United States Patent Application Publication US 2006/0134663 A1 - sequence listing, part 46

SEQ ID NO: 93051 - DNA, 797 bp, Homo Sapiens
  misc_feature (88)..(347): n is a, c, g, or t
catactctccatgtctgctgcatttgaggatgctccttttttatctggaactcctgctattccaaccatatttgcatgagggagcacnnnnnnnnnnnnnnnnnnnnnnnnnnnnnnnnnnnnnnnnnnnnnnnnnnnnnnnnnnnnnnnnnnnnnnnnnnnnnnnnnnnnnnnnnnnnnnnnnnnnnnnnnnnnnnnnnnnnnnnnnnnnnnnnnnnnnnnnnnnnnnnnnnnnnnnnnnnnnnnnnnnnnnnnnnnnnnnnnnnnnnnnnnnnnnnnnnnnnnnnnnnnnnnnnnnnnnnnnnnnnnnnnnnnnnnnnnnnnnnnnnnnnnnnnnnnnnnnnnnnaggcctgcggtaatcactgcctggtgaccacttatgttcactcaagaaggagtctctccacatatccaccacagctgggattgtgctgggtcatatctgaagctagcacacatctaagtctcatccaaggcccacacctggtaagaaaaatccacatcgtgacacggaagagatggaggaagaagagaaaacaaaagaaaatgtattaataagataatgttgtaaatgctgttgcaactgcaagctgcattacgtggccctcatattttcttccactgacaaaaaaagtatgtataacatactatgaatctggaaatatatggaaatatcaacttggttgcaggctgaagtccatgccctttgccattcacatcctcttccatggaatgaggactcatcagataaaatattgttttaaataaatggaccttgtgaaattgcacatgaaaa

SEQ ID NO: 93052 - DNA, 444 bp, Homo Sapiens
gccacggaagccacatcagacgtgctcaaccccaacaatgtccctgccaccccagtggcatggccgtctcaagaaggacagaatcccagcctctcttccatcagaaaattgattagagatggcagcattgacctagtgattaacctccccaacaaaaacactaaatttgtccatgataattatgtgattcggaggacagctgttgatagtggaatccctctcctcactaattttcaggtgaccaaactttttgctgaagctgtgcagaaatctcgcaaggtggactccaagagtcttttccactacaggcagtacagtgctggaaaagcagcatagagatgcagacaccccagccccattattaaatcaacctgagccacatgttatctaaaggaactgattcacaactttctcagagatgaatattgataactaaacttcaaa

SEQ ID NO: 93053 - DNA, 441 bp, Homo Sapiens
  misc_feature (46)..(131): n is a, c, g, or t
cctgaaaggccgtctaacgcctttcctcttggaaaagtcgcaggannnnnnnnnnnnnnnnnnnnnnnnnnnnnnnnnnnnnnnnnnnnnnnnnnnnnnnnnnnnnnnnnnnnnnnnnnnnnnnnnnnnnngaatctctgtcatggtggcatgagccaccatgcctggcccagatcctgaattctagcaggacagctcatgcccaccagtctgaagacaccaaaaggagaactgactcaatgcaagaatgcaatttctttagttccatgacgtcacccttcattcttcaaccaatcagtgatccttataccttggcccactaaccatccaaaccccttaaaatccctagatcctaaactccttgaggaggtggatttgaggtttcctccagtctccttgtttggctgccttgtgattaaacctctttctctgctgcaaaaa

SEQ ID NO: 93054 - DNA, 1050 bp, Homo Sapiens
  misc_feature (77)..(111): n is a, c, g, or t
tgactcactatagggcgctagctcgttctcagccgaacgacgagcgcagcgaagtagttgagcgaggaagcggccgnnnnnnnnnnnnnnnnnnnnnnnnnnnnnnnnnnncagtcgacggtaccggacatatgcccgggaattcggccattacggccgggggctcacctcggcgtgcccatcgtcaccgattccacgctgcgtcgccggagcaagccggagcggaaggaacgcatcagcgagcagacctaccagctctcacggtggactccgattatcaaggacatcatggaggacactattgaggacaaacttgacaccaaacactacccttatatctctacccgttcctctgcctccttcagcaccaccgccgtcagcgcccgctatgggcactggcataagaacaaggccccaggcgagtaccgcagtggcccccgcctcatcattttcatccttgggggtgtgagcctgaatgagatgcgctgcgcctacgaggtgacccaggccaacggaaagtgggaggtgctgataggatccacacacatcctcaccccacagaaactgctggacacactgaagaaactgaataaaacagatgaagaaataagcagttaaaaaaataagtcgcccctccaaaacacgcccccatcccacagcgctccgcagcttcccaccaccgcccgcctcagttcctttgcgtctgttgcctccccagccctgcacgccctggctggcactgttgccgctgcattctcgtgttcagtgatgccctcttcttgtttgaaacaaaagaaaataatgcattgtgtttttttaaaaagaatatcttataactgtatcctaaaaagaaaagctcatgtggcaatggggcacagcagggacaaattccgggactgttaaggatgaatggacgcccttctccccggttattttaaaatttgtggacctttgtaaattaacccctggggggaagtgcaactttggcttggggtatggaaacggtaaaaaaatttgggggggtttttaaaaaccttggtttgggggttg

SEQ ID NO: 93055 - DNA, 325 bp, Homo Sapiens
actgagactacgggagacagcaggcagacacacaggaggttggacgtcgagaggacacatcagtgcaagaacacatgggtggctgccacttctctccctttcctgagagggaaaaactctcgacgctgagaggaatccaccaacaggcaccagcactctggcaggccaccgaccaatggattgacatagagtttggctggggcagccagaggagagcctgggccgctgaataacctgacttcaggggaaaactattctcccttttggctcccccatctgctgagagctacttccactcaataaaaccttgcactcattctccaag

SEQ ID NO: 93056 - DNA, 686 bp, Homo Sapiens
gtaagggaggaggtggtagtaaagaaacctttagactgaaaaatgtaaagatacaatatgaaaggagaaaaaaaacaacaaaagaacccaccatggaagtttcaacccaccaccaccacatggtgccaaaaacttcaaaatggaacatttcttatattggcacatatttttgtgagaacaaacatatggttgtgagcatattcttaccttcattgtgatctgcatatttcctctctgcaggaaaatttaaatgcactgttgacatcgttttatagtcacataagaagaaagcaggcaaagaaatgttatgttatgattggacttattcatgagataccacagtctctaatatatgaagtttttcatatttacactactggtgaatctctagttgtatacctgcctctgtggtctcattgttggtccctaggatagcttataaataaaaacagatgatactgtctactggccagaacaagctcacaactcactttctactccattctcaagtgactatgtagagaaagatggatggttgaggtcaggatttggagttctctggctaactgcatattaactttgttatcatcgccaatattatcacctgacagagaaacagacttgatggattcgggcctttagccctgacttcatcacaaataaacagtgtcatcttggatgctaaa

SEQ ID NO: 93057 - DNA, 424 bp, Homo Sapiens
  misc_feature (278)..(292): n is a, c, g, or t
ggaactggaacactgaaggtcagaaaaccacagcctttggccaagggcgaaggggattccagaaagaaaagaatcagaaaagaaagacccaaattctgtctactcacatctttggctaaccactgagtcacacatgtacggaacaaatttcaaagcagttcaacaaaacacaaaatatttgaactgagaccagagcttccacttaagaaacagagtttgcagttctagtctaaccaagataattacctgtcaaatatcaacaattgaaaactttctcnnnnnnnnnnnnnnntcaactctagaaagtattcaaataaaccaataaatagcatgaaaagaatatcagagggacaaaaacagaaaggacaaattaaaaaggaataatacaatggtagacgcaaagttaaaagcaataattgcatta

SEQ ID NO: 93058 - DNA, 346 bp, Homo Sapiens
ccttgaagaatcagatttctaaaaatttctataggatggtatatacttttaccttcataatgtaattaacaagttatttgtgttcatgaatcaggtgaagaaaattgagattttgtttctaatgagctctaataataatataagaacacttgaccataatttgactatagtaaaattttttaacattttccgaagtcatgtagacaaattttctgagtatttctaatgagtttgcaggaaggaaataaagttagtagagtgagtctactattatcattaaattaaacttagatactttctaacacactcagttatttttccttctaataaataagtaaaatgtcaa

SEQ ID NO: 93059 - DNA, 1031 bp, Homo Sapiens
  misc_feature (839)..(839): n is a, c, g, or t
gggccggcggtgacaacggcaacatggccctgaacggagctgaagtcgacgacttctcctgggagcccccgactgaggcggagacgaaggtgctgcaggcgcgacgggagcggcaagatcgcatctcccggctcatgggcgactatctgctgcgcggttaccgcatgctgggcgagacgtgtgcggactgcgggacgatcctcctccaagacaaacagcggaaaatctactgcgtggcttgtcaggaactcgactcagacgtggataaagataatcccgctctgaatgcccaggctgccctctcccaagctcgggagcaccagctggcctcagcctcagagctccccctgggctctcgacctgcgccccagcccccagtacctcgtccggagcactgtgagggagctgcagcaggactcaaggcagcccaggggccacctgctcctgctgtgcctccaaatacagatgtcatggcctgcacacagacagccctcttgcagaagctgacctgggcctctgctgaactgggctctagcacctccctggagactagcatccagctgtgtggccttatccgcgcatgtgcggaggccctgcgcagcctgcagcagctacagcactaagagaagcccctgagaaaaaccctctagaaaaacagctgttcctctgtgtggtttgtttttttcctgggttcaagtgtgcatgccagccccagctccactcaccttttttccagcttttggcctcttcacctctccactctgctctccttgacgccctgagatgagttgagcttgtttcttctcagttttcccagtcaggatgaggggagtaagtanaaggactatgtggatgccccctttttcataagaaaggaagccataggcctttttccaaaggtaagcagcccagaagggggtggaaacccctaagcccttggtcctcgtgggcaggcaccttctgtgaggccctcttttccggcccattcttgggggggtccatttctcccccacccctggggaagatgggaa

SEQ ID NO: 93060 - DNA, 432 bp, Homo Sapiens
aatcacatctctacacatcagactctttccagtccattttgccccatccacaaaatgaaaatgccactttatttactaaatctaaaaattctgttgggaggcaaaggagagttgaagaatttgcaatgaatttaacctgccaggagagggagtttaacaccaagcttccagaaacaggctgcgtggtagctacaacgtccagaaacccaggtttcaacgcggccctgcttcaagacccaaaggaaattcagcaccaggcgggtgaagtgacttacctgtgcacagctgcactcgcagacttcggagcccccacctaattctaaaatgctgtatgtccatgaacttaataacagaaggtcaggggagagacgttctgagagcaacggaaatctatcttaagataaagatgtttctgaggctgatttttcaaaa

SEQ ID NO: 93061 - DNA, 529 bp, Homo Sapiens
  misc_feature (204)..(215): n is a, c, g, or t
gtaaatccaaaggaaacaagggagacaaaaagacagtagaagaaacagaaacttctgacacctacagctacatcaaacattaagcacagcccaactcctggccagattaacataaaacctcatactaatggtctctttggattagttcctattacttgatagatcatgtccagttttcaacaaaagaaattataacgtatgctnnnnnnnnnnnngacacacattctgaagaggcaaaacaagcatgagaaccaaattcaggttttggaattatcagatatggaatttaaaataaccacgattaatatactaagtaggctatgaataaaagtagataacatgcaagaccagatggctaatctaaacagagagaaactctaagaaagaatcaaaaggagttgctagaaatcaaaaacactgtaacaaatgaagaatgcctttgataggctcatcagtaagttggaaacagccaaggaaggaatcagtaaggttgaagacatggcaataaaaacttcccatgctgaaatac

SEQ ID NO: 93062 - DNA, 553 bp, Homo Sapiens
ggcccctggcagggcctggcggggtgcaggggaatctttggaggctgctctcttctcaccccgccaaaggacaccctttcaactctgcctggctgtaaccaggatctctttccacaactagttttaccatgtctacttcagcctcattaaggagttaacactgaccagttgcttcctagaagcaagttttatggcaaagcatcccaaggtgggtcaccgaatttcaagctggcattagagaatcacagggctggtgcacggagagctggctctccagcaaggacgtctggcctggccgggaatgattcattgagcaaaaggacatgccagagaaaatgaggaggatgttccaacccaggagtgagccgacgggtatgcagaggctggagctgtctcctgcacatgggatcatgtccctgtgttccagctctacatggggtgcccaccagctcccccacagggcccttatcacaaacatcacaagcctatttcacaagctcttttctccttgaaatgttgagatcaatatatctccactgttatttaaaaaaaa

SEQ ID NO: 93063 - DNA, 677 bp, Homo Sapiens
ttaaccagatctatattcatcggtcttcatccaagttaaatgtagagtttttaaacatcaatctttaaaccaattgctgctacttatataattgccaaaaagtgaaataatgtgtagttcatgtaaataatacattatatttctattttattatgaagaaggtgaatagccatatttgtaaaatgacaatcatgtgtgttaacccagtgctttccattcgtgaaaacacatttgctttttgtgatatgcacaatgtagataagtgttctgtctgactttcttttttgatatagaagtataaagaattgtggtttatatatttaaaagtgtcaagctgagtattaaaatgtatgcatgttgtctaagaaattgaatactttgaatgtgtttcacagtttgaaataagctatttgatgtaatacttcttgtgtgtatgcacatgaacttagattttacatgaagtattttttcagtattatatgtaccctctgaaatacatagggatatgcgtattataccaaaatgttgctgaaaaatgggcacttaaagctttcagaatatgtcagtgctgatgtagcatgcttgttgcaattgccttttttctgtataaatgtctttaatgcaatatactggaaagcttttctattttaataaaaataatttttatatgaaaaaaa

SEQ ID NO: 93064 - DNA, 396 bp, Homo Sapiens
aaataagacatacaaatgaaatgggcttagaaattacataaaggctggaatttaacaaaatctatttatgataaccaattgagcaattccataaaaacacaaaaagttaatcagttaactctcatgttaagattcatattgccaatattggcattatcctaaaagtgaaatatgttggtatcacttcataaaagaacaccaagatcctcttttgccattcacaaccctacgcctatggaacaagagtccaaggactacaggccagaggtagaaacacaaatgtttaatgaaagcatgaaattatttgtgatgtcagagacaaaatttcaaagttagaaggacctctggggaatgactagtctgatccctttgctaacaactgagaacacaaaggag

SEQ ID NO: 93065 - DNA, 372 bp, Homo Sapiens
  misc_feature (73)..(139): n is a, c, g, or t
ttagccaggcacagtggtgtgcacctgtagtaccagctacttaggagtcagaggtgggcggattgcttgagcnnnnnnnnnnnnnnnnnnnnnnnnnnnnnnnnnnnnnnnnnnnnnnnnnnnnnnnnnnnnnnnnnnnactctgtctcaaaaaataaaaatcaaaatcaagtattcatcttaaatcacttcaaggcaaattcctcagaaaacatctgtggaaatagcaacataatcgtttttggcatttgtacacttcatttgagttctgaatatcctgggtagcttcactaacactattaaagaagttacattcttttaaatgtaatgtgttatacattaattgttagaataaaaaaattggaataaaaa

SEQ ID NO: 93066 - DNA, 778 bp, Homo Sapiens
cgcttctagtaggccaaactcccaggtgagccccgcaagaaacgcggtccggagagggtctggccccactgctggggcaagggctctaggcgcccggaccccacgcccgcagcctgcggagaacgtgccgacaaggacctgtagggccccactccccctcctccctccctcggcgcagcccggcccaggggtctgtcctcccaggcccaggaaaggaggaaacccacttccgccgcgtccatgatctcccgcggcttctcctgactcttgcggctggcgctggcgctgggcatcgggacacggaactgggcagtggacaccaccctccctcgcaggcttccaaagtaatttgaaggccttccctgacttaaagtggatgctgctttggaaagcactggaaaaatggatcctgtctttcttagccaaggactggtctcttttctccaatgtgtccctaacagagtggtgaggctggctcttcccaccagtacaggaagatcattccttaaaagaaatcaccatatggcttataagtgttctttcctgtatgaagcccaagctgtccacttggagagacatctggccagccccccgttgttccagccatccccagttcaggcatcagaaatgtggtgaagaagccatcctagatgcccagccccagctaccatctgatgcaaccacactgctcaccccgagcaagaactgcctgcaggagcctagtattatcctctctcacagaaccatggcagggaataataaattgttgtttgaagcc

SEQ ID NO: 93067 - DNA, 1117 bp, Homo Sapiens
  misc_feature (89)..(123): n is a, c, g, or t
aaagaattttggtattatactatagggcgctagctcgcctgcagacgaacgaacgagcgcagcgaagtagtgagcgaggaagcggccgnnnnnnnnnnnnnnnnnnnnnnnnnnnnnnnnnnncagtcgacggtaccggacatatgcccgggaattcggccattacggccggggtctcgcgatctttctggagccgcacctccacgcggagtccgagcgcgtgtgctgagaccccagggtcgggagggcggagactgggagggagggagaagcccctttggcctgccttacggaagcctgcgagggagggtggtgtccactgcccagttccgtgtcccgatgcccagcgccagcgccagccgcaagagtcaggagaagccgcgggagatcatggacgcggcggaagattatgctaaagagagatatggaatatcttcaatgatacaatcacaagaaaaaccagatcgagttttggttcgggttagagacttgacaatacaaaaagctgatgaagttgtttgggtacgtgcaagagttcatacaagcagagctaaagggaaacagtgcttcttagtcctacgtcagcagcagtttaatgtccaggctcttgtggcggtgggagaccatgcaagcaagcagatggttaaatttgctgccaacatcaacaaagagagcattgtggatgtagaaggtgttgtgagaaaagtgaatcagaaaattggaagctgtacacagcaagacgttgagttacatgttcagaagatttatgtgatcagtttggctgaaccccgtctgcccctgcagctggatgatgctgttcggcctgaggcagaaggagaagaggaaggaagagctactgttaaccaggataccagattagacaacagagtcattgatcttaggacatcaactagtcaggcagtcttccgtctccagtctggcatctgccatctcttccgagaaactttaattaaccaaagtttttgtgggaaatccaaacctccctaaaattatttcccctgcccgtggaaggagggagccaaggttttttactggggccatatttttaaaaataatgccataccttggcctccagtcccacccagcttaaataaat

SEQ ID NO: 93068 - DNA, 367 bp, Homo Sapiens
acagaatagtacagagaacaacatagaacctctaggtactcaccacctaaatcccaaacacagtatttttccacacttctttattttctgaaatacacaaggctgttcaccctggcctggggagggttgtggagcctgtgttgttggagcaaaggttgttaactattctgagtgttatctcttttttctatctatcacatatacattgaaacgcttccatccttttcctcaagccaatgcccccactctccgaggagactctgctctgagttcggtgtgtggagttgggtgacgtttggaaagacagcatgctacacataatgtaaatgtaactacttatgtttccagaaataaacttcagtatttt

SEQ ID NO: 93069 - DNA, 498 bp, Homo Sapiens
atatatatgtatatgttgatcagatgtaaatgtggaatgtaaatggagatcttttccttctcactgatcccatcaataccatttgaaacatacttataagcagtggtggtagatagtattaaggaaaaaatatctgtgtctgatttaaatcctcaggtggcagcttaaacgagctgcctcgtgtgtgtacacatagatatgtgtttgtatgtgtgtgagtttcagcagagatagagaacatcaggtgagcagccttgatttataattctggctatacatcctactgtacctctgtcaagggggtaatgagagaaaagatggaatcagtaacctaaagtttaggaataatcacatgttgcatgggctcctgcctgagtgtagagatggaatagtctgtacgtgtatgtgtgatcggtgacacccaggtttgctcaatgtcattttggctgctttgaacatcagaatcccttttaaaataaatgtttgcttattatgaaa

SEQ ID NO: 93070 - DNA, 449 bp, Homo Sapiens
ctactgagttatgaggagctgacacagtacacatgaataaccatagagaagatctgtcaatccctgggaaagacgttagaacccgaagaactgaacttaattctcaagaacagctcctttcagagcatgaaagaaaacaagatgtccaattatcccctcctgagtgttgattatgtagtggacaaagcacaacttctgagaaaaggtgtatctggggactggaaaaatcactccacagtggcccaagctgaagactttgataaattgtcccaagagaagatggcagatcttcctcgagagctgtccccatgggaataacgtccaaaacactctggttcttatatggagaatgacattgattctcctgtccttgtacatgtacctgactggggtcattgtgtaagacttattattttatcctgaaaccttaaatatcaaacctctgcaaa

SEQ ID NO: 93071 - DNA, 440 bp, Homo Sapiens
aagagtacagtatggaaagggggggaaaataataataactttatcatggagaaagctgacaaacacaccctcagccagggggccaaggttgacatgatgtgatgaggacagtgcttaactctgtggtctccctcccgcaaacccacaaccccagtcgaaccgtgagagacacccaaccagtcctctgcaaaactgtcaaggtcgtcaagaaccaagaaagcctaagaaactcacaaccaagaggagtccaaggcaacaggatggctaagtgaaacgcggcaccctggatgggatcctgggacagaaacaggacgcgagggaaatactggggacatctgaatgaaacatgggctctaataataatctatgacaacatgggcccattaattgtggcaaacgtatcatacgaatgtgaaatattaataacgggaaactggaaa

SEQ ID NO: 93072 - DNA, 1082 bp, Homo Sapiens
  misc_feature (32)..(32): n is a, c, g, or t
  misc_feature (66)..(66): n is a, c, g, or t
  misc_feature (180)..(180): n is a, c, g, or t
ggcacgagggcagccagtgatgtttctgtagnatctacagcagaggccccagtctgcacggtgacnctgagaaagatgtcggcagggctgggctcagccctggaggagggaaagggctccctacacggagacaagcctctcaccattaacaggattttcaaaggagcagcctcagaacanagtgagacagtccagcctggagatgaaatcttgcagctgggtggcactgccatgcagggcctcacacggtttgaagcctggaacatcatcaaggcactgcctgatggacctgtcacgattgtcatcaggagaaaaagcctccagtccaaggaaaccacagctgctggagactcctaggcaggacatgctgaagccaaagccaataacacacagctaacacacagctcccataaccgctgattctcagggtctctgctgccgccccacccagatgggggaaagcacaggtgggcttcccagtggctgctgcccaggcccagaccttctaggacgccacccagcaaaaggttgttcctaaaataagggcagagtcacacgggggcagctgatacaaattgcagactgtgtaaaaagagagcttaatgataatattgtggtgccacaaataaaatggatttattagaatttcatatgacattcatgcctggcttcgcaaaatgtttcaagtactgtaactgtgtcatgattcacccccaaacagtgacatctatctctgctcatgaatctgcaatgtgggcagagattggaatgggcagctcatctctgtcccacttggcatcagctggcgtcatgcaaagtcatgcaaaggctgggaccacgtgagatcattcatcatacatctggccgttgatgtcggctgggaactcacctggggctgctggcctgaatgcttatcaggtggcctctccttgtggcctgggcctcctcacaacatggtgtctggcattcacaggatgaggcatcccaggatcgcaagagccatgtagaacgctgcatctagatacatacctatgcccatggaagtcgcatggcatcacctacacactctccatgacgtacac

SEQ ID NO: 93073 - DNA, 526 bp, Homo Sapiens
gcataaaatactactttgcaatgtcatgagaacaccattagatctgaaatgtggaaatggtttctcacaatttaaaggaaaaacccactttgcacccatgatcccatcattttggttgagattttagaataaaaaatatagtgttgagatccgtacttttgtaatcagaccaccaagcatgcctgtggcaaggcagagaggaaaggtctggagccagtgtattgcagtttcatgctacctttacctgctaatcataaaaattatgttttcaaaagtagatgatactagccttacacccaaaaacatgttctgaattagatgccccctcacccaatttttattaagctttctaaattccagccacattgctgtacatcaacattggtttcattcaacagacatttttttggcctgaagatacaaggttcagaaagaggccatccctgccctcaaataactttcatactggtgtatgatgaactgaccattaatagtttaagtgcttacaagctatgtttctgttcaa

SEQ ID NO: 93074 - DNA, 391 bp, Homo Sapiens
tgatcctgaccgtcctcagttttgtgaagcaacagcctctgtgcctctttctctgcatgctctgttgacggtctagtcttgagagagaacctgctgctgtcccgtctgtcatagccttcctagcaactcttaggcctgcgtgctgtgttttcatgatctcccccaaagcggcactttgatgttttttcagagtcaaagtatcactgtggatatttatcccaaacaaaattgcaaactgatcaaatgttatgtcttttgataccaaatcaaaaacgattcttggtggctgatcaggttgtctcctaaaaatttgccttttgaacctatactgcctttatgagatgattatgaaagtagaaaatagcctgtgaaaaatggtacctctgctaaa

SEQ ID NO: 93075 - DNA, 570 bp, Homo Sapiens
tttctgcacacgcaaattaactctgtagcagtaaaaggaaattacttacttgctaccggaattgtctgaaagtgatacaatcatcttttgtagagtcacattaaccaaattaaaagcccttgggaaaaatttggcaccctgttccttcccattcacatcttcctcaagacctctcatttagaaagtgatgatcattatcaggacttttaatttggaaagattggctgctcaccagtgagcctttctagatacccagtggttgggtagagtggctgtactgtgtttcagccttggaggccttgactttactatcctcctgcttgcttgaatgtatgatttctagcctgggacacacaaccacagtcctgctactctacattgttaccaagatggcgccatcattttattctctcattgaatacaaatattaatccttcattgagaggaggtggattgattcttccaactcttggaacctaagctggcctgtgactgctttgatgagtggaatgtggtgggatttgctgtgcaagttctaggcttaccctttaagaggattgatggtttcta

SEQ ID NO: 93076 - DNA, 490 bp, Homo Sapiens
acttgagaaggccatttgtaaatctgttcttagcaacggtgatgccaaagtaatggatggctatgaaaatataatcgtgcatacttacagttgtgacacctggataacgtcagttattgaaaacaagtcagatgagaaagtgattattcacatcagcaatgagctaagtaaaaactgcataaacaacagaggactcaacatatttgcagtagaagtgggacccaaatctacaatggtttgtcaacatgtaatgcctttgaatgaacgacaagaatggatatattattgtatatattctcttatttcttaaataattatacttagaacttaccaaactaagaattatttcagatttagtctgttatttattaaacaactaaatgctacttaactgatgtacctaaataataatctattcaatttatatgcattttcattttatgtccatggtatgtactttattattaaaatataaataatgcttaaaaaa

SEQ ID NO: 93077 - DNA, 423 bp, Homo Sapiens
agcatgatgagctttgaaaatgtgaaagaaaagagcagagaaggagggccccatgcacacacacccgaagaagaattgtgtttcgtggtaacacactaccctcaggttcagaccacactcaacctgtttttccatatattcaaggttcttactcaaccactttcccttctgtggggttgtgatcagaagcctcgtactgttcctacccttggaaacggcgcatgggatacccgccaacaacacatacgcacttcatcatggacagcaaacacactcgtcattcaaaaccagcattcacgggaaagcactgtttctgtttgcctttttatgttaatccgcatgcaacatattttgaaaacagatacacttcaacagttcagaatatgctagtactaataaaaccaacatgttacatgctgaaaa

SEQ ID NO: 93078 - DNA, 408 bp, Homo Sapiens
cagatctagaaatgtgctgcttagaatttttcaaaagactcactacaggaagcccagttgactggcagtcctagatgcccccctctggattcccactacattagctgcaaggccccagggctgctccctgccttggacagcacagtgatgatatgagtgcaagcacaacacaaactcctctggctggcaactttggcctaaggactccccatcagcctggcccaaccttctgtaggactgcaccaacagtctgagattcctcttacccaatcctccttccttccatctcttaccacaggtgttaggtttatggaagtctgaaggctcttcctgcctactcctactccctccgctttgtcctacacaagtgagttcctccaataaatttcttgcatgtctaataccaaa

SEQ ID NO: 93079 - DNA, 898 bp, Homo Sapiens
ggaccacgcctcccggaataaaatcctgaggcgctttctgtggctccccaagcctaaaactgtggcccagctggccggttgtgaggaacctaaaattggcgaggaaactgatgagcagttttgcacgcccaacaacatcgacatctggatgggcggcgtgtccgagcctctgaagcgcaaaggccgcgtgggcccactcctcgcctgcatcatcgtacccagttcaggaagctccgggatggtgatcggttttgtgggagaacgagggtgtgttcagcatgcagcagcgacaggccctggcccagatctcattgccccggatcatctgcgacaacacaggcatcaccaccgtgtctaagaacaacatcttcatgtccaactcatatccccgggactttgtcaactgcagtacacttcctgcattgaacctggcttcctggagggaagcctcctagaggccaggtaagggggtgcagcagtgaggggtatatctgggctggccagttggaaccacggagatctccttgccctagatgagcccagccctgttctgggtgcagctgagaaaatgagtgactagacgttcatttgtgtgctcatgtatgtgcgaagtatataaattggcttttcatgcgtgtgtgttgtctgaacatggggagtgtttcatgggttatgtgtatgtgccatttatgtgagtgtgtgtttgtgctgatgagaatactgagtatgtggaaggcaaccgctcagcgcgcatcccctgcttcctggcaggggacacccgttccaatcctggctctgtggcttgctagctatgtgaccttgagcaaattaccctccttaaacaagagttttcttccttgtaaattacatctgtcatggtttcttggagggcccaaaa

SEQ ID NO: 93080 - DNA, 233 bp, Homo Sapiens
  misc_feature (74)..(90): n is a, c, g, or t
gtcagcgccaaaacgccaggacttcagtgggaaaatgttcaaagttgtttgttcctccagagtttttctcgggnnnnnnnnnnnnnnnnnctcttgagtgcttgagtgaggatctggcttagctctttgacctgtaagatgctttgaacatctcaatttttatttctaatgaagggaggtgtttgtagaggtaattgcctgcaaattaaaatgtcaccaattttagtcacaaa

SEQ ID NO: 93081 - DNA, 548 bp, Homo Sapiens
gaaggtactgtatctaaagataagggcataagtgatcatttaattctcagccacttcactgatactacaaggtgttacacagtaattatagtggtttgatacagacatttgtttacaagaaactgaattggcattattaacttatttcacacaaaaaaagttagctttacccatgaactgtaattcagattgataaggtgacctacccatgaaaaagacacctgagacctgtttacttttttaaactatgaagtgaaatcctcagttcaataagtgtcccaaggagaatttcctctgttaaattttccctgttaacttagtataattggttttcttgaatagaagaataatgatttctgtaagatattttaatgtgaatatttttgctgtcttcatctttaaaaattaaatacagtactatatatagatattaaaattttaaagtgggactaggtgtttttatgtatacaattacagtttgtctcctctctttgcaaatttactggctattatcagaataaaggttggactcaatatgcttaaaaaaa

SEQ ID NO: 93082 - DNA, 392 bp, Homo Sapiens
ttgccttctaattcacgtgtctcatcatttcactgaagatgtatggaacgcttccccctttcaaagtgttaagtactttgctgtcagcatcaccatcacagcctgcgaactcgacactaaagagagagaagtggaaaaggcaaagtaagaacaaaagccagccacgtcacagggctcagaactcgtcctgacagctggcccctccctccccaggcctgacatgaaagggtcctttccaagctcgctggagactctctgacccccatttcttccggtcctgagccccagctattgtggtttccctgcggacacctcacatatcaccgacagcagaccagaatcccgagccttctgttcttcacatatttcccacaccttttttaccctaaaaa

SEQ ID NO: 93083 - DNA, 313 bp, Homo Sapiens
gtccgggaggtgaggggcgcctctgcccggccgcccctactgggaggggacatttggacacagacacagacatgctcagagggaagactgcatgaagagactaggaaaatgccatttggaggtagaggattgagtgatacatctacaagccaagtgttgccaagattgccagcaaaccaccagaagccaggcaaggggcatggaacagatatcctccttcacagccctcacaaagaaccaaccccgctgacacctggattttggacatctagcctcccaaactgtgagacaataaatgtctgctattttaaaa

SEQ ID NO: 93084 - DNA, 462 bp, Homo Sapiens
  misc_feature (281)..(339): n is a, c, g, or t
ctgtaggaaaccactctccttagattctggtttatccttcctgtccttatcctgtccttttgcacaaatgagcagatacatgtatacattttcaaaatacccttcttacctatatgtagggtagcatactgtagatagtctttggcactttactgtatttcacttaacaaaatgtcttgggaaaatctctcctggacattggtctaggcaaagaattcgtgactaagacctcaaaagcacaagcaagaaaaacaaaaatattctgaatcaaggaccagagnnnnnnnnnnnnnnnnnnnnnnnnnnnnnnnnnnnnnnnnnnnnnnnnnnnnnnnnnnnttctacacagcaaaagaaataatcaacaaagtaaacagacaccctgcagaatgggagaaaatatttgcaaactatgcatccacaggggactgatatccaaatttacaaggactcaaacaactc

SEQ ID NO: 93085 - DNA, 647 bp, Homo Sapiens
ctctcagactggaagacctttctgaagtcagttccagacatccctggaaggctggataatttgggaaaaggctgactcaatgtaaggactctgcctgagaaattttatacattcctccaaagaaaaaaaatacagaaaagctgtttcaaaaccaaaatctccttattttcccagaatagaatgagaggaagaaactaaaatcgagagaggttaataattgtgcccgaggctacacagctactaagcaaaccagatctatgctcaaagcccatgcaggactgtaaccacggtgcaagatcaatcctcctgcttggagaactgatccaactccacacctgtatcttcaggttggactcgcttcttcaacccatgtacatgtccagtattccttcatcattgacaaataccttcctttgactttactgattctctgactaccaccttttcaatgaaggtattttttcagtcaaccattttaacaaattcatctttgcttggtctccaattcctctccttgaagttgctcttcacatcactataaaccagcttttgatctcattgcttcttagagagctagtaaaaaaaatggatagaataatagttgcagctgttgtatatggcggtaaacaataaaaactaccatcaaa

SEQ ID NO: 93086 - DNA, 1128 bp, Homo Sapiens
gctggaccggtccggaattcccgggatccgaggggttccttggagaaggtggtgcgtcctggggcggcagctgaggaagaaagacgcagtgccccgaagcccctgagctgaaaagggccagaaagggggcggcatggcatggcccaaactgcccgcaccttggctgctgctctgcacctggctcccagcagggtgcctgtccttgcttgtgacggtccagcacacagaacgctatgtcaccctgtttgcctctatcatcctcaaatgtgactacaccacctctgcccagctccaggacgtggtggtgacatggcgcttcaagtccttctgcaagaaccctatctttgactactactcagcgtcataccaggcagctttatccctgggccaggacccatccaatgactgcaacgacaaccagcgggaagttcgcatagtggcccagcggcgggggcagaatgagcccgtgctgggggtagattaccggcagcgcaagatcaccatccagaaccgagcagatctcgtgataaatgaagtgatgtggtgggaccatggagtgtattactgcaccattgaggctccaggggacacatcaggagaccccgataaggaagtaaagctcatcgtcctacactggctgacagtgatcttcatcatcctgggagccctcctcctcctgctgctgattggagtgtgctggtgccagtgctgtcctcagtattgctgctgctatatccgctgtccctgctgtcctgcccactgctgctgtcctgaggaagattgtccctgccgtccagcctcccgcagatgccaatgacccagaccaccaatcagcctcccatcgccaatggtgtccctggaagtattgggagaaagaactgcgggaccctcaacctggcccagcctctggcccctgacctcaaaggcagatttggcccatccctgcagcatgctggcctccctggggctctgaagggcggggaacgccaaaatcatccaccctgcccccactgatcagagacctggccatcctcaagggaggaacagtggacttccctggcaccagcaattgggctcaccccaatttcttccagggccccggggggaatcgggagggaaggggggaaa

SEQ ID NO: 93087 - DNA, 352 bp, Homo Sapiens
caaaacaacccagggcaagggcctacccagcccccagggatctaaaaaataaaagctatgccttgtaaaaacttacttgtaaacttcacaaaactgtcccatgtcaggtgctattgttttatactagcacttatttacaccttttcaacataggttaaggttttccaatgaggactgaaaaggcaaaaaagtagttaaatactgtttaaaaacattatccccaggtttaaactgcctctaactttgaagtcaaacaagagtttagcaattatagttgaaataatttaaaatctagcaaagttgcataaaataaaatgaaagttacacacagcctaccaacaacaaagttaaa

SEQ ID NO: 93088 - DNA, 397 bp, Homo Sapiens
aggtaagcaaaggactaagccatttgggtatctcagggaagtgagtttcaaaacagagcaaatatatcacttgaataagtgcttaaggattaattagttaattttgttgtaagtgtaaagacaataaaaagaccttgcagaaacgtttgtttttaacttattaccctattaacctaaagcaatacagaaaacttttcctaccaatgtttttctacatttattcatgtatgtgtgcacacataagttattgtgtgcctaaaattctttttttatacttaagcatttctccatgttgtttcatcataatttcataatagttttataataattttaacattatcaattattccattagggatttatgtaaataaacaaaaaataaaatgctatatgccta

SEQ ID NO: 93089 - DNA, 512 bp, Homo Sapiens
  misc_feature (29)..(29): n is a, c, g, or t
ctatagggaatttggccctcgaggccagnaattcggcacgaggcggcacgagggcaggctcggccgcctctttaggccacggagccgcgcagatccggttcccgggtgaccactctgtcgccattgggcgagaccgacctagtcctgacgacaacggacaaaggccttcaggggcctggaagggatatgatattgaagcacgtgacaagttggtgatttcagcagtggtttctcctgtctatagaaactcttcagcagatggcaattttccaccttcctgtataaaaccagaatcctctcacctggcagaaatctttctctccagatgctgcaaagccagcacagatcatcttctctgtgatccctcctggatgggcagaataaaagaagaggggctgaagcggatgctgcttgatatcatttacatgacctattttcaaaaataacaactggcattaatgtttatgcaacaaaaatatgcttacctgcactgatgcttccccatccggtca

SEQ ID NO: 93090 - DNA, 603 bp, Homo Sapiens
  misc_feature (298)..(306): n is a, c, g, or t
ggcatgctggaaacccaagtccaagcataccaacacgagcagcctactgtcagctcccctcggagaagagctgttcacagccagactggcacagttttctgagaaagactattcaaacagtctcaggaaatcaaatatgcaaagcactgacttctaagtaaaaccacagcagttgaaaagactccaaagaaatgtaagggaaactgccagcaacgcaggcccccaggtgccagttatggctataggtgctacaaaaacacagcaagggtgatgggaaagcattgtaaatgtgcttttnnnnnnnnntactgatgttcctagtgaaagaggcagcttgaaactgagatgtgaacacatcagcttgccctgttaaaagatgaaaatatttgtatcacaaatcttaacttgaaggagtccttgcatcaatttttcttatttcatttctttgagtgtcttaattaaaagaatattttaacttccttggactcattttaaaaaatggaacataaaatacaatgttatgtattattattcccattctacatactatggaatttctcccagtcatttaataaatgtgccttcattttttcagaaaaaaaa

SEQ ID NO: 93091 - DNA, 401 bp, Homo Sapiens
aaaattcagcaataaaaaatgcacagaaagcaccaagcacagaccccaacacacatgaagcctcagaaatacttgctccttttccctttcctccttcacctggtcaagttcacattcttcagtcccccgttttcttaaaactcaaatgagacccgattagacaataacaggaatggaaaagcctctcgtgaagatactctcatgaactgctctcaatttccccccttctgaggaatcttcaagccggctagccacatgtcagggcactgtgacacatcatttgagaatctctaatggagcaacgtccaggggaacatgggccaagcaatgactgcctggcaagtccttctcacgtggcagactagcgatcaataaatatctgttgatttggaaatatcaaa

SEQ ID NO: 93092 - DNA, 259 bp, Homo Sapiens
  misc_feature (56)..(64): n is a, c, g, or t
cctcaaactagatcctgttcagacacaaacaagttagtatgagtttgtttcagtgnnnnnnnnntttgaaattcatgcatagtttttcataatgtgaatttttcatgaacttttggaagacctttggaatacttttttaattgcagcactcttttgcaccataaaactaattggtggctttaccattaagaagttgagccaagcaaacaataatgaaaatgctttatgtggaataaaaatttacacttaaatgcctaaa

SEQ ID NO: 93093 - DNA, 499 bp, Homo Sapiens
catttatttccctagtagccagtcacctaaatttgagcaacatcgtttgtaaacaaaactggatgggaatgagccatctctcttatcccctcaatggactgagtgagtagccttagggttcccccattaagaaaagcattataattttggtcttaatactaacttcaacatgaatacttgcctatagcaccagggtaccaacaaattgaaattagataagaacttaaacatgaaaagcaggagaatcatcacaagttggtggattttgaaaaaagagaagattttttttcagagtcagttggattttaactcatctagtagttttaaagactgaatggatgaaagatgatagcttaaagaataaggtaacagtaatgactacctgaagagcacttgtgctcatcatcactaccttaaacttaagaagagatatttattgttaattgagaacctaactttacactaaggaagtttcattataataaagggtaataattga

SEQ ID NO: 93094 - DNA, 411 bp, Homo Sapiens
cctgtcgccaagttgcaggccacaagccaagctctggttaaggtgggtacctgcaggtcatgggcagacagcacccctaatgatgatcagagctcatgcggcaacttctaggccctcagtcacccctctgattcactaggccaactttcagccctctccctgcagtctgtgtccaccaggtgtctcctcaggctaggacggtggccctcctgaaaaaaacaggcttctttcacaacagcctcactcagttactatttgtgacgcactaagctgtgcacacagattaaagtccagaacagcacagagggaggaagacagctgtgctgcagcctacatggtcaggaggttccaggtacaagatgccaagctgtctgaaaacttagaaataaacatctttttgggtcctccaaa

SEQ ID NO: 93095 - DNA, 571 bp, Homo Sapiens
  misc_feature (73)..(73): n is a, c, g, or t
gtgctacagatcagcctccacaaaaccagccactccccaggctcaagctcaagctcagagggacacaagccanccaaggctacagttagagaccggtcctcagaggcctcgtgtagtgcgacgcccttgtgtggcagtaagaaaacgagggtcctggaaaggccccggacactgcttgtggacaccagtgcttctggcagacccacgcaggggccccgagaagggcgctgctccacgggactcaggtccacacggggagctcttgcctttctccggacccaagatctggcccgcaagcaaaaataccaaagaaaaacatgctagcacaaaaatattaaataacaactttgctaccttttaagtgcagtttcaccaaataccacctagagactctgctacttttcaaagacatccacaaatagcagcattagtcaaacattaggcaatcaattaggcaaatgcaatctagcaatatggccaaagacaacctaccaaaccaagcagggattaccccagaaacgcaaggctggttaaacacaaagacaaaaacatcaatctaataacaacaaca

SEQ ID NO: 93096 - DNA, 615 bp, Homo Sapiens
  misc_feature (322)..(336): n is a, c, g, or t
ctgaaaccatcaccataaagatccttccgaagtaaagaaatttggcattatggcctgattaaaatcccattaaatgtacacaggacaaggtctaattatttaaaaggaagccctcccttacctagttccctgtccacctctttatcctcatcattttccacattcttcagccacactgcagttactcaaaagcaccatagtatttcctttctggcttgcttactctactccttctgcctggggtaccattcccaatatgtggcttggtaaatttataagagaaacttttaaagatttaattcaaacatcattttgtttctgnnnnnnnnnnnnnnncctctggcttccaaaactggtcctctctggtagaactgatcactctagttatttggctatattaatcttccttcacaatgcttaaagattcttgggggcaggaaactgtcacacattcatctttgtcttctcagtagtgatgtgcgtaagtctgactttgacatatttgccccaaatctgctatgactttgatttctggcacaggaaaagctgactgccctttcaacattctttttgggaatccctgatttgtgctttattagtgctcctaatcataat

SEQ ID NO: 93097 - DNA, 852 bp, Homo Sapiens
tttcaggggaggggatagcatctttttgttgttgttatttatagtagagtattaaacattcctctgttggtcaatggaatctggaacccttcttaacaaacctctgtgagttatatttattttgcagaagctctcctaatgatcacattagcagcaagttggaaaagcccagtgagtccaatcagactgactgtacttttgcatgttatcagtacaatatgttgcttcaactgaaaggctaaattctctaactgcccccaaaattgatccagacagcagaaagggaggaaattcattctactttaacacagcaattggtccagacttcacgcaatatcatttcagtctagaattttcatcatcactgccaaaaacatcatacagaaacattacatgacttgcactcagtttcactctccaaaaaacagccatcttgttccaggcctaaggagaaaaaatgaaattaaagggagatgaggtggggaggaatcacatggagcatttttaactgtttctcactgcctggtttctcagtttcacaacaattattgacaaatcaatgaagttttgatattaagaacagccagaagttcctccatatgtcaaatgctccatttctcaaactaaaaccctctattcatagttgcatgagggtatcttgctcgcctttttgcttttacttatctgtcctatatcccagatcattcagggaactggaatgtttatgctaggtatcagaaaatatcccaatgatttacacaaattagagcgtgcatcagtttatggtaactctactataatgaacaagcccaaaaatatatactgtgtcaaacacaatatgctaaatagctt

SEQ ID NO: 93098 - DNA, 844 bp, Homo Sapiens
tttcaggaaaatgatttatttgatttgtgacatgtccataaagcttaaggttttatgattttaagagagatgctaaagatacatttggttgcttcctttaaaatttatcttcaagctccactcagtctgtggttggcctaatccatcctggtggcttcaaataatacctgttcatggatgactcgccccagatctcacctctgaactccaggcatctatatccagcatgaatcctttctcttctggaagtctccagttctggcctgcacggttgtaatggcctttgatggatcttcccgctcacatgcttgctacctccattctgttctctgtattgcagctaaagcagcttttcttgatgtacgccagtactttatcccttatcaggacatgccatttattctcagcatatgttgggagatgaaggatgcagagggctggttgtcaacccattgttctgaatctgtgagttggcatccctgtgtcaaccatccccagttcactaggatctgtcagggagatctgggttccagcttcacattctctaatttgcttttgaaaaatctgtctttccatttttctgtcagttccttgttaagaattgcatgtgaagaatggaattcagaagtaaagcatacattagtaaggggacattattctcatctgtttttcccaattcctgagccttttggtgggtggttttgcatagagatgtccagaagctgtcttgtcaagacctttatcaatccagtcttacaagactaggagggaaggagagaagttagatgtactttgagccatgatgactggttgtggaagcatcagaagggagtgatctgaaaag

SEQ ID NO: 93099 - DNA, 620 bp, Homo Sapiens
  misc_feature (397)..(512): n is a, c, g, or t
  misc_feature (521)..(535): n is a, c, g, or t
ctctcttccttatttctacattactacattcacatttctgctgtcaataagccctaatggagtgataaactttaagctagtagatactgcaccatgtcttgtggtggtgttttcttaatgaaatggaagctgtacttcctgtttgtttttaaatacttttgaaacagacagttcatgtaccccatcatttagagatgcagtttgaatttccatggaaaaaggtgccaattttggattgggaaaggagctgaagccccagtcaagactttgccatttggggtaatgcagcagattcctgtgtctgtatctttccagtgtgtgtgttaatccatagtgttctgagcaccagaagggtcatgtaaatctgaagttgttattaaaggtttttctatagtgnnnnnnnnnnnnnnnnnnnnnnnnnnnnnnnnnnnnnnnnnnnnnnnnnnnnnnnnnnnnnnnnnnnnnnnnnnnnnnnnnnnnnnnnnnnnnnnnnnnnnnnnnnnnnnnnnnnntttttgggnnnnnnnnnnnnnnnaaaaaattttttaaacaatcttttggggggcgggccccccaaggaaagaaaaaagggccaaatttttttccaaaaaaaccccggg

SEQ ID NO: 93100 - DNA, 998 bp, Homo Sapiens
  misc_feature (667)..(704): n is a, c, g, or t
atgcccggagcaagaaggcaaagcatcatgaagaggatattgggagctctgctggggctcttgagtgcccaggtttgctgtgtgagaggaatacaagtggagcagagtcctccagacctgattctccaggagggagccaattccacgctgcggtgcaatttttctgactctgtgaacaatttgcagtggtttcatcaaaacccttggggacagctcatcaacctgttttacattccctcagggacaaaacagaatggaagattaagcgccacgactgtcgctacggaacgctacagcttattgtacatttcctcttcccagaccacagactcaggcgtttatttctgtgctgtggagccacagtgctccccaggcacctgcggcctgtacacaaaccctcatccgggctcggttcctctaccagtaacaaccacatcacgaggccaccgcagcagcattttgcacagcttaatattccttttgtacataggtagagttttaaccgtagattctttttggctctacaggtttgagactttggtctttattttcccttttcaatacacacctcctcctaccctataaatatctaacttggaaggagtagagtagctgataagaggacagaatcaaaataaatatttaagtgacagtatgcaggactccnnnnnnnnnnnnnnnnnnnnnnnnnnnnnnnnnnnnnncaccattccaataagcatgttgttagacattagttagacagtgatccagcttagttgtgtgtctcaagcacattcaggtctacctcaccacattatgtaccaacagacaagggcaaatatttgcatactatcccactagtgcagcaaagtaaaatttctttaaatattcacatattgataaatagctgtggagaaaaaactttaaaatgttatgttcccatatgtgtttttcaggcttgttgtataacctagaatatgatctatcctggaaaatataacaatgcatgattgaga

SEQ ID NO: 93101 - DNA, 301 bp, Homo Sapiens
  misc_feature (147)..(155): n is a, c, g, or t
gaaaatcattggaaactgttgaattagatgtcctagctctaaaaagttctattaattattaattatacctctacactgagtaatttatagtaatagcttgaatgaccacattcagataatcctgggctatttaaggtcatgttgccnnnnnnnnncttaataggaataattattaaagatgtaattatttgcatttcagttcctgactagctcttacaatttggacatgtgtaaatttcagcttttaaattttggtttgtgtttgaaaaataaaagcatttctcagctgaactattaaaaa

SEQ ID NO: 93102 - DNA, 441 bp, Homo Sapiens
cctctttcttcttgcctccaagcagctgatcaacagaaggttcggaatgaagaacagtaacacgtaacagttccaagtgttcctttgtgctaaaatttaccaaagcttctgtggattgaggcagttaatggggggaaattctatcaacctaggagtagtttaatagatattagcttggaattaaaagttcaaggtaaattgtctttcctttatctactcacttttctttctgcctgtgtgattctatttccattaatagagtaactaccagccatgagccttctgtttgctttggcccctcctatctttccttattttctccatcaggttctctcccttggccacttctgcttcctcttctcttccatatttctcctgttcacactcttcctttttaaaatgccatctttttggacaaacaaaatggttcaaaacgttaaa

SEQ ID NO: 93103 - DNA, 111 bp, Homo Sapiens
tccagcgctcattctatggaagatgtcacccaaaccagtgaaaccagtggctcctaaagatggtgatcctttgaggaatttctgtaaaaatatagatttctaagccctgtc

SEQ ID NO: 93104 - DNA, 330 bp, Homo Sapiens
ggtatttcatgattggagagactcttgaggtcagatgcccgtgtcttgtccttgcttcatcatgtaccagctgtggtcttgtacaagtcatggaacctattcaagccacattctcctctgccatggctgtgtgttcgttccaggagccaggggctcagcctaccggcctcctcttctccatccattcacaccgctgtgcctcttccttcctgagcctggctactgggggtgagggcggtgtaggtagcttccttagctcccctacttttcctgtcttaaggtcaggcacagtagaagccctttctgtgtgaaaagcagcattactccttg

SEQ ID NO: 93105 - DNA, 423 bp, Homo Sapiens
  misc_feature (198)..(206): n is a, c, g, or t
cattaactgagcaagactttcaggatattgtagatgcacagatggtaggttgtcctgaattctacattattagattactttaattgagatttgttaaaacggttaggactgttttgtccaggaaagataagaggaccaaacatataaggtgaaattcagaattccgtttccttctaactaatgaaaaactgcttactnnnnnnnnnttttatactttccttgctaaggtcccatatattgatttgtacagaaccacttagtcattttctcctttttttaagaaccattttcatctgatttttaaactcacgataccagttatctgttaatcaaaattgcattttacaatttaataatgtgatatttcctatgtctacagcataccttattaggtataaaacctactgcaacttagaaaaagga

SEQ ID NO: 93106 - DNA, 673 bp, Homo Sapiens
  misc_feature (439)..(451): n is a, c, g, or t
caggatagagaaacaactgtagaggagcaagagatgatggtgactcagaccaaagtggaagcagtggaggcaccctgctgattggatgatgcccacccacaatgagagccgatcttcccccgtcagtccccggattcgcacacaaacatactttcacagacacacccggaaatggtgcttaaccagctatccagtcagttaacacctgaaagtaaccatcacaggagaatgggaattcttcaactttctcatgataagaacttccaggtgcttccagatgcagtaggtagatcattttatagggttctattctttgttgaatgagagagagcatatatactctattcatagcatagcttgatataaacacgtctttgcaagatagtgctatcatctggattgttactaggatacaagtgttccatcacattcttggggnnnnnnnnnnnnncttgtacccagtggacatattccagcaagcatagtgagcatgatccaccattttgggctcaagaaaaaggactccatgcaggttaatcagaactttttatgaaaactattcaaaagaagttgaatatactcctgaaacatttacaaaagaaaaaagtgggacctaaaactggccacatactttttaattattaaagttgaacattatattgtatgtgcaaaa

SEQ ID NO: 93107 - DNA, 814 bp, Homo Sapiens
  misc_feature (682)..(746): n is a, c, g, or t
acataatttatttttaaaagcatgatttgaaagctcaccaaaatgaaatcaatttgactttgattttaaagttttgactcaagatttaaaatttagctgtctttggttttctacttatttatatcaacgtgcttctgagctggtagggtccctgtgaaaacccatgagttttgctcagattaatgaaatgcttgctattagtgatgggcccctgttcagatgtgtattgctaaggcagcatttgggatgcatcaggcaacactctggaaaccacctgtcctgcaactcaggttaaaaatatgccacagagcagacgaaagtggggctagcgtgagaatctagactaggcagccaaaccccatcgcagggaaaaaaaactcacagttaaagagtagcctttgcctcacctcctatcttttgcttttcctcacagtatgaatttatttcaacaaaaagatgaatacgttgaaatttgcctgctgttagggtcaaattctgaagactttcctaatgtggcggcaaactataccaggctctcttattcactattgcctttgaagaagttgtcctagctttaggcaaatgttgaaggggtagtcaggatacagaaaatccaccagtgctactgatctggatggaaagcaggtattttttaggatttcacaccagcatatccagggtnnnnnnnnnnnnnnnnnnnnnnnnnnnnnnnnnnnnnnnnnnnnnnnnnnnnnnnnnnnnnnnnnacacgactattgaatgaaaacaaagtactgctctggaagtctgtattccagtggggagagacaagaaa

SEQ ID NO: 93108 - DNA, 620 bp, Homo Sapiens
tgttaatccagacccactgtggtctgggacacgttccatgcggtgaattcagcaggaacaagacacagccttcttgaagtgagttgttcatcgtgctggtttggctgtgcgggaaaactgggtttgcagacccagcagacagtccctgtcaccttccacctgagcactgtcttctatattcaccgaaaagactggtgcctgtgattcccaggtcctgctcagctgggattgaccatgtgactcaggcctgatcagtggggtgtgagatcagtgggtgaaattcttcttaggaaagctttgctcttgtgaaagagcactagattcatgaggcccttttctccttgaatatgggagtgatagctggagctgcagcagccaccctgaggtcacacatcagcagggatgaaaataaagccaatatcatagggatggtgggacaaaaagtgagaaagaccctggtgtcttcgtgaaagtggtgggtattattgcagcgagaaatacacccttagctgtttgtgtctgttttttatgtgtgattctgtggtaaaaaagcatccatgaccaattaagtaaatatttaacaccaatcaattaataaaattaacaataggcaaagaaaa

SEQ ID NO: 93109 - DNA, 494 bp, Homo Sapiens
caccatgaccggtttaaagtcttcgcagattatgaagactacattaaatgccaggagaaagtcagcgccttgtacaagaacccaagagagtggacgcggatggtgatccggaacatagccacctctggcaagttctccagtgaccgcaccattgcccagtatgcccgggagatctggggtgtggagccttcccgccagcgcctgccagccccggatgaggccatctgagcctccagaccagaccccaaaccagcccttgagtctgtcacactctctggggccagccccagcacctcatgcagagggtggggtactggagttagatctctaagcccctcctggaaccctcattttccccactctcaatgtcccagtgtccagcgtgactaaggacacgggcccccttccgtcctcgggctcccggtcccctcctatttatggggtctgaccaactgcacccactccctaataaattcattctccttgggaaaaaa

SEQ ID NO: 93110 - DNA, 507 bp, Homo Sapiens
aaccactaaatttcacatgaattatccaagccaatctgatctccatgaccccggtgttcttcattcagccgcttacaaccagaaccaaagagtagcagctagaattggaaactctgctgtttcctgaataaatctacatcaactccaaataagcctggttgacatgagatacacacaaatttggacacattctgcaagtacagacattttcttctgttagaggaagtgaaaattatttttatccttaaaatgaattaaagcaattagaccattaacaaaacaacaacttaaagtttgaatttgaactttcatgcaggaatatgtattggactttcaatcatttaggaaggcggcctaattagatatcatttttgcagctgtggcagcattttatgggtggaaataatcatgttctttggaagacctggtatcatatcatgtctcaattgtcggttctctggcctgaaacaattcacttcatatcaccaggcttcagtttcctctttt

SEQ ID NO: 93111 - DNA, 511 bp, Homo Sapiens
taaagtattctgggcctgtataagttgttcctgcattgaattgagttccaatttcaactgatgagaagcctccttctctttttcaagtgactttttcagttccttctgttccttaagtgtgttttccatctgcacttgaagttgatgctttaattctttgcaagttttttccaagtctaatatagcggcttttcctttctgattctccttttcaaattcacttttagagtttttcaaagaatcagaaacttttgatagtttgtcctttactgtagaaagctctgtcattaaaagcctcttcctccattttcactttttgtagttctgttactgttgtatgaattctgttattcaattcctcatgctgaatctttgtttcttgacttaaagtttcaaaatcttgtttcaggatttgtttttcttcctcttgcatggtaagcttttgcatgatactttcaacggcgtcagaatttatctgtagatccaatcttgtactggatactatttccct

SEQ ID NO: 93112 - DNA, 451 bp, Homo Sapiens
caacataatgccattaataaatgtgtgtaaactataatcatgctaaaattgtcttcccttctttgttgggtctagagagaactttaaaaaatcttaaagattagcaccgacttctttttcagctaacacaattgcttctctgaatgagtttgagctcctttgcctctaatttggcttgaagtctttgtcaggccacagatacttctttaaaacttgcctttattaaatctaataattaagtagaaattaagctcaagaacccttctcagcaactattctctttcctaccacgcttttaggaaattacagtggagaaagaaatggcagcttgacaacaggtgaagctactacaaacatctctcttctagaatgaagatacgaggaggggccttctcttctatttattgtatttcttttatctccagtaatgaagaggtttgatatatacaac

SEQ ID NO: 93113 - DNA, 600 bp, Homo Sapiens
aacaccagaaaaagctgccactgcatgtatgggtgggcacttccattctgtgaggaagtggggtatgaaggaagcattgccagtgggcctccaggactgctcagaggggcgatttcttcgccaatgtgggttgtgtccatcataatgtttcgccttattttattaatcctttcagtggtttttgtgtttttccggcaagtgataggaaaccacttaaaacccaaacaggaaaggatgccactatccaaagcaaaaactgaacaggaagaatctaaaacaaaaactgtacaggaagaatctaaaacaaaaactggacaggaagaatctgaagcaaaaactggacaggaagaatctaaagcaaaaactggacaggaagaatctaaagcaaacattgaaagtaaacgacccaaagcaaagagtgtcaagaaacaaaaaaagtaaccgggcaatccatactcattcagtaacacaggctcatttatttaaccagctaatcatttatccaaaggctttccattcttctcccaatatttttttactttaatttttcccacaagttttgatcagcaaataaacagcattcttgttttggaaacaaaa

SEQ ID NO: 93114 - DNA, 338 bp, Homo Sapiens
ctcccagataatataacagaaatgaggttatcggtggagactagaggataaggttattcagcaagcctaaggaagaaaggcaaattgtgactccggatctctgcataagcatatggcagatggcacagtggagaacaaggtgataagaacaggcagagaaaagtcacactgtcataagccccaaactgggatctctcgttgctgctggcttggaccaagctcaagaccttgcccttgcccataataaaaagctgcagacagtaaaggctgcacatatcttacttcttacaatacaatgatggctgcatccttaaataaaattgtaatataactgcaaa

SEQ ID NO: 93115 - DNA, 414 bp, Homo Sapiens
aatgcaacaaaagcaaactaattcaacagtttaggaagtaggaaggcaaataggcaaaaacaatgcaatataatatgtgtcatgggaaatggagtatatgtggggtatgggttaattatcttggtaattcagtgatcacactttgttagagttctagtcaaagcccactttgtactcatttttttactctattagtttactcaattcccaactgaacaaaagaggcaagtatagtagccaaaacactgtggtgtatacataaaattaaaactgttaaaactttcagagtgcaaatattaataaatcactgttagctttaaacagtgatacctttaaaacaagttaatgttttaaatcccttcacctctctatctaaaagcaatttcatcattcctgctgcaatgagccccattt

SEQ ID NO: 93116 - DNA, 813 bp, Homo Sapiens
aattcccgggatcgcgagcggtggacccaggcggccatgtcccgccctcgcatgcgcctggtggtcaccgcggacgactttggttactgcccgcgacgcgatgagggtatcgtggaggcctttctggccggggctgtgaccagcgtgtccctgctggtcaacggtgcggccacggagagcgcggcggagctggcccgcaggcacagcatccccacgggcctccacgccaacctgtccgagggccgccccgtgggtccggcccgccgtggcgcctcatcgctgctcggcccggaaggcttcttccttggcaagatgggattccgggaggcggtggcggccggagacgtggatttgcctcaggtgcggagccgcagctacaggaggatgctcgcgaggacccccagagctccgcccggagggtgcgggaggagctcgaggcccaactaagctgcttccgggagctgctgggcagggcccccacgcacgcggacgggcaccagcacgtgcacgtgctcccaggcgtgtgccaggtgttcgccgaggcgctgcaggcctatggggtgcgctttacgcgactgccgctggagcgcggtgtgggtggctgcacttggctggaggcccccgcgcgtgccttcgcctgcgccgtggagcgcgacgcccgggccgccgtgggccccttctcccgccacggcctgcggtggacagacgccttcgtgggcctgaacacttgcggccggcacatgtccgctcaccgcgtgtcccgggcccctgggcgcgggtcctggaaagtaccctagcgggccacaccctgaa

SEQ ID NO: 93117 - DNA, 1315 bp, Homo Sapiens
gctggtttaaatcggcacgagggcgcctggtggtctccgcggacgactttggttactgcccgcgacgcgatgagggtatcgtggaggcctttctggccggggctgtgaccagcgtgtccctgctggtcaacggtgcggccacggagagcgcggcggagctggcccgcaggcacagcatccccacgggcctccacgccaacctgtccgagggccgccccgtgggtccggcccgccgtggcgcctcatcgctgctcggcccggaaggcttcttccttggcaagatgggattccgggaggcggtggcggccggagacgtggatttgcctcaggtgcgggaggagctcgaggcccaactaagctgcttccgggagctgctgggcagggcccccacgcacgcggacgggcaccagcacgtgcacgtgctcccaggcgtgtgccaggtgttcgccgaggcgctgcaggcctatggggtgcgctttacgcgactgccgctggagcgcggtgtgggtggctgcacttggctggaggcccccgcgcgtgccttcgcctgcgccgtggagcgcgacgcccgggccgccgtgggccccttctcccgccacggcctgcggtggacagacgccttcgtgggcctgagcacttgcggccggcaacatgtccgctcaccgcgtgtccggggccctggcgcgggtcctggaaggtacccttagcgggccacaccctgaacagcagagctgatggcgcaccccggctaccccagtgtgcctcccaccggcggctgcggtgaaggccccgacactttctcttgctcttgggagcggctgcatgagctgcgcgtcctcaccgcgcccacgctgcgggcccagcttgcccaggatggcgtgcagctttgcgccctcgacgacctggactccaagaggccaggcgaggaggtcccctgtgagcccactctggaacccttcctggaaccctccctactctgaccccctacagacaaccaagcactaatccccttagtaccaagaaagggggagccaggatttagtcctggcccagcccagagctgggacctggagcacgatctgttgacttccctgggtacggacactgccacctctgggctcaggtcctcatgcctccaaatggcatctagagtttgagcagccttcttggctgcaggcaggcctagcctgtggcagcgggctagggcccgcagagcatttggtgcccctccatgttgcaatgcaaacaccttcaccactggggcagtggggagagatggctatattaataaaataacgtgtgtctttcaaaaaaa

SEQ ID NO: 93118 - DNA, 398 bp, Homo Sapiens
tttgccttgggagagagactgaggaagaactatgtggaagacattccctttctttcaccaaccttcaacccacaggaggtcttgtgagtcacttgaaaggggatgttgcacttaatttaaggtcttgaacatgaggatacctgtcctgactccccaagatggttcccactgtcacccaaggtagtttgggggacaacttgtcatgctgcatacccttatgtcacaggatctggtgaacaggtcgttcctggaggtcgcattcattgcacttcgagtctctcaggggctgacatcccacagaaaagtgaagcattcttcctagttccatagctctccttatgtactcttgaaagacccctggagcgtatgtggaataaaatagagtgtatataattaaa

SEQ ID NO: 93119 - DNA, 1313 bp, Homo Sapiens
ccagagtgtcaccactctctgttcgtcaccccggcaatctctccagctggccacttgggaggttttgtgcctgctcggcaccacgttgtccaggaggatgaagaagtccacgttatcactactgtgcgatgcccatcctgtccgtcaccttggtccaatccttctgagattcctgctgtaaagaggcagtctgcctccggcctctggttctctgcctcaggctccagcagctttggtagttgggatacaagacttcctgaatctgcttcatcagtgtggatgatgatgggtccttctttctgacaactggaaaagcccagccagcaaacaacggggtggactccagattccgaaaaatgttagtggaacgaattaaagacctcctgtgggttgaaggttggtgaaagaaagggaatgtcttccacatagttcttcctcagtctctctcccaaggcaaacatttgctgcatgcccaccttggtcagctgcccagcaaacatgccccccttcagggtggtctcatggtattgagagtcgtaaggagaatatggtttcggaccaccagctagattggtgactgtgtaatcaaactgagtttggggtgggacctctaatagctgggggttccactctacctgctcctccagcgggagcggcttgagaggactccgagccccgtgtcgaaacacgacctgcaccattttcaacttcagcaggctgcggtcgaccggacactggccatcggcctcctgcagctcggccagggccacccgccgctggtgcaggcagtacgccagcgaggtcaggacgcccactggggtccacaagcgcatgctgaacacaccagtgatcatggtggtaggccctcgctgccctccgggttgaggctgcaggaggcaaacacaagtcttctgcgggcgccggggctcagcgggcgcccccaagtccgcgggaacctgcggatgcgtacatccagcccctcagcaagcagggaccgctgtgcctcccggccctgagggagaccccgagtgggaacgggggagagaacaagaggtggcagcagcgaagagtccctgggagttttaacccgggtcggggttggtcgctcctgctgcacaccgggccgggggagatcggatccttatcttttgcccgacgaggaacattaaacttgtatttcaagtttggcctccagcactcttgaaggaacaggagccggccctgagttcctggcggcagcggctccaccagcaaggactactcgattccacttttctataagcaagctcctacccacctcctcacctactcag

SEQ ID NO: 93120 - DNA, 750 bp, Homo Sapiens
cttcttggcgcgcgtcgccgcagagcccacccaggcgggatagagcttatggattggctaatgccgcagcaactcccgcctgcctgagctgttcccggaggtccgcaagcccccagccctcccatgcggaagagtctggctggtgcagagagctcaacttttccctaggctctggacccaaaggccttccacgtcctttggaacctgcttacttcctttattccctcgcagtctggctccttcctccatcctgggtgaccagtgggtgccgacattgacattcatataagaacacggaggaggtgcaggtgggaggagatgggctcagttttagccaacttaaaatagagtctgcagagcccgtgggacacaggggaggtatttggggacccagagttggggaactgtgggtagatatgggagttgaagacactgacagcaaagggtgcaactacagttcacctagcatagaaccctatgtgaccgttaaaaagaatgaggctcagtgaagtgaactcatagggaaacctgcccacaacaaattagacgcaggatgcagtagaaggctaagagaagtctggagccagacttgggtttaaagcctgggactgacacttgctatgcgaccttgaactgattacttaacgttactctgtacttcggtttcccaatctgcaaagcggggataagcaattacatccttctgtttgatgtgaagattaaataaattaatccacataaagcaaaaaa

SEQ ID NO: 93121 - DNA, 355 bp, Homo Sapiens
tgcccactctcacccttcctcctttcccggcccatctactctccccactgggtctccgacacgaccctctctcctcccggctgtccccgagcccctctctgcttccccagctcagccccctctctgacggcttctccctcccacccccaggcgaatctccgggctcccacggggtgcccccgatccccggggtataggtcaaccgacaaaattattttaaatgggaagatttgaattccattgaattcatggaagcaggaatccatctggtcatattttaaataattttgaaatgataatagcaattatcaatttaaagtttaaccagaattcagaataaccaccattttaccag

SEQ ID NO: 93122 - DNA, 248 bp, Homo Sapiens
gtatgatgcactgagatgtgtactttctaacaggggattggtacctaagaaatgtggtagcattattcagaaaactattatactttcaaatgacacatagtaaggagaatggaataatacatgttgcatatttgttaccagttgtaatttgtctgtattatgaaagatgtaatggtttgtcagctgtcactgttgttttcttgtaacatgatatggaataaagtatagcagaatctccgtaaaaaaaa

SEQ ID NO: 93123 - DNA, 686 bp, Homo Sapiens
agatccttaatttctgaagaactcagtaccttctggcttatcgatgggtaagtattaggccctggaagcaacaaagacttacagaaattatgaaattttactaaagataagttacagtagaatgatccaaacgaacaactctgcacttgaagaagtgcatttgaaaatgagggctttcaaattagtctcatctagggatgcctagtgatatgcagaagttctaaagagactttaatattttaaaaggctttttataaaaggcaaataaaaagcttaagtgactaattgataagaaaaattgaatctgctgaccttttagttttgtcatcatcctgccctaatagcagaaagaaagctagcctaaagcgtttataaaaggaaaggcttctttttcagatctctccctgctgagtccaggcataaaggatgctttctctgccctattccttaatggagtccactgtgaacccagtaattttagccaagaaacagtagctaagttaaacggaacacctatttaactaaaatacacctttctggaatttgattggctaacctgaaacccttttgtaaaagaaatgtacacctattaaggaatctccatttttaaggatgtctgcctatgtacattggaaattttaccactgttttaaatttacataataaatcgtacttttgtctaaaaa

SEQ ID NO: 93124 - DNA, 1037 bp, Homo Sapiens
ctatagggaatttggccctcgaggccagaattggcacgaggcggcacgagggtttgaaggaacttccatttctagatgctacagttctcaaattttttcacagtcacttgacatctgttcaaagtctttttttcttcatggattaaccaacacatatatccctgtggttatctggacaaagataaatgcctggacacaaaatgagagaatgcacaattatagtagaataaattagatccgattgaaaatgaaaatctatttataaattctcaagcatggaatcgcagtgcctacgaactgccccttctagggagacagagcctggatgtcgtgatttatccgagtatcaaaggccaattcttccagttcttcaacagacaaaaaagaggactttcgacagcaatcttgtcacaggttctgtgaaatgttgttccctcttattgcatatacacagctcatcactgaaagagatacctacgccaggcctagccaactgattcccgtaagaaggttaattcattctactggaggatcagggaatcatacaacccttggaggggattcttcagagttccctgtaactagatgacatttcacttattacagctgatataatattttttattatcacttatgtttttagattttcaaagtttcttcctttgtaaattcttacatcatattcctgttctcttaaaattctacaatttaacacctttaatgttacttctattatagctttttagcacctccttttatgctcaccaatatgtatacgattgtgaaagtgaaacttggcaattactgagttaatgtgatgtgtgtagaggagacagactacaccacctgatttgatttcaaaatgaatcttcatttagtcctcaaagagttattaaatgatgctgttagtcactagttattgaacagcggcttattttcttgaaatgtattcagaataagattcttttcccaaatatttcatttaaatagggttctttgatagtatttgctttaaataaaatgttttcaaattaaaa

SEQ ID NO: 93125 - DNA, 605 bp, Homo Sapiens
agatctttccattctctgtttttaatgcaacataactttttgaaagaatgtgtaaaataggttggattttctattttactaaagccttacagaagcacctctgatactcaatcagtgaaacaaacccaaggccacgctcaggttctccatccttcaagcctgaaactgagttcaccagctatgaaagcttaagagtgcagcagacattattgctttcacaatgtgaacttgctagggacttcaatagtaagtcattcttcagtgatcacctcccatgggaaatcccccctgactccccgaggctgagcaggaatccctctattctggcacttacccactggtcagtatgtaatgctttgtttgtgtatcctctactggactgggagcttccaggagtttcattgccccatcctggtgtctagcacagtgcctacaaacagtaggcactcagaagacatacagactaagcgaatgactgactgaataaatgaatgaacaaggactttggaagagtgaccagttcagctttcactgaaaataattttagacatgggtgatttctgcagaaagtaaaaaagaaaacatgttcacaagaaaatttaaaa

SEQ ID NO: 93126 - DNA, 439 bp, Homo Sapiens
aaagttcaacaattcaacttcttctcaagtaattcccattgaatgcaacagcatagcattaggtgagttcattggtaattagccattgaaaaacaatgagcagcctttcccagaccaagtggttggacaattttgaagttctggttaattttaaagcagtcagtgaaactgtattaactttatcccttttttattgaagagaaacataaatattcatataaaatactagaaaatgagaagtcacttaaaaaatcttaagaggtgatgtttaacctgactatcaaaactgtgatttgaacaccctctaatttatacgaaaataaagtagttacatttagcctccatcagcaaatcaatatggcatatctcttttattattatagttctgagatctgataaatatttatttcttaattacataaaagtgaaaaaaagttta

SEQ ID NO: 93127 - DNA, 509 bp, Homo Sapiens
  misc_feature (433)..(465): n is a, c, g, or t
gtatcaacatggagggaagtggaggtcgctatgttaagtgaaataagtcaggcacagaagggcaaattccgcacattctcatttgtgggaactaaaaataaaaataattcaactcatggagatagagcagaaggatggctcccagaggctcggaagaggaatggggccgggggaagagatggggatggttaatgagtacaaaaacagaatgagtaagatttagtatttgatagcacaacagggtgactatggtcaacaataatttatcacacatttaaacataacgaaaagtatcactgaattatttgtaacacaaagaaagtgtaagtgtttgaagtgacggggaccccatttccccaatgtgatttacacacactgcatgcctgtatcacagtatcacacatgccttatatacacctactgtgtacccacnnnnnnnnnnnnnnnnnnnnnnnnnnnnnnnnnggacaacgtcctttttttcccccaccaccaaaccaaaccaaaaa

SEQ ID NO: 93128 - DNA, 2676 bp, Homo Sapiens
  misc_feature (1460)..(1460): n is a, c, g, or t
  misc_feature (2377)..(2394): n is a, c, g, or t
agagctaccaccagcacttcgcggcccacctggccgccgtggcgcagttcgagctgtgcgagcgcgacacctacatgctgctgctctgggtgcagaacctctaccccaatgacatcatcaacagccccaagctggtgggtgagctgcagggtatggggctcgggagcctcctgccccccaggcagatccgactgctggaggccacattcctgtccagtgaggcggccaatgtgagggagttgatggaccgagctctggagctagaggcacggcgctgggctgaggatgtgcctccccagaggctggacggccactgccacagcgagctggccatcgacatcatccagatcacctcccaggcccaggccaaggccgagagcatcacgctggacttgggctcacagataaagcgggtgctgctggtggagctgcctgcgttcctgaggagctaccagcgcgcctttaatgaatttctggagagaggcaagcagctgacgaattacagggccaatgttattgccaacatcaacaactgcctgtccttccggatgtccatggagcagaattggcaggtaccccaggacaccctgagcctcctgctgggccccctgggtgagctcaagagccacggctttgacaccctgctccagaacctgcatgaggacctgaagccactgttcaagaggttcacgcacacccgctgggcggcccctgtggagaccctggaaaacatcatcgccactgtagacacgaggctgcctgagttctcagagctgcagggctgtttccgggaggagctcatggaggccttgcacctgcacctggtgaaggagtacatcatccaactcagcaaggggcgcctggtcctcaagacggccgagcagcagcagcagctggctgggtacatcctggccaatgctgacaccatccagcacttctgcacccagcacgcctccccggcgaccaggctgcagcctgctctccctacgctggccgagatcattcgcctgcaggaccccagtgccatcaagattgaggtggccacttatgccacctgctaccctgacttcagcaaaggccacctgagcgctatcctggccatcaaggggaacctatccaacagtgaggtcaagcgcatccggagcatcttggacgtcagcatgggggcgcaggagccctcccggcccctattttcccttataaaggttggttagcttttcctgtggcctgacctgcctgtgagtgcccagcaagccttgggcacaccccgctgggagctgttaagagcagcgctggttctcggttcctcccgggtctcctgtgctctgatgctacttctgcctagccctggcggaggtgcaggccctgtcagctggaactggacagaccttggtttgtttacattgtccgatgggggcaggagctcccatccggggcagccaaccaggcaacaccaaggnactctttgtaaacgatagctgatcgtgtgcacgcaaggaaagaaccaggagggagagtgcagccaggctcagggatccccggacacctctgtccagagcccctccacagtcggcctcatgactgtcctcctcgtgggtggggccgagggccctcttcagctctctggagacaggggccgagcctcacccatctgccctctgcagcccagggccgccgtgagcgggattcagcaatggtggaatggaagacagaactggaagagaaagaaggaaaagatgagctctcgtctggcaggggcttttagggtcctgtggcgagctgtgagcaccgccagcattagacgtcacatccaggtggccccacggcccctacaggctggccctgcaatggggccctgagccctccctcttcatcccccaaggcctcaactagagggtggtcccccgagggcttggtgtctactaccgaagggcccaagacctcctgggtcctctcaggctcccccttccccaaggcagggacaggccctgggggtgccaccgtgggccctgccacccagaagtctggctgaggtctgggcaggggcagggcaagcttgacctctcactgttgaccctttggcctctgtatttgtttcctattgccgtgacaggtttccacaaacttcgtggatcaaaacgaggtcttccagttctgcgggtcagaaggctgacccggggctcaaatctgggtgtcggcagtcctgcactccttctggaggctctaggggagaattcatttctggccttttcatttttagaggctgaccgtaattcttgacttcaggctcctccatcttcagagccagctgtgggtagttgaatctttttcccgtcacctcattgaggcctcccctctcctgcctccctccaccacnnnnnnnnnnnnnnnnnngagacagggtcttgctgtgttgccccaagctggaatgcagtggcctggtcatgggatcaagggtcactggcagcctggacctcctgggtcaaggggaccctcttggtctcaatccccctgagacaatccccccacggccaacctacatattttttatggggagaacaggggtcctcatttctgtttggccaagccttggttctgggaacctccctggggcttccaggggaatccttggtgacagcttctagccctccctaaaaagggggggtggggagattc

SEQ ID NO: 93129 - DNA, 595 bp, Homo Sapiens
tttacccaagtgccctatccccaagatcaagttcctctcagcaaatggacaagttttcttgtgtagtttaaaaagatctcccagaactggcatttagacagtgccaagggaaccctcacataatacttttccactcacaagaggagataagcaaccatatgagggagaggtcacactgtcttccccctcatcccagaataggccttggccccactaatggtggtgggatgccgcaggaaggacacaccgacacctgctagctattctaggcaccaagaaacccatcacgccttggatataacttcagtttacagaaaatacagaggacagaggaatgagctaagtgacaccacatgagaatgcaaccagacagagccagacagtgaatcattccacgggactcctggcccaggctcttctactggtcaacgtaaacaaaggggctgggtgggactgactggcaggacataacaaccacatgtaaagtgtgtctctgcattgcaaactgatttggacacaccatctataaaggggatttttgggacaactggagaaaagtgaacatgatcagagtatcaaatgcactgaaaattta

SEQ ID NO: 93130 - DNA, 596 bp, Homo Sapiens
gagacggagtcccaatctgttgtccaggctggagtactatttataagttctaccctctgggtcagccaggtctttgttcatttaaaagctccctggtgatttatacgaaggatgagcacaaaggaacattcctttcctatgggaagcctcctgcttagaggagatcgggctctggtaccctctaatttggaaccaggcaaacataaggaagcactttcgtatgtaaaataagaatatcttaaaagtaagcttcagaacaaaaccaatagtttgcaaagtattaagcgttaggaaaggtaaaaaaggaagtaaatattccataaatattatggaagaatgggtgacacttggctcaacacaggttacgcaaatcctcttgtgtcttacagaatagttgtgacctggtgtgatttaggtgcagtctggtgctggagctgggggcagacttgaggtatagaaggcagtgaaggaggtgggtggtagaatgggaagggaaggattggggatcagaagagatcagttagatgaacggggtactaggtaaatttccttgagagatgtgaaagtagaaaacaggataataaaatgatttgaac

SEQ ID NO: 93131 - DNA, 519 bp, Homo Sapiens
  misc_feature (324)..(324): n is a, c, g, or t
tttttgagaattgctaaatggaaagctagcctagaagcaccaagtaaatatattcaaggaatataagttgtttaaacattagaaaaatttttgcactcattttttagctgtattaggaatgtcaataatcctgtagcaaattttcacagagaactttaagaaattcttgcattggtcgatttcaatttgaaagctttttggtttgtttgctttttaaattttcatgttctaggaaactatgattctggttgttcaggattgttattattatagttgtgtaaaattattttattttgtgtgtattgtgcacagcttggggggggncgggaaatgcactaattgtgctcttccttataaatggtacatattactgacacagacaaataaagtttctaattgtttctgatttaatcactagtgatacagcatattctgtatgaaatgttttctcctttctcattgtcatctacttcattttttgttttcatgttttgaagaaataaaaaccaaaatggtaaa

SEQ ID NO: 93132 - DNA, 642 bp, Homo Sapiens
tgttaccaatctgaagtggggattaagtgaatgtctgtgaagtgtctagaatgggcctggcacttagaatagtgttatctatcatcatcgtcatcaagagaagactcagaaatggtcaattctgactatggataaagtgaaagcatcttctcattaacacattaaaatgaattagctaaatccctggacattttagaaggcacagaactcctaaaatgagatactgagcagataagagagagaaagggaaacagaagcagacaagttaaaagtttaggtcagagaaaagaggcttttgataacatgactgtcaaaatgagagttaaaatcaaacttaactacttcaaaatattgtcaaaggctgaacctcctccttagagcttactgccaatgcagcactacaacagaaagaaaagaaggtaaggaatgcatgcaagcctttaagacaataattgcttctaaaagaatgttccaaatagtttaataatatcaacacagtattttgattaatgtttaagtattaaattagggaaaaagaaaattagttttgtaaactaaattaagtcacacgtaacagatttctgacaagggtcttgagaggtttggagaaaaaagaattattctgttacagatgaagacaga

SEQ ID NO: 93133 - DNA, 1064 bp, Homo Sapiens
  misc_feature (237)..(409): n is a, c, g, or t
ctgatccaaagcctcataccctaacgagttaataatataatttgaacactttaatttttatacttctgtaagtcttaaaggatattatataaaaatatccttgaaatggaaaattactgaacacactttaaactttagatataatgtaaaaatattaatatcattgtgcagccatgtcaaaattttttaatcagccagtaaggtcaaatattctaaccgtggaggcagaggttgttnnnnnnnnnnnnnnnnnnnnnnnnnnnnnnnnnnnnnnnnnnnnnnnnnnnnnnnnnnnnnnnnnnnnnnnnnnnnnnnnnnnnnnnnnnnnnnnnnnnnnnnnnnnnnnnnnnnnnnnnnnnnnnnnnnnnnnnnnnnnnnnnnnnnnnnnnnnnnnnnnnnnnnnnnnnnnaacttgacggagagtgttatttaaatgtttgttttcatttgtcacaaaatctaaaataaaaatgcattgtgtgtatttctctaaaataattgacctaaacttaaaatttttttagtagcattgcttgaatcatcacaataagaacttgtaagaagtactaggaatgataactgaaacccctactgaataattccaagtactgactaccttctaaaatagggaaagacactagcattcatttacaaatctattttatgccaaaatctgtgaacagttcctatacatagctaaatatattataaaataatcatgtttataattatagtatagcagaaatacattaagaatatgcgggtaaatgaattttttatatctgaattagtagatagaagatacaatttgagtgggtactccttttccccaatataacagtttcttcaagcctcttctggggctgtttggcacattaaaagactattttggggacagggaagctggctaattaataccgattgactagaccatgcatgctagaagtagtcctcaatgtaattacccaaccgtctcatttagaaaagaaatgcagcataggttcagttcacaaatgcagagtaggtttttttcgtttgtttgcattgctacttaaaaggttgcc

SEQ ID NO: 93134 - DNA, 481 bp, Homo Sapiens
ggtggggaaagccttaacacatcctgaaaaggtgcaaacaagcactagcacggactggtagtccacagcatggacagttctgttaagtctgtaaccacgcctttacaaggcatggcttctacttccccaattcgctggggccaagtgggcccctgttgcgggttgttttgagcacaggttaagcactgtttacaaatggctcaagtgatggcagagagccgtggcacatagaaatggcattttagtaacgtttctagtgccattttttccatgagttccttgatgaatttgctttacaaacatatgagcttaaatctttgaaatggctaatctcccatcgaagaatttccaccaccctccttgaatatatttttcagcctcctgggcaaaccagggtctttcatttggtgtataacttgggttttcttggagaggaggttctgggaggagagccatagctaaggcttcctctgatttaaaa

SEQ ID NO: 93135 - DNA, 467 bp, Homo Sapiens
  misc_feature (194)..(295): n is a, c, g, or t
ccctgtgatgtgacatggagaagtgaccaacacaactttgccaactatactccattcttagtaactgcctattaggaaggatttctttctaagtctgtcactaattcaactgttattcacaagagaagtataggcaaatgatagcagcttgatcgttgatttttgatttagatgatcaatgatgttcagaatannnnnnnnnnnnnnnnnnnnnnnnnnnnnnnnnnnnnnnnnnnnnnnnnnnnnnnnnnnnnnnnnnnnnnnnnnnnnnnnnnnnnnnnnnnnnnnnnnnnnncagggtaggtatcaccacattccctgtggtggtgtgtctcttctctgggattggttcttctagaatctcccaccttttagaaccactttaagatatttatttattctctccaaccatcctggcaatctttttatccttaaacaggaataaattcctacagctgaatctaaaa

SEQ ID NO: 93136 - DNA, 420 bp, Homo Sapiens
gagatgtttgtggaaagtcgagttaagggttcctggaaacattaatctggacatgctggaggatgcaggtggatttagagccagaataacatctgtaataacaagtccttgaacctctcgtcaaacctccttgatgaagattatacagaagcacttctgttgtttgatagggctgttgattggaaagaccttgcttctaaacagtagaagtctccttccctgcaactatcatccatggatccaagatctgctttgggaatcctacaacttgaatttttgctcccttccattatgaagccctaaggcaagtggcttggagtaacccaccagagaaccagggccctattcattcattttggtatacccatgcttggcatgatggctggtcaatggtggaagcttaataaatgtctgctaaac

SEQ ID NO: 93137 - DNA, 865 bp, Homo Sapiens
gtgatgcccaaccgccatctctcctggcatgggggtccctcagctctcccttcctccccacaggtaatggacagctcaatgccgctgattggagagcatgtggaagaggacagacagctgatggccgaccttgttgtctccaaaatgagccagctcccgatgccaggaggcacagcgccctcccccctcagaccttgggctccacagattaaatcagcgaaatcccctaggtcaagcccagctggggcctcagctaggccagccccagccacgcccacctccgcaaggaggccctcgccaagctcagtctcctcagccccagagatctggaagcccctcccaacagaggctctccccacaaggtccagcagcccctgagcccccagtccggagtctccacagcagcaaaggtcaccaggctctccgcagctatcccgggcatccagtggcaagctccccaaaccagggcctccaagccaggtgccaccctcgcctcacagcccccgccccctgtgcagggccgtagtacctcccagcagggtgaagagtccaagaatgcccagcaccacgcccatccgctatctcaacagaatctcagtccctgactaacagcctcagcacatccgacacctcccagcgtgggaccccaagtgaagacgaggccaaggctgaaaccatccgcaacctgacggaagtctcttgccagcctgttctctgactaacgccatccaggctgggcaggggaacagtgctctgctacactcggacccctcctgcctcatcttccttctcagccttggttcctgatgggaacagaatggagggcctgagaacatactttctaaatgcctttgacccaggaaaa

SEQ ID NO: 93138 - DNA, 511 bp, Homo Sapiens
ccggtattggagtattccttggtgttccttagcattccttgacttgcagacatcttcccagtctcccttccatcttcacatgggcttctcagctgtgtggtccctgtatgtcctgtctctttattaggccaccctcagtgaatttagaattcactctaacaaagtatgatctcacgttgatccttaacgcatgacatctgcaaagatctatttccacgtgacagtgagtggcctccctgagagcaggactgtgccatcctcatgctgtgtccccagtgactagctcagtcctccgcagacaggaagctccaagcaaacgtctagtaaataagtgaatgaatgagtgatcagaatgcactcttctttgttggtgccatcccttaagcccttctaagtgtgacttgttttgactcaatggcaagtccattgacttaaataccttgaccagttctctcatcctaaagtgtctgggagtgtacaaaagcaaaaagagaacaccaagttgcttaaa

SEQ ID NO: 93139 - DNA, 808 bp, Homo Sapiens
tttactttaacctgagatgtaattaaaattcattcacttgaaaattcagtcgacgtgtgaactaattaaggatctaagcaccggcttccaagggcctgcctgtcacttcatgtgatgtcgccggccctcccgctgtgagatgcaaacgtctcgcctgctctgtgccctgctacgcttcacacaggggtccacgtgcagctcacgggagctaataccgccaccttccacccgctggcaaaatacagcagcatcctcttaaaagaaatcctgctaccatttcctctggggagaggggaaaaggtagaggaaagggaaagagaaaggaagaagccaccgcccccctgcccacccccacaccagctcctgcatgaggcgtccccaagtagacaggagcccagcagcctcctgtcaggaagggccagacatcccagccatgacccgagcaaaggcccgctggacttgggacagccatggctgcctgagggctgcagtcgggaagccctcaaatgccaggagtccattccacttggccatgaccctcgcggggtccccaggtctttattctgggtgagcagaaggcagagctgactatggacaccccttccttgggcaagacccctcatctctctgggtttcctcataagaggaagtaagatgggtgtgaggaagacaagtttgtcccgcctcaccagggtcacaggaccagctccccaccccccattcactcaccagacaccaaaagcatctgctgtttgccaggcagtcagcttaagctccgaggaaaaggagtaagacccacaaggttcct

SEQ ID NO: 93140 - DNA, 420 bp, Homo Sapiens
gccagagctccaagggaagggcagcaaggagacaacagcatgggttgcagctcagacaacaggtaaataaaaccaagcaaagctgctggtcacagatttgaccagggtggcaagaaatgacaagctaccatgagattcaacagtggcacggaaggatgatgagaagcaaacagattaggagaagctgccaccaccgtacatagaggcacagatgaccaagcagaacagcaccagtccctgcaaggtgtgctcagatacagctcagcacagccatctggccaggagggaatgataatgcacatggtgtgcactgcagccgggaagttgagaaccgctgtgggcacctcaggactgagtctggttaccctgctgatccaagaaatgaagccatctaaaattttgcctgctttcacaattttc

SEQ ID NO: 93141 - DNA, 846 bp, Homo Sapiens
  misc_feature (46)..(271): n is a, c, g, or t
tagaagagaaattaaattgacagaagattctcatgaggctctttgnnnnnnnnnnnnnnnnnnnnnnnnnnnnnnnnnnnnnnnnnnnnnnnnnnnnnnnnnnnnnnnnnnnnnnnnnnnnnnnnnnnnnnnnnnnnnnnnnnnnnnnnnnnnnnnnnnnnnnnnnnnnnnnnnnnnnnnnnnnnnnnnnnnnnnnnnnnnnnnnnnnnnnnnnnnnnnnnnnnnnnnnnnnnnnnnnnnnnnnnnnnnnnnnnnnnnnnnnnnnnnnnnnatttagaatgctgacctgcttattttcatatggaagacaataagctgattccctgtagattgagctaacggccatctgttatgatgggacaatgctgattcaagaagtgtcatttgccactttatctgatgtcaggaggcaacacatgaaatctgaggacctttaataactcacaacaccttgtgtgtaagatccccggggaaaggcaaccccaaattagaaacatgtttcactggaagggcactcacttactgatacctcagggactccactttgagggatgcctttatcattcatacctttccatggcatgaatggaaaactgctgcaatgctgcttctgtcctaatgcatttcatgagtcagcatatgacaaagggaagggacacccaggtcagccccatcattgtatctgaaaccaacacttcgaatataattggaatgattacatacgattctagatgttgagtgattagcacagcaagtggtgcccagttggttgctattattactgttgttgttgacattatgattatgcttattttgtgttatttattaaatgaatatacttaaaaa

SEQ ID NO: 93142 - DNA, 405 bp, Homo Sapiens
gttcacgaagagggtagagctcatctgttgtgatcatagtaactactgcaacctccctgagggagtttagttctacgtctctcctggattttgggttctttttcaaacactacgctctttttctcttccctgaacctgaattttgctctcctcttctatgcattggtagagagtgagaaagccagctcatagtgaaaagacaagcaggcataaggagacgcagtgcggacagcggagcctattgatgatggagcactagactcactctttgcacatccctgtcgctaacaggtgggaggggttttgctctccttacgtgatactgccatgaataagctcagacttggtcatttattatctcctgtatgaaaatgtgaacacttgggccataataatctccaaaaa

SEQ ID NO: 93143 - DNA, 832 bp, Homo Sapiens
  misc_feature (178)..(189): n is a, c, g, or t
ataaatataccatataaaaaacaagaagagattaaaccacaaatgtgatttcccccattataataagatagtttgtacaattctttcctgatgaatgtgtaagtcttgaatcagacatgttttgagaaaatatgaattaccaaaattggttcaagaagaaccataaaatcagaagttnnnnnnnnnnnnctttgaaaaacaagtactgaaagaaacattccataaaaaggcaccagaccaaagatttttatgtgcaagtccttttgaattttcaaggaacagtcagtcccaaatattcatcaaatgtctacgaggttattggaccctgtgccgggcactgagctgcaacagtgttcacagtcgggcattctccacgctctcgcggcactcacagttgaagagggggggcaaatgttaatcaaacgtaccacctctaggcccaattattaacttaggctatgacctagagaaaagggccccaattctccagaaagttgtaagatatgttcttgacatagattggaggtttggagagttttccatgacctagggatgctgtgctgagatctgccagggactaagcatttcatagaggctcccataaagggccctgcctgggtcaaggggggaacataccatgttagaagggtcactatggctgaatttcagggagcaagtggggagtgtggcacaatgagactagagatgtaggctgtgataagaagacagagactggcaggtcatcttaaggatttgggggttttagtcaaagactgataggagatgattaaagcctttaaatgcattaaagcagaacaaaaagacatttaaa

SEQ ID NO: 93144 - DNA, 423 bp, Homo Sapiens
acagacttaatactgttgccagccccaaagactgtcaggagcttgccagtatttctgttgggtctggctcaaggcccagctcagacctacaagcaagactgggagaaccagcagggtgaatctgtggaaaatcaagaagtccaatcaaaaaagcccattccctcaaaaccacagctcaaacagctgcaggtattagatgatcaaggaccagagagagaagacgttaggaaaaactattgcagtcttcgtgatgaaacacctgaacgtaaatcaggccaagagaaatcacattcagtaaatactgaagaaaaaattggcattgacatcgatcacacgcagagttaccgaaaacaaatggaacagagtcgtaggaaacagcagatggaaatggaaatagccaagtctgagaagtttggcagtcct

SEQ ID NO: 93145 - DNA, 543 bp, Homo Sapiens
  misc_feature (145)..(145): n is a, c, g, or t
tttaggttaggcaaagaggagaatttattataagtttattggcggggaggttgtacaaggaactgaggacaggattacagttggacatcagacatgaacaagattgaggatacaggtactatcccggatcttcccctcttctttnccctgtgctcctctccttgtgtcttttcacttttctctttctctgaagatgagcacttcccttctactggtgaaatcttactaaccatagttgccaatgttattcctcacttatagttcagtcactcagacaaaggccaatctctctctcaattgcatactcctgggaaaaggctttgattggtaaagctcaagtcaggtgcccaatctggtgcacacagctatggccagggctcagtttttcttcatgcctttctatcttcatgactgctctggctacaaccatgcattggatggagtgtttcttagaaaaggtttcctgggcagacattctaatagagatccacttcagtggagatgcattcagttttatttgtctttttctgctgctttaaaaaa

SEQ ID NO: 93146 - DNA, 504 bp, Homo Sapiens
acggtgacagggtcaaggaggaattttctgtaactaattaggtttgaacttgccagagagaaagtggacattggcagcctattgtataagagtgaaacaaagtttgaactagagtgaacttaatttcctttgcactgaaaggaaagaaagattaatgaaatatccccaaatccatcctgttagtttttattaaatcagcaaatgaaatttaacctccaattctgctataacgtcctttcctgcagattgggtttcagcaagcctaagtgaaatagacacactccctctagaacaacatttcgatatgaaaattgcattattgccgtcaacatcaggttacctgaggaacaagccacttggaaaacaattaattccacaaagagcagaatgacacatacattgcctcaaatttacaagaagcacaatgttctgattacagcatttgtgtaagttcatttcttacctctttgctaatgctaataaaaaaccagttgaaatttaaaa

SEQ ID NO: 93147 - DNA, 672 bp, Homo Sapiens
tgggaagctcctggctttctggagccagaggatgttcaggaggaaagcccactcagccgagggtgaggccacagctgggaggatgactcgcactggatccagaaagaaaacaaatggtcccagaaatatggtgagcttcgccgttgatgtctctcctctagtcgaatatggaagactggatcaccagatctcccaatttgcttttcctcttgtttttcggcctctttcagcttgctctctgcactgatgctctctgcatgatacatatggtgcattttgaatacatactgcaaagaaaataacagcttctccaccagcttaatgcaaacacaagcctttgcataccaaatgacctgacaggcatatagccatgtaaatgtactcccatagcatattttcctgtttgaattcttctctactaaaacttcatgcataattctccattcaatacacctaatttatctttcttgctccatttttcctcaactgctgaaaaaatagtcaagtagaaaacgacccacgtcatgaatttccttaggagattgggatatcctatatgataacttgcacagaagttaatatttttttcttactgacatggccatatcatgtatctgacactactcttatagtttaaatcaaaataataaaaatacctgtagcaaatttaaa

SEQ ID NO: 93148 - DNA, 675 bp, Homo Sapiens
cggctgtggactcttgcctgtcttctctgtgggatccaagagatagtcccatgatcctacgagagagtagatgtgagccagccaaaagaaacatcaaacagaggcccaggaataaattgcaaaatccctaaggatccaaaagatctgcaggattcctcaggcctgcctagatgttgtaggggatcatgagactatcctgtgtatcccacaaagaagacaggcaagattccttggctgatgcacctccacagaggtctccttctcagccaagcctcagggaattgtggcattcatgctgtacccgtgatctgttcccactggaggaggagatgtctagactgtgatggggtctctgagaactgctcttctgactttattcctgaaagaggctgtgtgcaagaattgagtcccagggggactggaatgttgtctggtgaatgtgtgggaccgcatccacccctcaccagcttgtatcctcacctttatctgatgttatggctgctcaaagtatctgtcccaaaatgaaattccaagacaatgaaggagtgacgtgaaggtcctgctcagctaggaactgaatatgaagtaaattcaaggggccctgaggactggactgctagtgtttctccatgggatgtacactggagaataaagcagtgaaatatttctgttaaa

SEQ ID NO: 93149 - DNA, 484 bp, Homo Sapiens
cacgatgatcacaattcgtcctcatagcaactccatgaggagggcgttagtagcccagtttctctgtcctttaaagcctaagagagtgggataacttcctgagggtcaaagggacccaccatatgaagccctgggaagacgctgctccatttgggaccattctcaagcagttctataagagctgcatatctttacctaaaatctaaggtcagccacaatggcctccaaaaacagaactcctctcctcccactctgattgctgatgaccacgccgtcgggatctggcgtccaggagaggacggctctggctgtagaacttgctgtgtttcctgcatttatggctgcactgaccccaaaacagcgctctgttctctgcttttaatctactctgactttgaaggttctattgaggatgtttcctgcctgtatcttgtttctcctccctcagcacagcctccaaattaaaaaacgaaacaaaacaaaa

SEQ ID NO: 93150 - DNA, 572 bp, Homo Sapiens
  misc_feature (265)..(273): n is a, c, g, or t
  misc_feature (397)..(406): n is a, c, g, or t
  misc_feature (435)..(435): n is a, c, g, or t
  misc_feature (550)..(550): n is a, c, g, or t
aaactgttgaggaaaaaaatataaggaaggtagacagcagaaacagtagaaagaagtaaaactgaaaatcttaccaatttgctgtaaagagattagacagagagtgggccacagcaacaccctcttcccctggatatccctatctccctcaccttgccgaccacagtatgtattttttatcctgactctcttctgttgttcttcagccatgggtgaagacatttggtgtcttgaaccaaatactggtgtaagaacaggtggcgannnnnnnnnccagtgcaatgcaggcccgggacaatgatgaaatgtaggacatacaacttatgcccattccaaggcttccagttaagcttagcacatagcagtactgcaagtagaaatgattaaatagattcannnnnnnnnnctcatattacagacaggtagtgcagctgngttactgagaataaacccgaggtccgaccggatccgtcagacgagccacagctgtggttaacgatgatgcatttgcgatttagtatttcgacaagagaggaacaggagttgtctngcttcttgaacgaacagtaatt

SEQ ID NO: 93151 - DNA, 509 bp, Homo Sapiens
tgcgtgcatcaccacaactaagaggaaggaaagagcactggatgtggagtgaggagacatggattctgtcactaccactctctgcagaacccaatagtatgtcattgaaacaaaacaatacaaaaccctgtctacaaaagaagactcataagtcaacaataactcgggtttcataaaggaagaaagtcttagaggaggaaaatcaacccattcaaatacaggagcatctgcttaacacaagacggaacgaaccccgctgccagaccggtggtgtgggcaggcgaatgtgtgcgtgtgcataggaacaagcctatatatggatgagacattagtggcaacgagaggagagccaccacgattgacaaagccacaactattacgatttgaaatatcccccgcaggcactgacttttggtgccagaatcttccccgaatttattttcaggcaagtgactcacaacctggtctccataagtaattccattaaaatgagtcgccggttccactaa

SEQ ID NO: 93152 - DNA, 516 bp, Homo Sapiens
ggggggcgcacctcggggcccgcgggccgagtgtcgctaggacgttttccgcaggcctagcaagcggacccccgcggctcggagccaaccggtgcaggtgtggaccgcacaacggggtgcacaggattagttaagcaaagcaggaacccagctggaaaattaaacgagccctggatctgcaaagcaggtcccttcgcgagaccaaagccgtgatcccaaccttagcaacataattctactggaggtgttgatatatatactaatccagaacaaccatgtagcaagaggaataaaatgaagttcagaagtctgtttcgggaaattttgaagccctttagaaagaaagatttctacattttgttacatgaaattcatgcaaatatatgtcaggtgccagtgctatggagttgttgaagaataagcacaataccatttattaccacttctcagttgtaaagaggctgtaactctggttgtcgaaataaaataaaatgaaatctcctagatgtgaaaaaa

SEQ ID NO: 93153 - DNA, 464 bp, Homo Sapiens
ctctctgaccatggtccgctcaagattaccctcgggggacttcagggaaactgctagtagcccctcttgcaactgagccaaagccaggcaaataggaacacagggtgaacccacttttgtcaagaccacattcaaaatcaaacttggaaatggagacccccgcacgaaaacccttaagagccccggattactttcttggcagcttaaagtcgcgcagccaggccaagctgtgtaagttaagggcagtaacgttaagatgcgtgggcagggcaccttgaactctggcttagcaagcatctaggctgccccttcactttcttttagcatggtaactggatgttttctaaacactaatgaaatcagcagttgatgaaaaaactatgcatttgtaatggcacatttagaaggatatgcatcacacaagtaaggtacaggaaagacaaaattaaacaatttattaattt

SEQ ID NO: 93154 - DNA, 838 bp, Homo Sapiens
  misc_feature (237)..(237): n is a, c, g, or t
caggagttcttcggaaggaaaaagatcgcgaccaacccccacagtggtgaagaactatattaaagatgcttttcctaagacagagggagaaccaaagccaaataggcactctgcctccgccaaggctagagcaggaggttcaaggaaatgggcaggaagagaacagaacactcaagctggacgattagtgaaggaaactgtggcctgagactgatgatcagcatatcttatgcctanacaccaccactaagactacctggctaagctgccatggtgtgttagagatgatgagttacttttcttgccccttttacaacagggaaatctaaggacaacaaaataaacaaaaggctgagaaagctgagcatgtgaagtcagtcatgctccgctgcttttcaaaaactctgggccaagaacagaaccagagaggccagagcagttcatgtatttctctcttccatctgaccatctctcatcttcctcacccactcacacggttccgagcaggaggcttaccaggtcaccaggggcaggaaaatttctagcttcaaccaagccatggactgccactgctctttggggattctaggaaaataatcatctaatgaaatgtcagtatttgtgattctatgagaacaattctcaaaacatcaaaaagacatttgtgacttggtaaaataaaaatcaaagaaaaattaaggtatttttagaatctgtaaaatttccttataataggagggaaagtagcagaactattttaagtaaggacatgcttcccttcagtctgtcccggccgtaatggccgaattcccgggcatatgtccggtaccgtcgactg

SEQ ID NO: 93155 - DNA, 976 bp, Homo Sapiens
gggagagacaccaagaagaatcggaacatacaggctttgatatcaaaggtttataaagccaatatctgggaaagagaaaaccgtgagacttccagatcttctctggtgaagtgtgtttcctgcaacgatcacgaacatgaacatcaaaggatcgccatggaaagggtccctcctgctgctgctggtgtcaaacctgctcctgtgccagagcgtggcccccttgcccatctgtcccggcggggctgcccgatgccaggtgacccttcgagacctgtttgaccgcgccgtcgtcctgtcccactacatccataacctctcctcagaaatgttcagcgaattcgataaacggtatacccatggccgggggttcattaccaaggccatcaacagctgccacacttcttcccttgccacccccgaagacaaggagcaagcccaacagatgaatcaaaaagactctctgagcctgatagtcagcatattgcgatcctggaatgagcctctgtatcatctggtcacggaagtacgtggtatgcaagaagccccggaggctatcctatccaaagctgtagagattgaggagcaaaccaaacggcttctagagggcatggagctgatagtcagccaggttcatcctgaaaccaaagaaaatgagatctaccctgtctggtcgggacttccatccctgcagatggctgatgaagagtctcgcctttctgcttattataacctgctccactgcctacgcagggattcacataaaatcgacaattatctcaagctcctgaagtgccgaatcatccacaacaaaaactgctaagccccacatccatttcatctatttctgagaaggtccttaatgatccgttccattgcaagcttcttttagttgtatctcttttgaatccatgcttgggtgtaacaggtctcctcttaaaaaataaaaactgactccttagagacatcaaaatctaaa

SEQ ID NO: 93156 - DNA, 487 bp, Homo Sapiens
tgttaagcatgtatttactggctgtatatactatatgcattgaatttcccatgacttgaaataactatagatcaaagatctatgcaaatacaaattacaaacatgtagattacaagaaatccgaggtgatagtttatgaatctggatttgcccttttataacttcacttcaaatagaaacatcttgtaccctcaagtccaggcaaaaatccaattttaaaatctcattcttaacctttgaaagtagagcctttggaaacagaatgaacttcactttaaagcactgcctttaagaactgtaacatctattttccagagatgtgacccaggaaacaattcatcaatagtttatccattccactggcaaaagttttaacaattctgatgatttcatcatatgtgcagtgaataccatccgtatcatttcacaacaggatcagcagacacagtgctgtcagacaggtctccattgcttgttttagtttctt

SEQ ID NO: 93157 - DNA, 286 bp, Homo Sapiens
caagttaattcactcagtgctccaggcatcaacttcatagaaggaatggaaattctacctgtttcctaaagaactacagaggtgtacaccaaacggagggcaaatgctgttaccactcatcgtgcaagacttttgaggcaatttggacatagacaagtgatgggaaaattgaatcattatatggctcatgacagtgttgaaaactcaaacatccaaggacctgtacctttgctaagtgccatgcatatgttgctgataaagatgcaataaatactcttttgttaaa

SEQ ID NO: 93158 - DNA, 528 bp, Homo Sapiens
tttctaattcttctttaatctaaagtagatagcttcccactggaaagtaaacaaaaccatccctcccaacctcaaagctaggccacactctatttcaaggcattttctttcagctgataaggtgtcctcctgaagccaagtaggtggttctggtctccaagtatcgttaagcacaggtgctatgacagaaaaagttctggggtggaagttttaagatgaggagttctgatcttaggcatcttaacagtcacaaggtgaaaagtcaaatgaaacagtacaattcttgatgagtgaggtgtcatcttccaaccacacagaggacgttttggctatgatcatctgatggcaagtgaaggagaaatgagtgatagggctttgcgttttcatccagatgctgtggccctgtgtttcacagcattaagagccataatttccaacctgcacagatcctgaacaacaaatgaataacgatgaatgtctttttggttgtaatttaacaagtcaaataaaataatcattgctgagcac

SEQ ID NO: 93159 - DNA, 808 bp, Homo Sapiens
  misc_feature (760)..(760): n is a, c, g, or t
  misc_feature (764)..(764): n is a, c, g, or t
ggaccggtccggattcccgggatatcgtcgaccacgcgtccgggaccctgggccagtccttgccgtccatcgcagccatcctcatcctcatgtttacctgcctcttcctcttctccgcggtcctccgggcactgttccgcaaatctgaccccaacccgctaccagaacatcatcaccaccatcttcaccctcttcaccttgctcacgctggatgactggaccctcatctacatggacagccgtgcccagggcgcctggtacatcattcccatcctcataatttacatcatcatccagtacttcatcttcctcaacctggtgattactgtcctggtggatagcttccagacggcgctgttcaaaggccttgagaaagcgaagcaggagagggccgcccggatccaagagaagctgctggaagactcactgacggagctcagagctgcagagcccaaagaggtggcgagtgaaggcaccatgctgaagcggctcatcgagaaaaagtttgggaccatgactgagaagcagcaggagctcctgttccattacctgcagctggtggcaagcgtggagcaggagcagcagaagttccgctcccaggcagccgtcatcgatgagattgtggacaccacatttgaggctggagaagaggacttcaggaattgaccccaggaggacaccagatacagacttcagcccccggcagtctgcccacctgggtgcactgggacgggtccccagatctgctgaaatgatctgntcancggcgcagagcaggggccccaacagagtttttaaaccccaaaaa

SEQ ID NO: 93160 - DNA, 681 bp, Homo Sapiens
  misc_feature (398)..(411): n is a, c, g, or t
agcaacgctgggaaaacaatgacgccccagtattctctgacttaagacagcttcctgcaggtgcactgctgcatggaaattctagcatattctaaccagaagtggcctcggtggccacacggtccaacctccttactttcaataggagaaggaagcccaggacaaggagatgccaccaatcccctgggcagctgctggtgcataaaaccctcacccgggcaagggagcaccgtgggccctgtcctccagccctcgcagagcctggctgctggcacatgactctccttgtttcctttttaaaaatacctctctgttcctaaactctactcttgagggagatgacagaggtgccgaggtctgaggcaggcaaggctcaatgcacgcaccactcgcagtannnnnnnnnnnnnnagaagagcctccacacctccagggtcatgaagtgctagcagaacctccagcccccagggaaagcctgtatttcagaaaaggggccctggtaattatctgggcaaacatcatctcattggggcctggaaggcaacctcctcaacacagttctgattagtaccaggcaaagttcatactcttaagtgctggtccttaacctgaaatctcctaaaaggacaatgaagtgttgcatggatctcctccgctgaaatattaacctgtgcactgaaa

SEQ ID NO: 93161 - DNA, 658 bp, Homo Sapiens
gcatcatcagtatagttaagagctttacagcccacctgttaaacagcttccagcagatgcttctgggagctgattttccagactgtaacaactttataatttgagcaactttaatcaagattcttaccttggcagatgccagctttttgcttcaatttcataccaggctcttctgacactttgtttgttgaaaattttgctctttatttgatccccaatgatttcttgcttcctgagttcctctagattaatatctaacagctgtttatgtatcatgtgaaaatcttatataattaagactttaaccctctacaccgtttattttcaaacctagactgtgttaacttattctgtagtttgaagaaagtttcttccatgtcatttcttatgcatactctaaaataaagagctacttaatggacagtgatatcccacagcccgtaaatattaatatgagtgccattagttagagtggaatacactcatttgtgaatgtttttaaagaatataaatgctaatttatttttgcattacaggatatattcttagcatttggaatcattttggcttaactggtatcaactcttctcacataaataaatgaataaatgaaactcaaattgctagcccccagtgacacaagagaaactgacttctg

SEQ ID NO: 93162 - DNA, 505 bp, Homo Sapiens
tccttgtttactagaactggtggtttatgcttgtcagagcactattagttgaatcatattgtatacttatgtaatctacattagctagtactgtttaggactatattttaattgctcttcttatcagtgtttttaagacaattaaaatggtgtgattcacctctcttttttatttaggtaatgctgatattctcccttttgtttcttgagtagcctagaactatgctactcactgatgtgcatgttcaaataaattactgatgtgtatttttttgctatatgtggagaaatcatggggaactcggggcgagatgtgcttttcgttggttgaatttgtccctccttgcctaagaaatactacaggggtcatccttttataaggacaaactgcttttgaacagtgtcttcaatgtatcaagcacaaataactctttcttcaacatgaatcataagtctctttttaccagcttaaaataataaacaagtctattagacaatgtaaaga

SEQ ID NO: 93163 - DNA, 521 bp, Homo Sapiens
cgcgccaccgccatatttgctgcttgctaataataccaggcaaccgtcctcccgcggctctgtggagcttgtagtctgaaggagggagccggaaactataactcccaggatgcacggctcccagacggcccaattggctcgtacgcctaatgatgtgaagctggagttagaatctgagggtagtgagctcagggaccctggcccactcgcttatttgacagatgagtcaactgcgttattagatgatcatttcacttccttgtccaggcgtttgcgaaatttgacacttttaccatcgggatgattgtaaggaagctacttaatgcagactgcattttacaactcattgctggaagtctctgtgggggctgctccattcttttgataattgtgaataagttgaaagttttcaactccgctataggaatgaccgatcttgttgagatcataaaagtggatacattttatttgaaattttagttaagtaaaagtaaagtatgccgaaatagaaacttttaaaa

SEQ ID NO: 93164 - DNA, 512 bp, Homo Sapiens
ttttaaaatgttgcagggaggagaaaaattaggttccatgcaaagaaataggaatcagatggtattgagattttcagtagcaacaactgaataccacaatacagtgaagtagtgtcttccaaaagctgatggaaaattattttaaacacaaaatcctatatttagccaaacagtcaatcaagtgtaaggctaaataaaggcatttttcagtcatacctcgaaaaactgcctgtgtagggatatttcccctgcttccccactcaggcagctgctgggaatgtattccaccaaatgacgaagcaaaccaagaacaaagaagtgaaggatctagaaaatgggctccaacacgggaaggaagcaaagggagatcccacgcatcagccacacagtaggtcttgtgggcattcagtctagcccagaccgggagggtgaaagtctccaaggaaagaggtgtctcggaagaaatcaattactttcaatgtttgaacattaaatagcaaatgacaaagcaa

SEQ ID NO: 93165 - DNA, 789 bp, Homo Sapiens
ggcacgagggaggcctgggacgctgttcagaggggtgacccaagaagtcaccgttgttatccgtgtatgcctctgggcatggacaggcgggagtccccgagccccacgtatgccccatctgccgccttgatcccaaaacccagccagttctcgggtgatggtggagctgtgctcccttgagtgcacttgagcactccccagaccagatcactttttggacacacccaggaaggcttttgaagtcaagccagtttccagaagggctggggtgagatcctgacctgtgcagagagtggggaggcgtcagcgcctggccagggctgccccagtcctttggtgcccggtgagcgcagccagcaggagctgagcagcgggggagatgaatcacctcctgccttggcgaggcggcagctcattgtttacaggcaagccctgctcctgggagggctcctgccaccccacccttcctctgggtggtatctctgccccacaacagcccctgggcagcaccagtggccactgggctacccccggggttgaaacgggtttcccagaccaggggttcagaggagactatttacccttcatgatctttggcgattctccactggagcggaagggctgtgtgtcaaaagaaggaagccaggcaccgtggaaagggcagtagacgtggagccggcacctctggtctggattccacttaaaaccagttgagtggtctcaagcccttaacctctgtaagcctgtttcttctctgaaatcacagtaataaagcgtcgtaagatggtt

SEQ ID NO: 93166 - DNA, 532 bp, Homo Sapiens
ctgtgaagggccgtgttgctttcagtgggtgggcagaggtttagaaaggtggttctgaaatggcacctggtactcttgtgggacctggggaatataaggaactctgtgcatgaggtttcaaaaataaaaattgagtccactctccccgtacacacacactcgggcacttcaggaggtcagttctcaccccttcctcgatggggctttaaagctctggggagaagagctgctccccactcatgccccagagggactgtgaaaaggcttcctgtgacctccgatggcggcccctcattggccaagggcactgtggatgttttgtgggaggcagcatggcaccgtggaaagggcagtagacgtggagccggcacctctggtctggattccacttaaaaccagttgagtggtctcaagcccttaacctctgtaagcctgtttcttctctgaaatcacagtaataaagcgtcgtaagatggttgggaagaaccaaaggtgacttatgcaaaagctttataaactgtaaagatcctgc

SEQ ID NO: 93167 - DNA, 270 bp, Homo Sapiens
  misc_feature (37)..(37): n is a, c, g, or t
agccaccccatcccagggaggaagagcactcacagcntgctgctgatctccttccaggcgttccgctgggactaggatcaggatgtgacacccccaatctggaccgtctagccggggagggcgtcaaggccaggtacctcatgccaccctttgtcacgatagctcccggtcccgcttcactgccatcccgggtaagcgccactctgcccatttcacccggtgcccatcaaagccccagcgtccgtcattcctggaataagaagcagagct

SEQ ID NO: 93168 - DNA, 699 bp, Homo Sapiens
gggccgcggtggggcccgcgcgtacatcgggctccggacccagtcgcattccgtcgtccggcccgctgctgccgccgcgcttctacccgcgctacgtgctaccgctcgccttcggaagtacttcgcgtccgtgtcagcgcacgtcagcatctggaaggtgcccgtgtcctatgcacacaccgtcaaggccaccatgcccatctgggtggtcctcctgtcccggatcattatgaaggagaagcagagcaccaaggtatacttgtcactcatccccatcatcagcggtgtcctgctggccaccgtcaccgagttgtcttttgacatgtggggactcgtcagcgccctcgccgccacgctgtgcttctcgcttcagaacattttctccaaaaaggtcttgcgagattcacggatccaccatctccggctgctcaacatcctgggctgccacgccgtcttctttatgatccccacctgggttctggtggacctctcggctttcctggtcagcagcgacttgacctacgtctaccagtggccctggacgctcctgctcctggctgtcagcggcttctgtaactttgcccagaatgttatcgccttcagcatcctcaacctcgctagccccctgagctactcggtcgccaatgccaccaaaagaatcatggtcatcacggtgtccctgatcatgctgcgcaaccc

SEQ ID NO: 93169 - DNA, 443 bp, Homo Sapiens
agacccagagaagatgtggagggagctcagaggctgtcctggaggagacgtggagacagctcagaggctgtcccagagaagacgtggaaagagctcagaggctgtcccagagaagacgtggagagctcagaggatgtcccagagaagacgtggagagagttcagaggctgtcccggagaagacgtggaaagagctcagaaactcagagactgtcccggagaagacatggaaacagctcagaggctgtctgcaagaagacgtgcagagagttcagaggctgtcccggagaagacatggagagagctcaaaggctgtccacaagaagatgtggagagagttcagaggctgtcgttactgctgcacttggctgtttttctttggataattattgcaatcaattttagtaattcaggtgttaaatcacagtcaagcacataaaaaaa

SEQ ID NO: 93170 - DNA, 438 bp, Homo Sapiens
gacgtccaagaaatgctaaaacctgccaagaattctagtgctgtgatacaaagaaaacatattttatctgttctcccccaaatcaaaagcactagcttttttgctaataccaactttgtcatcattccaaatgccacccctatgaactctgccaccatcagcactatgaccccaggacagatcacatacactgctacttctaccaagagtaacaccaaagaaagcagagattctgccactgcctcgccaccaccagcaccacctccaccaaacatactgccaacaccatcactggagctagaggaagcagaagagcagtaatgtggatctttcccttaaaactccaagttcctctctatttttgctatctataaaatgacatagaactgtttcctctgtcatcagtcattcaataaacactgtttgagcacctacaaa

SEQ ID NO: 93171 - DNA, 999 bp, Homo Sapiens
  misc_feature (813)..(826): n is a, c, g, or t
tttgacttgcagaaccaaacactgtacttctgatgtgttttacaagcataagttccgttaaaagacaaaacacgttgaagttgcattttcccagtttcccacttttgatccctgacatacttagagaaccctggccctctccaaaagaaccgttttgtttttttccttcttacaaggaaaaaaggtcacgcacatgtagatgaggaaactgcaattcaatagcccacttgttttcttcctcttaatatgttcacaactgccgtagagtggtgatcctaggtatgtaaaatcagttacgggaggaagaaatctccaaactacgatatcctgcaagaaatgtctgaagcacgaaccgaacaaaacacattatccagggcactgggtcagcccaaaatgaattgcacttatttgaagtttcccatcctttgtaaaattctttctccaggagctgagaacagaaactggatgactgatgacccaagttccaaaggctactaagttgcttatttaaattgacttttaaaaagaaacgttaaggaaatgagatttcttttgtaagtgaaattttttagcaatgttcagtgaatttgaaactatttccccaagcatttaaaaagctcacaggcatgtcaacacaacggtttattgttttccattctcaaagaaatctcatccattaagacctagaagccccagtaattaagtcaaaaactgtattttggtaatctgtttttgaaatgtcacagtactgccttttttccccccagactgatgtaccagtattagttaaaaatcaaattaatggatgttgcnnnnnnnnnnnnnngggtgtcactcagaatccctgatttaataacaaatcttattatacacttacaaacttttacatttttattttctctgggtgagagatttaacttgaaagcaaatcaaagtctcctagtagaaaaaaagtctgttgtgaccatggaaatatggatgttctcgtcataaaacccc

SEQ ID NO: 93172 - DNA, 532 bp, Homo Sapiens
ccaactctactcagtgcccaggaagatactcctgaccttctccatgaggacagattacagtatctgcaggaagagggttccggtgtgatgcatcaggaatgtcagatccagtcctgtgagctctcggtggctcagaagcccaggccctcttctcctgcagtgacatccttggcatcaccaccactctgctttggcagtttcctaagctgtgtctgccagaccttctcaaggtctaggaagcagaagcctcccagaagaaagggtaacaaccaggctgaggcaggaggtgatgctgaggtcctgagacctggcccggcaaaaccagagttgagcctcagcaaaacgtgtagccacttgaaattgatagagctttcctttgtgtttagttttatagttctctctgtatgtcattgttcctcttagttgagtttttgcctgtcaaagagatagagagctgcttttatgctgagatcctcaagccaaaacccacagtaaacgcaaagtaaaactttgaggctttgaacttttaaaa

SEQ ID NO: 93173 - DNA, 539 bp, Homo Sapiens
caggcatgagccactgcacctggcctgaactaaacagtcttggtaaggctttattctattgtcattcatgtcatttcaacggctttcatttttttgacttaactttgatctcaacgtctctaggaatcgaagtcaactatgaaaatgatttttattgtgggtaatggtaaaaaagagagagaggcgtgagccaccacgcccggccaaaaaaattatttaagtatgcagtaaactcaaagtctgtgtggactctatttgcagggtatgctttttccaagccagatttgatcacatggatggaacaagggagaatgctattaatcagcgaacagggatgcttagataaaacaagaaggacaactagccctcctactgatgaacagttgaacatgaagaatactggaaagttgctatgttttggtgagtaagatggatttaagatcatgaattattttattttcctagccttgtttcctgaatctttctttttggatatctgactagatctagtcaataaaaaaagttgttttgatggagaa

SEQ ID NO: 93174 - DNA, 796 bp, Homo Sapiens
  misc_feature (671)..(672): n is a, c, g, or t
ctttgtgtgagagagtatgaagtcgacggcgcgccgaattcggcacgaggggaacaagggagaatgctattaatcagcgaacagggatgcttagataaaacaagaaggacaactagccctcctactgatgaacagttgaacatgaagaatactggaaagttgctatgttttgatgatggacttccaaaaccagaactaatatcctggattgaacacgggggagagcccttcaggaaatggagagaatcacagaaatcaggaaacataatttgctcctctgttgatatgcattttgatccaggttttgaggaacagctgttttggggaagccagcaggctatgaattcaggaaaaactaaaagccatttccaattagatcctgaaagccagtgttcctttggatcctttgtttccttcaggcctgaccaaggcatcaccctcgggagcccacagagacacgacgccagggctcctccaccactagcctgcggccccagtgaatctaccctaaaagaaggaatcccaggtcccagaaatctggatcttcctggtttgtgggacgtccccgcctgggagagcacccagcacccttggcctgtctgcggggaaagctgttgggagaacaccatttagtatgcaccaggaggccactcaaaggacggaacgtaggnnctggagaaatcacaagagggcgaaaccgatgcctggacagcctcggtacgagcactcggggtgcgtgtgcgaaaactcgcggaactttctgtggcattggcgcccccgggaggtccttcgacca

SEQ ID NO: 93175 - DNA, 496 bp, Homo Sapiens
tgtgcttcccgcttctgctactgctgtccggctggtccgggacagggcgggccgacacacactgtctttgctatgacttcatcatcactcctaagttcagacctgaaccacgatggtgtgaagttcaaggcctggtggatgaaaggccttttcttcactatgactgtgttaaccacaaggccaaagcctttgcttctctgcggaagaaagtaaatgtcacaaaaacctgggaagaacaaactgaaacactaagagatttctcccttctctcccacacaagcacactaagacaaactgaaacactaagagatgtgggggatttcctcaaagggcaactgcctgacattgaaatggagaatgtaatacccatcggtaagtttaaaatagtccaggacagcagagagcagacacagtagtgtcttagaggcatttattggtttcctgtaaaaaataaatcagaagtttgtgtcacccaagtggttgaggagcatgggcc

SEQ ID NO: 93176 - DNA, 624 bp, Homo Sapiens
ggggttctctcactccgggaaggcctgggctgaggcggagaagtactgccagctggagaacgcacacctggtggtcatcaactcctgggaggagcagaaattcattgtacaacacacgaaccccctcaatacctggataggtctcacgaacagtgatggctcttcgaaatgggtggatggcacagactataggcacaactacaagaactgggctgtcactcagccagataattggcaccgcgcacgagctgggtggaagtgaagactgtgttgaagtccagccggatggccgctggaacgatgacttctgcctgcaggtgtaccgctgggtgtgtgagaaaaggcggaatgccaccggcgaggtggcctgaccccagcacacctctggctaacccataccccacacctgcccagctctggcttctctgttgaggattttgaggaaaggaagaaacactgagacaggggtatggggaagagctgagcaaagagagaaaggaggtagtttaagagtccctgaccctggaggactgagatcccacctccttctgtaattcattgtaattattataatcgtcagcctcttcaatggcgtaggaaagaagaaacaaatgcttgaatctc

SEQ ID NO: 93177 - DNA, 533 bp, Homo Sapiens
aatcccgcttctgagtgaggaaacccatgatggtgctaggggatccacagggagggcagggcgctggagcagggggatgtgacatctggaatccctttctggcactgttgccctgagacaagcagtatgcccgtctgcttcctgccagcctgtcccctggggcctcagcaccactgggccagaggcttaggaccccctcctgggagcccccattgcagagggcaggctggggccagggcctgggatggcaagtgcagtggtgagagaccctgcaaaggccgccaggtctgtgagtgcctggacggatgctaaaggggcacccggcgaggcagggcctgcaaacatgggcttccacaaggttttcatcagccttaagataaatacactaatgacattcaggacattgttacagctcagaaatggaatccatcactgtcctttgcccttgataattaattccagcatcaatgatctgagagctactggtagtcatttttaaatcatcatctcataaaaagaattttctcagcaaa

SEQ ID NO: 93178 - DNA, 389 bp, Homo Sapiens
gaaggatgttaatcatcttgaataaacacataagcaataacgtgaaataactctttaaagaacgtatgtagttccattttattactccaaagtcagagataattatggttattaagacagcctctttgggattccagcgtgtggtaatataatcatagtttaaatttgagttaaaattatagaatctcaattttgcatgtatttataacttgattagaaaaatacacctcaggtggaaaatgagctcctttatttgcacacatatcagtcaagcgattttgacaaagagcaaggatcttgatttttattaaaatgtagaatacagaaagcctgatctggagcgctctttccgtggatagtatacaataaacagtagcccttgtaataac

SEQ ID NO: 93179 - DNA, 534 bp, Homo Sapiens
gcttcaaatatttccctcacctttcccatcttccaagggtactaaggaatctttctgctttggggtttatcagaattctcagaatctcaaataactaaaaggtatgcaatcaaatctgctttttaaagaatgctctttacttcatggacttccactgccatcctcccaaggggcccaaattctttcagtggctacctacatacaattccaaacacatacaggaaggtagaaatatctgaaaatgtatgtgtaagtattcttatttaatgaaagactgtacaaagtagaagtcttagatgtatatatttcctatattgttttcagtgtacatggaataacatgtaattaagtactatgtatcaatgagtaacaggaaaattttaaaaatacagatagatatatgctctgcatgttacataagataaatgtgctgaatggttttcaaaataaaaatgaggtactctcctggaaatattaagaaagactatctaaatgttgaaagaccaaaaggttaataaagtaattataactaaa

SEQ ID NO: 93180 - DNA, 490 bp, Homo Sapiens
tttggaaaatttgaggtgagtttaattaaaaccactttttacaaaggaatgtgcagggtttagatgaagcaagaagacatggcaggcacagtacctcgagggtaccaatagaagggagctgctgccagccctaggtctggaaacatacagggaggaaagaatagacccagatggcaggctggacaagaggttccctggcaggggctgtggcctttggtagaggaacaaagccaatcctcagcgacttgacagacaggcaggtgggataacaaacaccgtgaccttgcactcctctgaagctccgacttcctgcagggagaaacctttactggaaaaacccaaccattaaacaggaaacccaatggcaagggagccttacctattttcaacaagaaaagagaaagaatctgtttctgccacctttttatagaacattatattttaacaaactttttttcagttcaaagtgagtaataccgcatcctcttca

SEQ ID NO: 93181 - DNA, 302 bp, Homo Sapiens
ccactagtcccatgaagtctcaccttgttgacttccaccagaacaaaacctgttaattcagcttgacttctcatatgtgttctgtgttcaagctcctgtgggcaactcaattgttttaagaaaactctatttctgttcatattaattcacttgccagactccaattctgaaagttgtctagttcttccttcatcacacgtgcttctcatcgaaaccctggtttcaggatggatcaagtgctgttacagctcatgttccttagacctgatttgttttgatattttactgcctatcatattaat

SEQ ID NO: 93182 - DNA, 479 bp, Homo Sapiens
ttttttagactaattagtggtacaagtctttaatagctgattatagggaagtcattccccaccccccaagtgattgatttatttattgctgttgtgctgcattattgcaaaatagtcagcttctaattatctattggctggttcaatcaggccttttccttctcttccatcttgttctttcccttgctaagggaaggcacaggcagaatgggagaactcaagccagctgatgaccaattctggacagatataagtgttgggatcctactgccactccatcttgagtgcttagagctggaaggggaatatgaggttcaagggaaaagaaggcaagaaaatcccactcattcttctaggataacgtccccatggtggccattccctcatcatccctctgactctgcacgccataactcacacacattgtcagttgcattaaaaaacagtatagttaggaaacaagcatgagaagacacaaa

SEQ ID NO: 93183 - DNA, 531 bp, Homo Sapiens
cagttgttgctggtccaccaccatctgcaggagctgtgaacagaggactgtcagggaccattgtcgctgctgaaggctgccgacctgtggactctcgcactgcctgtgtcaggcgtcaggccatccgcgagcccctaacgaggtgtgggagtgtcatgccatccatgtggaaactgaggccctgggagattaagtaacttcccatctgctgtagtcagggtcgggcccttagtcaccgtggtctctggaacccacaggcctgtaaacagcgcttttgagcaggggctcagcgaggctgggggtcagactagtggccgaggtgcgcctgtgtggagatctgagggtgacgtaagtagaggaactgacgtgagggcccctcatgcagtgtcaggcttgcacctttgcttggaaattccattagctttggaatttatagcttcgtggtgcagtgtggagttatgttggagataccagaaagataaagcatttccatggtgaacaaaaaagtttgcaaataaaagcagtccaggc

SEQ ID NO: 93184 - DNA, 600 bp, Homo Sapiens
agcaattatccccgctgttggaactgcggcggcccatggggccccgggcgggaggacaggttcttctgcccacagtgccgagcgctgcaggcacctgaccccactcgagactacttcagccttatggactgcaaccgttccttcagagttgatacagcgaagctccagcacaggtaccagcaactgcagcgtcttgtccacccagatttcttcagccagaggtctcagactgaaaaggacttctcagagaagcattcgaccctggtgaatgatgcctataagaccctcctggcccccctgagcagaggactgtaccttctaaacagaaagaatttactgacaatgtgagcagtgcttttgaacaagatgactttgaagaagccaaggaaattttgacaaagatgagatacttttcaaatatagaagaaaagatcaagttaaagaagattcccctttaattgtggatagtttaaagtttaaaaaataaagttcttgctgggattacaggtgtgagccaccgcacctggctacttaaatgtgatttatactatgaatatgctttcaaatccattttctgcatataaacttcaaacaaaccta

SEQ ID NO: 93185 - DNA, 795 bp, Homo Sapiens
  misc_feature (23)..(23): n is a, c, g, or t
ttcccgggatatcgccacccacncctccggatgtggcgggggagagccggggctttgctccgggtgtgggggttttggccgacaggggttcccagaaggagaccgctaagctgcgatgctgcgtcgcaggcgggaagcaattatccccgctgttggaactgcggcggcccatggggccccgggcgggaggacaggttcttctgcccacagtgccgagcgctgcaggcacctgaccccactcgagactacttcagccttatggactgcaaccgttccttcagagttgatacagcgaagctccagcacaggtaccagcaactgcagcgtcttgtccacccagatttcttcagccagaggtctcagactgaaaaggacttctcagagaagcattcgaccctggtgaatgatgcctataagaccctcctggcccccctgagcagaggactgtaccttctaaagctccatggaatagagattcctgaaaggacagattatgaaatggacaggcaattcctcatagaaataatggaaatcaatgaaaaactcgcagaagctgaaagtgaagctgccatgaaagagattgaatccattgtcaaagctaaacagaaagaatttactgacaatgtgagcagtgcttttgaacaagatgactttgaagaagccaaggaaattttgacaaagatgagatacttttcaaatatagaagaaaagatcaagttaaagaagattcccctttaattgtggatagtttaaagtttaaaaaataaagttcttgctgggcacagtggctcacac

SEQ ID NO: 93186 - DNA, 529 bp, Homo Sapiens
atcaaagtaccacatttcttcacagcagactcttgaaatgccagaggtcaaaatcattacgtgctgggacaaaagacagggtgaggggctggagtgaaagccttggcctggaggagctgtttaccagggaacccaggcaagccgtgggcgtgggctgtggccctgcactttgatggctggctgggtctgggtggcctgcactcattcgcctcctgtctcaccccaccaccacccaagatgaagccatcttttctggctcctccttctttttggtagaaatggtaccagcttgtgtggtctggagggaaaggacttaagggtatgaacctctcagcagccatgatccttataggacttagtgagctatttagaggtatctgagggaatcagagccttgagagcccagtagagacatcactgttgactattcaaaaaggcattatttagagcagggttcacaagctatggcctgtgggccaaatctagctggccaactgtttctgtaaataaagttttattggaacacaaa

SEQ ID NO: 93187 - DNA, 544 bp, Homo Sapiens
  misc_feature (81)..(81): n is a, c, g, or t
cagcccctgcaaagtgactctgaagaagatgacaagccctgctccagtcacaccagaaagctgactggtccacgcatggcncgaagcatgagaaaactcatcgcagaactcattttccttaaaatttggacttttacagtaaggacttcaactgaccttcctcagactgaggactgttccagtgtatacatcaagtcactgaggtaggacaaaaggttgctacagtcctattattttatggttattataagtgtactggaactctaaaaataacttgtttgtataatgttattctgtacaaggtatgtagcccaggaagtgaccaacctgatgtgtgttatgacccatctgagcctcccatgaccacggtttttaaaataagattaaggactgaggactggtgggggctcataaatgatatgagtaaagtgttagccaaaacagaagaaaaagaggtgcccaaacaagtcaccttaaaatttgatgcctgtgctgtcattaatagtaataagttaggaataaagtgtggttctcttaattaaaa

SEQ ID NO: 93188 - DNA, 684 bp, Homo Sapiens
ttgctcaatagctcacaaaatatcttgtgccttctaggagttaccatgtcaccacagggaggtagagctctatctctcatctctaaaaattccatttcctaggttctctcacagttagtgtggccatgcaggtgaggtctcccaagaatgtgagcagacgtgaggtgcaccatagctgagccaaggcctacaggccataggtgtgcccactccatgtgctctccgtccgtctgatgggctggatgtagatttcaatggggttatgggagatagcagagccacagaaggaaagctgtatggccccctgaattgccacgtgaggaaagccacccaccgaagtgtgttttggttgttacatgaacaagaagtcaacctgtgcatgtgcgagccacggtacatttgctggatctacttgtgatggcaggtggtccaattccacagtgacagaaccaggtcaagagcaagtatgctgcctcttgtgttgtaaagggatttatgcagcagatggcccagacagagacccgaaggtactccagaattccttctactcagaccaagtggcaaccccacccctgctgtacccagctgtgaaacccaggctcttctcagtccagaagaaccaccacaaatcatttctgaaaatgatatctgtagaataaataaataaatgcctcaagtgataaa

SEQ ID NO: 93189 - DNA, 1229 bp, Homo Sapiens
  misc_feature (76)..(110): n is a, c, g, or t
aaagattgtatagatatatagggcactcgtgaagcgaatgacgagcgcagcgagtagtgtagcgaggaagcggcgnnnnnnnnnnnnnnnnnnnnnnnnnnnnnnnnnnncagtcgacggtaccgggcatatgcccgggaattcggccattacggccggggagagccgaaagtagatcagaaacttcccaggagctccgagaggcggggaagtggcggtgggacgcaattccccgcgcggagtcgggcagtggcagcgggagaagcggcagccaggggcgcggcggggccggagagaggcggtcccctgggaggacggggtctcccctcgttgcctttgtagtggagaaggtggacaagtggcagtcggcgtgatcgcagggaagcggggccggcgcgggcggccgagggtccaggcgagcccgcgggcggacgggagatgccgctgctacaccgaaagccgtttgtgagacagaagccgcccgcggacctgcggcccgacgaggaagttttctactgtaaagtcaccaacgagatcttccgccactacgatgacttttttgaacgaaccattctgtgcaacagccttgtgtggagttgtgctgtgacgggtagacctggactgacgtatcaggaagcacttgagtcagaaaaaaaagcaagacagaatcttcagagttttccagaaccactaattattccagtggtatacttgaacagccttacccatcgttcgcgcttacatgaaaatttgtgatgatatctttgcatatggtcaaggatcgatattttgtcgaagaaaactgtgggaagtcattaagaacaatggtgccagggaaagtacttttaattttttcctcttgggaagtttatattcacattgctccaaatcccaaaaaccccaagtgggggacttaagggaaatcttcccttttactatgctctaactattcttgttaaccccagaatagccccgggggttagctggttcttggatatcctttcccaagttatttatatatttgccccccaaaaccttattccggcatgcccccggaatgtggatatataacctggggtccttatggaacaaaactggccaacaatttccttccccttttttaatggcgcaaaaaacatacctttcctcctgaatcccctcttttcatttaaaaaaattttggaagaggtaacccccttgttgtaactaaggcccgcctttctctttct

SEQ ID NO: 93190 - DNA, 431 bp, Homo Sapiens
  misc_feature (401)..(401): n is a, c, g, or t
gcggccgcgctgctgtcactgctgcccgagttgcgtcctcctccgcactggagagcagtgccttccacttgacccctgcgtgggcgggttatgtaggcaccaaggccttgttaccggcatctgtgcagggcttggatgggggagcggctacgggagtcagtgtagatgtgtgaccagaagccttttgctcaggcagctatcaataaggcaggatattgttgggagcgatttggaagggacaagcctgagaaggtaccagtggcctcgggggcatgggagaccggcaaggactcggccccctccttggtgcctgtgggcggagaggttctctctggcgcatgcagcaggcctctgtcgactgccctatgccttgtgagcgcctctgccccttagtgctgctnagcgtatgcgtcgggccacaggccacccag

SEQ ID NO: 93191 - DNA, 476 bp, Homo Sapiens
ggttggatggatgcagacccgcttgggctgttcccccaactcgccacgcagcctgcagtggagttggctgcacagtgaagtcaggggaactttgctgagttctctgggccctgagtgtccccccaggagcgtggttggagccagtcaggaagcctgttgcactgtggggagccctgccctgccctgccacaactgtgatcctggagaaatcctcccatcttcccttcccacgttggggcctttagggctccacacacacctctgcccactgtgccctcccgtgctttggggcaaagtcctcagagaggccagtgtgggaggcggtaggtaaactagtgctggtggcttgaagctccgggccaggtaaacgggcagatgtggcagggagacacctgccactgctagaagattccaccctggctggctggcatggtcagccttttcccaaggacttgtgggaagaaggcctgcaaagc

SEQ ID NO: 93192 - DNA, 689 bp, Homo Sapiens
aatagtcaaaaaggacttcatttaattagtggtatgtaaagactcttgcatagaaaaaggttacaaagtaatgcaaaaaagactaggtacagtaatttcaaaacaaatatttaaaagtataattttgcataacgtttaacattctcataatgtttattgctttctccacacagtagagaaatgaagtgcataatacatgctgtgtctcttatcttttaaacaaaaactctcacgtgcttgatttcagcatattaagagattattttgtcattaaacgaaatcgaaaaaaacaaaaccacaaccccattacatagcactagtttaggcatgggcaaaaataacttatgtacatcccattgcatacattcatcttgttttgggatcaaatgcaatcactaacttgacaaagagctttaaaaattgtagcttttctcttcctagtgctccctccttgcttcatcacctccagaaatgtaacttctcccaaagggtgacaagaatagatgttgcatcattaggagaaaatgaagaggataaatatataaaaatagtcctaatgaaactgaataaattaaaccaaactcctacaaactggagagttttcaagttggcatgaattaaatagcctctggtggacacatggtaggcaactgctcataggtgcactatataaatgtaaggtttatata

SEQ ID NO: 93193 - DNA, 468 bp, Homo Sapiens
tgactgcattattatttcagattcaaattcggtcttcatagattgggttttagaagctgccagttttcatgacatatttgataaagtgtttacaaatccagcagcttttaatagcaatggtcatctcactgttgaaaattatcatactcattcttgcaatagatgcccaaagaatctttgcaaaaaggtagttttgatagaatttgtagataaacagttacaacagggagtgaattatacacaaattgtttatattggtgatggtggaaatgatgtctgtccagtcacctttttaaagaatgatgatgttgccatgccacggaaaggatataccttacagaaaactctttccagaatgtctcaaaatcttgagcctatggaatattctgttgtagtttggtcctcaggtgttgatataatttctcatttacaatttctaataaaggattaatatgtcagcaaaaaaaa

SEQ ID NO: 93194 - DNA, 872 bp, Homo Sapiens
ctctgctgcagatggaacaacagccatggagaatgagggtcacctgaatgtggaaaagttgagttggagcaaaactggcacggccatactggatggacctcagcatgaccaggacacatttcagctcaaatcccctgtgccaagaacacattctgccaaggaccaccacctcttcccacaactagagctggcttaccagagcaccgatggacttggatacctgagatatctgcttgggatcccacactttcaaggtctctcctctggccttcttctggttctgcgactccttacagcgctgggagttggtgatgccaacaggacatacgctcccagagcctacctctcccagatcactttaaaaggcacccaggaccccagaattctcatcctcaaaggcatggagctcagctcttggccctcaacaaatctcttccccataaagatccttttgagagcttaggatgtcccccggatggttttggttgcagattgtggtggtggagggagctatacaatttaatctattgccattaattggatgcgctaatggcagattgggtagtgataatgccataagaggtagtgtgtgagccgtgtgctgcatctgtgctagctcaggtaagtcagcacacagcacctgcagcctcctctcacctcttccctgagcagcaccttttcacctgaacatgctgatcccctagtgcttcatcttgacagcaacttaacaagccctgggcagctttttaaaataaatgactatgatattgactatgaatctacataaaagccacttgttttttagtcataatctgtgtctaactgcagaagaaattcacacctttgaaaaacaaataaaaatgtaaaaagtg

SEQ ID NO: 93195 - DNA, 454 bp, Homo Sapiens
cacgagaaagaaatcgatccgtgtcttgtggctgtgggaacggaaaaggagctgcaggtgaatggggagtgatggcatcacagtggcggtggtgtgcagggaaaggcgtgcacgggccatgctgtggagcccatgggctcatgctgctggccggactttttccattgattaaaccttttagtggtttgggttcacaaagcttgtggtaagtccatgacttcccttagagagaaaagagagaatagattctactgtacttgccttttcctctgaggaaaaggaatattataaaaggctgaagacattattttattatgtataatagtggaaaattagggagaaaaactaaatgttcaatagggccatggttataaaaacagtgtagccatacactgtaatattctgtatccattaaagaattatgggaaattagttttaaaataatgctaagtta

SEQ ID NO: 93196 - DNA, 436 bp, Homo Sapiens
ccctcttcattgatcatgtagaagaaaacttcacaaattccttccatctaccctagtctgctagtttcagaaatacactctaacatttgtggattaagccatggatgagtgttcagtatctgtttgtcaagtagatttctaaggcatgtgctgatgagaatgtcagtcacttggaagtgattcttggctggagttggggtggccatatagttctctaagctaaatgaagtttgacgaccttatttattaggctggtgtctcgaacagatctgtgtttgccagaatgaaagtcattttcacatttgaagtgcattttatcactttgaacatctggacagcaagagaggcctttcttgcatcaaacaacttccaggatgtataatgttagatcaccctgctacccaatccccagccagcaggttctgaatttccaaaa

SEQ ID NO: 93197 - DNA, 908 bp, Homo Sapiens
  misc_feature (617)..(651): n is a, c, g, or t
cttttctttgctaccataacagtttaaagggtcaagagaagctaatgatgtgcaatgatcgactaggtaaagttaactattgttcttgtcttcagagatgcggcagagttactttacgtgaggtatttacatctacttgctaaatcttaagaactgttactcataattacaagacacaacatagcttgcttatttgtcttgcatgatgctatttctgaaatcactagacatacagtattacattcataagaacatctatttcctattttctatagctttgaatttaccaaactaactttaagttttcatgaagatcctaactgacatacagaataagcttgcatgtgagataacattccagctgagttatgctcagtttttaagagcttatctttatattttcaaatgacatttagagatttcccaagcatactatgtcctttacatatacttaaaatagtggatgaatataagttagtcttctcttaatgaagtcggatatacttaaaaaaaattgttaataatgaacagcaatagaacaaagatttcaagggcaagtaaactctttgaaatatgtttaaaaatattaacctttttgccttcccaccaaatgatcnnnnnnnnnnnnnnnnnnnnnnnnnnnnnnnnnnntcattcacagtacaggcaggctatgcctgtctaggtgagattctaaagagcagaactgtctcattgtcatcatacgtctccactcatctactcaaggacatgttcttgatctctatatctgccaccagcagttcccaagttcttcccaatctgtctctcttatttactacatgtaagtttctgtgagctgaaaagccatcttgccaaacttgcaagaattttgttcaaaattaaactaggtttgaagataaaaaaaa

SEQ ID NO: 93198 - DNA, 383 bp, Homo Sapiens
aacaactctagagcagttatctattgctgcacacaaactatggcaaaaagagtggcttacaagcagaagacttaaaatctggcagtttctgtgggtgagggatctgggtgcggctggctcagggtcttgcacaggccacagcatcaaggtccccagggctgctgtcatgtcatgtccaggcttgactggagaaggatctgcatctggtcacacgttggcagcattgaggtcctccagggctgtgaggcggaggctcactctcccatcacagggcagctcacagcaaagttcacagtgcagctcacagctcaaagttccttcatcagaccgagcaaaccaaggtggaagtcacagtcttttgaaacccaggggcctggagagag

SEQ ID NO: 93199 - DNA, 343 bp, Homo Sapiens
catcgtggtgtgatcactgcctctgtgctgattttgtagtgagatgctgcagacttgtggcctgtacctgaatggatggggagggagagtgaaggaggctgctggctttccttaggtgttcttgctcacagcctggacagcagagatggagctgagcacctccagggcaggcctccatcagctggggaaaagcttctgagtaacatagcccaaattcagctctacctttcctaatctcaaagcaggaatgaacggcagctggatttcagcttttcatctctctggtgtaagtccacagagctacttcaaaaggctgtgagtggaagggaggcctgtgagtcca

SEQ ID NO: 93200 - DNA, 1017 bp, Homo Sapiens
ctaaggtctcattggataatttctttactgtgggtatcatgctctgacaaagaatagaaatcgaccttgttttattggaaagacaatcaaattcctaacaaacactttcccttagtatctgtcaaaagcatggcatatagctcaaaatactgggctgctactcctgcaaaagaatcaacccaatttgcttgcaccaaaactgctgaaacaatgcttgtggtctctatttgctctggtaggaagacttggaggagaatttctaatactcctcatctctgtaactgtggccatcagatagtggttggtaccacagagctcacgtatgtcctagattgggtcagcccaggcataactggttctcaagtgcagaagaagcagaatgcttgatggagcccaccattggacagagtggcttcctttaaaggcctgcatctaatatcatctcaaaacccactccctcaactcaacttacagctattaagcaacgtttgagaatggtttaggggatgccaaaatctttaccttcatctctgcatgactagacgagagaaaagaaactcacgaaggttcttctcctttatattcccggggtgaaaagagggacttgagttcatgtgtcattcaccaaagtaaggtcctgctttataataataaaagatgcctagcacaacagttcactcaacagagctctgtgcttattgatctgctgagttgaactgaatctgcaaatccatagaattacatgagacattttaagttacattaaatttctgctgtgtgcttttaaatcatggagtgcgagacccatcagcacttagggtatatttattaccttaacaaatgtcagatgattgtgtccagtgctatctattatttatgaataacaagaggctgtaagactggaaatgacatgctttaatacgtccaaaaggttaggcataatgcagtttgctgccctataaatttctcgacaccattttcctttctaataaagcattgtcagtggttgactataaa

SEQ ID NO: 93201 - DNA, 440 bp, Homo Sapiens
gacacaacaatttccctttatttaatctccatattcatgtcccctaaatatatatatattttgattttgttaggagaaaggagatttgggattgggtattaacacacacagggtgcagaagaagcccactacaattgcttgccttggaaaagtaggacctggtcccagatactcgccaggacatggctggcagctcctcaaggaggacaacaggctggcagctgcgtgagactatggagagtaaataaatcctaccgcttcttagacattctgaacataatccctgcacgatggagatcaaaccagggcttcaagatctcacaggcaagcatctcagacccaagagacaagccaagtgaatgaaacaaaagaccagagataccacacagtacaaaatagtaattatttatattttcaaaaagaaaaaagttaacatttgg

SEQ ID NO: 93202 - DNA, 752 bp, Homo Sapiens
cctacaggccatggctaaatcttctttacaaccagatgcatatgagatcttagcaggaagtaagaaaagtaaacgcattattaataaacacacttaaatgcatacaataaaatgaatgctgtttccttcaaagtaaccctcctttgcagatatagtctaaccaagcctctattgccctgcccagcatggatctgaaactctcctccgtaaattctctagaattctaggaccgccccttctaaatgcccaaaagaatcccaactgactgagggcaaagatgcaccttatttctggctccctttcgcttcaccacttgacttcaaatgacttcaggctgattccagaaagctaatacaccctcaaaggacaatgcaccttcatttagctcactcaggagagaggccacagtcttgaggggaggcactctccaaggcacagctcaaaaattgtttcaagcaatggaatcttcacgtgaatgggcacatggcctcccacagcaaggatgctcgttaatggggaagaatcactgaaaatccgaattcagatgtgtttcagaaagcagcttcaaagtgtgtgactgatcttcctagtcctgggaagagcagaattggcccttagaaccgttaagagtcagattgtgaaacagagagttcttgttccccatatgtttcactctaaatggaacatgaatcagagctgggagaggagcttccaacttctgtcaataataaaagccttcttatgagtcaaaa

SEQ ID NO: 93203 - DNA, 530 bp, Homo Sapiens
cagagccaggattcccactcagatcttcgactctgaatcctgcaggccttcacctgtgcgagcactgagcgcctggctgccagctccagagctcctctggggccttggtcagtgtggtgttgtttatgtccagcacactttccgttggtctactggaggacagttcctgtacaggcagatgacttccttcaccaaggacctgtgactctctccctgagggctttctctgacatcatctgcacatggacagcttagactgaaagtttcaggggttcgatgccttccagaggcacctctctaacaataagagcccagattgagtggaaataccccagcttccttaccactccagcctccatgcccttagtggcatgattccgaggtgcatcctacactgactcttggtggctccctggccagagctcattcgcgtggccctcagcagctctcctccttccctggctgtcttcctcaccacctctccgtgattccaggaatcagctcccgaataaacgacttgcacccgaaaa

SEQ ID NO: 93204 - DNA, 529 bp, Homo Sapiens
tgcgtcgcacacctggtgaattgtagggcacacgaatctcactgaaactgtccagaaacatccttcccccagatcagctctcagcaaatcaggaacagtaatccagaataaaaactgggcagcctttctggaaggccgtctgccatgggttacacatgtgtctcctgtggcctagcggttctgtctctggaacacgtgcataccggttccatgtctagggatatctgtagccccgtttgttgtagtggaaagttctatgaccaggggatgggttgaaccagtggaatgttatgcagctgtgaaaatgggtttgctccatgaggtttgctctgtatctttgggcatggagagatgagcgcgacaactttaagggaaaaaataggctgtggactgggactcttgtgattcccgttttttgtggggatgtggttcttgaactgggaaagggagatttgcccaagtattggttgatattagtttgatgtcatggaatttgggataccttaaaaatatgcactaacttctcaaa

SEQ ID NO: 93205 - DNA, 462 bp, Homo Sapiens
aagaaatgctcctacttgaaaaatacacattccctatagactgcctcctgtttagtccaacttagatcactcagatccttcctgggatcaaatatatttttaaacctaagacaaagcgaagcaggtgtcacttgggtgatagggaaaaaagcttgtatttcctggttaatgtttagcttttgtaatgctatttaaacacacctaaggtgcctttccctcatctcaggtgctttctctgtaaagtttcactcccacctttcttttctctgcatggccgtccagtcttgcccatctacatccagagctgttaactagtagtgtcattacctgtgaaaaacatgtagaagcttccttgaaccacccagaaatccactcaaatttggggattgtcattccttttgtgaataattaatacaattcagttgttttttaaatattctaataaaaaaggaaattttctcg

SEQ ID NO: 93206 - DNA, 439 bp, Homo Sapiens
  misc_feature (346)..(360): n is a, c, g, or t
ttttgccaaggattccttctcagtgccactctcctctgatttccagaccccctcaatatcctcctcatgatttgccctgcacttcttgttccatgcttggggtcctaagaacaagccatctgatgcctctactatcattacctctattgggacccagaaaccaataccccaaaatatggtgcatggacatgctgaactgaagaaggatcctcaaggcaagttctctctggcctccccactcgactccccaccccactctctatcgtttgtctctctcaaaacacaggatgaagttgttctctgaagttcctttatctacctaaagtgtggacataccaaagggggnnnnnnnnnnnnnnncagttacctctggtcccatccttgagttttcattaactgaactcatatctcaggaagaaagaataaagtctgtcaacac

SEQ ID NO: 93207 - DNA, 366 bp, Homo Sapiens
atcccaggcttgagccaccgtgcaggctgagcatacctttgatatgcagagcaaccatcatgagtcccacctgcctcctttcatcaggctcctgcattcctgaacactagccccctgccctaaatcaccccaaggccaggtaccagctagctagataccacccccaagcccagagcccactgaaatgacccagttctaattctgctcagcttgcctcctctgccttgcctggaaaatggcaataaaggctcttgcccaccctttcccttcaccccctccctgtcctgactggccctgggtgcttccccacgtgcccctcctcctgggaactgtgagtaataaactcctctttcaaaggcgaaaaaa

SEQ ID NO: 93208 - DNA, 480 bp, Homo Sapiens
  misc_feature (180)..(237): n is a, c, g, or t
ttgccacaaattctttcttgtgtgagatccaagaacccactctttggatgtggatccagacccctttccggtaacatcttcctggtgaaccatgaagggatgatactgaggaggccatgacccgaaggaaatagaccgcaacactaattggctgactttgggtggatttgttttcctagnnnnnnnnnnnnnnnnnnnnnnnnnnnnnnnnnnnnnnnnnnnnnnnnnnnnnnnnnnctctgcccttcaaggctaagcatgagactgccatgtacaaacgttggtctagtctatggagggcaagatgccacataaaggggaactgaggcaccccagacaacaactagtatcaactgctagacatgaggccatcttggaccttctaccacagttcactgcagttgtatgagtgaaaccagcagaacttcccaaccaattcacagaacatacgaaataataataattgttgttttaaaaaaa

SEQ ID NO: 93209 - DNA, 319 bp, Homo Sapiens
atgaacactaattcaggcttctactgagaccccaccgagatcaccagttctcatgtaacctgggaagagccataaatggtaccccccaccccaactgccttcctggaagcatgcctgggaagtaagctgtaggcctgatccgagccaggaccactgggatccgtgcaaaggccaggggagggtagaattgaatcataggagtgaactccggcacctgttgtcttctgcgggtgacgcacactttaaatggaagagaggttgtggctataacttgtggctgggaataataaagatgcaccgccaaggagcctcaaaaaaa

SEQ ID NO: 93210 - DNA, 395 bp, Homo Sapiens
tttccaggaattgtgctctttaattagattataaattattcaggggaaagagttgatctctcatttctttgagtttcctaaaagtccagcacagttcttggcacactggagggaacctcacagttctacgcaattactgtgtccttgaaaaaatgaatgaaataatcatttggggacagtacattttccattgggtagttgggctggctactgagtgaagtctattatgaatcgccttgcgaagtgaagggttcttctgtaatggggaggatcctccagtcttcgtgtatgtgtgaactcggaatttcatagacggccttggctcacgatcggtttggcacttcgcgttcctaggccacaggacgtcgaacctcgggcgacaggagcctcccgct

SEQ ID NO: 93211 - DNA, 651 bp, Homo Sapiens
  misc_feature (442)..(442): n is a, c, g, or t
ttttttcagaaacaagttactggattttattataccccaaaacaaggaagagagtggggtgcattactaaggcagtgactcagtgttcaggactgttgttgtcacccagagagattcacaaaacctccaacctgtccagcaatacatttagaagaaacaggattagggaagactctggaagcaaagaaggctttattaaacataaccatgatccatagctggagtatacataggaaatttggtaacttggataaggcaaagtcttttccctttaggagcctgtactttagtgggtgaggaagaaccttctgaaaaaaaatgatttcagcagcagtataaaagaaagtgggtcacctgtatgagcaaactaacaaagcagatttaatgtaagtgcccaagagttccaaaacaagggaatcagtaagagttctggagaaggccnccttggggatacttggtgcggtgtgggggtggatgtaggtttattctgggaatcgaataacatggtaaatatgtgactgtaggatgactggctgtgatttgcaaggaaaagaaatttgcaaagacccaagaatggtatctgctaaattgcatgtgcaagggtggtcatggtgaaaaggaaagtttggggtagaataagagtaataaaat

SEQ ID NO: 93212 - DNA, 774 bp, Homo Sapiens
ggtgccctccctgagagatataactggcagctgcaggcccctgacgttctcgtctacccactgagaccaaagttagtggaatccacatatctcctctaccaggcaaccaagaatcccttctacctccatgtaggaatggatattctgcagagtctggaaaagtacacaaaagtcaagtgtgggtaagccacgctgcatcacgtcattgacaagtccaccagaagaccggagggagagcttctctctcagtgagacctgtaaatatttgtatctgctgtgtgatgaagacaatccagtacacaagtctggaaccagatacatgttcacaacagagggacacattgtatctgtggatgagcatcttcgggaattgccatggaaggaattcttctctgaagagggagggcaggaccaagggggaaagtctgtgcacaggccgaaacctcatgagttaaaagtcatcaactccagctccaactgcaatcgtgtacctgatgagaggaggtactccctgcccttaaagagcatctacatgcgacagattgaccagatggttggtttgatttgatctgctctctgtgaggcctcatcttgaaccagaccttaacgaccaaacccagaccatgccaaagtccagtctgaaatgaaaggggacagaagtcttgctgtccatggtggtgtaggaatttctgtgcaacacctcaccacgtctggttaatccttgcacacttcagtgtttctctcctgttcaataaaatgccctgttaaggatat

SEQ ID NO: 93213 - DNA, 371 bp, Homo Sapiens
ctgagaaaagatttaaaagggagaaataaaacccatgaggagggtgctctcctgggatgacagcgtcaggaatggacctgaggggcctcttgagctgggcacaatccacagtgctgctatcccacttcacagccctgtgacaattcacaagtcagttagttattcctaaactgttactttttgaattaaaatacacacataaaagagtgataaaaacatttttcagaaaaatggcatttttccaagtggcttacctaaaaatgcccttagcctgaattgcatatactgtgttataactcagaattttctcattttgacatggtcccttcttattttataaagataataaaagtgaacattttatatcaaaa

SEQ ID NO: 93214 - DNA, 511 bp, Homo Sapiens
tttcagaacaaatgtcaaggtctcgtgttcgacatagtcacaagccagatctttgacatcatcatcataagtctcattatcctaaacatgattagcatgatggctgaatcatacaaccaacccaaagccatgaaatccatccttgaccatctcaactgggtctttgtggtcatctttacgttagaatgtctcatcaaaatctttgctttgaggcaatactacttcaccaatggctggaatttatttgactgtgtggtcgtgcttctttccattgttagtaagtaaaatcagcagtcagagggactttaagaaccagaagtaagtttgtaaatcttatcattttttgaagtttgttcaaactatccacaaagcagaaaactgggccaagtgtactttctgaaagaatagacaggggtactaatgccattctctactgggaagttgctaggagatagagagtaatttctgttcccttaactcactacacaactgaaatagagttcaataatca

SEQ ID NO: 93215 - DNA, 617 bp, Homo Sapiens
gtagcaaggcggagctgtgccctgtcacggcacacagagaatgcccatggattttcacaaatgctgttaaaatgtgaaaagaaggtgtttcttttttcttcaatctgagcttcaagctaatatgggcattcagctaaatccctcctgggtcctgaaacagtatgtggttttggatttcaaagataatccctacaacttctgggagaggtgcaagtatcaaccagttggagacacagggaaagggtgatataatgcagaaagtgacttgaacaaatttacacagaaggcagtgaagtgtgattcaaattcaagcagtctagactgtgccccacacaactctgcagcataaccttgcagtatgaaaataatgcctctcatgcagatcagggatatgagatccagtgacttacccaaagtttcaaaggaaagatgtaacagagccatctctgaacttctgctcttgggaatctacacactctttccactagttctgaccttagcaggtgtttgacccaggacttgcccaacttggtttccatttgtatagaactaatgccaaatttcaaaagaaaatattacataccataatcaataaaaacaaaatatcaaacatgaaa

SEQ ID NO: 93216 - DNA, 346 bp, Homo Sapiens
ccacctctctacaaaggccatcttctgctctaatgaatacttctatcaccttataaaaatgataaagaggcacatcaaatatttcagtaataaatggaaaattcccaggaggcttataagaaaaagtgacgacctcaaggcagcaggccaagagagatctgtggaacgcatcttgttccagaataccagataaatccatgtctcctagtcttttttgttcctgctcaataacagattctaatactttatagtaaagcatctccgcaaaacgaaaatgtttgctggcaatttctttagcacaattactgaaatcctcgtctggctggaaatgctgagaatatatttc

SEQ ID NO: 93217 - DNA, 559 bp, Homo Sapiens
ggaaattgaatctgcacatttcagcttcatttgcacttaacacatctggctggcagtgggcaggaggcttttgatgtctgcgtttcggtgcccaagcctttttaagcctcttttctttgaagccagggagacttgtgtttctgccaaggagtaaacagacttgtacaccctccagcaatttagtctttggagacctggctcccaaagcccctgggggctggaggccccacttcttcatttgttcagcctacaaacacttattcaagacttactgtgcaaaagcttccccaaaactgcctttcataggaagggtatagagagaaactctggcagatttcacaatcaaactcaccaagctcatttgtctaagaagcaagggaagggagtctatgtcccaccaatattttctagagtgactttagctcccccataatttcatcagcctctctaccttcccacccacctctaaagtcatcccttgctgttcttatttgtaatgtgggcaaattgatgatttctcaatgtcatatgaagtgtgaataaagcacttgagaaagtg

SEQ ID NO: 93218 - DNA, 410 bp, Homo Sapiens
tttcagatcagtaaggagccactgctcaaacacttgtttattcatttgggcctgactcaagttaacattattattttcttcttgaatccagttaatacaagcttccagccacatcggaggtactttaacatgccatgcagctaaaagccaagtttcagctcttaatgcaatactagtcacattcatttcttttaaataaaagaaataatatgcatctattaccacgaggaacagcagcacaggatttgatgacagaatttggaactggttgttagtggattacttgaaacctccactgctcagaaatggcccgcgccgcagctcgtcccacagcccacagaccacagcccggggcgtggtaaggggcttcgggcacgagtgtgggctgtgaaaacacgggcataagtctg

SEQ ID NO: 93219 - DNA, 393 bp, Homo Sapiens
acagggctgggatggtgagagattggctctgtctacataagaaaagaagaatctcatggtgacaaggaagtggtggggtcttgtctgtattcctaaacttccttgaagtttacacctgcttctcactttgtccttttcttttgcctacttttgggtggaatgaagtggtttatcctattttaggctactaacttttgaggtgtttatcctgagcagcctgagtcttggttagcatttctacttggctgagatccacccatccacactccttaacttgtttccctgtcattgcacactggaaactgaagcacctgtagtcatgctataaaacaaatgtgataatatgtgtgaagcagtggtaaaaaataaaaactcaaggttcaagataaaaaa

SEQ ID NO: 93220 - DNA, 613 bp, Homo Sapiens
tctggagaatttctaatgactgcctcgtcattagattgagaaacatactgaactgcagacaccctgccttacctcatccccaccacctgctccagcagacacacctcaagagtgcgtcacttgtcacacaaaggggactttcttctgagcagtcggggccctgtcactaccccccacctaccacacagcagcatctctatttccattcaggcccaactttaaaaaaaagaacccagatgagagatctggctgtggcacactgcgatctgggatatgttccatgaaggttcaggcgccacatacacaaaatgaatagctgatactcctccttcatcagagaacttgtgaggcagaaagcggggaaagcccatctgagtccagcagagctcctctgggggacatcaggtcaggccccagtatctgggccagatgcagtactcatcaaaattgcctctcagtccaggttggaagagggaagctgcagcaccccgtggctagaaacaggagaaagatatcccctacaattctctagatgataaatctcaagagagttgttccctaaagcattagttaactaaaaaataatataaaataagcaaacatgggctctaag

SEQ ID NO: 93221 - DNA, 402 bp, Homo Sapiens
aaacaggaaaacaaggaaggctgccatcagcaggaattccagggctttcagaatgaggctgtcaggagtgaagcgagctgtgctccacatgcaggcaagtggccagggctgccaggccttgtttatctgggagcgccaggctgcctgcctgcacctggtctgggcacctgaaggcagagctgctcctgcttagggtctgtggcaactgtcctcctcagtgggtgctgctgggagctcctctgattcctggtgggcggcttctgcctcgcctcttcacccacggtgtagggtgtgggatggagatgcagggcctctgctctccttctcccctcccccaagcagcctgggttgtacctccactaataaacaccaacacccgcgcccagggtgggttcggcaaaa

SEQ ID NO: 93222 - DNA, 981 bp, Homo Sapiens
tttgctcgtggatgtgggggtgtcaggtatgtgggccgctgggatgtcctgtgccgtgctggtgagtgtcgcgtgcgctgggtgctgttggtcttctgttgccgcgttttcgtgtatcaggagccggcgcggccccccgggaagcccctgcagcgcctgctgggaccttttgcggggctgctgcggcctgagaggcacaccaaggagcagattctggagctgctgcgtgctggagcagttcctggccatcctgccccgggagatccagagctgggtcgtgcgcaggagcctgagagcggagagcaggctgtggcccgcggtggaggcactggaacgggagcccgggagagcgctggcagtggctcaagcagctgtgaagaccctgtggtgattgatgatggggacagccctctggaccagggagcaggagcagctgccggtagagccccacagcgaccttgcaaagaaccaggatgcccagcccataagccctggcacagtgcctggggctcccaagcagaccaccaagccagctcagcggggacccagttctgcaagatgctttccttcttcaggaagagaatgtgcgggacacacagcaggtgaccaccctccagctacccccgagtcgggtttctccattcaaggacatgattttatgcttctctgaagaggattggtcccttctagatcctgcccagactggcttctatggagagttcatcattggggaggattacggggtctcaatgcctccaaacgacctagctgcccagccagagtctctcccagggagaggagaatgagccacgcgttccagagttgcaggatctccagggcaaagaagtgccccaggtctcctacttggactctccaagtctccagccattccaggtagacagaaagaaggaaacgtgaggagctgcaggtgccagagttccaggcctgcccacagacggtggtgcctcaaaacacctaccc

SEQ ID NO: 93223 - DNA, 491 bp, Homo Sapiens
ctttgtgtactcattggaatgggtctacagtgtatcatgagccaaccctcaaaggacccgtattacagtgccacgttggaaaacgctacaggaagcatgacctatccacatctttccaagatagacactaacatgtcatgtcccaaacattagcacgtgggggttgagctctgtgcagtaatcgagattgggagaatttgggcagcgcgtgagaagtgctaagctacttgttttctcacttgagcccgggtaggctgtgttggccctcacttgggattctcagcagttacatgaaagttgtgctgataatctcttctcttgtaccaattttagtcaggcagaaaatggtaaacatgagggtgctcttgtgacttaatttttgttcaagggactaaattgcttatgtttattccctgtcagcggagtggagaatgtcattcatcaataaaccaaagccaatagctggagaattgagatctggttgaaagtgg

SEQ ID NO: 93224 - DNA, 388 bp, Homo Sapiens
aattcagtaaaacaggttgaatggttaaaaacaacctcaagggtccatgaacaatatctgccaactgaacctgttgtcttcaaatactaaggaaggagaatgaggggtacgggactagatatgacttgaaatagattgaggctcatttggtaacttcctttactgagccagtcttgatcagaagtccacattagtatgtgacagctagaggtactgttattaatgtatcagcaacagttacattaactatttcaaaggactactgcccttaaaatgaaaaaacctttcagctatgtttgtacccgtgactgacatctggactggatttatgcttgatgcattgttgggaaaatatgcaatacaaactggtatcagaattccttataaa

SEQ ID NO: 93225 - DNA, 832 bp, Homo Sapiens
cggggaccggccatgcatcccctcccccgtccgctgactcctggaaccctgctgttctgagacggcccacgcgcactaaagtaacggacagctttcccagctttggggcttaaggatccctcgtttaactgaatggtagaaaattaggaattccgcccatttgcaggcaacgtcctcaggagggttgtgtggtgaggaaatgaggcggcctcaccattctgaagacacctgagacccattcaggggaccgcacacaggtcagagcggcgcccggccacagctcttccgggtgcagctgtgtggaattgacagggacgaggcgtcacaccctggggggtgattctgccaccatggcctggaccactgagcttgaagagatggatccagtgccctgaggaagggacatggtggccccagacgcaagctggaaggagctccggtggcacgccccgcacgcatctgtccgggccagctttcagggcaacggctgttctgacccaccctggggatccagcaccagcgtttgttcaggtctcgtctctccccaaaggtgctggtcccgtggggcagcctgggagctgggtggagagtgagacgggcgcccagtgccagctttttcagtcactgggaggtgctggggaggctgcttcgttggggcttcagggtctccatctgtgaaacaggagccagcggcgcttgaaagggcgcgggttcccggagacgccgccaggcgtcagccccgggaccggaaggggcccccagggccgccttgctgctccgagcatccagctcccgtgaggccccgctcgtcgcgggcctcggagatgcgggc

SEQ ID NO: 93226 - DNA, 918 bp, Homo Sapiens
ctcctgctcttacttgtcctgctcctgctgctcgaggacgctggagcccagcaaggtgatggatgtggacacactgtactaggccctgagagtggaacccttacatccataaactacccacagacctatcccaacagcactgtttgtgaatgggagatccgtgtaaagatgggagagagagttcgcatcaaatttggtgactttgacattgaagattctgattcttgtcactttaattacttgagaatttataatggaattggagtcagcagaactgaaataggcaaatactgtggtctggggttgcaaatgaaccattcaattgaatcaaaaggcaatgaaatcacattgctgttcatgagtggaatccatgtttctggacgcggatttttggcctcatactctgttatagataaacaagatctaattacttgtttggacactgcatccaattttttggaacctgagttcagtaagtactgcccagctggttgtctgcttccttttgctgagatatctggaacaattcctcatggatatagagattcctcgccattgtgcatggctggtgtgcatgcaggagtagtgtcaaacacgttgggcggccaaatcagtgttgtaattagtaaaggtattccctattatgaaagttctttggctaacaacgtcacatctgtggtgggacacttatctacaagtctttttacatttaagacaagtggatgttatggaacactggggatggagtctggtgtgatcgcggatcctcaaataacagcatcatctgtgctggagtggactgaccacacagggcaagagaacagttggaaacccaaaaaagccaggctgaaaaaacctggaccgccttgggctgcttttgccactgatgaataccagtggttacaaatagatttgaat

SEQ ID NO: 93227 - DNA, 476 bp, Homo Sapiens
  misc_feature (118)..(185): n is a, c, g, or t
atgagtaagttctagagatctactgcacaacactatacctatatttaacagcgctgtgttttacacttaaaaatttgctaagagattagagctcatgttaaatgtttctaccacaatnnnnnnnnnnnnnnnnnnnnnnnnnnnnnnnnnnnnnnnnnnnnnnnnnnnnnnnnnnnnnnnnnnnntttattcaggttcatacattctagttactgtagagttctccagtcattaacatagtgactatatgtgtcttctgtagcaaggttttaacaccattatcttttgacccatttcatagtatcagaagtaacatattagaaaggaatggagtcagcatgctagaggcagccacacagaaagtggaaacaaatgatcgctaaagactgacagagatagaaattattcattcagcaaatatttgctgggtactatgcgccaaaaactggttttggtcacagagatatggatgtaaa

SEQ ID NO: 93228 - DNA, 536 bp, Homo Sapiens
aggccacatcacgaaatgtgacaggatagccttgaactcatcaattgctgggggcacctcaaactcaactccaaaattgatctaatgaactttgccaaaccacattcccttcttgcatttctgagagaatggattcccattcatctgactacagtgctaccctgaaagcagatccagagactaagattcacctgcaggtgattcatttgggtctcaactcaagcattcctttctcaagaagccttttatggtatgaagagtgagacagagttccctgcgccacctccattgaatcatgttaggccttaatgtacctttcctttataacacttactgaatgattaatttggcatttatttacctggctattttattcagtgtttaggatttatactagattgtaagctcctcaagagtgttccaggtctagtttaggtcaccatgtatccctgattagtaccacacatcccagtgcaccatggttctcaacaaataacatgttatataaatcaataaatgacaggaacaaagaaaaa

SEQ ID NO: 93229 - DNA, 787 bp, Homo Sapiens
  misc_feature (423)..(498): n is a, c, g, or t
tttggtaggcacttgagatttttattgagatattcaaaattatttcatcaacaacacttttatcaggataatagaggtattaaaattagaataaaaagctattctgaactgacctccaaactgaaacatcactgagattctcaaaatccaactgagagtcaaattggctgaactaggcaaataaagaagaaatgagggtttttaaccttacattttagatttattggggcaggggaactttctaaaatacagaagtatcacacccaatctagggaatcatatttaaaggtagcgacgctctaatagatgtttgtagtagtccatattggtttgtaattttaaagataaaatatctaagttttcggatgattgctaagatgaaataagccaactagaatctatctaatgcactgttcaccactnnnnnnnnnnnnnnnnnnnnnnnnnnnnnnnnnnnnnnnnnnnnnnnnnnnnnnnnnnnnnnnnnnnnnnnnnnnntagcaggaggatctgaagttaaagcttgaaagcagcccacagtgggtagtgagtttcgtattgttttcttcctttatcactttgcttggatgtttacctgagctgtctcccatgaaaggttctgaacttcaattccagtctccacagctccctgatagcgctgacatcgctgcttaaccttttagcttctaagcatagacagcaagggacaaaagcagcttatgattcattgtgagctgaccacctaatcttcaacaaactgcccagagtgaataaagtctcaacggag

SEQ ID NO: 93230 - DNA, 283 bp, Homo Sapiens
  misc_feature (81)..(81): n is a, c, g, or t
ggggccgcagggagcagaaacgctcacatccacgcgcacaaataaatccgcgagcagctccgcgccggccggcgcggcaanggcaaacctcgggttgattcaatgcagacgcggggctccgataatgctttgtggggacgttgacaagtggatccaagatggcgtagaaagtaatgacaggtaagtcctgacttcccccttctctgctcctggggccgctccgcagactcccggagctctccggggaggggacccgactcccctccggtgtcccggaccccgg

SEQ ID NO: 93231 - DNA, 502 bp, Homo Sapiens
ccagcattaccctgataccaacgccagacaaagacactataagaaaaggcaattatggaccaatatccctgataaacatggatgtaaaaatcctcatcaaaatactagcaaatgaaattcaaccacaaatttaaaaaagcattcaccatgatcgagtgggatttatccctgggatgcaggaagtttcaacatacacaaatccataaacatgatacaccacatcaacaagatgaaggacaaaatctttataatctcaatagatgcaggaaaagcatttaacagaattcagcaccctttcatgatttaaaaaaactcaacaaaatatagaaggactgtaccccaacacaataaagaccagatatgacaaacccacagctaacattctcaacagtgaaaagttaaaagcttttcttctgagatcaggaacaagacaataatgctcactctctcgacttctgttcatcgtaacgttggaagttctagacagagcaattagacaaaa

SEQ ID NO: 93232 - DNA, 578 bp, Homo Sapiens
  misc_feature (54)..(131): n is a, c, g, or t
tagcttatttgattatttattgtgggaagggtgtagtgattaacataggcatgnnnnnnnnnnnnnnnnnnnnnnnnnnnnnnnnnnnnnnnnnnnnnnnnnnnnnnnnnnnnnnnnnnnnnnnnnnnnnnagttgtcttaatctttttcccctgtaacttcagcaatgcttcttaaagagttttcatttttgtctagtcgctactttctcattcctcccagtgctttcctctgggtctgctaagctgccccatccagggaggatgctgaacctttatccattctgaacagaatcttcagaggaaggagatgctgtctctcttcactgttcccatttgcaagtccctgctccagacagcacactgcctctccagcttcccagacagcttttattccttgtgagaaaccagcagtttcagatgtcactcctaaaattcagtctgagctttttcaggcccaagtcctgttggccactttctgctgacatggccttggggtagaagtaaccttcagctgggcttcccagccacttgagtttgcaggaaactattttgtataagccttcaaaaaacggcaag

SEQ ID NO: 93233 - DNA, 457 bp, Homo Sapiens
ctcctctctcatggaaatgttcagtttctggacatctcctttctcttccattcttcacctgaccttccttcctttcttggccagcttgaatattataaagggaattttatttcaaacccaggatcgcacttaagaggaaaagaaacaaaagccagttctttttattgcacatagaacaaggagaaactccaccccttttgttgtctggtatgtttaaaacaagaaagaactttagaaaagtaggatatgagtgaaaattacaaccaatgttgagaactactttttaattttttattacaaaattaggatgatacttcattaaacattgtacatcatttcaaaactgttatctcataatcatgttgcttgttttgaattattcttttaaagtgtaatttttttaagcaaagaatccataaaattacatggcttggatgtaccataacttacttaaaaa

SEQ ID NO: 93234 - DNA, 694 bp, Homo Sapiens
ggggattgagtttttaatacacgaaatttggttgacacattcaaaccatagcagatgccaaaggtggacatgggggagtcaaattcccaaaagctgcctgagtggtgctgtcattgggttccagggctgcagtagaggttaagtaggaaggatttctgggggctgccaggttcttcaaagggaaacagctgttaacattgcagggagagacaggaagataacagatggggaaatgggcatggtatccatgttgatttcatcagagtaaaaggcaggcttggatgccaagtctgaagagggtctgcttactatagtggaggtgactgcagaagcagtggtaggtgggccagaaaagacagggcattgaagagagtggtttcctgttgatgcctgtctggaaccctagatttcaggtgataggtgtttcttgggtcaaaaggcaatgttggaaattcaggtagggctgttgaccataaaagcaggtgggctggtggagactgtgttctttacaagggatatctgctccatactgggatggaactggtcaaatgggaggatactcatcctggatcctatgggagaccaggagatgaaaacctgtgaaaagggattggtatccatgcagtttataccaaagtacaaagtaggcttgaggttgagtctgcagattactggctgtgatagtgaaaatgct

SEQ ID NO: 93235 - DNA, 544 bp, Homo Sapiens
cacacatattgctgaaaggcatggtcacaaagaactcaagaaaatcttcgaagacttttcaatccaagaaattgacataaataatgagcaagaaaatgattatgaagaggatattgcctcattttccacatatattccttccacacagaacccagcatttcatcatgaaagcaggaagacatacgggcagagtgcagatggagctgaggcaaatgaaatggaaggggaaggaaaacagaatggatcaggcatggagaccaaacacagcccactagaggttggcagtgagagttctgaagaccagtatgatgacttgtatgtgttcattcctggtgctgatccagaaaataattcacaagagccactcatgagcagcagacctcctctccccccgccgcgacctgtagctaatgccttccaactggaaagacctcacttcaccttaccagggacaatggtggaaggccaaatggaaagaagtcaaaactggggtcatcctggtgttagacaagaaacaggagatgaacccaaaggagaaaaagag

SEQ ID NO: 93236 - DNA, 342 bp, Homo Sapiens
actttctgcctccttgctctaaatgtcacaaaaaattatacttccttaaagtaaatgtaatgatttcttcttttcctattgaccagtacagatagatatgttgtgtttgcttcatttttaatgatgacttcaagattgatgatgtgatccaataactgtggaggtagctttaacttggttctgtgtaaatagtatgtattttattataatatttctcattttaagatgcttggtttacattaaattatggtatttaactatttttatgtttatactaggtagggtctttcttatgtttctgtgtttttggtatgctaaataaagctatttttaaacccaaaa

SEQ ID NO: 93237 - DNA, 480 bp, Homo Sapiens
ttttgtttcaattttgagctattgtttccctttataagagatgaagaatttaactcaataccccctactcttcccagtttttaaaaaagttttgtattcaatttctgtttgatatacattaacagctttcaatgatgtaattgcatttgttttcttgattcatcaactttaggcctaaagtgactccccactctgtcagtcaaggaatttggtacttctcagccttctcccactcaatttctcttccttctcatttctcaccctccctcagccatcagtttttttacatcaacataccttatatcatctacatttcattctgtgactgaatgtgttatgtactctgactataggttggttacaaaaattgaaaaccagtaaacaaggatacggaattttaggtaggaggaataagttcaagagatctattgtacaacatactgattataattaataataaagcattgtagttttgaaaaa

SEQ ID NO: 93238 - DNA, 392 bp, Homo Sapiens
gatggtcagtgcattttattgaatcagcacagtacaaaaataaataaaaataagggaaggggaattaaattacagccaaactgagcttcatgactttgtcagattataaaccacacatactcacaaacacactacacatacatacaaattgagacaaatataaattaatattaacaatacccacagtttggtcaaagaatagctacagaagaaattgcactaaaaaaccaacatacatcacacgtgtgtaattagcagtttcaaatatacagctatgaataattctgagtgaaaaaaatggcacattttcttttcattgcaagtttaactgttggaacaaaactaagttctaataactgcatggaaagaatatatcaaccctccaggtttac

SEQ ID NO: 93239 - DNA, 528 bp, Homo Sapiens
ggtaataatgtgaggtgatggatatgctaattagcttgattatgataatcatttcacaatgtattcatatatcaaaacatcatgtgtacaacttaagtatatacaatttttatttgtcaattatatctcaacaaagctggaaataaaagaggaagcttctttaaagatgtgtctatgatttcccagtgacatggatcatttaggattgtaatcaaccattgaaactgttagttagccaactaaatctcttatatacaaatagaaaccttgaatctcataaaatcaatacttaatgaatacctactgcatgctgagttccagagacacatgaataaaggcgatgtaggctgtgaccttattatactgggctggattctgtggggtgggactgagtagaggggatgactcgctttatctgggggcatcggggaaggctttctaggggaccagtctggatcttggaaaaagcagagagctactttatgctttaatctgcattaaaattgtccagtggtaaagcttgaaaaa

SEQ ID NO: 93240 - DNA, 398 bp, Homo Sapiens
gggcacctcactccacctcaaagtcatttgactgcccccatccaccccaccaccctaatcttccaccacctctccggctgcccctgccctccatcacagacagcagagccgggcagctttcttatgccattttctacactgtgcttcatgagtaggactttcttgcactagttcctatgactgagtctccaaactggtttcctagtagtcccccatcccttcctcccttacccagctatgattcagttgtctctgccctccctcttaccctgcctctgtgtttcggtgagagtctctgtatatgtactgctttctgttttgttgcattgtggggcagaggcctctctgctcttgtttaaccccataaagaaataaatggtaagacttggtggttaaaa

SEQ ID NO: 93241 - DNA, 523 bp, Homo Sapiens
gggagagtgggagaggactccaggctcagccaaggagctccggagacctccgcccaggagcccccagcctgcggagcgtgtggacccagccctgcccctggagaaacagccgtggtttcatggccccctgaacagggcggatgcagagagcctcctgtccctctgcaaggaaggcagctacctagtgcggctcagtgagaccaacccccaggactgctccttgtctctcaggagcagccagggcttcctgcatctgaagttcgcgcggacccgtgagaaccaggtggtgctgggccaacacagcgggcccttccccagcgtgcccgagctcgtcctccactacagttcacgcccactgccggtgcagggtgccgagcatctggctctgctgtaccccgtgggtcacgcagaccccctgacagtgacccctcggccccctttttgagtcctcgggcccagaaatcgtatcccaaagcccctcccatggcccttgaaaaataaattaggttttttgtttggaaaa

SEQ ID NO: 93242 - DNA, 837 bp, Homo Sapiens
cattgataaagaacataaaatacttaggaatatatttaacaaaacacatgcaagactactacctaaaaattacacaattttgttgagagaagctagggaaggccttaataaattgaaacatcttccataattacagatgagaagacccaatgtttagaagtcatttctcaaattgatctagggattcagtggaatccagtcagaatttgttctggagcacagcagtgaagtgaggattggagggagctggtgtagctgcactttgaggtaggttcattagctgttgcaaaaggctggtgatagtcactgttggaagatgatagaggaggagagagaagggactcagtaagcatggcagcacctcatcttgtgcatccttcttcataaggaaagggaggtccctggctgttgtcatgaaaatgtcagctgcttgctctgtggagaggaaaggaagaatacgggcaaccattctcttcccttttcggatacacatgatctgtacaaagtggtcatcactaggcctctcttgtccaggcaatttcccccttaagttgtcatacatgctacaaattttgtgctttctgtcatccattagggcaggtcgctcttcttccagacttaggagataacgtctttcatagtcctccacatcaaggagtaagctgtaggttttctcaattataacaagggtttttctcctcttgtctcgaacttgtttttcttttgtctcatcatcctcactccgagatgtcacacagcatcatcattttgcggggccctgcggctttggtgactctagataacctcggccgatcgcagcccccctgcgcgcgaccc

SEQ ID NO: 93243 - DNA, 561 bp, Homo Sapiens
ggtctgcaagggtcctgctttacctccctgtactttgcaccggccagggaggagggtgctggggagaccaaacatcaagctgggggagggtgctgaggtggaggtagaagggggcagaggggcccctcagctgagtccttagggagggaagggatcctggggtctgcccagcttgaaacagaagctgggggccacaaggccctgaatcaggccaggcagggtacaggggcctgggagtcctgctcctttgctgtgagacctttagggaatgggatccatctctgagtggtttctcccgatgaaagacaggtccagagggcagagtggccatgcccaaggtggtggccaggtctgacaggatctgcagtccctgccaacaacctcctcctctgctctctgggcagtagtggcctgctcctggacactgctttgcagtcatcacctggacctagagctcatctcggggctggggttggaggctgtgcccgctgctgccagtcaggtccaggcgggggctgcgcagggtcttttgggagccgctccagctgatgaggcgggcgc

SEQ ID NO: 93244 - DNA, 743 bp, Homo Sapiens
ttcagaagaatttaaccaaggaagcaaggacaaagacggctaggttaagggaggcatgcagggatgttaaaacaccccagggatttataaagcagcaaactgtaccacccaaaaacctaagagccaagaagaggaagagttaccaaaaccagaaactgttataaccatgagagatgataggagctatggcatcattagagaaacccagttactgccaacctgctgcctaccagaaaaggaaccaaggaaataaatactctgacctccttatcctcctgctgcccagtcttctgccagttcctcccacaaactaaagccactgaaagccagagagcaagggagcccattaatgtagtccataaaggtcagcctcctggagcgtggagcaggctgaagaagggtgggaaggacatctggagaggccagtggagaatatccagcacataaaatacatccctgtttttatacttctctttggcagttcttagtattttaaaaattataaagtggaaacctcaaaaaacaaaaggagtactgaaatttattaaaaacttttattttaaaacatgttcttaaagtcctaaatctgtcccccttttacatttagttaatgtttgcattctattccatggataggattacatttcaaatggtgccaagtgttcatgtgattttagcatattaattcaataaaattttaatatttgtaaaaagggtattttaaataaaagcattattttaaa

SEQ ID NO: 93245 - DNA, 1338 bp, Homo Sapiens
  misc_feature (80)..(114): n is a, c, g, or t
cggacaaactgacaacctatgggccagccgttatgccgaacgacgagcgcagcggagtatttgagcgaggaagcggccgnnnnnnnnnnnnnnnnnnnnnnnnnnnnnnnnnnncagtcgacggtaccggacatatgcccgggaattcggccattacggccgggagcgagaagatggcgaagacgtacgattatctcttcaagctcctgctgatcggcgactcgggggtaggcaagacctgcctcctgttccgcttctcagaggacgccttcaacaccaccttcatctccaccatcggaattgattttaaaattagaacgatagaactagatggaaagaaaattaagcttcagatatgggacacagcgggtcaggaaagattccgaacaatcacgacagcgtactacagaggagccatgggcattatgctggtctatgacatcacaaatgaaaaatcctttgacaatattaaaaattggatcagaaacattgaagagcatgcctcttccgatgtcgaaagaatgatcctgggtaacaaatgtgatatgaatgacaaaagacaagtgtcaaaagaaagaggggagaagctagcaattgactatgggattaaattcttggagacaagcgcaaaatccagtgcaaatgtagaagaggcattttttacacttgcacgagatataatgacaaaactcaacagaaaaatgaatgacagcaattcagcaggagcaggtggaccagtgaaaataacagaaaaccgatcaaagaagaccagtttctttcgttgctcgctactttgatgaactctttctgagagactgcagcacacctagagggccctttcctgcttctctgaaagcacaggtcacccagcctcagaatcacacctcccggctgctgctgagagcaccactgaacttagacctctcaacacagtatgccaagtggattccagcctcatggcctagcaaaagaacagactccctttttcaaacatggaagcaatgaagtggagacacatgcaggacctaactcgttttttccttgttttattacctgttgcagaagcggttatctttcttttttactttgcacatcagtgttagcctttccctatttcagcacaatcttagactcatatttgcacacttttgtgtcgtgaagttctagacaaatttgtacatgtggcaatgttaaaagagcatttacagcagaggttaatatactaaaattaaagggtatttggtctggttcatatggtcaaatattactgccttggtagcatttatttaagggctttttcttaaataagaatcattaaagtcattaaaaaaatttaaa

SEQ ID NO: 93246 - DNA, 696 bp, Homo Sapiens
tatatacatagttttacaacattcgaattatgttttgtaggtttgtacacttttcactttatatatcatagacctttcctaagttttaaagtattcttcaaaatcatgacttttaatgactttcatgatgatcttattggatgtatcataagtgacttaatcatttcttcattgtcaaatacatgtttctgatttttttgtatcacagaactgcaatgtaagtaattttttaaaaaggcaagaactgtttacattaaaatcgctttaatgaaaacaaactttaattatgacactgattctctttcacctgagtacatcagaaatttaagtgttaaaatgtgtttacactagtgcaaaacatctaaagtagatgtatttgagaaggtcttaaaataggaaaacttctgtttattttttcacttgaaattgtgttttgtaccttagtatttcttgtaaatcttttctgaatggaaaaaatgtttcctcttttgcacattttctaatattacctttcttagtagaatattaaacgacaaaagatcatataatatgtatgtgtataattgcaaggatgaagtgtgttcagatgatcaaaaaatttatcagcttatatttctccaaagtggaacaaatactgaggaagacggggagagaaaaagaaactgggaacaatactagagccaaactaaagcaaac

SEQ ID NO: 93247 - DNA, 999 bp, Homo Sapiens
  misc_feature (203)..(324): n is a, c, g, or t
  misc_feature (807)..(807): n is a, c, g, or t
  misc_feature (877)..(877): n is a, c, g, or t
gcggccgcgggatttggagcggccggggaggcgggggtggccggggccggcttggaggcctggcgccacccttcggggcctgcaaggacccagttgggggggcaggagggggccggaggatggttggttgtgggatttctactttgccttttcctccttatgccgccttagtgaggggcgggagctctggcggcagccccggnnnnnnnnnnnnnnnnnnnnnnnnnnnnnnnnnnnnnnnnnnnnnnnnnnnnnnnnnnnnnnnnnnnnnnnnnnnnnnnnnnnnnnnnnnnnnnnnnnnnnnnnnnnnnnnnnnnnnnnnnncctatcaatgtgtgtggggttgaaatcgctttgtaaactataaagcgtgggtgtacgtaaaggatggttattgtttataattttttttgagttgtaagaaaacttagcagttccccaatccttgggttttgaacctgggaaccttggattggagttggggatccccaaacttcctgaaattgtgggaatgtgcggtttgggggaatgatgggaatttgtgggaatgtgcgttttaggggaatgatgatccatcgctagcaagttttccaagggggctgtgacccagaagagttaagaatcacaatttcttcatgctacagagaggaaactgaggcctagatgtcatttgggacccttcacaaccattttgaagccctgtttgagtccctgggatatgtgagctgtttctatgcataatggatattcggggttaacaacagtcccctgcttggcttctattctgaatccttttctttcaccatnggggtgcctgaagggtggctgatgcatatggtacaatggcacccagtgtaaagcagctacaattaggagntggatgtgttctgtagcatcctatttaaataagcctattttatcctttggcccgtcaactctgttatctgctgcttgtactggtgcctgtacttttctgactctcattgaccatattccacg

SEQ ID NO: 93248 - DNA, 323 bp, Homo Sapiens
taacttccttcctataaacaccttcagtcaaagaaagccagaggagatgcactgagactgaaataacatctgttgactaccagacttcactgaaatcggccgtctgctctcctgagttggcattgttgctaagataaagcaaatgaaattgaagctgtactcttgatatttacaccatacaagactaggctgttagggttgtcctgtgtggtctgcagccagaggttacactgtaactaccatatgcaggccagacattcattctgtgcttagggactgaattacactataaggtgtaacactggaccgaagacttttccatt

SEQ ID NO: 93249 - DNA, 556 bp, Homo Sapiens
tctcggtgaggaagccccgagctcccgggacgcagacagggtgtgcagggccgtagctcgggcctgtgtatgcacctgtgcgtgtgtgtttgatgccaggacaaggcggcggtgtgcgcggcgaggaggctgcgacagctgtatagaccccagctgcagtgaaatggccatcaaaaagggaagggataatcgagtggtggaataaaatctgcaaacagaaaaaggacagacctgttttcggaacgaggcttttcgagttaccaccatgactgaaggctaagagcaacttgcttgcgcattaaagatcacttggagagagaggtccagtgagcaacaacggccagaaatttcagggagaccatcttgaaccatccagcctccaccaggccaacagctgacagctgtcacatgaatatgatcagcagaagaaccactcaggcaagccaagcccaaattgccaagccccccaaataataagctaattgttttttgttttaagccataaacttttgaggtggttatatagcaataaataactgaaacaggtggaaaaaaa

SEQ ID NO: 93250 - DNA, 440 bp, Homo Sapiens
aacccgtacaacaatctgatcttcatctggggcaacttcctcctgcagagctctaacaaggaaaacttcatctacctggcagacttccccaaggaactgtccatcaaatacatggccagatcgttccgtggggctgtggctattgtcacagagacggaggaggtgggctgccccgcccctctccccattccctctctgcccacccccaaaccccaggggcccctctttcccccgtcacagtaaaggagccaagggaagggggcaccctcggggaccctgagaaagggcagtgaagctccatttataactgaaactcctggaactcagggtaagtgtcagctccaaagtcacgcagaccggggctatgatctgatgttcagaggcggccctctttcatcccacagtgtggtcgttcacttcataaatattgagcatttaaa

SEQ ID NO: 93251 - DNA, 1529 bp, Homo Sapiens
ggaccggtccggaattcccgggatgcggggcccgggccgtgggagcgcctgaggggcaggagtccagtgttttagccttcgaaggaccatggtgcttccacgtcatcgtgttgtggcgctcccggctatggcagtaccgtagttttcctctcttctgcctgcggtgaccattgggctgtagggtgccccgaggcctccctggccccctcacgccggcagaatggcctcagcccgaggggccaagcagtcttcgccccgggtggggaccacccgctacacagagacgtccacggtccgcgtggagacctcgtcccaccgcgtggagacgtcgtcccggcgggtggagacctcccagcgccgcagcgaggggccctccctctccccctcggggaagcggctccctcgcatcctcgaggcgtcctcccggcacgtggaatcctcctcgcagcgcacggaaacgacctcccgccacgtcagagcctcgtccctgagggtggagacgtctctgcactgcgcggagagcccgaccccgcgggccaagccggccgcccgccagaacgaaaaaacggcccgatgagatgctgcttcccaaaggccaccaaggggccagggccctcagccaggacagaaaggcctccagttgccagccagccagccagctgccaggtggaccaatcattttcggtttcatggaaacaaaccataaatcaatgtaagaaacagccaagccgcagttttctgaacacagccaacgtttactgaccgtcctgcgtcttggaccagcctacttttgacccagtgaactattttcacttgaagccagcacagaaagttttcagggcccaggatgctgtctaaatcggggttgatggacaaagaaaggctgttttgagcctctgagccaggtgagtttgggatccacagccctcagaaaaccttcaccccttaggaacagagaccaaactgaaataatgacctgtggaatgattccatgcctgctaaaaactcgagggacaaggaacagactcataaattattaattggcctttgtttatgtttcaaagtaaatggtcgttttctttatgctaagtctttgtacctggcacccccatccatacacttttttaaggtaggttagatgtggttaaaaatgacagtaaacccaccagcaagcaaaaataatcttagaaagtgagaggaggtcactgaaacctggcctgaggtttgaagaagatggagaagagttatatttattgagaaccggctctgtgccaggcactagatgttcctccacttacgatggggttacctcccgttgaaactattgtaagttgaaaatatggtaatttgaaaatgcacttaatacccctaacctactaaacatcatggcttagcctagcctaccttaaacatgctcagaacacctaaagttgagcaaaatcatctaacagaaagcctgttttataataaaatgttgaatatctcatgtaatttattgcatactgtactaaaagtgaaaaagaatggta

SEQ ID NO: 93252 - DNA, 394 bp, Homo Sapiens
acactctttttggactccggctgcctgcacccaggtgattaaaaagctttattgctcacacaaagcctgtttggtcgtctcttcacacggacacacatgacatttggtgccgaagagctgggacaggaggactccttcaggagaccagttcccttgtcctcgccctcactccatgaggagatccacctatgacctcgggtcctcagaccaaccagcccaaggaacatctcaccaatttcaaatcagccaaaatccacagtgatccacataatactcaggaatcacccagaagggatttctatctgaaaggagaaagaagctctggggcatgaatatacgttgtcttgtgaaaaaataaatcagtaattcatgtgtgtatattttatactcaaaa

SEQ ID NO: 93253 - DNA, 1137 bp, Homo Sapiens
  misc_feature (903)..(914): n is a, c, g, or t
  misc_feature (1056)..(1077): n is a, c, g, or t
ggcagtaactcataacggttctaaggtagcgaggcctgggtggcgaattcggcacgaggcctcgtgccgcgcttgcggggtgctcttcgtgtccatgctggaaaccttcggctccaaagacgatgacaagatggtctttaagacagcatgggtaggttctctctccatggggatgattttcttttgctgcccaatagtcagcgtcttcacagacctatttggttgtcggaaaacagctgtcgtgggtgctgctgttggatttgttgggctcatgtccagttcttttgtaagttccatcgagcctctgtaccttacctatggaatcatatttgcctgcggctgctcctttgcataccagccttcattggtcattttgggacactattcaaagaagcgccttggactggtgaatggcattgtcactgctggcagcagtgtcttcacaatcctgctgcctttgctcttaagggttctgattgacagcgtgggcctctttcacacattgagggtgctctgcatcttcatgtttgttctctttctggctggctttacttaccgacctcttgctaccagtaccaaagataaacgagagtggaggtagcggatcctccctcttttccaggaaaaagttcagtcctccaaaaaaaattttcaattttgccatcttcaaggtgacagcttatgcagtgtgggcagttggaataccacttgcactttttggatactttgtgccttatgttcacttggcaaaattcagctttgttatactgaaatacgaataattaatgtctagactggggttggtgcctcacgcctgtaatcccaccactttggggggctgatgcaggagttcaagaccagcgtgggcaacataaggagacttcatccctacctggggaaggnnnnnnnnnnnngaaggaagaagcagtgtctaaagtatccgcccctggcaacgtttgttcaaaagtgttcattatgtttcttccttttttcttttgtggctgaaaatgtatttacaattcaccgtaaatgataaaaatggcattggcacacatnnnnnnnnnnnnnnnnnnnnnngaccgcgtatgcggccgcaagcttattccctttagttgagggttaattttagcttggcac

SEQ ID NO: 93254 - DNA, 587 bp, Homo Sapiens
tgcatagaaatggttctggctcctgggaggagaacgaattggaggtcaaggacatctaaatgagaatgaagttggttgctcccttgagtgtaccaggctggatgtactgaggcagagtttggatctctgaagtctccatctggctttgtgggtctttagtgctgggattatgcagtgacaccccaaatatacacatgcttcatcggaggcagagtcacctctgctgcatggctttattttaaaggaatttgtctcttgggagttttcaggaaaaaattacccttgcaagctggttttcttcaaaaggcattctttgctcaatgttctttccttctacacatcacacgaattcctacttcttggccttggtagtctactgtactccactttaattccttccctatatttcttctgccattttatcacagcctgattctgttgctgggtcctctgtgaagtcttttgtaataattacacctacatcaacctttctcttttgtaaacttctattgtctgttccttagacttttatttatattttttgaggtataattgatgtataataaagtacctatttaaagtgtaaa

SEQ ID NO: 93255 - DNA, 393 bp, Homo Sapiens
atgtgtaccatttcagtcttagaaagtggagttggtcgctgtacgcaagacagacattggggctggactcaccatcagtggccccgaaaaggtactgaaatttgcttacaagtgcagagttatgctgaacttaagggtatagatgtagattccctggttattgagcacatccagggaaaaggcacccataatgtaccacctgacttacagaactcatgggcagatgaacccatccacaaactcccctgccacatccagatgatgcttagtgaaaagaaacaccttgttccaaaagcagaaaaggaggatgcacggaagaaaaagataccccagaagaaacataaacttaagagacaaacaaattcagccaaaagaaaatgcaaataaaagttc

SEQ ID NO: 93256 - DNA, 413 bp, Homo Sapiens
tttttgatgtttgataatgtttaatatacaaaggcagagttaattcatccttctcagggcttaaacccgtccagggaaattgtaaataaaaacaagcttcatctccgataaaaataaaacagtgtccttcagatcttactgcttcgcgactttatgaattggaatggaaacgttgttgccttttgggagattgacctcagctgtttttcaactttttgaagaataagaactctaattttggtgccaatactcaaatagaagttttctcaggtggacaaacaacacctggtaggctggtttgtcatggaaattgcaccaccttaaaatcaccaggagaaccaagctgagtctttgctttgaccctgactagctctgtgaacttgggcatatgtaaaggatctggtatataatag

SEQ ID NO: 93257 - DNA, 581 bp, Homo Sapiens
  misc_feature (186)..(195): n is a, c, g, or t
aaaatattttaggctttgtgggccatgtgccctctgctgcagctactcagctctgcctttgtagggggaaagcagccactgacaatatgtaaacaaatgagggtggctgtgtttcaacagaattttatttatggaaactgaaatttatatttcatataattttcatgtcatcaaatattctcttannnnnnnnnncagccattaaaaaaatgtaaaaaccattcttagctcatgggtcatacaaaaacaggtggcaggctacatttgacccatggccatagtttgccagtgtctgatatagcccagtggtttccaaatctggctatctttcacagtgacctggagacctttaaaaatgttgattcgaagtgcccctctctcgtccttgaggattctgattctgtaggagtgaggaatctgtattttttataaaagctgttcaggtgatagacatacactcagggttgtggaattagcagtactgatctcactcatttaactgttgaagaaacagccctagaagatttatgtgacttcctgataattaacagcaaataaatggcatgaccaaaattcgaaaa

SEQ ID NO: 93258 - DNA, 502 bp, Homo Sapiens
cacatctgcggacagagtttccttacgaggagacttggtcactgtgaaggagaaagaacggtcacacctccctggcacctcccatagttacagccactacatccccaccgccgcctgtcatccctcacgtctctgtggccacccgggtgtcactgccagcaccaggcactgctttcacgtaaaatgtccaaatcacatcttcagcaagaaagcaacctcacggattgccccgcctcaaggtctttccaccctctttgagatcagcgttcggagaggtccccgccagcccggtggctgccctcaggtcccgtcacatgtctcaagggtccagcgttcgaggaagcactgttgtagatgacagagctttttgtttcacagctgcggggattctgctgaccatcttttagaaaattatttcataatttattccggctttgcccccttgctccttggtttattccctcatgttttactcaaaataaacatggccatgaactcaggg

SEQ ID NO: 93259 - DNA, 333 bp, Homo Sapiens
agcttgtccagaaggcaaatcaactatatcactaatcatctttagttccattgactcactgattgtaggaagagttcctcagtaaaggcagcagtgcatttaattatactttggtgcaagcttatcttaccataccatatccatatggaatatcatgcagctcttacaggtttttagaagaaaccggcatttaataatacagagaaagttcatgaactaccattgagtgaacaaagcagaggacaaaactttatgaatgatcacaatttcattctcagtgtatttgcagagcaaaatcttagaaggaaataaatcagcatactgatgaaaaaa

SEQ ID NO: 93260 - DNA, 586 bp, Homo Sapiens
ggtgagatctgtttagggtcaacggctgtgtgaggaaaggagaggaatcagggctgggcggagggagatgcatatcgcagcgtggtcaagccagctgagcctcggccaggctccagagtgaaggcggccttcagagagttccctggccgcttcccggccttcccctcccgccttgctcatccctggacggggctccctacagcagagctcagttcctccttccttggggcctcagactcgaccccccttcctgctgctgggcagcagaggcttcctggggtggcacttctgtgttcaccccatgaaggcactttctctctgaagtttacacacaaggaagacccgtttgaggccatgaaatgtgcactgtgacagtgacgagcctagggtcacacggattcatcgtcccgtggagccacattccagcatcttttgggggaggacacctctgccgggcaatgaggagccagtagcaggtctcccctccctgaagacgggctggacacaaatcacctcattttccactctgtccacacctgaggctgcatctcagctggaaaattacactggaattctaaataataaa

SEQ ID NO: 93261 - DNA, 540 bp, Homo Sapiens
  misc_feature (18)..(18): n is a, c, g, or t
ggaagaagcatcccgtcnatgttgacttttgggaatctacataccccccgacaaacaagttctcacctaaagcccacggactaataggccagttcatgcaggaaccaaagatacacatcttcaatgagagaccaggaaaggaccctgagaagccagaggccagcatggaagtgaaggggcagaagctgatcatcaccaggggcttacagaaagactacagaacggatctagtgtttggaacggacgttacctgctggtttgtgcacaacagtggaaaaggattcattgacgggcattacaaggattacttcgtgcctcagctctacagctttctcaaacggccttaaaggtttatagtttgggaaattatatatattaatatacatctttcccctgtcacttttgcagatattcttcggtttgaataattaaaatgaaccagatatcagggtggttaattaaaatgaaccagatatcagggtggtttataaagcctgtaaacacacctaagaaaataaacattttacaaatgaaaaaaaa

SEQ ID NO: 93262 - DNA, 596 bp, Homo Sapiens
  misc_feature (396)..(396): n is a, c, g, or t
cagagccatcaactaatcacgtctctgcacccagggtcccagcctggccaccagcctccctttctgcctgaccccaggccacccctcttctctcccacatgcacagcttcctgagtcacccctctgtctaaccagccccagcacaaatggaactcccgagggcctctaggaccagggtttgccaggctaagcagcaatgccagggcacagctggggaagatcttgctgaccttgtccccagccccacctggccctttctccagcaagcactgtcctctgggcagtttgcccccatccctcccagtgctggctccaggctcctcgtgtggccatgcaagggtgctgtggttttgtcccttgccttcctgcctagtctcacatgtccctgttcctctntcccctggccagggcccctgcgcagactgtcagagtcattaagcgggatcccagcatctcagagtccagtcaagttccctcctgcagcctgccccctaggcagctcgagcatgccctgagctctctgaaagttgtcgccctggaatagggtcctgcagggtagaataaaaaggcccctgtggtcacttgtcctgaaaaaa

SEQ ID NO: 93263 - DNA, 403 bp, Homo Sapiens
agattcaaggaagccataagtcatactaaataatattatatacagttttgttatcgagacttacatttttgttacttataaaaagtatattcaaacctgtatttcccaaagaaatctaagtgaatggagaactcaaataataactgtattcataaaactcgtgtcttaaaacaaggcttacttactcagacataaactgaatgtaaaaagtgctttttcaaatctctttgcaaactcgtgggagattcccgcatgtataagattaagattatacttcaagtgatgcgtgtctgtgctatttagcatgtgtactataaccaggtgactatagtattccttcagtcttcgtagtaaccggattttttcatgcttctggtattgctttataaaagattttcatttc

SEQ ID NO: 93264 - DNA, 690 bp, Homo Sapiens
aaaaaggtactcacagatgctcctcccattatcttgggaaacataacggtagaacagccatctggactctgtccgaaggtggtatagggtgtttgaaaccaagccttttcattagcccaaaccacatcgcaaagaggcaatatagatgctcctagaccaatggctggcccattgaccgctacacataatgggcttcttaaaatgaatgaaaggattcacgaagggtctgatagcttctgccattttagtgctttctcttttcctgtcatctgtcagacgtcggataaaataaataaagtcaagtccacaacagaagacgctgccaacggcgctgagcagtaccagcttgctgtcatcggcagcggccgtgctcagagcactctggacttctctcattacctctggatttagtgagttattctctgaggactttgtggataacaagatgtgggtgaagccatcctgcttcctgaccacaatatctctgtatctgtaggcactttctgtttgcctcacgctgaaacgcaatcgcttgtcaaaaggctggtctcttctgtcgtcaataaatttccttttgctggcagtcactcctgtaacagatgtctgtatgttggttgtcccattggctgttaatgcatccatgaacggagatgtacctcttaaaacagtttataggctatgcaggttaag

SEQ ID NO: 93265 - DNA, 507 bp, Homo Sapiens
ttaaaaaggtactcacagatgctcctcccattatcttgggaaacataacggtagaacagccatctggactctgtccgaaggtggtatagggtgtttgaaaccaagccttttcattagcccaaaccacatcgcaaagaggcaatatagatgctcctagaccaatggctgggccattgactgctacaataatgggcttcttaaattgaatgaaagtattcacgaagtttctaaaatgaaaaataaatggggaattactcaaaacattgcatatttgagcaaaggaaaagtctattatggaattcaatttaccaagatgtaaatgctacggaaatcctgaagacttgagatttgtttaaggccttccccagcagttgtggaccctagacttatttactacgtgttgtaaaggtttggtgacagcctggagcccacgcatgtagtggctgtcactacaggccctacgtgaaggccacagggtaacatgcagccatgagctgcactggaatt

SEQ ID NO: 93266 - DNA, 424 bp, Homo Sapiens
gaacaagccactgtgcctggctaaatcttttgaaaacttttaaaaggagccagtcacacagatgtttagtgcacatcctgcatctgactgagatggttaacttaataatcttttgctttacttaatattctcttactttactttggtatcaactacatacagacataaatgagctgaatagatagacattatctgtagaatttggactatgacattttgacataatttagtttggtttgacacatataacatttatatatacttttaaacaggctttatttttcagagcagttttagattaatggaaaaattgacaaaaagcacagagaattctcatatatacccctgcacacagtttcccatattattacattgtattagtaatgtactaatataaacacttatcttacattagtatggtata

SEQ ID NO: 93267 - DNA, 460 bp, Homo Sapiens
acagctcccatctccctggaaagaggaactgatgtttgaggggacagatgtgggtcactttccctggcagtgccctctagccttgctgccttggctttctgaccccttccaggcttcaggggcctgggagatctcatgcctcagcccaggaaacatttaatagggaaagcagagacatgtcatgtcagccccacagacaagaatttctagagcacttgtcctgttgttccttgccccgacattactcagtctgggccatggaatccatccaatataacacagcaacaccctatgctactgaccaagcaaagcttgcccctggtaccaaagagctaaatcatgaccaaagtgtgacatgaatgtaactgaaatgcgggttagttgctcaatgtatgcaaagtcccacggacaagagtaaagtctgataccaataaagtgaatgtattccaaagctaaaaaa

SEQ ID NO: 93268 - DNA, 605 bp, Homo Sapiens
aaagtgaaaaatgattattacaaatgaaataataatttcccctgtgtaagttccgccttctgtcccctccattctgatgaaattggctcataccccctttgttactctctgtaccctgaacctctatcccagctccagaaattatttattatacatatatttctatatgtagctctctatatttagtgaggtttttcaagggttggatcaaattttatttgcctctattttccaatacctagcagaacagaagcatatcccaacttgtccggtcaagggaatcatcctctggagtgcttttggtgaattacacaatatccaccagcctttatgagaagttattttgttggcagagggctgctctgacatcctgtgcacctgagaggcaaggaagaccacctgaaagagaagaaatatagatgccccagagagactgtcttttctacaggatttggaaaatgaaccacaaatccaaatacccccacagaggcagaatgctaaaaaccttcatctcagattgacacagtttagagatttgaaagcccacttctccttttaccatgtcaaattataacaggaaaaataaaatgctgatttgagtctct

SEQ ID NO: 93269 - DNA, 396 bp, Homo Sapiens
tggcccccaagctgagaaccgggagccggaggaaatcatagcgaaatctcaacctgatgtagccccatcagcatcacacacacactcagagcaaaatggcctgctcttcaatgtagcttagtttagttcaattgtcctgcccaccccctcctgaccctcctgccgctgaggggtggtatttgaaagaacagcttctttcctctcttctccttgggacagcaacagcacagagagtgggccgccatctcttactgcccactcaaccgttgctggggactgattctttcagctctacatagaattcaagaactatatttggatctgcttcagagcagtaatccccacagccttaaaacatgcaaaataaaaataaattaatcatccatcagcaaaaaa

SEQ ID NO: 93270 - DNA, 416 bp, Homo Sapiens
ggaacggttatctgtgtacaaaacatgggcagactaatttcttgcacatagctgctgccagctcctaccaccagagagggactgactccctttcccaaggagttctgatctgtgtgctttgggtcaggcaccaaggtccagaccagccaatagtgaacaggaaatcaaggtctctcatccagagtgcagagaacactggcagggattgtggctggagaaatgaaacggaatcctgggtgacgcaggtcctcagacagcagggcttttaaaagattctgagacagccagtcctcccctccctgctgctggaggaaggctcttgagaacaacacagcaaccgtcagaccaggaagggcaggcagtcctcctgctgtcctgtcaacaggtggaaataaaagtccttcaccccaacaaaa

SEQ ID NO: 93271 - DNA, 601 bp, Homo Sapiens
cgttggcggcttaggggctgttactgtgtcccacccaggcgtgcacaccgagcggcggggcgctgtggaacgcgggagcggactagcggaggaggatgcggaccaagccccagcgacccagggcaactcggagctacctcgggcagccctgcgggtctccgaggagaaccgaggagacgggagaaacatgggagagggtggccttttccctgttcacacacacatgcacgcagccactggccgggacagttgacacccatcttccttccctgctccttccagtcattctacacccgcttggtgctgccagtgcgggcagggccttggagcccaaagcggatccccacacttgtccctacggtcggaaggaaagtagaggagagaaagtcaggcgcggcagggctaagagcaatagtggcccaaatgttcctggcccgcctgctgcgccacagagtctgaaaagcgggtctccgtctaccagaaggtgacctccacacagcccctctccccgaccaactgcagcacccaaggactggcaacgtggttggagcttttggggggaattatgaagaaatctgaataaatttctcacccttcaaaa

SEQ ID NO: 93272 - DNA, 548 bp, Homo Sapiens
  misc_feature (216)..(216): n is a, c, g, or t
agaggacagtctcacggtccccaagcccagagaccactgggaggggagcaagtggggtctggaccaccgaccttagcttcacctcaacccccaagaacacctgccccgttggaggcagactggagctggctgtggattttatttctcaggagaaggaggtgggagctggagagagtgacccgtgcatctttccagcttttccttggccacctgggntggcatgggagctgggagtcagagttctgctgagctgtaggaccaaaggccactggctccgctgcacctgcggactgagacacccacctgctgagtgagacccagcctctgcgtgcttaggggtcccctgctacagggcattgaggtgaggtccgcctttgcccagtgtgagagcgctgctttcagagctttgagaaggctgttatcatttgtttctttttgaacttgccacctccccacttagagaatatttctggggacagagtttcgtaactcctgccgcatagttggtgcctgctctcgactacattaaatctattttcagtgccaaa

SEQ ID NO: 93273 - DNA, 519 bp, Homo Sapiens
tgcggtggacatgcggtctgcaatactctgaataattgtcaacgtgatgttgcatattctcctcaaactcgtaggcaagatagttcatcaccaggaggaagtattgatgatgggttttggattttaggaaaaagtacacccttgtttgtgaacatgacatgctgttcctcagaaaaatggcctttaatcagttgctacatttttctacctttcctcattttaactgccatcattggtcttaaatggaacaaaatgaagggattttgacactgagcaaaaagtgtaagtggaagaagacagcagtagtagcagcaacagtaacagcagtagtgacagcaaccagtcatagagtaactacatgataacatcaaaagccataagatagagaaaggatattaccaagaaacttaccattaactggcttgattcaacaatgaaaacaaaaatcgccttttttctcctttcattatggcttaaagctttcaattgcacaaacaaaataaattatatgacaggaaa

SEQ ID NO: 93274 - DNA, 796 bp, Homo Sapiens
  misc_feature (283)..(283): n is a, c, g, or t
  misc_feature (290)..(290): n is a, c, g, or t
ccggctcggccacgctttctcctttctaggactatccgcatgctacgcacttcttcccgctgaaagctgccctggcccatcggaaatccccatctcctccagctgcgagctttacgcgtctgagcagtgccctgccgatggcttttcggtcgcctgggtcctctgtgtaggtctttcatctggacgctgcactgagctgccggctgcttcatgggccttttgcctttcccagcttggagatgctccaaggtgggagttgggggagccaccctcggccattccntccactncaagacaggtggcggccgggcaggcacttttaagcccacctccccttcttgttgccttcgatttcggcaaagcctgggcaggtgccaccgggaaggaatggcatccgagatgctgggcggggacgcggcgtggccgagggggccttgacggcgttggcggggcctgggcacaggggcagccgcagggaggcagggatggcaaggcgtgaagccaccctggaaggaactggaccaaggtcttcagaggtgcgacagggtctggaatctgaccttactctagcaggagtttttgtagactctccctgatagtttagtttttgataaagcatgctggtaaaaccactaccctcagagagagccaaaaatacagaagaggcggagagcgcccctccaaccaggctgttattcccctggactccgtgacatctgtggaattttttagctctttaaaatctgtaatttgttgtctattttttcattctaaataaaacttcagtttcacctaa

SEQ ID NO: 93275 - DNA, 511 bp, Homo Sapiens
gatttagaagcttgcactcactaaatagattaaacagagcaggcttgtttgttgaattgctccaaagtccaacagacacacactgagcaggtgttttacactcacattccctttttgccccttaaatagaaagtgcaggtaaaggttatacaacaagaaagcacattgaaaataatttgatactctaacaatccattaacatgtgtaggggttacggtgaggatcactgtgttgtattcagaaaaacggggagagggatgcttaattggccctggcgcttgctatttttttctcatttcttcacaataggaccgtctttggcagcagcaaaatgtatttcagtatggcagtctttcctctcttacattattggtaagattatactaacaaaatgtttccccttgtacaattatgctgtgtttttaaaaaacattgacctgtgtgtttttataaaagaaaaagtatgttgtgccttcttcttaagaataaagttttctaaagggaaaaaaaa

SEQ ID NO: 93276 - DNA, 405 bp, Homo Sapiens
gcttccacaccgatccctacccgcccctctttattttctgtctggtgggggcgagggttgggggtgtgattgcctctaaaagcaaagctagaaaacatttaatttagtgtatgtaattccgttcctcccgatgctcccgcctctagcaaccacaacgcggtatctggagctggtttcatgtatcataagttgatttctcccccagcctccgaaaagctttaggtactgggaagggaaagaaggtgcacttgtcttcaaaaggcagaatggcactcgacagtattggcagagattcttgccaaacactggtcatccagcaaagaaagtcggggaataaactcctgatcttctcggaggaaaggggcgctgggggccgagtgctggatccactcaggctcactgcgc

SEQ ID NO: 93277 - DNA, 1283 bp, Homo Sapiens
  misc_feature (446)..(531): n is a, c, g, or t
  misc_feature (1025)..(1135): n is a, c, g, or t
  misc_feature (1137)..(1140): n is a, c, g, or t
  misc_feature (1150)..(1163): n is a, c, g, or t
agaaagtgcctggattttacaacaggaagatacagatcgaccttccatatcaagtaatcggccctgggggctggtatccctattgctaccatctgctccaaacagaaagtcctttaccaagaagaaaagcaataagtttgcaattgaaacagtcaaaaacttgctagaatctttaaaaggtaacagaacagaaaatttcacaaaaaccagtgggaagagaacaattagtactcagacatgatggctgctacattgtgtaaagaactgggcttagcctatcaaatggtctgtggacttacttggaaaaactgatttgaaactttcacagatctcagctttcatctgatgtcacttttcatgatcttctcattggcccccttaacctggtctgaagttctgggatgttttcagtttgatcagtctgatactcagtggcactttattannnnnnnnnnnnnnnnnnnnnnnnnnnnnnnnnnnnnnnnnnnnnnnnnnnnnnnnnnnnnnnnnnnnnnnnnnnnnnnnnnnnnnttttgaatccatcgtggacaacatagcaagattccatctctaaaaaaaatgaaaataaacataagccacaaggaatgggtgaaagattattgtaatgtgctttaactaaataggtaaatatactaaacaaatgctaaaactcagttttaggatgaaaccattgttgatatccacatcagtccctgtttagaaaacatttaaaatgacttttagttatgtacagtacgttggcaatgaatacattaagcttcaaaatttggtagtgctctcgaatatgtatatttgtatttttcaagcgaagttctcttattcacatataaattaaagtgggttggtactgatatcaaaaaatgtttatgtttttagaacagacatttcagtcactgcattcttaggtattccaaaccaaatatgatgacatcaatagattgcattttaaaaatattgtttgatttttctattttcaaaaataaaattctgtttctaactagaannnnnnnnnnnnnnnnnnnnnnnnnnnnnnnnnnnnnnnnnnnnnnnnnnnnnnnnnnnnnnnnnnnnnnnnnnnnnnnnnnnnnnnnnnnnnnnnnnnnnnnnnnnnnnnannnnatttgggggnnnnnnnnnnnnnnaaaaaaatttttaaaacctttgtttgggcgcgcggcccccaaaagggaaaggaaaaaggggcaaaaccttgttcccaaagaaaacccggggacagaaaaagagggttggatttccccccc

SEQ ID NO: 93278 - DNA, 671 bp, Homo Sapiens
cacatatttatatttttcataggtattaaaatgaaacttatgcttctaaactaagaaatttattgttaccttttattctctactaagcagtctttcttgaattgttgtattttggaagtcagtaattatcaggattgtcattgttacagttaagtgtattgtcattagtctatttgtgttctcctggaactgccggtagaaatgtaatctccctaaaggtcctaatgaagcagcccatggtttctgagtgtcaaatttttaagaacgcacatgccgacaattgacaattgggctcaatatttcacagcgtctttttgttttctggtacactgtaagcagattactatgtaagtgattttcaaccctactagagaaagtgaagcacagagaaaccctttaaaagggtcagtttcacaaatgatgctagatctcagttcatagatccttatcttttactctctagcatatagtcagatgttctaaataaacttttttaaagaatagttttcgatttacagaaaagtcacaaaaatagtagacagttcccatatacccagtttctctattgtgtgagatgttgacatttgttttagtgtaagatgatacatttgttacaactaaggaatcaacaatggtacattactattaaataaactccacagtttatttgg

SEQ ID NO: 93279 - DNA, 265 bp, Homo Sapiens
  misc_feature (114)..(163): n is a, c, g, or t
cagcacgatgatgtgtatgcccatgtaaccttcacctagaaggatgagaaccacaagcatgagaacatgaggataaatacactttggggaaaaagaaaacagacagaggcagcnnnnnnnnnnnnnnnnnnnnnnnnnnnnnnnnnnnnnnnnnnnnnnnnnnttcatttcgcttatctggcaaatgtgtaatctgagtaatagaggtgagtgtttctaagaggatgctgttcagagacaaatacactgtttaaaatccattaaa

SEQ ID NO: 93280 - DNA, 531 bp, Homo Sapiens
tcatttatatataatcttcatttttcatgaggtaatggaagctggagagttggcccttgaccaaagccttgcagctaacaagaggacaagcctcctgccccacagtgtttcacagccagtaccccaagctcctgaattcatctgtctaatgtgtaatatatttataaacactctacctgggatgtatgcgtaccttctactatggactgttgttaaagacaagtaaatatgcaatcgtggtctttcaataaactaaacggatataaaaataaatatagaatacagccagaagatcaaaattgacatattatctatttatgcttataatatgtaattacatgtaatattgtaaaacactttctaccatttcataaaattctgtgttgttatttagcccagaattcccttgcaatcttttaaaaatagtatctaatagggcttttaatataaatgtcgtagtgaaactgttttatgtactgtaacccaaacatttctacgtagtaacactgttccatatagaaaacaaatatg

SEQ ID NO: 93281 - DNA, 437 bp, Homo Sapiens
gccacaaggtctgcacttcttgttgtgaaggaaatatctgtaacttgccactgccccgaaatgaaactgatgccacatttgccacgacgtcacctataaatcagacaaatgggcacccacgctgtatgtcagtgatagtgtcctgcttgtggttgtggttagggctcatgttatagtggctcagtggctccatgtgttaatagcgatccatggggatctcgatggtccacagacctgcatgagtcattggcctgacagtaattacacatgtgagacacaacactcttggaggtcatcacagccaagcattgccacttaccatgaggaataaatgttgcttcattgtagccattttgagtctaaccgagactcatcaaagccttctgtcagtacagcccaagttccataccataaacgtttgttttcattccaaaaaa

SEQ ID NO: 93282 - DNA, 613 bp, Homo Sapiens
  misc_feature (11)..(11): n is a, c, g, or t
  misc_feature (76)..(76): n is a, c, g, or t
cgatacacganaagaattatagatcacagctaagagggatttattctggatatacaaggctgattcaatatttganagtcaactaacgtagttaattacatcaacaggctgaagaagaaaaatcataaaactagatacagaagaaacatttgataaagtccaatacccatttatgataaaaattctcatcacactagaaatagagaggaacttcttcagcttgataaatacttatacagaaaacgtacagctaacattatggtgagaaactagatgttttccccctaagactgggaccaaggcaaagatgtcttcacttaccactcatatttaacatcgtactggaagtcctacgtaaagcaaaaatataagaaaaggagatgaaaggtatacagattgggaaggaagtttctgttcaccaaataacatgattgtctatgtataaaatcccaaagaatcaacaatgacaaaaaacaacattcctggaactaagcaattatagtaaggtttcagagtgcaagataaatacacaaaagtcaagtgcttgcctatataccagcaatgaacaattggaatttgaattaaaaatacaataccatttacactagcacca

SEQ ID NO: 93283 - DNA, 1554 bp, Homo Sapiens
gagagtatgaagtcgacggcgcgccgaattcggcacgaggccggagatcggcgtggccagcaccaaggcttataccagtcagttcatctctctggtgatgtttggtttgatgatgtctgaagaccgaatttcactacaaaacaggaggcaagagatcatccgtggcttgagatctttacctgagctgatcaaggaagtgctgtctctggaggagaagatccacgacttggccctggagctctacacgcagagatcgctgctggtgatggggcggggctacaactatgccacctgcctggaaggagccctgaaaattaaagagataacctacatgcactcagaaggcatcctggctggggagctgaagcacgggcccctggcactgattgacaagcagatgcccgtcatcatggtcattatgaaggatccttgcttcgccaaatgccagaacgccctgcagcaagtcacggcccgccagggtcgccccattatactgtgctccaaggacgatactgaaagttccaagtttgcgtataagacaattgagctgccccacactgtggactgcctccagggcatcctgagcgtgattccgctgcagctgctgtccttccacctggctgttctccgaggatatgacgttgacttccccagaaatctggccaagtctgtaactgtggaatgaggctgagaccgtgacaagaccatcaccacctttcatctgattccagacctgtcccaacagcagggatgctacatgggaagagaagtggacatcccacatgttctgcgtgctcctgtagagcttgacagcttccacgtgccttctacccaagtgcttttgcttacagcagatactgtttctctgtgtcctgaagtcgccagaggagaagggaatcattgtttacacatggggatcagagcagacttctccactactgtgcaatagagatacagctctcttcagagtaactgtgaaccttttataaccaacactagagttagttttaaaagacaagatatttataatgacgactgtatagcttttaagttatttttctagtatgtggctttctgtagccgtggtaacggccaaactgttcatcctagctacccatgctctgtgtccaggcttgctcctggcaggtggcattcatctcagatgtgagcacaaggcattggccctctggactcctttctccttttctttcctctctaggctgctcctgaatcctgttctctgacatccgtggagcccctcctgcatccacctatgcctcctataagtccagttgaaatctcagcctccttcaacattttcttctcgtgtgtggcccacatccctccacttctccaacttctgtttaatctgatcacggctctttttaagccctggcagcattttggtccctgctccttgcccatagtaaaacagcttgaaatatcccatgcaagagagtagtttcaagtgggcaactctgctctctatttaaaagcgtgcacaatcaaaagtactatgcaattttaggacaataaagaacatacagttttaaa

SEQ ID NO: 93284 - DNA, 465 bp, Homo Sapiens
agtcatcaaagaatttatatcagagagaaaccatacaagtataataaatgtggcaaggttttcagtcacaattcactcctacacagcatcagagaatttcattcttgagagaatccttacaagtacagcaaacccttcatcacaagttcaagcattcattgacatcagagtccatgctaaagagaaatcatatacacctaactgtgtggcagaggcttcatttaggtctcacaactcactagacatcaaaatgtgtaaacatctttgtatattttgtgcatgttgaagctattaaccaaggatcaaaactgtaacacatccaaggatttatgtgaggaataattcagtctagttgtgctgataaacttttcatattacacattgtagaacaaatgcaagcccaaatgtgttaaaactcacacaacatgatatatattaaaggttgcaggatgtttgaagtcaaaa

SEQ ID NO: 93285 - DNA, 967 bp, Homo Sapiens
tgacatacacaaaacccaccaccaggaagctctagtgacatatagaacacgtgcttaaaaaaagcaggctggtaccgcgtccggatttcccgggatatcgtcgacccacgcgtccggacgccgaaaacacccagacgcctctccggaatctcccgggcctctgctctgattactgctctgccttccattctaactgtcactcagccatttccctgctgaccaatgaccgcggcctccaggagtctcatggaagggacggtacccgcttctgccacctcctggaccttcctgacaaggactattgcttccctaatgtcctgaggaacgactatctcaaccgccacctgggcatggtggcccaagatcctcagggctgcctgcagctctgcctgagcgaggtggccaacgggctgaggaaccccgtctccatggtccatgctggggacggcacccatcgcttctttgttgccgagcaggtaggagtggtgtgggtctacctccctgatgggagtcgcctggagcaacccttcctggacctcaagaacatcgtgtcgaccaccccatggatcggggatgagagaggcttcttggggtcggcttttcaccccaaattccgccacaatcgccagttctatatttatcattcgtgcctggacaagaacgaaggtagacaagatccgaattagtgagatgaaggtttctcgggctgatcctaacaacgctgacctgcaaatcacgagagggtcatctaggagcattgacagaacagactcaaaccataatggcggacaacttcttttcggcctggatggctatatgtaccatattcactgggcgaaccggggacagggctgcgacgatccctttggcccctgctcgcgccactgctcccgaccacacagttccctgcatggccacacagttctaaacgggatcccatgttcaaacggccaagcctcacactggc

SEQ ID NO: 93286 - DNA, 461 bp, Homo Sapiens
ctgccaatcaaatgcctgaagccgtgatcctgggaatgtatccttcctcgcctgaaggggaggggtccgggcttctctgggcctcagcttcctgctctgaaagtgagggtggggtaggttgaatgggctccagggctctcccatatgcagtcatctgcttggccccaagatggagaagcaccacactaaagtggaagaaccccccaaaatggaggagccccgaggtcccagtaccccacatctcagttgctaccttcccaggcttactgggcagctcttttttgagtcacgtggatacagggaccgttttctgaaccccaaatcagggcacagtgtctcacaaagacagttgtaccatttccaagaactagacagtctgggaggcacagttggaatgcccagatgttggcatttccagaacatgttgatttctggacgagatattaaagcaaaactgcctt

SEQ ID NO: 93287 - DNA, 738 bp, Homo Sapiens
ggcgaagagagaagagactatcaagatctccacttagggaagtgggaatcttatttgcggaacattgggcagaagctttgccattggctggtggagaaggaggaggcagaatgtctgcattgttacaccatacagctcaaacttcagaagatttggggttaagcagttatcattagtctgcaaatgatcgtgttttcacctgatcattagaaactaatgaaacaccttttaagtcttatgaattcaggttacactgttttccagatgccttggcagctggtacagggcctctgaaaaatggaaccaaattctctgaggactaaagtcccagctttcttatctgatttggggaaagccacattgagcggaatcagaaagtgtccccgatgtggcacatacaatggaacccggggactgagctgtaagaacaagacatgtggaaccatattccgctacggtgcacgcaagcagcctagtgttgaagctgtcaaaatcattacaggctctgatcttcaggtctactcagtgcggcaaagagaccggggccctgattaccgatgctttgtggagctcggggtttcagagacaacaatccagacagtggatgggacgatcatcactcagctgagctctggacggtgttatgtcccctcatgcctgaaagcttgcactcaaggcgttgtggaaaaccagtgcagcacatcaagctggcggtgaactgccaggcagaggacacca

SEQ ID NO: 93288 - DNA, 777 bp, Homo Sapiens
gaagaacagcctttcaaatttgacttctgcatgtggataggtgagtgtcttttgtggataccgacagtgggaatggctcctctcaacttgagaaattcgcaaggaatttccatgcgcaagttcagcaaggccaactgacgcagagaggaagcaccctgactgttccagttcagacactcttggggcttgttagtaattgagtatgtgtctgcataagtgagtgtcatttgtgggtccagacagcaggatctgctcttctcaatttgagaaattccgaaggaatctccatttgcagattgaactagcccaacaaacagggagaaagcaactcaactgtttcagtttggactctcttgggacttgcttattgttgtagcagttagattgtattctggtggttgtttgtgtgttgatgtagttgtgggagatcagggtttgatctgagtgcagaccgcttgggtgtattcttcagggttggtctgcatgtggctgtgggccagtggagtgagggaacatctctacccgtatcacgctgaacatgcccaatctcatctgatctcagacagtctttgaattgtagcactgccttatatttggatttattttgctgttgaatgtgaatatgggatggaagtccatgtctccaggcttctatgctgctgctctaaggacaggcaggcctgattagtatgtgctgctgtttggctacagagttctttggagtctggagagatttggcctttaaaaatcaaactgtcagaccctgtctcaaggaaa

SEQ ID NO: 93289 - DNA, 416 bp, Homo Sapiens
ttatgggtcaattttcactgaagtgggctggatgtgtgtattcatctctcatcagtgccaaaaggaattatgcacatcattcattggacaacaggatgaaaacttgtctctgattggacactagggatatcagctgtacacacaagataagtgtaaagttgaaaagagaaatacacttagtaattcactcaagctagcatttattaacactttaaaacttgcattaaaatgttcatgatattatttccttcctcatataagaaagctaacattacaattcttaaattgaatgaaacataccatcataaaaattgctttgcagagactgctaatgcaaaaacttttaagctgttcatccttttttaatgaaaaagataataagatcaataaaagcaccattctttaccacttaaaaa

SEQ ID NO: 93290 - DNA, 677 bp, Homo Sapiens
  misc_feature (86)..(171): n is a, c, g, or t
ggagaagctcagacagaaacttgcttcagaggctgctgctggggccctcattttggagtatgatcttctaagccccaacacaggcnnnnnnnnnnnnnnnnnnnnnnnnnnnnnnnnnnnnnnnnnnnnnnnnnnnnnnnnnnnnnnnnnnnnnnnnnnnnnnnnnnnnnnccggccgcaacaggaagggagattggacgcctggctgttcccactccctttggaatttaggcattaatgtcaaaacagagatcagaaggctgacagaactgaccgtggcaataagagccccagttacaaacaggacccaagaccatgtcagacgagggttaagtcaagtcatgcaccctgttagtcacccctgccccatgtttcgggtgcagatgtcctcatcgctgactctaggttttagataaagctttgctcctttaaccagccgcaaactgaagactctctgaatccacctataaccgataaggcttgcttccagatatcccgcgtgttcgagctgagccaatatatatctcgtccacctgtaacgcctgtcccctaaagtgcatgaagccagactgtaatccaggcacctcaggaacactcactctaggcttcttgggtttgttttttctccaagctgtggtcaccgtattaggggtcccaataaacctctttaaaatgtt

SEQ ID NO: 93291 - DNA, 370 bp, Homo Sapiens
atccacagcaagaaaatcaggccacagaaagctgtaaagagccttgggatggagactgaaaagaggcaggaccacctctgacatttacgtcagtagtgagaatcaggtggactgatgaaacctctagtaaaccaaaggcaccctacacctacgatagttgttaagatgtgcacagacgtaggattgacccacatcaaaccatcagaggaagcatgcagagatgcagcatgcacatgactctctaggcctcagtttcctcactagtaaaagagacaactttaatgagttggtatatgcaaatgagttatgtacaaatgaaatgaggtatgcaaatgagttgatgtacataaatgagttgatacatgcaaaa

SEQ ID NO: 93292 - DNA, 497 bp, Homo Sapiens
  misc_feature (53)..(161): n is a, c, g, or t
aactccccactccttcctgctcctcagccagggaacttggagaatctagccannnnnnnnnnnnnnnnnnnnnnnnnnnnnnnnnnnnnnnnnnnnnnnnnnnnnnnnnnnnnnnnnnnnnnnnnnnnnnnnnnnnnnnnnnnnnnnnnnnnnnnnnnnnngagcagcacacgcagtttcaaatagtgaatgactttcatctggaaatgaggccacaagatggagacggagcgggttgctcacccaagttcatgcagcgcccatctgacgttcccccgggaggagctgcagggccttctttcgaggaggtggcagaggggcttcctgcgtgcaaaggagggtcccaccagcccttttggaacctcagcctggtcctccagaatttcacctcaaactactggagtctaggaaaaccattaaaggaagaaattgaagcttagagaagttctgtaagatgctgaggtcacacagtaataaagagataaatgtgtgttctc

SEQ ID NO: 93293 - DNA, 414 bp, Homo Sapiens
tttaatgagccaggttctttcatttctgtctttgaggtacaggaaggaattcagagtggtgttactgagtggattccggatatccggcaaaattggagaagttctaatttatggagaagttataaattatgttcatccatatgaaaagtatgaactgaatggaaggactactggtgtaacctcttttgtcactggaaagttattgactagatatttcagtctttacaaaagaattccagaaagatggatgtcttcattatctcgtctgtagttggtcaatttttataaaatccaaacttttcttcttccctttttctcttgttgataaggattggactttctatggtttatccttccctctcttaaggtagatgcttcttttttaaaaacctaagacttgagacttcacaggcc

SEQ ID NO: 93294 - DNA, 450 bp, Homo Sapiens
agcatatctttccttagttcagcctctgcatgagaacccagctttgcctgacaccttgattgcagccttgataagaccgccactctctcaacaccttctctgttgtctctgaagaatggaccttctactcttggtgctgtgtcccagggaagcaatggacatgaaatcctcctatgtaggctgagaacttatcccctagaaattatttccccagaaaagcaaatatacttttgacggagctctttaacactactatcattcagtaacattttcaatgaaaccatcttttgttaactctctggggtactgacaccatttaattcactgagaacagataataaacagaacatttaattcactgggagaaaataaacagaaagcctaattccacttggctgaatctgcctaagtccaacttttgcatataataaatgtttaaaataacgaaaa

SEQ ID NO: 93295 - DNA, 565 bp, Homo Sapiens
  misc_feature (44)..(44): n is a, c, g, or t
  misc_feature (61)..(61): n is a, c, g, or t
cccccaaatccatctacatcaaatttgtagaagtagagaggatnttctttccgcagctctntagttgagtgcctggaaaaagccattgataccccttaaaatttaacaactgaatgtcatccttcataaggatttgggctcttagctccttcttctctactcacttcccattacccggaccacccctcatccagatgccgccgtcagactcttcatggaaaccctttcttcaattgggccagtacgacttctaaggaatcatagtagacttgggccagaaaaaacagacctcacctgaaaatgctcattttgagcaagcaagatatatagcgaacttgcatggtgggtcagctatttcttttttaaaaacagaaaaacaatttttaaatggattttagagccctaatataaacaaatgtaggtacattccatattggacaaaacttatactttgagtttcatatgaaattgaaaaattgtatttttttcacaatgtttcatttttacacatctctatgtctctatataagtaatatttacaaccctgaataaataagcaatagat

SEQ ID NO: 93296 - DNA, 424 bp, Homo Sapiens
atggattaaaccaacctgcttggtctctattagtcagtaatgaagacgacagcctggccaaccaagggaaaggaaattagtatctttagtttcagtcattccttgtaggatatggtttagctgtgcccccacctaaaatatcatcttgaattgtaatccctataatccccacatcaagggagagatcaggtggaggtaattggatcttgggggcgttcccccatgctgttcttgtgatagttctcacgagatctgatgattttataagtttgatagttcctcctgtgttcattctccttccctgccaaccttgtgaagatgccttggttcctcttcactgtctgccatgattgtaagtttcctgaggcctccccagccatgtggaacagtgagtcaattaaacctctttcctttataaatttat

SEQ ID NO: 93297 - DNA, 403 bp, Homo Sapiens
aaactgacacagcacatagacacaccacatttactctgttgctttcagtgtgactaacccaaaggaactgggcaagcaggagaaaccagacctcccggcgctcccaagccacatccctatcctggcttcttccccatagagtctaaatcatctaaaggaggtgaggtggccatatgtaccttacaggggtgttgtatgactttgaagaaacaataaacaacacaaacagaagtccccagcttagtcctgggcacacggcaggtattcaacacgtcagctgtccacctcaacctcagcccacctccaccagctctagcatacattctacagaagacaaagttaaaaacagaaaagtaggattgcctgagtcagcagttcgagaccagcctggcaacattatgga

SEQ ID NO: 93298 - DNA, 456 bp, Homo Sapiens
acaaagaatctgttcacctatttatgtaagtgaaagtgtaaatttaaaaatacatttagtcctgctgttaataacccttccattcttttttactttccctcagaccatatattgtgattatagtttctgctgaggaggatggaaactcaactccctttgaataatattagtaattctacttgatgttcagaaccggattgcaagagagtttaaagtgcccaacaccccttgtgggaaactttttagtatcttaagtgcatggaactactgctgcagccacaccgcctgaagcttcagccacactgaaacttcataacaaaacttaccctcttttttcctaatttctgtggtcattgcaatttgagcatgttactttgtttaacaaaaactcatttcttaaagattattttagtattgctgtacaaacagaataaaattatggcattattaaaaaaa

SEQ ID NO: 93299 - DNA, 674 bp, Homo Sapiens
  misc_feature (124)..(177): n is a, c, g, or t
gtagccctcggtgcccccgcccgggatctcgacgcctatgccagattaaaaggaacccgaagaatataaccaagagacacattgcaagggcttgagttgggggccaacttggagaaataagcgnnnnnnnnnnnnnnnnnnnnnnnnnnnnnnnnnnnnnnnnnnnnnnnnnnnnnnagagtagttattcacatggaaacgtggaaattattgtcttttttaaaagctggttacaagacgggatgtgtctgtagacaaaatgaaaaacatgtcctcaaaatacagattaatatgtatgtatgcatatgaagatgtgggaggagaatatgaaccaagggttacagtggtgatctctgggtggtgacagagatattttattttttgttttggctggttccatattctatgatgctcatgaagtgcttttgtaataagaaaatattatttaaaatttaaaaataattttctttgctatcggtaagtgaatagcagatttttaggaggcctaataaatccataaatccataaatgaaatctccagttattaggctcctcaaggacagggtctgcagtggagttggctctatgttcttgatatttaccagaatgcctagcagctaatttcaacaaattaatacatttaatgcaagagaataaatggaagaactagatct

SEQ ID NO: 93300 - DNA, 570 bp, Homo Sapiens
aaagtgtttgatattccaagtgatgaatgtattaagatttctgctaaacttggaacaaatgttgagagtgttcttcacgcaattattgaaagaatcccccctcctaaagtgcatcgcaaaaatcctctgagagctttggtatttgactccacctttgaccagtatagaggtgtgatagccaatgtagcattatttgacggagtggtttccaaaggagataaaattgtatctgcacatactcaaaagacatacgaagttaatgaagtaggagtcttgaatcctaatgagcagccaactcataaattgaatgtatcctctagaccaatctgaatataacaatctgaagagtgctatagaaaaactgactttaaatgattccagtgtgaccgttcatcgggatagtagccttgctctgggtgctggctggaggctaggatttcttggacttttgcacatggaagttttcaaccagcgactggagcaagaatataatgcttctgttattctaacaacccctactgttccatataaagctgtactgtcatcatcaaaattgataaaggaacatag

SEQ ID NO: 93301 - DNA, 543 bp, Homo Sapiens
  misc_feature (161)..(224): n is a, c, g, or t
cttttgaaaacacgtgtatggtcatgttatttcctcttaaaattttccaaaggcttcttatcctttcaggataaaatgcagactccgaagcctgacgttgaaggttccccataatctgacttctcctgttgtacgccacgcccatgtgacctcacgtttcnnnnnnnnnnnnnnnnnnnnnnnnnnnnnnnnnnnnnnnnnnnnnnnnnnnnnnnnnnnnnnnnctcagttaagatgctacttcttccatgacaaatgatgctataggaggaagtcatttctttctctgcgtttgctttgaacctctcctattgctttgtcttttttttcttaccatggattaaaatatctgtgtacatgttttctgttgaattaggagcatctaattcagtgttagacacggttctacgtgttagcagtatcatctggaataagacagcctctgttcttggggagggagggtccttgtctttttcattcttggaactttttagaggtgatttgacaaataaataaatgtctatttaaaagttactaaaaaga

SEQ ID NO: 93302 - DNA, 462 bp, Homo Sapiens
catgaacgtaatggatgcagattatgtaaaagtgataaatattgtgagccacatgactatgaatactgctgtccttgtgagtggcaccgtacagaacatgataggcaactcaatgaagtagagaacaatattaagaagaaagcttgctgttgtgagggattcccattccatgaggttattcaagaattccttttaaacaaggataaattggtgaaggttatcaggtaccaaagacctgatttgttattgtttcagagatttactcttgaaaaaatggagtggcccaatcactatgcatgtgagaaattgctggtacttttgacccattatgacatgatagaaagaaagcttggtagcagaaactctaatcaactacagccaattcggtaatgtaaagaactgtatggtgaaggtggtgtttttacttgagtattttataattaaaatattcctaataaaaaa

SEQ ID NO: 93303 - DNA, 117 bp, Homo Sapiens
aatgtgtgcaaaagcccaaaggtttcctaagcctggctgcaaagaagaatcaacagggacactttttaaaaacactcttatcagcctgggcaacacagtgagactccatctcttaaa

SEQ ID NO: 93304 - DNA, 723 bp, Homo Sapiens
ctggctccctctccaaaatcgaccctgggtgagctgtggaggcgagaaggcagtgtgcatttcagaaactaaccaaaatcagtgagaaaatcttggagaaactgaagttaccctgggcggctgtagctgggaatggaggatggggcagccaggagccagacttaagaaggctgttcacactctgctcttgttgcttgcctcccacacctcgtgacaaatgctgcctggtcccgctcaggtgtcaggattgcaaggtggctgtgtcagccagtgtgagggccccacaagccaccggtgttgtgtgccctccatcctcctcctgaaacccccctgggtgggacagttgctatccagggaaatgggcctcttccactgtgatctcctccagggctttcacacggcaggcccgcctgcaggagtggcttgtggggtggcaggatgcaggagagagtgagtgaggtgcttcgtgcctggggccctctgctctggggccaccctcctcgttgactcactgggagccttgctagtgcagacagggtgaccaggagctgctaagcccagggaatgcacacacgtgcactggagcagctgcctatcttaagagtccaatgcccaccgaaacacagtaggctgcacagcatccactactggaagtagagttgctggaaaagacagaccaaacatacttaataagcacaataaatatctttttggatacagaaa

SEQ ID NO: 93305 - DNA, 320 bp, Homo Sapiens
  misc_feature (32)..(32): n is a, c, g, or t
gcatgccgcctccctatgccgcgcacctttcngggggttaagccgcgataaagaccttgcttagctagcagtgcgtattgtgtaaggtaactaggatttctacctcaaccgcgagacctatgcaaggacggtgtggaccaactcgcgcccgcggcatggtgcccgccggcctgccgggctcccacccctggacggcagaggcaaggacggacgggagctccactgtgaatcggcggcacgcgccgcaggaggctgggactggtccagtttgtactgtcgatagttttagataaagtatttatcattttttaaaaagtaaa

SEQ ID NO: 93306 - DNA, 623 bp, Homo Sapiens
ctgaaattcaatacttagcaattggtaagtggctggcaaaacatttaaggaaataaagggcttacctggtttctgtagcttatattattttttaaaaaaggaatgaaaatagggagtatggggaatgagagaggggaagggaagagtcaggctgacagggaagaagagatgctgattcaagctgtctgatcaaactaaaagggacttaatttagaaatgaaaattatttcttctcaattcatgattcaggtgaaccagtttggttttaacaaagaaaaaacaaggaaaaaatatttgctaatgttaacagccctctcacaggctccttttcatctgttcagtaactggagactctttccaacatggtctttagagctttctagagatacgactgtgactttgttggtcttcacgcactgggtgtgtctgtaaatacagcgctgtccacggtgtctgtcctgcttccatcccaaattcaggctttagcttaaaacatctttagtttaattttttaaaaaattcttttctttcccccagataaaatcttaatcttttgcactagactgttagccagggaaaacaaagcaagaaaccagtgtctggaaccgaacaggaacagaaca

SEQ ID NO: 93307 - DNA, 720 bp, Homo Sapiens
  misc_feature (653)..(661): n is a, c, g, or t
tttactttgcaagcatggtttatttcatggaattaggctcaattttatactttccacagcacaaattactagagagtgagatttggtataggtttcattccaaaggagactgagctattttcaaatcaaaagaatctcagatcatcttgctgtttatcatagattctgagcatagggatactgtgaatttctagcattttctgaagtaagaaacagtaatacttcagaggggaaatactggtattttgaggtccacacaggatctttcagactgcaagatgtgtataaatatagtaataattggatctataagacctgattattccataaagagggggaaaggtaataattagggctcataaagcagttttctgctgcttacctatctacaggggagagaagaaacagagccttagggcactcaaacgagcagagatttgtggtgtgcagtcaaatcatggcatgattatactttggaaccttatgcaagtatctaaaatacatatctgaagaatttatatgcattgagataagtagttttaaaaagcacaatataaatttgtatcaacagcatcattcaaaacatatgaactatagaaaactgttgaaaatggttaattctaaattgagatatatgaatgcaattaaaaaannnnnnnnnctatgaagaactcgtgtgacttcgacaaccagaaagagctgatggagcccgggattcag

SEQ ID NO: 93308 - DNA, 1618 bp, Homo Sapiens
  misc_feature (879)..(879): n is a, c, g, or t
  misc_feature (1540)..(1548): n is a, c, g, or t
taaggctaggtacgagcctgggtgttgaattcggcacgaggcggaactcggctgcggctccatggtctgagttgtcagccgttgttttttcgtgctcgctagtcgccgccgccgctccgccatggggaagcgacagcaccaaaaggacaaaatgtacattacctgtgctgaatacactcacttttatggtggcaagaagccagatctcccacaaacaaattttcgtcgtttaccttttgaccactgcagtctctctctgcagccctttgtctacccagtctgcactcccgatggcatcgtctttgacttactgaacattgttccatggcttaagaagtacgggaccaaccccagcaatggagagaagctggacgggaggtccctgatcaagctgaacttttccaagaacagtgaggggaagtaccactgcccagtgctgtttaccgtgttcaccaacaacacccacatcgtggctgtgaggacgaccggcaacgtctacgcctatgaggcagtggaacagctaaatatcaaggccaagaacttccgggacctgctgaccgacgagcccttctcccggcaggacatcatcaccctccaggaccccaccaatttggacaagttcaatgtctctaacttctatcatgtgaagaataacatgaaaataatagacccagatgaagagaaggccaaacaggacccgtcttattatctgaaaaatacaaatgccgagacccgagagaccctgcaggagctctacaaggagttcaaaggggacgagattctggcagccaccatgaaggccccggaagaagaagaaagtggacaagctgaacgctgcccactatttccacaggggaaaggtcagcgcttccttcaccntccaccgcgaatggtccccggagaccacacatgaagcagctgccatcgacgaggatgtgctgcgctaccagtttgtgaagaagaagggctacgtgcggctgcacaccaacaagggcgacctcaacctggagctgcactgcgacctgacaccaaaaacctgcgaaaacttcatcaggctttgcaagaagcattattacgatggcaccatcttccacagatccatccggaactttgtgatccaagggggcgaccccacaggcacaggcacgggtggggagtcatactgggggaagcccttcaaagacgagttccagcccatgtccacatctccatttccagcctttctagcctgccctctgctgccagccaataaattgcttgcctgctgcctgcatcccctttcctggcccctgggagcccacagccttcccatcccttaacctgttgccaagggccttggccctgtttccaggacctggccccgccagagcccactgctgggaccttccagcacaaggcctgccctacacccaggccgggggcctcaggcctctcctctagtaggcaggcccggttagtgagggaaggatggtgtctccacattgggggttccccctttaagacagggttcttgcctctgttccccaggctcccagggcannnnnnnnnatcatgggttccctgtgagacccgcacccccctgggcttctaaacaaaccctccggtgttccaaacatac

SEQ ID NO: 93309 - DNA, 750 bp, Homo Sapiens
  misc_feature (229)..(357): n is a, c, g, or t
atcaatggcatcccgtttcaagtagaataaaatcaacctgcttttcatgtctgctcctgccaaggccttctccctccttcccttccccaccgggctccagccactccaccatgcttggtcccacctcaggcaggccctggccgcccagagtgtctcaggaggccacattcccctgcttgaggcctcagccccaataaaaccaccttgcactgaggttcctgtgggtttnnnnnnnnnnnnnnnnnnnnnnnnnnnnnnnnnnnnnnnnnnnnnnnnnnnnnnnnnnnnnnnnnnnnnnnnnnnnnnnnnnnnnnnnnnnnnnnnnnnnnnnnnnnnnnnnnnnnnnnnnnnnnnnnntctcctgcggtgaggatgaaaatggctttgacacattcaaggtactgagtttgtgcttaggaaacactaaccgctatgactccgtgaccaccctgtcaccttgtaccccatttttctatcctattacaggtttacgcacttcctgtctgtctcctctatgagactggagtctgcggcagacactgtatctactcagttcaccgcctcattccaagcacctagcacagcgcctggcccacagtggatgcgcaagaaacccatggaatgaatgaataaatgaatgaacgagtggacaaaccacttccccaatacctagctcagtgcacggcctatgaccagtgcgggccaatgctcgctaaatatgacctattagtaaatcagtgaaactgcaaa

SEQ ID NO: 93310 - DNA, 454 bp, Homo Sapiens
gtttcttcttgtctgtctgtggagtcctctctctcctagagtgcaagttgtctaccagtagctgtacctgcctgaacatccataaatctgacaacgaatgtaaggaatctgagaattctatcgaagatatttcattaccagaacgcactgcaatgcctcgtagcattgtccgtgcacacactgtgaattccctaaacaaaaaagtccaaacacgtcacgtaacctgggctctgtgatttggcaatctatttcttgcagtatatgctcatctttatggaaaaagctttgtgggtgtgtgctgtgtctccaaccatgttgtctctatttggaattatggttggggtttgtaaaaagatctggaagatggttttttaaaaaatcctggcctgctgaacgaatagtttcttctgcaacatttgttgttaatataataaatattatcatataataaaaa

SEQ ID NO: 93311 - DNA, 466 bp, Homo Sapiens
gggccgcgcctccggtgagtttcagctgagggcgcgcggcagctccgagcctggctccgggtgcagcaccggactgggacctctgctgtcccgtgtaggggtgccctgcaaatatgtgatgaataagtgaagaaatacgttctatcttctaacttgccggatgttagaaggaaaccaagcttatgcttctcatttatagctaccgttaaggattggacagaagcttagctttttgggtgagacggacaacagtgttttgagaacctttggcaagggagagctggaaagaacatgtatgtgagagtgactgacaggtcttctggccctagggcgaccatgagcaggtgcacccagcttccctccaagacagaaaataaattaagaaggagagcaggaagggccccggcagactccagacgggagggggtgctgccatcaggcaaaggagcttggaagggaggggcgt

SEQ ID NO: 93312 - DNA, 594 bp, Homo Sapiens
tgaatatgccagcgtgttgctacagaccgtgcttacttcagccaatttctctgctgaatatcctccttttactgatgaggaaaccaagtcaagaagtcataaatgacacacccaaggctgggaagtggttgagcaggtatttagactcaggtctattttactcctgtgcctgtgggccgttttcacattcttttcagttggacagttttaaaaatgtgtaatgttgcactcaaattaaataacctgaaattttgcaattctgaaagggaactgataacttgaggcactatgtaactatgcttcaacacctcaaaaaggctccagcaggcacttctgaaaatgatttttaaagcccttttttacttgaatgctgttcaacattctcacaacttggcttatgtttttatgctgaacaaatgattcatgaccctttattctgggggctggattacttgaatccaaagtgatgtgatgaataacaaggatctaggcgttgttgcccagttgatagtcacaaaatacttggccttaataagtcaggaattattttccccatatttctcgaattacattaaagaatataaggtttttaaa

SEQ ID NO: 93313 - DNA, 551 bp, Homo Sapiens
ggcatgttagcccaactttcccccaaacccactatatgtagcccagggaaccaaatcacagcaattcaacaagcacagttgatgtgacagacaccatgtgaggcataaatgatacagagacaaaggagactcaggcctgtcatcaaatgtacaaaaattttcaactctagttctaaataactaggtcctgcctatgcttttcacatacatctaaaactgccatttgttaagtcagcgcaccccaaaattgcttcatcccatataaaaagagcactttcttgccaaatactgatttctcaaatgccaaaatgcaagcatatatcatgtggagacaaaaatcatcttacaatattctccaaagatgagataaacctctattctctttgcagagctaagaaacttttgctaagtgatttagtccaagcagtgacctgcacaacaacaaaaacaacaacaaaagtaatccaaaaatatcaggaagaggaatctaaaagttttaaataatcagggcggattctaaataaagcatatatttcagtgaaagttaagca

SEQ ID NO: 93314 - DNA, 1202 bp, Homo Sapiens
  misc_feature (23)..(23): n is a, c, g, or t
aactccattcattacatcaagtntgcagcagcggcctatgggtggcccctctacatctacagaaaccccctcacggggctgtgcaggattggtggtgactgctgcagaagcagaaccacagactatgacttggtcggaggcgatcagctcaactgtcacttcggctccatcctgcacaccacagggctgcagtacagggacttcatccacgtcagcttccatgacaaggtttacgagctgccgtttttagtggctctggatcacaggaaagagtctgttgtggtcgctgtgagggggaccatgtctctgcaggatgtccttacggacctgtcagcggagagtgaggtgctggacgtggagtgtgaggtgcaggaccgcctggcacacaagggtatttctcaagctgccagatacgtttaccaacgactcatcaacgacgggattttgagccaagccttcagcattgctcctgagtaccggctggtcatagtgggccacagcctcgggggcggggcggccgccctgctggccaccatgctcagagccgcctacccgcaggtcaggtgctacgccttctccccaccccgggggctgtggagcaaagctctgcaggaatattctcagagcttcatcgtgtcactcgtcctggggaaggatgtgattcccaggctcagtgtgaccaacttggaagatctgaagagaagaatcttgcgagtggtcgcgcactgcaataaacccaagtacaagatcttgctgcacggtttgtggtacgaactgtttggaggaaaccccaacaacttgcccacggagctggacgggggcgaccaggaagtcctgacacagcctcttctgggggagcagagcctactgacgcgctggtccccggcctacagcttctccagcgactccccactggactcttctcccaagtacccccctctctaccctccggaggatcatccactgcaggaggagggcgcctcgggcggtggatggggctgtgtcaaaataggccagggtcacaggaagcggattcagaaaatcaaggccgaaaagcccggaccatgcagatctgatgcggctgacaggggccaaaacgcggtcggcaccagggccagggcgccgcagcgaaggccaaggacgctaagaacggcaccaggcacaggggacccattagaaaagaacaagaaaagggagacgcc

SEQ ID NO: 93315 - DNA, 408 bp, Homo Sapiens
ggaatggaatgccagaaatgcatggcagcagctaataagtaaagctgattaactatttatttgtcaatgttattatttaatgagctttcacatgtgatttgtttcaaaactttaattttttaatgttttgaaactttttcatggacctaaatattttcctatatgatttgtggttgattagaaatatgaaatacatgttgtagatatgtaaaatgaatattttagtctccttattacatatatgttcatggtgaactttatcaatagtatggatctttttaaatcaataagatgctttgtaaagttgaaataagtaatactttcttgtttaatctgtgcaatcagaaggtgtcttgaccttcaattcaattggtttcttttaacaaaaataaacactgctaaaagtta

SEQ ID NO: 93316 - DNA, 478 bp, Homo Sapiens
gaagatgggactgacaactccctggatatctatctgtttgggcagcactgatctgctctgccctattgcttcctgcacaaaggagaacacagatggagagagacagcactggaggggctttggatggtgtggggagaaccttagatgaagaggggctgaagttgcttccccttatcccttcctcccaccttgactttctagtcccagattggagtacggcaaagaagtgtccatcagagaggagtgtggcataatgacacaagctaaccatctgctggaagatatagcaaatgtgtgaggggtcacctgttcctgggaagatgcctggaatcctccaggtgcgcaggttgtttgtcacctgctctggcttcatttctgcttgtatttttataaattgttttgtaaaaagtagatgttattttatccttcatctcttcccagagcctaaacaattaaagtcattttcagatcaaaaaaa

SEQ ID NO: 93317 - DNA, 425 bp, Homo Sapiens
caggataagagctatgagacatatggccaaaatgagaacaaggccaagtggaagagaccgccattctcagtagaaggccaggccaggttaggggctggccctttcctctccacagttagctctcacatttttaaatccaatgtaaaatcccaaacctgttactaatagtcggagaagggggaagctataatgacaaggaaacatgggaacaagggcatgagaggaacagggatattagaagaggattctggttaacattgaaattgagtttgctttccaatttctacaattatttttaaataaatcatcgtgtggggggtggttaaatttgctgtctaacttactgtcatagaaaagtaaagccaaaagcccacttattaaagaagtgaaaagatgagctttggtttgttgaaaaactagttaaa

SEQ ID NO: 93318 - DNA, 781 bp, Homo Sapiens
  misc_feature (215)..(215): n is a, c, g, or t
  misc_feature (228)..(228): n is a, c, g, or t
atatgatttgtcttctaataatactgacaaaaacaactggatttaaagatgaaagtgtctgccatgaggagtacggggacagcaggaatgaaaaggaatatttaagaatgcaaaaaccagtcagacagcacagctctgagccctggcagtgcccctgcaggggcacctggttcacatgctgattgtgagcaaggaaaatctcatttaaaccaagngggaaattatagntaccaagttgacgattacttcattcatatatatatatttcactgctacattcccatcattgcatgggtcacttttgaccttagggctctttacaattcttgatttcattagtataaaaaatatgaactctgaacactgtcgggcgtgacttccaggcagaaagatcaactgtgtgaaccaagctgagtatcttcaccagcccctgagttgctgcactgtgaactgggtatacagactgctaatgctttgttaggagttctttcaacatggaaactacttgatacatcagctttgaagcaatgcggcatacgcatgctctagaaaggtaaaatgctaaggtctgtcctgctgaagagtccagtggccacaccagtttcacattacacagaacacagcttcttcacaacctctgaccatctccatcctctgaagtggtccactggatctaatgtcccaacatgctgtgctatttgtaacatgctgagcgctctgccccacttacattctttacctcttctatatgatgcattaaaatattttgtgatccataaaa

SEQ ID NO: 93319 - DNA, 878 bp, Homo Sapiens
cctcgggatgaaatcggacgagggcggaacagggtggcgagcgcgggcggaggacggagaagggggcggcgagggccggaatctcgagcttgttttcacttgcgttttaaagacagaaagctcatggtgcaaattgttatttccagggaatccctgtgctgatcgtggggcatcatatcctgtatgggaaaatcatccacctggagaaaccttttgcagtccttgtcaaacacactcctggggatcaggactgtgatgagcttggccgcgagactggcacccggtacctggtgacagcactcatcaaagacaagatccttttcaaaacccgccccaagcccattatcaccagcgtccccaagaaagtatgaaagaacctcggattttccctagagagcggccaactccttggactcgtgctccgctgccacctcgaggacggctcgacggttccctgggaccacaggggggtcctgttctgaacacaggccacccactgggtgtgaactcggatcccttccttatggcggccggttctcttggtggaaatctgaccccatttccaaggaacccatctccttttccagcttcatcaggctcattggcttcaaatccagcacctttcccggctgtgctcgtgacccaagcatggcttcttttccaagagggatgaatcccactggcacaggtgcagtttctttcccaaggcctggtggcctcttggggccaggccaggccaggcccacctaaaccctaggacagggctctgcatgccaggcctcgtctaccccaggtaggggtctccaggacaggtctatgtcaccaggcagtggctcctggacgtcttgcccagtgtgtccaggctgttgctatgaacg

SEQ ID NO: 93320 - DNA, 897 bp, Homo Sapiens
tcgtaaacgtcgtgcacagcagccacttgtcgcgtcaggcctgctgtgcaagcgtctgaacctactggtgcgagctggctgagaccttctagttaggtggctgctgggctgcccagagccacagcctggaagaatgcactggccatggatcatcctctgaaaagagccaacttggtcacgagcccagccggaaaggtgtggattgaagccaatgagcctgagaagctggaaaaggagatgggttccttggaaatggggtcagatttccaccaagagaaccggccgccataaggaagggatccgagttcacacccagtgggtggcctgtgttcagaacaggacccccctgtggtcccagggaaccgtcgagccgtcctcgaggtggcagcggagcacgagtccaaggagttggccgctctctagggaaaatccgaaggttctttcatactttcttggggacgctggtgataaatgggcttggggcgggttttgaaaaagattcttgtctatgatgagtgctgtcaccaggtaccgggtgccagtctcgcggccaagctcatcacagtcctgatccccaggagtgtgtttgacaaggactgcaaaaggtttctccaggtggatgattttcccatacaggatatgatgccccacgatcagcacagggattccctcagtggtgtaatgtaggtctcccaggaggtttccagctaatccagtgctgtagcgagcctcgatctccccctgtagctccatcagcacccattctgccaggcctccagccctcgcactgcaatggcggccgccgagcgcggcgccgcgcggccaacgggcgacaaccgaacctcccgccgccgtcgccgccgccgcctcgtgccgaatcggcgcgccgttgcttct

SEQ ID NO: 93321 - DNA, 964 bp, Homo Sapiens
ggacggagaagggggcggcgagggccggaatctcgagcttgttttcacttgctttttaaagacagaaagctcatggtgcaagattgttatttccagtgcgagggctggaggcctggcagaatgggtgctgatggagctacagggggagatcgaggctcgctacagcactggattagctggaaacctcctgggagacctacattacaccactgagggaatccctgtgctgatcgtggggcatcatatcctgtatgggaaaatcatccacctggagaaaccttttgcagtccttgtcaaacacactcctggggatcaggactgtgatgagcttggccgcgagactggcacccggtacctggtgacagcactcatcaaagacaagatccttttcaaaacccgccccaagcccattatcaccagcgtccccaagaaagtatgaaagaacctcggattttccctagagagcggccaactccttggactcgtgctccgctgccacctcgaggacggctcgacggttccctgggaccacaggggggtcctgttctgaacacaggccacccactgggtgtgaactcggatcccttccttatggcggccggttctcttggtggaaatctgaccccatttccaaggaacccatctccttttccagcttcatcaggctcattggcttcaaatccagcaccttcccggctggtgctcgtgacccaagtatggcttcttttccacagagggcatgatcccactggcacaggtgcagtttctttcccaaaggcctggtggcctcttggggccaggcccaaggcccaaggcccccaccctaaaccctaaggacaggggctcttgccacgcacaaggacctactgccataaccccaagataaacggggtcacccaggaaccaggtcctatttccaaacccaagccaaggtggcctctggagagcaggtcccgacacacag

SEQ ID NO: 93322 - DNA, 339 bp, Homo Sapiens
tttacttaaaaaatgtttattgaatgaataaaccaatatacagaaatgtcacgtagagtgacggctccttttttctagcataatgtaaaactgaagaattttaaaatggttaacagttagttattaggtaacataaatcaactatattctatagagaataggatattcttaggatccctgtgaaaagattagcaagtgctgatctgcgtgtggtaggattacaggtgattttgttttacttttatgtgcacgaaggcattgcccaaatttttagaaagaacatgggttgtttttattataatataaacaagagtatgaatcctcaaaaaatgaagtatc

SEQ ID NO: 93323 - DNA, 441 bp, Homo Sapiens
tacaattaagtggtacattctgtcttctgtaaattatacctcaataagggcgatttaaataataaaaactgtgacaaatggttcattaatcagccatcatcagcaacaactgcttatattcaggcctctgccttgaaaaaaggagctgtggctatcactggatatttaagattgtctgaggaagtgatgtgatgagggctttgctcaggacaggaaagatgctgagcaaggtcttggctggatagagctgaaaaaaaggactatcaaaatagaggaagaggtgtgctgagagaaggcaattcatcaactataattttgcttaagataacacattacctttgaatacatagaactgtatgtatatgtgtatttaggaaatttatgaaaatatcagaacaattccatacctctcaataaatcttactgttgtaacattttaaa

SEQ ID NO: 93324 - DNA, 112 bp, Homo Sapiens
gagccgtgctccccccgatagagcctgcaacgtaaaactttagatttagtctgtggtcacaggcacacaggattatattctagtaaaaagtttatgacagaaggtaaaaaaa

SEQ ID NO: 93325 - DNA, 160 bp, Homo Sapiens
cccaggccagcccgcgtaacctaaacttccttctgtgccctgccagtgacccccaggttattctaaagcagagtccttcccttcccccagtgagaaggaaaatgggataagtctgggacactgtttcagttcaataaagaggcttttttcttccttaaaa

SEQ ID NO: 93326 - DNA, 584 bp, Homo Sapiens
ccggaacccgggttcccagacacagacccctctcaggtttacagccccggcctgccgcctgccccggcccagccctcaagcatcccatcaagcccttctaccagaagagggaggtgaccaaggaggagtacaaggacatcctgcgcaaggccgtgcagaaaatctgccacagcaagagtggagagatcaaccccgtgaaggtggccaacttggtgaaggcgtacgtggacaagtacaggcacatgcgcaggcacaagaaaccagaggccggggaggagccgcccacgcagggggccgagggctgaggccaggcaatcacgggctatgccgggggagctgtcgggagtggcgggaatcggggccatgcccggggagctgtcgggagtggcgggaattggggccatgcccggggagctgtcgggagtggcgggaaatggggggcatcagcatgcctgccgtcgggttcctgcgctgacacctggtctgtgcacctgtgttgctcacagttgaaaactggacacttttgtatgtatattatagagacactgtttccattctaatttatcaaaaatggattatcttta

SEQ ID NO: 93327 - DNA, 401 bp, Homo Sapiens
ttaatgctgaattataattgtatttctctagaaaccaatatgcaatgcttgtcaaccctgtgggagtgttttcagtcaaggttttctagtttctgagtcctcaccaacaaacctgttaggtggagatgtgttatacaatgtaaagagagaagcatttttatttccctggccttagacttcctcctttccctaatggaaattcatcttgattttaaatcctctgaagaggaagcaacccttaaagatgtctcaactcatctcccagcctcacatgccaatgagattgaattgctactgtgtgtggagcctgtagttattgcctggaaaagaataaatctttcctgatagtagctcagtatgccctctcacaaaatgcagagcaagaaattaaacctgagaaa

SEQ ID NO: 93328 - DNA, 420 bp, Homo Sapiens
agaacaagagtaaacccagctcccactctcagtgggctgcagttgcccaaccacaggaagaaagggaaggaggtagagggaagaaacagaagcagtgttccattttcttcctcaccaatgacattcttttcttttctcctttcgtactcctccctgagagtcccctcccttctcccacactcgtttccctttgctcatgactcctgtagggaagtttcttcaaacaaaacccagctcctgagtctccagatgttgttctgtcagttgccaaaggactttgctgaccactgcatggggatccaaccaattcaattaatgtcttcatattgaagaagagatgtaccttcaattgaaaacctcgtttttcttttgtttgcattttctgcaaaaaggaaaaagaaaccacaaattggggaaaaa

SEQ ID NO: 93329 - DNA, 687 bp, Homo Sapiens
gtggtgctctgagttgacactactccgggggtcgggggaccccaggattccaggctgacgttccccgcccgctcccgcagggcgggcgtaccgaactgcccaccctaacacagctgtcaccggcgctgtcgcctgcccagcctgctatcctctgtgccttggctgctctcagccctggctgcgcattcccgcccctggagcagatttctgctgttgcctcccaccccatcttctccaccggagggtcagcggtgcagctccccctcctccaacattgcagcttttcctcatcacctccctagaggaggcggcttggcaggcagcgtggaaagagccctagatttgaagcaagactgacccaggttccaggccttgcgtcagtgtgatcacttaaccccttcgagtccaatttgtaaaatggggtagcgtaagctattctttgtctgatgatttcgagggcgaaatgtgatttcccccccactttctcctatgaattgaggctgtgccaggcactgggctattttgcacagcacgagcatcacataagttattttcttgccccatgcaggtctccgggccagggcaatgttccgcacggcagtgatgatggcggccagcctggcgctgaccggggctgtggtggctcacgcctactacctcaaacaccagttctaccccacttcagat

SEQ ID NO: 93330 - DNA, 728 bp, Homo Sapiens
agagatgaagtcgacggcgcgccgaattcggcacgaggggggtggggagtgttgttaaccggaggggcagccgcagtcgcgcggattgagcgggctcgcggcgctgggttcctggtctccgggccagggcaatgttccgcacggcagtgatgatggcggccagcctggcgctgaccggggctgtggtggctcacgcctactacctcaaacaccagttctaccccactgtggtgtacctgaccaagtccagccccagcatggcagtcctgtacatccaggcctttgtccttgtcttccttctgggcaaggtgatgggcaaggtgttctttgggcaactgagggcagcagagatggagcaccttctggaacgttcctggtacgccgtcacagagacttgtctggccttcaccgtttttcgggatgacttcagcccccgctttgttgcactcttcactcttcttctcttcctcaaatgtttccactggctggctgaggaccgtgtggactttatggaacgcagccccaacatctcctggctctttcactgccgcattgtctctcttatgttcctcctgggcatcctggacttcctcttcgtcagccacgcctatcacagcatcctgacccgtggggcctctgtgcagctggtgtttggctttgagtatgccatcctgatgacgatggtgctaacatcttcatcaagtatgtgctgcactccgtggacctcc

SEQ ID NO: 93331 - DNA, 468 bp, Homo Sapiens
gctagagttcagaagtgagtggtctggattcagaagactgccagaagctaagtgaggtacatcacaaaggaacacaggactgtgagctagaacaggagagtgaatgttcgctggggccttccagaagacagttcagtcttagcaaactggccaggaaggattttcatcaagatggaggaaaaacctggagatctttggctcaaaggacatgacctaattctacagatgaatctgtactgacgttagaaaaccactggtggaacataaaacttgtacattcttctaaaaatgaaggtagatcacagcagactcaatctatttatagccagtcatatcaacattactgattgggaattaccaaaagaggtgaaattatttaacaaatcctttgttaagtcatattctgaacctacagatgtcaatttcaggtgtttattttttaaataaagataattaaaacactaaaaa

SEQ ID NO: 93332 - DNA, 565 bp, Homo Sapiens
tgaatcggaggctccacccttgccctggcttcctaggccttaggttctggggctgatagaatggagaacgcgaatgaaccaagaaactcaggcacagagaagttaagcaacttgctcaagatcacacagtcattaagtggcaaaactgggaatggaacctaggcattttggctcgtctttctcctaaccaacactattagcaaaaatcctgatgtatgaaagaaaataacaactgctttacacagttttatgtggtttaaatgaaataaggctctggagccagagaaacttaggtttccagctcaactacttattcacaaaagttcaagggcaagtgttttcatctggacttcaatattacgaactacacaatgggaaacttgctctaaagaaaaattgctggattaagggatgtgaatattttagcagtgcttgacacttagccaaattgccttccagaagtgatgaaacaacttaccctcccacaggcagctcatgaaacctcctgtctcaccaaactaggtattggaattctaaaaagaaaataaagctgtttgccaatttg

SEQ ID NO: 93333 - DNA, 691 bp, Homo Sapiens
ctgtgctgtcagacagctctcccagttaaatgaatgactgcagcaacatctttttcaaaagtcgacatacccggggataatacagacccagaaaagtcatttcctctggaaagagttcaaggagattggaggctgactgtggtgatgaactgatctataattgtgacaggctaatattgtccctgggtgctgcaacaggcttcaagcacgaaagagctcaggaaacaatctctttaaaaaagatgaagcacagataatggttttattttgtctgaaccaaataggaaatcacgtgctaaaccctttcaatcactttgcaatgtcattaccccactccatcaacactgctcataacctctgacagctacaagaagacctccatgatggcatttatttcagggaaatggatgtatcagctatttgtgtgacctcggagaggaaacatttgcaagctgggaagtgtccacagaagccgttcttcttggtggctgtggaggagtgaagtcgacactttgttgctggaatcggatcctttttgaaaatagatgtatggaagaaaatgccaccccactctctccttaccacctcttctctattcaagttttccctagcatcatgataaacatccctctcgaaaataagcaaacaaagaaatggggctgcgtactccattctggaactttcaaaaaaa

SEQ ID NO: 93334 - DNA, 671 bp, Homo Sapiens
  misc_feature (47)..(55): n is a, c, g, or t
  misc_feature (306)..(325): n is a, c, g, or t
  misc_feature (455)..(467): n is a, c, g, or t
ctggaccggtccggaattcccgggatatcgtcgaccacgcgtccggnnnnnnnnngaattaccaagagaaggggacttctcttccagtttctgtaaggtcttacattgcctgactaaaatgtttcatttacctctaaatttccatatccttctggctgtagataaataatgtagttttgtttatgcatttggaattagtggatttttttgacattaaaattgttaccactggtaacatgtgacaagcacaccacaattctccctatcttgtgaagttgtttttttaaatcgccttgaacaaaaagnnnnnnnnnnnnnnnnnnnngctttctgaaattcacagaagcctaggaggactggggtaagcggaataaactagagaagggagacattgtttggatttcctttatactgtgaagttacatgcataaaagggtcaaacctgtagatgcagnnnnnnnnnnnnnctataaatacaaatctgtataaatgtctattattatgaagaattgccaatcttgttttaagcaaatgcattctatcgttattataaatgttagttctagctctatttacttctaatcttaaatcagaataaattaatattgtattgctgctgtgcgtggaaaaagacgatgtttatgttcttatagaataaaagctgtggaatg

SEQ ID NO: 93335 - DNA, 365 bp, Homo Sapiens
ttcccaggagtttaagggagagggggatgaataagcagagattcacagatcattatgactgtgaaaatactctgtatgatactataatggtggacacatatcattatacatttctcaaaacccatacaacaccaaaagtacaacaccaagagtgaattgtaatgtaacctgtggactttgggtgataatgatgtgtcaatatagtttcatgaattataacacatgtaccactctgctggtgggggatgcagatatgagggaggagggtggtcaggagttatataggaactcttctgtattttctgctcagttttacagggaacccaaaactgctctaaaaaataaactttattaaaagtgaaaag

SEQ ID NO: 93336 - DNA, 353 bp, Homo Sapiens
ccccaacctctgggtccctacaaagcagggaagggacccccggggcgtggtgaggctgcagctctccaggagttccacacgggcccagtgctgcccctgctgctgcaggagcccccaggcgaggttcggccttcctctcgcccctgtgcacccggagatgcccacagcaccagcacctgagctcacctccgaacccgcctcctgaacccgcctcctgaacctgcctccttacctcccacttcctgagccctgagtggaagcctttctgtgccttgccctttgcccactcccctggtgggactgccaagaccctcaatgcccattaaatactcttgcctgcctcttaaaaaaaa

SEQ ID NO: 93337 - DNA, 525 bp, Homo Sapiens
catgaacatttagctgctgagcccaaaagcttgatttttattagctatatttgttgcccatatattggaacagatcttaaagtggaagtcagatgtgtattatcagataccatttggagtaatgagtgtattttcctaatctttccaacaccaacctaaaaactcatctcaaaagcatgcatactaattaatttgttttccatatagtaataagattaacaacctcgcatttacacggggtactgagtcatgctcaaataaaacaagttctaatgagaaaaattgaatgtggcagcaaatcatgtcccacccggcaatccaggtttatgtgtgtttgtctgtctttgctacacgtatttttgtcaggatctcactgtaaacaagatgatttctctcatgttgggttagtctaggtaaatttgtttaatgaacaacaaagtcattgtaaacattgcacaaatctgagtgcctggcagcatggctaggaatcttttaagcagcttcaaaaaatgaaacgtgtacacc

SEQ ID NO: 93338 - DNA, 193 bp, Homo Sapiens
gtttctgaagaaataaagagtatattaagcaaagggataatttatatttcaggttggacaatttaccctaaacaaattaaaccatggaaagtgcaaacacatgaatgaaacatttttttacatcaaagtatcatcaaagattcttgtttcatttgataaaattaatatttgaataaaaaaatttttaaatcaa

SEQ ID NO: 93339 - DNA, 540 bp, Homo Sapiens
atttatcaaaacatatgcacacaaactcttatgggaacaaacacccacaaaccatagatggtgtcattcacagtccagagaaatgtgaacaaaccacaaagataccatattaaatcataactgcatgcaattgagtgtagtatgttactgtactactataataattttatagccgtctcctgttgctgtattggtgagctcagctgttgtgagtatccacttaaaaagctgtggggggctaattacctttgaaagagcagtttgtctcttcagcgatgcgtatctcagtaaaaagttctctctcatggttctgccttatttttcatcatgtttactgcaatatcataaaccttgaataataccatgggacccatacaaagtgccaccggtgatggtgctaggaagtgcttcaacgaagcagagaagagtcatgacattacaagaaaaagctgaattgcttgagatataccatggattgaggtctgctgctgcacttgcccaccatttcaaaataaatgaatccagggtagggatcattgt

SEQ ID NO: 93340 - DNA, 496 bp, Homo Sapiens
gggtggggacaagaacgaggaagcctggcattgagtgcctaccgtgagccaggcctgtgcccagccctttattcacttgtcttgtttaactctcagcaaatcaagtacctcatccccatgtcacagatgaggaaaatatggacccagtttgcacagggtaaaaggtttcacgccatggccatctactctggagtctgagttctttctattcatctttgaatcagcagtttctttatctccactcaggctcaggagaaaatggaggcaggggcgtgcgttcacagcccccctcgatttaggcaccttccaagcttggggtaaaggtaggacctgggagtatcgccatcaacctcttgcactttatgctctagtagtttcctacttcaggcctccatacctttgcatatgctgttccctgtgcctggaatgttctcattcctctctgtctgcctggcaaactcctattcatccattaaaacccaaattaaccagcaaa

SEQ ID NO: 93341 - DNA, 592 bp, Homo Sapiens
  misc_feature (169)..(203): n is a, c, g, or t
tcgagccggacactagtcacggtggcgcttaggaggataccatttggtttgatgaaaaagctggagtgataatagctcaaactcttttgagcatttagtacatgcttggcactgttctatatgtcttaagttattcactcttgtatttaaccatcaacactcttatgannnnnnnnnnnnnnnnnnnnnnnnnnnnnnnnnnngtaccactacagacaaggaaacagatgcagagaggctaagttacaagggcacacagccataaactttggatctgtggagtgactgggcttcagagtcctcttcctgactgctgttcctatgtcttttgcaaagagaagtctttgacaggtatatgctttattaaaatcatgtttagaaagaaatgagagaatagaattagaaaaaggaatgactgtaggcttcgatgaaaatgacttttgtgactaggtgaaaatcgtttggctgggtatcctggaaaattgtcttctgggaatatctatattccagggttcacttttgtcatagaattgtttcttggcccatttaagagagatactttgtttattaataaatcaaacgttttaatttt

SEQ ID NO: 93342 - DNA, 991 bp, Homo Sapiens
cagtcgacggtaccggacatatgcccgggaattcggccattacggccggggttaaaataaagagttgagagtaagagactaaagacatatgccaaatgtttgtaataaaattaaagagaaaatataaatatatacaaaatccaaaatgtcaggataatgaaatcaaagcatttttagtattatcactttgggtactttagtagaattgcactcgtttatgattttgaagtttgttttacaaataacatccaatttaaaaatactcttttaaaacttagatccttttatagttcataaacatagtaattaggtgttcccattgcatgtatgagatgtgcctcccaaagagcttgttacagcgttagtacattacctgtctgatatggagaaaaaaaactgttatatttctaccttcatttccaactttgtattgtgctttgaaaacctttaccttcagtatgtgtatttcattagtattttcataaagaatcagtttttagatccagttaaccactgaaaccagaatatgcctatatgtcaggcatgatttactacatgtgtattctatttattgagttgatttaattttagtgggtttgtggacattaaaaaatacatgtttaatatttcccaccataattacatttacacctttgtcttcctttttcttcagtacttgagttgtcagtgttttgtgactcagtctggaaatctgtttaaaccaccttgtctttatacaactaccaacaggaggattggtaatttgggctctgggtgagacatacataggttcagtttccatgtctgcagctgaatgcatgacagggaaaatcatttagcctccctgggcctcagtttcttcacgtgcaaaatgtaattaacacaacctacctcatggggttatattgaggattagagataatgtaggtaggatacctacacatagtaagctattatatattggcaacaataataaacttttaaaaaaaga

SEQ ID NO: 93343 - DNA, 528 bp, Homo Sapiens
cagttacattttatgcatctgtaagctttccttccttagcaaaattgcattcaaaaatgtgtaaaaatgagtaaatacagaatatcactacagagacttgtatcctcaggtttattgatttcacattgtgaaataaacagcaaaggtcttagttttcaagtgaaaactttttggtaatcacaaaattacctgacacataccacgcttaaaccaacccccaaatttagcatattcattttgccatgagccagtcttgagattttcttaaaagatttcttattttgcctctgatgtagtgaaaaacggggtaagtatgctaactttcttgtatatgttggggggtacttattcaactccatttcttgtccttacaagatttataaatgtggtatgtttatagtgtggatatatatgttgccactgcaaaggtggtgcatatgtatatatgtgcaaaatgggtaaggcctgttctaactatgaaatttttctaaagacaaattcaataaaatttaatactgaatatttaaa

SEQ ID NO: 93344 - DNA, 579 bp, Homo Sapiens
caagatacatttggagaagtctagagtgtttgctttattcatgttgtttatgcgttaaaatataagcatattgcatacataagcatatttacacccacatctaaaagataacatattatatatacttttccatacttctgaacaagcgtctcatatccataactaaaaattagatgagaaaggcaaagaactcttgtcttcgaattgacttcattgcactatatagcatttcacactgcggttccaggccacagggtcccttgggtagggggagacaaagggtgtggctgacagggagactctaggactaccattgccacttccaccagagcagccacacttctgttccacatagttggcatccaaatttgatttgaaaaacagtttccactactaaaagaaaaatcctatgagaaaatgaccacaagccaattatccactcaaacctgctgatcctggcctctgggagaggctgtttggagaccacatatttcatattaactttaccatgatgagattatcttactgtctggggtcatccaaacttgagctccaagaaaacccctgtgtgagggaaaa

SEQ ID NO: 93345 - DNA, 709 bp, Homo Sapiens
  misc_feature (355)..(355): n is a, c, g, or t
  misc_feature (519)..(535): n is a, c, g, or t
ccccttatttttgggaattggccggatacaatttccaccggaaccgtttgaccggttccgattttacccgacccctatagaaatttgcccctgggccaaaaatttcgcacgaggggtttaaagggattttgggagaaccctgtcccatgataaggggaagttgaagtgtcctttggagtttcatgtgtgggccctttgggcatgtttaattgtctgaactcttcccgtgaattgccttcaaatttggtgtttttccaaaattattttggaggcccttaaaaatccttgaagaaatcttgagaaagggttcaagggagagggggagaatttccggtttcatcaaaactgtgtccanttgggagcttttgcaggccacagttttttcctcagcagacatcatcctgcctgttacagaggaagtggccactggccggcagagccccagcttttctgcaccacgttcaagaaggcaggcaccacacaggcaacctcacgctctcttcggaagcagatggaggnnnnnnnnnnnnnnnnngcacaaggttactctaacctgtttgtcttcttggggtaacttgttcattcatatatgaattgtcacccattctatcaaacaaataaaatcaccatgacaattgctatttttaggcacattttaaagctataaatgagatcatgttagttaataaaaattatctcctcagttaaa

SEQ ID NO: 93346 - DNA, 876 bp, Homo Sapiens
  misc_feature (135)..(175): n is a, c, g, or t
catctgtcataagattaatattatataatatataatatagggtccttggtgggtggggaggttgggatcctcagaggtcacccgaggttcaggctggctggtctgagtcattccggaaaaagaaacagtgacaannnnnnnnnnnnnnnnnnnnnnnnnnnnnnnnnnnnnnnnnaggttacacaaagtcttctcacatagaagatgtttgcctcttagggacaaaggccccagccatgagggtcgcgagatgaatttcttattgaaaattcccagtgaggcattaaagattagctgtgccaagactaggacatcctacctgctgcgtgactgctaatccccagctggggcagcttcctgatcccactggcccagccttaacctccaagctggtatctttttccatacctggctcagtgccctggctagaaacagcctaagaggtcatgcagcctactgagaccagagaaagcgagtgacagggctggggttgcatgaggggccagccaggctggggggtgctcagctgaccagactgcccactgaccttccttctcctgtggacagaagcagcccccaccccttctccagataacaaacacacaggtgtgcactcccattgcacccatcaaagataattgccttattttgctagtaaaattgctgaaaggcttgtcaccattttgcctgtgaaatcagtcaagtacgaatcatccatccaatttctagtaggtcctggtttctcacacttgaactgcctactcaggaattctgggcaaataagaaagatcaaagcaacaaaacctgttcacacgttactgtccttcctgtgactgctaaatagagcaattaataaagttgtcacaatgttacaaa

SEQ ID NO: 93347 - DNA, 368 bp, Homo Sapiens
gacccccccatcgttgctcctaagatccttaggacccacctggaggactgtgggtgttaggtgtccaagtagaaagttcaaatcttccgaccttacgtgggatttacgatccgacgggtccgaacacagctcgggaacagaaagaaagcaggttatttgcaatctaccggagcttaagggcagaaggcaggtgagagaattcttaggagctgtggggttttgtaggctgtggatcccaaactgcagtattagccaagcctttgtatgaggtcacaaatggggcggggacccggaacttttgaaatggggatcccaacaacagcaagtttttcatgagttacaagaaaatcttctggcagcccaaaaaa

SEQ ID NO: 93348 - DNA, 605 bp, Homo Sapiens
acttaaaacatttccatgagcccctagaagcattctgggccccaggcactgtccctactgcacctaatggacaagtcggtgctgcctggcattggtgggtggggagggctggggccacgtgctcacctggagcctaaggaggtgaggttcacccataccacatgatccaagagtagaagtgaggggtccacaagaaaaacccagggtctttctccaaagaagagagggtgtggtaaggtcccacgcaggcaaaccacagatgaccccaggcccgacgcagctgaggctgaggctgcggcctttggtggctcacccccttctcagatccacactttctgggccaggcctgaggctgagccacgtgggggtgagagaaccaggagcagggggaagatgtgggggaagggcaggcggagtgctgaccccgaggacctgtttcactggaaaggcagcagtttttacctatcttatcgccaactcggatgaattcttgtaccagctgcatagctgtgctcccaggatccagtttctctctagcttcgggcatccacgttttcctgccatggactcttgtaacaaacctctttcctaatagtaaataggta

SEQ ID NO: 93349 - DNA, 353 bp, Homo Sapiens
aaactaggaggaatctattttgacaaagccaagccacacataggatagaggcagacatgcgtgccctggaaagaagaaagtagaaggatcaactaaaagagctctcccactaaatggctgtgggctcctctaagaaactgaaacatggaagaaggaaggaccagccagccagaacagcagtgggtatcaaggaatgatataaaagcaagctcaagacagtcaagattcaaggagctatataccttgcttcctttccagagctgaaatttgagtcaagagtccatttcttccatctggccagatgatctccaggatactctcatgtatgtcaataataacttttcttttataaa

SEQ ID NO: 93350 - DNA, 564 bp, Homo Sapiens
tatctggccggtggtataagttagaacaactactttggaaaacattttggctgtatcttcagaacacatgcagaccttgtgatccagcaattctaccctagagaaacctgtatgtgttataccaggatgtatgtacaagaatgtgcatagcagcattgtttgtagtagtcaaaaattggaaacatccagatgtctgtcaactgtagaatggataaattgtgttatgttcatatactataatatcatacagcaaagaaaatgattgaaccacagttacattcagtatcagagatggatctggcataatctggaatgattcaaaaaaagcactaaagaatataaacagtataattccatttatgtaaagttcaaaaacaggcaaaatgatattgaataagaatatagctcactattcttaaaatgcaagaaaatgattttcacaaagtcaagataatagatactttaaaagggagggatggagttgtgattggagaagggcacatgagtaggcttttaggactctggcaatgttatttcttgatctggggaaaaagataaagtaaa

SEQ ID NO: 93351 - DNA, 332 bp, Homo Sapiens
tctaaaatcgctagggataattatcactttcttggatttcaacaaatggtttcgtgtgaaaccccaatcccacatttccaaaaatctaggttcccacctacctcccccgaccatagatcggctgcagcccaattgggtgtgttggtcaaaggtggggaaaactaagtcaatccagactgcctttcccacttttccagcccaccttctgtgtgccctctgggccaactgggctagacatctggggcaggggagagtgccaggacctggtgactgggagaggactctgggggagagatggacgttagttaaggaccccagccactgggagcgta

SEQ ID NO: 93352 - DNA, 1172 bp, Homo Sapiens
  misc_feature (584)..(604): n is a, c, g, or t
  misc_feature (1023)..(1023): n is a, c, g, or t
acctgcccggccgacttacctgtacttgccgccgtcccggctcacctggcggtgcccgaggagtagtcgctggagtccgcgcctccctgggactgcaatgtgccgatcttagctgctgcctgagaggatgtctggggtgtccgagcccctgagtcgagtaaagttgggcacgttacgcccccctgaaggccctgcagagcccatggtggtggtaccagtagatgtggaaaaggaggacgtgcgtatcctcaaggtctgcttctatagcaacagcttcaatcctgggaaaaacttcaaactggtcaaatgcactgtccagacggagatccggcggagatcatcacctccatcctgctgagcgggcggatcgggcccaacatccggttggctggaggctatgggctgaggctgaagcacatgaagtccgatgagatccactggctggacccacagatgacagtgggtgaggtgccaggacaagtatgagtgtctgcacgtggaagccgagtggaggtatgacctttcaaatccgctacttgccctagcacttccatgcagaggccggagcgcggacttgctcatgnnnnnnnnnnnnnnnnnnnnnggttccgaaaagaccatcctgctgccgctacccctctctagtgttactcccgccacgtcgcgccctccctgagtcgccctgcgcccaccgagggcgtctccctcgtctttcctttcggcagcgcggtgctcagcatggagacccctcgtccacaccagcgccacgtcctagagaggttgccccgaggacccgccgcccctacctccagtcaccatcgtcggccgagtctgaccgcccaactagcgacactataagaaccgtctcgctttcgcccttgtcgccgcgtccgacctgccgctcttcgccctctgccgacccccaccggtcacccacgcagcctccgccctgccacactgcacgtccgcatccccctcaccacgccgctgcagcgcctcttcatcgacctgacgttcgatggncctcagccgtcccggcgcatgcgccacatacgaccgccgcccacgccgctccggctcgcgtgtagcgtgtgaccccgcgcgccgtctcccgttcagccaggcacgggccagagccatgacgctcccaccgtactctccctctcgcgcta

SEQ ID NO: 93353 - DNA, 423 bp, Homo Sapiens
agccaaaaggtggaaacaacccaagtgtccggcaatggatgaatggataaaaaggaaattctgacacatgctgcaacacagatgaaccttgaagacattcagagacataagccagtcacaaaaaagcaaatactgtatgattccatttctatgaagtatctagcgtagtcaaatttatagagacagaaagtggaactttggttgacagaggctgggggaaaagaggaaatggagaattagtgtttaataggtttcagctggggaagatgaaaacattctggagctggctggtggtgatcattgcttaacaatgtaatgtacttaatgccatagtattgtacactaaaaatggttaaaataaattttatgtcatgtatattttaccacaataaaaacaataaaggcttttgagtgactgcaaaa

SEQ ID NO: 93354 - DNA, 775 bp, Homo Sapiens
  misc_feature (222)..(251): n is a, c, g, or t
agctgctgtagcccctacgtggtgagtagatcgtgtccacagaaatcagcggaggcttccacagtccctggttggaatggaaccggcggtgaggatgagaggcgctgaagaccagaagacccagtgcgtgaacggggcgtgtcatccctggagtttcagtagaatttcaggcctgtctgcttgagcagcagaggaggagtttctgtgtgcctgtgagagacnnnnnnnnnnnnnnnnnnnnnnnnnnnnnnatgaatgaacagggttgtgtacgtgtgtgtgcgttagacaaatgaacagtgttgtgtacctgtgtgaattgtcactgtgactccaggctctaggctctgcagattcctcagccctatcgcctcacagacacttgggatgtgcagcaggtaacagagagaagccagattcatggaggcgtgaaggatcccagcaagaaaacacagacttgatcttgagacgagattttcgaaatcggttgcggtctcaaggcaggctctgagaagactcgataaagagttctcaggaataggcatccctcctggatatttcccccttggaagcgccgaggagccagctctatgtgtgtaaccatagcatctctaaagctccagccccaggaacctgctgtgaattagagacagattccaccctagacatcagtgatcttggcctctcttgtatagggaaggtcaacactgttccagtttctctcctactcccatctggttgtgctcggtgaagtagtgctacccttctgttaaaa

SEQ ID NO: 93355 - DNA, 267 bp, Homo Sapiens
tcacttgacctttctgaccctgtttcctcatctaaaaaatggtgagtgttccaccagagtacacctaattacagagattaaatggtacctgggttgaaagggatctggaaataaagctagaaatgtctcactgcatatacatttctttgaagtactgttttgccttacaaattcacgtaggtgttgcattttaacaccatattacctatttaatataaatttaatattttaaattacttaccattaggtaagatgtatcatactgtc

SEQ ID NO: 93356 - DNA, 1001 bp, Homo Sapiens
  misc_feature (873)..(897): n is a, c, g, or t
attggcctcagccacttgcatctaaagagcaaagctagtttacccgcggcccatgttcttttcgatggttagccttatttcttagctctgttaaccactattctaacgttagcttcaagttcagttttaataatctattccatagttgtgtactgctccctgccacatgaacaaaaagtttgggggaataaggcgagcagtttacattttctgtggatacttcaagtaattggccccaaagtgaaactgaattggccatggtttatcgtgttctgaggggataaaatgtgtaaggaaacggacctgtagagagggttgatatccaagtatgcgtgaatgtgtgaaaatcctataactccacttcaactggcctaatatcctgagtcactagatggtcagaagaatagatacagtacaaaaggaacaaactgatgtacatttatactaaaaaaccaaaaacaaagtttgtacaagatgaacagcaaatgaaatagcttctgtcaaaataaaatctcacacaggtaatttttctagtacgtgaacatacatacacccacacacacagacaacacaagcaaaaatgtgtattttgtaagatataggatcttggaaatagacaaaattagcaaataaagaaagacagatcaattgtaatttattttcttttaacactgtatcatcataaagaaaactggtataaatgaaaaaatctatttcaaatatctacatctaaaattttaggcagtgaaaaagcactttgttgacaaggagtgtggaatgatgtatgttaattgtcagaaactgctgaatgccttgtttagttgtcacaaacaaattcacatatcagaacgaacaatactgctaaatattccnnnnnnnnnnnnnnnnnnnnnnnnngttaaaacatacttgggagaaagtaaagaaaaactggaaatccatacatctttcaaaagtttgaaattgaagcaatatttagaaccatagatgaggaaacacgg

SEQ ID NO: 93357 - DNA, 535 bp, Homo Sapiens
  misc_feature (310)..(340): n is a, c, g, or t
gcaggaaaaaaggaatatttagcagtattgttcgttctgatatgtgaatttgtttgtgacaactaaacaaggcattcagcagtttctgacaattaacatacatcattccacactccttgtcaacaaagtgctttttcactgcctaaaattttagatgtagatatttgaaatagattttttcatttataccagttttctttatgatgatacagtgttaaaagaaaataaattacaattgatctgtcatccatatttgctaagaatgtctatttccaagaacctatatcttacaaaatacacattcttgctnnnnnnnnnnnnnnnnnnnnnnnnnnnnnnnccacgtactagaaaaattacctgtgtgagattttattttgacagaagctatttcatttgctgttcatcttgtacaaactttgtttttggttttttagtataaatgtacatcagtttgttccttttgtactgtatctattcttctgaccatctagtgactcaggatattaggccagttgaagtggagatataggat

SEQ ID NO: 93358 - DNA, 723 bp, Homo Sapiens
ccactactaatatccaattccaggacattttcatcacttcaaaaagtttggctcctttgaagacttgggattttcctgaagacagaattcactttggagtcaggttaccatgatagccttttaccatcttagagctaatattttgtgggcaataaccttgcgaactgcacagagatttcaagttgattatttgactgcccaattgtttcaagctatgaaattgtcagatacttacaagcaccatgtgctgaaaactaccatcttttgcagtgctcacaagggtctgttttaattggtggctttactcagccatgtttctgtttttcaaaccccggagtcagttggactgcctccatatcaccacttaccacttccaagaggagatgagttcccagcccatcgctgcatacccaccagcttggacgtagctccagttgctgccaaacaacagcctcgataacttttgaggtttcttctgttcctgggaggctatgattcagtcttgtcttctagcaatattatggaaactgcatgccagtaaccttttagatatcatcttgatcttcatgatactgactcataaacttaataactcttctaatttgcaaaagcaaaaatgtacactggaaagatcattatgcccccgctaggtttgaagcctggcttccaaggcttagcttcctcatcagaaaacagagacctcacctatctcatcacctaaaa

SEQ ID NO: 93359 - DNA, 602 bp, Homo Sapiens
  misc_feature (151)..(151): n is a, c, g, or t
gatggccttaacatgttaattcctacgggaagcccttccgagagcccttgcgtaccaatggctctccttgccattgtcccttcaaagaagggaccttactcattgccaaggacgaatttctttgtccttaactgggacttgccagtttggnctcaccacgggaaattaccgcatagagagcgtcttgagcacagtgggaaaccgtctgggctcaatcagaatcgttgcctctctaaagggcatataccatggcatctcccacagcagaatggaccggtgtgaggaaggtcccttttccccgtgtttggggtttgccaaggccaaaagtccaactctctgcccccctttaatcccctttctacagtgagtcaactaccctcactgaaaatcattttgtaccacttacattttaggctggggcaagcagccctgacctaagggagaatgagttggacagttcttgatagcccagggcgtctgctgggctgaccacgttactcatccccgttaacattctctctaaagagcctcgttcatttccaaagcagttaaggaatgggaaccagaatgtttttaggacctgaagaatctttatgactctc

SEQ ID NO: 93360 - DNA, 574 bp, Homo Sapiens
cagtattgaaaatctattcagtagataagctgccattagaaatgaattgcctgaatcctcaagcaggaccctctgcagatctctggagttctctttctatgcagcaatctcgtctcttgtgctctgccctctgaactctagctgccatggtctgcctggaaacatttcagcagtctgtcttctcaactcaggaaacccaccagtcccctcctgggttcttccttcctatgtcacatcctgaaaactctctgaaggcagtaaactgcaccacaagcccaacaccgcagttactgcttcgtgtttgtgttgaatcacaaaatgctcaaacttcagggggctttagaagccacacagcccacatcttcattgtagaaatgagaatgcaaggcctggagagatgaaatggctttcctaggatcccatcactgggcagctttcaaagtacaatttctccaccaaatcaatctttggacttggcaagacttgagaatctgtctgttcgttgcttgttttggattcatttttgtttgtttgttctcccagtgattctgatgcacatcaggtcaggagactg

SEQ ID NO: 93361 - DNA, 388 bp, Homo Sapiens
ccaaagagtgagcatttttcttaggggatgtgtttaatgacactagggaaaagccaaggaccaaaatccaactgtgctggaggcagcatgacatcaggtcatctccaaccccctgggctataccttggcagcctcctaacaaacaatcccctctgggtggttgaggaagggtaaatgtgtctcaggtctccttctccgaactgcaaaaagttctgctgttagaagtggtcactggctgtgagtgaaattcatcttaagcacttttatgttgtaagatttgtgtacacatctaataacttaaagactatttctagcgttgttttcaactacaaatgagttcaaacttgtattcaactgacctagaaataaatttttctggaaccggaaa

SEQ ID NO: 93362 - DNA, 249 bp, Homo Sapiens
tttgtcacacatggtatctttatgagggccttgggtcataggtgtgcatcatagtaatactcggcaaggtcgggcccgtcccgcttgcgctgctgggccctagacaggaggggtcgaggccctcgcggcattgggtgcttggggaggatgccatagtcatccaccaggccggaaagtggctgcgagagttccaggggggcggaaaatgcctcaggaacagaccgctgagacctcagaggctgggagcga

SEQ ID NO: 93363 - DNA, 550 bp, Homo Sapiens
cagaatatatactgaaaggaggcttgttcattgcattagtttttaaaaatgatccatagcatgtgtgtgtgttttctcatctataaaatggagatacacccctctcagaggatggttgtggtgattcagcgaggtcgtggctgtgaaagcccctttagacaatacctgcacagagtcggtgtaaatgtcactcctgttttttctgctccccacccccttgcctgaatagatatcagctattttggcttaacagcttctttctcatcttaggcctgcctgaaaacgttatagttccctttctggcaggcggtggtttcaatgagtacgtatactttgaattattataaatagttgagggacaggctgcctaaagtctaattggagagttaacctaatgtctgtgaaactaatgaacaaaacgagatagtgtagatcaggaatgtccagtcttttggcttccctgggccactttggaagaattgctttgggccacacataaaatacactgatactaatgatagctgatgagctaacaacaacaaaaagcaaa

SEQ ID NO: 93364 - DNA, 463 bp, Homo Sapiens
tggaattactagattttaaacctcattacactgaacaagatcccaaacgtgcccaagccaggggtttgagaaaagagattccaattcccctagaaaactgacacctataagataacgcctacaggatgatgaaaccccaaggccttggtttatccaatctcaaaacatctacataaaggaacgcactatgggagtgatgtcctcgccaacctagtacaaccacacctcagtagaccacactttcaaaacatcactcggaaaattacacagggatgcatcttgtgcactacaaacaaacaatcccaagatggaatgtagtcctcctaaaaaggagatatagtacaaagagctgagtcccttcaaagactgaaaggcgggcttcactcagatgcctacctggttatgtgcaccaaggaaagatctgaagttattaataaaagaaaaagaaggagatataagcaaa

SEQ ID NO: 93365 - DNA, 303 bp, Homo Sapiens
tttctattttaatgtattcttttattgtaaggaaactcaatttccttttggagatggaagaaacataattagtaaattgtataaatagaactctactgccctttgtgtttcaagaatagaagttccaagcaagacatcatgattaaaatgttttccaataacataagaaaaataatctgtaacattcattacatcaacatattgtctacatcaatgtcaaaagccagttaataaaattaagtattcttaataaaactctaagagacaaagaactgaaatatgaaaattaccaaaacttaatag

SEQ ID NO: 93366 - DNA, 310 bp, Homo Sapiens
tttatggaaatgttatttattacagatacaggaagaaaattaatcctctgtcaccaactcatgctattcaaaatagaatgttctaagcatcacagtcagtaaaatacattctcttaaactctaacaaactctcaaaatcatgccacaatttagtttacctgttatttgagtcctggatttttaggcagtgctataaatactacaactggttacaagcagttaatttaacagattaacttaagaaatttgttggaaggatataagggtcactctcaactcaaaggaaaagctaaggattaaacattaaaag

SEQ ID NO: 93367 - DNA, 601 bp, Homo Sapiens
ccttgaaactggagaattgaaaacaatctggtttctctctgggttctttcattataccatgttttcttgcatatagacagaataatgtggttgttacaattatttataaatgtagtgtatgccaggaactgatcactgtgtgtaacggatacaccattatttttcaaggaaaaaaaatattttgggctttgatgattactagacagatgtccttggtgataataatcacagtaagtcccaactctacccagtacttcacaattctctcagtgctttcctacttgttgtctcctgtaatgacgtatcatatcctgaatggcgggagggcaaggatcattagtctcattttacacatgctcattctgggactgggagagagatttcctgatttgcctaaactgccacagtttgtcaatgatggtggagggatgggggcaacactgaacctccagcttcctaagactttcccactttctcaagcttttgtcgaatgtgtcattagtggcattcactttggtcaactttggttccttgggtattgctggctccccatttttttggatttaaactcttcaaattaaataaatcagatttacatgtt

SEQ ID NO: 93368 - DNA, 584 bp, Homo Sapiens
  misc_feature (158)..(166): n is a, c, g, or t
ttttgtcataatacaaatttactaatgagaagaacaaaaaccttttttgaggggaaaggtgataatattttgtttagttgcggttcaaagtgagtgttctctcttgtcaacccagttttaacattcatctgtaaagacagactcatttgtgggccgtnnnnnnnnncacacgtgctggaccggattttgttcatgggctacatgtagttcgccgactgccgctctatttagtctgctcccatttagctggaatccagacttaggatttctcagctctctgttgtgaatcgccaggtttcttctcagtttgttgcagaatcaatactactcggctggtgacatgcgtgagttggtccaattaagactgcaacttctgatcctgtcctgcctggatccatccaccctgggaatgtcaacttgtctttcctttgatgggtgggataaaaggagtaagttacaatttcttccttcatctctgcctctttcaatgtcccttcctttatgctcatgtcagtctctctttaaccaaacttgtaagctaagtctggcaagacacatagcatttttcaagaagtcaataaaca

SEQ ID NO: 93369 - DNA, 789 bp, Homo Sapiens
caggccttctctaaagtgcaggaagtcactagatctttctaatgtcctggcacagaagtgaagtggatttaacattctcagggcaaccctcaaccacagatgcacaggagctggtgggtaaattctctagcttcccaccctttgaatggacaattctaagaggcattctgtacactcttggaagtctcagctgagtcaaacttccattgcttatagaagcaacttctgtaatttactcctattgtagctctgtctcactcttgtcatttgtaactccttccagagaattctcccaagccaaatacctgcatccaagatcttgtcatgttctattttggagaaacccaaatgaagataagtactactattatccccagtgtatttgaaacagaggcacagagaggctaagctaagttacttgcctaagactttacacctggaaagtgaaagagactagatttgaactcggataatctggctgcagagccagcccattcctgactatcactctatgctcaatgaggtttataacagatataggggtctcaaacagtctaatattacctacctgcccttataatggttaaaacttgtcttggctggaagggtaagttttcatatctcttacctaggtttggaagcaagggcatactgcttctttagattttcaccctctttcaaatgaattcccacttttaagctccaaagtgttttcccctcccccaccggaagaagaacaatttaaaagagtgacagagcaaacattaaagtattgtaacttcccaaaaa

SEQ ID NO: 93370 - DNA, 539 bp, Homo Sapiens
  misc_feature (217)..(217): n is a, c, g, or t
  misc_feature (401)..(414): n is a, c, g, or t
ttttttatttttcggcctcacagaaacatccagaacagacaaacctacagagacggtgggctggaggtgggcacaagctagggcagagaaagagggcacagctgctaaaaggcacagggcttctttttttggggagcagtaatgggggctgtacaattctggaagcgtgttaaacgcccctttgaaatggtgcattttatggtatgtgaatttcatncaacctcaaaaacagctgcaaggcctcaaatggaaagggccaaggaaagccaaacaggatatacacacaaaacacaccgtagacgcgccacagagcaatttaggaggaccagggacagaggttcgacgcgtttctagggagaaagcagatcaagtgtgagaaagatgtccttggacctcctgannnnnnnnnnnnnngggggcgtcaccccacggagaccagcttggaaacttttggagaaagggctgcagaaaaccaaaataagtgggatgagaggcttgctccaaagtcctggggactttgccaaggtctaaaacgcaag

SEQ ID NO: 93371 - DNA, 281 bp, Homo Sapiens
catcccccaccaggaccccatactttcctcccatgggtttcctatggaatgttgctgcttcaacttctgagagcctcttgctgggggccccatccctagcccttgcctccctgtgctgctttaccttctttttgggaggataactgccctctgttttcagcaccccaataagaaagaaaaagtcatgaccagaagtcagtgtcagtgattgctgatgtgtggaaacatctgatgaatgaagagtttgggtaaaaaataaagggaactgatgaaaaccaaaa

SEQ ID NO: 93372 - DNA, 1382 bp, Homo Sapiens
tcatcttcccttttccgggctgtggggccccgccgcttgggccgaggctcagtcagtgactgtagtgatggcagttaagagctggaggaaccgctgggagaggatcccggcgcccgaccacccggccccccggatctgggtgccttccgagcgcccccgctggcccgcctgccccatgaccctggtgtcttcagagtctatccccggcctcggggtggccctgaacccctcagccccttccctgtgtcgcctctggccggtcctggatccctgctgccccctcagctctccccggctctgcccatgacgcccacccacctggcctacactccctcgcccacgctgagcccgatgtaccccagtggtggcggggggcccagcggctcagggggaggctcccacttctccttcagccctgaggacatgaaacggtacctgcaggcccacacccaaagcgtctacaactaccacctcagcccccgcgccttcctgcactaccctgggctggtggtgccccagccccagcgccctgacaagtgcccgctgccgcccatggcacccgagaccccaccggtcccctcctcggcctcgtcatcctcttcttcttcttcctccccattcaagtttaagctccagccgcccccactcggacgccggcagcgggcagctggggagaaggccgtagccggtgctgacaagagcggtggcatgtgcaggcgggctggctgagggggcaggggcgctagccccaccgcccccgccaccacagatcaaggtggagcccatctcggaaggcgagtcggaggaggtagaggtgactgacatcagtgatgaggatgaggaagacggggaggtgttcaagacgccccgtgccccacctgcaccccctaagcctgagcccggcgaggcacccggggcatcccagtgcatgcccctcaagctacgctttaagctggcgctggagtgaagactgtcgcctcgaagggggtgggggccccgctgggggctttgaggatgagggtgaggacaagaaggtgcgtggggaggggcctggggaggctggggggcccctcaccccaaggcgggtgagctctgacctccagcatgccacggcccagcatctccctggagcaccgagactcctgagggctgtgggcaggggacctgtgtgccccgaaccccccatgcttcttttgctgcctttaagccccctatgccctggaggtgagggcagctctcttgtctcttccctgacctcctcccttttccctccccacattttgtattaaactttaatttctttttatttaaaaagtggtgggggtgggatgagtgcccaggactaagggctattccctgtctctgagggtatctaagctatg

SEQ ID NO: 93373 - DNA, 619 bp, Homo Sapiens
acacacctttgttcattgataaagggtggtacaaaccatctagacggaaagggccatggaaactactgtttcttctgatgtttgggcacagaactgacatccctttgctccagtcttccaaaccctggccacgtgaactaagccatctgattgctgggtatatcagcatctagtttgtgcaaaattatctgaacttattttcgttcctgctgatgcaagtgcctggtgggtcaaatccggagccggatgcatgacaagatcccctgccactcagctacttatacaactcttctctccacaaatactaattcagcttttaatttgaaactgttagggaagtttcagacagggaaaataaaggagttaaaagtatgcctgcagctctaaaatatgtcaaattagtgtattgattacttcaagctcaaagtactttggaaactgtagttccagaagtgactatctgacctgtcttttcctgcatatagcaagccataaaacttccatggagaaagatgccttccctgtgccgggacaagaaaataaccctatccccaggattggaaattgttgcttcagtagacctgtacaaataaactaaagtaacctcttatctcccaaa

SEQ ID NO: 93374 - DNA, 339 bp, Homo Sapiens
ctccgccaatagaaacaacaggaaaaacatgcaggaagcttcagaacagactagaaagcttgcaaactctggtagaagatttacagctgaagaaccaagcaatgtcttcaatgatcagaaatcaagaaaagaggatacagaaagtaaaagaccaggaaaaaatgttactaaaatgactcgttgcttgcctattctttacagaggaatgaggcccaattaattgtggtgttactcgtaattagtgccctgtgtactttttctttttatgtgaaaatttaataaaagataccctgtcttgtaaactctattttgaaataaactattcttgaatccctcaaa

SEQ ID NO: 93375 - DNA, 532 bp, Homo Sapiens
  misc_feature (498)..(498): n is a, c, g, or t
  misc_feature (517)..(517): n is a, c, g, or t
gtccagggatgggtgcctgggatcctggggggagggaggcaggggacgcccttctggagctgggctcggagggtcctgccccatccagccctcggctctctgtgttctctgtccctagcctcaaaccctcttctggcagcgctagtgagatgccttagtctgtgggggtgggtgggggactggggccccgttttcctttgtgagtcttggttggccccagccctggcaggggcctgtctggagcaggggtaggtagggctgtgggttccagaactctataactgggcccctctccagtgtccaggggcttggagagacctgcgcccacccctccactctcccaggagtcgctgatcactgggacctggttccagccgtttgcaggggaggcggctccgagaggcgtgtgctttccgtgggtggcgcccctcccccgccctgcctggcctcatccttgtatttaattaattaaacaagcccctttttaaacccctcttngccacgggcagagaagcanaccaaaaacatgtcg

SEQ ID NO: 93376 - DNA, 376 bp, Homo Sapiens
agcctgcacactgatggaggaggtacagccgtggaggagaaccagagtctggaggggaggcacagtcctcaggagcccccaggctgacaggggaaacaaaacacacaataaaccccaaacttgcaaggttctggggcaggcaccgaggtccgagtggcaaggagacaggatccagccctgtgcagtggtgaggaggcccctggggctgctgtgatcggcctggaatgtcaggctgtgagctcagccctctcggcctgcgtgtcgggctgtcagcagggccggtgcacgggagaagatttccagccccctctgggccatggacaggcctaaatttagctagtagacaaggggctggccccaagcccagggacagtcg

SEQ ID NO: 93377 - DNA, 560 bp, Homo Sapiens
ccctttcagcagccccagtggccattctttcagacgaatgcctttcaagggcgaacagttacagaacccaaattgtagctttgacggggccaacactttccaggtcgaattccagcgatttcactgtgcttacttcggccttctgggactcagcctcccagggagccttcagggaactggttacttggtctgcagcatctctgccttccaacacttcaggcttggagacttgctccactgcatgtagcactggcactacaggacagcgacgatcctcaggtcaccgtaatgacactgccaggccccaggacatcgtgagctctccggggccagtgggctttgaggattcttatgggcaggagcccacacttgggcccacagactccaatgggaactccagcctgagacctctcctttgggcggtccttttgctgccagctgttgccctggtccttgggtttggtgtctttgtgggcctgagccagacctgggcccagaagctctgggaaagcaacagacagtgaatgggcccaataaacaatcatttcaaacctaaaaaa

SEQ ID NO: 93378 - DNA, 803 bp, Homo Sapiens
gtgtcgagtacactatataaattatctccttatacatatttctcaggcaagcacagagttatactgaacttttctaaagatgctttgcatcaagaagcaaagggaaatacagaattaaaatgtttctttccattttgctttgtttttctatatcgatctagactttgtaggaaaatgcaaagcgtatatttaagaaaacctaaataagaatagattcatttactcattttcatttattcattcatgaagaatttattgaatgcctactatgtgccaggaatattgctatatttttgaaatttaaggataaaatatggcccaatctatcaagaaaggaaagtgaaagacaaatgtaagacataattacaacattctgtgggagcacaaagtaggggactcagttcttagagaagtcttttggtcttagagttcatcaagcagagaaggggaaggacatggtccaggaaaataaatcagcacacaaagagatggggtcttgagggtgcatagtacattctggacagccagttacctgggatgagttgggagggaggagaataaggacaaaagaccatctgggcaaaaatcacgaaggggtatgtgtgtcatgtaaaggtgtgccatgatagttattcatattgctattgtaatattaatatatagtaattaactacacatgacacagctttacatgaccttaagtagttatcaacattaccataatagtaatattaataactacaataagagccattattattcacttgaggcacttgttcaaaatagattttacaaaagaaaaa

SEQ ID NO: 93379 - DNA, 491 bp, Homo Sapiens
  misc_feature (448)..(448): n is a, c, g, or t
  misc_feature (473)..(473): n is a, c, g, or t
tttaagattgtacacagaagagataactagatcagggatagaaaaggagcttttcttaaagtctctgaggagagaaaagtcagcaaagagttatttctgaagattcttaggaacttgttataaaaacaggtggggaagagagagtgctttattggtaacttcaaacattctgtgggcaggacagctgagtcacagtttggtgataggatcttagcttcttggagcttcagaatttattctaaatgttctagaaaaatagcagagttagcttaaataccattatgttagtcatctgttagaaagttttgtgtttaattattatttaatttttgctctagagtttattttctttatgatctcttctggatactagttctaatttaactgctatattaaaagttgcttaggactgaggaatttgatttgccagcttatttcatttatttgnctaggccccctgagactatagaacnctacttctattgggtggc

SEQ ID NO: 93380 - DNA, 291 bp, Homo Sapiens
  misc_feature (180)..(227): n is a, c, g, or t
tgctataccatgaggtcatagcaatcattcctctaatagaagctgacaggacataaagacagaactatctgatgaacacacacaatgactagaaatatatagagagatagagacagtgaaaagacttagtttacctctgagaaaccatcccccaaaataaatcctgtattaacaagtgcnnnnnnnnnnnnnnnnnnnnnnnnnnnnnnnnnnnnnnnnnnnnnnnnacctccaaacattaaaacacagtgtataaaatggtgtgagaaatttaaagtcactttccagcct

SEQ ID NO: 93381 - DNA, 463 bp, Homo Sapiens
tggaccggtccggaattcccgggatggcgtgtcctggagtggaggtggaggtggaggcaaggagctgaaattctgcgtagccggagtgagaccgctctgcaaaccactgcgtgctttgcagagtgattatcagcacagttccctgccctggataaggaacagctacagtcgctgttaaatgtgcctgaaaagcaatttgcaatctttgcattaggcatttcggccgtggaaccccaggctcggaggactgggtgtgagcgctgcccgggagaggctgacctgccgggaccggagtgcccggggacgctgtgcccccacttgcccaacgtgcggaatcggctaagcgcgtcggcctgcgcggggcacaagggacgacgcccgcctttctctctccgagaaggatccccaaacctcactctcttcactcctccccgctaaaaaaccccccaaccccccaaataac

SEQ ID NO: 93382 - DNA, 578 bp, Homo Sapiens
aaataagtatacttatttgtatttataagtgtttatttgggtgacagataaatagaattttaatggcaaacatcatactttgaagtcaagagtaaaactgatttctttgaattcatagaaacgaagtattggagtgggagttctgcttggacccatgtccaaattacatataatggatatgactagaagtttgttaggtgtactagacacgaaggtggatatatggagagagaactttgtaaaggcttcctgaagcccaatatgaacatctcatttcccttgatctatcttatcatccctcaacttatcttctcaaaaaacacatgacagtctggcatggcatataatacatttttgcatcgaacgggttgtaatgttgtgttatttgttgtctccaactttgaccgttaaaattagtttatgtcagaaatacacttcaaaacttttgaggattattttctttcatattataattgtttttaataagatgaaggttgtcctttgtgaaattttggaactgaaactgatcacaacttaaaacttgaaatcccaaattaaagtttatttccaggtttaaa

SEQ ID NO: 93383 - DNA, 415 bp, Homo Sapiens
ccggtccttcgtgggctgcggggtgctgctgtcccgcaagcgccggcggcagcatggccagctctggttccctgagggcttcaaagtgtctgaggccagcaagaagaagcggcgggagcccctcggcgaggactcccgtgggcctcaagccccggaagaacgcttcagacggtgccctcatggacgacaaccagaatgagtggggggacgaggacctggagaccaagaagttccggttcgaggagcccgtggttctgcctgacctggacgaccagacagaccaccggcagtggactcagcagcacctggatgccgctgacctgcgcatgtctgccatggcccccacaccgcccccagggtgaggttgacgccgactgcatggacgtcaatgtccgcggccctgatggcttcaccc

SEQ ID NO: 93384 - DNA, 217 bp, Homo Sapiens
aaacttaaataaattgttacaaaatagactttagaaaataagttacaaattgtagcaaaaggctcccttccacaggcaactttcccaccgggggggctctgcatccgcctctccctggtgttgcaatctggctgctgagggtggcgctgagaagagcacggtgatgaggctgggggaaggaggtccttcaaggacagggacgcgaggaacaccccac

SEQ ID NO: 93385 - DNA, 622 bp, Homo Sapiens
tttaaaaacgtcgtgctggttgcttctccccaagaccgttatgtgccatttcattcagccaggattgaaatgtgtaaaactgccctcaaagacagacacacagggccagtttatgcagaaatgatcaacaacctcctgggccctctggttgaagccaaggactgcactttaatccgacacaacgtgttccacgccctgcccaacactgccaacaccctgatcggccgagccgctcacatcgctgtgctggattcagaactcttcctggagaagtttttcttggtggcaggactcaactacttcaagtagtggctttgagggagcaggtctttggtaatgcttacgatcggtggagagctttagctgagacctgcttttacagacctcaccatttcagaatgaagcttcaacagcattgggggacggaggctcgggtggaacctgacatgagaggtgcttttgttttggagattcgagaaagctgagcaaatagactaaatgacaacaaactttgcttgaatttgtatagttacctggagtgtcattcaagatgttttctaggaaaaatatgagagaataaacagaatacttgggagttggtgagctccccttgcttgccaaa

SEQ ID NO: 93386 - DNA, 544 bp, Homo Sapiens
gcagagactgaaattgcagacagagggcacgtccggaagaaaacctgtctgttggcccagacatatagtttttctcttcttacaaagtttcaaaaacttaaaaatcaggagattccttcataaaactctagcattctagtttcatttaaaaagttggaggatctgaacatacagagcccacatttccacaccagaactggaactacgtagctagtaagcatttgagtttgcaaactcttgtgaaggggtcaccccagcatgagtgctgagatatggactctctaaggaaggggccgaacgcttgtaattggaatacatggaaatatttgtcttctcaggcctatgtttgcggaatgcattgtcaatatttagcaaactgttttgacaaatgagcaccagtggtactaagcacagaaactcactatataagtcacataggaaacttgaaaggtctgaggatgatgtagattactgaaaaatgcaaattgcaatcatataaataagtgtttttgttgttcattaaatacctttaaatcaaggaaaa

SEQ ID NO: 93387 - DNA, 562 bp, Homo Sapiens
tttcctggcttcctttcctccctgtctccctggcctacccttcctcttccctcagctgttccttccctttctctccagtgaagactaagggccaagcatgagcctttcttcctgctcttttacccttgaggcagcaggagaggatattcacctcctgacatgacagattctgacgctatctgctcctctgtgactttgggaagcggggtatgtgctgctcctgggctgatgggggaaagtgcctctcccagcaatgctggtgccacttggtgtgctacggccccccagggcagtgcggagccatctgggacagttagacaatgagagacgtgaagccatttcaaggtgcttccttgaaaatgctccagaaaaacagcagaggcggcctctctggggatccggtccagccgttgaaaagaatctgtttgtttcaccactgaactcaaataagccaacagattgaaggaagggagtttccacgcgcccctccccaccaagcagttacctgagttccagagtccagtccgatggatcccattttaccctggtttaaattgtttcc

SEQ ID NO: 93388 - DNA, 785 bp, Homo Sapiens
  misc_feature (512)..(701): n is a, c, g, or t
aagggaaaagcagcttatttttattttaccaaatataaacgagttatcagtaacaatgaataccagaaacagtagaattaaatcctcaaagttttgagagaaaaataactgtcgacttgaaatatggagaaactttggagggctgtgatttttttccagtattaaacatgcatgtattaatcttatagtttattttcttgttgtatatctatatataggttttctctgcagcacagtttctcttagttgttccctttcaagctggtggctgctgcttcgcagtctctcagaatgagttctctcccagaaggcacctcattccctcatgcaatagagctcttgggaggtgtgccaactgatgtttcagacatgtttggatggggcagaactctgcatgtgcagccagcctggtatcagggggaaaaaaggtaacaaatatgaagtgcctagcatagcacctactcagtacattctggctttcattcattactacataggaaattcaccaatannnnnnnnnnnnnnnnnnnnnnnnnnnnnnnnnnnnnnnnnnnnnnnnnnnnnnnnnnnnnnnnnnnnnnnnnnnnnnnnnnnnnnnnnnnnnnnnnnnnnnnnnnnnnnnnnnnnnnnnnnnnnnnnnnnnnnnnnnnnnnnnnnnnnnnnnnnnnnnnnnnnnnnnnnnnnnnnnnnnnnnnnnnnnntcgtttgaatttaattaagagcctattattatctaggcgctgggctaggaggaatggaaaataacaagatacatataatttgat

SEQ ID NO: 93389 - DNA, 526 bp, Homo Sapiens
tcatcccaatggaaatgtctggtatacatcaatatcttgggggtcaatactcaaatccagccgcgaaacagaataagggcttgcaattggtcaaattccatcacttcctcacccctttgtttcatttaaacctgtctttctggctttgaaccgttatattggagtccgcatcttagaacaagacaagatttctataacttttctagcaatgggccaacaggcaagaatcagtgttggaaccaaagtgaagctaccaaaccctgaggagattccaatcctccgatacgtaagtggagatgaccttcttctgctggccagtttaataaagatccgtcgcctgtttcataaacttgaaggatgtgtgaattttccctcaagccaggtttgggaaaaattaaagcaaccttcctacctttcttcactttctctaaaactaattgccctttgtcacagttctggtataaagcaagatataatgaagacaataagaaatataataaatgaagaaatttaactaagaaaaaaa

SEQ ID NO: 93390 - DNA, 396 bp, Homo Sapiens
atattaccaaattggtgatgttgtttctgtgattgatgaaccagatggaaagccctactatgctcaaatcagaggttttatccaggaccagtattgcgagaagagtgcagcactgacgtggctcattactaccctctctagcccaagagaccaatttgatcccccctcctatatcataggggccagaggaagatctccaaaggaagatggaatacttggaatttgtttgtcatgcaccttctgagtatttcaagtcacggtcatcaccattccccacagttcccaccagaccagagaagggctacatatggactcatgttgggcctactcctgcaataacaattaaggaatcagttgccaaccatttgtagttcacaaattaaaactgggtttcca

SEQ ID NO: 93391 - DNA, 446 bp, Homo Sapiens
gctctgttcagcagttctaaaaattgctgaagtaggggccaggtcactggtagttatagtatggaatgggagaagtgaaagttcagttatagaactttccatacttccaagtttactgcaagtttttatgcttgagagagatgctttctaatataagactgatgtgttgattttactgattgtactgtacatctattaaagccttagattattacattacgggttggaacccataccaatgtaatgtcaatcgtgttaagaaagtaatggtgacttcacatgttattgtagttagttacattatagaatattacttatttttcttgttaaaatgtagtttttcatttcctacatttattagattttcattttctattaacaattgaataccatttcagtttatagacttgttttattagattttaccaatgaatttttcaaaatac

SEQ ID NO: 93392 - DNA, 522 bp, Homo Sapiens
tttcctgtacttactatgatggtctaagagtgatgatgtattttaaagttgcaatgaagcaattacaagaaataaaatattggtatatacttccctataacttgaaatgatttcaattaataaaatgatctgatctttaaacatgaactatattcagatatggatctatcttctgtattttaaaaaatcaactttagcaagatattatttacatacaataattgtatctattcagtgttcattttgacagtgtgtgcacccatgaaaccaccaacacaataaaaatacagaacatttttatcaactctaaaagattccttgtgcccctttgctggccatccctgtctctggcctagcttcaggcaactgctaatctgaattttgttacttcactattagtttgcatttctagaattttatatgaatacaaccatatggtacataatactctttcatgtctggcatcttttactcaaaatgactgaaattcatccatgttgtcacatgtatcattagtctgtt

SEQ ID NO: 93393 - DNA, 708 bp, Homo Sapiens
  misc_feature (109)..(169): n is a, c, g, or t
atttttttgatgagtgtacatggcatgagggacacagattccgctagaattcaaatcccacttgtgtataacctagggcagtgtgccacatctctgcacatctgttcannnnnnnnnnnnnnnnnnnnnnnnnnnnnnnnnnnnnnnnnnnnnnnnnnnnnnnnnnnnnatagaatataatagtagtgctttcctttgctgttgtcagtattactctgagtcggtttcattctcacacagaatgatggccgctagaagctcaaggcttataatctgctagctttctgatcccactggcatgagatactcttgcctaatagttacagctaaagtccaggagctcactgttactggtctgccttggattatgtgcacattcctgaaccagccactatagctaggggatggaaaatactgttcctggttacttaaatgtaggtgatgctcctcccatataccacatgaacctaaaggagtcctggaggaggccgttcaccacaggaaactgaggtgttcttagaagggtggatgctggcagatctctactagttagagtctacatttgccttactcatttcaaaagtccacattgcagtctcattttaccagtgatctagcttgataaggacattcataagtaactggatgattctttaacattgcagatttgaaaggattaaataaagtcaacaaaattgttatatcaaa

SEQ ID NO: 93394 - DNA, 274 bp, Homo Sapiens
gttctccagagagattgtaccttcagcaaacaatatatgaggataccttctgcaccctcagccacactgaatatcatcagattttttcatctccggcaatctggtagatcagggatggtgaacattttctacaaagggccaagtaagaaacatactcagctttctgggccataagatatctgttgcagctcctcaactctgccattgtgcaaaagcagttgtagaggatatgtaagtgagtgtgattgtgtcccaataaaacttcagttacaaa

SEQ ID NO: 93395 - DNA, 1167 bp, Homo Sapiens
  misc_feature (597)..(717): n is a, c, g, or t
tgcattcagtgtgtggagtcccagcttttggttgtcatcatgtctgtgtgtatgttagtctgtcaacttcggaatgtgtgcgtgtgtgtgcatgcacacgcatgtatgtatctgttccctgttccttctgggtcaggctgtcacttccggctctcagccctatctcctgcaacctcagtgcctcagcctgagagagagatgagatgctcttggactccccactgcatctgggctgcagggccagagctagtctgaccattaggtcagtctgcctcctgacagtttttgcgtagtcaagctctaggcggtatgggaatggctaccgggactctaatggggtgaaagagaggggaggcttgcctttgagagcctatatagccttcctgtgagagaggattagatagggttccaactgggcctacaagctcaagccatacataaaaggaccttgggacataagaaccaatgattgtgcataagttctaaattagagacacatatagtttctctctttcagcaccagctcttgcccctatgctgggtaccaagggagttctcctagctgtggcttctctaggttctaggggtgcaagcctnnnnnnnnnnnnnnnnnnnnnnnnnnnnnnnnnnnnnnnnnnnnnnnnnnnnnnnnnnnnnnnnnnnnnnnnnnnnnnnnnnnnnnnnnnnnnnnnnnnnnnnnnnnnnnnnnnnnnnnnnccacactggccagcctccctacttaccaaggttctccactgcttaccttttccagtgggacagtacagtgtgagcccccgggaagtactgcctgacctatcctaagcttttacacttggattttagccatcatatgttggccaggtctcactgcagcctgcccgaggctaactggctagagccctcaggccctatgatgctccctgccccggccatatcctttattcctgctgaccttcctggcggaataaaagaaatgggggccaacccccagcaggctcattccctaactgaggaaccccctccagggacacggacaaaacccaaaggggttggcggtcttaaaagcccagctctcctctgccaaaaacccccgcgggaaatggaggccctaaacccccccctccaacaagtcccggggcccaaccgggtggggcagagaatgagaac

SEQ ID NO: 93396 - DNA, 377 bp, Homo Sapiens
aggtggagtgactcacttgggtcatatagttggtatgctgtagaactagatttgaacccaggcagtctggccccactatgtgcactccatcactacactacactgctctccctgagaacttctccaactgcctcagcccttgttgggctatggagcctcctctgtacttctatcctaggcttttcatgtccctatcattgctcttatcccatcttattataatgaccctgtcttcctcacaatgctgagaactccccaagggcagggactggacttctcttggcatcacccaccatgtctcacgcattggctgacacataagctagtttgttcaagtcttgtcaaatgaatgatctaataaacgaatgaatgactat

SEQ ID NO: 93397 - DNA, 479 bp, Homo Sapiens
gcggccgccaacagggtttcaaggggaccaggagtcagaatgtggggagacgcctctgccaaggccatcccagcccctatgctgccatcccccagggctccccatcacccgagaggagaggacgccccaactaacccccgctggccctcgggcctcccgagtggccggctgcaaccacggctcctctccagggtaggccagcttgaggaatcttatttattttatttatttacccaaatttgaactagtctgttgggttgggggaaggaggtggctgctacccccaagccttcccagtgctgacaaccccgggggcaggcgagggcgcccagtccctcaccatcggctgcacatcgcgccctcgggccctgccatgtccctggtgctactgacctctcaaggcttcctccaatctggggtcgggggaccctgggaggtgctttacagaccgctaataaaagacgatctgcgtgaacgcc

SEQ ID NO: 93398 - DNA, 309 bp, Homo Sapiens
tcaccctgtctccctgatgcaatttctagcgctgcaggacgaggaatgaactttggccttcagttctgaaggcctggactgagtccacctcctgctccctgcccctcacaacaagctgaacctactccagtggctgcagaattccccaactagcagggggagatatagagagaccaactcagggccctcctgtatctagaaagagtaactgaaaagccccaagccaaggagttatgcagctgttgacggtttccgttccgggaatcactgtctccaagaaatgacctgggcacaaggaagccttgggag

SEQ ID NO: 93399 - DNA, 417 bp, Homo Sapiens
  misc_feature (342)..(350): n is a, c, g, or t
aatctattcactttgaattaacacagtcaagagcaaaagtttctatgcttgagtctgctcaacagcaggcagccagtgtcccaatcttagaagaacagattataaatttggaagcagaggtttcagctcaagataaagttttgagagaggcagaaaataagctggaacagagccagaaaatggtaattgaaaaggaacagagtttgcaggagtccaaagaggaatgtataaaattaaaggtggacttacttgaacaaaccaaacaaggaaaaagagctgaacgacaaaggaatgaagcactatataatgccgaagagctgagtaaagctttccaacaatatnnnnnnnnngtggctgaaaaactggaaaaggttcaagctgaagaagaaatattagagagaaatctaactaactgtg

SEQ ID NO: 93400 - DNA, 467 bp, Homo Sapiens
  misc_feature (102)..(124): n is a, c, g, or t
atgaacagacccaaccaaagtgagctgaaaagcggtgctgcccagtcatgtggaatactgcaggcgctacattggtatggcttcccagagctcaggaacctnnnnnnnnnnnnnnnnnnnnnnnagagatggttccatggaagaagcctgaattctgttgccaaaaatatgggaagtgctgcactcgctctatcatcctcattgattctcagcccttactggcatattaaagtctcgagaagtcccacctgaagaaaactaatgttgtttaacccaggttctaccaaaagcatttgagcattggacatttttgcctcctgttaaaattctgttgggataatattccatggaataaaaggacactgctctaaatacataaattgctgcttatgtgacactgagctttcagtttcctgggtgccagccaataatatggaggaataataaagtaacatctagaaaacaaa

SEQ ID NO: 93401 - DNA, 424 bp, Homo Sapiens
tttacaacacaagaaatggtactgaatatatttgttacatcctgaatcaacccaatagactatcttgtaaacaaaatagtaaggtaacacttcaaaaacagatgaacaatttatccaccaagaatgtatatagtaagccaaaagctcactgtggaaatacacttagcatggttattagaaaatcacaaagagtaatgtaacaagttaccaaattttatggtcatgttctgcttgataattcaaataggatggatggtagttactagttttccatttgtgttgttttaacatccccaatgaattttaatgctttattttttatttgaatttgctggctggcaggtttgctttgcttaatacattgactgcaacacgcttattgttgtgttggtagaataagacatacgagaatatatatagaaag

SEQ ID NO: 93402 - DNA, 630 bp, Homo Sapiens
  misc_feature (583)..(583): n is a, c, g, or t
ggtacctggggcactcggggaagaagggcagcacgaaggagctgcagcgaagcgaggaccccggtcagccccagcaggatcggccagccatctacgtttgcaaggagattccgaagaccaaagatctgggccacaaggatgccaacagtgatgaagagctggggcaacaccccgagagccccccgcaggtttttagggaccagctcccctaagtacatggggaccacgttggaagatacacctgcacatatttgcacctaaggtctggaaataatgataagctcaaatgatgtggcgactctgctgcatcccattaagatcgcacgcacgatacaaaatatgttgttgaacagcaaggccccttttctgccaaatttattcaccaaggggccgaccaggagggatccgataaaccctccaaatggaaacatggacactgttacagaccacagcaacgtcaaggggaagtcttccatgaattcaccggtcctaccatagtgagtctcattgtaaaattgttgcatgagcagtgctggggagttgacagcagccacgttgtacccatactgggaagatgacccanatgcagctatcagggttgccagggcaagcacaagctcaggctgccct

SEQ ID NO: 93403 - DNA, 136 bp, Homo Sapiens
aagtgccattaccgtctcctctgttcagattttgacattcaggaaaatatttttattttgatgccatactgaaatctacaatgtatatctgacaaagcagttaaatgtgacaataaaaaacttatttaatcatggt

SEQ ID NO: 93404 - DNA, 367 bp, Homo Sapiens
ttgaaacgagttttatgaccaccatgaaaaacttgtcaccggcatatgtgaaagatcagcctagtccaccctcaagttttgacaagaacaagtaggcctcatgagggatggatattggccattggtagaagagattttattctagaaaaacatcttgctattgtttcaggttggttgtcctgaagtgtttaagacactgtcaagcttaagatgatgcaggggaaaagttaaactgtgaaataaaacattttaaataatttctgacataaaatgaaaatacactccttggaaagtcttgtccaaacatttttaagatgataaaaaattagaataaaatgaaagctgtaataaaacatcaacaaactca

SEQ ID NO: 93405 - DNA, 418 bp, Homo Sapiens
gcccaatgggtacataagaggcaaaaatttatatgttggaatcttcattccgtctctctaccattaaaaaaaagacacaaaattaagaaacaaggtatttcaaatattctcacatctaagcaagtaagttattttaagacagggctcctctattagcacaagtggttaacaaaacttcactaactatattgttttccttcatttcttttcttatctgaaggtctttctaatgggtactctagattaatgcattggtaaatcaaaatatttggtcctaaattaaactggattcagaactagaatacttactgtttatattccaaaaaatctaaggaagacaaatgtgatctgagtgtgactgtgatcttgattcctgagaagtcagtgtacaataaaatgaagtaattgcttttcaaaa

SEQ ID NO: 93406 - DNA, 692 bp, Homo Sapiens
tctctcttacctgaaatataaagcctccaaggcccactacaccacagtcatctttagagcctcccctcttgttctgggacccatgggtcctacagtatatgcagactactgactgttctgtgactgcaccttgtactctaaatctcatacctttgtccctgacctgctgttgctgtacctgcattctttttgctgagagggttgtcccctcaagcactccctgctaataagcactcagccttccaccccaaacatctagtctgtctggtgaattcctggtgattcttcagtggtctgtctcaaatatatcttctacgctcttttctctttagtcttaactgccatccaaggcaacattagttagtccctcattataagaggcaatataagctggtgagaggtatatacccacagtcctagctacttgggagtctgaagcaggaggattgcttgaggccagcctgggcagcatagcaagaccttgtctctttgaaaaaaatagaaagaaaatgctgggattacagtcatgagccactgcgtccagatggaaagtatctttttaaactttatatccctccctagaatttatcccctaatatatggtgtttatggaggtggttggaatcaactactttttataaatatattattaaagagttgacaacccctaaaaatcttttagatgctagacc

SEQ ID NO: 93407 - DNA, 476 bp, Homo Sapiens
gcacactaaggagttcagaaaacagtgtatcctatggacaacatgaagtctctgaaggtttttagaacccagttcaacagcagagtttgggatttctgaaagaccactgtgatagcactgtaaacagctgggagagaggaaatgaagtcagggtgacaagtcagggggcaaatgcaagtgacagagccagagaaaaggatgacagagaggagaggatggagtcaaggtaaagctcagaagcacagcagccagaacgttgtgacctcccaagatgaaacttgtttctaaaagaaaattaccaaggacttaattaaattaactagccaggttactattttcacattctagaaacactgccctgcttaattaacttatattctaattcatttacatacatgcattttaaaaagctagcaaaacatgaccaaacagactagcactcttgaccaataaacaatctctttaaagagccaaaa

SEQ ID NO: 93408 - DNA, 688 bp, Homo Sapiens
gcggccgcgccgcagagatgtgactcgggccgaaggccagctggagcgtcggcgctgcggggccgcgggggtcgaatgttcgtggcatcagagagaaagatgagagctcaccaggtgctcaccttcctcctgctcttcgtgatcacctcggtggcctctgaaaacgccagcacatcccgaggctgtgggctggacctcctccctcagtacgtgtccctgtgcgacctggacgccatctggggcattgtggtggaggcggtggccggggcgggcgccctgatcacactgctcctgatgctcatcctcctggtgcggctgcccttcatcaaggagaaggagaagaagagccctgtgggcctccactttctgttcctcctggggaccctgggcctctttgggctgacgtttgccttcatcatccaggaggacgagaccatctgctctgtccgccgcttcctctggggcgtcctctttgcgctctgcttctcctgcctgctgagccaggcatggcgcgtgcggaggctggtgcggcatggcacgggccccgcgggctggcagctggtgggcctggcgctgtgcctgatgctggtgcaagtcatcatcgctgtggagtggctggtgctcaccgtgctgcgtgatacaaggccagcctgcgcctacgagcccatggactttgtgatggccctca

SEQ ID NO: 93409 - DNA, 418 bp, Homo Sapiens
gggccgcgtccaccaagcagaccatcactgagagcagcagcctcctcctgtcgcagctcaccagcctggacccccaggggcccccccggaggcctccccctcacatcctggatcaagtgaaaagcctcaaccagtccctccgcctcgggcacctcttgtgccgcagccgaaaccctgactttctcctccacatcatccagcggcaggcctcctcgcagtccatgccctggctggcggacctggtacagtccagcgagggctccctggacgtgctgcccgtgcagtgtctgtgcgagttcctgctgcacgatgctgtggacgatgctgcttccggggaggaggacgacgagggcgagagcataggagcagaaggccaagaagcggcagaggcaacagaagcagcggcagctgctgggcc

SEQ ID NO: 93410 - DNA, 753 bp, Homo Sapiens
  misc_feature (91)..(325): n is a, c, g, or t
tgcagagtgtagtagccagtgtggattctggagtcatctggagtcattgtctgcatttggatgctggctttatcacttagctctgtacccnnnnnnnnnnnnnnnnnnnnnnnnnnnnnnnnnnnnnnnnnnnnnnnnnnnnnnnnnnnnnnnnnnnnnnnnnnnnnnnnnnnnnnnnnnnnnnnnnnnnnnnnnnnnnnnnnnnnnnnnnnnnnnnnnnnnnnnnnnnnnnnnnnnnnnnnnnnnnnnnnnnnnnnnnnnnnnnnnnnnnnnnnnnnnnnnnnnnnnnnnnnnnnnnnnnnnnnnnnnnnnnnnnnnnnnnnnngcctcagttctttcttggtatgatctgtgaaaccttcaaaatgtctgtgctactggcctttcactatgctttgtacttcaggcattggcttcaggaaggctctgttaaaagagaaccatcctccatgagacaagacccgtcctttccatgggagaggcagtcattgacaagtgtcctccaacacattttcccagtttatcatattggcactgaaggaacactcaggtaagtattaattgccttgagattaaaaaaggaattcagccattaaccactcttaacattttgttgtattcactgcccattttatataaccacttaaaattggaatcatatcgtgtaaagattttttgtcacttggtttctttacttcgtgtttatattatctttacatcttcttactaataaaaaaaacttgctttcacaaa

SEQ ID NO: 93411 - DNA, 418 bp, Homo Sapiens
aaaacacatgcccacccttgaaccaatggatctgcagatatgcatcgtgctgattggcttaagccaacctaagaccctgaagatgtgatgatggatgggactgggagtaatatccagccttctgcaaaataatggagtatgaaaggggaactgaattggtcactcacaggaaaagttctggttgaatgagaggtaggctgggtggaactagattactggccggcaatcagtgctgcaataatcaataaccacagaaggacagcaattagactgacaccaggcttctatgggcaatacagtgtgatgggaggaaatcatttcaaaggtctgcagaaagacactctgaacctagacttctacaaccagctaagttattacctcaagtatgaggctgaaataaagatgacatcacacatgg

SEQ ID NO: 93412 - DNA, 448 bp, Homo Sapiens
ttaaaactggcttagaaaatgtacagtagaagggatgatgggtacggtaacctgggaggtggaggatggagagttgatatcaccagagttgggaagaaggcaggaaaaacaagtagaagaaataaaaaactataattatgaatgtttttagttcagtgttctagggcctatttgataccataaattacttttaataatgaattggaataattagacaaagattaaataacgttctgagcttcctgccaaggaaagtaggtaaatgtgtaattgattctggagaaatttttgttcaagatatcataactatcttaaataactgatgccctgaaggttttgaattttagaagtttttgatgtatttttaaagcgatacacaaataattgaaagttgaaatagtaaataatactgttttccaaagtttaattaaaatactttataaagctt

SEQ ID NO: 93413 - DNA, 534 bp, Homo Sapiens
aacttcctcagtagacaggcggagaggccacaacatgccgaacccatttcctgtcatcctagtcttgggtcttcaccgcctccttccaaatacccaccctgccagcagccctaggtcttcctgttctgaccccccatcactgctcgttcagccttctagacgtctctctcgtggacatctgttctttagctgttggctttctctgaggtgtgagagggtctatgaactttgtgaatttcccatggccccagtgaaggagcccagataatcccagtagctgttacctgtctccatgtatcaaaggacacagtccagggggagggtggaaggagatgtggtttctctatagtgcaacaaacatggtttctcaatgttctgctgtgcagcaagcagggtctggcggcttggtaggtgggtttcaggagcagtcactattgtaggatgggcttccaatcaaacctcagactaaactcttgtactgaactgattctacctccctcctctagactcagtaaacagtgactattcaataaa

SEQ ID NO: 93414 - DNA, 502 bp, Homo Sapiens
catggagatcctactgatgccagggccatcatccagaagatagtgacagtcacaaattaaagcatgtggcctgctagtgattccgccctaagtccactgcggtcagaggaggttcactggcttcacgtggatatgggcgtctccagtgtgagggagaagtatgagcttgctcacccaccagaggagtggaagtaagatacaaacctgctttggtgtgatgcacacttgatttcttttgctttttaaaaacatgcacaagataacaaatgtatatgtttaattttcacactgcttgtcattacaactctggtataaataaaattcgttagtaattattaacgaatgatctcttctagacctctagtctagcttttgggtattattaattatactttgagccatctgatttccgttttctgtgatggtcttttgctagctaatttctcatcagtgctactttgtttcaacctttgttcccaataaaactcaaatcatatataaa

SEQ ID NO: 93415 - DNA, 870 bp, Homo Sapiens
cagtttaaaatgcaattaacttcatttgtatttacaaacgtaccatcttagtttgataggagattaagcaggctagagctgaatacaagtttaattttggaatttctcaatgccaggtacatcactagtattcacaccctcaaacttaagaaacacttctgaaccttgaagctgtaaatcagtttgactaatgtcctctttcatgccatgtaagccattgcctaattgaggccagacctgtcaggctcaacagcatcccggaaatgactagcctactagggctggaaacacatcaagaatttggaatatttctcatattggggcagacaaaaaaagttcaaatgagattgtccataaaaacaattattatactgttccacaagggaaaaagaaagaaagacataaaaggcatatctgtgttattctggtaaagccaccaccaccaagacatctcaattctgtatcttactgtcaggtgatggtcaactgaacttacccacttacccctcttcttcctatatacgaacaagagttcacttctcaagcctcattttgaatacccgtcttttaatctaattaccattttatatccttagctactaaaaccacctggagcatggctgatttcttgacttggaaacctgttaacaataatgcctagctcctaatcttcttaatgttttttcacttcttaccaagaatatccattaaatgtctaaaagaaatacaagcatacacagatctacacacactgaaatcccagtcatgaaaaattaagacattccggccataaactgtgcaacaagacacttccagttagtgtgtgctttagtgatcatggacagcggtatcagagtgagtggtaggggg

SEQ ID NO: 93416 - DNA, 864 bp, Homo Sapiens
  misc_feature (52)..(107): n is a, c, g, or t
  misc_feature (116)..(129): n is a, c, g, or t
  misc_feature (172)..(219): n is a, c, g, or t
  misc_feature (634)..(664): n is a, c, g, or t
taggtagcgaggcctgggtggcgatttcggcacgaggcccgggttcacgccnnnnnnnnnnnnnnnnnnnnnnnnnnnnnnnnnnnnnnnnnnnnnnnnnnnnnnnncagcctaannnnnnnnnnnnnnagtagagacggctttcaccatgttagccaggagggtctggatnnnnnnnnnnnnnnnnnnnnnnnnnnnnnnnnnnnnnnnnnnnnnnnngatgggcctgagccaccacgcccggccggaaatgagtcttaagcaactgctggtagtgatgcctctgaagtggactaacgggaaacagcgcgtgacagaggacaacgtcttaaaaaacgctgattcttcaagtaactgtactccttggaatggtcaacccagtcccatctgtccttgattacttaatttgcagtcaccggggagttcaaaatgacttttccacagtgaagatggaagcacacctgggcagcagaacgagtgatgtgggctcagctcacagaccttctcacacagggatgtaacaggcggcagaaagaaggaattccctccccgcgagaaggcttgggaaggacagtctccatgttccgggagactctggactttaaggaagattccttcctgctctagcttatcnnnnnnnnnnnnnnnnnnnnnnnnnnnnnnngctgattaactccactctgccaatagtgtgtcctctcaaaggactccaagttcccacagtgcacatgtatccaattttattgctttgcacttgatatacggctttgtaactgctcaaggcatatttttgtgaacattatgtttctgtctcccatactctaccctaagcttcttaacaataaaaatcatgccctgcccctg

SEQ ID NO: 93417 - DNA, 286 bp, Homo Sapiens
aatgagttctctagagtcaggaaggtggccattctcacctttcccaatcaaaacagttactcctaggagtcccctattcatctctctgctctctcttccacccacctttatttgcacgtaatagaaatgcatctgaatttagttatgcctgtgcccttttgtatattttcctttgtgtttcgcttgacagaagtgtctccggttgaaaacacaggctgctgagagtgtctatttgttatactttgtatagcatttaggacaataaaacctttttgtgctcataatg

SEQ ID NO: 93418 - DNA, 346 bp, Homo Sapiens
tttgggattaggagaacactctttaatgataaagcctgtccaagtactaaggacaattagagtaggcaggtgacctgtacaaagtattagtgataacacaacattcagcttcctaagagttaaaacgtgctgcttacatgaagggagatgatactgagctaagaagtcctggtatagagaagcagagagaccaacctacttcatattatttataaaatagagaatattctcagctaacatgctgggagaaaaaattcttccaaaaaggcagaattacaatcaatgccaagatttacaaattccatcatgtttaaatataaggacaaaaataaacatttcttattta

SEQ ID NO: 93419 - DNA, 689 bp, Homo Sapiens
ccaacttgtccatcggtggatgaatgcaccaagaatctgcagcgagtatgacgaggaggaggtggactatgaggagtcggacagcgatgagtcctggaccacagagagtgccatcagctccgaagccatcctcagctccatgtgcatgaatggaggggaagagaagccttttgcctgcccagttcctggatgtaaaaagagatacaagaatgtgaatggcataaagtatcacgctaagaatggtcacagaacacagattcgtgtccgcaaaccattcaagtgtcgctgtgggaagagttacaagacagctcaggctgcggcaccacacaatcaatttccatcccccggtgtcggctgagattatcaggaagatgcagcaataacatgctggtcataactgtgccaagaaatcctcaccagcagttgctgattttgaaaacagccaccttttttcaggggaagcattcagcaaccctttaaagaaaaagaattaaatgcatgctttaaattttttctgtaattttggaatgatgtatctttgtagagttaatgattttgtacatttgcacatgtaatcatcatacccattttcattactttgatataaggtgctaaacaaaaaaagctctaggttcttcagcacatttcccccaaaacaaaataaaattgagggcatgttgcaaaaaaaa

SEQ ID NO: 93420 - DNA, 450 bp, Homo Sapiens
aagacaagaacatccacctacttccggaacttgggctttggctggggtgtgcggcagtgtctgggacggcggatcgctgagctagagatgaccatcttcctcatcaatatgctggagaacttcagagttgaaatccaacacctcagcgatgtgggcaccacattcaacctcattctgatgcctgaaaagcccatctccttcaccttctggccctttaaccaggaagcaacccagcagtgatcagagaggacggcctccacccacatgggaggaaggccaaggggtggcccccatggggtctctgcatcttcagtcgtctgtcccaagtcctgctcctttctgcccagcctgctcagcaggttgaatgggttctcagtggtcaccttcctcagctcagctgggccactcctcttcacccaccccatggagacaataaacagctgaaccatg

SEQ ID NO: 93421 - DNA, 432 bp, Homo Sapiens
gcattaattttaattatggactctacattcgagggcttgacggaggagtccctgaagccatcggacgctggaacgtgttcaagcagcagcccacctgcccccacgagctgacccggaattatatcgcaatgaaacgcggggcggtgaaagccggcctggtgactgcccgggagaacttgctctaccgtcagctcaatgacatccgcatcagtgaccaggatgaccggcgcatgaagaaagagccgccccctctccctccaaacatgacatttgggatccgggcacgaaaactttccaaacaaatagaaaagttcagaagcaacataactaactcccgtgaacccactacctggatttagcacgctaaccatctggccgctttcgcttctgatcctttcctttaatattgaagaaataaaacgtgtcaaacac

SEQ ID NO: 93422 - DNA, 546 bp, Homo Sapiens
  misc_feature (417)..(425): n is a, c, g, or t
atccacgagtggaaacgttccatggtattttcaaacgccacgtgtcaggaatttggcatgccttcctctgggagaggcactggagtgtggccagatggaacccagcagggtacagagggcatttgtgggagcagttaggaaaccaggacgtccagcttctgcctgccagggagctcgctcatgttgtctctgaaatttgcataagagcaattacctcatattctaattttaaagatacaatttttaaagacatggaaggctctgaggcctcctgaaggctattcctatgtgaggtattgtttacgggtggcctttcactatttccaaatcagcgatgaaaagaagactgagtctaaaataaatgaagcaacagacttcagcagcctgagagaattttgttcaattccagtctccttnnnnnnnnntcggtttttgctttcaatttaggaaaattgttttgggttgcattgttgaaagtaatgatttctagcagctacttatgtataatctcttaaccaattaaattctgaatctcttaaatcaaaa

SEQ ID NO: 93423 - DNA, 1019 bp, Homo Sapiens
  misc_feature (434)..(575): n is a, c, g, or t
gggccgctgggtgactcccggggcggcccaggcgtgcgcactggtccctggggttgcggctgtactagcgcagtccgcgctctgtcagatgcagtggacagcgccggggtgaaagtaagggttgagaaatcctcactgccctgctcctacccagcctcgattttttcatattgcaataattatgcaccttcgaggccgggatgcctgcgctttgccagtgtatcaacgtcacatggttttccaggggctgtcctcgcctctgcatcccattagctctgaagaggtagaggggtggtgggtaaaacctccaaactggacgttgagagacccgggtttcagctcggcgttgccactaacttgtttcctgtccttaaacagtagtagtaacaaaaactgtaaagttgattgagtcaaaggcccacactgctctcctnnnnnnnnnnnnnnnnnnnnnnnnnnnnnnnnnnnnnnnnnnnnnnnnnnnnnnnnnnnnnnnnnnnnnnnnnnnnnnnnnnnnnnnnnnnnnnnnnnnnnnnnnnnnnnnnnnnnnnnnnnnnnnnnnnnnnnnnnnnnnncattctggggccaccaaccccttgctctttaccgctgcgctccatagactgcctctccttcggctgtctgggcctcagtttccttctctgtaaaacgagaagtttaatctgcagctttctttgccaatcggtggttcagaccaggaacctctgctacagatctcggcgctgacaggggtaagaaggtgggtgaaagaagggggcgcccagttttccacagcctgcttttctctgggacctcgcgaagggcgggcctcgcgagctaaaggaggtacaggagagcgcctatcgtccgcggcgggtgaaggtgctacctgccttcgtgctaggctgtgagtcctggtgcttagctcagggcgccaaggccagtgtagctggcatgtcccccttggaaaacctcaggtctcccgcagagaacgttacccacaacaaagaagaggacag

SEQ ID NO: 93424 - DNA, 760 bp, Homo Sapiens
ctgagagtctcaaggtcccatagctacatggtacagggctgttgtctgcttgctgcacagcagaaattacaccatccacaggaaatggactatttttgcagtccaacatcagccaaccacacacagccgtgtttggaagctgaagagtaaagaaatttctaggaatggctgttgttctgttttttagcacagccatttagatataacatccttcacttaaaaattaaaaacatcagtactaccaccaccaccaacaacatcaacacagatcttcacatctgcccattctgtggttagtcaatggcttgcaataaatgtgcaaactgcatctataggaaacatttttgtgattacggaatactttagttgattgctgaaaatattgaaaggtcttcattttacagtgatgagtacatatgcatgtttcggggacttggcccttctgatgaggggccctcggtactctggataacgaagcttgtgcagagtggtaaccatgcttacacactaaactataatataaaggaaatgaagccatgttaatctgagagcagtgtcgccatagttgtgttgtttacaatactctataaatgggttcctgttgccctgtaattaaactgctgcccgtagaggcctttcagttccttttctgtccttccccttcttaacacaagctcaaattttctaacttgtttttattttgaagacttttaaaatggacattttcaatacataaaaataaacagtgctttataaaaat

SEQ ID NO: 93425 - DNA, 401 bp, Homo Sapiens
ttttagcataaaaaattaggactacattaatgatgaggttgactatacacagtttggagtgagagagttactctacccagtatcactgacatgttggaatgccagatgaaactgaaacagaaaaattgtcttggggtctaaaagacgtctgatgtgctgatgtctgttcagtcttctgcactcatgggcgtaaactctcaaagagcaccactgggtcttagtccgtggcataaagactattctcaatgtagatattgtcttctgcttggacttccttttcaactgcattttgcaaagctttaatttgaaggctgctaaatgaaacactgtagaaagagttgttgaagaataacatgagtaagaaaaaaagcagaccacttctcacatataagctgcacttt

SEQ ID NO: 93426 - DNA, 1073 bp, Homo Sapiens
  misc_feature (60)..(60): n is a, c, g, or t
  misc_feature (885)..(949): n is a, c, g, or t
  misc_feature (1009)..(1017): n is a, c, g, or t
aagaattcggcacgaggtctctcatcacttttgtgaacaagcacctgaacaagctgaatntggaggtgacggaactggagacccagtttgcagatggcgtgtacctggttctgctcatgggccttctggaagactactttgttcctctccaccacttctacctgactccggaaagcttcgatcagaaggtccacaatgtgtccttcgcctttgagctgatgctggacggaggcctcaagaaacccaaggctcgtcctgaagacgtggttaacttggacctcaaatccaccctgagggttctttacaacctgttcaccaagtacaagaacgtggagtgacgggggagctgtggatggtggcaggagtgtcccagcaagaaaggcggcatccgtctgtgccctgtgcctttccagggagccaggcgccatgggcttctggtccaagctgtgttgactgtcatccccaccccacccctacctcacgcctgccccaccccctgcctcttttggttgttgttcttaatctcctctccatgtagttcccagtgggcaagagcctttgaaaatgcaggattctaaacactcgtgcttgcgtttgaagcctcgcgtcactcagtcgcgtgggatgatgagtccgttgttgtctgccttggccgaaagatgaaaaaaagcctgaaccccaacccccagctggttgagagcaccctgcattctgcctcatggtgcagttagcgatcacaggccttcagaagtacaacatcagctcagcaggaacgccggctccccgaggacccaggcttgacgattcaccgggggatctcctgggctgggctcctccttggaagtgaggccttttattaaaaataaaagggttttgcacttttgnnnnnnnnnnnnnnnnnnnnnnnnnnnnnnnnnnnnnnnnnnnnnnnnnnnnnnnnnnnnnnnnngggggggccgctccaaaaaattccccccggggggcccaaagtcttaccctttcccccccnnnnnnnnnacaacgcgggccccccacaaagggagtcgcaattaacaaacataggccattggcct

SEQ ID NO: 93427 - DNA, 119 bp, Homo Sapiens
ttatacaaagaatatatacctatagtttcaaatatacaatgatatgctgccttttctaaacacagacctttcattgacacagatgcaagagagatctggcaacaacttacagaacaaaa

SEQ ID NO: 93428 - DNA, 892 bp, Homo Sapiens
gggggagacaggtgagcgacgaacttctgagacagttgtgtccctgtggctttggtgcgcctgtgtgcactttctccctccacctggagcatgggctaacaccggaggaaaggaaaagacagagtcagacaggggacaatgaagcctttgaagtgccagtctatgaagaggccgtggtgggactagaatcccagtgccgcccccaagagttggaccaaccacccccctacagcactgttgtgatacccccagcacctgaggaggaacaacctagccatccagaggggtccaggagagccaaactggaacagaggcgaatggcctcagaggggtccatggcccaggaaggaagccctggaagagctccaatcaaccttcggcttcggggaccacgggctgtgtccactgctcctgatctgcaaagcttggcggcagtccccacattagagcctctgactccaccccctgcctatgatgtcggctttggtcaccctgatgatgatagtgtttttttatgaggacaactgggcacccccctttaaatgactcctcccaagatttctctttttctcccacacccagaccctcggtctcattttgactaaacaatttttccagcggccccacttatgttgtcacaaaacaaggtggttttctggccttgggaaatccattaaaatggggggacttgggaacccctgaaggaaaaattcagggcccaccggtaaagcccctttccccacgcttaaaaatatgcgggggggcattaattttgaaggtccttctggggcaaccattttggggtggaccccaaccccccattttccaaaattttttctcccccccgttaaaatcttaagggaattaaggtaaagggaaggtgggaatcccc

SEQ ID NO: 93429 - DNA, 621 bp, Homo Sapiens
gacaggtgagcgacgaacttctgagacaggtgtgggtgcgatgggtcgggagggtcatgggattgggaccgaggtgtgaggagggaatctgcaattccttgctacacagagcgctggcaacttctgacaggctgtatctggggtatgggctgcctcgtggttgttgctgttacaaggaaagaaaatgagttcccctgcccaccgcctcccagccactgggctacctcctggcaggaaatttgcaaactgagtttaacaagttaggatcagcagagggtagaggagggccctggacagatgtggggtctacgaagaggacagtgagttatcagggcctccggccattgtgctgggcctttgcctgtacaattgtttctcaagcagttgtgtccctgtggcttaggtgcgcctgtgtgcacttatctccctccacctggagcatgggctaacaccggaggaaaggaaaagacagagtcatgacatgggatgcctggggaggggccatggtgccaaatgcaccttactggggagactggagcaagcctgcttctcctcctgatgctgcgcctccttcctactggggctggctttgctgggcataaagacggacatcacccccgt

SEQ ID NO: 93430 - DNA, 354 bp, Homo Sapiens
aaccaagttacatacaatctcatgtactgatttgagacttataacaatttttggagggggcatagagaaaggagtgcccacagttgaggcatgaccccctccattcagacctctaactgttgcctgagtacacagatgtgccctgatttctcgcccattggccatagtactgtgcctaatcaatgtaataggtttattttcccaatcctcaaactaaaaatgttcataacaagatgaattgtagactagtaacatttgatgcttttaaatatttgcttctttttaaacaaaaactaaaacccagaagtgaatttttaggtggatttttaaataaaaaagattgattgagaaaaa

SEQ ID NO: 93431 - DNA, 339 bp, Homo Sapiens
atgagcactgcacccagcagagagctttctaaagactaaagaattccctctgaagatagtgggagaaatacagagatacacaaagacagcaggatgcaatgagagaagtgtatgtatatatgggaaacatatatatttgtatgtacatttatctatacacaccgctgcccccaccctaccctatgttgacgcctctctgcctgggtctttcctcctcctccagtgcccactgacatcccagaaccccagtactagcccaggccacagtccttacccaggagcaggagccaggggcccaggagatgcatggtgtcgtgtctgggtgcaagcctgagcagg

SEQ ID NO: 93432 - DNA, 1296 bp, Homo Sapiens
  misc_feature (217)..(217): n is a, c, g, or t
aatctgtatggatagagtcaccaacacaaatttgtttgtaaaatcatgagttttttcaaaagaagtttttgggaagatatgtagagtggaaacgagtcccaccccttcccctgcagctagggttagtggacagaggaagctaggttatgactgcccacagcgggaaaagtttgacacttttattcatgttggaagtgtgtccaaagtcgctcaggcncggcttccagtctcacaccccgtgtgcttctggggtatcgcagaagtcgatgagagaaggtcaatgaggggctgcatgcagcatctgaagtgaccgcgaagtggttccagtttgatatctacaagaagagcctcactaggggctgcatctccaccagccttggcttcctcccgagctacttctgtggcagtacttttggagaaagtagaatcgctttcctctggagaaaagttaagtgcctgaggcacacgggaaggaggagaacccctgtcaggggacacatccaccagcctggaatctgtctttctgttgctctcccttgttggttcagttctcattgcagagttcttgcggggctcagaggaacgtctccgagctggcacacacaggggagagcccacggccctgggcatcgttttgggggtcatcggtggaaggccagagcagcgccggctggcgggtgtgggcaaggctgacacacgccgtgcgctcagcaggctttgtggtgctggcccagatgagcgtctaaccggggtgctgtggacagtgaccctgccaactgacgtgcacgactgcggccgctgtgcccgcgaaaagctttggtgttgagctgtccggggagtcaccagggagcaacgagcggagctcacagggccgagaaggtgtcatcttgcagcagcaggagtgcaggggtctcgcgggccttgcgggacacacgggtgtgcagcagaggccttgggaaggacgccgtggcgggaggcggaaaggctatgctagacccaccacttcaaagcataaaaagcctcggaaggatgatctgcaccttaactgcctgccaagcccaacccaactcctcagagaaagacaacaaatccagacattcaaaagtgtacacctgacaatatccaacaaccaagaaaaacttgtgaaaaatgtagaggcaggaaaatgaggccaaacccggaaacaaaattagtcagtcgaaacagaccccaaaatgatggggaagatggtatgagaagaatcgcctcgtgccgaattcgccacccaggcctcgctaccttaggaccgttatagta

SEQ ID NO: 93433 - DNA, 361 bp, Homo Sapiens
ggcttctccaccaacgtaacaatttataaagcaagagatgaaaaaaagagattattgggaaatgtactgaataatgaggagtctggggaatagaacaaaagttgtaagtcgtaacctgacccatcttacttcactggtaatcaagtacagtcgaaaggatgaaataaagaagtgagtagtttaaaaactctgttggaccagcaccttgaatcaaatggatgttttagggttctgtttcccactgaaccaagaattgtatccctccatctctccttgaggagaggccctatgttagaccttggctactcatcattaagataaaatcttaatagataaaactggaattccttgaatccatgaa

SEQ ID NO: 93434 - DNA, 502 bp, Homo Sapiens
tcatccccaattcctctcttgtcttgtgttgattcagtattctgaactccattctcagctgggaaagctacagatccttttagtgcaagataaggttttatagccagattcagtggcagaccatgatttaagaaattatgtttggagcctgtgttctgtaaagagaaggttgatttggtttttagctatcgtattcggagtggaactataatacaattgtataatattcttgttgatcaattcaaagttactctgcactgtttttgactttttaaaaataccttagatgcaaatttataggagaaaaaacactttcagataagaggtgtttgctgggatggaagaactacctggcatgtaagaaatatcgtcagtcgtcctaatgcatattgtgactgtttgcatatacttctgtttataaaagtatcagttttacttttcagaggatttgtaagaatcatttaaattttcattgaaataaacgacaagtcacattgccaaa

SEQ ID NO: 93435 - DNA, 399 bp, Homo Sapiens
gtctgtagatgagaattccaggaagtgtttccctgccgctcgtcagttaattgcgatcacttactcaaatggccaactggaagccagagtgcacatgaatgtcctctttgagctattttcctcctttagaatacttcatgcaggtaaccagacaatatcgagagatgcggacttctactcaacgagagagattataaatgaatcctggatgcgcttgatttcttgtttcccgcatgttgttagacctctccctaaagccacaaaacatttaacggagataatattttgagcgattctgttattgtacatatttcagaacatgacagaaaagcaaaagattaacccaaatactttagtaaaataaaagctttgagtttgtcgtaaaaggaatctggaaaa

SEQ ID NO: 93436 - DNA, 738 bp, Homo Sapiens
  misc_feature (598)..(598): n is a, c, g, or t
agaggactttcataaggtagtctgaacaaatgaagatattattttcattagtaaaaatagtaacagcaaacactaggggtgtcagacagtgttttaagtgcgtatatagctttactctttactcttttgatgcaacttatgaagtagatgccataattatcttccctgtgttacatatgaggaaactagtcactggggaagcggggggtatcaggtaatttgtccaggtacctcttctgatcttggattttaaaaggagttggaacaccaaaagcacaattcgtaaaacaaaatggatgaactggaattaatcacagtttaaaatgtggctttgtaggagaatctgttaagagggtgaaaagagacgccactgactgggagaaatgtgtgtaaatgacacatttgacagaggactcgtatcctgaatatataaaaatctctccagactcaacattaaaaaccaaacaatccaattagaaaatgggcaaaagacttagacatgtcaccaaggaaaatacacagatgggaaataagcgcatgaaaagatgctcaacaacatcagggaaatataaattaagaccataattagctaccattncacacctattagaatgaatacgataaaatttgctggcaatatcagatgctggtgaggttgcagagaaactgtgtctttggtgggaatgtaatatggtatgaccatctgtcaatttcttaaaaagttaaatatataccata

SEQ ID NO: 93437 - DNA, 830 bp, Homo Sapiens
aggctggtaccggtccggtattcccgggatatcgtcgacccacgcgtcgaggagtcagaatcttggctaccctacatgctccctctggcaccatttcaggggattactccagagagctgcagccagaactgtttatctcctgagatatggactttctctaagtcaggaaaagcacaaacctcataacttaggtgttttctggttggttgctcccttttctgatcctactactggcctctccctttccagagccaggagacacatctgggaccagaggaaacaaaagcaccaagaggttgactagagctgaccagtgatttacaaatatttcatattccaatgcttcgtctgctcaattattcaaaaggccatccctgtaaaggcagaaaagcttcctcttagatctggccactcagcaaataagtgggtatttggttttatgaagaataatgctgaggactagagatatagtatatcagagataatatatagtatacaggttgatctaaatattctggtttggattaggcaattaaaatttttttggcaacaggacatatgtttccatgtgttgctaagattcaaaaactttgccctgaagttttattttaatcgtcatttgagaaagaggggctcctgttctgacctcaaaaacagaaagctgttgtaaagaagagagctgtttatacgaaaaaccagattcaagactgtggtataaaggtattcttgaggcttgattcaggttgtggttaatcttggccagattctagatcttggtgttctagatcaatcagaagaatttgaataatcaagatttgctgatgtgacga

SEQ ID NO: 93438 - DNA, 257 bp, Homo Sapiens
  misc_feature (135)..(135): n is a, c, g, or t
gtattctgtttttggattgtcaacaagatcaacacctctggcagttcaaataattgcctggcccaagaggctgaataaattagaaaagttaaaaagaagtaaaaagtaacgctgacaagttcctgcaaacaaaantacgtttcaggcttactgatatgacaaactgagcctatgaagagcagcaaaattaaaaatcaaactgcagatttaaaacagaatattttgttttaaaagtctccacaataagctttttagaa

SEQ ID NO: 93439 - DNA, 496 bp, Homo Sapiens
gccatcgcagccgggaacagaagacatgaagaaaacctcactgcaaccccctatgactgtatctccaacctgaccaatcagcactcccaacttcccaagtccttacccgccaaattgtcgttaaaaactctgatccccgtctcctgtacagcctgctctgcatgaattactctgtctcccttgcaattcccctgtcttgataaatcggctctgtctaggcagcaggcaaggtggatccactgggcggtgacctgacccccacaaggtagtgtgagttttgaatgggataatgcaagtgttgcttaaatagcagggccaacctggtttactggggctgagtttcacggaatatgggactttcagtgctaaaatcaagaaagttccgggcaaactgggacgactggtcaccctatgcttaaaatcaggcgtcagcaaactgacggagctgaaatgagcctgccgcccgtttgtaaataaagttttattagaacacaaa

SEQ ID NO: 93440 - DNA, 683 bp, Homo Sapiens
  misc_feature (565)..(618): n is a, c, g, or t
ggaggggatgtaagtgatcagagtttagaaagtcatagtcagaaggtttcagagacccaaatgtgtgagtccaactcttctaaagaaacctctctgcccaccccagcagggaaagaaagccaagaaggacccaaaaatcctactggtcccttcttcccagttttgagcaaagatgaaagcactgccctccagtggccatcagaactattaattttcaccaaggcagaaccctccatttcatacagttgtaaccctttatattttgactttaaactttcaaggaacaaagatgccagaactaaaggaacagaaaaaccaaaggatataggaagctcctcaaaggaccatctccaaggcctagatcctggtgagccaaataaaagcaaggaagtgggcggagagaaaatagtacgttcctcaggaggcagaatggacgcacctgcttcagggtctgcctgtagcggcctgaacaagcaggagcctgggggtagccatgggtctgagacagaagacacagggagaagccttcccagcaagaaagaacgatctgggaagtcccaccggnnnnnnnnnnnnnnnnnnnnnnnnnnnnnnnnnnnnnnnnnnnnnnnnnnnnnngctgacacagaagagaaaagctctaaggcagagtcaggggagaaatctaagaagcgcaagaaacg

SEQ ID NO: 93441 - DNA, 436 bp, Homo Sapiens
aagttctgtgggtagggctcaacccttaataaggtagtgaataaaagacaaatgatgcttacaactccaatttaaaagaccatttaaacaaaaatggttccatagcgaagtgaggcagaagggatccaggtatttctgagatttcttatatggctgatggagaaaatatggctgattcgtttgttcccagcaaatcattaaagacagtaatgccttgtgacccaggacactgtgtatcccataggccctgatttttagtggactggctcattcactttggtgaaaatggggaagaacagcaaaagcacgttttagtgagactgctttaattaacactaagttatctaacagaaagtgaggctgtatcagttgtaaaggttgttggatagggactcaggatgattatggaaaatcaaaatatttgacatagcagaaa

SEQ ID NO: 93442 - DNA, 1123 bp, Homo Sapiens
ttgggttcactcctaacaaagagttgaaaacttccattaagaataacagggcccggtacttgcccggcaaatgcctaccagtaaaggatttggcttctccatgtacatggtacatatgaactgtcaccactgcacaagtgagacaagtgagactccagacctacgcctggttttccagtatctggaagtcagtgatagagggtggccccctgccaagcacacccagtagtcttgctttgggggcaataaacaagtttggatggggcaactgatgtgaaatagttctttagtgccgtgagtttcccagaagaagaggaggttggtctcactaacctgtgatggtttggggtatctcaggcatctccttcagcagcactggttggtcttcatcttgggcagtcacatacaattgagtttttgagattcttagaatcacggtaattttagcatcatcctttgatgacttataagcacccatgtcaaatttcactgcttcatccagattatgtaatgcagcagccgtgaggtactgatcattggctcgaattatactttgattgagggcgtcattcaggatgaattcgtatttgatgatcctcataaagttgtatttcacattgctcaggaagctaaaaggtgctgacctaggcttgatgatttcttcctctgagtcattggcgatggcctccaggtcatcatcagtgatggattggcttaaactcaaccgtctcttcttcagaaccttcccgttggttgctactaccaccatgctctccttgaaggtaagcttggatgttttagaggtttcagagatactcagagacacagattgatccatgcagccttcatggagtgggccatagcttacatgatagaaggatttctgattcagagacagatgatcaatggaggaactgtcttcttcattttcactgtaacagttcttcaggtcttcaaacatgtctggaactttggccatcttgacttctttgctgactcaaacgccaatgaaatgaccggacgcgtgggttcgacgatatcccggaaatccggaccgtacagcctgctttttgcaccactttctatatcacagcactgttccgttctgctgtctgtccctctt

SEQ ID NO: 93443 - DNA, 877 bp, Homo Sapiens
aaacatttaggctaggtacgaggctgggtgtcgaattcggcacgaggctgacttctggctcatggtccatgagcagaaagtgtcagtcattgtcatgctggtttctgaggctgagatggagaagcaaaaagtggcacgctacttccccaccgagaggggccagcccatggtgcacggtgccctgagcctggcattgagcagcgtccgcagcaccgaaacccatgtggagcgcgtgctgagcctgcagttccgagaccagagcctcaagcgctctcttgtgcacctgcacttccccacttggcctgagttaggcctgcccgacagccccagcaacttgctgcgcttcatccaggaggtgcacgcacattacctgcatcagcggccgctgcacacgcccatcattgtgcactgcagctctggtgtgggccgcacgggagcctttgcactgctctatgcagctgtgcaggaggtggaggctgggaacggaatccctgagctgcctcagctggtgcggcgcatgcggcagcagagaaagcacatgctgcaggagaagctgcacctcaggttctgctatgaggcagtggtgagacacgtggagcaggtcctgcagcgccatggtgtgcctcctccatgcaaacccttggccagtgcaagcatcagccagaagaaccaccttcctcaggactcccaggacctggtcctcggtggggatgtgcccatcagctccatccaggccaccattgccaagctcagcattcggcctcctggggggttggagtccccggttgccagcttgccaggccctgcagagcccccaggcctcccgccagccacgctccacagagtctaccccaaatcccatcttcctcccaacgca

SEQ ID NO: 93444 - DNA, 628 bp, Homo Sapiens
  misc_feature (475)..(475): n is a, c, g, or t
  misc_feature (574)..(574): n is a, c, g, or t
  misc_feature (590)..(590): n is a, c, g, or t
  misc_feature (601)..(601): n is a, c, g, or t
gcggccgctgatgcaggtaatgtgcgtgcacctcctggatgaagcgcagcaagttgctggggctgtcgggcaggcctaactcaggccaagaggggaagtgcaggtgcacaagagagcgcttgaggctctggtctcggaactgcaggctcagcacgcgctccacatgggtttcggtgctgcggacgctgctcaatgccaggctcagggcaccgtgcaccatgggctggccctctcggtggggaagtagcgtgccactttttgcttctccatctcagcctcagaaaccagcatgacaatgactgacactttctgctcatggaccatgagccagaagtcagcagctgtgccaggcagtggggcctgggttgccactagcggggggcagtatggggagagcccctccacgcagctggcattgatgtagtcatccttgcctgagcgcagcaccacacggttactgtcatagggcatgacnatctggtgccggttcttcagtgagtagcaggcggcaatggcgatggaacggcctcgggcatatgttcctgcgcatcttgcagctctcgccagacgtgtncagagctcccacatcncccagctgacncccgaaagcctccagcttctgctgcac

SEQ ID NO: 93445 - DNA, 360 bp, Homo Sapiens
tatgcagcaaaccaaaaaagtgaattgaaataattacatcaagacagtggaggggatattgcaaaaacaaaggggtttgtttgaatgcatcgaatggctctctactttcagactgaatccttagcatcatattatgctcctgttttttagtcaccagtatagatcctggaattgccaggtggagagaatgttaatcactgtccatggtcacagtagatcaatatttttaaatatctttacacgatttgcccaaagaaatgtcttttggcagttgtataacccccatttaatatacctttcaatgtgacaggtttagaagatttttgtatacgttttgtaataaactgatatatattagga

SEQ ID NO: 93446 - DNA, 659 bp, Homo Sapiens
gctggtaccggtccggaattcccgggatatcgtcgacccacgcgtccgcccacgcgtccgcagagggcaccttctctgcttttaatctttcaggtttgactcctggcactggttttgatacttggaattttgaggttcagggaattcagagaatttggtagcacagtgtattgggagaaagggaaatttcgggtgacagattgatcaccctggctgacatgtttctggaagtgggtgggtgggtttgattgagaacactttgggctattatagtgatggtgggaaagaaaaattctttccaaagctgcacttctcttaataattctctcccctcaaaagaaagattatgataaagaataatttggagtaataagtaacaagatagaattagaaaaatgttgaatttctgaatgaccattcagaggtgtggctttttccacgtctttttctcctgcaatgaactgctcccacgtcctgcactgcaataccagtctaatgaacactttgtgaaacaaatcgtaagtatgtacgcacgcatatcaaactatgctctgaggataaagcaagttctaatttgtggaaaaaggattaaatatttctgttttctgaaaagagttattttgtattttgttttctattaaaatgcatttagtttcaaa

SEQ ID NO: 93447 - DNA, 425 bp, Homo Sapiens
acatttatatataaaaagtttattagaaatataaaaaattttaaattttacactatttccaccttaagattcttttagataaagcagatgtgccttacggttcaaacacaatctgatgtacaaaatcttatttagttcttagcaaaataaatacagaaacacaaatgatgaaatgatggactattaataactttaaaaacccaccgtaaaagtttccaaaaaccaccatttgttgtaggtacctaatatggcagtatttactgtaaaatacatgaaacagctttcactaaaatttaatgtactggcttattagcaagatcaacattgtcatattaaaatgcaagttgtgtggtctaagtttatgtttccaaactttttgtcaactagacaaaggaatcgaaaactttttcttaaaggaccagaga

SEQ ID NO: 93448 - DNA, 1009 bp, Homo Sapiens
  misc_feature (981)..(981): n is a, c, g, or t
gcctgggtggcgattccggcagagggtccgctttcgtctccgtcctgctgccgttaccgccgctgctgccgccgcttgcgtcccccgctccggtctgtggtgcagccgggacccaggaccatgtctctgtctcgctcagaggagatgcaccggctcacggaaaatgtctataagaccatcatggagcagttcaaccctagcctccggaacttcatcgccatggggaagaattacgagaaggcactggcaggtgtgacgtatgcagccaaaggctactttgacgccctggtgaagatgggggagctggccagcgagagccagggctccaaagaactcggagacgttctcttccagatggctgaagtccacaggcagatccagaatcagctggaagaaatgctgaagtcttttcacaacgagctgcttacgcagctggagcagaaggtggagctggactccaggtatctgagtgctgcgctgaagaaataccagactgagcaaaggagcaaaggcgacgccctggacaagtgtcaggctgagctgaagaagcttcggaagaagagccagggcagcaagaatcctcagaagtactcggacaaggagctgcagtacatcgacgccatcagcaacaagcagggcgagctggagaattacgtgtccgacggctacaagaccgcactgacagaggagcgcaggcgcttctgcttcctggtggagaagcagtgcgccgtggccaagaactccgcggcctaccactccaagggcaaggagctgctggcgcagaagctgccgctgtggcaacaggcctgtgccgaccccagcaagatcccggagcgcgcggtgcagctcatgcagcaggtggccaggcaacggcgccaccctccccagcgccctgtcggccctcaagtcccacctggtcatttccgaaccccattccgggggccaaagccccctgccggttgcccccgagctggccaccgntttccggggggcgggatggtctgccccc

SEQ ID NO: 93449 - DNA, 912 bp, Homo Sapiens
  misc_feature (848)..(848): n is a, c, g, or t
  misc_feature (865)..(865): n is a, c, g, or t
gaggctggaccggtccggattcccgggattggagggtctgcctgaggccggtaggggctcagcccaagtacatcgacgccatcagcaacaagcagggcgagctggagaattacgtgtccgacggctacaagaccgcactgacagaggagcgcaggcgcttctgcttcctggtggagaagcagtgcgccgtggccaagaactccgcggcctaccactccaagggcaaggagctgctggcgcagaagctgccgctgtggcaacaggcctgtgccgaccccagcaagatcccggagcgcgcggtgcagctcatgcagcaggtggccagcaacggcgccaccctccccagcgccctgtcggcctccaagtccaacctggtcatttccgaccccattccgggggccaagcccctgccggtgccccccgagctggcaccgttcgtggggcggatgtctgcccaggagagcacacccatcatgaacggcgtcacaggcccggatggcgaggactacagcccgtgggctgaccgcaaggctgcccagcccaaatccctgtctcctccgcagtctcagagcaagctcagcgactcctactccaacacactccccgtgcgcaagagcgtgaccccaaaaaacagctatgccaccaccgagaacaagactctgcctcgctcgagctccatggcagccggcctggagcgcaatggccgtatggcgggtgaaggccatcttctcccacgctgctggggacaacagcaccctcctgagcttcaaggagggtgacctcattaccctgctggtgcctgaaggcccgcgatggctggcactacggaaaagagtgagaagaccagnaatggccggggctgggnttccctttctctacaacccggttcttgggaacacgaatggcagtgga

SEQ ID NO: 93450 - DNA, 307 bp, Homo Sapiens
gcacaggcatcagaagcagagctcttgccacccaaggccctgagggaccagtgaagtaggagccgtggggagagggtgcctgagaggagcagggacactcagccgagggacacagccagccaaggcggcctcacaaagaggattttcatggaaacaaatgccctgactacttcattcccacatcttcggctgaggctcccatggcaagtggagagagcagctgcaggtggcctcggtcacttgggtcagctctcctgcttaaaacaaacacagaaatcaataaaagtgttgattgtattatttaaaa

SEQ ID NO: 93451 - DNA, 542 bp, Homo Sapiens
ttccctatgcaccatatttattaaaatgcagctttaatattgctatattcaacttttaactctgtgtgctctacaaaggataacaggtatttgtaacatttttattttgaacactagcagtgactgtacattaataaatatgcgatctgatccaaatataaatacatagtctcaaaaggtacaaaatgcaaaatctacgaaataaaactagaaccaaaactctgtataagggagttctctacaaacacaggggaccatttaaaaaatgtgagaagagaaaaaccaggcaggaagcccattttgcgggatagggcaccagaaggtgaagaatgtacacatgtacagtttgaggattagatgaattctgagcttgaaaaaggtaataccatgcacaagggaattttctaaaccaaaccacagggatcagtcaattccaagggtttccttctagactgaatgttccagaaatcatctctaatttagggatcccaaaggttatgttacaaatttcaaaaagttaaaccgggtaattttggaaaagc

SEQ ID NO: 93452 - DNA, 509 bp, Homo Sapiens
cgccgcccggaccagatacattccgtgtacatcacgcccggggcagacctgccagtgcagggcgccctgaagcccctagaagaggatggccagcccacctggggccaagcggaggtactcggatcccccaacgtactgcctgccccccgcctcgggccagaccaatggctgagagccacagctgacaaagtctgcatgtccgaggacggcccctgcactggagctgggcgccagagctgcagagctagtgttcggccctcagagaaggatccagaatcaaaagctcaagagtgacgtgaggtgggcaccggccccaagtgcagagtcaaggcagggagaggccggctggagccaggccccctcgcacgcagcccccaaatcatggacgcacctgtggggagcaccacatctcccactgcggcctcacatctccccactcccctttttgtacgtttaactgtttctttgtacgtggtttacgtaactttaaactgtaacagccttaatgg

SEQ ID NO: 93453 - DNA, 445 bp, Homo Sapiens
aatgggagaaatgatgttctgatgcattcctttgctcatctgtgagcactgccttctcaaagcgttgccaactgcttcacagcttgccagcagtcccttgggcatttcccaaaactcacttcaattcagtaagaggggtaaggtgcagcacacagaaaccctggcagggaattcagaatgggtgggagtctggacccagtttcgcctgatgctaacttgctatgactgacctttagccagtccacttctgtgtcttcatttgcaccaggaaagagtggactacgcttgctactcaaagtgtgacccaaggaccagtactatgggtatcacctggaagcttgttagaaccacaggcctcaccccagagcttatgaatcagaatctgcatgttaacaagattcccaggggatttatatgcacattaaagtgtgaaaagccctaaaaa

SEQ ID NO: 93454 - DNA, 450 bp, Homo Sapiens
taaatggcataaatgatgattagagctaattatcgtcagaatttgggctggtgtttctaaaatgaaactacagagtttctttaaatggggtcatcaggttaggattcagttgtcaagaaagatcaatgatttgtgtgaactcacagtcttctcagcttacctggtagccaggggtaatatttcacacttcggagtgaattgcatttatattctttttcttcatagctcactcaggatttttagaagatgaaagaattgaatcttatggcaacaaagcccatttcttcacagtggaactataaatgcagacttaagtaattaatttgtaaacctttgtatctttttaaaacatcatcctatccccaaggcctaacataagttttgttgactaggtgaaatgattgaatcagtgaatgattgaataaatgaaaaatataggatgcagttcag

SEQ ID NO: 93455 - DNA, 648 bp, Homo Sapiens
  misc_feature (526)..(526): n is a, c, g, or t
ggggtgccggaggcgcgtcctgcatcgtctgccgctttggtgacttctgacagctctctccatggaaggaggcggcggccgcgatgagccttcaccctgccgggcaggggacgtgaacatggatgaccctaagaaggaagacattcttcttttggccgatgaaaaatttgacttcgatctttcattgtcttcttcgagtgcaaatgaagatgatgaagtcttcttcggaccctttggacataaagaaagatgtattgctgccagcttggaattaaataatccggttcccgaacagcctccgttgcccacatctgagagtccctttgcctggagccctctggccggggagaagttcgtggaggtgtacaaagaagctcacttactggctttacacattgagagcagcagccggaaccaggcagcccaagctgacaagcctgaagaccctcggagccagggcgtggaaagattcatacaggagtcaaaattaaaaataaacctctttgagaaacaaaaggaaatgaangaaaagcccacgtctcttaaaaggggagacatactacctgtcagacagccccttgctggggccccctgtgggttgagctcggctctttggctcctccccgggccttgccagctcttggtgcc

SEQ ID NO: 93456 - DNA, 578 bp, Homo Sapiens
aaagaacgtctagagcctaagcggcccgttgccagattctactcctcaggcctcaaatgtgagcgccccaaacattctagagctgaacctggtacgctcgcccaccaaactgccgtgctcggggcttagtatctcacgcgcggcagttcaagaacatcagacacgctcaacaaacacttgttgcttgactgatacattatggcgggtaacgcgtcccacgtatttcttcttagagatatacattacgctatacgtttctgaagaatggctcgatttacaggggttcccacaacgatttgtcacatataaaagagtgggtggtatttttacgtcaaagatgaacaggcgaacgtccatctaaatcgtgtggtatcagatgcggggaggcgtgggggagggagcgggggagaaagcgttaattcttccagctttagagccagacgtaatatttaaaacgtggattgtttttcaaattaacttttaaatggacacgacagcaccttatcctgcattaatattgcattgcaactagaaagaaaaccagtggaggtacgcctatctcctctctagttggcaaa

SEQ ID NO: 93457 - DNA, 438 bp, Homo Sapiens
tttgatctcactagtagcattgttaatattaaacaagatagctaatagctttaaagcgtctaatcacggtacccccacgagtagtagtcacacagcaaatcataggcaggagtggacaaacagcgctgggagcattaattctggtagatttggagtctgggcagggcctaagaggatgggatcagcggattgggccagccaaagggggcgggttcagagggaggagccagctgcctcccgctgcaagccccgagctttgaatcaagcgcggtagtttcagctgtagccaatcctagaacaaaatctttttgcgtcagttgttgctgaggcgtagatctcacccagatcagttctagtcgctgctgcttgtacccgtcctcggcccttgcgtgtccgtccgttacgactcagaggacggagagaaagtctaagtcacct

SEQ ID NO: 93458 - DNA, 969 bp, Homo Sapiens
aataaaattctattccactgacaacatttaaaaactgggagaggatgctttttaaaaaatggtatttccaactttttttgaaaaaattagatgttctggcaaaactgggatcatattctcacatagccacaatcagctgtagctgagtggcaggtgaccccttctaagggtgaagtattcattaacgttaactgcctgatctctgcagcataccttcagcacctgcaatcattcaagaaataactgactgtcttatgtgccaagaactgtattagctactggagttacaaagataaacgagacaaacacagtccctcaccgacagtctcgcttagtagggatggcaaagaagcaattaagatacatgtgataaatgccgtgaggaaagtgcaggacagctaagagtacatagcaaaaatacctaactctatggaagttagggtatacccctcaagtaaagtgacagctaaactcagatctttaatagaagttatccagaaaaagataggaggaaacagggagctcaaatgtcccagagagagaaaagagcctttgtgaagatactgagggaagaaagtattctgaggaattgaaatccgttcaacatggctacagccatgcccaacctttaaatgcagggtcagagaaagggctcaactgaaatggctggcaggaaaatctacgtgttatcaatagttaaggttaggagatgaaggagaatttcactaaagaagttgaatatgtaaaatagtttaagcaggaaatagaggtttcagaaagcacagatggggtgttgaggggttaaatggggaagaaacgaagaagcagtgatagcctaagtcgaaagaaagcacaaagcagcatggaaatgagactatagcacagaagaccacagaagcttacatcttgggcggtaaccaaggataacagagatgtaaagcatggtaagtttggctggccacaagtatg

SEQ ID NO: 93459 - DNA, 616 bp, Homo Sapiens
  misc_feature (443)..(488): n is a, c, g, or t
aatttattttctaagtcttctataaatttcagtacttatcttgcttgttctcttagcagaataacaatgttaactacttttcttttctagaaacaccctctctcttactttcacttctggcttccctctgtactacattcattttatgatactgtccaatctacacccctctcttctgaaaacttcccccacttggacccagcagtgtggccctggagacatgctcatcccctgtgatcctgctcccttgaccacagctacttggatcaggaatgaacacttggcactagggaagcaaaaccattggctgtgctgagccagtcagattcttttttctaaaagtagctgcaaataaagtcagaaagagagtctctactgtgtgcttgaatttataaaaataaaactatgagtgaggcagacatgtgcgtatgaaaacagaacannnnnnnnnnnnnnnnnnnnnnnnnnnnnnnnnnnnnnnnnnnnnngagggagggtcttgctctgttgcccaggctgtagcacaggaggaagaatcaaaactgagtccagcagtttccctgagttaaggggagaaagactagtatcctcagaagccaaagaggctgtaatttgc

SEQ ID NO: 93460 - DNA, 436 bp, Homo Sapiens
gtgcctattgtccaaaaaatgcaagattactgtgaaccaaacggcagactgacaatcaccccctcccccagctttctcgctatctctttttgcctaataaatacggagggctgtgtaaagctcagggcccttgtccactaaaggcaaggtgcccctaaccccttcttccaaatatactctgttgtctcttgtcttttattcccgtgttgcccgcctttgttcagtccagtaggtccccaacaatgtcctgagggtatgaatcctgaaagactactctccatgaagcaggtatttaccaggttagtgcatgtttcctgggtattaagggaaaacagtaaaatgttctgtacgggggtcccggttctgtgtcgcacgagaagagtgtgtgtctttttacttttttaatatggctcaataaaattttaaatcacaaaaa

SEQ ID NO: 93461 - DNA, 360 bp, Homo Sapiens
ctaagcaagaaaacctaggcaatgattgaaagaatatttaaggcgcgataaccccattctatatttctgaatgtattaacctttggccaaagaccaattaaaattttccattttccccttaactcttttgagtattttggtgacaaatattctttcacatatctttttatctcggtggtactgaaattaatttttagaagctaaacaggactaattcttggttatatataaatgattattttcaaaaacttgaatttttaaaaacaaacaatcacttagaagaatcaaatccaatatttatttagtaattatcaggcattttctacagttttatagaattcctaaaattctgtaatagtc

SEQ ID NO: 93462 - DNA, 218 bp, Homo Sapiens
aaaacgcttagcaagtttgaagaaccgaaaagggcactgtgtctgagtgtgtaggcagggcagaatgtcgcgctggtgaggcggggctggggcactgtagccgtaaggaacctggatgctgaacggaggggagagtcgctgaacaaatggtcaagggaggaaataaacggatgagcgtgtcgcctctcccggcgcagccaggtggcttcccaaaaaaa

SEQ ID NO: 93463 - DNA, 479 bp, Homo Sapiens
acacaaatgaagttggaggacattatgttaaatgaaataagccaggcagagaaagataaacactgtaggttctcacttacatgtggaagctaaaaaagtagatctcatagaagtatagagaagaatagtggctactagaggagaagaaggggagccaaggaagggaagcggagaagggagagtagccaaaggttggttaatggatatataagtacaactagagaggaggagtaagttccagtgttctatagcactatagggtaactataattaacagcaacttgttgtatattttcaaataactataaaagcaggatttaaatgttcccaacacaaagaaatgataaatgtttgaggtgatggatatgctaattaccaagacttgaccaagacacattgcatacatgtatcaaaatagtacactgtacacccagaaaatatgtacaattattgtgtcaattaaaaataataataaaagc

SEQ ID NO: 93464 - DNA, 293 bp, Homo Sapiens
gaaaaactcctgtgaatatggcctctcctgaacatttctacaacatgaatggcagcttcccaatacagattccccatcctcttaagtgtgaaaacacaggaatcagcacaacattttctcaatctgattcatacaaatgtgtatttttcccctggtgtctggactgtcttgggttataccatgaatgcctacagaagtttcaaatactcactgaccctgctcatatagcctaaccaaagtgaactaatgctgacccaaataaagtgtagcaataaatttcaaactggattaaa

SEQ ID NO: 93465 - DNA, 313 bp, Homo Sapiens
cccactatttatttctaaactattatgttaacaccaatggacattttaggaatcaccaatggctgcttgccctcaagcaatataggccggacttattactaaccacctgcctcagcaattacctacattcaattgctttgcataacctctgccttctttcctttagggtacaaggcctttaatgttgtccacgttaagcaatgaggatcatgacaggaaaaaggttggagtattgctttttattgctttgtatcaatccaggctacaatcttcatttgatataaataaactcacttatgggtttatgacaaaa

SEQ ID NO: 93466 - DNA, 542 bp, Homo Sapiens
  misc_feature (51)..(51): n is a, c, g, or t
cgcggatctcagggtctcctcgctggggcgcgagtgaccggtcgccgccgntgattggtccctgcccggcgccctctgccctctcccggaggcctcccgcgtggcagggtgggcgtacggcgactccccccaactcctgccccaaaggaaggaaccttctggctttcctggtgttggccctggcgccctgggaccctagagccccggggaagcgcccaaaggctaggtcaccggcccagggctggccactgtccccggaagacccccaaggccgcggccgacgcggcatggaggcgctgggagatctgggccttcgcagcccggctagggagcgtggacgagtctccgggacatcctgcgcgaagggtccttctgtgcgtgctgcgcgggcgctaacgaggccagccagagtcaccagggatgaaggctatagggcccggttttaactcattcggttcctggccattgactgtccttttttcagttctggggcctcatcccttcccaaactgagaaaataaaatacagcccaacacccaaaa

SEQ ID NO: 93467 - DNA, 458 bp, Homo Sapiens
taaaataaatatgggagatcaattcaagaaagaaatggtaaattatatcacaagctgtaaaaataaagtaagataaatctattggttttcactgctgatgtaacaaattactgtactcttggtggcttagcaaacacaaatttgttttcatgtaattgtgaacatcagacatctaacaaaggtcttcgtgagctaaatttaggagtcagtagggctgtgatcatttctggaggctccggggagaatccggctccttgccgttttcagcttttaggtgttgcactcattccttggctcatggctcttcttgagtcttcaaaaccagcaacatcacatctgtctgatccttcttttgttgtcaaatctcagtctctgttttgagccacagttggaaaatgttctgcaatttgaaggtttcatgtaattagatagaacttacttgaataaaccagatcatc

SEQ ID NO: 93468 - DNA, 563 bp, Homo Sapiens
gaatgttcttctcttaaatcatttgccgtgatggaataaacttgtcccccctcatcagtattatcatttgttcagaaatacactttttatattttaatattgcaaatccacctttcctttatctttctttaacatggtgtctttctttatgttttaaaatttgtaactgattatgtttaaattttagggtaattttagattttaaggcaagccccctagagtaaggtgtgttctcatgtacaactttccagggttcccatacactgatccacactctaccaaggctgggtctctctccggccatctacggggctcactctctgaacagtgttctgctatccactgtctagtctgtgatctccacacttcttggcctgtctgggatctcagctccttttcctcagcttcaaatctacctggttcctcttcagcactgtggcctggaaactctctttaaaaagtagcaaagcatgcgttcatcagagggctccttttgtatattttccccacctcagcaatcactgtccttgttatttgatgtaaaataccttaaaatcatgttt

SEQ ID NO: 93469 - DNA, 748 bp, Homo Sapiens
tttgattgaataaaacttttatttcagataatgaatgcattgatttaataaaggatttgtactacatagtattatagttccctaaatgaacactgaaatcctaaaatgggaaaacttaccattggtccaagttaaatcataggcacttcttttactggaaaccctaataagataacaacccatttgatacttaaaacaaaaaaatgtgttatataagtacttaacattttctagctatttttaagccgcctgtttttcctatcataagtacatctggcatcaggcaaacagattacagccatggacatctgactaatttataatatttttatattttcatatttttggcagactaatccattaacctagctttcaaagatgaatcttgaaatcttgcactcttgcaacctttttacctttttctcttccaaaccctagaatatttttggcaagtcctaaaacttaattgaaaaacagagtcagggagacagaaatgaacccttatgttctgtccatctagtgccccttccagagctaacttctaaaaggaattatgaatctgttgtacacaatgttgattttgaaagatctttgtactttcaatcattcttccttccttcagtttactaggcacattggcacttgtgttagcatcctattttgagaattgcattttgtctaaatgtaatgggagtttaataacttaagcctggcaggagaagaatcagttgcttgcctttgcaaaaga

SEQ ID NO: 93470 - DNA, 515 bp, Homo Sapiens
ttaaactgccccacagaaggcgaaaggaatgcttgaggctggaccacgtgagtctagcgtgcactgcgtttctgtccccagcccctgttttaccttttgctcctcctgccccatcaaccaagtgtcttcatttgtttctatggcaattaacttttggagatagaagtcccagcacacgagatccccaagcacattatctaccttgctgaacaggctggcagtcacacatgagccaggcgacccagggaaatgccagcccaaacaaagctgctgccacatccagagagggccggactctttctcccttgtagtcactcaagctaatcatccaaaacctgcatcctccatctccaagccccatcttattagcaccatctgggattgccaaccaagaaactgttttatctgagaactctaagaccaaagaacaagatttatttcctctactacagatttggcagtgacgcataaaaggcccatttctcaggaagaatacatgtcctaaggaagtaaaa

SEQ ID NO: 93471 - DNA, 1317 bp, Homo Sapiens
gtgttgcggcccgggttctgttcgtaggtttaaattgtcgcgggtagtggggcgccccagctgccaactgcacgtggtttctttctggcgtttgcctagtgtcctgtccattccgccccgttgggaagtgggaagcggagaggttctgtggggacagagctgggagtcctgaaggagaaagcgcgcagccgaggggctctggagtgccttagagcagagctgcggccgcggaaggggagcagctgagaaaggagggccgctgcaggcggggttcgaaccgtggggtctgggctgctcccgcggagggcctgggcggacgcgggatgctgggggtccgctgcctgctgcggtccgtgcgcttctgttcctccgcccccttccccaagcacaaaccttcagccaaactgagcgtgcgggaccctctcggggctcagaacgcgagtgaggagcgcattaagatccagggatggattcgttctgtccgatcccagaaggaagtcttgttcctgcatgtaaatgatgggtcatctttggaaagccttcaggttgttgcagattcaggccttgacagtagagaattaacttttgggagttctgtggaagtacaagggcagctgataaaaagtccatccaaaaggcaaaatgtggaactgaaggcagaaaaaattaaagttattggaaattgtgatgccaaggatttccccatcaaatataaagagaggcatcctctggagtacctgcgacaatatcctcactttaggtgtaggactaacgttctgggttctatattgaggattcgcagtgaagcgacagctgctattcattctatcttttaaggacagtggctttgtacatattcatactccaataatcacatccaatgactctgagggagctggagaactttatcaacttgaaccttcaggcaaacttaagggtacctgaggagaaatttcttcaatgttcctgctttcttaactggtctcagggacaacttcatctagaaagtgatgtcaggagcttttactcaagtgtcaaccttatggtccgacctttccgagctgaaaaatcctcagagccggaggcacctggcaagagtctcatatgatagcaagcagagatttcttaagttgaccaggccttcaagatcttattcaggtcatagcaggaactggttcaaggggtacaaacaataatggtactctaagaatgtcctgaacgatgttgaacgcctgtcacaaaattccatagcaactgggacaaaaggaaagattagaaacattatgctacaaacaactataggaaacatatgcttat

SEQ ID NO: 93472 - DNA, 695 bp, Homo Sapiens
ctgatccatttcctcatctatgaaatgaagattgtagtttttatttcatagagtcatgaagattgagttaatctctgaaatatccacacagtgttgtcactcaggaatgatttggaatgttagggatagtcacccaccaccacagtgctaggtttcagtgaccaggagcgatgtggagctgagtctagtgggagtccagaggtaaagacacagtaaggtcacatgtgacccaggagggaggaggcacaggcagggcaatctgaggagactgtgccatggctggaggagcaggggctccaggaaggaggcagcatctgcactggaaatgcagcaggagggcccagtgagggaggcctggaaagtccacttggacttgacaatgaggagctctctgctgtcacctgctgtgattcctagagtcagaatcagactgcagtggccacaggcacaagtgggaagtgatgcagctcaaaggtttggatgagatgggatgtgcagcgattgagtcgtagctggagcgaaggatgtgctaagttagggattggaggggcgtgcatttacatgggaaagtaatgctaattagaaatcagttggacttcaacattctcaagtacttccacaaagcatcccttggttttattccagtttgttgctttacgtatttgtaagtattaaacaccaattactaaattaaa

SEQ ID NO: 93473 - DNA, 517 bp, Homo Sapiens
ccagggtcctacttgcacctctgctgggggcatttgtcaccgtctctaaaattgtgtcaagtaggaggatctcccgtaatcgagcgacccgcgggactattcatctctttagtgtctagagtcgatccctgcatacagtaggcgcccataggatgtttgcctgctctctagggcagccctcaatccttcggttaatggggaaccttctcgatctcgagaaaaaccttctcccgagttcttttaagatttccctgcatgagtaccgccttcccccaagtcaaaattgcacccttctcggcgctcttattcatttagtggaatcttttatgccagtcctggcaccaccactttgttgagtgatcctgggaagatgcttctctgcgcctgtttcctcatctgcaataaaaagattcttaccgttttgctaagaatcaagtgagcttatttgcataaattgcttagaatagttcctggccgagagtaggtgatcaataaatattagctattattactaaaa

SEQ ID NO: 93474 - DNA, 398 bp, Homo Sapiens
gctcaagggacactcccacctcagtgctgggattacaggcgtgacgaccgcgcccagccaggtattttcttttacttgttagtcaaagctcaagttttcctggtcatatacatttttctttcatcttttaaaactcaactttattcttattaccactcatttcttctaataatctctatgggactatttatgacataagagatcaccatgctgtgtaagatggctgcagaaaaaaacagactaggaacaaagtgatggaactcttcagaaaagaaactggatgaggtcatttcatttgtgtaatgcctgcctgcaaccagtaataggagttaatagggctctatacattagaaattattggaaacaaaatcactcaaggggaggactgcctattactg

SEQ ID NO: 93475 - DNA, 1164 bp, Homo Sapiens
ccggccgtcaactacttgctttccgcccctatgctgctgggaatggccccgaacctcgtactccaccatcccatgggtctcttttccaaatgtccctgcagtgagcttactgcatagcttgctgtgtgaacttccagccttgtctgaagagagatgggatctagcacccagtgccagtgtacccctcactcagacccgagctgtgtcctctgacctaaaacgagatgacactgtttctctgcctaagctactgaactataaacctagatgactttactagccagtcatagtttctaattattttaacttgtatatgcatataaacacgaaaatatttatgcctatgttatagtagtaataatagctgttatatcatttccacaaaattacacgtggttataactgtagggaaggttttaaaaccctaaggcagttttttaaaaaataccattgtttttaatatttattatggacatctttctgaaaaaccttaagtctagctatgtatattaacattaaataacttaaaaaaataaacatacattatattgtagcaaatagctccattttaaagccatataagtgaaaaaattgagttttcaataatagactagaccttctaaaggtatttttaacaattttgaactaatattaaatgtattttcttttttgactatgccaagtatattcacactgctcttggtactttatgtcagaagtatttttatgtgaaacactaggttgtttcatttgtctgtttttacttgctctataatgaaaagtttactctaaatctaaataagtttgctcccaaatatctccccaaggagaagggggacagcataaccaaaaacacaacaaaaacctaatgatatatagatatccagtgcatgcgacttcatattttctaatagtggtagaaagtaactttcaagtattcctgtaatccaactggacttacagatagcgatctcataaaatgaacattctagaggaagaaagtcctttgagaaacttgttctttccagaaaacctttgccaaaattcccataggaaacaaaaccatccattcacaaaagaccagagggtacttggtccccagtactgacctgaaagtgcacgcatttaatactgctctgaactcaaggttaactctagcagaat

SEQ ID NO: 93476 - DNA, 555 bp, Homo Sapiens
  misc_feature (95)..(257): n is a, c, g, or t
  misc_feature (347)..(491): n is a, c, g, or t
tggcacagcatacatctgatttcccaagccagaaacctcatagttattcttgactccaggaagaaatattattgagtttttaaaaactcagcttnnnnnnnnnnnnnnnnnnnnnnnnnnnnnnnnnnnnnnnnnnnnnnnnnnnnnnnnnnnnnnnnnnnnnnnnnnnnnnnnnnnnnnnnnnnnnnnnnnnnnnnnnnnnnnnnnnnnnnnnnnnnnnnnnnnnnnnnnnnnnnnnnnnnnnnnnnnnnnnnnnncctttgctggctccaaacaatgactctttcctatctttttagaaagattagaattgcttttctagagttccagtaatggaatcatacagnnnnnnnnnnnnnnnnnnnnnnnnnnnnnnnnnnnnnnnnnnnnnnnnnnnnnnnnnnnnnnnnnnnnnnnnnnnnnnnnnnnnnnnnnnnnnnnnnnnnnnnnnnnnnnnnnnnnnnnnnnnnnnnnnnnnnnnnnnnnnnnnnaatttgaagatggtgctttaaacactgtcctcacatggtagaaggggcagatgggcaaaaaaaa

SEQ ID NO: 93477 - DNA, 484 bp, Homo Sapiens
  misc_feature (42)..(120): n is a, c, g, or t
  misc_feature (150)..(160): n is a, c, g, or t
atatatctgataaggaattgatatccagtgtacatgtagaannnnnnnnnnnnnnnnnnnnnnnnnnnnnnnnnnnnnnnnnnnnnnnnnnnnnnnnnnnnnnnnnnnnnnnnnnnnnnncatctcaagctcaagatttcccagataacnnnnnnnnnnncaaaatctgcttctgtgtttcctcatctgtaggtggcacagcatacatctgatttcccaagccagaaacctcatagttattcttgactccaggaagaaatattattgagtttttaaaaactcagcttattgactcattgttttatataataaaatgcaacagttttaagtgtatatttcaatgagttttaatacatttatgtacttgtgtcactatcctcatagatagagacaaaacatttctatcacaccggcaatttcctatgtgtcccatcccaatcaatcctttcccctttgctggctccaaacaatgactctttcctat

SEQ ID NO: 93478 - DNA, 1236 bp, Homo Sapiens
  misc_feature (736)..(752): n is a, c, g, or t
  misc_feature (1002)..(1034): n is a, c, g, or t
aacataggctaggtacgaggctgggtggtgaaatcggcacgaggatttgaatcgcgggacccgttggcagaggtggcggcggcggcatgggtgccccgacgttgccccctgcctggcagccctttctcaaggaccaccgcatctctacattcaagaactggcccttcttggagggctgcgcctgcaccccggagcggatggccgaggctggcttcatccactgccccactgagaacgagccagacttggcccagtgtttcttctgcttcaaggagctggaaggctgggagccagatgacgaccccatagaggaacataaaaagcattcgtccggttgcgctttcctttctgtcaagaagcagtttgaagaattaacccttggtgaatttttgaaactggacagagaaagagccaagaacaaaattgcaaaggaaaccaacaataagaagaaagaatttgaggaaactgcgaagaaagtgcgccgtgccatcgagcagctggctgccatggattgaggcctctggccggagctgcctggtcccagagtggctgcaccacttccagggtttattccctggtgccaccagccttcctgtgggccccttagcaatgtcttaggaaaggagatcaacattttcaaattagatgtttcaactgtgctcttgttttgtcttgaaagtggcaccagaggtgcttctgcctgtgcagcgggtgctgctggtaacagtggctgctnnnnnnnnnnnnnnnnntttttgggggctcatttttgctgttttgattcccgggcttaccaggtgagaagtgagggaggaagaaggcagtgtcccttttgctagagctgacagctttgttcgcgtgggcagagccttccacagtgaatgtgtctggacctcatgttgttgaggctgtcacagtcctgagtgtggacttggcaggtgcctgttgaatctgagctgcaggttccttatctgtcacacctgtgcctcctcagaggacagnnnnnnnnnnnnnnnnnnnnnnnnnnnnnnnnngggagatgcatgacttgtgtgtgatgagagaatggagacagagtccccgggctcctctactggttaaccacatgggctttcttatttttggttggattgttaaattccccagaataagcccaaactaccattaaaaactaagcaccaaggccattcctaagtccttggggggaaaacggggtgaactttccgggtgggatgt

SEQ ID NO: 93479 - DNA, 1829 bp, Homo Sapiens
  misc_feature (239)..(310): n is a, c, g, or t
  misc_feature (736)..(752): n is a, c, g, or t
  misc_feature (1002)..(1032): n is a, c, g, or t
cgacacgaggcggcggcggatggtatgccccgacgttgccccctgcctggcagcctttctcaaggaccaccgcatctctacattcaagaactggcccttcttggagggctgcgcctgcaccccggagcggatggccgaggctggcttcatccactgccccactgagaacgagccagacttggcccagtgtttcttctgcttcaaggagctggaaggctgggagccagatgacgaccccnnnnnnnnnnnnnnnnnnnnnnnnnnnnnnnnnnnnnnnnnnnnnnnnnnnnnnnnnnnnnnnnnnnnnnnnaggaacataaaaagcattcgtccggttgcgctttcctttctgtcaagaagcagtttgaagaattaacccttggtgaattttgaaactggacagagaaagagccaagaacaaaattgcaaaggaaaccaacaataagaagaaagaatttgaggaaactgcgaagaaagtgcgccgtgccatcgagcagctggctgccatggattgaggcctctggccggagctgcctggtcccagagtggctgcaccacttccagggtttattccctggtgccaccagccttcctgtgggccccttagcaatgtcttaggaaaggagatcaacattttcaaattagatgtttcaactgtgctcttgttttgtcttgaaagtggcaccagaggtgcttctgcctgtgcagcgggtgctgctggtaacagtggctgctnnnnnnnnnnnnnnnnntttttgggggctcatttttgctgttttgattcccgggcttaccaggtgagaagtgagggaggaagaaggcagtgtcccttttgctagagctgacagctttgttcgcgtgggcagagccttccacagtgaatgtgtctggacctcatgttgttgaggctgtcacagtcctgagtgtggacttggcaggtgcctgttgaatctgagctgcaggttccttatctgtcacacctgtgcctcctcagaggacagnnnnnnnnnnnnnnnnnnnnnnnnnnnnnnnggtagatgcatgacttgtgtgtgatgagagaatggagacagagtccccggctcctctactgtttaacaacatggctttcttattttgtttgaattgttaattcacagaatagcacaaactacaattaaaactaagcacaaagccattctaagtcattggggaaacggggtgaacttcaggtggatgaggagacagaatagagtgatagggaagcgtctggcagatactccttttgccactgctgtgtgattagacaggcccagtgagccgcggggcacatgctggccgctcctccctcagaaaaaggcagtggcctaaatcctttttaaatgacttggctcgatgctgtgggggactggctgggctgctgcaggccgtgtgtctgtcagcccaaccttcacatctgtcacgttctccacacgggggagagacgcagtccgcccaggtccccgctttctttggaggcagcagctcccgcagggctgaagtctggcgtaagatgatggatttgattcgccctcctccctgtcatagagctgcagggtggattgttacagcttcgctggaaacctctggaggtcatctcggctgttcctgagaaataaaaagcctgtcatttcaaacactgctgtggaccctactgggtttttaaaatattgtcagtttttcatcgtcgtccctagcctgccaacagccatctgcccagacagccgcagtgaggatgagcgtcctggcagagacgcagttgtctctgggcgcttgccagagccacgaaccccagacctgagcaagccagg

SEQ ID NO: 93480 - DNA, 859 bp, Homo Sapiens
ggggacatgccccgcggcgcgccattaaccgccagatttgaatcgccggacccgttggcagaggtggcggcggcggcatgggtgccccgacgttgccccctgcctggcagccctttctcaaggaccaccgcatctctacattcaagaactggcccttcttggagggctgcgcctgcaccccggagcggatggccgaggctggcttcatccactgccccactgagaacgagccagacttggcccagtgtttcttctgcttcaaggagctggaaggctgggagccagatgacgaccccatagaggaacataaaaagcattcgtccggttgcgctttcctttctgtcaagaagcagtttgaagaattaacccttggtgaatttttgaaactggacagagaaagagccaagaacaaaattgcaaaggaaaccaacaataagaagaaagaatttgagggaaactgcgaagaaagtgcgccgtgccatcgaacaactggctgcccatggattgaggcctctggcccggagctgccctggtcccagagtggctgcacccccttccagcgtttattcccctgggtgccaccaggccttccctggggggccccttagcaatggtcttaaggaaaggaggatccactttttccaattagaatggttccacctgggcccccttgtttttggccttggaaaggggcaccagagggggcttctgccctggggccgccggggccttgcttgttacccgggggcctgccttccctgctcaccatgtctcgttgtttggggggcttccttttttcacctggtgtcgaactcccgggtctttccccggtgccgtacttgcagcgagggcagaatgc

SEQ ID NO: 93481 - DNA, 382 bp, Homo Sapiens
tttttattttactttatttttattaaattaaaagctacagtctggcagcgattccagaacagggtaaggaggttcctcacaggggtcagagaagagcggagaaagacagactgacggagactgagacacaggagagaaaggacaaggttaagggagaactgtatctgatgaacacacacagccggctccatggcgggtgacggggagctcacatcagcccaatttctcctccccggcacccgaagttcagcggtggagcagtatgtgggggcggttaggaatcaagagaccctcccttccccaccctaggtcctttctcggcttggtcgtggagcacagcacataccagaaaaagccaagggcaatggaggggcagggaaac

SEQ ID NO: 93482 - DNA, 1114 bp, Homo Sapiens
  misc_feature (395)..(454): n is a, c, g, or t
cagattatcaggatgagggaatggaagacatcgtaaaaggagctcaagaacttgataacgtaatcaagcaaggatacttggagaagaacagcaaagatcatagtttctttggatcggagtggcagaagcgatggtgtgttgtcagcagaggtctcttctactactatgctaatgagaagagcaagcagcccaaagggaccttcctcattaagggctacagtgtacggatggccccccacctgcgaagagattccaagaaagaatcccgccttgaactgacctcccaggataggcgcagctatgagtttacagctactagtccagcagaagccagagactgggtggatcaaataagtttcttgttaaaggatctgagctccttaaccattccatannnnnnnnnnnnnnnnnnnnnnnnnnnnnnnnnnnnnnnnnnnnnnnnnnnnnnnnnnnntatttatgaagtcttgccagatgaagagcatgatctagaagaggatgagagtggcactcgacgaaaaggagtagactatgccagttactaccaggccctatgggattgcctatggtgaccagccagatgaactgtccctcccaacggggtgacctcatccgtattctgagcaaggagtataacatgtatggctggtgggtgggagaactgaacagcctcgttgggattgttccaaaggagtatctcaccactgcctttgaagtggaagaaagatgaaacccaggaaatatattcttccctctctcctgcctttatgaggaaactgatcatcaaaagttcccactccctacttctgccaccccaccaacgccttggactcctctctttgctgaagagacccaagtctcttgacacctcagagtgactgtaagctaccagtaagacaagtgggaagaggcacgttcatcaaacctgttactaaaccagcctagtcatagctcatccccatctctaaatgtgtccacacaaccacatctgccttttccacaagcttttcacaaagaaggtgagagagaaggaaaccttgggaggaggacattactggttgttctggctggtttgaaaagcacaaataaacttgggatgtggttccttgcaaaa

SEQ ID NO: 93483 - DNA, 433 bp, Homo Sapiens
tttgaattagaaatttaaaatttagttgaaatataaaataaattattgccagaaacacaaagggcacatgaatacaataggggaaacagcttaatgggtttctgttctctgaaaactcaaggcccatctctgagtgataagagtaccctaacaggcaaagccctctgaggtccgggaccaggaagacagtgctactccacctactggcggtctggcactatctgtaggctggagttgggctggggatggtacattcaaaatggactttggtaaactaggggacaacccagacaaacactgcagaaaggaggaaggactccctttccagcatctcaaattcaaggctccaagttactgggcttgggcaaagtcacacattttctcaacaaaggccaactgctgacaatccaaattttaaaaacactgccattag

SEQ ID NO: 93484 - DNA, 689 bp, Homo Sapiens
gcggccgcgtccgtctgcaccgtgagcggcgcgaaggcctccttgcccgggagcgcgcgcgcctcttccaccttggccggcgctgtgccctcgcgaaccgggctcctgcgctcctccgcgcccaggccgcgagtgctggacgagatggtggcggggctatggcgtgagtcgggcgacgctttgtccagccgcccgctgtcccggggccgctcagcagcgaaaaggtgagccttgaccgcggggctgcccttgtcacggcagggctcctccgacgtggtggtggagatcttggccgcgtcgcaggcctcggggccatgctcctctttgctctcggcctcggcgtcgctctcaccctcgctgggacataaatctttgaggttcgatgtccctacagtggaggcggctggagaagaagcctgggcgaaccagttgaaagctgcttgttcactggaggactcatcagaggtcccattctcctttttgtgtctttcatcaaacaccctcatggactgcagggtgagctgctttcttttttctcttccgccatttccagtggtcccgaaaaccttttgcaaaagggttgctgtctatctttaactgcgttatcttatcattctggtatgcagtcacagcgatgaattcagtttcggtggacaagtatgtccgaaatgactataaggcagcttcag

SEQ ID NO: 93485 - DNA, 584 bp, Homo Sapiens
  misc_feature (65)..(65): n is a, c, g, or t
  misc_feature (68)..(68): n is a, c, g, or t
agatcgccgaggccttatgcacctttctgccacttctggatcacgtaagcatgcacttacgtctntgnctgtgcctggtcctctatctatcagtaagatactaaattataagtattgaaattgaattaataatttaactcttggattttgagactaacatcctactttttaatactgtctaaatgaacatgtttctaagcacacaagattttaatttacagtcagatatgaaaatttgtttattgctgcaaagtttgattttgatgtctgtcatcttattggtatttgttctgtcgtttgggtaaaacggatgtgtttgacactgccttactacatagattgtttatcttgaagttttgttgcatttttgtttgtttgccagaagaaaatttgtctactaacaattccagcccaattttggagtcagatacacaaatctaggtagttttttatctagtgattgcatgatttttctcttttactgtaggccttttcatatctccagtcaccaaatacttaagtgcttactatgtggagggctgtctgctaggtgttaggatgaataaaagaactgtagttttaaa

SEQ ID NO: 93486 - DNA, 262 bp, Homo Sapiens
aggagactcggacttaaacctccccagcattaagggaagaaaggtgtctctgttttttccgaagtgtgcctgcttgactcctttgatttttctctgggattcttcatcctccatcaagttgatcgatccctctggatcttggtcagtttcctgacatctctatgaagttcagtgacccagactgagtccacgtcctcaaataaggttctgactaatgcagagtctaacagaaagattactgaacatgtcatgcactattaaa

SEQ ID NO: 93487 - DNA, 446 bp, Homo Sapiens
catttcattctcacattctcgcacaaaatgaattatcaagatggattttataatagctgattctctgaagaatccctgagactttgtatgattctttagtatagcagtggctttcgatgtgccaagtctacctcctcccatactgggacactcaagcaacacagatgtacacgggaattttgggtattctatactgagaatactgcacacatatcgttagtcatcttaatgttgtaacttaccaaactcttaaggtttgcaaatgtgattttgttggcatctagaaccagtgtattttttatttatgtctgaaaaataatcattgtggggttttaaaatgaaaaatcatgtagctaatgcctatccatagatgaaattgttatgttgggaaaatgtgtacttaatctttgctttagtaaaatgattattataaaaatgttaaaaaa

SEQ ID NO: 93488 - DNA, 372 bp, Homo Sapiens
aggggaggtaagtctgggggctacgaagccgggcccccacaccctggctaaagtcagcttgacctaggtcttgaccctcatccagcaagggactcgacagacccaagggtccctggaacgtagggaggggctgggggtcactccagcccgggcctcccagaacaccaggcccgtgtgggtggcaccctgaggtcaggggatcctaagggtgtccttccaaagacggtgtttccagggggaggaccgcccccgcttccagatccccggccccggctgtgactgccctgtttcacccctgctgtgtcccatcccccgtctgtccactaactgtaccgcaccggccattaaaagatgaaggcagaccgctgcaaa

SEQ ID NO: 93489 - DNA, 318 bp, Homo Sapiens
taccatcgcagacgccaacacaagcagtctcacaaaggcagtggagtagttttccagaaggctgtaatgaggactgattggaacccatctcctgggaatcagagagctgctcagaacatgggcaaaaagtcccattcattttagactgtgaagaaactcgctaccaactctactgtattctgactataaatatttattaataaaacagatcccacggtagaacctgaggacctgcgaggacctgaggtgtatgacagcggtgtcattgtcaacaatagtgattatctgatgacatgtaataaatgatacacgtccgtc

SEQ ID NO: 93490 - DNA, 474 bp, Homo Sapiens
ggacccactcgagccatccacacttgccccagcctcctccaaaacagcactctttccggctgaagaaaagaagaatggtattcacgcagttcccattttacagatgaaaacaagaggactttttctgtgaagtcaagaaagtggttacaatggtactttcagcctgtccgaattatgtattgcccctcccctttttattaataacattgaagtgtgatgggacaaccactgaagccgtcagttgaaacctgctgggactttttagccattctcttcaacataaagaatgggtgtttttggagggggtgagaggaatggggaaatgttgtcaaagagtacaacgttttagttgagacaggaagaatatattttgttgagatctacagcacagcatggtgactgtagttaacaatgaagtattgtctatttcaaaattgctaagacaataaatttcaaatgttctcaccacaaaaa

SEQ ID NO: 93491 - DNA, 1012 bp, Homo Sapiens
caaggatgacagaacacaaaacaagtgagataattggttggacggcatcagtccgccttgccctgccctggtattcgagacggatagttgcatggagttccaaggtagaacagcttcctgagtgcctgcagagacactgtcacctctgtgcccacaacaccaaacaacctagagggccagctgtggtcaggcctgaagctttgtggagctgaattcctatatgtcaacatcctgtctcccgatctgctgtgagagaatctggcacgggacgtcctctgtgaaggctggctggagtccaggagcagcaaagtgtggtacagaaactgtcctccagagagcagcccggatccggggctggcatcatccgtccctgcaggcaattactctcaccggaggtaataatcaatcgcagcagagaaagcagcaaaacctccacaaccaatggccccagcctttaagccagctctgaaaccaatagctcctcccgtgatgcagccactgatgacactgttcttccagtctgatgttccccggtaagattctatcaaacactcagtacaagaaaacatgggctcccacaatggcgaaatttttggcataggacattcctctctgccccatgtctttcagcacttcttttgcagtcggtgtacggtaaggatccttagggtcaaagcccacgttggtatcgatgccagcggtaaacaccccaaatgcacctcctaagacaaatcctcccacgcaggccagcgcagccttgaaagcgcagctttccatcgccttctcgatcatcttctgctcctcactcttggctggacttgggatcccgcccaggctcccaggctccaggagccggggctgacgcttgtcacccaccaggtactgcaggagcaggctgtactgcagcggagcttcggcggaacccgctgtctcaggggccgagcctccggcattgcccacgcgtccgcggacgcgtgggtcgacgatatcccgggaattccggaccggtcca

SEQ ID NO: 93492 - DNA, 523 bp, Homo Sapiens
tttttaaagtaatatacatttattgctttcacacaatagtccaaaagatatgacaataaataatatgagtgaaatatatatgatacattgaagatgtgtaaggtctaacattaaacaattgaattctaggttaagaacacgaaaaaccaaggacaggaaataatcgtggaaataatcattgataaaaatttctgagtgctgaaggaaaatagttttcgaattgagaaaattttctaagtgtccaacctcaaataggaaacataaacacacataaactcgcacctggaggcaatgttcaaaacacaaacccaaataaacacatactcggagacagtgttctaaataattagactacattcataaaaataagattataaacactagagaaagagaagatgaaaataaaaagggaaaaaagaggctctttaccaacaaagaaaatataatcagacggataccaagtccactcttggtttctagaagataatgaatacaatttcagatgcaaatgtataaattcctt

SEQ ID NO: 93493 - DNA, 883 bp, Homo Sapiens
gcttctatactaaaatttataaatggaattgttctctggtgtcccagggcatttttaaaaaaacaataaaagtaatgcatgagtctgattctgtttctagttccaaaatctttgtagcacaagctgtatacatcatttgtaattcaaaatgatgtcaacagcccacagaatacttgagggcaaagtatgacagatagatttgatttccatcctttaaaaacatgttgtagattatgcatgagtacattgcggttattcttttaatgcatgagcgtgtctgttattttcttaatattctgcaccacagaacaaatacattcggagtgtctgaaatcagagcaaatacataacttgtcttcgtaattttcttttcttcctcactgatcagagcggcttctgttttccatcttctttgttgaatcaaggcagcttgtgctttgtgtgtgccattataattcatctaaactaaatcatggcaacactttctcactgtctgatatatggcaggaaatacttgccctctcctcctgttctcttagtctccagctgaagcgaatgaatggaatctgctggctgttctatcttttaatctaagaaacaacttacttctcttttcatttccccttctgaaaatacataaacaatatattttatacataatccaggggtttgaaatagtctaattagaaagtttacttttaccattttcttttgtctttttatcttgagaggtaaagtcaatgactcagcacagctcatcctcagctgccaaccatgtgtgatcaattctacatgtttatccatgtgtgagattttgtgctacaatcctgctctcataccttgcccctacaatccattttctacaaagtagccagtatgaccc

SEQ ID NO: 93494 - DNA, 649 bp, Homo Sapiens
taatttcttatgctgcaggtgggggaaatgggctattgaatatctttctgtcaggttcagtagcatatgcagtatacatattgctgttacttttgtattgttaacttcttagtctcctaaaactagacatttaaaccatcatttgtatatatgtgtgttcttttcttggtggaaaggtttatgtagacacaaattatagttatcatgataacacctgtagttatactaaactgtttcatttttattgtaaaaattttttcagtatcagacctttaaaacaaaaattatacagtagcatgagtttgtgctaaatggttttccaaaataattgaaccttcagtagggaacccatcctttaagcctatgttttcttccttgagtctcctagagcttccagttcactacacctaaacccgggcatgcaccattggaggatcaacagagtccttatcagcggcggcagttggtaatatttttgtcggtgtgcttatcagctttgactgggattagtcctgtcttacatggagtataataattccatgagaatagagatgtggcctctaattcctttataattcctaaaagtactcagaactatgttataatccacacactgtggggaccaaataaactttttttgttgaccaaa

SEQ ID NO: 93495 - DNA, 484 bp, Homo Sapiens
  misc_feature (267)..(283): n is a, c, g, or t
ctcaaacaaaacaaacaaaaatgtgcataattgtacccagatataacgggctgaagaacagcagcgaggctgcgtgctgagctgtctacacctgcaaatctcatcaactcctatcagctgggcagcaggttgcccagttcaccactcctgatgaggaagctgaagtttgctgaacttccttctggcactaacgtcacacacttcatagcgctcctaggacttgaacttagtctggtttgccttccaagtccagattctccaaaacannnnnnnnnnnnnnnnnaacttactaaatggtgaagtggccagataagcagcctacagataagtgaggtctacaattcatcacacaccgataatgctgacatataacagtttccgtatctttacaaaggcaataaatggatgaagagatgtgatgaggaaaccacgctctctatatgcatgcaagctatttggaagctctaataaaaacttgggaaac

SEQ ID NO: 93496 - DNA, 685 bp, Homo Sapiens
cttcaagtagacagatcttagtgctcgtagagaaaggtatgctttcctgctggatgtagtttttaccttgaaggtttaccttccctgcctcttatctcaccagtgaaatccctccttctgggccaaagcaagttatgagagctgccatatgccagctgccaaatgtcttcagtgccaggcatgttgccaaactaggggtaaaatagtgaatgagaaacaaatgcagcctccaaagagctcaagtgacaaagactgacttttacaacataacggtgctgaggtgcactgaagccctgaacctctggaggctgcaaggatagagcagtgatgtgtcagaccacctgcatcactggttccctgatggcacttaattcaaatttcatcctttggtagggtctagtgaaaatcagctcaaaccttgaaagatatttctatgtaacctaattaaatgagtgagaccttggtgcctctcactgcaggacaggcaggattgaaaatgaaaccaatatctgacccaacgagattctgtcctaagttcaggggaacaggttttggtggcaggcccttttacatgactgtttgctggagcccacaagaaccaagatgagaatctgagggaaatggccactttgcagccaggttacaacaggagagtcatgaccggctgcagttataaaaactgaaa

SEQ ID NO: 93497 - DNA, 1220 bp, Homo Sapiens
ttgactaggttcgattcagggggatgtggcacaggagaggccatgaaaggcaggcctgagagtatatccgatgaagatggcgtaacttgggaccgcgtctgcttgtctgccccgatggagacacccccgttgtcggtggcagacaacaggtagggagagcaccaggcccaggcgagaggaacaccagcacgcacagacaggacctccctgttggcgcaagtgatgaagtccccgacttctgtataaataggtgaaagtgggcaatgcccagaaaagtccacatggtccaaggcttctttggtgcaccggtcaagcggagattatgtgctcgagtgggtataaggttcgtccccgatatgaggtaccaagaggagcaacggagagccaggccagactccagttaacagtgtcccaagggacgagaagtccagaatcagaccagtttttaaaaatcatataaagttagtgtaaaagtatgtgaagccaagttgtatagggcattagaaagcaagtattgtaaaatcgcctgctggatacagctccacgagcaagactcgcatcactccgtcagcaccaggaaatccagatatgtcccaggtgttgtcgtgtgattgatggtgttccctgagcggttgctgcgggtgatggatactcttctgatactggctcttcgtgctataatttcttttctcaccaagagcaggtgccctttcagaagggaatgggagtggagggagggtcacagaaacacctcggcactgggggaaacgtggcctagcctctggcgacggcgagcagcggccggaaggcacgggggctgcgggccggcgcgggttcagaggcttctttttccgcggacggagacactgtacagcccaacctcgggaaaacgccaacgccgacgccttctccaacaaaagatggcctcggactcaagagtgcggctccagggcaatgcagccccaacctaaagatttagaggcctcccgtttcgctggcccccagagccgcccaccgcgactgcacttccccaccgataaaaggtggtttccagggtacctcacctcagatggcggcaggcggctcaccgacggcttcctcaccagcatccctcgcgggcggcaggctctcgccagcgcggcgcggccaccagtaaccagagtaaccagtcgcacgcccccactcgccgccaggctcaacgcgtctcagccagctgggcg

SEQ ID NO: 93498 - DNA, 470 bp, Homo Sapiens
gtgcttactttatacctaacacttacaaagtttcagccagaacgacgtagctaggttttatcttgaagtctgtttcagagctaatatgaagatagaacacccatgccactacaccagagctgggagcagggacagtggcccacttctgcagtgaaacttatgctctacaagaatgtgggactattatcttcccctgtgcttcttgaagttggtgtgactgtgatctgatttggtcgacataatgtgagaagtctgtcacttccaagcagcatcatttaattgctgctgcgtgcttctctatcttctcttctctgttgcaacaaatcctggagccttgtgacgatcataaaatgggaacatctttgttatcccaggtcctgcacggtaactgtgtgaagcacagccctcacccctctggctggacatgttgcgtgagcaagaaataaatcttagttgttctaggtcaaaaa

SEQ ID NO: 93499 - DNA, 381 bp, Homo Sapiens
tttgtctaagcaaatttagcaatcccaaatgtaagtcatgacattcttagaggtactattcaaatttgttttaaacttagtgctactagttccaaaatgggtgcatatgttaatgcagaaggattttaaagagtttctaggagatttagagagaaactcgagcaccctatgaaaagagtataatccaaccaagtgacagtgactgggaaacacctattgaacccaacggaaagtgggaaatcagtatcttattatcacctgtcattattattgttactattttttcaacatcactgaaaataccacagctgaaccctctgcctcatgcttatttgctaattcaaacctggagatttcttttcaggcagtgaacatatgatt

SEQ ID NO: 93500 - DNA, 473 bp, Homo Sapiens
  misc_feature (331)..(356): n is a, c, g, or t
gggccgccactgggagcccgtgcgctctatactgcgaggacgaccagcggccagtgtgcctggtgtgcagggagtcccaggagcaccagactcacgccatggcacccatcgacgaggccttcgagagctaccgggagaaacttcttaagtctcagcgtaatctcgtggccaagatgaagaaagtcatgcatttacaggatgtagaagtgaagaacgccacacagtggaaggataagataaagagtcagcgaatgagaatcagcacggagttttcaaagctgcacaacttcctggttgaagaagaggacctgtttcttcagagattgaacannnnnnnnnnnnnnnnnnnnnnnnnnctgaatgagaacacgttaaaactcaatcaaactatcgcttcattgaagaagctcatcttagaggtgggggagaagagccaggctcccaccctggagctgcttcagaatccaaaagaa

SEQ ID NO: 93501 - DNA, 826 bp, Homo Sapiens
  misc_feature (683)..(683): n is a, c, g, or t
  misc_feature (718)..(718): n is a, c, g, or t
tgcggccgccgggcgccggagccgcgtccccctgcgccgccccgggcctgccggccggaggagccaccatacaccccgggtcgccgagcgcctggccgccccgcgcccgcgccgcgctccgcctgtggctgggctgcgtctgcttcgcgctggtgcaggcggacagtccctcagccccagtgaacgtcaccgtcaggcacctcaaggccaactctgcagtggtgagctgggatgttctggaggatgaggttgtcatcggatttgccatctcccagcagaagaaggatgtgcggatgctgcgcttcatccaggaggtgaacaccaccacccgctcatgtgccctctgggacctggaggaggatacggagtacatagtccacgtgcaggccatctccattcagggccagagcccagccagcgagcctgtgctcttcaagaccccgcgtgaggctgagaagatggcctccaagaacaaagatgaggtaaccatgaaagagatggggaggaaccaacagctgcggacaggcgaggtgctgatcatcgtcgtggtcctgttcatgtgggcaggtgtcattgccctcttctgccgccagtatgacatcatcaaggacaatgaacccaataacaacaaggaaaaaaccaagagtgcatcagaaaccagcacaccagagcaccagggcggngggcttctccgcagcaaggtgagggcaagacctgngcctgggtgggccaccctgtgcctcatgctctggtaatccctggactgcagagggggtcagctcggggactggcatggcgacagctgggcagagccagacttggctgc

SEQ ID NO: 93502 - DNA, 606 bp, Homo Sapiens
gaaaaaaagaaaagaaatgaaatgaatccctgttccagttgaattccaaagagtcgtgtgacttgtccagcgtcacaggttgttaatggcagaacttcccttaggctgaggtcccctcactgcccagccctgcccaaggactcagaccccagccccggaaagaggccctcctgccacagcagctgtactcacagcacccacgtgcttggcactgcagaccgaggcgctcggtctcttcttcctcttctgcccagaacaattttacagaaaaacaaagcattgccttgggaatatttcagtgttatttgcccctgaggtttctaggaacactggacttgtaagtactataaagctcacatgcctgttacttctgtgcaaatggagccacctgaaagatggtcacaatggtggagttggggagacttgagctggaatggtggttccttccctgacctgcttgtgaactgtggtttccttgcctgcagtagagataatacgagacactagataataccagtcatgcctcagggtcatttcaagggctaaactacatattgcacagtgcctggcacaataaaaaaggtctcctcttttcctcctccttct

SEQ ID NO: 93503 - DNA, 276 bp, Homo Sapiens
atttagacctatagcaaggccttgggagaaatggtggtgcagcaggagagcaggaacctaaccattgccatcctaaggccctccattgtgcggagcaacgtcgcaccagcttttcctgggttgggttgataatctaaatggatgtagccgactcattattgcggtatgtatagggatgaagaagtaactgtaatgtagtggaggaatagtaagaaaattcttagtgctggcttagcttaattgatccaaaaacataaatgctactttactatcaaa

SEQ ID NO: 93504 - DNA, 666 bp, Homo Sapiens
  misc_feature (412)..(470): n is a, c, g, or t
ggggccgccgggttgcgtccgcacttctgcgcgctggcccctcccttgctcctctccctagcagtctccagggttttaccgggaggacctaggcaacggcctgagactccgaggacatttttaaagattggaatgatctcgttcttgaaacctaggtgggatacgatcatttaccagactctatgttgaagatgcctggactaacctactgaagatacgtggttttaccaacagccagcaccaataggaagatatgaatgaagccatctgagaccagccatctggcagccaaactgccaactgactgcaaatgcatcaatgatcccactgacaccacgtagagcacaaatgagttgcctccactgagcccagcccaaattgttatcctataaaatcataaaaacataaacannnnnnnnnnnnnnnnnnnnnnnnnnnnnnnnnnnnnnnnnnnnnnnnnnnnnnnnnnnaatgtattagctagagcagctgtgaatggcactatttgcttagttgattggctgaaatttggactcactggtaggttacatttaatggtgttgagttgccagaatttctctggaataatgtataggaaggattctaatggcctaagccattagaatctctaaggagatagaaataaaggagtgatttattatatgt

SEQ ID NO: 93505 - DNA, 841 bp, Homo Sapiens
accaggcagagtctttgtcatgactgtactggccaccagagttcacctcacctgccagcccagctgaactgggatggctgcctctaaggctgtgttgaggccatagctgggctcaaggagaaacagtaccggagtcacactgaaactttaggcagcatatacctccatcaatatgatcaatgaggcagtacacgagagcacataggaaactgccaaggactttaccaatgtccgatgatgatgactgtcatctcctcagaacaccagattcaaaaaccataagaggcagctccaagtcctctatccccacatttaatattacaatgaaaatactctactcagggataagctctgagagccactaagaaaatctgaggattaaggaaatggagagtttgtaattactaagatataacaaactgcatttctagaaccccattttttcagttaatgaaaataaagctgctagctacagttttaaataatttatgtgttgcaatcatactcaaggacacaaaactatgagagctggtataagaataaaccactgcatattattatacaggtgaatgtcccctaaagactggtaactggctaccggcttgcactcagcaaagcactgcttctgcaactcaacctaaagaaaactgactgtacctctgcattcactgccaaaatctggaggttcagaacttacaaaataaagcccttcatcaactgagccctcctggacttctccaatctaagcctgggtttgcctcaaagcatgcttcctgtaccacactcctaagggtctgaaattcatgttacttcctgaagtaaaatgcccttccctctcttc

SEQ ID NO: 93506 - DNA, 872 bp, Homo Sapiens
ttcagggcttaaaagggagacattcccaaagaagattccgtgggaagtctcctacaagccccgaaggaagggaatctctctcctcataccttgagtttcctgagtacaattattatagatatacgaagatctctgtgctcatggagaatttgtgtcaagggatttgtacagccctgtaggagacacctccagagaaagtaacagctctcaattgattagctgagccagaattagcttctgttacttacaactgtgagtcctgactgaaaacatatttcttcctttgaagaactgttacctgtaacaggctaagaagaatattaagaataaacagatgcttttacagctcgccttggcgggaagatctggcacaaatgaagtatctataaggagcagcagagtcaagactggatttagtgacttgcttcatcaatggaatacactcaaataacattttggaatttctgagatttcataaaaagctgaagggcttctattgggcttcctgaaatgctcccttttggatccctgagcagccatgtgagtttaactactctgcaggagagagtatgtgaaaaggaacctacctaagcccagcctccttgtcatccacaggaagacaccagacaaatgagttacactgttttggactccccaacacaacccagccaccggctgaatgccaccaaattaccttctagttaaaggtttatggagcaaacgaatcacctattcaatatctgcttgaatttctgactcaaaatacatcaggtataaaatgatggtttttttaagccactaagtcttgggggagtttattataaagcaatagataattttgaaaataaatagaacaagctgaagtcctcaaa

SEQ ID NO: 93507 - DNA, 829 bp, Homo Sapiens
gagagagtatgaagtcgacggcgcgccgaattcggcacgagggcggtggcagcgctcagggatgcgaagccggagccccccgcggcccaagtggcactcaagagatgggtcctctcagtcggactcaggagaggagcagtcacggggccagtgggctcgccggcgacggcgcgcacgctcgtggtctcctagctcctcagcatccagctccgcgtctccagggcgatcccagagcccccgggcggccgcggctgccctgagccagcagcagagcctgcaggagcggctgcggctgcgggaggagcggaagcagcaggaggagctgatgaaggccttcgagacgcccgaggagaagcgcgcacggcggctggccaagaaggaggccaaggagcgcaagaagcgggagaagatgggctggggtgaggagtacatgggctacaccaacaccgacaaccccttcggagacaacaacctgctgggcaccttcatctggaataaggccctggagaagaaggggatcagccacctggaggagaaggagctgaaggagcggaacaagacgatccaggaggacaaccggctggagctgcagaaggtgaagcagctgcgactggagcgggagcgggagaagccatgcgcgagcaggactggagatgctgcgcgcgaaagggagcagacacttcagactgggagagcagagacactccactccgcaggcagctgcttcagatccatcggacggcggccaccatgactgtgccatctccgtgagagcatctgctgaatctgaccacttctcagccctgcaatgagcgcgagacagtatgag

SEQ ID NO: 93508 - DNA, 931 bp, Homo Sapiens
  misc_feature (861)..(870): n is a, c, g, or t
ctggtaccggtccggaattcccgggatatcgtcgacccacgcgtccgagaaagctgtggaacgctacctcttcctttgagaccttgtggagaagggtctgaaatggtaggcaaagagaatagttccccagagaataaaaactggttgttggccatggcagccaaacggaaggctgagaatccatctccacgaagtccgtcatcccagacacccaattccaggagacagagcggaaagacattgccaagcccggtcaccatcacgcccagctccatgaggaaaatctgcacatacttccatagaaagtcccaggaggacttctgtggtcctgaacactcaacagaattatagattctaatctgagtgagttactgagctttggtccactaaaacaagctgagctttggtccactaaaacaagatgaaaaatacaagagtgactctataactctggtctttaagaaagctgccttttcatttttagacaaaatcttttcaacgctgaaatgtacctaatctggttctactaccataatgtatatgcagcttcccgaggatgaatgctgtgtttaaatttcataaagtaaatttgtcactctagcattttgaatgaatagtcttcactttttaaattattcatcttctctataataatgacatcccagttcatggaggcaaaaaacaagtttcttgttatcctgaaactttctatgctcagtggaaagtatctgccagccacagcatgaggcctgtgaaggctgactgagaaatcctctgctgaagacccctggttctgttctgcctccaacatgtataattttatttgaaatacataatcttttcactatgcttttgtggggnnnnnnnnnnaagtatgtggaaaaaatgtgatggctcagataagtacatttatatcagcttcagtgttaaa

SEQ ID NO: 93509 - DNA, 337 bp, Homo Sapiens
gtcgcccagtgatcccgccaagtatattcatcgctcaccaaggaagagacgttcaaggctattaccctgggcagctggcaagactccattttgatcatagtgcaaagagagctcccagacattcaaagcctgccgagccatggtataaagaaaccacttaccgacgagactattctctgccattttatgagattgattggaaccagaaattagccacagtttcgctgaatcctcgaccgcttaattcactgccagagctctactgttgtgaagagagaagcagctttgaaagaaatgcttttaaactaaaataaccacggcattcgaacaaaaaaaa

SEQ ID NO: 93510 - DNA, 565 bp, Homo Sapiens
  misc_feature (359)..(359): n is a, c, g, or t
  misc_feature (421)..(422): n is a, c, g, or t
  misc_feature (471)..(473): n is a, c, g, or t
  misc_feature (503)..(504): n is a, c, g, or t
  misc_feature (531)..(532): n is a, c, g, or t
aactttcacagccccatgatagaattcctgccgatgtgaagctcggccaaggcagcgaacggcatcaaaactccaaacacttttagtccctaggaagaccctcggttaagatttctccccagagtgcccgggccctttagtcctacaaaaccaaggaaagggagccagcatagctgcatccgccaggggatgcccaccacccacctgtcccccggctctgctccagcatccgtctgtcctctttagtgccatatttcaccctcagccccagtgcaggtgcccgcagccaagcccacaccagctctggggcacgcctgttccaagttgcatttgagatacttttcgcaagtgtagagagnttgggtgctaaacgttgggaggtttgtttaatattaaaatatataagaaggtaggtggggcnnacagtgggctcacatcttggtaatctccaacacctttgagaggccaagnnncagaaagggattcaccttggaggccaggannaccttaagagcaggggttggacaacanntagtagaagattccccccattctcctacaaaaa

SEQ ID NO: 93511 - DNA, 499 bp, Homo Sapiens
atttctcttatccacaggttgcagactggtggcctgcatacctgttttgcttcctacagtagtttaaaaacagcattttacgtaaaatttcagatttcttagaaaaaatcagtagctgtgacaacactgggctggcatttccgcacagaaccagtcagcaggaactgagcagcagggcccttctgggtgggacaggcactcaccagtgtccccacactggcccagggactcatttattcgcactggcacctgcaggcatatgaggctgattcctgccaattcagcctaccccaaactcttgtttcgccgtgtcttttcctttctgccttgctgcgtcttaagtgtgcctctgacccaccctcatcactgcactgaggtttatcttcccccatacagctgtctcctccagttgactgcaagcccgagggcagaaacaatgcttccataaggttctcagtgaatgtacattgaataaacacacgtcttgcctttgaaaaaa

SEQ ID NO: 93512 - DNA, 619 bp, Homo Sapiens
ttggaatgatcagatacagacttcaaagcagctatttataaccagccttcagaaagtattggtgaatattcttaaacagaatggaaatgacaaagcatggagtccataaattagatgatagtttggaaaaagatataaacttacaaaccaagaagctcagtgaaccacacaactggataaattaacaacaaaagtccaagcttagacacatcataaagaaacttctgaaaactaaagaccaagaaaaataagatcagccagagaaaaacgatacatttcattcaggtgaacaattctttgaaagactggatcttcaccagaaactatagaggccagaaagaagtggaacatttttagttttgaaataactgtcacccaagaattctatatccagtaaaaatttctattttactggaataaaagaatgaaataaaataaagacattctcaaatgaaggcaagctgaggaaattcataaccaaagaatctgctttaaaaaaatgttaaaccaagttcttcagacagaagagattactgggggcaattcaaaactttgggaatgcaggaagaacatcataaatggcaaaagtccacataaatatgaaactattctttaaatc

SEQ ID NO: 93513 - DNA, 728 bp, Homo Sapiens
  misc_feature (497)..(532): n is a, c, g, or t
accaccccattggctcaccttgtatcagcaaacaaagtacttcttcagggaaacctgaaatttctaatgccttgaaaagcatattacaaaagtaatgctaccttttgggaaacaaactgccccgttaactccagatcattgcactggaatgtaatcaagaaagttagtcatgttttatgtaccatgttttcacacgtgtcacttctcttcgacttcctgaaagcgaaagctttacctcctgcaaatgtcagcacatgtagtaggacaccagtatcctaggacagagagccataagtagccctttggaggactgatggtgtcaaccaaaggcatgtgattgattaatgattcccccttagaaagcaagtgttaccaaagttgtgttatcttgaaagcattacaggtaagcgcatgttatggttatttatcattgtttaatgaatagtagaggtgtcaagggactatgtatacatgattagggtaagatagaatgtatnnnnnnnnnnnnnnnnnnnnnnnnnnnnnnnnnnnngctgaatctttggtgtattgaaataggcagcactctgaaagacagaagcttcgtccagccactcttcagcacattcctttactaagcagtttaaagccgtcctagtggagcaagccctaaagcagatttaatttttgccattttccaagaatgacggtggtggcttttagtcagaaaatggccttctgtgctttca

SEQ ID NO: 93514 - DNA, 583 bp, Homo Sapiens
gcaattgcaatacagtggtatttgtgtatccgaacatacgaaagcttctacaaggtgcggatccataaggaagatattaggaaacatctaattgaagcttgaagaaccaaaatgaggaaggcagaattaggaaagaccctgtccggtgacgcctccccttctggtttccatctgtgccccctctcaggagccgcgggaacacaagcctcgagcagaatccaaccacttgatgattcgaaatcaccgcaatgccatggaatgtaaaaactgctctcgccacgtctagagaccgatgcctcttcctccgctgggaacacggttcatctccactctccgatttcacggttttatttgccctctgggacgcgctgacattgttctaagcacattttctaagtgattgtgtgagtgtgggtgtgttttgttggacttgaagggagtctaatttctagaagttcctttcaggagtctgcctttactgcaaagttgatgtattcgaaaacacagtaactcttaatggcaacagaatttgtcacctaattaagtgcaattcggtcataaaagaagccacagaatctgcaaa

SEQ ID NO: 93515 - DNA, 838 bp, Homo Sapiens
aacaggcttctgagagatgaacatacacatctctattaactccacattcggtgagtgtgggtaacttgaaattggctgggtcaccatttacatcatagaaattggcaaatagtacaaattagggctccctcacccctactcgggcatagagctggtacactagcacacctctggttatacatgcatgcgtgtgccaccagaacaaaacacctaacagcaggcacgttgcctctgttgcccaccattacagctcccgcacggagcagacagactcatggcaggaattgaatgcatgtttgtcgagtggaagcatgaacaaatccacaaaatgcccaagatgaggcaaagaaggacattggctcaaatgttaaacataagttaggagctgagataatgcccagaggaaaaatgttctgtaattctaagtaaaacccatctctaaggcaggatgctgcttatgagggctccacagacagatgggggaggcctgggtcctgcccttggaaagagtctgacagctcgacttctggaaacagccatctgcacaggtcaacatcttcttagctgacagggagcagatttgcagaccacatcacatttgaaattccagaagaaacttcttggagtctgctcttgtgcaaatgagcctagaaagcccgttaactttgggtggaggcttccactgtttggctatcccaagtgggcccaaagctaaggaaaacccaccagccctttgcttcctgcttcctctatttgtttgccccaggaaatcagaggtgatgacatgatttggcttgggcacgacaggaataaacgatatttaagagacgtcaaaaaa

SEQ ID NO: 93516 - DNA, 450 bp, Homo Sapiens
gcggccgcagcgagtgcgccccgcgatgcagcgggctgtggagggagcctccatggagtctccatcaaccattgaggaccaggagacggtgacaggcggtagagaggcctgggcagggccagcgccccgggctgcggagcacaggacggcggcgcccaaggacgccccagggcaggcctcagcccctccaaccggtgggagcccagctccaggggagcacgcagctccctccatcttggttgatggaggcggggagctgcgtctgggtctctccaccgtcgtgcccgtcccctgtggccccgcggacgcagacgccagcagccggggttgttcccttggccgaatgccagagtccagttggggcttccgaggaaagtttccggcccacgggtttggtttttagggggtccaagttcccacagtcgttccgacaaaatggaggacgtcgtc

SEQ ID NO: 93517 - DNA, 603 bp, Homo Sapiens
aagggttggggtaggggatgagtagaaataacattccccttcaaggctggacacataagggaaagagggatgacatgtgaaaaggaagcgtctctattcccttgtcttttccagtatgtagtgtctaggaagaatcagaagaaacttgtgcttttgggcccaatctctttaggttaggaaagtcacctttatataagaatctactcaacccacaggctttgaaatggtggcaatgagtagtggcctaagggggtgtgactaacaccaagtgctaatctcatgcctgggttgtgcaggtagcaagtaccatacttaatacttcatacaatttataaagagcacttcctttttctcctatttgtctcctatttctattattacaaaggaagctgtgaaggactgagctatttttatctgttcactagttctcactctattgattcttcaatctatggggacacacaattctgggagaataaaggtaagtacttcttttccttgcttaggaaagagggtagggaaaataaaaaagaatcccaaaatgacgcatgctaggaaacttctggctgcagtagagcaaagaggtagatagatcctttccct

SEQ ID NO: 93518 - DNA, 258 bp, Homo Sapiens
tgagtctgccggcgctcgcctgcttcctccgaagacttcagggagagtctgcgagctgcagtccccgcgtgtgaggcacagaagggctggatgtcagaaccgcataattattcattaaactacaaactttttttaacccaaagaatatcggtgatttttgtccactgcgaggagaagaagagagagcccagggctcatgaaatgcagcagaatccttatttataaacaggcgggggtagtgatatatgcaaccccagc

SEQ ID NO: 93519 - DNA, 480 bp, Homo Sapiens
ccgatttatggtccatttaatgttaggctaaagcacctttaatcatttttgttgttttaagataatgtatttgtgaagtggataaacactggaaatagggtgcttcttctggaaagttcagtgtaaaacacaaacaaggctttggcgggtttatctggctttataaacaagtctgaaaaatggatgaaagctaaatatataaagcagttggttgtctatcttttatcaattttactcagatctgtatttaacacttacttatttgttagtttttacattcaaaagaaatacactttgaactttggctaacattgtaggatattttttaattgtttctacatttttaaagcatgattcatcatttttgtaaacttagatcattttttaattgtcttttcttttccaatagaccagttaccactcatgtgtctgcagaacctctttattgtattcctataataaatgtaaaatatttgtagc

SEQ ID NO: 93520 - DNA, 416 bp, Homo Sapiens
acttctaataaatcattgtaagactatgaatttgatgttcttcccagtccaccactctaccttcattctgagttgtgtgagtctgtgagaatacttttggcatgcatgaggtggggtgatgtagatcctggtccagagcaatcactgtcagttgttgaactttggatagaaggcccccatacagacattagtgtcacacagtggaagggtttcataggcctttagtggcactcacaagtaggcaaaacgtgacaagttttgaagcagagaatgtcttcattctcttctgtacctgttgtgcttccttttcatctttgcttctagttttcagaattctctcaggcttcttggctgttaatcatactaatttctcgtgcatcctaggagtaatgtaaagttgaagtaagtatgtttat

SEQ ID NO: 93521 - DNA, 473 bp, Homo Sapiens
tggttcatctttgcctctgtcattaaaaggcacttaatttatttaaaatttaatttgtatttagtataatggtatagatccaccttaacctggataaatgggaactatctactgcacggaagaatctttttggcagtattcccacttgaggcaattattccaccgtatttttgcggtaacctacttggctgtgtcagctccgctggttattaaggtgttaatcaaaagctcatgaccgtatcttgcagccacatggagaggagtgttgccgtccttatccacacagtcaatttcacctccattctgaatgagggtctgtgaccgtgtgaaccttccatggaaagctgtcatgtgcagtgggacttttgccatctttactctgaatgttaacatctgccccgttgtttaataacaattcaggacacaaagcaccctgaagtggaggccgcagcaaaatgcaaaggggtaaacca

SEQ ID NO: 93522 - DNA, 966 bp, Homo Sapiens
atgaagataatgccatgtacctcctggtggtgaaccatccagatgccaagtccacagtggagttgtttaaatttcaagaagaagaaaaatcgcttttgcatctaaaaaccatcagacataaacttctgcctaatttgaatgatattgttgctgtgggacctgagcacttttatggcacaaatgatcactattttcttgacccctactaacgatcctgggagatgtatttgggtttagcgtggtcgtatgttgtctactatagtccaagtgaagttcgagtggtggcagaaggatttgattttgctaatggaatcaacatttcacccgatggcaagtatgtctatatagctgagttgctggctcataagattcatgtgtatgaaaagcatgctaattggactttaactccattgaagtcccttgactttaataccctcgtggataacatatctgtggatcctgagacaggagacctttgggttggatgccatcccaatggcatgaaaatcttcttctatgactcagagaatcctcctgcatcagaggtgcttcgaatccagaacattctaacagaagaaccctaaagtaacacaggtttatgcagaaaatggcacagtgttgcaaggcagtacagttgcctctgtgtacaaagggaaactgctgattggcacagtgtttcacaaagctctttactgtgagctctaacagaccgatttgcacccatgccatagaaactgaggccattatttcaaccgcttgccatattccgaggacccagtgttcttagctgaacaatgaatgctgaccctaaatgtggacatcatgaagcatcaaagcactgtttaactgggagtgatatgatgtgtagggcttctttttgagaatacactatcaaatcagtcttggaatacttgaaaacctcatttaccataaaaatccttctcactaaaatggataaatcagtaa

SEQ ID NO: 93523 - DNA, 384 bp, Homo Sapiens
aaggggaggagagatgggctggcagatcagaaaggcccacctcctcacacctgtctcctgccttccaacttctgcccaccttgtctgggtcttatttcttggctttcttaatggtcttaagtgtgtctagctgcttggacattgcaaagaatgttcacttctattatttttgtcgttagtatatcattcaaaagaagcactccccaccagccttgtggactgttgtgagcagtctgtgagactggatatcaaggtgctttagggacttttagacaaagccacagaatcacaaattataaggcctgatttgtccacagggtggtgagccagctcctcccgccactgtcccctccccaccaaataaacatgatatttcattctcaa

SEQ ID NO: 93524 - DNA, 220 bp, Homo Sapiens
tgactgttgtgagcagtctgtgatgactggatatcaaggtgctttagggacttttagacaaagccacagaatcacaaattataaggcctgatttgtccacagggtggtgagccagctcctcccgccactgtcccctgaccccacaattctttccatgagccctgtcttcctttttcccatctccacgggccttggcaccagcccctgttctctaccagcc

SEQ ID NO: 93525 - DNA, 428 bp, Homo Sapiens
  misc_feature (88)..(98): n is a, c, g, or t
ctccattaaggaagctacatgcaaaagatacaacatacagaatatctttaaataacacaactcccagacagggacaggacaatatttnnnnnnnnnnncattctgtctttgctttgctatgttctatttttaatttttttgttcctctggatgaaatttctgagatgttactagatgggggatgtgggggtgctaggaggggtgggagaaaagcagaaagcagtacaaatacgagacttcaagcagattcttagagcgactgggaggtaaagacatggagagggtttggtggaggctctgggtgctacgacaaacacacgaacactagccgaactttccaaaacgtctattagtccaaggaggaaatggatcaaggaagggacgattccgcctgggctctgcgagaatacagaccctccccgggtaaa

SEQ ID NO: 93526 - DNA, 1336 bp, Homo Sapiens
  misc_feature (943)..(966): n is a, c, g, or t
tatatttaataatggttcttttattgcttctagtatcaagattattgagaagtcaaatgaagttatgctgacgttatgattcaaaaattatcttccaaacatttaacgattataatttaagataaataacacttaaagaaagcaaaccttttataatatgactttcaatatacagccttactttaattcagtctgattccattacatttttgttattttgtattggtcctaaaaatttaaaaagaattgtatttctatatatagaactgcctgcataaatccacttcaaccttcataaaatggttacattagtgtgtgatcttgcaaaactaataattttcaaacttttgaacttagaatgaaatgtaaatttaatacaaatagtctgactatgtacaagagaaggtaaagttttcaattctcgtattatcagaaacatcataaagaaagctagatttataacacacttctattcctatgtgcatctgaagtatgtacaataaaacaccaacacagctttcatgtgtcaataggggaagtgcaagcaagaatgacttgaagtatccaataaagcaatctctatagaccccaaaatcaggctaaaaactgcaaacagctgactgcatccttgccagttctcaaagaaaaatttcatcactaaaaaataggtgtcaaattcactgaaaaactaagttgggttctttcattaaacctgggaataatgtaacatcaagtatttactatttttgcaagagaaataaaattggcagttccatttttacattacttaagaaaaatttaagagtgtttgaagaactgggacaagacattccaaacctacgacctaaaaatgaagcaagggatacatactgtccttcagcacatttccccacctgatacagagaaatttaccattagaatattagctgtgtgtggcaaggcnnnnnnnnnnnnnnnnnnnnnnnnaatcagacactgtcccagtctgttgacaaggacaaaaaggctctgaataggtcaccattcttcaattctgaataaatttcatatttaagaattctcaaatgcttaaaatggtggtcttttcagctacccatcctaagaagtcaagtacaagcatgcaagtaaattcacaggcacagaggatccatgttaaaaacagttaaggtagctgtgatgcaacaccaacaatttgaatggccctgacacactcaaaatattatcttaattattcaacaaaatcctgaagcaaactcttgctagtcttggtacactgctaaacactaaagtagcatgtttcttccatggttttagcttagctcaaggaacttttaca

SEQ ID NO: 93527 - DNA, 413 bp, Homo Sapiens
ttcctccacaagataattttagtgtatctgtttaagaatataagagtggccagaagacagaaagcagtcgtcagtcacatttcaccaaaatttacatttgtctcaggtgcattaccgcagagctttattgtatttctagtattagctatccctgtcattgctgctacttttttatcatcttcaagtaaaatttaatgtcaacaaaaattaaggtagttaataatactatagtatactagtaaagttgtctgacacagacaactaggaaatgtgatttttactttaaaatgtattttagttttagaatgtctaaattttagttttagaattgtctaaattcgagaattcataaagctgtagcccggtggaaaaagttatttgacatctcagaaattaaaaattgcagagattta

SEQ ID NO: 93528 - DNA, 638 bp, Homo Sapiens
  misc_feature (92)..(130): n is a, c, g, or t
atatttgccagtgtttagaaatgtttgctttgtttgtctaaaccaattattaatttggcacatttaaaaatgcatttctccccggaccaccnnnnnnnnnnnnnnnnnnnnnnnnnnnnnnnnnnnnnnntctcctcctgtctctttttaaattggcaggcaaactttttctgcctagtgagtcagtggagatgagaacattaatttatttgagtgtatgtatgtcaacgctgcttgaagaaaacgtgccagtgtggtctcaacatgtgaaacattttaggtcattctattctcacatttgccccctaaagcgctgttcaagttatgtattcaacatactgatgagaaacacattctgctatttaataatgaagaagaagagtgaaacagagaagcgctgagctgaagaggagcacacaggtgtcccaatccaatttgaccattagctagctcttagatctctgaaaaatacatgcaacctctcagtctttcaatatctttagatgctaaaggcagactatgtcttcagttgtacctgaggtcatttctatttgcaaagtgttatgattacaacctgattttaaatgtaagtccagacctccttacaataacagcaataaacatatggtgcttacaaa

SEQ ID NO: 93529 - DNA, 167 bp, Homo Sapiens
aatatatacacttataccagaaacagttatttttttcattcatttttaggagtgggtacgtttgtattcaagtctaaaaagatgctgactaaatccatcaatagaagggaataagataagtgtagtggttaaaagagacattgttttatgaaaaggctagaatgacc

SEQ ID NO: 93530 - DNA, 434 bp, Homo Sapiens
cacaaggaaccctcaggccaccctccacgaggtgtgactaactatgcaataatccacccccaggtgcagccccagggcctgcggaggcggtggcagactagagtctgagatgccccgagcccaggcagctatttcagcctcctgtttggtggggtggcacctgtttcccgggcaatttaacaatgtctgaaaagggactgtgagtaatggctgtcacttgtcgggggcccaagtggggtgctctggtctgaccgatgtgtctcccagaactattctgggggcccgacaggtgggcctgggaggaagatgtttacatttttaaaggtacactggtatttatatttcaaacattttgtatcagggaaacgttttgtatagttatatgtacagtttattgatattcaataaagcagttaatttatatattaaaaaaa

SEQ ID NO: 93531 - DNA, 444 bp, Homo Sapiens
  misc_feature (116)..(137): n is a, c, g, or t
gactggtcttcccacctcagacgtccttactcagtccatcatctctttcaggattttcttctgtggtctttttcaaactactagctgacttttcccttttatttcccactaggaannnnnnnnnnnnnnnnnnnnnnagccatttcatcaaatcaaactcactgccctctttcatgccccttccttagttccccaacacaagcctgtgcataagcttgaacatttctacctttgccaatggtatttccccttctggcttaccctgcttcctccttctcagacttttccagtcttgattgtcctctccataaacacaagaatgaacttcaaggcaagttacttaatgtcttagagcctgtttccccatccataaaatggggctataaattcctcaggatgggatgagggtacaaataaaaaatgaagcaggatattctttgtaaa

SEQ ID NO: 93532 - DNA, 398 bp, Homo Sapiens
cggccacatcaaaacttagttatttctagtagcaactgacgattgggagctcttaccttttggagtcccttctatcccattgaaagtgtgcgggtggtggtttaaaaatgtttcagctgctctgcgcttcagccccacccataatgacatctgctccacaacaataagaccgaggattatattatctccaaagtaaccatcggcctatttttatgcctactttggttattgaaggtgggcttttggatgatttactgtgtccatgaaattctcaacttgagcggggcctccattgggaagacgtttctaatcctggctgagtttacgcctgtcactgagttattcatgcaccctgccctttcaatagatactattcctataaaatgaaatttagaaaa

SEQ ID NO: 93533 - DNA, 234 bp, Homo Sapiens
tgtgcccgtgaaaactgcaggctcagccagcaaaggcaggagaagcagctggacatcagagagaagtgccttacttcagagggacagctcgatggtgtaaatctcaagaagaatcccaggagacagctggactttgagggaagattaccttccttctctgtctgcttttcagctcctcttccctctgagagccacgtccaacagcaataaaatcccccacatttaccatcaaaa

SEQ ID NO: 93534 - DNA, 464 bp, Homo Sapiens
ccccatttatcaccacgtaccagaatattgagacttatccaattctaatgatgtcattttagcccacaggggcagagaccaggagtccacatcctacatgtcttccaatctttctgcctcaaaaccctcaggaactgcttctagggcatttgatatcatctcactgacttctgagaaggagcatagacaagtacaagcatgttgtcttactcagcactcagccgcacacatcacgatgggcagaagtcactatcagtgagttctgttgcccttgtacaaagaggagttccacttcattataaagaaatggagcgagtatatttttaataggcccaactctttagctatgtttttctttttatcaggctttacttatttagtttttctagtgccttgaagtatattacttatatttctttttaatcttttcagcctcagtaataaaattaatataaatgagaaaa

SEQ ID NO: 93535 - DNA, 421 bp, Homo Sapiens
cattatccagcacccagctacagaccagagagcttcataaacctatttctgactgcagggagaggcctatactagtccacgtcatggaacacctatggatcaacactggtcaggaggagacacgaaggccataccgggagctgctctctgattaccaggactcctgaaacacagagctcatggtgtccgtgggatatgaggcagaccacatccagtccttgttagaacaaaaatttgatgataccatggcctggtactgaatcctgggctacaggaaacctgatgcagggctccatcatcacagcaaagtctttgccttcagtggatcccacccaacagctactagccttccccatcacctgaaagaaactcttatgctttaacatacaaaacttgttaaaaacattgggaaaaggtgaaa

SEQ ID NO: 93536 - DNA, 790 bp, Homo Sapiens
  misc_feature (331)..(353): n is a, c, g, or t
gcctttaaaacgttcataaataacctgctgctgctggcacctaggagccaactgcagcaatgttaagcaacaacaaatttcatagttcaagaggcacagttaagggaaaaggttgctcagaaaatcactcttatttagcacaaagatccttaaaaattgcatgaaatcagtgaagtaactatagaaaccaatttcttcagctccatatcacacgtctcacacctcaattgtctttattatcatctgctgtcagatccttaatcagaaatgtgaacaggcttgatgatttattcaggagggaaaagaatctgtaggtcaagtgaaaaatttnnnnnnnnnnnnnnnnnnnnnnntgcaccttcaaccttaggtactttcatctcattctgttctcagcagctctgggggcaactccagtgagatccaatattaaggctcaattaaaataagctccaattagtggagcttttttctctggggctagaaaagtcaggaaatggatattgggaaatgtaaaaagtcagctactgagaggaggctgcagacataaatgaacttatttgttgatttctacagttgctatgcagaggcctctgggagtaaaagcttaaccagtctaagctataaactaaaacccctgcagctaaacatgaactgtgtgaaacaagggctccattccagaacagaaaactgctgggcccagaaaattaaaagccagaggcattttccatttaaaactaaatcccagcaccgcctcccagccaaagaattataagcagtatcagattta

SEQ ID NO: 93537 - DNA, 1186 bp, Homo Sapiens
ggtccggaattctcgggatgcaactacctgtaaatgtcacgtaacacccaaggagactgtgttacttatctgctcaccagtgggaggagaagattgtctgtctcagctttgttaaccagctttcttgggatttctccataggcaatggtggcttgctatccgggaaatggaacaggttatgttcgccacgtggacaaccccaacggtgatggtcgctgcatcacctgcatctactatctgaacaagaattgggatgccaagctacatggtgggatcctgcggatatttccagaggggaaatcattcatagcagatgtggagcccatttttgacagactcctgttcttctggtcagatcgtaggaacccacacgaagtgcagccctcttacgcaaccagatatgctatgactgtctggtactttgatgctgaagaaagggcagaagccaaaaagaaattcaggaatttaactaggaaaactgaatctgccctcactgaagactgaccgtgctctgaaatctgctggccttgttcattttagtaacggttcctgaattctcttaaattctttgagatccaaagatggcctcttcagtgacaacaatctccctgctacttcttgcatccttcacatccctgtcttgtgtgtggtacttcatgttttcttgccaagactgtgttgatcttcagatactctctttgccagatgaagttatttgctaactccagaaattcctgcagacatcctactcggccagcggtttacctgatagattcggtaatactatcaagagaagagcctaggagcacagcgagggaatgaaccttacttgcactttatgtatacttcctgatttgaaaggaggaggtttgaaaagaaaaaaatggaggtggtagatgccacagagaggcatcacggaagccttaacagcaggaaacagagaaatttgtgtcatctgaacaatttccagatgttcttaatccagggctgttggggtttctggagaattatcacaacctaatgacattaatacctctagaaagggctgctgtcatagtgaacaatttataagtgtcccatggggcagacactccttttttcccagtcctgcaacctggattttctgcctcagctccattttgctgaaaataatgactttctgaataaagatggcaacacaattaaa

SEQ ID NO: 93538 - DNA, 561 bp, Homo Sapiens
  misc_feature (510)..(510): n is a, c, g, or t
ctgtaaatggacaaagcattagatttggaaaatcactattttgtaaccatcatagttaaagactggtttgggttttagtctggaaagaatcgccaagggagctcctgataaaggaacagggtatttgcacattgcttcccagagattgctagtagtaagtaccacacatagggcaaaaccaggacaccttgaccaggcgctcaaaagtaacatcaatgaagagcagatggagagtatacttgagaagggcgttaagcatgaataaacaattcaaatgcaaaatgagtaacaatttacaagaaaaattgccctgtactccaaaaaacatagaggtcatggaacacataaaggctaaggaactgttccacattaaagacaactgagaacaactaaattcaatgatcctgtactctagaggggggggatctaaaacaagctaccaaggatactgggacaacaaaacgaatatggatgataaagagtatcaacattccctgagtttggtaattntactctagttatatgaaatattcttgtacttggaacatatgccgaagtact

SEQ ID NO: 93539 - DNA, 590 bp, Homo Sapiens
tttagcaagattgtaaatgtgccgctaatgtgcaacttttattatcttgacaacgaacatgaggtttccattttgggaagggaacattttagggaaaataccgtgattggcagcttgagctgggaggtacagtcaccaggacatgagtacccacaacacccgaatcacatggggagctactcagtatgaggaaatcagatgactttttattgttttctttctgtggcgtgaatatgtctctctttctccagtcacctcttcttccctcttgttatgccttttctgttcttcccctgtatcctctggctgaccagcatctcctctgcccctggtttggttgggttactggccaggtccaggattgttttgcccataaaaatgcagttacacttcaagcttagaattaagaatcaattgattcttagacgaacaaaagaaaattctactagaaattctagatcttggttttcttaggaagaccgtgtggcaaactctaaggtggcacccctaatctcttcccctgatggtcattgctttgtgtggctccctcctcttgagtgtgagttaggacccgtgacttgcttctaagc

SEQ ID NO: 93540 - DNA, 934 bp, Homo Sapiens
  misc_feature (51)..(85): n is a, c, g, or t
  misc_feature (805)..(850): n is a, c, g, or t
aaggtcccgaacgacgagcgcagcgagtcatgtgagcgaggaagcggccgnnnnnnnnnnnnnnnnnnnnnnnnnnnnnnnnnnncagtcgacggtaccggacatatgcccgggaattcggccattacggccggggcagctgcgccgcggctcacagctgacgatgggggaccccagcaagcaggacatcttgaccatcttcaagcgcctccgctcggtgcccactaacaaggtgtgttttgattgtggtgccaaaaatcccagctgggcaagcataacctatggagtgttcctttgcattgattgctcagggtcccaccggtcacttggtgttcacttgagttttattcgatctacagagttggattccaactggtcatggtttcagttgcgatgcatgcaagtcggaggaaacgctagtgcatcttccttttttcatcaacatgggtgttccaccaatgacaccaatgccaagtacaacagtcgtgctgctcagctctatagggagaaaatcaaatcgctcgcctctcaagcaacacggaagcatggcactgatctgtggcttgatagttgtgtggttccacctttgtcccctccaccaaaggaggaagatttttttgcctctcacgtttctcctgaggtgagtgacacagcgtgggcatcagcaatagcagaaccatcttctttaacatcaaggcctgtggaaaccactttggaaaataatgaaggtggacaagagcaaggaccaagtgtggaaggtcttaatgtaccaacaaaggctactttaggaggtatcctctatcannnnnnnnnnnnnnnnnnnnnnnnnnnnnnnnnnnnnnnnnnnnnnggaagtttgggagctcagaaactgcaaacacatgtttaatgaattgaaaaaagctcagctgggataaaatgaaggagcagaaga

SEQ ID NO: 93541 - DNA, 478 bp, Homo Sapiens
  misc_feature (59)..(59): n is a, c, g, or t
tgtgaatatttttgcctttggtcctgaggtggatcaccagctgaagaagcggtttgcanacatgaaggaaggtggcagaatcgtgtcctcgaaaccctttgcacctctgagcttcagaataaacagtagaaacttgagtgacatcggcaccatcatgcgcgtggtggagctctcgcccctgaagggctcggtgtcgtggacggggaagccagtctcctactacctgcacactatcgaccgcaccatacttgaaaactatctttctagtctgaaaaacccaaaactcagggaggaacaggaggcacgccccgcgcccaagcagcgagagagaaagagcaaccgcgccacgcccactaagggcgagagggcaaggttgccgcccccgccgacccccccatggactctggtgctgaggaagagaaggcgggagcagccaccgtgaagaagccgtctccctccaaagcccgcaagaagaagc

SEQ ID NO: 93542 - DNA, 310 bp, Homo Sapiens
atagtgaggcccaatacatttttgttcaatggacaaacggattcatactgtccaagagtccaagaacctgcatgtagggaggagtcatattccttatgaatttggtcactgactctcctgcaatgtcatataactaagaattctcttccacatccttgcttaatgactggaaatggccatttcactgtggccctccaatcaaccctttcccatgagctatgtaatattttaccaccttctaagattgaaactgcccactaataacttcagcctgaagctatttcataattaaaaactgttaagtatttgg

SEQ ID NO: 93543 - DNA, 529 bp, Homo Sapiens
ctcctcaaagtgtcctttccaaatatgagttggtaactatagggcatttgagaggatccgttgtaattatagtaatcagaacttttcagtttagtcaagaatctggacaaaggaatcagtcatatctgtaccttctgcagttccaacagcttatgtaatgtacatgattaggctttgcccacttagtgttcagttcattcttgtgagactcgtggaaaattcagattcttcggtgggatgtgatgaactgtgtaagggcaaatgttaattggagaaagtgaatgcttagcttgaatcgtttttgaattgctttggaaactcatgtatttttaaacttggtgtttacttgaactgttggtattcatttaagtatttacccatcacatgataactgccttccatcagatcccaactgtgattggtagcagacagatagactttaactaactcttctcttgttgctttttttcccccctaaatttctggaagactagagatataaagcactgtatgtttctgtgagaatttc

SEQ ID NO: 93544 - DNA, 500 bp, Homo Sapiens
  misc_feature (484)..(484): n is a, c, g, or t
cctgttcctatatctcaactccttctgacagttgttagagcaggagttgctcaggaagaaacgtaaattgttatctatattttttccagatctattttctccttgaatgctcctaatctagtaaaaggggaaagccacatgaaacaacagttacagtaaaaagtgacaccagggatgtatgttggcaatggtccaggtatgttctgagaattatgagacgtctacgtgatgaggtttgaggagattcagcagaagtggtgaattaagtcaaaatcaattaagtctaggaggatttattaagtacccacagtgtacacagcttggaagtgaaaatttcgatcaaacagacctctgttttcgtccttgtgccacgtaagttgttcagcagttatttactaagtgactaagctgactgggtgtatcagatgttcccagcctcagtttccccatagtttcaaaagctctcaaggtctttgaaagtggngaagcaataaaggctg

SEQ ID NO: 93545 - DNA, 874 bp, Homo Sapiens
  misc_feature (840)..(840): n is a, c, g, or t
acgtatatacagagcctccctggccctcctggaaagagtcctggaaagacaaccttcaggtccagccctggagctggaggagtggagccccactctgaagacgcagcctttctccaggttctgtctctcccattctgattcttgacaccagatgcaggatggtgtcctctccctgcacgccggcaagctcacggacttgctcccgtatcctgggactgagccttgggactgcagccctgtttgctgctggggccaacgtggcactcctccttcctaactgggatgtcacctacctgttgaggggcctccttggcaggcatgccatgctgggaactgggctctggggaggaggcctcatggtgcttactgctctgttgtcaggtggcctggctttacttggagccctgatttgctttgtcacttctggagttgctctgaaagatggtcctttttgcatgtttgatgtttcatccttcaatcagacacaagcttggaaatatggttacccattcaaagacctgcatagtaggaattatctgtatgaccgttcgctctggaactccgtctgcctggagccctctgcagctgttgtctggcacgtgtccctcttctccgcccttctgtgcatcagcctgctccagcttctcctggtggtcgttcatgtcatcaacagcctcctgggccttttctgcagcctctgcgagaagtgacaggcagaaccttcacttgcaaagcatgggtgttttcatcatcggctgtcttgaatccttttctacaaggaagtgggtacgaattataaacaaacttccccctttaggtatccctggagtaataatgacnacaaaaatcacttgcagggtcggtggaattgata

SEQ ID NO: 93546 - DNA, 476 bp, Homo Sapiens
tgcctgtgggaacagtgataggaatcctttcttaagggttgggttttacatacgtcttttaaaatagatgatatcattaataaattatctgtgggcatcatgaaaaaagtgtataacgtacaactttatgagcttgacagttggtgaaaacttttctgtttaaaattttatttggccctccccaaaagaaatgtttatttatgagtattaggatagttccagcagtaatgcctcaaaagaaccaggaggtatagtgatgtctaaaatgtggactcaggagccagactgcctggctgtgcaactagccttgtcacttcctagatatgtggcaagttaattaacttctcagtgttcttatctgtagaatggggataatcctaatatacatctcagggttatattacaaattaaaaaagttaattttgtaaaggacctagaatgatatctggcaaataaaagtgttcataaaagtaaaa

SEQ ID NO: 93547 - DNA, 513 bp, Homo Sapiens
tgtatggtctccaccagctttgacatgggtagccttcggagggagggttttcagccacgaagtactgatgcaggggtatagcttgccctcacttgctcaaaaacaactacctggagaaaacagtgcctttccttgccctgttctcaataacatgcaaacaaacaagccacgggaaatatgtaatatctactagtgagtgttgttagagaggtcacttactatttcttcctgttacaaatgatctgaggcagttttttcctgggaatccacacgttccatgctttttcagaaatgttaggcctgaagtgcctgtggcatgttgcagcagctattttgccagttagtatacctctttgttgtactttcttgggcttttgctctggtgtattttattgtcagaaagtccagactcaagagtactaaacttttaataataatggattttccttaaaacttcagtctttttgtagtattatatgtaatatattaaaagtgaaaatcactaccgccttg

SEQ ID NO: 93548 - DNA, 473 bp, Homo Sapiens
cttgatccaaatgaccatcatctctgatggagatgggttgggtacctggccttcatggcaccttcactgctagggatgctcaaggggcaggcctggggcccttccctcctgtctcttctcggtctttcctctctgagcagcctcctacctcccctgcctgagccctcactccacagccctcccaggtacctagcagaggctgtcagtccttggctcacctggaacagggctggggctgggttggaacaggtgtgtgcccccaccacagctctatgactctgttctccctccctgccattgtggactcttgtatttgagggacctcaagagagtgaggaccctaccatccactgtccatattcagtcccagccccagtgcgcttcctctgttccctccctcagccatccaattcttgagttttctcactgattggttttctttctttttccttggattaaatgtgaaagcaaag

SEQ ID NO: 93549 - DNA, 513 bp, Homo Sapiens
  misc_feature (106)..(106): n is a, c, g, or t
atggggtgctagttgctctgctgtgcggttctctgtctcctgagagcggtccacatggaaacgggagttacgcagacaacaagacacctggtcatgggaatgacanatacgaagtctttgaaatgtgaacaacatctggggcattaacgatatgtattggtacaagcaaagtgctaagaagccactggagctcatgtattgtctacaactttaaagaacagaatgaaaacaacagtgtgccaagtcgattctcacctgaatgccccaacagctctcacttattccttcacctacacaccctgcagccagaagactcggccctgtatctctgtgccagcagccaagacacagccttgcagagtcaccgctttcctgtgcagaaacattaggggccctccaggaagctgtgggggccaccaaagcctttgatgaacatttcctacaagagccccggcagaagattcagaacatcatagcacctttaatggcataaaatatctagcatatagaaaa

SEQ ID NO: 93550 - DNA, 413 bp, Homo Sapiens
ctcaaatgaccaggagtaggagctctctatatccctgctcctgaaaaacaagctaactggagtctccatcacctgccaccagctatacacactaccaactacccaactgaactccatgactgatttgccagctaatcatgcccctgacccagcccacatggacatgggaaggacatcagtgaactgtgaaaagaggcagaggtgaggagacacctgtcctgtgccacacatctatgtagttcagcaatttccagccccttagtactccaggggctctaagccacccctttgtaagtcaggatggaagtagatgacaccacatttctatctgctgtagacattcttcccagtgtctcaaaatgttttggcatctttcagtaaaaatcttcaagtttgtcagtccttgatttaaa

SEQ ID NO: 93551 - DNA, 468 bp, Homo Sapiens
caaatctattggttaatccatttgaatgccatcaacatgcctaagtattgtgtggtggatgctatgatgtgtcacacagaacttcttttaggatgacaggatggagtctccagctgtgaaagtgttgctgcagacagccctcagcttccagttcttgtaaaaatggcctcagcttcagagagctccattacccaagctcattcatttcctggggtgttctgcatccagtgagtgttctgtggacttgccagaacactcacttttggaacctggccaccatgttggaaggaatcccagagcacatgaggaggccttttgggggtgttccagctgacagccttagctaaggtcttagctaatagtcagcatcaactgctggcaagtgaacaaggcttcagatgattccagccctcagctttccagctgaaaacattgtaaagcaaatacagccatttcctatttaaaaaa

SEQ ID NO: 93552 - DNA, 619 bp, Homo Sapiens
tttcattactatcaatatgataagcaaaaatcaaaaattagtttgggggtgagtggatctgcatttcaaaatgcagatattaatttataacaaaaatactgaaacaattcaaaaaccacagcagctgcttgaaaagccataatgcaaccacaagcaaaaatggcaactaaaggctctgatgatgtaaaggcatctgaagagggctcaggaagtattaggaaagggtatttcaaagccacattaagatgggatcggatgtcgttttatctgtgttcaagctttaaggagtagatcattacgggctcatttccttccttcgattagaaaatcaacagaaacaaaactaacaaaatgtgcagaccattcctttgtatcagaatagacagaacactgctaagctttaccccatgcctgggaggcacctgcagctggcaggatgtgccacgcagcctgggctggcagcagtgtccctccataccccaggagtcagggccatctcctcttcagcatgcccttcagtaagactggatctaaatgccacaaggagacgtgggacctacccagtgtgtctgcctcagcctcacagcctgcgagaggagaagggcaacagcagagggta

SEQ ID NO: 93553 - DNA, 378 bp, Homo Sapiens
tttcctaatttcagtgacactatagtttgaagctagtttacaaacagaactcctgaaactgatttaggtaatctcttaatctgagtaactcaaaaaattaacacaagcctgatactaatatcgccctggacatcctgacagtgctcttccctactttcctcagtatcttaaatgtctctccaaaagaaatgtcacaacaggagcaacacacaatccaaaacaacactgtccacataagacgttaagctcaagaatgaggtctgactttaaacgacccttttcgatcaactccgccaggtctgagagggcccccaaaaagcaaaacccttaagtttccctatggtcttctctccattcagaaagttactagacgccaac

SEQ ID NO: 93554 - DNA, 1111 bp, Homo Sapiens
aactcatttctttaactccttcattctgtcttctttaaccatgccaatctaagtgatctctttgaactctgaaggtagtacttatgttaccatccaactgatgcttaatgtgatcacttgcattttcaacacatctttcagacattaccgaaatccacatttcattgcctgacagtttttgaggctctggaaataaagagatgtataaaataagattcctatcattaaggagttcccactctagtagagaagacagagagttaaccaataaccagaacaccatggtgctctgaatacaatacacactttgtatattacagtgaagaagggaatcaagtaatcagtgggaagactcatcagaggaggttgtatttgattggcaccttgaaggataagtggaagctaaccaggcagtgtacgtgtgtgttgggggtgaggtagagcaagaaatgaagggaagggcatttaaggcagaataaaatacggtatttgtgtgcagtccaactgtggagccaagtcttgtaaacagcatatgggagggatctagtctttatttctggaaaccccctcttccgctttccaatataacttagtacagagcacacagatattcaggtgaatatacttgttttatgtataaatgaatttaattagttgtgtgcaaaaggaaacatttaggtgatgttttttggcaatgtgttgagaaaaacacaactacctcaatatattgttatagtaaatctaaatgatgaaatactacgtagccattaaaaatgatgctaaaaagttttaaagggcactgataaaatacttaagacattacgttatacaaaaaagctgtaaggactgtgctgtccaccatgaccactaggaactggttgctggaacttgaaatgtggttagtctgacttgagatgtgctacaagagtaaactggatttagaaggcttagtatgaaaaaagagaatgtaaaatatttattaataatctttaaaatgtttattacatgtctacaagatattttggatatataacttggattttatttgaattaaataaaatatattattaaaattagcttacctgtttatttttagctttttaaaaatgag

SEQ ID NO: 93555 - DNA, 387 bp, Homo Sapiens
caacaaaatgtatgggccgatttattttcccattatattgtaacttcttgaaaagctcttttacagtggctttgtttcaataagcccttaagttaagggctgattgcacttagaaataagttgcacttagaaataattatttggctattaattggattttgacaagaaccaatgtaaaatttcatttttatattttcttaacaagaagaaaaatattctatgaaagcaaagtaatgctaacttaatgaatctgcttattgtatggattaatcactaatattattcccatgtattttgttttactaaagatttttaagaatccagtggctatttgaacctactgttatctaactttgagcaacaataaatgaaacattaatcagtaaa

SEQ ID NO: 93556 - DNA, 409 bp, Homo Sapiens
aaatgtcccctgtgtccccgtgagatgggtacacaccctaagaacacggagggccaccggagcttctcattcagctacatgggagccaagaccttgccaggtggaatcagtcacacattttatttacaggatagcccaaatttatgtgctgattttcattcctgcccttcctgatttggggagtgctgcattcgggcaccctcggagccgttcgaaatgtcaagacggtggcttctgcctcagccagttggaatcggcctgtgtcaattcttcagggagtacatcttttatccactctggaaaattccaaatagtgccctagcattgtctcatgtgagtgaggttctctgagatcatacatcaaggggaagtgtcttatttaagattaaaaaccggaactaaactaaaa

SEQ ID NO: 93557 - DNA, 565 bp, Homo Sapiens
agcccgtgctatggggaagcgcaagaaaagtgccaccaacagcactttgaccaagccggacgctgctcccttgctgctaacaatcgagaaaggagaggcattgccctggatgggaaaatcaagcacgaggacacaaaccttgcctccagcaccatcattaaggagggcatagaccggaccgtcctgggaatcctggtgtcttaccagatcaaggtgaagctcacagtgtcaggctttctgggagagctcacctccagtgaagtcgccactgaggtcccattccgcctcatgcaccctcagcctgaggacccagttatcaggatgcaaatttagtttttgaggagtttgctcgccataatctgaaagatgcaggagaagctgaggaggggaagagagacaagaatgacgttgatgagtgaagatgtcggctcaggatgccggaaaatgacctgtagttaccagtgcaacgagcaaagccccacagtttagtcctttggagttatgctgcgtatgaaaggatgagtcttcttccgagaaataaagcttgtttgttctcccctgaaaa

SEQ ID NO: 93558 - DNA, 549 bp, Homo Sapiens
aggtgctcgtggcggttccggaaggggataaggatcgccaccttccaccgaggcatgcaatcagaaggcttccagtgacctccgagcttgatggttgggtctttggagaagagttcatgaatgtaatccattccaatttcactcatgtttatgtctattgggcccttcatggaagggagtctttcagggcaggtatggtttgcaaagtaggtgaagtcttcaggaagaaatgttgtagtttgcaggaaggtttcactgtggttcaagtcaagaggataatctgagtcatttacactgctgttcctcttggcataagcactccgaagcacctgctcataaacctgagcaccgattgttctcacgttgtcccggatcagaatgccttgggcttgcatcatgaagaggtaggtgttcactatgccgggcgccacatagacgaagtacagcagcgaggacgagagagaaaagaagaagagcgcggcgagcagcgagcggcgcggcagccgcagcagcccccggcgggcgagcatgctgcagccaggcggccgc

SEQ ID NO: 93559 - DNA, 535 bp, Homo Sapiens
accgcagagagtcgaatgatctggggtgcctttgcccagagtgcagacgagttcttagcctcttaaattgtggaggaaaactcctggactccaaccattctcagtccatgatttcttgcgtaaagcaggaaggctcaagttacaacgaaagacaggagcactgtcacattgggaaaggggtccacagtcagacctcagacaatgtagacatagagatgcagtatatgcaaaggaaacaacaaacttctgcctttttgagggttttcactgactctctacaaaattacctgctctcgggaagctttccaactccaaacccctcgtcagccagtgaatatggccatctggccgacgtggatcctctgtcaacctctcctgtgcatacattacgtggctggacttccccagcaacgtccgaatcccatggccacccatcttcatctacactgccagaagaggaggaggaggaggacgaggaaggctattgtcctcgatgccaagagctggagcaggaggttatttcactgcaacaaga

SEQ ID NO: 93560 - DNA, 331 bp, Homo Sapiens
tctctgtagctgtgagccctttgtgagaatatgactcttaattttgaatcttatgtaagaggcttgagatgtgctggagagggcaggaagaggaaagtatcaggccttgagagagggaatgtagctttgcttctatgatctggagtcaccttcacttgctagctgagtcctaacacaacttccaagtccatgattctcttggggcattggatgggctcagtgtgggtctcttaggctgttcttgtgacttcatcatttcctggttcaaagttgtactgtcaaggggcagcatttctggtatttctataataaatttttctgtgatctcaaa

SEQ ID NO: 93561 - DNA, 530 bp, Homo Sapiens
ccggtccggccctctgggcacaggcatggtaccaccagcctccccgctggtacagggcacagttacctgaggggagagagagagtccatgtcctctcaccagaataaaagcctctacctgcacctcacagtgcaaggcttttgccaggcatcccctggcccctcccattcttattgaatacaagccctgatcttccatctcctcagcaaaaaaataggagccctggccccccaactttcttcagagtaatagccttaattccttccctatctccttaccaaagtacaagtcacatctttcccaccttttctgcaaactaggagtctaccgttcattcctttatcaaagaaaagtatctacttcctttctagaataagagtactagctctcaccctctgccctttacttgaacaggagtcttgattctttttttgcctcatcagagaaggaatctggactccccatccccccaccaggataaaagtcctgacctttgttctcttgacggaataaaagcttgcttatcctta

SEQ ID NO: 93562 - DNA, 356 bp, Homo Sapiens
ttaaatggcagggacttcgctgagtcagtaagtataatcactctagtttattcaaggatgtgtggcaactttcaacttccatacgtatatatgtatgtatggaaggccatgtcaatactagtatcattggatataactttgattcttaatcagagggcaaattcattagagaagaatttttagtagatacacagactaatatttgtgtggaggttcttttgaccaattttattcctaagaataaacaaacccctacagttaaaatgcaaagatgcctgtcatctaagtattgaaagaatttttgccttatcaagagttgttttttaaaaatttaataaattcataaaaaagacaaa

SEQ ID NO: 93563 - DNA, 860 bp, Homo Sapiens
ctggacgatgtgctcttatgcccgcaccacgggcaagctcaagacggacaatgttttctggggcgagcacttcgagttccacaacttgccgcctctgcgcacggtcactgtccacctgtaccggggagaccgacaagaagaagaagaaggagcgcaacagttacctgggcctggtgagcctacctgctgcctcggtggccgggcggcagttcgtggagaagtggtacccggtggtgacgcccaaccccaagggcggcaagggccctggacccatgatccgcatcaaggcgcgctaccaaaccatcaccatcctgcccatggagatgtacaaagagttcgctgagcacatcaccaaccactacctggggctgtgtgcagccctcgagcccatcctcagtgccaagaccaaggaggagatggcatctgccctggtgcacatcctgcagagcacgggcaaggtgaaggacttcctgacagacctgatgatgtcagaggtggaccgctgcggggacaacgagcacctcatcttccgggagaacacactggccaccaaggccattgaggagtacctcaagctagtgggccagaagtacctgcaggacgccctaggtgagttcatcaaagcgctgtatgagtcagatgagaactgcgaagtggatcccagcaagtgctcggccgctgacctcccagagcaccagggcaacctcaagatgtgctgcgagctggccttctgcaagatcatcaactcctactgatttggcagcaaggaggaatacatgtccttcatgaaccagttcctagagcatgagtggaccaacatgcagcgctcctgctggaatctccaaccgcaacctaattag

SEQ ID NO: 93564 - DNA, 533 bp, Homo Sapiens
gcggccgcctgctcggagcgaacacgcgcccacgacaaacggggggagcgggattaaggaaaaccccgataatagagaatgaatgcattttgacaattcgtgaaaataatcactagtttagtatccgtggttgtaccagttctctgaattctaaagatgaaaagatcattgagaacatctttgttactggcactgtctacatggtattttgagcagagttttgcagtgtttccaagtgctgcagtttcttcccgcagagagatggccactacagactctagctgccagaagaatttcccccagatctggaaagtttctacagttgcttacctcgaatattcacatacagagaggtacttcctccaaagtgcggttttccaacaactccataatgataacatgggaactggacctggctctgccaacagatgtcaatactttcacgatgaagagaaatagcgattccttcatgatctgcttcaaaatattggaatagattttagtgattctggaatggatgagaagatttgaca

SEQ ID NO: 93565 - DNA, 409 bp, Homo Sapiens
gcaaagagagaaacgaggatcaggaaagttacatcgaggctgacggaatcctggacatgggctggcatcacgggccatcttctacttgagatatttttcagataacacaagtatggaaaaaggaaaaagcaactgtattgaaatctcctaaatgcagcagatttggagcctgcaaacacttcttttagggaggaggcagtattgctcttaacctagaaggcatcctcaatggtctttgagacgtttggaaacgtgtgcacaagtgaaattattttacctacttctcttgaacgcatgatgtctcatatccaattttatttctaaacatttcttttaaaaaatagttatttctgtgcacttctgattctgttactagtaagaacagtaaaacctgattggctataaaaaa

SEQ ID NO: 93566 - DNA, 555 bp, Homo Sapiens
cttcgtgctgaggcacgcagtacttcgtcttctccatgatagaggtgaacaatgtcaccaaggcccgcgactgctgggcaccttcatccagcactggggttctcgtgcctacgtgacctggatgacgggcggcatctttgatggcgccgtggtcatcttgggtacctgctacgagcttcatctgctacaacatctggtgcaacgatccgcgggtaagacggcgtcgcgcaagtagcagaggagtgcagagcaagctgggtgtggccttccaaaaggggttcctgctcgcaccctgtgtcagcagcgtgaagtccatttcaagggccaagatccgcacggtgaagatgacttttgtgatcgtgacggcttacatcctctgctaggcgcctatcttcatcatccagatgataggtcagtctcgggatcccagtgtccgtctggaccgaatccgaaaaccctaccagcaccatcactgcattactgggatcttgaatagagatgtagtcctggatataatgttgttagtggcgacatcttcagactgtgtcaagcttc

SEQ ID NO: 93567 - DNA, 592 bp, Homo Sapiens
  misc_feature (400)..(400): n is a, c, g, or t
  misc_feature (446)..(446): n is a, c, g, or t
  misc_feature (466)..(466): n is a, c, g, or t
taatgctatgaaagcgtacttcaaaaaattagtatccagggtaacaatgaagaactaaattttcatttactgattaataactcaacatacaaaataatacaagggaaatcaacagtaatccatgtcatgcgtaggtgcttaaaaatttaatttgatattggattaattattaacaattttggtttaaaagcttgttttatttaaatatttgactagatattataaataccagttaactctcaaatacaaatgaacaaaataaaatttaaaagaatatgtcagtattctacttgaaagcgacttacagagtgagcaaattgcaatcaattataaaacaactccatattatttcagattttcttggactccatgttatagatgtaaaacatgcaagaactgngaaataatcctcccactatacttggcattagtcgggcccttattgnagaaacatatccacgttggngctccacaattcaagacgattatgagaactagagacgtccaaggagagcaacggaatgattaaaggatgaaaaatggacctatgaagatgggtaaaacatagagtctgactgagatcacgagctag

SEQ ID NO: 93568 - DNA, 902 bp, Homo Sapiens
ggtctctggaaatgaacacaagggcaggttattcctgggtcacttctgggcccccctgccctcccagccccacttgagtttctctctctggtgtgggtgaaccagtcagcctgaatgttctgcatttcagcactttagaacctccctgtgaagattttagccttagcccaaacatcaaattagatggttcacatgatggtttttgacctatttcctttctaatgtattccacatgatcatggtgttaaatagtgaaaagtactgtgttgtgtgtgcaccttctccgtgcatttattagactaaccagtcaagcagacagctcagttagggagaaaacaatactctgaaatttgaaggccaatctgttgttactaagctgtttatctctattgcctttttaaatgtctggataagttgttggtggaaattaagttacttaacctcattaataccaattctagagaaagttcttttcaccatggatagtaaccctggatcctctacggtactggctgagctggaagtgccaaaaagcactcctggctgcttctggttccatctgatgatgatgtgacacacactgctgaaaaggcccaagcagggcaagtgggatggctgaaggagggaaggagggggttcagaacccactggcctggatgggagaactgggtggaggcttccccaagagggaagacagataaacaaaacaaaacaaaaactgggtaaagaggaatgaatcactcagccctgatgtttcaattctacactgcattcctggccagtcgcatttgttttaatgcaggcatggccacagctctcctagagaattatctcaaagaccagaagggacctggagaggcctatttcttaggtttttccagttggacaaggaaggagtggtt

SEQ ID NO: 93569 - DNA, 313 bp, Homo Sapiens
cgagcccactgacgactcccgaggggctggaccaagcggggtcagcccgggcttcttccctggcgcctctggaagggagctggtgcaagtctgccgtcacatccacccccagatgcctgtggataaagaacccaggaggactgaggctggaacacaccgcgcacctggattgttcactcccgagccgccttggctgtggctccgtggcagtgcgacagaaggaaactcaagcagaggcgtggcctgggggctgcccctcctccacttctctaataccagtgacaagtattattaataaagagcgtacatcttc

SEQ ID NO: 93570 - DNA, 530 bp, Homo Sapiens
cactgcgtacatacccggggcctatgtgtgcctgcaaggccaagctgatgatgttaccaagctcaaactaccactggccaccttggtgagggtggggcagaaacacgtggaccagccaccaacctcatccattcaaggaagcagaaatggtcaggctcctgcaggataagtggccaccaccagaccaccaatggggcagagttctgaggcccaaggagatggcactggggccctgcttccagggtccacaatctgctccaggacacaagactgaagaaaactaagcaaatgagagtccaggaggctggatccctcatctgccattcttggcagttgcattttgtggtcagaaaaagtcaggaaacttggctctactcactgcaggaggctccaaggtgggaccagagcttccagcatagattcaacaatgcctaagaatgcctcttcttggggaaaaggaccccttccttggcctcaaagcccccacttattttgattaaagcacaataaagtctttgttgttaaaaaaa

SEQ ID NO: 93571 - DNA, 523 bp, Homo Sapiens
cgaagagtggttgtaccagaggtaccactaggcatatttaggaagctggaagacttccgattagagaaaggtgaagaggaaagaaatcttatataataggaagaaaaagaaagactcttcagctctcacataagtcggattcagtggttttggtatcacagtctagacaaaggacatgtaggcgtaaatatccaaattatggtagaagaaatcgtagctggcgtgagttatcttctggaaatgagtcttcaagctctgtaagacatgagacttcctgtgatcagagtgaaggttctggttcttcagaagaggatgaatggagaagtgacagaaaaagtgagagttacagcgaaagttcaagtgactcttcatctagatattccgattggacagctgatgcgggcatcaatttgcagcctcctttaagaacatcatgtcgtcgacgaattactcgattttgtagtagttcagaagatgaaatatctactgagaatttatctcctccaaaaagaagacgaaagag

SEQ ID NO: 93572 - DNA, 1062 bp, Homo Sapiens
  misc_feature (974)..(1013): n is a, c, g, or t
aaaggctaggtagcgaggcctgggttgtgaattcggccgaggcccaggcctaagcaatcctccccgcccaggtgcgagccggagccgccgccaccgctgccgcccctgactcacgccgcccccgggctggcgcagcgaagggtgtgggacagggtaaggggttggaagagccttgtggagagcgggcgagccggcgccatctggcggccatgctctgagtgggcgagcgccccccgcgagccactgggagcgagctgtcttcacgctcctcatccaccccagctggtgagcggcgcccccttgccaaggcagtgggcacagaacttctcgcttggccgcaggggaaggggctgcggacctgtgggaaagtgatccccttcccagatccttgccagccgggcttcctgtcaggcaggggagaataatccccactctgctcttaggattgaatccacccccattctgtacatagcctcttctgttggtcttgttgaaatctagtttcagatttttaactacccaattctgctgggggtgggggacacccccccttcctcgctgggtgctggaccccttttgcagcctgggctctgccttgcactatttccccttcctggcctgacggctcctccccctccttaaaaggggcaggttcaggggcccggtgctcttcctcccttccatgcacccccatgcccatttgcacagctgcccaggtacccctaacagtggggaggggtcacagggagggggtagcgggaccagtccctgttatctatttaaaaagtgatgatgtaatatattggggtggcggggagatcgggttgtcctgggcctcatcttagcatttcaggtgatggggggagcccagggctggggagacctggggcccagccccagaaagtggggacaatgtggcctcccttctccctactttcggctttcccagtcagtgccttagggggagaggaaannnnnnnnnnnnnnnnnnnnnnnnnnnnnnnnnnnnnnnnacctcgggtgtaagcgacaggaagaaataataataatttaagattcaaa

SEQ ID NO: 93573 - DNA, 708 bp, Homo Sapiens
gctactgcctctagaagactgtctattgtgccttgaatacacagcattgactttgcagggtcatcttgctggataacatagcaccacccaaacaggagaattgaggctgagactggatcaggcccagtggaacatagcgaaatgagaataagctttcgtgttagaatcctgcctatgtgatctccagcaacttaacatctctgagccacttcatttatctggagaatggggctaaatcttcctgagtttttgaggcttacagcgaataatgtacggcacctgacatgcagtaaacaagaaatcaaaggcaacacctgggcctcaggactgcgtgatgggtgccccgtgaaatctaattccactgtgaactatgctgacatccatcaaggcctttacctcctacctcttggtttgaaatgcgtctccaagacttccaccatccacaactgatccagaaatggctctggcagtacccaagggttccttgaaggcaggtctgggtctggttctccggatcccaacaccacgaggtactttattttaaaaggattaaaaaagccactgcttgtcaaatcttgaactaaaggactaacaccaattctcataacatccttaagccggccatgtgaaatgggtgctgtaattaccatcctaatcttaagggcatggaaaataaagcacagagggtaaatcctatggctaatcagg

SEQ ID NO: 93574 - DNA, 930 bp, Homo Sapiens
  misc_feature (62)..(197): n is a, c, g, or t
gtgcctaagctaaaattaaccctcaactaaagggaataagcttgcggccgcatacgcggtcnnnnnnnnnnnnnnnnnnnnnnnnnnnnnnnnnnnnnnnnnnnnnnnnnnnnnnnnnnnnnnnnnnnnnnnnnnnnnnnnnnnnnnnnnnnnnnnnnnnnnnnnnnnnnnnnnnnnnnnnnnnnnnnnnnnnnnnnctcaaacttgccatttttaaagtgtacaattcaatggtttttagtatatccactagtgttgtgcaagcatcaccgctgtctaattccagagcatttctgtcaccccaaaaagaaactccatgcctattagcagtcactcccagttcttcccttcctcggcccctggaaaccagtaatgtactttctgtctctgtgattttgcctgttttggacatttcatttaaatggaattatgcaataatttgtggccttctgtgtttggctttcacttagcatcatgttctcaaggctcatccatgttgtggcatgtatcagtactgcattcctttttatggctaaatgatgtttcattgtatgagtgtgtaccacattttatttatccattcagcaattaatggacaggaacaatggcttttaagtattaaattgtaagttcaacattaaatgtatccacagttattgataatatcaagattatacatggtgtgaacagaatgctgtgtcgaaatggtatgtaaattatttgtcagcatttcatgtaagtgattattttctaaggaaccttctagccctggttttaagaaatatgtgaatgtagtatttttcatcaataaaagtttaatggcattaagcattagctttaacatttgaatgaagggcagatggtgaagatatttgccacatgtgtaatattcaggtttgaaattatttcattatgaagtattgaaaaatt

SEQ ID NO: 93575 - DNA, 827 bp, Homo Sapiens
ggggagaggggttgagtcaagatggcggccaaggtggcgaagcagcagccgcggcggcggcggcggctggagtgagcgtccgactcgccgcgccgaacgaggtcccggtgtagggccgcgcgccgtggccgcgtcccactcctcaggccggggcgcacgtcggctcccacgcttagccagctcccggtggtttcctagaaacatgattgtttattggcattgatctcacagtctggtgaggacttctttactgataatgtcaagttcaggttatcctcccaaccaaggagcattcagcacagaacaaagtcgttatcctcctcactctgtccagtatacatttcccagcacccgccaccagcaggatccagcattcggaggcaaacatgaagctccatcctctccaatttcggggcaaccatgtggagatgatcaaaatgctttaccttcaaaactatcaaacgaagagttaatacaaagtatggatcgtgtagattgaaaaattgcaaaagttgaacagcagatccttaaactgaaaaagaaacaagtaaaaaccgtttcatccaggcccatccccagtggatcatgattcactggaatcgaaccgaccacgtctggaacaggtttctgattctcattttccagcgggtcagtgctgcgggtttgcctttagtgcacccgctgccagaagggctgagggcttctgcagatgctaagaaggatccagcattcgggaggcaacatgaagctccatcctctccaatttcgggggcaacaatgggggagatgatcaaaatggcttccctttcaaaaactctcaaaggaag

SEQ ID NO: 93576 - DNA, 805 bp, Homo Sapiens
caccaatcaatacatcctatgaatcacaccatacctgttcatagagatctttctcatttagaattaaataggactctgacacttatctccttaaaatccttcagaagcctcccttggcctccaggaaaaaaagagctgtctccttagctagttccacaaggttctttacctgtggtaataactcacctccccattctcacccccattacctcctgccccacacactccaccttccagccaaatctaccttctgtctactcttagcactagcaaagtgcctggatgtgggaggaccccataagcattatggcctgacaaacacaccatgcctttgatctacttgaaaatgccctttactccttccttcctaaaacaaatctctactcatctctttagatccagattaaaaggtcacttcttttctatagctttttggaactctttgagcaaatttgcctgttctcccagctgtgttccacagaatcctatgtatttctctattgcggtggttgatgattccctgtgggggacagacacccaaacagctattaataattaacatacaagctggcaagagaagtggtgcagatatgtccagagatttatggggtcatctaatgtgtctgaagcaggcacaaataatcaggaaaagcttcctgaaggagctgatgctcctgctgaggaggggtgacgaggtgatgtggtatacattgctataactcaacaaatattcatattatcattatcatggttgttccattgtagctcagtgcttgaattcacagtggaaaaggctacaccattc

SEQ ID NO: 93577 - DNA, 392 bp, Homo Sapiens
aataagtttgctatattcattctcacaatgttaaatttgctggcatgagagagataatcataaaaaataagagggatatgatttgaggaacaaaattctatatacggtgctaaattattttgtgacataaattaagatgaagttcttctacagaaaatgttggacaaaggctgtttctgaatcttaaaatgaaaggactctaaacactaattttaaatgaatataaaaattctgaaaaataatatttatagcaaaatagttcaagattagttttctcaccaaagctgggaaagctgtgtgcacaaagtaccaaatatatttcaactgaagtactgaatcctcaactagcctgaacacaaaaccaacttctattttacctcattacctctcag

SEQ ID NO: 93578 - DNA, 811 bp, Homo Sapiens
cgccaatctagaatactctgcgaatgtcttcggatggtagccactcagcccattcctaaaggccatgagattttcaacacttatgggcaaatggctaactggcaactgattcatatgtacggtttgttgaaccatatcctgacaacacagatgacacagctgacattcagatggtgacagttcgtgaggcagcattacagggaacaaaaactgaagctgaaaggcacctagtgtacgagcgctgggatttcctatgcaaactggagatggtaggggaagagggagcctttgtgatagggagggaggaggtgctgactgaagaggagctgaccaccacactaaaggtactgtgcatgcctgctgaggagttcagagagcttaaagaccaggatggagggggagatgataaaagggaagagggcagcctgacgatcacaaatattcccaagctcaaagcatcgtggagacagctgcttcaaaacagtgttctactgactttgcagacctatgccacagacttaaaaactgaccaaggtttactcagtaataaggaagtctatgcgaaactcagctggagggaacagcaagcattacaggttcgctatggtcagaagatgatcttacatcagttgttggaactgacaagttagcagtttccctgttccctgaaggaacagcaataagaactttattctaagctaatactcattgatgtttgaaaaagaggaaaattggatctttctttttgcttaactaaaccaccaagaggaaaagtaggcaaagtggtgtgctaggattactcaggtaaagg

SEQ ID NO: 93579 - DNA, 533 bp, Homo Sapiens
tgtcaagtcctctggtggcagttccagcatgaagtttgtttctaccacttattccggagtaaccagataaagagatgccctctgtttcattagctctagttctcccccagcatcactaacaaatatgcttggcaagaccgaggtcgatttgtcccagccttaccggagaaaagagctatggttagttacactagctcatcctattcccccagctctttcttttctgctgtttcccaatgaagttttcagatcagtggcaatctcagtcccctggctatgaccctgctttgttctttccctgagaaacagttcagcagtgaccaccacccacatgacatttcaaagcacctccttaagccagccagagtaggaccagttagacccagggtgtggacagctccttagcatcttatctctgtgctgttttggttttgtacataaggtgtaagcaagttgtttttcttttgtggagaggtcttaaactccccatttccttgttttgctgcaataaactgcatttgaaattcaaaaaa

SEQ ID NO: 93580 - DNA, 479 bp, Homo Sapiens
atgttaaatgccctggcaggagggtgtacagagggtattcaggctcagtaggctgacaccaagtcaggcaaaggtgctaagctgatggtccctggagcataatcactagcaaacaccaaagtaccttatggggtccatccattcagctatgtgttgctgatcccggcttgtttcagcgtccccttcaaccaccaaaaaggagatctggaacagcagggccatgaacaaggaggagaagaaggactgcacctccatctgccgactgggttccagcaggagctcatggatcgccctggtggccttgagggaggaggagagtgaagcattatcgtatcttcgactcataggtcctgtcaccaggaaatctctttccacaacccatcaccatgacagacttgcccagtaaaacccgtgctgctagagcaagtgaagactaagttagtgtgagccagacaaataaagggcaatttctagaaaaa

SEQ ID NO: 93581 - DNA, 423 bp, Homo Sapiens
gagcttcaaggaatatgaaaccgcttctgttagctctcccagaactctccacattgatcccactctggctactagcaccagctggacagtaacgactttcagaggtgaacacaatgtgcttcaacatgccttcctgaaagttcagttagcaactggacagcatctgaattccagttctgcaaagctcttctctgaatacctgaggtaccagcatgatcctcgcactgcccctgcctccgctgtcttgtctaattctagctctctggggccactcttgtgagtttctaggttccgagaaccttaatcttttccattgtttcccagccctagacaggtagctgctacctgatgttgtcatcctgtgttagctcagtgttcatttttaccattaaaacacctgctttaaataatcttcatcaaaaa

SEQ ID NO: 93582 - DNA, 457 bp, Homo Sapiens
ccatttaagaattaatgccaacacctttattacatgttattgtgcaaagtctcttctgaagatgacttctcatttcaataagttcaaatgtaaatgataaaacaggtcagacttataacatgcagtctaattctacacaaggcatattcgctattttaacataaacaaaacatataacacatgtggaagtttacatcacttatctcaattttttatgatcctcagaggtgactctcaaacagaaggaggaacagacatcaataccagaggtataggaaaatgtgttgcatactgtaagtggcgaaggaggtcataattagatggaaaaattaattcacttggcttttccctcttcaccaacttctcacaattaactgacattcttctgcccaacgaagtgttggcattctcacaggattctccaggcataggagaaaaaatctccattttcacatca

SEQ ID NO: 93583 - DNA, 476 bp, Homo Sapiens
tccagcagaagacgtggactcttttgagatggaattctatgaagtcattacttctcctcctaacaacgtacaaatggagctctgtggacaaattcgggacataatgcagcaaaatctggagctgcacaacctgacccccaacacagaatacgtgtttaaagttagagccatcaatgataatggtcctgggcaatggagtgatatctgcaaggtggtaacaccagatggacatgggaagaaccgagctaagtggggcctgctgaagaatatccagtctgccctccagaagcacttctgagccccttcagagcaggaaacaacctcagactcatcacaaagtagacatatacacacacatatatgtatgtatatttttctcaccacattcttcaaggaggttgtagacaaatgtttccatgacctctcagctttccaacaggaatcttgtaagagctaataaaaggaaatacctgaat

SEQ ID NO: 93584 - DNA, 443 bp, Homo Sapiens
cccggagctctggagcactgatcaggagtgtcgcatgtgtccggttgctttcgaatgcacgaggcgacaagtactagtggctcactcagagacccttggcactttcttcagggaagctatattcatattataaataaacttaaaaaaacattcatatgtatagttagaattgatttgtagggtttttgaactgatgtaacttgggcaaaactgaagttcttatttttgttgttgctaagagacaataaagataaaaataaaataaagattacagataaaagatttggtatacaaggagtataaatatgaaatgagagggcattttaaaaatgaattaataattttgaaatatatattaatacttgctgacttccaaagtatcatctgtgataatttatatcattgtattccatttcgttgtaccaaacatcctaattgtttgg

SEQ ID NO: 93585 - DNA, 1292 bp, Homo Sapiens
  misc_feature (830)..(830): n is a, c, g, or t
aagatcttattacaatacctatgcctgtgcgggacaatgtcagcatcgtgaattcgcagtatcgcgagttgatgaccacgacgtgtttgtagaagtctatattctgactgcagacccagaccagatcactaacattgctaaaacctttgaccccagagctcttaggaaagatgaactatcggttaatgatgttacagtcctgttctgggccaacctgtcgcactccagggtttttgaccccggatacaggttgtacccccgtctcatgttcagcaatcgcggcagtgtcaggactcgaagattttccaaacatcttctgtagcgacctcacacagcctctgcagatggatccctgcacgcctctttctgatgaagtgattgtagtaggtgtctgtagctagtcttcaagaccacacctggaagagtttctgggctggctttaagtcctgtttgaaaaagcaacccagtcagctgacttcctcgtgcaatgtgttaaactgtgaactctgcccatgtgtcaggagtggctgtctctggtctcttcctttagctgacaaggacactcctgaggtctttgttctcactgtattttttttatcctggggccacagttcttgattattcctcttgtggttaaagactgaatttgtaaacccattcagataaatggcagtactttaggacacacacaaacacacagatacaccttttgatatgtaagcttgacctaaagtcaaaggacctgtgtagcatttcagattgagcacttcactatcaaaaatactaacatcacatggcttgaagagtaaccatcagagctgaatcatccnaagtaagaacaagtacccattgttgattgataagtagagatacattttttatgatgttcatcacagtgtggtaaggttgcaaattcaaaacatgtcacccaagctctgttcatgtttttgtgaattctaggctggtgctgcactgaaatagagcagtaagcttgtgataaaggccaattccaggtagctccttgaaggtgatagccatctactttccagtggctgccaaccacagggagtgccagttaacactggaaggaataaggcaaaggtcccttctcttgagactcccctctgaaatctgaaaaatgaagggccttaggaacatcaccagggaagaactgcccaagagttgtgaaaggttgcctccttccgaaggcgcttttggaaaaaggggctctttgaacagaacaattggaagggcctgtaccacggaataaaggaaagaatggcctgtccacc

SEQ ID NO: 93586 - DNA, 278 bp, Homo Sapiens
tttaaataactaaactattgattgacagaaaacagaaatgttggcccaaagaaaaacgaaaagttcttggaaaccttcaagttgccacccacagcacagcctcgagttgtgaaaacagtttaagggagcacgtggccaccccagccctaggaggctgccgagaagcgcggctgttaatgaaaatgcattgacaaccactcctttaggattccttccccaggagctcccagtcccaggagcgaccaggaatacagttagccctcccttataggacagtg

SEQ ID NO: 93587 - DNA, 626 bp, Homo Sapiens
  misc_feature (375)..(400): n is a, c, g, or t
aggagacagctactgtgttttgtcggagtcacctttacatagatttctatccatttaaaaacaaccttactgtagctgccattctctaccagcattgttacctctttctgtggctcccttctttgtgctcttaaaaaggccgacatctggctagtctttaaaggagaaagctactgtgctgggacttgtctttcagcaatatcataggttaaacaaatgccttccatttatttcagtttacttcaatcccaccactcatgctaccaacaattgctctggacttcatactttggaactttctttccactacagttgatagcgtttattacacttttcagcttggacatctcagatgttctgatattttacattggnnnnnnnnnnnnnnnnnnnnnnnnnncaaatcttgctctaaccacgtaacctgataaaatgtttctcaatggttctaaccactttctagcaactaagaattttaatactgtaattattactatgaaggatcctgagttttcctttacagccttgaatttacatggttaagattttaatttgacgaaaacagaaaaaaaatgtgcctttgcaaccagccaggtgataaagtgtgattcaggaagtaaaaaaaa

SEQ ID NO: 93588 - DNA, 317 bp, Homo Sapiens
gcctcctcaccggcgcaggctaggagggggcggcctgagtgcgtagccgagccggggctggagcgcgcggtctgacctacgagaaacatggcaaccagcgccgtccccagtgacaacctccccacatacaagctggtggtggtgggggatgggggtgtgggcaaaagtgcctcaccatccagtttttccagaagatctttgtgcctgactatgaccccaccattgaagactcctacctgaaacatacggagattgacaatcaatgggccatcttggacgttctggacacagcagggcaggaggaattcagcgccatg

SEQ ID NO: 93589 - DNA, 726 bp, Homo Sapiens
cgtggcctggtactggaactccatgcacaccgggcttcggggcaggtggacaggggggctgatgagccgggcatactggccctctctctggctgtcactctgcagccgcaagaaattcctgtcatctggaaacgtccggtcgtttgggctggagctgctggcccaggtggtccggagccacttggcatggtcatacatccaaccacagggctcctcgaggaaatcgaagttgcaattgaatcccgaagggagctgcaaatctttgtcatcctcaaagctgcagttctccccacactctgtggcctcctcttcggtggggtagggggtggttgtctcttcgctcttcacagtgggtcccagcgtctctaccgtgggcttggagtctgtccagtcacagcccagcacctccagccgcatcccaatccccgccggcgaccacctctccgggtatacccgcacatactgtgccggaatggggtcaaaccttcggatgtcaggggtgtcatagtgcatgttcccttcaaacagctttggctgctgggtcctggggtcctgaatgtattcccagtccttgccgtttaggctgtaggagactttgaacttgcgcacaaatgctctggcttccacagcagtgatactgtctcctccgcgggctccctggatgatgacacctttcactgtcttgggtgttcccagatctacctgaagccactcctcaccgggctg

SEQ ID NO: 93590 - DNA, 375 bp, Homo Sapiens
gcggccgccagggttggtggggtcaaagggcgtcagatggggctgggtctgggggtgcgtagtgagagtctgggggactcctgctctcctctttctgaggacagcctctccttcaggagtttccccggtcttcagcccgccggcgccccacggaagccccccgcgctctcccgagtgtccaggatgttttccgtggctcacccagccgccaaggtgccgcagcccgagcggctggaccctggtgtacacggcgctgaagcgggcctgacgtgagcagctcctctgttcccagccctgtcccgggatccctcaccaagcccgcatcctgctagcaggaaccttctccaggggcagataagggagtccaagaggaat

SEQ ID NO: 93591 - DNA, 1255 bp, Homo Sapiens
  misc_feature (798)..(906): n is a, c, g, or t
  misc_feature (930)..(930): n is a, c, g, or t
  misc_feature (958)..(1002): n is a, c, g, or t
  misc_feature (1179)..(1179): n is a, c, g, or t
ccaccaaaaccgcccccattcggtcctaggtagcgaggcctgggtggcgatttcggcacgaggcaggccgggcacctccgagcgcaaggacagcgcgaggtccgcgcagcccagcgcagccatggagccccgcgcggactcactctatgatgtccctgtcggtgcggccgcagcgccgtctgctcagcgcccgggtcaataggagccagtccttcgcaggcgtcctcggcagccacgagcgggggcccaggagtttcccggtcttcagcccgccggggcccccacggaagccccccgcgctctcccgagtgtccaggatgttttccgtggctcacccagccgccaaggtgccgcagcccgagcggctggaactggtgtaaacggcgctgaagcggggcctgacggcctacttggaagtgcaccccccaggaccaagagaaactccccgggcaaaaaaaggggaatcccaaaaagagaattccccgctttgggccttcccccggaatggatcctggggaacaaaaccaaagcccaaaaggccctctttggaaaacgccttttccctgggcgcaaaaaaaactgtgggaaagtttcccctcggtgcccacaccctcaaaaaacactcccgaatttgccagcccccttcttttatcaaagaagggcgcacataaaatacaggggggcgggggccctcaaccacgggcgcagagggagctcttctaccctccccacgggaggtaaaaacagatgaggcgggtacaaaacgtcctatttttcacacggaacaaacgtgatatnnnnnnnnnnnnnnnnnnnnnnnnnnnnnnnnnnnnnnnnnnnnnnnnnnnnnnnnnnnnnnnnnnnnnnnnnnnnnnnnnnnnnnnnnnnnnnnnnnnnnnnnnnnnnccgggggcggtaaataaacaactncctctctctccaaataaaaagggggcgnnnnnnnnnnnnnnnnnnnnnnnnnnnnnnnnnnnnnnnnnnnnngctcgtcggtgaatacacacatagagaaagcgcaccacccccctctacactcgcgcgcggcggggaggagacctctctcctgcgcgatgggaggggtgcctcacactccccgcgcagtgacaacaccaacaccctccgatctgacgttctccctcccgccgttgcccgtcgaacacnaaaacctcgacccctccaatggttgtgtgggggcagatcacacaccactgtactcgggggcggacggcgaaacaat

SEQ ID NO: 93592 - DNA, 723 bp, Homo Sapiens
  misc_feature (129)..(169): n is a, c, g, or t
aaacaacagtgaggcccatccctgaccctgtcctggagggggcagaggccaggccccagtgctgacgaggagcccagatttgggcctaatcaggtggggacgcatctcagcctggaaccaacaggggcnnnnnnnnnnnnnnnnnnnnnnnnnnnnnnnnnnnnnnnnnggtgtctagggggactggcagagtgtgagagggaccgtgagggggctcttgatgggagtggaagaagtgctgagggtctgagaggggagatgcatgcgtgtccaggctgaagatgcccctatattctgtcaaaggttggcggggggaggtgttggggtcctttcatctggctccgtttctggtgcttctggaagtctctgctcagcacagggaagaactaacacgactaacctaggcctaccctgaatgcttcttgctaaccaggccgagaggccacacacttgcccccccatccccacaaaccaggtaatgccagtttgccagcagctatttgcctatagagatgagtctgtcctggtcataactgtgtgctcaaggtgtccaggcttttgggggtgggcctatctgggtgcattatggatggtttggtggattgaggtgtggggaggagggtcctaggctagagggggtatccctagttagactttgggaagccaccttcaatgttttctggaacaaggcaggtacaaataaaaaataaaactttggaaagc

SEQ ID NO: 93593 - DNA, 489 bp, Homo Sapiens
  misc_feature (330)..(437): n is a, c, g, or t
aacagaaacaagttgctgtgaattactcaacaaggtcctgtgtacttagctgacatgtggtgatggggtgaaaagaatgagtatgtgtgattcttcttaatattgttatttcaccctgattcaagagtcattttgaccagcagattaatcaactgtaagacggatcctcacacaaagaggcaactgaaaggatgaaatcactgactgggatattgggcctttgggctcttgcagcgtgtttcacacctggtgagagtcaaagaggccccaggggaccatatccacctggaccgctggctcctcctcaaccttttggcccaggatttgttnnnnnnnnnnnnnnnnnnnnnnnnnnnnnnnnnnnnnnnnnnnnnnnnnnnnnnnnnnnnnnnnnnnnnnnnnnnnnnnnnnnnnnnnnnnnnnnnnnnnnnnnnnnnccactccatcctgatgccccaagttatccacagcctccttcccgaccaagac

SEQ ID NO: 93594 - DNA, 475 bp, Homo Sapiens
gtcttctctttcccacatctatctaggctgggtatctaggagtctgcaagatttattgcatacttgggattatggcaccctctagtgctgaaatggctgcagtgaccacagcttagggaactcagcactcagtcccctttgaattctttgaaggccctctgaagaagaatgagtacaagcaaggccagactgtgaagactggaataaataagaaactcttcagtgttcagacatgtacaaatatccacaagtattgagaacattcaagaaaatatgatctcatcaaatggactaaataagctgcccagtgaccagccctggagtgatagagatctatcagatagggaatacctttcagacagggaattcaaaatatctgtcttgaagaagcgcaaagaatgtcaagaaaacatgaagaaagaattcagaattttagcagagaaatttaacaaagagattgaaataattaccaaaa

SEQ ID NO: 93595 - DNA, 478 bp, Homo Sapiens
gaagcagcctcgtgtgtccttccgcctcagccgcctcctcccaccgcaagccccgccccactgtcgccgcggcctcggccccgccgccttgggcacccaggggtttcccgcaggaagaagcgccggcccgagctccgcgcggagggatctactacgagtcactggccccgtccgcatccttctccagcagccttaactcgatcagggctgcagcggctcgctggcttgaccagtgcagaaggggcgtggaggtgaggggggtggggtaggactctgaacttcaagcactggagtttgccgggatcgtgaacttgcagggagaggcggtcctcatccagtgaggtctgtatcgccacctacacccacacatccacacactgctttgctagctagaggaatgctctggagtaggaccagtgctgtcaaagaaggaaagtgggccaaggcgccaaagtccattaaaaaggaatagagccaa

SEQ ID NO: 93596 - DNA, 896 bp, Homo Sapiens
tttggttagaaactatatttagaatttcaatagaagaggccagaaacacagctgcccacatctgaaagaacctcagcagtaacagtgggggattaccaagcaaccaaggaaaatagaaactctccccactctgagctgctgatggtgactcctgtgactgagggcaaaatgacggctgaaagtgagggctaggaaatttaaggaaaagaaaggtgtggcaaagatgtgacagaagggttttctagttaggtgaggtggaaccaagttgagtggaatgagcacatgcggctggaagtgacactgagaagcagtggcccgacggggtcttgctttcctcttccttttgggtctcttctgctctcattctctcgtcactgttacaatatgctggactttttcatcgatgacttcacaatggtatggccaccgtgttgggctcaatggaccagaagaagagacaccatataaatcccttggttcacgaagacgtggcacccatctccctagctgatattctaatagtatctgtgtagtccgggggaagaagggatcaccaaaagagtcagctgttaaaagtgcacaccgatgaagatcttcacttacaaatttcatgaacatatcctcatccgattcatcttcatcactgattgttctgtctgaatagtcttccttttctgaatcttctgacatcttttccagtgtttgacttgagatttcttgtaatatacgggtaggctgtaaaacaatttctcaccgtcctgtcggggccggcacctcgctcccacgcgagtcctctggccaggccagtcgtcgcttccgtgcggggagaatatctcgggatctcgcgatctcgcggagaacccggtatccagccgctagaagtaacgccactgctg

SEQ ID NO: 93597 - DNA, 727 bp, Homo Sapiens
  misc_feature (650)..(650): n is a, c, g, or t
caagaaacaggtttaattggacttacagttccacatggctgaggaagcctaacaatcatggcagaaggcaagaggagcaagacacatcttatgtggagggcagcaggcagagagcttgtgcagggcaactccctgcactgatggtttttaaaaccatcagatctcgtaagactcattcactatcataagaacagcaccggaaagacccacccccataattcagtcaccacccatgacatgtgggaattgtgggaattacaattcaagtgagatttggttggggacacagccaaaccagatcaggatctcaacatgttgcccaggcttaacttaaagtggaggaaacaatcagaagtatcaagtgactcgattctctaaaatgaaagatacttggacagatgattttaactatgtatatggatttttaagacttttccccactaggtttccactagctcaaccaaacttcacctcagtacccacatggacacttgtgcaaacacgttcccaggacatctctaaaggggaaaataatctattctctaatgtgatgatgaatgtagagtgatatgacagtccgttttccaaccaggagatacaaatggctgagtcagacttgctccaaaatatttagcctcttccctaagtcnctgtcttcctcctcatacaacatactctgcacatctcccaggaagagagaaaaaaagtttgctttcatgctaactta

SEQ ID NO: 93598 - DNA, 678 bp, Homo Sapiens
ggccctgcaagtctcgtcaggactggggctgccgacgggcctgggccgaagactacctgtcctctgccactgacaatcccacagcatcaagcctgtttgctcagcgactaaagacacttcgggacaaagatggcttcggggctgtgctcttttcaagccatgtccgcaaggtgaaccgcttccacaagatccggaaccgggccctcctgctcacagaccagcacctctacaagctggaccctgaccggcagtaccgggtgatgcgggccgtgccccttgaggcggtgacggggctgagcgtgaccagcggaggagaccagctggtggtgctgcacgcccgcggccaggacgacctcgtggtgtgcctgcaccgctcccggccgccattggacaaccgcgttggggagctggtgggcgtgctggccgcacactgccagggggagggccgcaccctggaggttcgcgtctccgactgcatcccactaagccatcgcggggtccggcgcctcatctccgtggagcccaggccggagcagccagagcccgatttccgctgcgctcgcggctccttcaccctgctctggcccagccgctgagcgcccgcacccgccgcaccccgaggccgccaattgtccgccccgccagcgctgcaaataaaccttctgagtcagaaaaaaa

SEQ ID NO: 93599 - DNA, 330 bp, Homo Sapiens
aaatgcaaccggaggaaacactctgatatgagctggagttaaccgaatttcatactggcctgctgatccagaaataagtttgcttacgaaggcttctagttctgaagatgcaaagttagatgccaaagcagtggaaagattgaagtcaaacagtcgggcccatgtgtgagtattacttcaacctttggtgtgttatatggtgcagtttgtagaggagacatcttacaaatgtgactttattcaaaaaattacaaaaacattgccggatgctaacactgacttttattatgaatgtaaacaagaaagaataaaagaatatgaaatgttaaa

SEQ ID NO: 93600 - DNA, 676 bp, Homo Sapiens
  misc_feature (29)..(29): n is a, c, g, or t
ttaacatactgtggatgtccccaacgagnactactacagacattacatatttaccaatctgagcttccctttagtgatacaaaggcctgctcgcttgtccatctttgtctgtgagtttggtgaacgttgttccttactcagcttcacattgacaagtatatccatataggcggtggtacagtaatgattgcgtaattgcaggaagaatgaaacaaaatgttgtggaaaaacttatggcaattggacatggcttatcacaggtaaaaatggacgatttatctggaaggatggattgcaagacagcgcacatcaaacaatgaaggacagtgacatctgagagacgtgaaacaatgagggctactgttgcctcaggttactgcttggggagagtttccaggctgtggtgtggcacggactctggaagaccctcagagttgagaagatggaactgacagtctggagaaagaggtggctgaatttcatgaagccattctccatggctgcacgaggagggagcacgcatgccaacagccatgcaggccggactgtggtgccatcattactccactgagacatggttcacaggagtactggcgcagtacagaaacaaaaagcaaagattgaaagtaaagtaatttaaatgaattatttaataaacagtaattcccctttaaac

SEQ ID NO: 93601 - DNA, 598 bp, Homo Sapiens
agtaatttagagagatggggcttctgatcctgtgcacatgcctgggttgggccagttttaaaacttgtcaaatgggagcttaatagagtctcctgggggctcccttgcaggcccagcaccacggtggcatcccccagttgcagctccctggtatgtattaaaaggacctattgggtttacaggtgtggcctccagtacctctcctgggatttgtgagtgtagcacaattccttttcaatggcatccatctcctgatctgttggcctcactgtacctgattaataataaaactttccttttaaaatacttgtgtctgagggacagagggcagctctggtcacaggggtcacagctaatgaaatccaaccccgttctgctgctctgtggccatggtggcaccgtgtgtggcatcaccaggctgggccatgctgggctgaggctgagggctgctaacaagtgtcctttgtgcaaaaccacccattcctatgggctgcaggctcctcttctgcccaagtccataagagtccaagccagtcatgctgttcagctctgcacctgccgatgacctccgagcactgttgtgtgctcagcagccctg

SEQ ID NO: 93602 - DNA, 492 bp, Homo Sapiens
atggtggcttattcagccagttccatggcactggccatagcagcaggtcagagtgtggtttctgtagcaacacttctcatgaccatctgttttgtgtttatgatgattttttcaggtctgttggtcaatctcacaaccattgcatcttggctgtcatggcttcagtacttcagcattccacgatatggatttacgctttgcagcataatgaatttttgggacaaaacttctgcccaggactcaatgcaacaggaaacaatccttgtaactatgcaacatgtactggcgaagaatatttggtaaagcagggcatcgatctctcaccctggggcttgtggaagaatcacgtggccttggcttgtatgattgttattttcctcacaattgcctacctgaaattgttatttcttaaaaaatattcttaaatttccccttaattcagtatgatttatcctcacataaaaaagaagcaccttgattgaagtattcaaa

SEQ ID NO: 93603 - DNA, 893 bp, Homo Sapiens
ttttaggtaagaaaacgaatatttatttaggttgagaaaataaataacaagaaattacaaactttagaaagttcacatataccataaacatcacaattgtgcttaattttctgacatgcctctataatatattgccccctgtattttttgaggaaaattctggaaacccccatcaagtttctttcatatattagctgtaaaagatgcacttggtgtttgttgatttcctataggtttgtgactacaaacaagggaatctgataaattctatttcacataattactatagaaatcatttctttctacatgggcctctccatggagcatctcacaacatggcagcgggcttcatcagagtgcacaagcaagagggaacatgctagcaaaacaaagccacaatctcttctgtaatctacttacagaagtgatattctatcactattcagttggaaggagttcctaggccccacccacactcacagggaggggattacacagggaagattacacaggaggcagcatccttgggaactgtgtgggagctgtctgtcacagcaccataggacaccttcatagggtggtctggactctggcctcataccttcctgtcatgtgctggctgagcaggcacaatgggccaaaggaatacactgaaagccattctgacatcattctggggttccttagatagacactgaagcaactgcaagccacctaaacataccctgttaaactcaaaatgtgccctcaactcaccagtccctcatttggatctcaaaagtgccattggccattcgaatatcatctcacacaactggctttaactgattacagttaaaatatcttattcttgcaaattttacaaaagcataactcagtgaatacatcagaat

SEQ ID NO: 93604 - DNA, 491 bp, Homo Sapiens
agaggaatataaaagcagtgggatatctggatttcttatactcagtcaaccacaacatggccttagtactgaactagcccagggtttcaatggaactcgtagatctcattcccaaggctggtcctggttgaagggagaaggtcaaaaaaggacgtgtcttctaaaaggcattacccatggaaagccaagggggagggttgcccactaggaggagcttcttttgtagaagccagaatggaggaaaggggctttctgacttggagcatctgaggaaatagattatttgaggatctagtactcccagaataatctgtaaccacaagaaacacatttcttgaactccagcgccccagaacaggatatccatatccaatcccatcgtatccatcctggatgttatgaatttccagagagggccacttctacccccctaggagtcatacatctggctacttatttgttaaaaataaaattctgtaccatttataaaa

SEQ ID NO: 93605 - DNA, 309 bp, Homo Sapiens
tttaaaaaagtttaattagttgccaacatttgaaaaaacaggagatttcacattttaaaaatccaggtttccagtttctcttgcaaaatcagataacatggtagcatcggcccaaactcaagccaggcaacaactggctggcgcaaagtgcaggccctcggcgccgggacattacctacctggcccacctcattctgtgtgctctgcctgcgtgtccccagatctagtcccacccttcccttcaatgatgggaaaacggagggagcccagtttcccagccctcaggccagtgccccttcctttacacct

SEQ ID NO: 93606 - DNA, 605 bp, Homo Sapiens
  misc_feature (266)..(275): n is a, c, g, or t
ggataggaatatagaacaagtttttacaaaaagcaggctggtaccggtcggaatcccgggatatcgtcgaccacgcgtcggtctaagggaacattcagcactctagcggcatctgattggaagttccctcacccaagtaatctcaattccttcctctctccatccctgaaagaaacaggatggattttcctctcttctccctgctacattcactaccagatttttatgctacagtttcattcttgattgtgatttctccatggaannnnnnnnnnctggtgacatttctatcatggaaataggaagatttcggagtgctttgtgaagatttcaattgtctgtctctttctctctttgacttgtatgaaggagattgtacattgcctgatatctctttgtaaatgagaaatattgctaacatccaagcattctgaagtcttgcttatccttctgagtttagttctcattttgttttacattttgtttggggacttggggcaagctatttattagagttttgcaacagagttctggtttgaagcctctaaagactacctgtaaaattcaaagaataaaattcattttaaacgctcttttaaaaaaaa

SEQ ID NO: 93607 - DNA, 450 bp, Homo Sapiens
tattgcagaaatgacagtgtgactccaagactaggccataaaagaccttgtggcttctgccttgctctctcttgctttgctcattttgagggaagctagccactatgtcataacgacacttggtaaccatgtgtagaggctcacatggcaagaaactgaaacctgccaacaaccagcaccagtttgccagctatgtgagagaagcaccttggaagttggtcatccagccctggtcaagccttcagatggctgcaaccccatgaaagaccctgagtcagaaccacccagctaagccactctcaaattcctaccaaaagaaattatgtgagataatgtttactggtgttgcaagctgctacgtttggaggtaattgttatactgcaatagataacatgtaggtactcattaattatttgttaatgacaaatgaataaatgaatgatgaaggc

SEQ ID NO: 93608 - DNA, 400 bp, Homo Sapiens
gtgggggagaccactccagatctgcagatgatttagtccaatctgtcactttgggaaatggaggaccaggaggggcaattggatctatagcagtcgatgggtatgatggcagaattgatggacacacgccagcagcattgattgcatataccaggaattgatagtcggaacattcaataagaccagtcactttataagaaacacccaaagtcatggctttgaaaggatctcggttaactctcttccatctctttgaagtggtgtctttcatttccagccagtaccctgtcacaggagagcccccatcatattctgggtcttcccagttgacagtcatggagttacgagtcacgctgctaactgttggtttaactggtggcccagggacagaaaaaaggtt

SEQ ID NO: 93609 - DNA, 505 bp, Homo Sapiens
  misc_feature (318)..(441): n is a, c, g, or t
  misc_feature (444)..(444): n is a, c, g, or t
ctctccagccaacaagaaaggcctgtcaccctcgccttgggtgtccctctcctgcctcagcttaattttagaggatattgggcctggttttcttgtcccttcataccctagtccctggacagctgaggagatgaaaggagccacaccacaacaatggcggcctgcccctccacacaggggagaagcacgctcaggcttcctctgctttgtctcttcagacctgtggttgctctgctcatccatgcccaaggttcccaggtgcaggacagaggtgtggcctattgtaccttgttctgaaataaagcatctcctgcttcnnnnnnnnnnnnnnnnnnnnnnnnnnnnnnnnnnnnnnnnnnnnnnnnnnnnnnnnnnnnnnnnnnnnnnnnnnnnnnnnnnnnnnnnnnnnnnnnnnnnnnnnnnnnnnnnnnnnnnnnnnnnttnaaaacacccttcgacccccaaaaaacttttaaaaaccaaacctttggcaagcggggccccc

SEQ ID NO: 93610 - DNA, 747 bp, Homo Sapiens
  misc_feature (119)..(176): n is a, c, g, or t
ggagggcggcggggtggttccagggtatttcaggccccatgggtggtgccacaagcatgtgaccttcagggctcagagttggagacagcaggcgagctggttatgcaggggaaagcggnnnnnnnnnnnnnnnnnnnnnnnnnnnnnnnnnnnnnnnnnnnnnnnnnnnnnnnnnntatctgtaaatacacaagtacagcagccatggcttgggaagggcatagtgaacaggagctcgtactgctcagaaataaggatctggatcacagcatcagcaaggactaagagacacccctaaggaagaaaagtagtagtagtggcttggaaccaggacccacaatatctccaaggatgccggtatatcccacttcatttcaatgacccacttactgagttacattccatactacattatcaatgcctccaagtcagagactatgtcttacttttgtttgtatgtctagttgctagaatagttctgagtgcacagtaggtgatgaggtttattttgatgttgaacaaatatgtacaacctgcaaagatatttttactcagtgctttatccattcagattttgccctcatgaatcaaaactgtagttataaatataaataaatgtataaatgcatatatatgtgtgtgcatacaatcagttggccctccatatctgtggattccacatcctctgattcaacaaactggataaaaagtatttttaaaaatcaataaaaaatacaagctaataaa

SEQ ID NO: 93611 - DNA, 453 bp, Homo Sapiens
gcggccgctgcttgcgcccgccaccggtgcaaccttccgtccggtgcagccccctctgcgcctcccgcgcggctcacatggagcctcggctctgccggtccgggctcctaccttctgcgagccgggcccaggcgggcggtggcggcccgcagaggggggtggggaccagccgggtaactgacttgtttgagggtgatcgatgggggagggtaggatgcgcaaggaccattttcttatattccaatgctcgtctttggactagtcgtgccgagctgttgcagctcatactcctgcaactgctggcatttggagcgagctgaaggtggacaatagcttgccatctattgtgttcaggcttcggaaaagaggttgctccgacctccgctcataggacttgttttcttagcctttcttggagtgcggtgtgcatagggtgataatttctttgacacg

SEQ ID NO: 93612 - DNA, 794 bp, Homo Sapiens
  misc_feature (603)..(613): n is a, c, g, or t
cgccaagctgcccaacagtaatcctgcacgctatgaattcctgtggggtccaagagcccatgctgaaaccagcaagatgaaggtcctggagttttgggccaaggtcaataaaactgtccccagtgcgttccagttctggtatgaagaggctttgagagatgaggaagaaagagtccaagctgcagctatgctcaatgatggcagtagtgccatgggcagaaagtgttccaaggccaaggctagcagctcttcccacgcctagtgaagttgaagcaaattttgcattttgtggttaaagagggcagtcactgttccaaggagtgaaggactgggtgttactggagggaacacactgtataataccttttgtttctgttctaaatggataatttgaagttttatctgtattttggggcatatttttcaaatgttccttttatttaacattgtaatctaagtttaggattgatactggtcacatttgttgtttaagagtaaaaattttgctgttttgtaaaacagattgagaaaaattcgatcttatttagtgatctgttgcaagataacttggaattagaataagcatttccttgaaaatgtttnnnnnnnnnnngtcagcagtaaaatgtatggcattaagaaatagagaaagagtgtaagatggtcaatatttggtttcctaaatgcttttactctgtgttttaagaaaatgaaagataaataaccatatatgtctggcttacttaagaatgtagaattaaatcataataaattagacctcatgctgacaaaaa

SEQ ID NO: 93613 - DNA, 254 bp, Homo Sapiens
aattactaagaaaaaaattggtgagttcagtagctttggtattatgagtgcaaatcataatagctccaatgtggaaaataaaatcaaaagtataacttgtcacttaatgttagaaaattgcctaaaatgcagtgtaataaataatctctgtaccaaatagtaatttaaatggggtaattttctgcaaggaaaatgtactgtttttatgtttccaaccctcttgaattaaaataaaaacaacttcttttctaaga

SEQ ID NO: 93614 - DNA, 634 bp, Homo Sapiens
cggctcttcagggagcgagccaggctcaaggaggaagagctgcgtgagagcccagccagtagggcgcagcaggctataggggacagaaaactcaagccaaccagggccgggcccaggaaagagcaccccagaggagcggggaggggcagcctctggcgatttggtgatgtgcactggccctgccctgggggaggggacccagaggccatggctgcagccctggtggccaggggcccccctttggaggaacagggggctctgaggaggtacttgagggtccagcaggtccgctggcaccctgaccgcttcctgcagcgattccgaagccagattgagacctgggagctgggccgtgtgatgggagcagtgacagccctttctcaggccctgaatcgccatgcagaggccctcaagtgaccctagggaagaagcaagaaacttcggggctgcagcctcaggatgaggcagaaggaagggtaagggaaaggatggggaccacaaggaagagccaggtgctgctcagcagaggatatgggtgggagcgaaagttgtaacaagtgggggtggggggtgcgggccgccaccactgctccttgactctgccgtttcctaataagacctggttccacatctc

SEQ ID NO: 93615 - DNA, 429 bp, Homo Sapiens
  misc_feature (331)..(373): n is a, c, g, or t
ttcttgtagaatatggtttaatagttggttcattgcagtttcctacatgatttcttggcattatttcatagaagtaggaaggaggctttaagtttcctttctgtttacctagaataggtataaaaactgggaatttggatgcactgagttaacccctacaccatttgtttatacctaggcagtttctgacttcctctgcacattccagaaacttgagagctttaggtagctactatagtattaggattacagttctctaggccaatgttgctttaggggagaatagcattcattagtcccaattagttcattgttgctgatgttgctgatnnnnnnnnnnnnnnnnnnnnnnnnnnnnnnnnnnnnnnnnnnntgcccattcttggagataccagcttcaaattcaccaacaccagcagcaacaatcag

SEQ ID NO: 93616 - DNA, 722 bp, Homo Sapiens
  misc_feature (42)..(96): n is a, c, g, or t
aaagaattatttggcccagattttggtgggtattggatgccnnnnnnnnnnnnnnnnnnnnnnnnnnnnnnnnnnnnnnnnnnnnnnnnnnnnnnncaataatattaagtagtattgaaggatttaatataggccttgatacaatcagagttgtgctttggaaaattacttggaaaaaaattagaactaggaatggaggattcaggataggaagcataggtcaaatctagtcgtgtaagtgcaaggtatctaggggatggcagtcatggaaatgcacctcttagctctcccttctggaaagaacctgctggtgagctgtaagttgtacagttagtggacagcttctagtccttaatgctttcaggatgacattagcttttgaaccacagtcatgctttattctgggacagctctctaccaagacagaacacggcaagggtgctagagcctggtcattcctgcccgatgttggacaattgcaatgggcattccttgctctcaagcttcccattggattagctgaggctttgtctttattgtgatctgaggtgccccctgcccagtgctgttttcctcacccatactcccttccttaaacatttttcagatctgcatcatattctgaaggctttcccaacccaatatttctccttcttctttttatctttcacagacattatccacaacaaaccactctcctgtttgagtaaaatgagaaagtt

SEQ ID NO: 93617 - DNA, 415 bp, Homo Sapiens
agggaatttggccctcgaggccagaattcggcacgaggcctcgtgccggcacgagggtcggtctccgacttcccaacgtgggcctcccagctgcgctggatacttaggactcccacaggcgtccccctcagattggattggttctccgagactccacccgataccccaactccgctagttcaggcgcctgggaggcaagaccagcgtccatgcggaaccctgctcagtgcgtggcatgaggggtcggctgtgcgctgctgcctcctcgtgtcttgttggtccagacccaactagggttgggggcttacttcccgagctgtacctgagcggaatggggctgaggctgataactggattgctctctggctacttttccccataaaccttgcaacaagtagtcccgccagtaaaaaaa

SEQ ID NO: 93618 - DNA, 733 bp, Homo Sapiens
gtatctaaaaaacggtttaaattttctcaaaataaaaggtgggggagcaatacaccaatttatatcattaaaacaagtcaacaatacatatgaacaaatctctataaagaacattttcttaaatatataaatcataactatagtaaataagtttaacttaaaaagacttttcctcccaggcagcatagactgtgtatgcatattgttcaaattccgtgaatgacttcaaaccatgaagctttattttatggacttaaaaaaacacctatatgaatctaggaatatctgaatgtcttatcaagcctctaaagcaaaaataaattattgaagaacatcagtattttctaaattcttagactgtcagtactctcaagtcaggtactcaaatggattctcagaatgtctacatttagaaatgtgagtaagtctaatatctaatttaaaggaatatcacatctgggctcataggccacttgtatttctattttttcaaaacaatagctatctttttgcgagcctattttatgtcacacattttacatatatctatgacctcatttatatcctcatataaagcctgccaatgtgataataatctaatccaggtagatagaaataattttggcaagttagtatggtatgtgggagatactatagagtagatagcaccgtccttgtaccccgtatatccaataggccctccatatgatcctgctctccctggtactctcgt

SEQ ID NO: 93619 - DNA, 421 bp, Homo Sapiens
tgagccactgtgcccagccttgaagaacaaattttaacatggtcgtttccagcatattattttatttgctatagggatgttatttaagaaagtatctacggtgtctttcaatgattttatctactgtatctctcaatgtctaaacagaagtgaattaagagttgaagagatacttcttcttcccaataaatagctttatatttccacataaaacagtaaaaattgtacaactgcttgtaacttttctctttcctttggctgcaaggctattcagggacaaatttatagtttagtgagaacatgtggcatatgactgtgcttactttatgtttttcttgattttgttgttactgccataatacttcacattattactgtaagttgcatcaatccactgtgcaacaagatagtaaataaatga

SEQ ID NO: 93620 - DNA, 571 bp, Homo Sapiens
gaaagaggtggcatcggcggttcaagactgatttttctatctcttcagtgcctctttcaacaatgaagatcaaaccaggttttgtgcaaatatctgctgagtgaactacttatttgaaaatacatcattggttaatattcccttttgctcattgaaatctcaaagactacagaccccgcacaagacattctgacattcccgtctttgaaatgaatgacagcaatgataaatatggctcacctccagagatacagatctcacaacttcatatttttaatataaattattaatctgaggtgtggtgcaattccattagatgaaagagatctacatattcagaagcacatgattcttcccccttccatgattccagtggccaataggtaatcagaacttctctgttcagctaaaagacagaaaaagagcatatgaaagacgtattttcccagaagtgctcatcctgataactgtgtacagcactactgctcatattccattggccaatatttaggtagataacttcactaactacaaggtatgctgggaaataaagtccagatatgtgtgaaaa

SEQ ID NO: 93621 - DNA, 499 bp, Homo Sapiens
tttgaatctgtgaaatcattccactctttaatgaggtcctcttagaaggggagggaatagatctcctttagtgacatgactttgacaagcaaatcaattcattccatttgtttcctctttgaaaacagcaatcctcgagcgttacataatctaatcttcatgcctcactggtttgttctgtcctcctgaggaattggcagatggtgccaatgcggagacccgcacacacgcctcgcaagcctcatggtaacaggagagttgctcacagtgtctgtctctttgctgtggggtccctcgctggcatttgtttccctggatcggttggctctttagcatccctcaggcaccgctggcttcttgccctcggctatcattccaagattaaattggaaatgcatcatcaggtgctgccagacctggcttctcttctattctgagaactgatatcctgtggctgacttaccagggtcgtcatagtcccaccgcacggtattgggag

SEQ ID NO: 93622 - DNA, 472 bp, Homo Sapiens
tttatggtgctttagtaatttaataaggttgttaaaataagggtatctgtggtttcatatataaatatagcaaatatattttaacaggcaaaggtttcatgtttcaaattacccttttcaagggaactagtcacactcaattattgttctgccacacaaactggacaaatacacgatttgaaaatggaacagcaaattaaaatccgtgcgaggcaaagaatactgagtagcagccccttccgaagctgaccacactgcttgattaagttcttacgaggtggtttggtaagaggccctttcctgatctgataactgccacggagaagccaaatgcagagtcaatctgcaaatacttaatcctccagaaggcagattaagtgtataattgacctatataatccatgtatcatctccagtcaaatgttccctgggcctggttcccaatgacacggggcctgaagaaagccagtgc

SEQ ID NO: 93623 - DNA, 400 bp, Homo Sapiens
tttcgctattgacaagtcacactgatttatttatcagacgactggaggttggtcaggaaaagaaaatgaggagttgaggggaaaaggcacaagtgttttgaatgatcagggagctaagtttcctccttcggtgaattaatggacagaaaagcccagaatcccaggatagacacaggatgatcccattttctcagctccatctccttttgctccgtcctgggcttcagtcttaaaccaaaagagccctccaaggtcagagaagtgcatgaggactgccaataaatgtctccaacccatgcggggcccgaggtgtctgtcttggggtgctgaggcaggtgaggatttgagcagcagaggcaggctgagtccaggcaggtggtggttggggttcgtggggccc

SEQ ID NO: 93624 - DNA, 410 bp, Homo Sapiens
ttttcatttagtcagagaaaaatatgtttggaacattaagactagcaagactaaagtagggccatgtaggcagatctctcaaaatgggcttagcttgtgaatatatttatttctcatgtaaatattcaccagagaatattcactgcagaggagggtttccaaaatcaggcggtttatacatgactacttttttaccagtcacataatatccacttaacaggagatcaatggactgaagtggaacatagcatggtggtaggaattttggttatggaagaggttaacgacatagaattctcctcatcagtgacaattcccctcactgaggaattcaacgtagaatgccccacaatatattctgttataagcagacaccaatgctgagctccccatggcaccaacagtaagga

SEQ ID NO: 93625 - DNA, 441 bp, Homo Sapiens
tgtctgagcacacctgtacactcttattcattttatataaatggaaaccatggcagtatgggcttctttgatagactcaggaaacaggtggatgcaatacttcatttagaaaagatgtaaatatatcttcccaggtgtacttaatttgtgtatgtcctggaatcataaaaccttggaaactagaaaggaaagagtctcactactgtagcctacttaattaatctgccctgtagttcatttgtttgtacaattgcatttctagtgttaagtgcatggagagcctggctactggtttcctgatgccttcagcaggcataaatcacctacagaggcagtggcaacatggtcctcgtttttcctccgaaaaagctttcctcattttctcaacattttggattccaagacaaagtggttaataaaaccagtagttctgtttcaaaa

SEQ ID NO: 93626 - DNA, 759 bp, Homo Sapiens
agtactaggggagtggggaagtgagtcaggaaagagagagaagctaaaaaagagtgtatatctagcaagttacaccatagggaattcgacttcagttccacctgggaactctaggaggctatatacaacatatcttagagttatcctgtcctaggggaggggagtcagagtatttatcaactcgtcagtcattggttgagagttactcaggaaaatcccccagtatcttctggtatgacccatgtgtgggcagagtaggctctggctaccacagaaagtattcagacagaattacagtcgctggcagctgaaagtggagctttcctgcgtggaagtggtaaatgatgaagaaataagggcagggcaccaagcacatctgctacatcacttggtgtgtcttaaatatttgctataaagtgaatcttaaaaccattgaatcaagagatcagaagaatgattggcagaatcagcatagattaggaaacagtagagaccttttataacaatgggagaggggctttgcctttcttcttgattgtgagtcacaaatccgtgtaataagccatttcatatctaattggttgtatctagacaatttaaaccttatgtcctggcaaaagaggtcaatcagatcactaatgactaagaaatatacttttttattgctgcctatggtgaaatgtctttcagaaaaatcttcatagctttttgctttgattaaaaataatggcatcattaaagctcaataacttcaacaaa

SEQ ID NO: 93627 - DNA, 408 bp, Homo Sapiens
ttttggtttgccaagttcctttattgtgtaatctttaacatctagtatatttgttatacatggttctaatgctggaaatctgctgtacaaaaataaagggatttgatgtttacctaaactgcacaatttcacaatctaaaactaatacacttaacatacagtctccgctaagccaatacaattatttggatagataactagatacaatagaaataaacactgatgataaattgaatcaatagtttcaggtctaaaaaacattaccttgaatcatctatatttgatgtatcttacatctcttttgttaaaatataaattaggatattttaactgtgaagaaaattacaggaaaacaaattcttgtaaaaaaataatgtaaagctttaaaaacagttaatatctcctgtt

SEQ ID NO: 93628 - DNA, 374 bp, Homo Sapiens
gggagggaaagtcctttccctggtctcatgtttttgtgttgaaggacctccattgaaatacaactcttggcctgtagtctcactcctcacacactccttccagcagagaaattaattacctaattgctaggtggtgatggggtgctaacggggtagaacaactctatcaaaggactgtaaacttcccattttcctccctagagacagctccaaactttcctttgggtgcagagggaggctttggatgtgtatttggatacaggagagagttggcagtcacagagtattaataggctctttggttcacagatctaatgtcattttctccaattggtttatcaataataaagctgacagtttaaactctaaaaaaa

SEQ ID NO: 93629 - DNA, 479 bp, Homo Sapiens
cggaagttagaatccagtctcccagccctcaaccccatgctcctttccatggcgaaggaggagaagctcgccgccaccccactggcctgctctgctgaggttgtggagcaccgggaagcaggggccgagccttccccgctctgtgcctgggggctctgggcactgtctacacctgggaggtggtcagcatatgtgcgtgggaacttgctggaaggaaggaatgacccttctagccatggaacggtggtcatccgtgagccacggcctcaggaggtgccttcctaatgtgcaggtgacgattgcctctgagctcaggcatgcagcttctgggatgcactctcctttcacggcaaagcattctgcataggaaaaaccgtctctgcgtctccaagctgtggcctagcccttcattcatcaaatgggatacaactttcatttcttattaaaatctggaagtcactctccatttgtaagataaa

SEQ ID NO: 93630 - DNA, 985 bp, Homo Sapiens
  misc_feature (310)..(310): n is a, c, g, or t
  misc_feature (394)..(405): n is a, c, g, or t
attaaatcaatcccaatttttcaaccattaaaaagggagaatctcccatttcagtctaggaccagtattacttaaaccaaacagaaaaggttttccaggaaaatcaggaccatcctctttcaaaatgaatgcaaatctaccaagcactaccaaaccgatttagtaacacaaaaaaggattatacgcatgacaagtggattttatcttaggattccaggcttggtttacatcattcaatatatatccccatattaataggataaaggagaaaaatatatgatcatctcaatagacacagaaaagcatttancaaaattcactaccttttgatgagaaacactcagtaaactagtaatagaggaaacttcctcaatctgataaactgcatctgttnnnnnnnnnnnncccataactaacatcatacttaatagtgaaagactgactgctttctccctaacatcaggaacaaaacaaggatgtccactctcactacttctattcaacattacactggaggttcctggccaaggcaaaagacaagaaaaagaaatgaaatccaaattggagaggtaaaactatattttccggtgacatcatactgtacgtagaatattctaaacaacacacaaaagacaattagaactaatagttcagcaaatttgcaggatgcaagatcaaaatgtaaaaatcaattgtggttgtatgaattatcacttaacaatctgaaaatttaattaagaaaacacatttacaatagtatccaaaagaataaaaaatttgggaataaatgtaacaaaagaagcgtaagatttatacaccaaaaactgcaaaacattgtggaaagaagttaaaaagaacctgaataaatgaaaaaacattctgtattcatggattggaagacttaataatggtaagatggcaatactccccaaattgacttatgcattcaatgcagtctctttaaaatcctagctgaaattcttac

SEQ ID NO: 93631 - DNA, 774 bp, Homo Sapiens
  misc_feature (209)..(209): n is a, c, g, or t
gccactggcctgggctgctcgatctcacagacggggcattttgagtagagacaagctctgggctttgagagctgaatagcatttttctcctgcctcatcagtcacagggactggaagtccatcttgttccctgatccttcacagatcaaggtgatgcctacctctttggagctgctgcctctagctctccacgggtgagtgaggagagntggtgggccaggtcaggcctgccgtattccaggcctggcaaagcagccccagagttcttccacaacaggaacaggcccatttggatcacgcttctccctattccagaacagcaaacttcctgggtgagggcctgctacagagatcccaggggacacttccctcagcaaagagtagagttcccatcccacaagagtcctaggaagcaggaaagcacgaaggagcagccagcctcttctccacaggcagtcatctagctttttaccaaaggggaagtgccgttgctccccaagtccagagttgcagacgccctgccccaacccccgtccagaatctccctttgcagtgttctaatccccagagcccctctgcggtatgtatagagttgttaaaaacgttcagaaacccagtgaagcccatttcgttttcaagccctcccatcactgtgactctgaaattctgccaagtacaaatattagcgtttggctctaataagggtatgagaaaatgtttcagtcttttctttgtggctacccaaaatggagatcagtgtttctaaccaaggaa

SEQ ID NO: 93632 - DNA, 519 bp, Homo Sapiens
gcccacatcttgaaggtggtgcacaagatcgtgcaaccagtaggccgggccaccagatcatcgtgcagaacgtcaccatggacgaggagacggcgctgggcccagaggcggcttccgccgacaccatcaccattgccacccccgagagcctgacagagcaggtggccatgacgctggcctcggccatcagcgagggcactgtgcttgccgcccgggcagggacaagtggcactgaacaggccactgtgaccatggtgtcatcagaggacatcgagatcctggagcatgcaggcgagctggtcatcgcctcgccggagggccagctggaggtgcagacggtcatcgtctagcatgaggtctgcggggtcctggccgggcagggacagggcagaggactctgagcgccccacccatgcctgcctggcctggtagagaagatggcacaggatggaggcgccccaagacggacagtgtacataagagtttcttgttgctttacaataaaacatgagaacctgc

SEQ ID NO: 93633 - DNA, 357 bp, Homo Sapiens
tttagagagagcgagtcttgctatgttgcccaggctggtctgtcttggcctcccacagtgctagggtcacaggtgtgatccactgtgcctggccgaggggtaaactttctgatatggattgagccagcacagaaccttccccaagctctactcttttagagacagggcctcgctcagtcgcccaggctggatggagtgcaaactatactcttaagtgacaaaattcacggcgcagagaggtgggtgtggcggggaaggacaccggtgaacacatcgccttgtaaggatggctgtccccggtggcccggaaacaactaaagcaggggcctgagaacggagggcagcgggactcgatcg

SEQ ID NO: 93634 - DNA, 645 bp, Homo Sapiens
  misc_feature (525)..(534): n is a, c, g, or t
  misc_feature (536)..(558): n is a, c, g, or t
gattaaaaaggaagaaagaaatattaaaaaggagagaggaggcggagtttttcaaaatcgacctaaagattaactttcaggtcagcacgagtgaagcgtggtttcctgagcttgaagggctctgaattcaggaaaggatgagtactttttccagagaacactggagcctgtggagttccattgctgcactggattaacactgcacggctaggatcaagaatcctgaaccacattggttgacaggaactgcaggccccctggaatttacctggccatcagacctgccagcaacagtggcaagaggactcagaggtctctatctcactgtgctgaccttaccacattcgtctctcactccccttcccctccaggacacggggacaccatggacacagaaactgaagaacaaggatgcaacgctactcccttcccctttctgccctctcctccccaccccctttgcagaatgcatagttacaattcaccttacaacataaagaagcgacgatgaccacatgtgggacnnnnnnnnnngnnnnnnnnnnnnnnnnnnnnnnntccaacaacctcttcttaaattcagtatcaaaattcacatttgcataataatacatttcaaggccatgagagaggaatgagagcacc

SEQ ID NO: 93635 - DNA, 341 bp, Homo Sapiens
tatccaagtctcatcctggccccctttccctcctaactccgctgtcacttctctcctcttggtccctagaagtgagagtcctgaggcacaggaagagtgagtagctcgtgcgcggctcctggctgaggctgaggcccggggtggggggaagagccagaaaaaccacgggaggagggcccacccttgagaaaagggcagggccaggggctgccaggcgagaaaacctcgaagaatgggtggggccttgcacctcatacctaccctcatacccacatatgcacccaagcattctgcacctggctgatggttttgcctaaataaatgagccagccacaccgaaa

SEQ ID NO: 93636 - DNA, 278 bp, Homo Sapiens
gaacctggcacagtggagaagagcacaaggagacatgatatctaaatatgttgtggtatcctggatggaatcctggaacagaaaattgacattaaggcaaaaaatatacaattaatgcgtgcacttgttaaatgaatgaaaatgtataataatggtgtgataattgtgaaaaaatatcccacatagtaatgtagaaagttaataaagaaaaccctgtgttggataaatatacatacactctctgtagtgacttccaatggttctgtaaacttaaaact

SEQ ID NO: 93637 - DNA, 565 bp, Homo Sapiens
actccaaattgactttgcagcagggtggcagggtcaggagagtctggtcctgcctagctcagatttcatggcacctgcacttgaagcaagtcacttctttatcacaggtgtcttgaaacattagcttcttttaccaacctgagaaaattaggatgacctggcaaataagatcttgaataggccaaaagcaagtatcttgctgtgtgtagtctcttggttaaagtgaagaaacagtactgttcacacctttcttcactgagattccagtgtacatgagaacatatatttattgcatgattttctagatacacagtctatgcattattcatatacatttattttagcctaaagtggttttcaaatccagttcttcaagccataaatgaccaagatccaagcaatctgaatttgtttttgtgattatttgactggaatgcttcttaagtggaataactatactccgttatccacccgatttcctaatgtaattgaaacattttctattttgccacacacttggagacaataagggtttttagttttatctactcttctattgaagtta

SEQ ID NO: 93638 - DNA, 380 bp, Homo Sapiens
gaccccaaatggtactcttgtcagctgtttctgtcctcagaaggtaagagagccctgaggtcaggcagcccctctgggtcctggaagatggctttggcgtactgatgcaagaggcggctcatgtaccagtgctgccacgggagcagcccttccaggaagccgatgtggccaccccgggctgtgatgagcagcgcaacgtacggggagtgttgggcggcctgtatgggaagggcacaaacgggggagaaggggtcatctgctgcactgagatagagcacagagatccggatggcatctatctcggtactagggcttgctgctttgtagtaggtaacacagtcttgatattcaaaggacacagatgtggtacgcttatcaaa

SEQ ID NO: 93639 - DNA, 1958 bp, Homo Sapiens
tgaaataaagaccacacggttaaagaaatctttccatattgtactttatggtgttggagtgaagccttgtagcttccatacccctatgtcagaggaggtcttacggacaccatagggtaggaatagcctttcctcagtctgagaaattggtctcttttaaaagacgaatctcatgaatattcacatcaaagacttgagctttttaaactagtgagagtgccaagtgctttttagaaaggacccatatgttatcaaactttgaaattgagttgctggaatgaagtagaggtgactctctctgtggtacacattgaatgtactatgtatgttcaagtattcaggcgccatgtcttatatactgaagaaagaaaaagtgaggcccaccttgctcttacaatgtttgcaattgttactgtattgaatacagtataatgactactatggcttcaatcttaaacctggaaacaaatatccctttttttccccttcatttcaccaagcctttacttaaaatcttcagtgtcttgtcaaatctagctctgtatcagatgctggaatattcctaacatttgacaaactggagttgaactaaaggctccacgggaaagtttctggtcttactagtgtgtatgagcaagatctgctaaaacttactccactgggtaaatggttgactgagtcaagaacaggataatatctcctgcatagttttcagtaatgtaagtgtggactagtgcatatttcagacaactgctctgcctgtgcaatgaaaaatagcctttaagggtttctttgcagactgatttcattggatggatacttaatgctgtgaaacatgataggattaacataatgttggtggatttcttgaatagaatttgtcttaacattcctctttgtgtagaggctttattttctctcttatatttgtagctaaccagctcaggtttttttatttgaactgggttgaatctctaaagaaatctgttcaagaccatgctataagacactgtcagctaatggagctgggaagggtctactctgctgacagagcatttccttgggtgatcatagtttcgaggtagagtttatgatcattcatagctttgtctagaaggagtaaaatatcatggccttaacacaaagggtgctgcgtagaatatgaattgattttggaatcagaacacaagcaccatactgaaggactagcagccaaataactgcctaggatactgatggttgtgaagactgtttcaaatgattggatctttgaaagcttcagcgtgccttagtttctaggatcagaattagttttcctctcacttggccttgcagctaaatggagaaatgtttcaatttctttgaatacttgcacatttcaataattcctttcccgagtataaccactcaagggggagcaaatttggatggatttacgacttcacaggcattgtgaggaaagagcattttccaaggctgttttgataaccctggggtgataagcagtgagccctcacacacttactttgacaatttcacatgcacttgtacttcattatttccctcttcaagagtcgtttctattctagtttctgccccatcccggggaatcctaaaggagaattaattcatctaagtaatctcaaaaaactgtaggaacgggtgctctccctgagaagcttctcccacagtgctttggtgctgttaccttgagggtggtttggacagtcacggaagtttagggctggtgcataggtgatcatctggtaaatttcaaggtcctcatcatcttaagaaacatttcctcaggtaacattggggaggggattctttcctcttggctgattcacagggtgcgactggacctccttggttgtcccattcttttttgacaatggacttttaaaacgtgccacaataaggggtgtataacaggttccattttaatgtcgcgaacg

SEQ ID NO: 93640 - DNA, 369 bp, Homo Sapiens
taccaactgccttaagcagtcttccttgggaagattttaagatccttgaacaagatcaacaagataaaacactgctaagtctaaatctaaaacagaccaagagtaccttcatttaaatttagcttgcacagagcttgatgcctatccttcattcttttcagaagtaaagataattatggcacttatgccaaaattcattatttaataaagttttacatgaagtaacattactgaatttgtgaagacttgattacaaaagaataaaaaacttcatatggaaattttatttgaaaatgagtggaagtgccttacattagaattacggacttaaaaattttgctaataaattgtgtgtttgaaaggtgaaaa

SEQ ID NO: 93641 - DNA, 748 bp, Homo Sapiens
  misc_feature (440)..(561): n is a, c, g, or t
  misc_feature (608)..(692): n is a, c, g, or t
tgcatcttgagaagatcgtgtggttttggtcttcttttaatatggtgtattacattaattgattttataaagcatgttgaaccagtcttggattgctgggataaatcttacttggtcatggtgtataatccttttagtatgttgctgattctgtcaatggcttttatttctatagtcatatgaaatattgctgtacaatcttcttttctcgtaatgtattttacttgttttagtatcaggtaatactggccacatagaatgagttggtaaatatttctctcccattttttgctagagttaatgaaagattaatgcaaattcttctgtaaatttttggtagaattcaccagtgaagccatttgatcatgaggctgagtagctgggattacaggcagaatggcacttttatcattataaaatgttaattgtttctattaacnnnnnnnnnnnnnnnnnnnnnnnnnnnnnnnnnnnnnnnnnnnnnnnnnnnnnnnnnnnnnnnnnnnnnnnnnnnnnnnnnnnnnnnnnnnnnnnnnnnnnnnnnnnnnnnnnnnnnnnnnntaaactagtgtttctcttgcagacagcatatatcacattgttttcannnnnnnnnnnnnnnnnnnnnnnnnnnnnnnnnnnnnnnnnnnnnnnnnnnnnnnnnnnnnnnnnnnnnnnnnnnnnnnnnnnnnagctattttgtaaaatactcactttgctatttgctttctatatgccttacgtattt

SEQ ID NO: 93642 - DNA, 1167 bp, Homo Sapiens
  misc_feature (918)..(927): n is a, c, g, or t
tttttttaaataacatctttaattaaagtttttgcaaagtagaatattaaacttaaaataggtcttagtacatcaaaatactaagttctctaattgtattccaagatggtctttaaaacataatatcccatatatcacagaagagcaaccttgatctgcaatgaattttacaaacataataaatatatttacgccattacacataacagtatgtacaacagcagttgacaatagtagctcagaacagcaaaaaggattagccccgccccccaagtcatagtcctgatgtagactggactgattaaggaaccttgactgaaagagtagttactaactcaatgtgtagtaacttcccttaaaagagaaaagtttttttgttcctcaaaataaacaaaaatgttagtttggtgtgttcttcattaaaccatagacaatgacaaaagacaagagtaaggcaggcttaaaaagggaacaatataaacttcggtaataattttcatagcataatagaggactaaaatgcaaagctatttaacaaactcatgaggaaacacagtaaagcaactattttttaactaaagaattcaaaatctgctatagctgattctgacaggtaggtgagagaaagacatgaaataaaatgaaaatgtaccaagatggatccaccaactattaccttgcaccaaagcttaaaaaaaagaaagttcacagatgaaataatcggaaaaacaggaattttctcaagtagaagaaaatgctaagtcataaagagaactccccagaggaaattatgtctgttttcctatacaaggggtatttaccctctgataagaatggtgacattattgctatgagaatccaaaaatagtatactcttagagggagaccactcttttcattcctccataaaagccaggnnnnnnnnnntctgtgactttcattatagcaaagaaaatattcatataaaagctatatgttatttcctaaaaccagaatctattatgctcattaagcacacattttaattactacacctgctcaagtcttgatgtaatcttagaacagaaagtggctttgcttttaaaagcgacgcgtggtcgacgatatcccgggaaattccggaccggtaccagcctgctttttgtaccactgttctatatgtcccat

SEQ ID NO: 93643 - DNA, 843 bp, Homo Sapiens
cctagtgctttccggggaggcgaccgccgcggtggaaagtgcaggagtgggcgaggaggaggaggaagaggaggtgatggcgacggaccaggggagggggagatgctccgtctagctcagacgccacgcaggctgccgtcacccttccgggtgacataccggccttggggacttgacacagcaagcaaaagacatacagaacataacagtccaggaaaccaacaaaaataactctgaaagcattgaatgcagcaaaataacaatggatctcaagttcaacaattccaggaaatatatttctatcactgtgccatccaaaacccaaacaatgtcaccacacatcaagtcagttgacgacgttgtggtacttggcatgaatctcagcaagtttaacaaacttactcagtttttcatatgtgttgctggagtttttgtattttacctaatttatgggtatttacaggtaaaaaagttatatgtttgtaatatgttaattatttataataattgcggtctgtatgggcatttactagttttgcccaagatagtcacttaggggatactggctgattcataaatttgaattttttagtatagagtagaaaagagcttcttaacagatcaaaattcaagagttaaataatttaagtggggaggaggcatatgtagagactatcttgaaaaattttcattatgaaaattaagttttaaatatttaacaaaatgtgtgcttccaagagaaagcaatgattcacgtattgattggtatcttggaatattattgaatgatagtccagtttacttgattcttggagctcaataataaaagatcatttttgcaaa

SEQ ID NO: 93644 - DNA, 418 bp, Homo Sapiens
ccacaagccagtgaatgccaaacgtcaccagcaaaccaccaggaactaaggcaaagggactactgcagtttccgtcaaccaagttgacacttcagggatacttttgtgaccaccaggcattacaaggatcctcaaagttccccaggagaatcctgttgaaaatgaagccactatcatggttaagaggatttgaaatctaagatcaggagtgactgctttcggtgaatacaagtttctaagactagaagatggacattctaaagttcagaaaaagtcacttctcaaatcactaagttatgttgcttccttcacaatgttgaccaagaatcccttcaccccttttcttgttaacattgcagtcaaacattgattatcatgcactttaataaaataatagccaaattgttatctcaaaaaa

SEQ ID NO: 93645 - DNA, 576 bp, Homo Sapiens
cggctgccattatgcaccgacccccatcgagcgccggtcctgctgcccgtctagttgggttccatctcttctgcatatttatgcttgcctgttacattccctggcctctgagtgtcctttggcagtttccaaagcatttgggcaagaaggagcttgggcagcttcacaacaggtggggacgcgcaggggaggggccgcggccggaccggcagagtttcaagggctggcgcgccggcggactttccacactgtctttcgggactggggttaggagacagcccttggccaccactgtgtccttactttgtcgctttacttggggctggacctcccctttccagctctggcgtgtgaccccgcaacgagcgtggtgtcgagaccaccaccagctggggcggtgggagcgaaggtgccccaggctcggggaaggtggaaaccttttccccgctccccaagtgattgttgcgcgctccggtgaggggacagtggtacctcgatttcccgtgtgccagcttcgggactcagctgtgcttttgtgtctctttgattagcaaaagcaaaacgaattcctcccca

SEQ ID NO: 93646 - DNA, 437 bp, Homo Sapiens
aggggtcccaggccaccgagccaagccaccctggtcaccttctggctcccgcctctgtgctgcacctgagtgtgatgccctgggaccccattaagtcaggctgagtcttgcacccacaccctgcgactccattttctgctacaaaggatctctctgatgttgacgagcagcatggagacttgggggacccccccaagcgcctcctccatgtcatccttgggctccagcttggcgctcacacacacaggaaaggacttcagcttctcctgggagggctggctggctcgaggggtggtggatttcggagttggaccagcacctcgcctagaggctactggggaggagggagcagggagcacccactgctgatccagattcactccttccctcgcctctgtcactgaccccaaagaagcagatcctgaacctggaaaaaa

SEQ ID NO: 93647 - DNA, 798 bp, Homo Sapiens
aattggactataaaagttgtcaaaaaccagctggtacggtccggaatcccgggatatcgtcgacccacgcgtcgactttgagttactcttcaaaagtggtatacctctagtttggagctgtgctgtaaaaacaagagtaacatttttatattaaagttaaataaagttacaactttgaagagagtttctgcaagacatgacacaaagctgctagcagaaaatcaaaacgctgattaaaagaagcacggtatgatgaccaaacataaaaagtgttttataattgttggtgttttaataacaactaatattattactctgatagttaaactaactcgagattctcagagtttatgcccctatgattggattggtttccaaaacaaatgctattatttctctaaagaagaaggagattggaattcaagtaaatacaactgttccactcaacatgccgacctaactataattgacaacatagaagaaatgaattttcttaggcggtataaatgcagttctgatcactggattggactgaagatggcaaaaaatcgaacaggacaatgggtagatggagctacatttaccaaatcgtttggcatgagagggagtgaaggatgtgcctacctcagcgatgatggtgcagcaacagctagatgttacaccgaaagaaaatggatttgcaggaaaagaatacactaagttaatgtctaagatatggggaaaatagaaaataaattattagtgtaaaccagaaagtactttttattaacaagtcgagttagaaaaacccccaattgg

SEQ ID NO: 93648 - DNA, 249 bp, Homo Sapiens
agatgtgtcgctggttgtggaagcggagctcggtcagcgtgttgttctggaggagggcccggaagatggccaggatgcctttgcctgtgatgtggttggagtccaggttgaggctggtgatggtcttgttggccttgagcatgatggcaatgcaaaaggccacgtggtcatcggctcgcgtgtgggccaaggcgaacagcttaaccacagtgttgaactccagagcctcagtaaaccggaccaagatct

SEQ ID NO: 93649 - DNA, 429 bp, Homo Sapiens
cgccggaggagccgggagcgccacctcagtccccccaccgccccaccccgcgcatgctcccaagagccccagaccacccttctccggcttccgagatacttcatccgttgcttgtcctggcccaccgctcagtcccccaactctaggacgacagaggttagggataaggggaatgagacacgcgccttggctgcagcattcaaggtaaaaactcctggaagaaaagatcctgcaatttggctttttgtgagatggaaaagattacaccttgccctgcaaacttcccccctttaaaggcgaaggtttgttaggttagttagcctgtgagaaaactgtgcgttcttagcaatcaaaggccagacatctgggggtacaggggggaggaagactaggataagagactctagacggggacagaattaaaagaaa

SEQ ID NO: 93650 - DNA, 584 bp, Homo Sapiens
agcacctgctcctcatcagcccccgcctcgttccttgtggcccactgctctcacggcgcctggtgtgttgggcagcacacctgctgagtgagccacacagagggcccagggccggggctggtcagtgccctcagcatcggcagtgggcttctaagcaactgaaaactcttccggccgactgaggaagagaaaaggttaacaggaaattcctcaaactgcagggcagtgccccgaagcccacagtgaggacagcgagggcacctgcatcgcctggactcagcgctcacccgggacacatgatgtgacttttctgcccacagacctatggttcggcctcacagccatcaacaaagtgtggggccggcagggcctgagctcagctcaccgcaaggagcctgggcagtgcggcagcttctgcagagggaggggttctgcgtcccattccccaagtgggttctgatgttggaaagtcaaaaagaatgaccaacatccactatcaatgctgagtttgcggtccatcccaccacaccatcgcctgaaagaacatctcatttgctctccgagtcaaaaggaaaagagcaagc

SEQ ID NO: 93651 - DNA, 602 bp, Homo Sapiens
ccctgactgaatacctgtgaacaagttatatcagtgactcaggcttattatctgtaaaatggggattatagcattcctgcctcatagggatgttatgagatttaaataccaataagtctgtacattataaaccttatcagattggtgtggtgaaaatgctcagtaactgagcctcgtgagcattagaatgttgagatcagcatgaagttagcctgtatactgggcatacacattcttctggatttgctccttttgtgagcaatcaatgatgagctaaaggcatttgctaactagtaggaatgaaataaggtttcagacaggatcttggtgggtgatgtagattttatctgtcccatttgtcccatttctcaactggaagtgagtctggccttggtctgcatctgtgctctccccttcacaaaaggcaggcccagagagactccagagatggcccctgtctcctgtgtgtcctccgccgctgtgtccacttgggcacgtcaaaggtatgatcggtacttatctgatgaaaacaaatctttgtatatacagttgtctacctgggttgaatatttcagaggtataaagtagtttaaataaataaa

SEQ ID NO: 93652 - DNA, 405 bp, Homo Sapiens
tttcacatatcccagaaagcctcattttaggacagcatttagcagagtgtattcaggatcccactaacgttttcggaagacatgacttccagatgatataaggctccatcaggaactgtgcaggactgtgcactctgttgatactcacatggtggaattatatcgcccttggccaaccctaaagccatcaagatagcaggtttggaataattcactgtcgaagtcttcttgagctgagcagtcatgtgagcttggaagatgatccctctccagctgatccttcagctcaggccatcatctacatctggattcctgacccggagaaactatgagtaatgtgtgctgcttttgagccactaagctacatggtaataggctatgcttcaataaacaataatacacttg

SEQ ID NO: 93653 - DNA, 505 bp, Homo Sapiens
  misc_feature (37)..(37): n is a, c, g, or t
gtgtccccagtgaacgtgacagcctcggcggtcgganagttgaaagccacgttcaccttcatgagggaggataggtgcatccagaagaaaatcctgatgcggaagacggaggagcctggcaaatacagcgcctatgggggcaggaagctcatatacctgcaggagctgcccaggacggaccactacatcttttactgcaaagaccagcaccatgggggcctgcgccacatgggaaagcttgtgggtaggaatcctaataccaaccgggaggccctggaagaatttaagaaattggtgcagcacaagggactctcggaggaggacattttcacgcccctgcagacgggaagctgcgttcccgaacactaggcagcccccgggtctgcacctccagagcccaccctaccaccagacacagagcccggaccacctggacctaccctccagccatgacccttccctgctcccacccacctgactccaaataaagaccttctcccccaaa

SEQ ID NO: 93654 - DNA, 650 bp, Homo Sapiens
  misc_feature (373)..(390): n is a, c, g, or t
aaataattagttgcctaatttgtgtatccaaatatagtaattgtttttccatagtcatgacttaaatattctctgtgtgtaattttcagttgcatacatttttttgcagaatcaaattgcagaggaatacattcatttgaaatttctctagggatgtgtttataacccattttggaaagagtagaaagattttttttctcttccaaatggctatgaaggtggataacttctctgatcttttagtaaacacttttatgttagttgaatggtatgcagttagtcataaacaggagagattgaggaaaaataacatgcttaatgcaaataaattttctgtacctgataagttaattggaattttttcctgtaatcnnnnnnnnnnnnnnnnnnctggtagatgcttgttgatttaaggtaagatagaaaagaatcatcaaactatatgtaaaccacagccaaatgatgaattcatagtttttgctcaagtagagggattatctgaaagtacaaaaagaatttgataattgagaaatacattattttgaatgcacatttgaagtagctaaaaattctacgccacagctgaatgcactggcagtttgttaatcacatccataaacatgagtcttctacaattggagtgggccccc

SEQ ID NO: 93655 - DNA, 437 bp, Homo Sapiens
taagacaattttccaaagcaatcgtgtggtctttaaaatattgttatgtaaatgaatctaatgtgtctctaaattcattaagtgggttggagggttactacccctggagggccccagcgaaattggcagagacattttcactgtctaggttgtggttgttgaccttttcttctgtcttgcttaccctttcctagggaggaggcaggaactcgaggggcttatcggagtggcagaaggaaagcccccactgaaaatgcctgttatgcaccttctgggaaccgtcctcctctttcacctcctcacagccccagctggaattcccaaatgtagcctaaaccagtaccatacctgctagacaaattgtataaattagacatccctaagagggaggagaattttggatggggagcaaataaaggaaatggaagctgccaaaa

SEQ ID NO: 93656 - DNA, 301 bp, Homo Sapiens
aaaacttaaaagatacttttattgagtactattaagagaatcacagtgaagcactttcttcactatcttatctgttattcgtgtttcattcaaagttggtttccctccacacttggtcaaaatacgtcttttgctttcaatctttatcctttagtcaaaagggattttgagccatttgtacaattgcagcttgggtttcagaacgatgtggcagtacacccttgcaggtttctgtggcaggtcggtctccctcctgccttcaacctatggggtagaaaagacggtctaccagttatttttc

SEQ ID NO: 93657 - DNA, 504 bp, Homo Sapiens
acttgtttcctgtgtagatagttctttaaggaatcagactgtcagttgtactttaaaccaagaacaataacaacatagaagtaactgttgataaatccagcaagtagtatatctgtgatatatttctttttcctcgtaactacgaaataacatacatgtagttattttttctaagttgttaaagatctatctttgaatcattgatgttaataacattttctcatggcacagattactgtggtgttaattctactattaagttacagtaatttgaactggattaataattctttgttcagtctcattttgcatgacaaaacccccttcgttatatgtgcttgtggtgtatttaagcaagaagtacaaaaagtgcctgggtgagttccagcctggccagtgacatcattttggagatgttttgtcagagaaaatgatgactaaataaatacatggaacctatgggtaaatgtctcattgttgcagattaaaatttgagccatagat

SEQ ID NO: 93658 - DNA, 446 bp, Homo Sapiens
tctgtgagaacctgggtgcagagttctgagaccttctaatttttcaagaaaaccaggtcattcaaatttttatgtgaaactgtctggtatttaaaagcagccaactaatctcaagtataaacagacaggcacgcctaatgtgcaagtcacactctgctctccctcctccctcccccctccttggtcctcagggagtgctgaggcttctggggtctctctgaccagggtggagccactggccaccagggctctggagcacttgggatttggctcatccaaaccaaaacctgctgcaagtgcaaagttcacacctgatttttaagacttagaataaggaggtggggaatgtgaaatatctcatttaatagttttagattggtttcatgttgaagtgataatattctggatatattgggtaaaataaaattatattattcaccggcaaa

SEQ ID NO: 93659 - DNA, 578 bp, Homo Sapiens
catcgtcagtcaggagtcatacattccttcattttgaacaatcaagtcacagctatgctaggaagtcagaaatacagggaagatgtgattcctgctggtagaagagacaggcataagatgcaagggagcctggtgtggggagaattatgctacgaaaaggagtaagccaaagcccagcaccattttgcaaccctaaatatggatctaggcaatggccatcaacagacgctaaaacctcaagatggaggagcagtggaaacctatcagggaagaggcaggctgccaccactggggcccctcatccatcctcccatcagcaaaggtggggccaccagacctcacacgcctcctgaaggcatctaagaggaggttcacagtgccacatgcaggcatctctgccacacgcagctcagccgggatctaattgagcggttggactcatcgccagcttacggcaagtgcacgaaacacaggcacaggttaaacaccgctgtgagcaagcaatgaggcaaatacatcatatggactattcgacaggacaaatgacctggctgctccaataaatcaatgtcatgaaa

SEQ ID NO: 93660 - DNA, 503 bp, Homo Sapiens
gttttagatttaaaagagtatcatctaaaggatctgacattacagacaaaagagagatctgtctatggcagtgcagaaattttcccagtcattgcaagatttccagtttgaatgtattggtgatgctgaaacagatgatgaaattagtattgctcagtcactaaaagaatttgcaagactactcattgcagtagaagaagaaaggcgaagactggcaatgttttaagaggttttgctgccagcccccaaaaagcaggcgataaaaatgagaatagcctgacatttccatggcaaacttcttggtgttgttgtaactggagcttggatgaggatgagacaagccacattggagaatgatccaaaacgctaacgatgtattaattgcaccacttgagaaatttcgaaaagaacagataggtgcagcaaaagatggaaagaagaagtttgacaaagagagtgaaaaatattactctatccttgaaaagcatttaaatttgtccgca

SEQ ID NO: 93661 - DNA, 667 bp, Homo Sapiens
cctctataaaggtgctacgaggcctggaactctgaagcctaaagcaaccccggcagccccctcccacgaccgtccacaaaccagtagcctcccttcgctcccacctccgcgccgacgggcctggagctcctccgcacaccacaccaagccgaccactcaacaccagaggacccacagaagaattctctccacgcccacccccacagcatcggccttcaccaccgccgccgctgccggaagcgcccccacgtctccacgccaccaccgtgaggtcacttccggcgcgacaccttggaatccagggccgtcaattgaggggcgtggcacccgggaaatttaagaggttggaagaacgtcccttcggccttacagaattgcgcttgggtagtcattttgccctccacgcttacttatgtcctgtggcgtcttggctggaatcggggctctacccacgactccccagcctcgatgcctgggcccccctcttgcaggctcgatgaaaagcacccgcttcccctcctgttaccccagcgccaatcgcagagctggagcggaggactttcagggaggcctggtgacgtgacagcccctccgtgctaaactgcagctgtgggacttaataagtgcgacaaccccctgatggattaaagaaaacaagatattcaaa

SEQ ID NO: 93662 - DNA, 625 bp, Homo Sapiens
ggcacgaggaaggccgatgctgtgggggtgggcgtggagagaatacttctgtgggtcctctggtgttgagtggtcggcttggtgtggtgtgcggaggagctccaggcccgtcggcgcggagtggtctcacgtgtgaaacatggctacagattggctgggaagtattgtgtccatcaattgtggagatagcttgggtgtctatcagggaagagtgtcagctgtggatcaggtcagccagaccatttctctcacccggcctttccataatggagtgaagtgtcttgttccagaagtcaccttcagggcaggtgacattacggagttaaaaattctggagataccaggacctggagacaaccaacatttgggagaccttcatcaaacagaattaggcccctctggtgctggctgccaagtgggcatcaatcagaatggcacaggcaagtttgtcaagaagccagcctcttccagcagtgcccctcagaatatccctaagaggacagatgtgaagagccaggatgttgccgtttccccgcagcagcaacagtgctcaaagagctatgtcgacaggcacatggaatccttgagtcagtccaaaagtttccgtcgtcggcacaactcctgg

SEQ ID NO: 93663 - DNA, 418 bp, Homo Sapiens
tagctgttacagcgtccttgctacagaaagagatcgttgtctgaccagagacaaaacttacttctgtctggtagcagagtacctacatttggctttccagatctcacctcagttccagattcctctacattaaaatcttcgcctgggttacatcttctctcaggattgaatatcaacactattgaagacacctcatgtgacatcacaaacagctttcttggactctccaggtactccaatttggactgtatcttggtactttagacttgtgaatttgaattcaactgtctgagtgagactccaagatgggaacaggatttgtggttcaactgtgttatcctactctggaagaaatttatgaagttattgatggatcgcccccactaaattgttatcaaaaatttccaaatccttaaaa

SEQ ID NO: 93664 - DNA, 671 bp, Homo Sapiens
tttttcaatgtagaaaggctatactttattcagatagagtacactcacatattggcttgtctatggcatatcgatatcatgccaagaatgtaagcactaagagagaataagaggaaaatccaggctttatccctattgaattatttatcccactattagaatattagtgaggtaggtgtggccacactgtgatggcaaattgagcttcggtcacaaacatgccttactgttccccccagtctactgacatcagcttcctttacatagcggtagatgcacaaaagcttgcacagttgagggtattgtcatcatgttttggtatgtactggaatcctggcagcttcttctctgattcggagaggcgcaaacattaaagacaaaaagaacaactcgagtctgtcctttggggtgatttagggtggctgtttaaatttgtagtggttgaaaagtcttgagattgccacacctagcaactcttatacttttcttctctcagctgcagcttgttcttttcacctgtgtaacaagctgtcttctcttctcacagaagcttagcatttcttcctctgccccatagcattttttcaatacttaatttaccaggtgcgtgttatgtcgtaggcgcctcagtacttataccagtgagataacatgtccgaagttcttagaac

SEQ ID NO: 93665 - DNA, 384 bp, Homo Sapiens
gttcccaatacattttgtgtatagaaatgcaagacgtgcatttgccacatgtcttcgatctcctttctgtgaagaaataatctgttgccgtggagaccaagtgcgactggcagttcgtgtccgagtatttacttaccctgaatctgcatgtgctgtttggatcatgtttgcttgtgaatgtgcctcttaggagcacttgtccagaagtgtctgggaaaagcttgggctgcacagtgatggtgctccctgaaagactcagagcagcacagccagtacctccagagtatgaagcatgaagtacacttattctacaagaataagaagtaaatataaaaaaagtcaaggattcaatttttaataaagtaacaaaatcaacaaaacaaa

SEQ ID NO: 93666 - DNA, 547 bp, Homo Sapiens
tttcccagggataatttcattaataaaaaacatttactagaagttttaaacatactgatcatttatacatcacagataagagaaaatatcacaatacacctgccagaaaagaagaaatgttacattttgtacacatatttggcttacaaacaccatagattgtttgtgtgtatgtataatcaaaccaactttttttcagagtacatcttcacacctcaacatacatctgtatctactgacatctgcaaaggtcccatattgtcccatcctatggatgcactgaaatttattgataaatttataaaatttataaaatccattataaggggttttccaaatacattgctattttaagcagtgctgagaaaaacaaattgcatgtatctctatttcctagagatattttagtataatggaattgatgggtgaagggcacatacatttttacagtgtgatacttaccaaaaaattgtctatttgaaaagtcatcagaaatgtaaactttcaacagcagtatatgtactgctaccctttaccctcacaaact

SEQ ID NO: 93667 - DNA, 515 bp, Homo Sapiens
gcggccgccggcccgcaatggtgctaccctggttgctgctcgagactgcgcgcagggcggtcctcgggtccgcggaggctgcgctctgcgccatgaaaatgacagatgaaaatagaaaagtgtggctggtctgaaggtttgacgtcaataaagggaaactgccacaatttttatactgctatttctaaagatgtcacttataaggaacttaaaaacctgttgaattctaaaaatattatgttaattgatgttagagagatatgggaaattctggagtatcaaaaaatccctgagtctatcaatgtaccattggatgaagtaggtgaagctctacagatgaatccaagagacttcaaagagaagtacaatgaagtaaaaccatccaaatctgacagctagtgttttcttatttagccggagtgagaagcaagaaggccctggacacagcaatatctctgggctttcacagttactatgagaggtgtgttaaaatctctctctgaaagaaagaaaaa

SEQ ID NO: 93668 - DNA, 953 bp, Homo Sapiens
ttccattctgatgttggagcggcttcagaattttatttttggtttacaaaaccacacccaagtttccttctcaggtactcttctgggattaatatatgagtgagaaatgatagacttagactatcaccacattgcatcccataatgaggtaaaggatctaggcaataatcatcaatggttgccaaaaccattaagttaaaagagggcagagcaatctgataacaccccactccattgatcaatattaatatttatatcactaagcttttactgcaatgatgttggtcaaaaagtaatttcaaaactcaatagcatgtacacacacacatttatttcttgattatgaaaaaattggatctgtgggtcaactgatgctaagcttggcttggttccaaactgtggtttgctttcaggttgacttattctgtcttcacaatctgtatcccaagaaaaaagaagcagttactatttgaaacacatgattgtcatggcagaaggcaagaattctagaagctaagccagacaatgcaaacgcatttgtagtcttggcaccgatgtgatctatgtcatctacattcacgttctataagccacagcaagccaaattgctaagttcaatacccatgtagttgggagctatacttctctcatgaagtctggggaaagggaagcattcaatggaaaaagagattctttgttaaataataatatgatctacaacatcatgtaaaaaaagagacacacgagtcatgacgtgcccatgatgtgaacaagtaagaagtgtgcaagccaacctatgaagtattctaaactattttttgtcaaactatcaatttatagaaaataaaagaagtaggggaagacgtcaagaaacgttacaaggaagcaactggcaacatctagaatgcgaagaataccacagagcaataaatcattttcttctacaaattgtt

SEQ ID NO: 93669 - DNA, 447 bp, Homo Sapiens
gtgaagctgagctgtactctctgcagcccaaatatctctggttgaacaaagaacattagcacctaaggccaacaactctcaaagtttctgtactgtgaatggtccaacagctgaaaaaactcaagttcatctcacctccaatgtctctcttgaatctattcctttctgtccatctacacagttagatactaaccatcagccatgccatctcttgccaccatacatcatttgtaatataattagtctcacacttatctcagtttcccatctcactcctctcttatctattttccacattacaaactgagtgattgttttgcttcctacaacacagttcttatcatcaccattgtcatcattgaaattatattatcataattatcataagtcaggtcttaactgtaagcaaaaaaataaactctggctaattaaagcagaaataaaaaa

SEQ ID NO: 93670 - DNA, 745 bp, Homo Sapiens
cccagctgagcattctcgtgaagagctttagccgccagtcttcactcctgttcaagattctctccagtgttcggaatcatcagatcaactcagatttggctcaactactgttacgactagattataacaaatactatacccaggctggtggaactctgggcagtttcgggatgtgaaaatttctggctcataaattgaaataacagccacgttcccaaggttgtaacagaagattcaaaacatcccattctagccacacacaaataaatatctggcggcttagtgataggactctaccttttctcctagaagcagttactgaacatccagggagtacaactccttccccatcattcccatgtggaagggtctctcccatcaaggagaacatgtggcatctctgatcctttacattggagaacatgtgttggatatgttcagttattcaatagtcatgtattgagcacctactacgtaccttggtactgttcaagctgtgggagatacagcggtaaacaaacaatatagagcagaaagttaaatattttatggttcatatgtgaaaaagtaattatgtttataaatagactaactgctggatgttaccaccaagtaagaaagcaacaggtaagataggctttctctctccctataccaagtaatttatacctacacagattgggcaattctagctaatgaaaatatacttaaaagtatttcttaggccgggcatggtggctcacac

SEQ ID NO: 93671 - DNA, 557 bp, Homo Sapiens
gcctctatgctgacgggacggcaagaatgcccctgcggaggctgaaagccattcggcccgccggggtggcatcccggcctcccccattgaccccttccagagccgcctggacagtcactttgcggggctcttcacccacagactcaagcctgccttcttcctggagagtgtggacgcccacttgcagatcgggcccctcaagaagtcctgcatatccgtgctgaagaggaggtgatgccgggcacgggcgctcctgctgccgtctctgctccaggaagctgcctcctctgggccctctccttcgtctgggaaggcaccagcatgagtcccacacacccagccttctcatttctagaggcttccacctttttatacactcagccttccctctcccaggcaggaggacccccagaccctgttcccctgcagacctcacttctgggagacagagctacagctgggacagctccaagctaccctaacccctcctttcccaggtttctagaatagtgtctggcatgtagtagatgctcaataaacacttgttgaatgaaaaa

SEQ ID NO: 93672 - DNA, 427 bp, Homo Sapiens
aaaacaacaaaaacaggacagatggatggaatacccatgtcaatgaagaatgaaatgcccatctcccaactactgatgatcatcgccccctccttgggatttgtgctcttcgcattgtttgtggcgtttctcctgagagggaaactcatggaaacctattgttcgcagaaacacacaaggctagactacattggagatagtaaaaatgtcctcaatgacgtgcagcatggaagggaagacgaagacggcctttttaccctctaacaacgcagtagcatgttagattgaggatgggggcatgacactccagtgtcaaaataagtcttagtagatttccttgtttcataaaaaagactcacttattccatggatgtcattgatccaggcttgctttagtttaatgaatgaagggtactttagagaccaa

SEQ ID NO: 93673 - DNA, 420 bp, Homo Sapiens
ggcaacagggacaggagcctcccgtgagacactgcagctgagacagatgggagtcctctgaccccagagggtactggcttgactgctttatgccttaagtggggcctggagcaaaatggcccaggttagtctgtcctgagagtccagagccttggttcaggggagaatggcatctggagagtgggctgctgggataatggggacagtgagggacagagcccttgatacttaaggaagtgctggatattgctaagaattcaggtagtctcgggatctccagagtctccatgctaggacaggagatcttcagaacctggaggaatggaaatagtctagtcagcttatttgtcaagaaaaatgtcaaccttggtaatttaaataatgctttaaaagtccacaaaatacatatttctaaaatta

SEQ ID NO: 93674 - DNA, 500 bp, Homo Sapiens
ccttacacaaaaaatatttctgcaaggacaactgcccagcaattgcctgtccaacctcagactggaatgacctttgttattgatgtttgtagccaaggagaattatctcaaaaccactgtgatcctgctcgcttttcctttaaagacctttgtcttccttgacctccctgaataggcatatggtttactatggcgtgtgtactctccttgtaatgttctgttctcaagctaacatctattcttctagagaacctctctcttaggctgacaacgctgtggatctgggctcccaggaactggggctgacatcagaggggtggaaagagaacagcagctctccctgaggggatgcttgccaaggataaggagacgatggttctctaaggattattttatattcatctaaaagggtatttttgttgttacccctagccttttttcccttttaattttctgatgaataatttatataaagaaaacccattctaagtgtgcaaaaa

SEQ ID NO: 93675 - DNA, 384 bp, Homo Sapiens
  misc_feature (194)..(202): n is a, c, g, or t
ttctatttcaccaaagaatctttaatcacagaggtgaacactagaagtaacataatgagaaaagaaaatgaacaatgttctaagaaataaacccatagctgtcaaacacaagtctacataattcagcccaggaaaacataattattatctgtccaccacagacttaggctccatttccaagtaacgatctaaannnnnnnnnaatttacaaaattaaaaacaattcttcatatacattctgtcttggttcttttgcatattattccttaggcacaaatccaaagcctgctaatagtggggaattaaataggacaagtaaaaacaagcccaatttaaggagacctttgagagtaaaatgttatagttggaagccagcttgccgtg

SEQ ID NO: 93676 - DNA, 375 bp, Homo Sapiens
aacccagccccggaaataacgtaccgatcttcggagtccaagtcggaagttgactagagagtcacctgctttcgtccgctctaggacaccagacacaccaggccgccatgttgtgtaaggatccccagccagtgagcctaaaatgggaagaaggaaaagatatttcttaccctacgcacccaggtccaagtcatcattattttgtctgaaatttatcttcctaactgatttctctgcttccccattgtgccttaagagttagttttccacagagcagctcgagatatcttttcagatcattatatccctttgcttaaaaacctctaacagcttcctattaggcttagaataaagtacaaactccttaatgtgaaa

SEQ ID NO: 93677 - DNA, 336 bp, Homo Sapiens
tgctgctttctggcagttgtgtttatttctcaagggcacaggctgtacagatcatgggggcctgctccctgcagctcagctgagcctaggatgaaccacagttgctcttatgccagttaaaaacttggggcctgttccatcttgcatttcctcccccgcttcccagtcctcgcccgcaccctttgatcctgtgagtggagaaatgaagagaactccaaatccttaatccattttgaaggccggctggcagcagggctttctgtgggcctggtaagcagccctagttgaatcattttagagaagggcaggtattctttcaaggttatagaaagaaag

SEQ ID NO: 93678 - DNA, 435 bp, Homo Sapiens
cactctgtgttctgtgttccatatctagctctaaatgatgtcattcgtttgtctgaaactttaagactggtcaacactaacagaaagttacttaatacctgttaatttttgtacctctataaaggaattatatttttcccaaatactctattaaatgattcatcacctttagacactatccagacaattaagtgtttaggaatcttgcactatctatcatatctcctcttccctcctcctttatgtctttagatacatttttccttagttctggtcattgcctttctgaacttaaatattatacttaaatgacaatttttaaaatgtatcaattaaggcaatatctacttattctttgctatgaaaaatgtgataaatagtaaaccttttcttcacctctcctcctcacttacctcaaacaaccattaggtataa

SEQ ID NO: 93679 - DNA, 363 bp, Homo Sapiens
gcgctcagccgacccgagggcgccgggctgggcgggcggagtcgggccgtggggcggggccgcgaggaaggcttgcctagcccaggccctccgcccatccgactcctacggcccttggaggcctggctcctgtaccttcacctggcgtcttggcgcctttttctcagcggcctgtgggtggatgtgcatggtgtggcctggagagagcctggagctccatgagcacctgaagactgaaagaggaaatggaagtgggggcggccacacccagtgcagggttgatactgtgccctgaggtgacataaaagacactccttttccaaagcagaattggccaggaaatgaataaacacccggagaaaa

SEQ ID NO: 93680 - DNA, 443 bp, Homo Sapiens
aatcagcaaacttgtccagtctgagaaatgatagagcccaaaatgcatgaaatagcagaatcaaagaggcaaatggacaattcaaacatgagagttggagactttaacacccactctgaataatgggtagaacaactaggcaacaaagaaatggaagacttaaacaatactgtaaaccaactggactgagcagacatctatagactactccacccaacgagcagctaaatatacattcttctcaaatgcacatggtctattctccaggatagaccatgtgttagcaagtaaaacgaaacctaaataaattttaaaggattgaaatacataaagtatgttctctaactacagtaaaataaaattagaaaccaatagcagaaggaaatttgggaaattcacaaataagtgaaatttaacctaccttcccaaataaccaatggatt

SEQ ID NO: 93681 - DNA, 372 bp, Homo Sapiens
aaatgcagctaaggtgcctggtcactgtagaaaggggtacatgcaaagacctatgctaaccgtagagccagcaaatgactgataaaaaggaacttggccatatacctctctctactcaatatagccctgcaggtatatcaaaaaacaacagaaacattgttccagatcataaaaataattatgttgctttagaaaatttggaaaacctgagagaatacaaggaaaataaaaatcacgttaaaccaccatccagatagaccactgttaaaatattgctgtatgttttcagttttttgtgtgaaaataatatacatttatattttattgtatatacactactaaatacaatattttgatctttttgtaaaaaaa

SEQ ID NO: 93682 - DNA, 368 bp, Homo Sapiens
  misc_feature (320)..(320): n is a, c, g, or t
  misc_feature (328)..(328): n is a, c, g, or t
ttaaaattgttatcaaattaggtatgggcagaaaatatatacaatgtttgaggaaataatttttaaaggtttcaaatctaacttatcttatttctcttgtgttgcctattctcttttacgaagaaccaaaactgtggcaggcctgcgatggctgtggttgaggaaagaggccacacccacagccagcagaaccacactcagcagcagcctagccccacgtggaaaaggcgtgaacactctcgggagaggtggatgtacgctaatggttctcagctccgacctctgtgattaacagaacatgctgattgttttatctgaantcacacanaagggtttctatgtccaggaaagactctaacactctgacc

SEQ ID NO: 93683 - DNA, 443 bp, Homo Sapiens
ctgaccctggtccccagctccgtctgtgcttaattgctcttacctgttgcactaatgaatatgactaggttttaaagggggaatgtgaagcaataggcacatggggcttggatgaattggtcccacagatataccctgccttaagccgctgaggtgatgagtccactgctcatgtgaccctccacctttgtggatccctcttggtttgtgaccagtgtgtctgtttgttgaggttgtacaaacttgacaaaagttaatacttttgtttgtattttctgcactgttgcactctccaaatggccccttgagtatttttattgacttgttacacacatttttgtctttgatgtctacattttttcctttaatgttttttatttggaaggttacctgctgttggatttaataaatttgtttacttgaatattgatatttctacaaaa

SEQ ID NO: 93684 - DNA, 415 bp, Homo Sapiens
ctttcaaaacttgtcagccgagtcagtcctttacctgttgagcagaggatggacatcagaaactacattctgaattacgtggcatcacagcccaagctggctccctttgtcatccaagctcttattcaagtcattgctaaaatcactaagttggggtggtttgaggttcagaaagaccaatttgtcttcagagaaattattgctgatgtgaagaagtttctccagggtactgtggaacactgcataataggagtaataatcctttctgaattgactcaggaaatgaacctggtaagcgagcctttccatctaacaggagcctgagtttgcttaagtaatgctgtttcttttctgcttttatttgtggcaaaatagacagccttcattttgtggcataaaactctgaataatcaaa

SEQ ID NO: 93685 - DNA, 329 bp, Homo Sapiens
gtctgtcattcactgtatgtttgaaggaattttgaaactgtcaaactcatcgcaggatttcaggaaactttcccattaggacaagcaccagagtggtatcatcagagaatctgggagtctaagcagacaaagaagtaaagccaaaagtatttttacctatgtagttacaaaaatgttacaaactgtttacatactgttctgcaacttgttttggcctcaggacacattgtggacagtttcctgtcacttctgtggagctaacctcttttttaaaaaatatatcagtattctatcacatggattacaacataaaattgttgaagcaattc

SEQ ID NO: 93686 - DNA, 468 bp, Homo Sapiens
aatttgtctcattagaagtgatgttaatttggattagcatcaggtaagaaagctagtgtctgccactgttaaattactattttcttttttgtaattaataaataatctgaatcttgtaaatatcctgtttcccattaaacttaatagttgtagcatcctggcaattctcacatgtattatttttgtaattagtgggacacaactaggttcctggagatgcagttgtttggcaaaagactgtatttctgagcagccagagtggatctagtcagatcagaaagaagccagcttatctgggtgacttaaaatttacactactttttcttgtcttaggctgtgacattcttctcccatgtggcccaggttgttctgtgatagaaccagggttgcaagtcataccctcacttagtcattcaacaaatatttactgagaagctactgtaacccaggcactgtttgaagagatac

SEQ ID NO: 93687 - DNA, 476 bp, Homo Sapiens
gctttcttctctaattcttttgttttattggacccaagacaagttctaaaaattgaatgcaatgagagattgtccagaaatgtaatatatactaaaatataccacttaagcattgattgccttttcttgtttgcttcaagaatataaaacttgttacttgagcttggaatcatgggcttgattgaattaattactcttggggaaaaaagacaccttgtggcattaagtcttgctttggttaaagccttatttcacataattgctaaaaactcatttttgtttaatatactacctatagtttaattatcggcacttgtattttgtaacttgatatcttacctaggattgggaatttgggacatgacacgtactataaaagtcagtctatgtacatactgcttattgatgtgctgtgatatgagggaatctgaaatgtttcataaaaataaagcttaaaaattgtcttacactggaaa

SEQ ID NO: 93688 - DNA, 888 bp, Homo Sapiens
  misc_feature (87)..(121): n is a, c, g, or t
aaagaatttatagatcacttatagggcgctagctcttcgtagccgaacgaccgagcgcagcgagtagatgagcgaggaagcggccgnnnnnnnnnnnnnnnnnnnnnnnnnnnnnnnnnnncagtcgacggtaccggacatatgcccgggaattcggccattacggccgggggacagcggctgcaggtctccaagttgcggccgctggagcccgagccatgcggaccgcggaccgggaggcgcgcccggggcttccgtccctgctgctgctgctgctggccggggcgaggctgtcagccgcctcgcccccagcagcgccgcgcttcaacgtgagcctggactcggtccccgagctgcgctggctgcccgtgctgcggcactacgacttggacttggtgcgcgccgcgatggcaaaagtcatcggggacagagtccccaagtgggtgcacgtgttaatcggaaaagtggtcctggagctggagcgcttcctgccccagcccttcaccggcgagatccgcggcatgtgtgacttcatgaacctcagcctggcggactgccttctggtcaacctggcctacgagtcctccgtgttctgcaccagtattgtggctcaagactccagaggccacatttaccatggtcggaatttggattatccttttgggaatgtcttacgcaagctgacagtggatgtgcaattcttaaagaatgggcagattgcattcacaggaactacttttataggctatgtaggattatcggactggccagagcccacaacaagtttacagtttctggtgatgaaccgagataaaggctggtggtgggagaatgctatcgctgcctggtctcggagacacattcccgtcagctggctgatccggctac

SEQ ID NO: 93689 - DNA, 681 bp, Homo Sapiens
  misc_feature (27)..(27): n is a, c, g, or t
tgcagccgctggtgttgccatcacagnattcatagggtttcccaaaaagaactcaaactcctcactatagccctctctgagtcatgaaatcttgcagggctgggagggtgcccttattggataaagcaactacagtaaaatattaatggtagacaccaggtggtggatattaaagtgttcattgtaaatgtctttcaactttgctgtatgtttgaattttttcataataaaatgcttgaaaaaagtctaatctggtactttcaaaacatttctaggagccttagggttttaggaagatgcctcagggacctctagttggtgaaaggggtgggcggaggtggtggaaaagataaagctctggaatctgcactccagtccctgcactgccaacttcaactagggcatgttcaatttcaatctgaagtcaaggacctggtctttttcatctttgtatggtcaaggcttggcacagagcccaggtatacaacaagagctcaatatgtgcttgttgaacaaagttgaactcttctggagagatggctaggccccctctgacctggcatggggtggcatgaagacagggggataaatcccgtttcaaattggggtctgaaccccttttcaaattggggttcagcgtttttacagtttcaacaataaagatttgaaaacttctggttc

SEQ ID NO: 93690 - DNA, 1462 bp, Homo Sapiens
  misc_feature (1027)..(1036): n is a, c, g, or t
gcccggtgccgtgagctgaagaggtttcacatcttactccgccccacaccctgggcgttgcggcgctgggctcgttgctgcagccggaccctgctcgatgggcacgactgggctggagagtctgagtctgggggaccgcggagctgcccccaccgtcacctctagtgagcgcctagtcccagacccgccgaatgacctccgcaaagaagatgttgctatggaattggaaagagtgggagaagatgaggaacaaatgatgataaaaagaagcagtgaatgtaatcccttgctacaagaacccatcgcttctgctcagtttggtgctactgcaggaacagaatgccgtaagtctgtcccatgtggatgggaaagagttgtgaagcaaaggttattcgggaagacagcaggaagatttgatgtgtactttatcagcccacaaggactgaagttcagatccaaaagttcacttgctaattatcttcacaaaaatggagagacttctcttaagccagaagattttgattttactgtactttctaaaaggggtatcaagtcaagatataaagactgcagcatggcagccctgacatcccatctacaaaaccaaagtaacaattcaaactggaacctcaggacccgaagcaagtgcaaaaaggatgtgtttatgccgccaagtagtagttcagagttgcaggagagcagaggactctctaactttacttccactcatttgcttttgaaagaagatgagggtgttgatgatgttaacttcagaaaggttagaaagcccaaaggaaaggtgactattttgaaaggaatcccaattaagaaaactaaaaaaggatgtaggaagagctgttcaggttttgttcaaagtgatagcaaaagagaatctgtgtgtaataaagcagatgctgaaagtgaacctgttgcacaaaaaagtcagcttgatagaactgtctgcatttctgatgctggagcatgtggtgagaccctcagtgtgaccagtgaagaaaacagccttgtnnnnnnnnnngaaagatcatggagttcaggatcaaatttttgttctgaacaaaaaacttctgggcatcataaacaaatttggttcagccaaagactcagaacacaacgagaagtatgaggatacctttttagaatctgaagaaatcggaacaaaagtagaagttgcggcaaggcacagaacattggcaatactgacattttaaaacgtggctctgaaatgggccaacaactgatcaccgaaccaggaaagacttcactggaaggataccattcccaagaagcacggatcgaaaagaaggggatacaagcctgtattttccagcaaatttttcaaagagagctcttagatccccccaggaaggtaaggccttaagaaaaggggcacctcctcgggtaccactgtaaaacccgtgacagaaaaccatttgtagagacg

SEQ ID NO: 93691 - DNA, 761 bp, Homo Sapiens
  misc_feature (254)..(320): n is a, c, g, or t
gcggccgctccaacatcagaatggtagccggctcccgccgcctccgcgctctgtctggggccagccacctggcgggccgctccggtgcgcctgcccgcgcttttcactgacaggcgctgttccccacagccagcgccgcccgccacgtcccagctctcggccaacggagctgcgcggcgggtgacctttccgagcccagcgcgatgacggctccttgctcccagccggcgcagcttcctggacgccgccagctnnnnnnnnnnnnnnnnnnnnnnnnnnnnnnnnnnnnnnnnnnnnnnnnnnnnnnnnnnnnnnnnnnngccgccgtggcgccggcgcgcggctgggagagcggagacctggagttgtttgacttagtggaggaggtgcagctcaacttctaccagttcctcggggtgcagcaggatgcatcatctgcagacatcagaaaagcatatcgtaagctttcactaactttacatccagacaagaataaagatgaaaatgcagaaactcagtttagacaattggtggccatttatgaagttttaaaggatgatgaacgaaggcagaggtatgatgatattctgatcaatggacttccagattggcgacagcctgtattctactacaggcgggtgagaaaaatgagcaatgctgagctggcattactcttgttcattattctcacagtgggtcattatgctgtggtttggtcaatctacctggaaaaacaactggatgaactactaagtagaaaa

SEQ ID NO: 93692 - DNA, 852 bp, Homo Sapiens
  misc_feature (32)..(32): n is a, c, g, or t
aagacccctcggggctgctcatctctgtgatnggtgagggaggcaggaggcagggtctggggactgggggcagcggctcgacctccgctttggaagggagaagggttagctgggtcccaccctgctctcccctttcctccttgcctcccgcagcccctccccagggctctaacccctccccagggccccagcaattccccctccaccttttttttctggggttagctatagagagaggagccccgcctcagtcttttctttaggggcagcaccttctattacagtctcgggaccccaaagcacgctatttgggtttggtagagaaaaccaggtgtaaaggtgtgtttattgattcctaaaatgcttgtttattgtttgcctgtagcagcactcactgagaaaggcgtcttgtttcctggactttggggtgtaaggccttggagtccggagattcctgtcacgagttgcagatttgtgttttcacactctggatactttcaaccacctgtgcgtggccacagccacaaatacaagaatctgcagtgagctggtaggaggactgggtttgaaggcacacatcggttttcaattttttgccctgcctccgcattctggtccattccttaaaaaacagaaccaaaccaatttcaaattatcctccatgcactggcccctctgcacctcccagaagattagggtgggggtggagtgggagcggtggatcttttaggagcttttttttaaaaaagcgaaatatattgaggatgggggaaccctttcaagaatcttggatatgatgcaggtactgactaaaaccaatctaaataaaatttattatggcacgttaaaaaa

SEQ ID NO: 93693 - DNA, 562 bp, Homo Sapiens
gcgaccgctcgcccgccacagcaaacttggagcagtctcccggccctctggaaagaaacttagggcaattgggattggaggcagcatcccattctcggttctggagcccaggagctgccagggcgtctggatcctccggggcaggagaaatgagctggtcgggtttggagagtcttcctgggggcatggagagaacctgccgcagtgcctggagcaaggattgcagcgtggctgaaggcggaagacgccttaggcaactgcctgcagccgagcctgatggggacccagggacagatccctggatcaggacccatgggacctatctaacatttccaagtggctttcttagagatggcagatgagatctggaattgtcatattcatttttttgggcagatagctactgacaaggagaagcacttttctggtttaaattttatagcagtatacaataatactagaagaatgtgaatgagacttatttttaataagtcaagttaaacggaaattggaaattgctcaccttcttgtatttcactaaaataaacattttacacttaaa

SEQ ID NO: 93694 - DNA, 343 bp, Homo Sapiens
aacacatctactaaaatgtgcagaaagaagaataagtccttctgggtcaggggaggtagagagcacaagcatgaataagacatagatgctgccttcagtgaaatttgtggactccgagggaagacagtggataatgcaggtaggagataaatgtccattatatgatgaaaatgaaaattgtccaactggatcttcagaaaaccgctgttaatattccattggttctgagttagaagcacatgaaataattacccttcactatttaccagttacacaggcatacactgatttgttgaatttgcttgaaaagtagagccgaagatcctttgaaaatggaagaggt

SEQ ID NO: 93695 - DNA, 416 bp, Homo Sapiens
tgtatgtggaattctgtctcttggtaaagctcaaagccaggctagcctgaggtggcgcagggctctccttcctgtcccttcgatctccttgagaattaagagctggcagctgctgatggtgtttcccaacccccctcacttcccaagacaacccccagcttcaggtcctcatggggaggggagggcacgttcttgacacatgggaacttcgctcaggagggcctccccttcccctctccctcagagttttcactgccgtctcgtctttagaaagctgtttgaattccccccgcccccagtttggaccgtgtagatataactggatatacggatttttctctttgtgcaggcttcttatgccgttggtatacagggcaggaaagagaggaataaagggagagagcagtgtggaaacc

SEQ ID NO: 93696 - DNA, 279 bp, Homo Sapiens
agaccctccgacctcccccagggctgtggactcagggcgccccttcctcccgtcgcgctctccagtgactcacgcctggggcttattgtgttttctgttgcttctagttttccaacttgatcctcaggcatttgaagacatgctgcagtactttctgagcagtgttcccttaggaatttctttcctctgttgagtgccgcaagtatcctgatcagggaaaacagttgtgcctacacatgggtcctggaaaggcttctccccggaaccactgtggtcaga

SEQ ID NO: 93697 - DNA, 1006 bp, Homo Sapiens
tttgtcatctacttgttctatcagctattgatggttggtactactgacagcatcataaattctcccagtatatttggggatttgtccagttcttttgcttctatcaatttttgctttatatatactatctcactatgtgcatgcagatttaggatagtgaaaacttcctgatacaattacccttttattattataaaacatccatcttttatacaaattctcctaactttataatgaggctatatcctgagaaacccactgtaagtgaaaaatattgttaagtcaaaaaatacatttcatatactatagagtgttggttatttaccctcatgactgcttggctgagtggaaactgcagcttgctgctactgcccaacactgcaatagagtattctattacatatcactagcctagagaaagatcaaaattcaaagcatagcttctactgaatgtgtatcatttttgcaccaccgttacgtcaaacaattgtaagttgaaccatcatacgttatggaccacctatatttagtctttatcttatagtctaccttattggatatagtagctacaccagtttgcctttcagtgttaggacagtgtatctattcatccttttagcttcatcctcccatttaatttaagatgtggctcttgaatgcagcatataattggggtttacttgttttatacagcctgacaagcttagtgattcaattttaataattagtcaatttatattgaatgtgattaccaatataattaggacaaaacagaggaagaataagctttactacagatacaactgagacttgaaatacatccccaaggtcaactctgatacagaatggttacatgtatattttatcttgattttctcattgctctaagcagaagtactaatttgctaccagctactccattctacttggaaggaaagcctcaacacataggttttcctaaaatcaaatatttacttgaaagcctgtattaaatccaaggtgatgt

SEQ ID NO: 93698 - DNA, 549 bp, Homo Sapiens
ctgcaaagaagttgatcccataatgctggcaaatacactaatcgtcactgcactgctcagagcaggagcttagagctacagagtccggggggaacaggctcggcatagaatgagaccacggactgccggcttgaagaatgtgctgccaggatatgaaacccaaagctggcaatggaccacaagctactcccagtgacagaggacccaggccacagaccagctgctgtgctgggcacaatgcttctattgtcacggaaccctgcatccacgcccggccccgcttgcagatgggaaagctgagggtctggggctgcaggatgtgctcggcgccctgctgatgaccttccctgggccagcctgacccccggctcctctgatcctctctgctttaacggaagcaaagaatgagttgtaacagccgaggaccaaggagcagctcttctgtcaacagatgcaccggaaaatccgcggtggccgaggaagccctattttctttagtctgctcagcatttcttgtacaataataaaaacatctgaatttccaacaaa

SEQ ID NO: 93699 - DNA, 438 bp, Homo Sapiens
aaatcttactcttctgacttctggtgttaatagtctcctcttttcctatttaacccaaaagaaaaatttgagattttgataggaactctgggcatgtggaccttttaggccatactgaatgctgattttgacggtaaggaggaagccatggcaggttctgagtttagggggaaaagcagatggtccaagctggagaaatatatctacaagaagagtatgaataagagagaaatattgcaagtggatgacagaagaaaaaaatcagtatgaatttgtcattcatggtcaagtaccagtttatgaactggttgtgttcttaaacgttcatctgactgttggatgaatggcccaaggagggcagaaggctgcagaagtaattcattggttgctggatagaagcttcaaaaattcacagtttaatgctcttgttttaaagag

SEQ ID NO: 93700 - DNA, 644 bp, Homo Sapiens
tccttgctcaaatatccgcatcactaattgactctatattagatatttattttgtttattgactgacatgagcagagtcttcctctatttcattcattactctatccttagtgcttagaatagtatattgttgtctggcacttggtaggtgatgctcagtaaattttttttataatgaatggtataagctgagctgctagctgagtgcattagtcatctattgctgcatgacagattgccacaaacttagtggcttagcacaatgcatgtttattacctcacagtttctttgggtgaggagtccagtcacatttagctgggtcctttgcaaggcgctgtaatcaaggtgttggttagggccaaggtcttatcagaagctcaattagggaaggatctgcttccaagcccatgtgattgttgacagatttagttgctttcacatagccttctttataggtagttcacattcatgacagcttcttcaaagccagtaaggaagagagggtcttctggtaagaaggacattatattcttgtggaatgtaatcatacatacgctgtcacctttgccatattctgttggttagaaggaagtgataggtcatactcatactcaagcagggggaataaaggaaatcatttgtc

SEQ ID NO: 93701 - DNA, 378 bp, Homo Sapiens
cctttaagtccacctctgcctaaataggcttcccatgctgctgatgtttgctacagggcaggtgctttagctgacccccaaaaagcctcttaattacaaagcctgcatcaagtcacatgtgcctgaatcatccatcaaagtggccaaacgggacaattaatcagacttgaagaatgtaaaacatctccgtacagaatagagggtaagctgcaaacaacctcgccatgtagcagaaccaacaggatatattgataaaatgctcatagaaaacattctaaaagctgccccaggagaaaatggatggggaaaatgctactttcctcagaacctaataattctgaaggaaatggagcataaaacaagcatgcatgaaacatc

SEQ ID NO: 93702 - DNA, 595 bp, Homo Sapiens
acacaatcctagaaagtcctatttccttatgtctactcctgctttcctccacattctctagacaatagtcaaaatgatctttttaaaacacaaaactgatcatgctacttcctgcttgaaagctttgaacataagatatgcccaagatatgtttgtggaaatgaagttttttctaaaatatgttccatgaacatggcagaataaacattaagtcatatctaactgtttacaattatgagacaaaatcagccctggatttaggaaatagttggtgtaagactaatgctatagactaaatgtgtcttcccaaaattcctgttaaaattctaactctggaggtgacggtattaggaaataatgcctttgggaagtgattatctcacaaagtcacagtcctcatgaatgggattcctttcattataaaatagaccataggaagtgctttcatcctttccaccatgtgaggacatggcaagaaagtgcattctatgaaccaggaaatgtgccttctccagacactgaatcatcaggcaacttgatcttggacttcccagcctcagaactgtgagaaataaatttctgttgtccacaagaa

SEQ ID NO: 93703 - DNA, 560 bp, Homo Sapiens
cgcaaaaagatcatggatgccagttactttggccccatcacattgacgaaagccttgcttcccaacatgatctcccggagaacaggcaaaatcgtgttagtgaagaatatccaaaggaagtttggaatcccgttccgtacgacttacgctgcctccaagcacgcagccctgggcttctttgactgcctccgagccgaagtggaggaatacgatgttgtcatcagcaccgtgagcccgactttcatccggtcgtaccacgtgtatccagagcaaggaaactgggaagcttccatttggaaattctttttcaggaagctgacctacggcgtgcacccagtagaggtggcggaggaggtgatgcgcaccgtgcggaggaagaagcaagaggtgtttatggccaaccccatccccaaggccgccgtgtacgtccgcaccttcttcccggagttctttttcgccgtggtggcctgtggggtgaaggagaagctcaatgtcccggaggaggggtaactgcaggaggccaaatgggccaccccttggaaataaaggtttttctggca

SEQ ID NO: 93704 - DNA, 652 bp, Homo Sapiens
caagataggctgtattgtcgctaatttacagatgaagaaatggagatgagagaagataaatgactttctcaacttcccagagccaggatgagaagccacatcttgtgaataactgactctctccactacgtcttcttctctgctacatattcaatgtcaggggtctcagcccctacccccaagagagacaaggttttggtgaatgtgaggcaaaaatgccattctctggatgtgctcataggacagattaaatactactattccaattgctgaacagaggaactagaaacaaagaacctctaaaatgagaaaaacagataagctttgtataggagatccccagagccaaccaaagattgggtaaaaggagatactacctcgctctgccaggtattcaatattgaatacctcagtttctcccaattgaagtgtgtaagaatgaactggggcctaccttgcctccattggccttgaaccttcagggccctggtttcttctgcatgtagatcatttcctaggaactgctctgcctcctgagccccagatacaatatttcttgggatgatcaacgttcttacagatcagcactgctcctgccaccaaaattctccataggcgcccttaaataaatacaattcttacacttgaaaaa

SEQ ID NO: 93705 - DNA, 481 bp, Homo Sapiens
ttataatttaagggaaaaaacattgaggggcctaatctacattttgctccggatccaatgatttaatttttgggaagaaaaatccagtgattaaagtcatgcaaggagatggcctggggcttgctaaaagtcaggttgcagtttccattgcattcaagaaaatcagaaaaataaatacaacttttagaagaaactaagttttctcccattcatgtttagctattggggggtctcatacttctggacttgcttagacctatgctatctaatatggtagcctctgcccatccatatgtggccactgagaacttgaaatgtgactagtttgaattaagatgtgctgtaactaaaatacaccctggatttcaaagacttaataaataatgtaaattatctattctttcctgttgattatatattgaaatgataatattttggatatgtttgggttaaataaaatatattactaattattaaaaaa

SEQ ID NO: 93706 - DNA, 762 bp, Homo Sapiens
tagtgcttgaggtcctcgccgcacagccggcacacggtgtccggggcgcagaaggcgtccaccagctcggccgcgctgctactcacatactcgatgttcttctcgatatccttgcgggtggccttgaggtgcttcttgcgcaggtgccgctcgcagttggctttgacagtgaaggggtagtggcagatcttgcaaatgtagggccgctccccactgtgcgtgcgcaggtggcggatgagcgcggccttctcggcggcgatgtagtcgcagagtgttgcactggtatggcgagatgcccaggtgggagcgcacgtgggcacgcaagacccccgagaaggcaaacacctggttgcagaagcggcaggggtagagcaccttgcgcatggcgggcgtcttcttgccgccgggcgctgtcatgaaggccttgagttccccctctgtgatctcctgcttgatcttggcctccatgctcagcggcagcagggcctcgatgatgctgtcctgctccagctgcgtcttcatctcaggctggccccgcagctccgcccgctgctgctgcaaggagagccgcgtggccgcgtggggctggggtcccgacttggactgcagcagggtggcgttgaagccgcctacactgagcatatgaggagcttccggggcggtgctgcaggctgggctgatacagccacgggaagcctgctgggcgttgatgagaaggtgtgctcgtgagtggccaccacccgccataggttgaaccaaggg

SEQ ID NO: 93707 - DNA, 530 bp, Homo Sapiens
caagttgatcccccatctgagccttctaaagtgctgggattaaaggcataagccaccatgcccagccttcaattttgcccatagatatgttttatctggtctgctgggtgtcaacctccaaattaaattggctagcaatatttgataattagagaattgcacagtaaaattgagacttctggattctttttgaaattttggaaaacctggcgacataaggcctgcattctctgtgccaacaattgattggcattgaataggggctgctgccttcagctaaggcagtactgtccagtttgccgtagttcccaccaccccatattgtccccaaaaccaaagctaagaatcaattgcccctatcacagttgcactctgcctttgcatataagaaaaaatggaataggttgaatgctcatgttcctgttaaaaaagggtaaacagaagatatatggggagaagaacatgtttaaagaaagatggggaaaaacatatttctacttgtttaatatacaaataaagtgtgtacattg

SEQ ID NO: 93708 - DNA, 139 bp, Homo Sapiens
tttgtattccaataaaactttatagacactgttagatttcagataattttcatgtgtcataaaatattttgctttcatttttttcaacaattaaaacatgtaaaaagcattcttagttttcaagctatataaaaacagg

SEQ ID NO: 93709 - DNA, 378 bp, Homo Sapiens
  misc_feature (130)..(258): n is a, c, g, or t
aaaatcgatgtctctgaagtctctcttcagccaggaggcttttcctattgaagcactctggggcacattgatttctcctatgttttaacttcaaacatggcatcatctgaaacctatattttgattatgnnnnnnnnnnnnnnnnnnnnnnnnnnnnnnnnnnnnnnnnnnnnnnnnnnnnnnnnnnnnnnnnnnnnnnnnnnnnnnnnnnnnnnnnnnnnnnnnnnnnnnnnnnnnnnnnnnnnnnnnnnnnnnnnntattctctaaagtctcaattcatgaactcaatgctttcatttgcagtagtttatctactttgtaaaatatatctttttgaggaaataaacatgtatacttaaattcatctcaccaaaaaa

SEQ ID NO: 93710 - DNA, 673 bp, Homo Sapiens
  misc_feature (260)..(269): n is a, c, g, or t
  misc_feature (343)..(367): n is a, c, g, or t
tccaacctacggcaggacgaggcccggtggttaatcggcacgaggggaacgcggaaggcgcaccgacaggaatccggccagcgcagggcgagtgaaagaaggaaatcagaaaggaagggagttaagcaaagataataaaaacagcctgagccacggctggagagaccgagacccggcgcaagagagcgcagccttagtaggagaggaacgcgagacgcggcagagcgcgttcagcactgacttttgctgctgcttctgcnnnnnnnnnncttagaaacaagaaggcgccagcggcagcctcacacgcgagcgccacgcgaggctcccgaagccaacccgcgannnnnnnnnnnnnnnnnnnnnnnnnctggcgtgcagggacggaaaaagcattttcacttttttggctcccactctaagaagtctcccggggatttggtatatattttttaacttccgtcagggctcccgcttcatatttccttttctttccctctctgttcctgcacccaagttctctctgtgtccccctcgcgggccccgaacctcgcgtcccggatcgctctgattccgcgactccttggccgccgctgcgcatggaaagctctgccaagatggagagcggcggcgccggcacagaagccccagacgaagccccagaagccattcctgc

SEQ ID NO: 93711 - DNA, 644 bp, Homo Sapiens
tttcttttccttttctccccctcccaacgccactgacaagaaagcactaaagatgcaggttgtgcgatcaccctgcttccaaagtccattcgcaccagggcctgaccaggccgagcccctcagaaccagttggtgaagtcgagaagctcctgctcctcggggctgagcgggtcgtaagagccctcgtccgacgagtaggatgagaccggcgagccggccatggagttcaagtcgttggagtagttgggggagatggtgggcgacaggacgcctgcctggaaggcggcgctcaccgcgtcatgctcgtccagcagctgctgcagcgcgcggatgtactcgaccgccgagcgcagtgtctccaccttactcatcttcttgttggccgcgccgttggggacgtgctcccgaagggtggcaaagcccaggttgaccaacttgacgcggttgcgctcgcgctcgttgcggcgcgccacggcggccggctgctgctgcggcaggctgtagccaaagccgctgaagttgagccggcgtttgcagcgcatcagttcgggcgaagacgagcgctgtcgcttgacttgcttgggcgctgacttgtgaccgccccctgagggctggccgtcggccgccggtctcagctgcggcgc

SEQ ID NO: 93712 - DNA, 492 bp, Homo Sapiens
gcgccgcagctgagaccggcggccgacggccagccctcagggggcggtcacaagtcagcgcccaagcaagtcaagcgacagcgctcgtcttcgcccgaactgatgcgctgcaaacgccggctcaacttcagcggctttggctacagcctgccgcagcagcagccggccgccgtggcgcgccgcaacgagcgcgagcgcaaccgcgtcaagttggtcaacctgggctttgccacccttcgggagcacgtccccaacggcgcggccaacaagaagatgagtaaggtggagacactgcgctcggcggtcgagtacatccgcgcgctgcagcagctgctggacgagcatgacgcggtgagcgccgccttccaggcaggcgtcctgtcgcccaccatctcccccaactactccaacgacttgaactccatggccggctcgccggtctcatcctactcgtcggacgagggctcttacgacccgctcagccccgaggag

SEQ ID NO: 93713 - DNA, 886 bp, Homo Sapiens
tttgatgatgacaataaagtcttgctaatttttcccagccctcgtgtaaataggaacacaataagtgtttgttgaacaagtgaacaagtacattgctccaagtagagaaggtaagaggaagggaggggagtggaggagaggcactgaaaaaatctcatcctacgggccatggactcacagggtggtcagcatccagttccgctccatagctgagaatctgattggcaaatctgtccagctcttgaatgggtcttgggaaccagggcactgtgtctttcttctaatctcgtgaaagctcatggacagtggcaccaatgtcatgcctcaagatcttgatgatgtttgtcagagcaggcaggctacgtttatccaaatgggtgaaaaattcatactcatctttctttaaacgagaaggtctagattcaatgtgggtcaggtttacatcattctcctcaaataagcgcaatactttggccaatgcaccaacttcttctttgagtgagaagatcagtgatatggcaccattttgattgcagttgtcttcaatatagcttgtttcctgtccaaagtcagagagtttcctgcccaagcctgggttttccaggaccgcagtggacatgctggctccccgggagtgaggtctctggctttttagggcctcaggtacaggcaggtttgcaaacagcacgtggggctgaaggttttaacctcgcactcgcgtcccggatcgctctgattccgcgactccttggccgccgctgcgcatggaaagctctgccaagatggagagcggcggcgccggccagcagccccagccgcagccccagcagcccttcctgccgcccgcagcctgtttctttgccacggccgcagccgcggcggccgc

SEQ ID NO: 93714 - DNA, 407 bp, Homo Sapiens
  misc_feature (232)..(241): n is a, c, g, or t
  misc_feature (315)..(339): n is a, c, g, or t
  misc_feature (349)..(349): n is a, c, g, or t
ggcacgaggcttctggccagggaacgtggaaggcgcaccgacagggatccggccagggagggcgagtgaaagaaggaaatcagaaaggaagggagttaacaaaataataaaaacagcctgagccacggctggagagaccgagacccggcgcaagagagcgcagccttagtaggagaggaacgcgagacgcggcagagcgcgttcagcactgacttttgctgctgcttctgcnnnnnnnnnncttagaaacaagaaggcgccagcggcagcctcacacgcgagcgccacgcgaggctcccgaagccaacccgcgannnnnnnnnnnnnnnnnnnnnnnnncggcgtgcanggaggagaaaaagcattttcactttttttgctcccactctaagaagtctcccggggat

SEQ ID NO: 93715 - DNA, 1144 bp, Homo Sapiens
  misc_feature (754)..(811): n is a, c, g, or t
taaaaagacggcagtaaactcataacggtcctaaggtagcgaggcctgggtggcgaattcggcacgagggccaggaacgtggaaggcgcaccgacagggatccggccaggagggcgagtgaaagaaggaaatcagaaaggaagggagttaacaaaataataaaaacagcctgagccacggctggagagaccgagacccggcgcaagagagcgcagccttagtaggagaggaacgcgagacgcggcagagcgcgttcagcactgacttttgctgctgcttctgctttttttattcttagaaacaagaaggcgccagcggcagcctcacacgcgagcgccacgcgaggctcccgaagccaacccgcgaagggaggagacgagggaggaggaggcggcgtgcagggaggagaaaaagcattttcactttttttgctcccactctaagaagtctcccggggattttgtatatattttttaacttccgtcagggctcccgcttcatatttccttttctttccctctctgttcctgcacccaagttctctctgtgtccccctcgcgggccccgcacctcgcgtcccggatcgctctgattccgcgactccttggccgccgctgcgcatggaaagctctgccaagatggagagcggcggcgccggccagcagccccagccgcagccccagcagcccttcctgccgcccgcagcctgtttctttgccacggccgcagccgcggcggccgcagcctgcgcagnnnnnnnnnnnnnnnnnnnnnnnnnnnnnnnnnnnnnnnnnnnnnnnnnnnnnnnnnncgagtggaaccggggcgaggccagcctcaggggggggccacaagtagggccagcaagtcagggaagggtacgtttcgccgagtgatgcctggaaacgccggccaaatacggggatgtgaaaggctgccgaagaagcggccgcgggggcgccgaagagagggacgaacggtacgtgggcacggggtggcacactgggacgagccacagggggcaaaagaacagggggaggagcgcggaagaacccgagaatggaaagacgagaggacacagagagcacacaacacaaagaggccgccacgggaaccacgagcacagagagcatggaatcgcaaa

SEQ ID NO: 93716 - DNA, 370 bp, Homo Sapiens
tatagtctaagcagattgctacataacattgcttcaataaaatctgcgaatcaagaaatttgttggcagtgtgagagttgacagattatagctttcagttcatgtgctctacactgagaggtcatcttccttttcctttgcaagctcttcaggtgtgacataacactaaagtctgggcttcagctgatcccctaacacactgcacagtcaggtaaccattgaccacactgcattataaattcatagaccaagatgaccagagatctataaaatatttaaaaagtaattgttttataaaaggtctatctaaacaaatattttaatagactatcattaaaaaacaaaataaatatattaatatcatctgtat

SEQ ID NO: 93717 - DNA, 360 bp, Homo Sapiens
  misc_feature (19)..(19): n is a, c, g, or t
gggcagaaaaagagggagngcattaggacttttccgcgtgtaacaacaaagccaattcaaactgacctaaatagtaaaagtgatttacagggacatgtgactggaaacacagggccagatctggcttcaggttcaatttgattcaaccgctctaccaatggcatcaaggatccagtttctctctgtccttcagctctgccttctgcaggattagctttattataatgtcagtggccaaaacgcccaggtttcttacttccccctccaaatccagggggaacaggccatcatacccagagacctctcagtacatcaaagaaacatcttacctagaaactgcaaataaatttttttcccaaa

SEQ ID NO: 93718 - DNA, 1136 bp, Homo Sapiens
  misc_feature (900)..(933): n is a, c, g, or t
ttacccccgctcgcgggtattaatatcccgggatatcgtcgacccacgcgtcgcggacgcgtgggctgcgtccccacggctgtccccggctcggaccctgatgcggatcaccgtgtacctacagctgctgatccctgcgggatggtccagacccacacaagccgtggctactgggagaccccatgacgtactgttgtccctgcaggcacctcagttagacccttggtggtgggaccagcctctgcatctggtgaggggccacgcctgaatccatggggaagttccgatggtgggggtcccggtcaggtgggccctcagcctccgatccctggacaccggccccggccttctcagatccctggggagggtcacctgccaagcccagcaccaatggcacaacagcagccgggggattcgacacggagcccgacgagttctctgactttgaccgactccgcacggcactgccgacctccgggagcagcgcaggagagctggagctgctggcaggagaggtgccggcccgaagccctggggcgtttgacatgagtggggtcaggggatctctggctgaggctgtgggcagccccccacctgcagccacaccaactcccacgccccccacccggaagacgccggagtcattcctggggcccaatgcagccctcgtcgacctggactcgctggtgagccggccgggccccacgccgcctggagccaaggcctccaaccccttcctgccaggcggaggcccagccactcccccttccgtcaccaaccccttccagcccgcgcctcccgcgacgctcaccctgaaccagctccgtctcagtcctgtgcctcccgtccctggagcgccacccacgtacatctctccccttggcgggggccctggcctgnnnnnnnnnnnnnnnnnnnnnnnnnnnnnnnnnnacactaatcccttcctcctataatccagggcggaagggggcctggctccatccggctgccccattccggctccctgggagatcagtgttgtgagtgcatgtgaaatgggggatccccacccccagtgcccttccccttcctggggcccactcacactacaccctctcctcgtgccgaaatcgccacccaggcctcgctaccta

SEQ ID NO: 93719 - DNA, 789 bp, Homo Sapiens
  misc_feature (467)..(587): n is a, c, g, or t
ctcctgtgagactgtgaattcttcaaaagcagattccacaaatatgtcagcgctggaaatgatcctttggctttgaactatgtgaagactgcagaaggactggttgacaactacaatacagatgagcagcccacccaagattccttctctaagaatttagaactgggaatggaggagagaaagagagagatactgattctaccagagacaatgggatgagatagcatggttgttggaaccatggctggaactgtaaagcacaaattggacagcagataaagtcaggctgcatttgtatcctgggtccacaagacatcgtttccttaaaaccaatccccctgattttgctaagtgtctgcaagcctaatatttcatggatgtttgacaaggaccccgtctttagctgaactaaggagaaagtcctgcaacacacacatggagctcagcaaacggaggatgtaccttgnnnnnnnnnnnnnnnnnnnnnnnnnnnnnnnnnnnnnnnnnnnnnnnnnnnnnnnnnnnnnnnnnnnnnnnnnnnnnnnnnnnnnnnnnnnnnnnnnnnnnnnnnnnnnnnnnnnnnnnnntctgagcctcagatgggacgctagaccctccctgattatagtctgcgagacactgaacctggactcctggtctatgggagctgttttaagttttaagctgttaatttttggtaattagttatgcagcaaatggctgtgttgttattcccatccccctcttcccacctgtctcctttaaataaaaaccagcatttcaggtctg

SEQ ID NO: 93720 - DNA, 443 bp, Homo Sapiens
  misc_feature (13)..(13): n is a, c, g, or t
agggggacggggnaaccttccccatttcaacaccaccgctgtggctgcatgtggctgccataagaaaaagaacccattctttggcacagctgaagcaggactcttctcgttgttctccagggctccagccctcccgctccttacacagtggggatgtcagcaccacagcctccctttgcttctgtgcctgggaggaaggaagatgcctgctcttgttcttacccctgcctctccctccatctctgggttcctgtacctcccatcatagtactgttttgttttgtttgtgtcataatagacaccaccctgatctcatttaatcacctaaaggaaatccttaagcaatgcaggtgtcacagatttactttaaagcttcaagggtaaagaaagggactgaaacaagaagagtaaatacaataaaaatcttgataatagggtaaaaa

SEQ ID NO: 93721 - DNA, 403 bp, Homo Sapiens
  misc_feature (131)..(189): n is a, c, g, or t
tgactcctggatttacataacagagcaagcaatcccaccctaagcccaaaaaattctacatttcttaatttctactattcagaaagatgtggaacctgcagatatggagggccaactgcatttattttttnnnnnnnnnnnnnnnnnnnnnnnnnnnnnnnnnnnnnnnnnnnnnnnnnnnnnnnnnnntatctgcaactcaaggttctgctaaagatcctaaggagcagacttccaaaggtcacgcctcctgttgaagaccagatatgacaagttggttgataatcaaacagcttttcctctgctctcactcgacaacaatcaatacagaagacttctgtgaccagatgtgtggggttttctctctaccaataaacaagcaatcaattctgcagccaacacc

SEQ ID NO: 93722 - DNA, 453 bp, Homo Sapiens
gggccactgtgcaatggcagaaggagcattgccatagaagtcagggggcctggttacaagtcctgactttagttgaggacctgccatatgaccttgagcaaactgctgtacttctctggatctcagtttctacaacctaattcactgggcccagcctgcagcctgcaagcaccggatgagtggacgtggctgagcagccatgagaaagatgtggggctctccagtgactgtagacccagcataaatcaacagttcaaggtgctcatccccaaagccatggtgagaccttagctgctgtaataaaagtgtagtgccaaagtaagggcaatgacagtcttgcttggttttatgctggagctcaactctgggccacactcttttgtgggggtgggtggtaattatcttttttaaacaagacactggctatatacagtcaagtgtgcaaggcttaag

SEQ ID NO: 93723 - DNA, 355 bp, Homo Sapiens
  misc_feature (41)..(90): n is a, c, g, or t
gtggacctttttactcttggcccgatctttacctcccccannnnnnnnnnnnnnnnnnnnnnnnnnnnnnnnnnnnnnnnnnnnnnnnnncatattcagattcatgctctccatctccagatcatgaacagcagccattgtcctgggtcctccctcctccccagaaggacatgaatcccagggaacagcaggtggccctaggtcctcagcctgccgctcttccctgggctgtctggcgcaacgactgctttccaaggcctttcctgtatgtgaagagaagacagctgaagatgatcaaaatgatctaaacctcctaaatggcccaaaataaagctttctctgtaattgttttaaa

SEQ ID NO: 93724 - DNA, 635 bp, Homo Sapiens
tcctaagtccacagcttgtaagtgccagaactgagatcaaaaccaagtctctttgactttaaagtctgtactctgaccccaaagagatcctgtttggccacttataggaggtccctaaagctgcagactccccttgccggcacccacatatagagacattaacccttcccctgcagggtcacctcaaatagtcttttagctgggcttctcctgcaattccacctaatgccatcccctgggttttgcccaaacctgaactgggcagtggggtgagaggaggggtttacagggttacagagcctcatacagataggagcccatggctgctggtcatctgcattcctgcaggattggctgttccttggggtccttggcaggaaaatgaggattgctccgaggcctgctccagtacttcccagaggctggcctggtgtggggctctgggaaggctgaggctggagaagcgtaagtaggagggcagagatggcactcaggtagcttgaatcaccaggacccttccaagccccacaggttctgagggagtactagggccagctctgggagaggtctcttcctatgctgtgaaccccctgcctttcttgcagcctacaacgaataaattttctttgcaaagg

SEQ ID NO: 93725 - DNA, 427 bp, Homo Sapiens
agctgctctttgatcacgaggttcacgctgcatcttttcgggaaggttaaaaaataataaatgaccaccaggatcacagaaggaaagagctcgtgatgtccatggaattcacgcagatcacatccaggaatctttggaacaaaaaattcacaacaccatggcctcatacaaaaatgctgggctgcaggaaacctgaggcagagagctccatcatcacagtgaagtccccgccttcagcagatcccaccaacagccacagtgcttcccatcacctgaaaaaaactcatgtatcaaactattacacttcttcagaatattggaaaatggtgcatagttcatatgttctcatttgtttatcttgtgtctaaagtgtcttgtcattccaggccactctatttcttgtgtattaataaaaagtttgaggtat

SEQ ID NO: 93726 - DNA, 1066 bp, Homo Sapiens
tgcggccgccctccgtggaccaggttaccatgtccccgcccgcacgcccggccgggcagcccgagctcacgcgcgcccgcccacgtccgccggggtccctgctgatgctcggggggagtcctgtaaaagccacactgaggtcgcggcggcgagtccctgcaaggtcgcccttctgtgcgaacaggctttggtggttcttgttctaggaaacatccagcgcttcaactggccacggagttactaagtatcaaccgaacaaggtagttttaaaaggaagggaaatattgcgacacgaatgaagggacagattaacttgctcctcggatccgggcacacagctcctcctacttcttcttcctcttttcctggacacaccgtggacagaaccattttcctttgggtttcgtggtaaggtccacgcaggcaaagtgaaaccactcaattggacagtctggattgtcacagccaatcatctccccataggagaactggtggcacaggcagtacgtgggttcgtttgggtccacgggcatgtccagcacatcagaggggtgcacggacaggatggtgtcagtgaactcagaccctcctttgtgcttctttttctttggtgtgtcttcctctgatgtcctcctgcctcggccccgggaccctcttttttctttctgaccccggcctttttttaaccctcgccctccggagctttcaaaatcactgccctccatcttgtccttcagatctgcttcaaagcgcgccaggtctgcatcaagccttcgaatgtgtttatccaccatctcgtaggtctgcatggccagctgcactttgtcgtcactgtattccttgcacttgctgtaggcgttctggatcttctgcaggcgctccacgcgctggtctggagacagcgtcttcaccgtggagatgtactctgcagccaggatgtcaatctctgctttcttatcttccgtcctctggtccagctctcgcatcagctggaagttcctctgaagttcgcagggaaggttctcgatactgtccagatagtgctccaagtacatggcggtcgccc

SEQ ID NO: 93727 - DNA, 455 bp, Homo Sapiens
tctcctgagctattcgaaaaattctacgactgtgaggaggaggtggagcggctttgctgcctatgaaggcgccttcactgcttgccagagccccttcctctcttgtttcccatggaaacggcctcttcagaaggcagatcgggctgtctctttcctgtggaaatagaactgtcgtaaaggtgtagaagggagagaagttgggacaccaagtctgagcttggagtggcagtcgtccaaaccccaggaagagagctctaaagatggggcttcgggggtaggaatccaggatgcttagtttctagaccctgcttgaaagttctagagcctttgaaagggagttagtctagaggcagccacttagaaaggtggaatttgggctttttggacagactgcttccttgaactttgtgttaaaaacagttctgcttctgaaaataaagtttttaatcagaaaa

SEQ ID NO: 93728 - DNA, 773 bp, Homo Sapiens
  misc_feature (22)..(22): n is a, c, g, or t
tctacacaaaccagatgaaccntccaatctcctgcctcgagtattgaagcctggctactgtgactgtggggaagggattaatggtctcagcattcagccaacaacaatacctgctcactataagcattcagaaaacagaaaagtttcaagaagcaggaagaaaagactcacctatgatcccaacacccagagataagagtcctgaagctcagatgacacagctgataacagggaagccaggacagaatctcattgttttgaacaccaaaacccgttcccttgacaacttggctatactacactattcgaatgttgcagatactgtggtcacatttcaaaggccagatctttcccagggcttaagctgttccttggatacttttggtaagtcatttatccactaatcatttagtaatcgtctctgacatgccaaacaccctgctcagggctggaaatgcagaacctgggaagccactggccttgtcctcaagatctctctctggctccctttgaatttgctaattcagactttcacatttcccccaggaaaaatcataaggaccaaatcatatcccgttttctcaaatggcttcaaagacccatgtcatcgtttggcatcatgtaattctttactgatgtactttaagagtcacgttttattctctttatgcagctgtcaaggacagacacaaagagtgggggtgtcttcctcactaaatactttcccacaacactccagagtagattcatcatttaaataaacactaacagct

SEQ ID NO: 93729 - DNA, 975 bp, Homo Sapiens
caagtgtcccatggattaagattaggtcggggggctttaggtgatccgaatgcctccagaattctgggcgacaacttaatttcagagtttcaatggatggtaagagttttaatgaagacaagttttaaccttattcggaagttaaatattaatactttagaaaattattgtactaaacttatcgcaagccttttgaaagtagcagagtttcatcataccacatatattaccagagccataaaattttctataatcaggcaccttttgctgcttcttgagtaagactgttttcctgtttaagtgttaagcatcgccagacataaaaatctattctctcctctcgattgtagcatagcctgacagctctagatacagcatttctatgatgaaaaatgagtatccatcaggaaatctagaagactagccgtgttttctcagactccacctttgtttgcactctgttgcctgtgaggagctttctggcatgtgattatttacttcaaaactagagttccaagcacctacattaattattttatattgtgtgcagaatagtatatcttttaatgtccagatatgatacactgcacatattgcttttgcactcttaaaatttttgtactaaataatagaaaatatttatattctttgagtgtgagctttgaatagatggcattatcactttattgtttttttaacaaaaactttttctcaattattctattgcaatgttattctgagcaagtcctatgccaaatatcttgtataatgtttgtatggaagattaaattttactcttgtgtggtaagactatttcagttactgattttatagttggaatttgatattccagcacaaagtccacagtgtattcagaaatccaagttggtgtcatacatttcattttgatgtgaacttttctttgctttcctttgttctaagactccattttgcaataaacgttttgacagtaaa

SEQ ID NO: 93730 - DNA, 743 bp, Homo Sapiens
agactattaatttcatcctgtctgataagaacaaaagcaattgcaaatgataatacaaagagacctatgatttccatgaaatgaaagtagagctatttgacccccagcccccaccccaaaattaaacgtggaaagatgatgacaaatgttataacatgatgaaaacactgggaatcattctaaggaaaagaccatcacgtaacatgaacagggctatgcccatctattcaattaataacgatctgcacaaaaggacagaaggcagttgatgaaacataaaacctttccagtgtgtgactaaagtatcagtttcagtatcagattctcattagcctaatcagaaaaaggatgatcaaacttctattgactgttgcccacagtgcatttggaatgtgcaacatcaaatgagaactaaagccacaaatataaatatattgccatcaatgtccacagagaccaacaaaaaaggggtagcttatctacttcggcagaatttcagcgtagataaaacttaacttgttttggaacaagaggcctgagaggtctacccacaaggagaggcatcctcctttactttaaagtatccaaggacattcctatttggtagaaacacatccagagactccaagctcaaatcctccaggataatcttggccttacacatggatgcccagacctgagtcctgtctggaaggaaagtagcttccccactttcaataaatgtataatagtgtactaacagc

SEQ ID NO: 93731 - DNA, 927 bp, Homo Sapiens
  misc_feature (897)..(897): n is a, c, g, or t
  misc_feature (904)..(905): n is a, c, g, or t
ggctggtaccggtccggaattcccgggatatcgtcgacccacgcgtccgaattaatcaaatacaagaatctcatgctgaaattatccaggaaaaagaaaaacagttacaggaattaaaactcaaggtttctgatttgtcagacacgagatgcaagttagaggttgaacttgcgttgaaggaagcagaaactgatgaaataaaaattttgctggaagaaagcagagcccagcagaaggagaccttgaaatctcttcttgaacaagagacagaaaatttgagaacagaaattagtaaactcaaccaaaagattcaggataataatgaaaattatcaggtgggcttagcagagctaagaactttaatgacaattgaaaaagatcagtgtatttccgagttaattagtagacatgaagaagaatctaatatacttaaagctgaattaaacaaagtaacatctttgcataaccaagcatttgaaatagaaaaaaaacctaaaagaacaaataattgaactgcagagtaaattggattcagaattgagtgctcttgaaagacaaaaagatgaaaaaattacccaacaagaagagaaatacgaagctattatccagaaccttgagaaagacagacaaaaattggtcagcagccaggagcaagacagagaacagttaattcagaagcttaattgtgaaaaagatgaagctattcagactgccctaaaagaatttaaattggagagagaagttgttgagaaagagttattagaaaaagttaaacatctggagaaccaaatagcaaaaagtcctgccattgactctaccagaggagatttcttcaagcttagttgctgaacttcaaagaaaagcttcaggaaagaaaaagctaagttttctagaacnaacttgnnagaagcagaaaaaagaaggaat

SEQ ID NO: 93732 - DNA, 533 bp, Homo Sapiens
  misc_feature (523)..(523): n is a, c, g, or t
tgcggccgctccagatccacctcgtttggctccttcagtcgttcgccgtacaactttcctttccatagtgcgttactgtggcggacagagcacctgtgagaggtgcaggcgatgccgagcttaggggggtatggcctgtgccccagcactcgccggttgctggagggacgcagcgctgaggtcaccacagcctttagactgtctgcagccctcccaggttcgcgccggggcggaggttatgaggattcttgtattgatccggtcctcaaccctatttcccaagatccaatctatagtagagggtgtgaggtgtttttaaacgtgacatttttcaaggtaacaataatatcccaaaagctgaaacctaaacttaaaaactgtgttaagattagggactgtaacctaaatttagccttggctgagccatccttctttttgtaaataatcgtgaggaatgtgaagctggaggccttctatctcttgattagatcaaagaaactcgaaggaagaagctcaattgtanagcataaaaa

SEQ ID NO: 93733 - DNA, 562 bp, Homo Sapiens
tttatttttcatccttgaattttattttgtgcatagttttctaacaataattgtttgctttaaattaaacataaaattagaattcattatgcaacaaaaactaccccaaagataaaacttcattattgatttagattagaatgcgcataccatccaaaaaactagacgttcaaataatcacgtttaagcacactatggtacatacgtatggtacaaataacagtggaaaagagcaatgattttgtgaaataagctgtaagttcttaacaattataaatagagatcataaatttttcaaatgaaacatgataatatgaactgtattgtgaatacacatggcttcatgattctgaaaaatttcttacaatattttctataatttggcagtttgtaaaaaatgattatgttattgccactctctcttaagtgtttcatatacacatacacatgcatatatagatactttttagactaactttaggtaaaagacttttctagatatacttttggaaattactcaaaaacatacaatacagaaaaaccagtggaaagtataaaatgt

SEQ ID NO: 93734 - DNA, 681 bp, Homo Sapiens
ggaattcccgggattgctgagcggcgcggagctacacgccctgccagactcgcccttgggtccctgtctgacgagctctaggcaatctgccctcgttcgggacacaaccatcggtctcacccctcagtttctgccagagaaaaaggaaaagtcaccgagaggcctgaccctgacgggtgggggagatgcgcgtgcggagtagcgggaagcgactgaggagcggggaatgggcagcatttgaatggatgcgggtgccgctggcacccgggaagacgctgggggccggcgctgtagagccgggcatgggctgggatgtgtttggattccaatccgggcctgacaccagttcagtgacctcgggaagttccccaaccctgcgggcctgtttcctccctctgaagtggcgacagtaatagaaccgacctcgtaggctcatcgggaggtcctgatgggagaacccatgcaacttgccaccacagagccaggcccgcggcgactggctcctggtgggtattaaagacgagtcgggaaagaagagcaggctcaatcaaaccttcaatggccccgaaagacatcttgattgaaacctcatgagagactctgagccagaaaacccagcaacttagaacccagatacctgaccatcagccactgtgtgaaataataaatgtttgttgtttt

SEQ ID NO: 93735 - DNA, 404 bp, Homo Sapiens
ccagatccctgcagctgcagcccctgtgggcccctgagagcctagagacaccaagatggctgaagtgcagtcaccatccttagggagaggcgagaaagacaggccatagagctgaaaattacaacacagtatggcctggcaacagtggaactcagagcaagaaacagaggagggatccatcaattctggggaagtttcagaataggagggagcttcactccacgcagaggaaggggctcctgcaaacactggaggaaagaacatcctctgtgacgtcacagagtatgaggctcctagttctaataggattggatgggggttgtgctgctgtgagagatgcagtgttgctcacattatcttccaaatggattcactttcattaaaatgacaattgttttacagtc

SEQ ID NO: 93736 - DNA, 393 bp, Homo Sapiens
taaaaggaggagggttagacctgcccaactagaggtttcttctagtttttatatttttaagacagtttattattatgtggccaatgaaccagcaggtggcactacacaacaatttttacacaggcaaaaataagttcccttagggcgaaaaagatgatgttttctcaaatgggacctttggaaggatatggacctgtacaacatgcacgcctaccggggaaaaaggactgaaaatagttgttcgaataggatgcccttcaccccggtgactctccatacgaaaacggaatgtgatcaacactactctgacaatttacacaaacaagaagtgaccactttaaagatggaatgccaagaacaatacaataaatgctaaagagaaagagtgaaaaa

SEQ ID NO: 93737 - DNA, 611 bp, Homo Sapiens
  misc_feature (53)..(53): n is a, c, g, or t
cggcccgctgctggccgctctcttctctgcctctcaccaggacagccgccccncagggtactcctgcccttgcttgactcagtttccctcctttgaaagggaaggagcaaaacggccatttgggatgccagggtggatgaaaaggtgaagaaatcaggggattgaggacttgggtgggtgggcatctctcaggagccccatctccgggcgtgtcacctcctgggcagggttctgggaccctctgtgggtgacgcacaccctgggatggggctagtagagccttcaggcgccttcgggcgtggactctggcgcactctagtggacaggagaaggaacgcctttccaggaacctgtggactaggggtgcagggacttccctttgcaaggggtaacagaccgctggaaaacactgtcactttcagagctcggtggctcacagcgtgtcctgccccggtttgcggacgagagaaatcgcggcccacaagcatccccccatcccttgcaggctgggggctgggcatgctgcatcttaaccttttgtatttattccctcaccttctgcagggctccgtgcgggctgaaattaaagatttcttaaaggctgaaaaaaa

SEQ ID NO: 93738 - DNA, 495 bp, Homo Sapiens
acaagacagggaacaaatatgtgtcaatgtgcagcttaacagaggggacttgaatggataaaattatctttaattatctagagctacccagtactgggcttgaatttaatcatagtcaaatgtttcctctggcagcataatattaccatacaccatattaccttataattgccattacagttccttatcaaaaatgttaattctttgcttgagcaaaaatcaataaaaccttatgtttgaccctaaagtatttgatcagggaacagaaggtgtgaattggacagatcccccgaataactttcttcaatcaagttgaaaaaccaaacagctatgtaagtccccaggagagctctttttcccttatcttctcatttgttttgttataaactgtttaaatagttcaaatggttgtgcatgcctaggggatgaaacctatgtaatagaaatgtactgttttatgaataaggagtaaaattgttttaaaaaattaaaaaa

SEQ ID NO: 93739 - DNA, 283 bp, Homo Sapiens
gcggccgcggggcatgggaccggctgggcgggtaactgacactacccgggtccgccgtcccctaggaaagagctccgacgattggagctttgggggccggggatgggggtggggtggagaggtcaccgtcggcctagctggggctgcagggtaggatctatcagaaagccgaggctgcacagcatggggagtggagcgggcaggcgtctcaccaccggacctccccctgccctgcctctcctactcttgttgcaggcgaagttcttctgtgttgtgcaggcgg

SEQ ID NO: 93740 - DNA, 483 bp, Homo Sapiens
actctggggtctctatactctctctaattgacctgaagataagaggctggaagcagggccattccagaggctctttggtctctctcttggctgagggaatttgggcataagcaggctgcaccctctggctaaataactcagcatcatgagggtggacctgagggtttaaagtagctctcattatatagatcctggatgttgagggttctctctcccacccccgcatccccagctcttaaaccctaacctcttactatttccatgacaactggcttcaattcaagccatttggctcagaaaaggttgagttagggtgatgatgggttagaaactaaacttcatgtgtccgccctcttgccctttactcccattcccaaccctggaggctttatacaagtgcttaagtgagtaggtgttggggagagcagggtttggggaataagggataaacggggcacagtggcaggggccctcctattccag

SEQ ID NO: 93741 - DNA, 789 bp, Homo Sapiens
tttaatgctgcccgataaagtcaaagcaaggcttcctaaatgttagaccactacacctcagataaggaaaggccacctaacggacagatttaaacaaaaatcagacatttgtctatggaaggtatgattgaattttcgcgtaatgaccccgcaataggatctaaatcaagcccacaacaagaatgcacattcaagcatctgaatgcatgatctgttaatactgaattctatatggtgatttcactcagcaaagtactggtttattctatataagaccaggattaaaacacctacagtgggaactgtatcttacttaagtttgcattctggttctcagaatctcagaacataataggtgtaagcgtttgccaaactgagtccagcattcatgatttcaggaagctttgcatccgtgacaaaactgttgcctgagactcaggggagctttttctttggtctctaggcctgtgattaatttctggctaatcaagttaattgacacagatctgtcacagtttctcattgcagggtcaagagttctagaattcatctattctacagttaagccttctccaaagatttgtgcctgcacatcatcatcaagttaaaagaagaaagatcatctttgtgatgttgggtatttgcttatgttaactgccggaagcacatgcgcacgcacacacacgcgaacacacaatcacttcataagtggagaacagaagtgaaataatacgcaaagcctaaattacacagctcccaagttaactaaagaatgacactgaaaccata

SEQ ID NO: 93742 - DNA, 522 bp, Homo Sapiens
gccctatgagtgggtaatgttgctggtgtgctctaagactctggacctaaagtaggacggattcagataagggacactggaaaaatatccataaacaagttattcaaagtgcctatgaaattatcaagctgaaggggtatacctcttgggctattggactgtctgtgatggatctggtaggatccattttgaaaaatcttaggagagtgcacccagtttccaccatggttaagggattatatggaataaaagaagaactctttctcagtatcccttgtgtcttggggcggaatggtgtctcaaatgttgtgaaaattaacttgaattctgaggaggaggcccttttcaagaagagtgcagaaacactttggaatattcaaaaggatctaatattttaaattaaagccttctaatgttccactgtttggagaacagaagatagcaggctgtgtattttaaattttgaaagtattttcatttgatctttaaaaaataaaaacaaattggagacctgtgaaaaaa

SEQ ID NO: 93743 - DNA, 1142 bp, Homo Sapiens
gcctgggggttaaatcggccgagggcgcgcggtcgcaggcttgggatggtgttcgcgcctccgagacccggacagaggcaagcaggggcgccgtgggtgccagagaggcggaagaggaggcctgatggggataccttcctgctgtccttcctgagcacaacctggctgaaaacctggaggtcacaacagtacaaagaatcaaagtcaagatcttgtgccagagagcaaatgaactcttcctcttgctgagaaaacccaccctgctcacctaaaccctggccttgcctggtaattccatccatgcgcctggaaggccccagacatcaaggctctgaggggccaggcacggggagaacccagcagtgccctgccctgcagtctgagctaccagattccttgtgaagataatttgaggaccatgactcacccaaccacatttcctggggcctcaaattgaaaattcaggatgggcttttctatatgactggctgatatccaactatgccatggtctttacatgccatgaacattctttcctgccagagttctaagaatctgtgttctctgccttagaccttctgcagatgagcccacaggaagctccacgtgtagctgagctacatgcaccaggcctcagtttgccccaagtcccctgtgtactctctcatggcctgtggccaagaaatgtattctctcactttggacttaggagtccaaagagaagcccagaaacaaaattgcttgaacttgaactccgtgtgcgtgcgcaccgtgtgcacgtggtgggggaaggtgcatgtcacggcttgtctatgcgtcatggtcacaaactcccaaatatagtacattgtctagatgatgttggtggacaaactccaacagagttaactcgcaaactctgggcccgggcccacaataggcccgagaaccggcagctgcgggtcaaaccaaggagaacgagataccacaagcatgggaacgcgcgagcacaaaccccctagcgatagcagtaaccaaactgcgcgggcccaacgcaccccagaagagcggaaacagcagccgaaagcgcagcggcccaagggacaaccagcagacaaacgacgcacacaaacatgatggacagagagcaaccacgcaacaca

SEQ ID NO: 93744 - DNA, 837 bp, Homo Sapiens
  misc_feature (12)..(12): n is a, c, g, or t
  misc_feature (378)..(441): n is a, c, g, or t
cgccctgtccgnaacagtacgataagaatttcacaggactttcgtctggaagtttgcggttgacaatgcgtttttacctacatgatcacagtaactttcccagcaaggctgttagctaaagaaggtgccctccccgccctggagcctgagagaggacgagctgcagccttgtccaagagaaaggcccgggggacccagccatccacctccctgcccaccaccacccttccttccaaggagcacgcaagaccaagcctaggactcgctacaaagctcggttcctaactagaccggcggggactgactaggaatggaatccaggcaaacacctggccgatcataatcagatgttactaaatattcataaggattacaatnnnnnnnnnnnnnnnnnnnnnnnnnnnnnnnnnnnnnnnnnnnnnnnnnnnnnnnnnnnnnnnnaaatcaagaaatcgtcattaaacaccaaaattgtgtttaacagaaccaaacagcgccacgcacttgtgaccctgacctgaagcttctggtcgagaaggcccttgaactcccaggccctccctgtaagcaggttgggcagtgcagagggcacagggcacagggcggagccacagggaaagatgagcagggtgctacccacaggaaggtgccctcccgatccccccacagcctctgccccctgtaaacacagtggccctgtcttctctgggcctcttcccttttctctgcatcctgccctctattttcttctcactaacacagaatggaacatttattttgtttgttacatgatcttggtaaatacttgtttgattgtaaataaaaggtgaatgagta

SEQ ID NO: 93745 - DNA, 896 bp, Homo Sapiens
tcctgggggaaagactgcaaccacagacacaaacattcagaaacactggcggatttgggacaagcagaagggagttgggagcatggaaggaaaataataataataattattattaacaataataacaagataaccagtccaggagagagggagccacaggaagacctaagaccaaacgaaatatcgtaacacaaggcgaggcaggcttgtgggaaccggtccccagcgggcggcggcagagcggggaggattggaggggccagggctgggggtggcacgggctcttgggccgctgggctcctctgggcgggctcagggctggaaggcgctgccagctgtagccaggctcatacttttcaatttgttgtccttcttccacttcatgcgccggttctggaaccagatcttgatctggcgctcggacaggcagagtgcgtgggcgatctcgatgcgccgtcgccgggtcaggtagcggttgaagtggaactccttttccagctccagggtctggtagcgggtaatacgcggtccgggcccttttcccgtccggcccggtcatatcatggctgatgtgaagcttcctcatccaggggaatatctgcggagtctgcccctcgggcgcggctgtggaggtggccatgggctctggctgcgcccgagctaggctggggctgcttagctggcttgccgcttcctcaggctccgaggacgcgctggcctcgtctatttcggtgaaattggcgctggagctggctgaggtcgcctggtcggagggggacgaagcagagggcttggcgccgtggctgtcgccgttggtgcagggcagggactcgggcgaggacagggacagccctcgtgccgattataacaccgctcaggggcctcgctccctagag

SEQ ID NO: 93746 - DNA, 345 bp, Homo Sapiens
caaactcactatgccaaagggagagttaagagtgggagactgagtcaggcaaaaactgccttccttttgttcccaaatagatggctgtaatttcacatgcttgcgttatgtgaaatgtggaattcattgagtgctaatcagagccccacaagaatgaaagcacttgccttgctgcctaccctccctcctcttttttcttcccctcctgcttgctcttttccctttaaataatgaagttcccaaaaccctctttggaaaaagcataggtcacaaatcctattataacttgcatttctttttccagggtacattctcaacctgggcaaaataaacctctaatcaacg

SEQ ID NO: 93747 - DNA, 465 bp, Homo Sapiens
cagcctagtcaccaacagaaggaggaatgctgtctaggctatagtgactctcttggaggtaatagctgcaagaactctcccaacagggacttctgtgcaaaaggctgagtaaattgcccttatgagagccttgcatctgtccaaaggccctggagaaatgcagagatgcaggtttaaccaagtccatcagggtgtccagtttcaatcactaactgctggaactgatcctcagacaagccaggactcaagtacaagcccacctacaaccagatgagcccttagggccactggggccatttctgactttgtgctcttcacacacttccttacattagaataatgtaattgttcagtatgttgtgctttaattttttaagaaaatgtcaaaggctagccatgacacggttatgtgtatttcttttaatttaacttttccataaatattaaataatgtaattgttcaga

SEQ ID NO: 93748 - DNA, 693 bp, Homo Sapiens
caatctctatctgtgaacctgtagtcaattcagagttccccagactggcgttctgttacagagggagtttagattcaacttcagatgagaaaaatgaggatctgacatgaaaagtgacttgcagtaggtgcaaactagtgtccagggctctggcctccacctctggtcaactttcaccaccccatgttatgctaacccctggcattctgtttgtgcacaaccaagtctttaatttgtcctagtagtcatatttttttcctcttcttcttaaattgatgtcttcacttgctgtttccttgggtgttgaaacccaagtcccatcccctgaggaaccaacaacattgaatacgaatatggccatgaactgattggccaaatctactctgacctgtgctcccaaggtgaatgaccttgttggggttgactaagtcttttccagggaggtcaacatcacctcagctatttcaaaacagagctaaagttccagtccagggaatggctgattcttcaggtgtgtttctgtgtgcacaacttgttctttcaacaacctccccatgagtttctggaatgtgaagactacttttgtctgaagaaaccactggcctacatatttttgttatacacacatgaaaaaattgttacaagaggtactgctgtgacaagcaatataaagtcttggactgtttcctaaaa

SEQ ID NO: 93749 - DNA, 505 bp, Homo Sapiens
ctgctgatctgggcaaaacacggaggtcaggagcaagggcagaggctgcaagtcccgaggctcagacatttgtcctttcttcttctgtgcccacaagcacctgtgtgtggcatgttgagtttcagtggaagtcatatacttctgggcttcatagtttatggctgcactgtgggacatacaccagctacaaggaaggtgaaaggataggacccgatgaagctgaaatcacatttattctaactacttatagcagcatagcactttgttcatgaaggctgagatagtcgctgaggcagtgaggaacttttgaagacgaacaagggatgtgggtgtcaagagagctgctgccaggtgggaaagaccaatttggccacataacccctgtcatctgccatccagatactaaaaggcaaagcaaagtgtaaattgaattttctatgtgacattttaaatagtatttctgctgcagcctgtgattcagttaacttacctcagctaagcctca

SEQ ID NO: 93750 - DNA, 590 bp, Homo Sapiens
cacatggacagccattccccaggctatgaagtgacataggcctcccccacggtgcctgtgtacggagcctgatgacttcactgggagccttctggaatcctgcagagggtcaaggagcagggatgttggatgcccacctgtcaagagttcagatcaaagttgcgctgagagcgtcacaattttggttcatccttgacgcgtttgtccaacagctcattggctccctttgtatgatatcgtggtcttctcacatggtgcccagtcaccaatatttataatgaggtctaactacagcagtagtttttcatatatatctctaaaacattttgttatattgaaaaaagtaatagaaatcaagatgtgttgatgaaataaaatgtgtatctgagtgagaaaacaagtatggtgaggtcactttaatgtttcacagcgatctcagatctaggcctcaggtagaatggaagctgttctgcattcactgattaacgttgctaaactcttggtgaggcacgagctaccagccaattgctcttcatcacagctatctgtcttttagtgccacaaataaaagaaaatcaaatcttaaaaaa

SEQ ID NO: 93751 - DNA, 610 bp, Homo Sapiens
atggctcagttctgcacaatcctcactttatccccccgaatccccccaccagagggccatggagggtcccactgggcaccaggcctggtccatggggagcgacaaagaaccttctgctgtcattaaccgcgatggtttatcacaatgatgaccctccccgaggcctctcctacggtaacagcaacatctacggttccacacccacagggaaaacggattcagagcagcaacagggggcgggcaggctgtggggccgacagtgaacatggaggcaggctggtggctgggagggctccatgtgggcctggctgaggagccagggatctggagtcagaaccgggggaaggcagctggaacccagtagtggacttggaattccgcaaatcgtcctcaaacgtcttcagccagaagcgacggcggcagcagcgcctgcagacaggcgtcaggaagcttcgctgctgagggtatttctcaggctgggctgggctgggaggcccatgtccttgcaggaggagagggcctgaacaccggcccttcaagctccctagtcagtcagtcttgggcaccgggctcctgagggctgacagtgtgatgaggagctgggcagcat

SEQ ID NO: 93752 - DNA, 323 bp, Homo Sapiens
  misc_feature (269)..(283): n is a, c, g, or t
actctggacaacagtgtgggaagggagagggggtccccagcaagggacttgaggtaggagtgcattcgggctctgtggggtaagggggctgaggcaccgccccgactgccccccaggacattcattccggctgaggtaggtgctgagagccaaaacagcaaaaatccatcctgagaaaacaaagtcggtggagggtgacagtgtcagggcccagctacagcagggtcatcttttggagtctaattcaccttcctctatctctctcctcnnnnnnnnnnnnnnnaagttttgctttttaaagaaaaatgttagttcagttcccc

SEQ ID NO: 93753 - DNA, 915 bp, Homo Sapiens
  misc_feature (403)..(457): n is a, c, g, or t
  misc_feature (476)..(476): n is a, c, g, or t
atctgtcagtaaattacatgtatcctggctgtttatttcaaaaatgcttcagtatgtatttcctaaaatagggatattctcctttgtaatcacagcagggtagatactgctctttagttgtcatgtctcttagccttctttaatgtggaacacgtccacaccctttctttatcttctgtcttttaaacatcttttctgttgtccaatttttaacaacaaagatgttaaaaatcagaaaactcagaaaagcacatggtgtattaaaattccacctaggaataactgccattaaagttttggtgtctccctttctgtctcttcagatgcaacttactagtctagacaaagcaggtttctcagtgaataaaacatgctctaatggggtgtacatcctggcacattnnnnnnnnnnnnnnnnnnnnnnnnnnnnnnnnnnnnnnnnnnnnnnnnnnnnnnnccttttatcaatcacttanttcttcaaaacgaccttatgagataaggttgatgattcttgtcctccattatggcataaggaagttaaacaacataccccaagttaaacagatgtaaagtgatataccatactgtgataaagacacaggcaggttggtgtcagagatcatcttcttaatcacggtgatacactaacaagttataaactaacaagttaacttaaagtggtgataatactgaactgctgtgaggagaactatgatgacactgttacctataacctgtgatggtttgtacttgactagggttttgtcttatagcaagacctccattctttccgtaagtggtgatgtctcttaaatgggcctgccacggccttccttggtcctccctgtggaaattctccccttttcccctctccttcccttctgctgacctgttctcagtggtgtgctggtt

SEQ ID NO: 93754 - DNA, 426 bp, Homo Sapiens
aaatgatgataggtgtctatcaatggatgaatggataaagaaaatgtggtacaaattcacaatggaatagaattcaggcatagaaagaatgcaatgctgtcatttgcagcaacatggatgagactggaggtcattatgttaagtgaagtaagccaggcgcagaaacacaaatatcacatgttctcactcatatgtgagagctaaaaaaaagtgtatctcatgaaggtagagagtggaatggtggttaccagaggctaagaagggaaaggagaagagtgggatgaagagaagttgattaatgggtaccaaaatgtagatagaaggaatgagttctagtatttgatattatagtagggaaattatagttaataataataatttatcatatatttcaaaattgctagaagagaagaattgtaatgttcc

SEQ ID NO: 93755 - DNA, 682 bp, Homo Sapiens
atgcgtgctccacgtgtagcacatgttgtgtcttaagacagttctctcatccattagaatgcatttatatgattctgcgaaaccaggatcttcacacaaaagcatcatgcagttttttgacatagcgtctataagtggggagaagatggttgagcacttacggttgagcacggataaaacttacacggaaaaaacttacacagaaaaaacatacacttgtgtatgatggaatctgaagccactgaaaatcctacttgaaaagccatgtctaactcacctattgaatttttagttaacagcaactatttttcatacagtaaaatgttactaatttagattaagggagtgctgggggaagacactgatgccgaaactgaacaaatgttttaaaagaaatgcaggtttattatccagcactgagagagttaacaaggactggaaaaataaggctaacaaagaataggatgtgaatgttttcaagggccaaattaatgtatttataggtaaccagagcatatgttgcaaaaagacacattttaagaatcaaaatcaattctccaaaatgttttaaactttactgtatattctcgctagcaacagtaattctgtaaataccttttccccccataaacactgcaagggtaaacaataaatcttctttcctaattatctccaaccaaaa

SEQ ID NO: 93756 - DNA, 517 bp, Homo Sapiens
cacccggggaaatttctgtctccattttcttctccttccggccagattatctttccaaaagttcaggtgagaggtagggtgatgggagagaatgcacagatcctcttgagactatagcccctattaaggcagcatggatatatgggagcccctatccttgagacacagctaatgtacttcaatatcaaaagaggtaaagctaagctctggtttctttatttaatgcatcatctgaaaaaagtaagtttccagtaaccaaagtgtgtaagaattatttctcactagaaaataactccgtccttatttgcaagagagaagaagataaactattttcctttttatgtgtggcccaatatacagactatgtgatttcagaatgaggaacaccagattttgaacctggacactatttcttcaaccttaagccaattgtgtaaattccctttatataaaagtagaggtagccgtacttacctcacagacttgtacagtttaaaaataaatggcactcaataaa

SEQ ID NO: 93757 - DNA, 719 bp, Homo Sapiens
caggaggaactttcaaaagtctggcccactgtgcagtggagcagaaggcaggaccatgaggcctcctgccatgtacccattgcagaccctgcccctaactcctgcctatgacacagaagccccacaccagttgcccagatgaactggcctctgcctttggtttactcagggtctgatgttggaatctgctccaactccacaccctagcccttacatgtcctcctaaggggcccctccttgtgctgccagtcagcctggatttctggtctttggttatttctgtgcaaacaaaaggtgtgcctggcagccatttctccatggagttgctaagtggccggaaaacaagcctgagggaggaggcaggagttggagttaccttaggcccctgattcactgcctatgaacagaccatcccccactccttgggtatccccaaccccagacccccatcacttgatgggccacacaagtttgagagtggtgcaagggagaagtttgggaaaagccttcttggaaaatgggacattagcattgagttttgaaagatgagtaggagtttgctaagaatagatggaagacagcaggataaacattccagagaaaatcatgtttattccctgctgtatcttccagaacctaggaggatgcctaacagagagtaagcacttaaaaaatatttgtcatatgaatgaaaaaataaacgaatgaatgttgataaa

SEQ ID NO: 93758 - DNA, 360 bp, Homo Sapiens
agacagccactccacccactgcagtctacaaggaaagcctccatagctgtggatttctttagtactaagcttcaagaaaccagcaacttgcttgagatgtgtcccacttctcgttctgggcccatgaaacttggatgaaactatgcctgccatctggttcttacttcagggtcacggacttaagattgcccattcattcctctttaataagacatcttggtggactaatggctaaccagtccatgatcacacatcactgtgatggtgtcacacacttggtattttttaatttagggaatgttgtgatccaacatggctgtcacggacttgatgcaataaagcaaactgtagctgaaaaaa

SEQ ID NO: 93759 - DNA, 377 bp, Homo Sapiens
cttttagttcaaattctcactcacagggatctcactgactcctggctaaaaggaggaggagaaatcacaagcacatcaattgctccctcctgatccaatcagtttgtgtcttgattgtggcttcctatggcctcttaagcaagatcttcaacacagcaatgtcatgagggctggcagacactccaactgtgtctacgcaaagatgagtaaaccatgttagagtttaaaaaatcttattttcaggcagtgtgagataatttgccctcaatcaacatggactacctttacatagagaaataaattttagaaatcatctggcgtattaaatcaatggaaaataggatctgataacaaagcattgtctattccagctgaaa

SEQ ID NO: 93760 - DNA, 542 bp, Homo Sapiens
tttaagtgttttgttttgttgttttggagttgagagtaactttaatttttatgtgtattcatgctgtgtatttatggctacaagtcaaactgatttcatatgtatgcatacatatagtctaatagagatgattgtaattcattataatcttgagttttttaaattagtaagatggctactattgctgttttggggtttttaaggttagatatatatcatgtttaactttttcccctatctttttatctttacttctttgttctctacatgctgtgtttaaacctttctgctctcttcacctgaacacatcgtgtttgacatcatctttgtgttgatgtttattacatagtaccacaaagcctgctccacacctggatggggtgcatgtagtctttggactggttatttctggttttgaagtaatcgaacaaattgaaaatctgaagaccgatgctgcaagcagaccatatgcagatgtgcgagttattgactgtggagtacttgccacaaaatcaataaaagatgttttcgaacaaaaaaag

SEQ ID NO: 93761 - DNA, 636 bp, Homo Sapiens
tgaaatgcaactggctgtacctcaatgatgttgccctgagattctgccagtcgaggtattacttcaatctcctgagaccagcctctacctccagatccagggaggccaacgtgccatgcatccctggagcatgaaacccaggatgggccgccttccagcctcccacagctgtgatgcaagttgaacacatacagagagactgcatctgcactgggtggttttcctgagccttggggagcagaatgcatgaatcccaggtatctgccgatctgtatgtaacaaattcacttcatgtaacttactgtgtgtccgtgagattatctctcactcaactcagacacattggcaaccagtgtgcagtgaacctgcttcacaagcaaggatgtggagaaactattttcgtacattttgtgggaatctgaaatactgcggtcagtatggaaagcagtatcatgggaaacttcctcaactcaagatcacctaccaatccttacagaatcagaatcatcatacaaactggtgaaagcatagtttcccctagaggttgggatgagggcaagaatgtcccctcttatcactactattccacacaatatgaaaggttccagccagtgaaataaaggaaaaagaaataaa

SEQ ID NO: 93762 - DNA, 396 bp, Homo Sapiens
tttcgggtgtgtggtgaaaatgtcacgtgtgtggaatacgctatctcctggctacaagacctgattgaaaaagaacagtgtccttacaccagtgaagatgagtgcatcaaagactttgatgaaaaggagtatcaggagttgaatgagctgcagaagaagttaaatattaacatttccctggaccataagagacctttgattaaggttttgggaattagcagagatgtgatgcaggctagagatgaaattgaggcgatgatcaagagagttcgattggccaaagaacaggaatcccgggcagattgtatcagtgagtttatagaatggcagtataatgacaataacacttctcattgttttaacaaaatgaccaatctgaaattagaggatgcaagg

SEQ ID NO: 93763 - DNA, 694 bp, Homo Sapiens
cggtggtggccacagcagaggctccaggaggtgaccgcctggtttccattaggaagtcctggtcagcagcttgggcgagatggcagagtcagggctggccatgtggccgagcctgctgctgctcctgctgttgccggggcccccgcccgtcgccggcttggaagacgctgccttcccccacctgggggagagcttgcagcccctgccccgggcctgtcccctgcgctgctcctgcccccgagtcgacactgtggactgtgatggcttggaccttcgagtgttcccggacaacatcaccagaaccgctcagcacctctccctgcagaacaaccagctccaggaactcccctaccccaaactcccaacacagatggaggcagcaacaataaagccaaacccttccagcactcagcacggaccaggcacccttcgggggctctgtccacggactcctccccacaaccagtccagctggggaaactgaggctctgggatgctaagtgggtcaggactgaattttgaggtcttgaggaacacactgcgcgtcaccaaacaccaccctgtgcgacctagccacgtgtgattgcagggacgcccaaggccacccactgaaaaaacactgggtgacagatatagggaccctcacatgtatccccccccacagcaagcatgggaatgaaatgcatccttcaaa

SEQ ID NO: 93764 - DNA, 493 bp, Homo Sapiens
  misc_feature (18)..(18): n is a, c, g, or t
agggggtgaaaaggaacncagatgatgtaagtgaatgaatgaagcttctgaccatctgagcctctggcggcagcccttccacaacgagctcacgcatctctgttttgagcaggaaacaggatcagacagaaagggctccccagactcacagatacaagctatgtttctcattaagtcccaaagcaaagtcaggggagtggagaaaactcctggtgctggcgcctcttccaacgttaggttgaggaatacaggagatgtttaccttatgcaggacgtggtcgttgaagtcagggccagctcctccctggtaggaatcgggtctctgcaggtccatgccaggcttggagctcgccgctccggctctccctgcgctctgcgtcagcgcttccaggagctcggttcgagctccgctgggtgcggcaggcttgggtctgagctctgcgggccgggccgcatccgttttcagcactggacagttccccgcagcgggcgc

SEQ ID NO: 93765 - DNA, 395 bp, Homo Sapiens
ctgggctctagtgaggaaatgagaccccagcagagaccagggggtcagttaatgttcggatcaacatcattatgtggtcccttagctctgagtgaagggcggattgggaggcgggcaaggaggccaggacaacatacaggtgacataggatggcggcatgggcctgggtgctgtgcttagagccagaagtgggcaggtcgcgagatacttgagaggcagagcccacaggacttgctgatggcttctgtgagggggatgacagggaaggtgaggaatcaaggcagagtctcagctttgggatctgagattcattcaacaaataattaattcattgccgcgtgccaggcctattctaaaagttgaggatatgaagacaacaatggtgatggcctcac

SEQ ID NO: 93766 - DNA, 548 bp, Homo Sapiens
gcggccgcgtccgccgggcgggccaggggtcgctgtactccctggaggccaccctggaggagccaccctgcaacgaccccatggtgtgccggctccccgtgtccaagaaaaccctgctctgcagcttccaagtcctggatgagctcggaagacacgtgctgctgcggaaggactgtggcccagtggacaccaaggttccaggtgctggggagcccaagtcagccttcactcagggctcagccatgatttcttctctgtcccaaaaccatccagacaacagaaacgagactttcagctcagtcatttccctgttgaatgaggatcccctgtcccaggacttgcctgtgaagatggcttcaatcttcaagaactttgtcattacctataaccggacatatgagtcaaaggaagaagcccggtggcgcctgtccgtctttgtcaataacatggtgcgagcacagaagatccaggccctggaccgtggcacagctcagtatggagtcaccaagttcagtgatctcacagaggaagagttccgcactatctac

SEQ ID NO: 93767 - DNA, 1267 bp, Homo Sapiens
gcggccgcccgcgccgcttcactagcttcgaccaggtggcgcagctgagctccgcagcccgtggcctggcggcctcgctgctcttcctgcttttggtcaaggctgcccagcagctacgcttcgtgcgccagtggtccgtctttggcaagacattatgccgagctctgccagagctcctgggggtcaccttgggcctggtggtgctcggggtagcctacgcccagctggccatcctgctcgtgtcttcctgtgtggactccctctggagcgtggcccaggccctgttggtgctgtgccctgggactgggctctctaccctgtgtcctgccgagtcctggcacctgtcacccctgctgtgtgtggggctctgggcactgcggctgtggggcgccctacggctgggggctgttattctccgctggcgctaccacgccttgcgtggagagctgtaccggccggcctgggagccccaggactacgagatggtggagttggtcctgcgcaggctgcgcctctggatgggcctcagcaaggtcaaggagttccgccacaaagtccgctttgaagggatggagccgctgccctctcgctcctccaggggctccaaggtatccccggatgtgcccccacccagcgctggctccgatgcctcgcacccctccacctcctccagccagctggatgggctgagcgtgagcctgggccggctggggacaaggtgtgagcctgagccctcccgcctccaagccgtgttcgaggccctgctcacccagtttgaccgactcaaccaggccacagaggacgtctaccagctggagcagcagctgcacagcctgcaaggccgcaggaccagccgggcgcccgccggatcttcccgtggcccaatccccgggccctccgccaacactgcccagcccccttgccccgggcccagtcggggtgggtgacctaccccattgaccccaaaatgaaaacccctttccggccaacaacaagggtacacccccaggaacaaatatttccctccttccctgcccgggggtcgccccatgagaaccccagagtgaacccccttcacaaattactttttaggctcttggcaaagggccgaagaccacaggcaaaaaacgcctgcacctaaagagctccccttaaaaccaggcaagaagagctcatttaccaacggagcggcctctaaccacctttaaaaaagagcatggataggccaaacatagaaaaccccgggctgcccaacagcaaaattaca

SEQ ID NO: 93768 - DNA, 1056 bp, Homo Sapiens
  misc_feature (1046)..(1046): n is a, c, g, or t
aaggtagcgaggcctgggtggcgaattcggcacgaggcgcaggagtcggagccgcgggcctcggacctgggggccccccggacgtggacgggggcggcggcggggccccggactccgtcggcgcacatccccgtcccagcgcagagagccaccccaggaaaagcccggctggacgaggtcatggctgccgctgcccttacaagcctgtccaccagccctctccttctgggggccccagttgcagccttcagcccagagcctggcctggagccctggaaggaggccctggtgcggcccccaggcagctacagcagcagcagcaacagtggagactggggatgggacctggccagtgaccagtcctctccgtccaccccgtcacccccactgccccccgaggcagcccactttctgtttggggagcccaccctgagaaaaaggaagagcccggcccaggtcatgttccagtgtctgtggaagagctgcgggaaggtgctgagcacggcgtcggcgatgcagagacacatccgcctggtgcacctggggaggcaggcagagcctgatcagagtgatggtgaggaggacttctactacacagagctggatgttggtgtggacacgctgaccgacgggctgtccagcctgactccagtgtcccccacggcctccatgccgcctgccttcccccgcctggagctgccagagctgctggagcccccagccctgcctaatccccctgcgtgcggcctgccccgaccacctgcccccgaccccctgttcctgaagcaacggttgcttaaccccccaatccctgacacaagtggacccggtggtttacccaaggtttgtcctgaacgccccgcccccgccttgggaaaccgcacaacccaaccggaaggatcttggaaaaccatggcccccaaccccgcacccttggcctcccctccccagggagattccgggaacgaccccacaccactctcacaacaggaaaagacgcccctcgcgccccttgagcgggaacacgtgaacgccgacaaaaaacntaaagcggga

SEQ ID NO: 93769 - DNA, 467 bp, Homo Sapiens
caggctctcctccattcctccagtcctggcggaagcaaggccctcctaggcagctggtggataacagaggagggtcctaagagcaccacaggaagaacccttggctgggccaggacttggacgttgaggtctcggtgtcccgcatgagatgtctgcagaatgagacttacagtgcgctgagccctggcaaaagtgaggacgttgtgcttcgatggagccaggagttcagcaccttgactctaggccagttcggatgagctggcgtctattctgcccacaccccagcccaacctgcccacgttctctattgttttgagaccccattgctttcaggctgccccttctgggtctgttactcggcccctactcacatttccttgggttggagcaacagtcccagagagggccacggtgggagctgcgccctccttaaaagatgactttacataaaatgttgatcttcaaaa

SEQ ID NO: 93770 - DNA, 356 bp, Homo Sapiens
ggggccgggaacacgcgccgcaggggctcggggccgcacgcggcgcccatcggcagcgtcgatctccgcagtggagcgccagcgacggcaggaccctgcggcctgggccgccagcgtgggcgctgggccgcggcgtggccgtggaggccgaggctcttcccgctccgccgtggggtacttagggggccccgaagggaccgcggaggcgcggcccagcaggctggtctcagactgggagcgcgaggccttgcgggccctgggcgagccgcggcggcccgaagcctcggccatgcgtccacggcggccggcggcccggggacgctcccggggtggtgactgctccacgctgcggccgc

SEQ ID NO: 93771 - DNA, 407 bp, Homo Sapiens
cagtacatcggccccaaccagccccggaagcctgggctgcctggccagcctgctgtaagctaagaacccacccacagcagcactcgggggtgtcactgcttcctggagttcaggagaccccggacacctgggacctgtgttgctgagcccgtcctgacatctgtgttcttcctgtcagctccacgcccgggcccctggaccacggggtccacctctcctctgtccttgctgcctcagagtcagtcactgaccctgttatcattgagggtcccagtgggaagcaggacgtctgggctttacggttctagggacaggagaagcagaggaagaggcttccatccctccttccttctttcctcctacagtgctgagcaaaaagtccccaataaatggtcaggacaaaaaaa

SEQ ID NO: 93772 - DNA, 438 bp, Homo Sapiens
tttggctttttaaatatgcgatccaagcggcagggtagggactaaagtaggtcaacagccaactccgagaaaggagtgtggtcctttaagggtgtgcgccaaggggcggagtctagagcggaagtagtaactccgggccgaagtccggtggatgaagggcggaagtagagtgtctaatcctgcagtcatggcgcaggaagaggaagatgttagagattacaatttgactgaagaacagaaggcgatcaaggccaagtatccgccagtcaataggaagtacgagtgtggggagaagaattttcattgtccaagcaccctcagggaacagaagtcaaagcaataacatattcagcaatgcaggtctataatgaagagaacccggaagtttttgtgatcattgacatttaagacaccaaaaaataaaagactcctacgaaa

SEQ ID NO: 93773 - DNA, 515 bp, Homo Sapiens
gaagaacagaaggcgatcaaggccaagtatccgccagtcaataggaagtacgagttggattgtattacacagagcatgaatatacttctttaggttacacgcatggggagatactctggaggaagcatttgagcaatgtgcaatggccatgtttggttacatgacagatactgggacagtggagcccctccaaacagtagaagtagaaacccaaggagatgacttacagcctcttctgtttcactttttggatgaaatggctttataagttcagggctgatgaattcttcataccccccgggaagtgaaagtacttaacattgatcaaaaaaattttcaaattaccatcaattgggtggggagaagaattttcattgtccaagcaccctcagggaacagaagtcaaagcaataacatattcagcaatgcaggtctataatgaagagaacccggaagtttttgtgatcattgacatttaagacaccaaaaaataaaagactcctacgaagaaaaaa

SEQ ID NO: 93774 - DNA, 1018 bp, Homo Sapiens
gcagtcatggcgcaggaagaggaagatgttagagattacaatttgactgaagaacagaaggcgatcaaggccaagtatccgccagtcaataggaagtacgagtatttggatcatacagcagatgtccagttacacgcatggggagatactctggaggaagcatttgagcaatgtgcaatggccatgtttggttacatgacagatactgggacagtggagcccctccaaacagtagaagtagaaacccaaggagatgacttacagtctcttctgtttcactttttggatgaatggctttataagttcagtgctgatgaattcttcataccccgggaagtgaaagtacttagcattgatcaaagaaatttcaaattacgatcaattgggtggggagaagaattttcattgtccaagcaccctcagggaacagaagtcaaagcaataacatattcagcaatgcaggtctataatgaagagaacccggaagtttttgtgatcattgacatttaagacaccaaaaaataaaagactcctgcgtccgacagcgagcgagcgcaggaggaaaacttgtcggcccgcctccggccctcgaagaaagttttctaaaacccattccgtttggccgccgcggggcccccagttagggtaaagtggcaacagtggcgccctaagccgtggttctccctaaagggaaaacatcctggggcgccattgggacgtaagggggccttgggaaatttcctcccccccacattaaaaacacacccccccggggcgggcccaacgccgaaaacgcgtttgcctggaaaccaaatctcccgacgaatgggggaggtgtcctcgcaagggtccattttaacggtgggaatccttaatccgaacgaggggggatctccccaggcgccggagagctcccggaatatttccaatattttacgcggcccccgccagccctctgggccaaaatattcaattcggcgcaaagacaaccccggaggggggtaaaaatttcagagtc

SEQ ID NO: 93775 - DNA, 927 bp, Homo Sapiens
cagtcgacggtaccggacatatgcccgggaattcggccattacggccgggggaagggcggaagtagagtgtctaatcctgcagtcatggcgcaggaagaggaagatgttagagattacaatttgactgaagaacagaaggcgatcaaggccaagtatccgccagtcaataggaagtacgagtatttggatcatacagcagatgtccagttacacgcatggggagatactctggaggaagcattcgagcaatgtgcaatggccatgtttggttacatgacagatactgggacagtggagcccctccaaacagtagaagtagaaacccaaggagatgacttacagtctcttctgtttcactttttggatgaatggctttataagttcagtgctgatgaattcttcataccccgggtggggagaagaattttcattgtccaagcaccctcagggaacagaagtcaaagcaataacatattcagcaatgcaggtctataatgaagagaacccggaagtttttgtgatcattgacatttaagacaccaaaaaataaaagactcctacgaagaactgtttttgttttcctcttccttttgagaagacactatgaattaaattctacagcttttttttgatatatggaaattttgtagaaacgaaatattttagttaaagtgtgacttttcaaaaagggaaaatcacggcacagcccttggtctgggttcccccaatattcccactttataagaaattcttccacccccccaggggaacagttatggtcccctttgattctcctgccgggggccataagtgtggcctcatgcccctttcccgtggcaatggaaagcccctccagcccttccccccagaaaagggattcctggagtgtccgcagccgcccttgagggttgaaatcccgggtttgg

SEQ ID NO: 93776 - DNA, 677 bp, Homo Sapiens
  misc_feature (343)..(343): n is a, c, g, or t
agggaagcagttagacggctgccgggcggcggctgccgcgcggcacacaatatttatttaattgcccaactaccactgatgaagatatattggagtgactgctgaaattgcctttttgtttttaaccagaggacagtccatttgtttcacttctttttgctttccttactgctatgagctttactgaacggctgaaaaacttggaaaataaaatggacatgctgtagtcttgaacataatttttttaaggaaaacttaaagtgccagagtgaaagccagaatggcatccagagagaggctctttgaactttggatgctttattgtacaaagaaagatccaganttacctgaagctgtggttggacacttttgtttctagctatgaacaatttttagacgttgactttgaaaagctgcctaccagggtagatgatatgcctccaggaatatctctgcttcctgataatattctgcaggttctgaggatccagcttctacagtgtgttcagaaaatggcagatgggttagaggaacaacagcaagccttgtcaattttgcttgtcaagttcttcattattctttgcagaaatctatcaaatgtggaagaaattgggacttgctcgtacattaattatgtcatcaccatgacaacactctatattcagcaattaaaaagc

SEQ ID NO: 93777 - DNA, 665 bp, Homo Sapiens
ccgaacggaagccactagcaattgcttctgcccaggaaaaccataatataaaaagcaatattgcatttgcagaaaaaattacaaatgttggtgtcactatcaaggacttgaagagtggagggatgatgattcctgccatactcccattcaactagattatttggactgagcagaagatagatggatcttctagaatgacaatagagtactgtaaatttagccagatggtgactccaagtgcagtttctgtacccgatatcatttcattattgtggcaaattaatatgcctcctggtacctggttgctatgatttcaatgtcccctccagaactcatgttgaaacataacccagaagtggcagtgttgattcgtggtgcctttgggaggtgattagactatgaagggttttgcccccattaatatattaatccattcctggattaatgggctgtcatggaaactggtgactttataagaagaggaagagagacctgagctagcacacgcaatcacactcagcccctcgccatgtgatgtcctgcgccaccctgggacccttcagagagtctccaccagcaataagactctcaccagactcacctcgaactgacagcttcttagaccccataactgtgaaaaataaatttctttttctttacaaaaa

SEQ ID NO: 93778 - DNA, 927 bp, Homo Sapiens
  misc_feature (884)..(884): n is a, c, g, or t
gggacggcagcccgtctcccgttaggagccggggaggcaaggtccagcgtacggtccgggggaaccttaactgtcgtttctgtgcctggacagtaggttggagagtagggtctgaatgagctacagtagtgaacgccgacggcttgtgttgagggcaggaaagggtgcacacagctccggcaggtgcttccgcgagaaaggtgactgatacaacaacgtagaggaccctgcaatgtggagaggcatgaaactggaggtccagtgccgtgagttaacaatcaagacgtccatacaggagatgcattggtggatgggtgaagagatgatagaacggataattcagtggtgatcttcggaaaaattcccacaaaaacccatttaaccgatcgaaacaatctcttaatccagttggaaattgaatttctctaaaaacaacactctgtaaaaattttttgatcaaacacccagctggaacaactctatttaccgtggatccaccattagtttggagagcctgcgagagatacgggggacttgaagtacgcctccacccccttgtcccttccaggagttcaagagacccagtggaggcagatgtatgtcgggtcccgccctacctgctctgacgagcttctcctgatattaatgcgtatccgcttttgtatgaccccttctattgatgtcacacgttcgtctattcgcccgcgcgcctagcaggcagggccgctctcagctccgccgtgacttgcacgtttctgcccgcctcctgctcgagatggagaggcgcatcctgagccgcagctggccgactatctggtgcaagcctgccacgaggctgtggttgaagagtctaaggctacgtaagggtgccgcccgactgactnacaagctattctgtcacaacacctccaccccacgacggtccgc

SEQ ID NO: 93779 - DNA, 535 bp, Homo Sapiens
agaaaagtagcgagagacgccagcagcagccgccgccgcggagccaacgcggactgggacggcggcggcagtagtgggacccggcgagcgtgagtggcccggagcggccttcgatgcggcgcagtatgaagaggcggcggcgccggcgcccggtcgccccggccacggccgcccggggcggcgactttagggcagaagacggggctgggttggaggcgcgggaggagaaggtggtgtactcgcggtcgcaactgtcgctggctgacagcaccaaggcgctgggcgacgccttcaagctcttcatgccccgcagcacggagttcatgagctcggacgcggagctctggagcttcctctgcagcctcaagcaccagttctccccgcacatcctgcgcagcaaggacgtctacggctactcctcctgccgggccctggtacccgaccccccggggccccctacagcccgcggccaggcgcgccggccggttccgcgcgcagcggccaggaggaggcgccgcggagcccgggcggccgc

SEQ ID NO: 93780 - DNA, 472 bp, Homo Sapiens
ttttgaagttgcttatccattgtattgctgcaactggaacacattttgataatagtagtaacaataataattcacctggcattaatttgttacttctgagtcctcagctgccaagcctgcaaagctgggacattgttggcacaaaattcttccattcgtttgacaagtctcaaaagtccactttctgaactgcagccgaatacagttcccagcttaaaattgtctcttggccaagtcaattgttcttactcctgtgatcatcagtgcctttattattagctccccaacaatggcacaggtatgcctgtttgtggcttctgtttaaaaataccatcatctctttttttcttatcaatgaaaatgcatatatttcctatcatatggttgcgcatatttaccgattgctcacaaagtgcaatgcgcggcctttgccgcacaatcccgagttccttactctggagttattaaaacc

SEQ ID NO: 93781 - DNA, 540 bp, Homo Sapiens
aattcccgggattggagagctgccgccgcggccggccggcgacgctggcgacgctttcgcccctgaggtagtttggcgaccgcgaagaaggaaaaagggcgggcgggcggctgtcctctcaccgtcctcaccccgcgaggcccggcccgctcctccgtcgtggatttcgcggcgatccccccggcagctctttgcaaagctgcttgaaacttctcccaaactcggcatggatacgactgcggcggcggcgctgcctgcttttgtggcgctcttgctcctctctccttggcctctcctgggatcggcccaaggccagttctccgcagcttcgcttggctggcgagcgcatctgctgctggggttcgcggtgcagatggagacgcagtggtggccagagggtgatggagaagacgggaaaagcgacagccacgctcctggctgaagccgcaggacgcaaataacttactttgtacctgacagtttctcacgttgttgtggaggccctgtttcctggaaataaactcaaattgttgttttctg

SEQ ID NO: 93782 - DNA, 743 bp, Homo Sapiens
cctctgagaaagggttgaccaatgtaagcctcactgagaagatgacatctgaggcatgaagtgaggcagggggcatagatactcctggcagaggaacagtcagtgcagaggccgcggactacaggcatggctcatgtgcaaggagatcagagtggctggagcagagtgaatgaggagggaagctgagtagcaggtatctgagaagcaatgcagcccgcagcttaacttcaacatgcttttaaacttttttcccattctcttcagtttcaagatataaccttgaggaaactcaaaatcctttctccttagccttaaaatagactccacgtccctcccctttctcaccagatatgctcccttttcatttatctaactgtatgctactatttaattgtgtgatgtcttagaagtttcagtggctaatcttgagacagaccaagcctggagacccagctgcaaacctccaaaaattacttcaaaatggctaattaacaacctgaccattgttaaaataatgtcaatccgaggtccaggtggactgaagcccaagatagccaccagaacaaaacacacagacatcatactcagcccatttcttgcatgccttccttatcaagtcttcccttttaaaaaccctaaaaattgctttcccctctaaaaattgaagcagttactttaaatagcaatctggctacttccccctttactagttttgggtaataaatttgctttttattactaga

SEQ ID NO: 93783 - DNA, 744 bp, Homo Sapiens
ttaccaaaaatacaattatgctgcatgcatgtttggtctatttgatttccatttaacaatatattatgaaactttgtctgtgccccaaatatattatattagcctatcatcattaatgacccatatatacacatatattgcccacaatttatcaagtcaaccaaaataagcatggactggatgtgtatgtatgtttgtttaaaaataaagaatgttctccttcaactatgaataacttcagaagttagagtaatgctgctttgaaaataacactattttctactatgatagaacttatctttgaagaaaaactgaatccccattttcatgaatatcatacctttctgagaaactatgacacatacataattagttacgaatacagactctcagaatttgaatttcaattctcattacagtaagccctctgttattgtaactggaacatggttgaatattgaactggataagaagaaatagaagaacaaaaagaaacaggacactgtatatattcaataaataattgcttaagagtatggtaatgtcataaattcaaaatgtttcaactaaagaattaatacctagatatgttctttagtgattaccaaatgcataatatcataggctttgaaacaagacagtgatctgagatctgggaggttcaactgctataaattttgggagggtactcgacctctctaaatcttagtgtcttcatataaaaagcacacacacacagctggg

SEQ ID NO: 93784 - DNA, 650 bp, Homo Sapiens
tagagttgaaacttgtcaaaataaaaggttgggggtaatgaaacaaaactgactttacaaacagaaaaatacatatgtttttggttcaaagactttctgagcaagaatatggtcatgactattttgaaactgatccaggacctctgccggacaccacagaggtatcggcacagcccctccagagccatccaactaaggcaaggcatgtgacaaaggagtccagggaagatccagggctttgacctgtcacaacctcctcaccatttctttccccagtttggatgagcagccactggaagattttgctcaccacctcaactcaacaataaccccactgacccatttcataacttgtataaaaagagtaaaaagtaactctttttaagaagtcagaatataatcatttcacggtcactatcacatgattctttaaatgtttagttttttaaactatttcactttgttttgctaacaattttgcagattacatgtttgatgttgttctacatttgcaaatttaatgactggtaacatgtttatacattgtgtatttaaaatgtatcaagtatttgattttactgttttccatttttactgaatgaatgtggaatacttttaaataaaacaacgcggttaggtcagtattactc

SEQ ID NO: 93785 - DNA, 519 bp, Homo Sapiens
  misc_feature (25)..(25): n is a, c, g, or t
  misc_feature (71)..(71): n is a, c, g, or t
gttggtgagccagggggtgggtccntgaggcttggacgccccatttcattgcaggagcagcgcaaccattngcagggcaaactgtcggagctgcaggtggagcagacatccctggagcccctccaggagagcccccgtcccacaggtgtttggaagtcccgggaggtagccaccgagggcatccgtgggcaccgcaaaatggtcctctacaccctgcgggcaccacgaagccccaagatggtgcaagggtctggctgctttgggaggaagatggaccggatccagctcctcaagtggcctgggctgcaaagtgctgaggcggcattaagaggaagtcctggctgcagacacctgcttctgattccacaaggggctttttcctcaaccctgtggccgcctttgaagtgactcattttttttaatgtatttatgtatttatttgattgttttatataagatggtttcttacctttgagcacaaaatttccacggtgaaataaagtcaacattataagcttt

SEQ ID NO: 93786 - DNA, 440 bp, Homo Sapiens
ctggactgtggggttcatcctttcctagggagcttccaagggcccacacagcctgctccccgcaccccatggaggcgcaatgatagcagaattactggcactgttaacctgctggagtgggaacctggagtcctggaaggtgggacttgctcagggactcactgctggccttggggagcagagaactcaggtctttgtgattccgaagtccaggttcttccacctgcaactgcagtttccagaattggtcccaccccaggaggatcagccaggcagatgcaacgccaggagcagcatcagccacgctgtaaacaagggggaaacgccaagcgcattacagaggacgtcagccctgccatcactgggctggggaaacaatgccagccatggctggtctccgggttcacagtgataggggaaataaacccttatttgtctaa

SEQ ID NO: 93787 - DNA, 551 bp, Homo Sapiens
ctggaattgaggctgagccaaagaccccagggccgtctcagtctcataaaaggggatcaggcaggaggagtttgggagaaacctgagaagggcctgatttgcagcatcatgatgggcctctccttggcctctgctgtgctcctggcctccctcctgagtctccaccttggaactgccacacgtgggagtgacatatccaagacctgctgcttccaatacagccacaagccccttccctggacctgggtgcgaagctatgaattcaccagtaacagctgctcccagcgggctgtgatattcactaccaaaagaggcaagaaagtctgtacccatccaaggaaaaaatgggtgcaaaaatacatttctttactgaaaactccgaaacaattgtgactcagctgaattttcatccgaggacgcttggaccccgctcttggctctgcagccctctggggagcctgcggaatcttttctgaaggctacatggacccgctggggaggagagggtgtttcctcccagagttactttaataaaggttgttcatagagtt

SEQ ID NO: 93788 - DNA, 1946 bp, Homo Sapiens
  misc_feature (1635)..(1653): n is a, c, g, or t
  misc_feature (1679)..(1772): n is a, c, g, or t
  misc_feature (1816)..(1864): n is a, c, g, or t
gtcccgggccgcgtcccacccacagacgacaccccccgctcactgaacgctggtaccggtccggaattcccgggatatcgtcgacccacgcgtccgctcggctccggaatcactgcagcccccctcgccctgagccagagcaccccgggtcccgccagcccctcacactcccagcaaaatgggcaaggagaagacccacatcaacatcgtggtcatcggccacgtggactccggaaagtccaccaccacgggccacctcatctacaaatgcggaggtattgacaaaaggaccattgagaagttcgagaaggaggcggctgagatggggaagggatccttcaagtatgcctgggtgctggacaagctgaaggcggagcgtgagcgcggcatcaccatcgacatctccctctggaagttcgagaccaccaagtactacatcaccatcatcgatgcccccggccaccgcgacttcatcaagaacatgatcacgggtacatcccaggcggactgcgcagtgctgatcgtggcggcgggcgtgggcgagttcgaggcgggcatctccaagaatgggcagacgcgggagcatgccctgctggcctacacgctgggtgtgaagcagctcatcgtgggcgtgaacaaaatggactccacagagccggcctacagcgagaagcgctacgacgagatcgtcaaggaagtcagcgcctacatcaagaagatcggctacaacccggccaccgtgccctttgtgcccatctccggctggcacggtgacaacatgctggagccctcccccaacatgccgtggttcaagggctggaaggtggagcgtaaggagggcaacgcaagcggcgtgtccctgctggaagccctggacaccatcctgccccccacgcgccccacggacaagcccctgcgcctgcccgctgcaggaactgtacaagattggcggcattggcacggtgcccgtgggccgggtggagaccggcatcctgcggccgggcatggtggtgacctttgcgccagtgaacatcaccactgaggtgaagtcagtggagatgcaccacgaggctctgagcgaagctctgcccggcgacaacgtcggcttcaatgtgaagaacgtgtcggtgaaggacatccggcggggcaacgtgtgtggggacagcaagtctgacccgccgcaggaggctgctcagttcacctcccaggtcatcatcctgaaccacccggggcagattagcgccggctactccccggtcatcgactgccacacagcccacatcgcctgcaagtttgcggagctgaaggagaagattgaccggcgctctggcaagaagctggaggacaaccccaagtccctgaagtctggagacgcggccatcgtggagatggtgccgggaaagcccatgtgtgtggagagcttctcccagtacccgcctctcggccgcttcgccgtgcgccacatgaggcagacggtggccgtaggcgtcctccagaacctggagacgaagagtggccgcgccggccaggtctcccattctgcggccacatgccgttaaggccctcaagtgtcgcgcgcggcgcccgcgccccttcccttccccggctctgacccgcccttccggcctttttttnnnnnnnnnnnnnnnnnnngtgtttgtccgctcttgcgccgtgcnnnnnnnnnnnnnnnnnnnnnnnnnnnnnnnnnnnnnnnnnnnnnnnnnnnnnnnnnnnnnnnnnnnnnnnnnnnnnnnnnnnnnnnnnnnnnngcccctcccggccgacccttacccattgtttttaggtcttctgnnnnnnnnnnnnnnnnnnnnnnnnnnnnnnnnnnnnnnnnnnnnnnnnngccttcgcccgtccttccgtccgttcctctccgtctttccctatccccgttgaggtcccgcgcgtacgtcgatccgttcccg

SEQ ID NO: 93789 - DNA, 687 bp, Homo Sapiens
  misc_feature (311)..(311): n is a, c, g, or t
tcttctcccagtcattaccaaagtagctttattgaaacttcagtacacctcagaattagccatgtgtatatcctggatatttgccaatttatgaaatggttcccagaccagagctgggacacacctggtttccggatgtttctgctgcatctgtagaaatcttcaccatatcatcgccccaggacagagtcaaatcaattgggtgacctttccttctctgaaatcctaatcatctatcccctaggccagattatcttatcagctactgacccagttagctttcctacttcacaacaggtttctaatgcttntatgtcagtgtgagagaaatggcaagttgggaaaatttgtgacattgcattcaggaggcagtgaggtagagcaatagctttcaaactagattccatcaaccctcaggacactgcagaggtgcaacagggaaaaggggcaggggagagagaaaagcctgggagctctgagcccttcattagagcagctgtgctcaattctgcttcatatacagaaccgggatttctaaaagagtcactcaaaagcttttcagtgcggggagtgggaagggaaactgaaaagagagaagtcacaagagctggattctaaccccaactcttcagttaacttggtatgtgactttgggcaaattgcttcatctctctgggcttcggtctg

SEQ ID NO: 93790 - DNA, 221 bp, Homo Sapiens
aaatttgcaagggatggttcacgagacacatttgggacgaaggtgaaagagaaattccccattctgagtgtcctagttgggttcctccgactctaaacaagggacttgggttcagttagtgtacagcgggggctcacgtccactaaggaacatgtagaatgtaaccaccgggtgacagggaagctgcggtatttactacctagcccccatcttcactggtt

SEQ ID NO: 93791 - DNA, 599 bp, Homo Sapiens
  misc_feature (284)..(284): n is a, c, g, or t
catgtgtttagagggttggaactttcagccccactcccagaccttggggaaggaagaggggctgaaggttgagtcgatcacaaatggataatgatttaatcaatcatgcctaagaataaagcttcccataaaaatctaaaggacaaggttcagagagcttctgcattgctcaatacatgaggagtggtgagcccaaaggggccgtggaagctccgtgccccttcccccaaacctgttcctgtgcctccatctggctgtttctgagttatattattttataatangactgatgatagtaaataaagccctttcctgagttctgtgagctactctagcaaatggtgaaatctgagaaggaaatcatgggaacctctgctttgtagccacgtcagatagaagatgtgagtaactttggaacctactgcttgtgactggtgtctgaagttgggggagatcttatgggactgagctcttaacctgctggggatctgcacttaatgccgattaatgccagaattgaattgtatgatatccagttggtattggagaattggccagtgtgggagaaaacccacacagttggtggcaaggagtgttca

SEQ ID NO: 93792 - DNA, 436 bp, Homo Sapiens
  misc_feature (90)..(156): n is a, c, g, or t
caaatggtgaaatctgagaaggaaatcatgggaacctctgctttgtagccacgcagaatagaagatgtgagtaactttggaacctactgnnnnnnnnnnnnnnnnnnnnnnnnnnnnnnnnnnnnnnnnnnnnnnnnnnnnnnnnnnnnnnnnnnncacttaatgccgattaatgccagaattgaattgtatgatatccagttggtattggagaattggccagtgtgggagaaaacccacacagttggtggcaaggagtgttcagtgttgagtgtgaatgtcaataaaaaaaggtttgttttttctacgtacaatatctttgggaacttggaggtgcagggtcagacgtctgtgtgtgtatgtggcagggacagaacagggattagggatgtgagggggtagagttttcagaataaagggagagaaaattcaaaaa

SEQ ID NO: 93793 - DNA, 754 bp, Homo Sapiens
gcgtggtggtccccccggagcccaccaaaaccaggccctgtggcaacaacagagcgagccaccgcaaggagctgcgctcctccgtgacctgcgagaagcgccgcacgcgggggctaagcaggatcgtccccaaatccaaggagttcattgagacagagtcgtcatcttcatcctcctcctcggactccgacctggagtcggagcaggaggagtaccctctgtccaaagcacagaccgtggctgcctctgcctcctccgggaatgatcagaggctgaaggaggccgctgccaacgggggcagtggtcctagggcccctgtaggctccatcaacgccaggaccaccagtgacatcgccaaggagctggaggagcagttctacacactggtcccctttggccggaacgaacttctctcccctctaaaggacagtgatgagatcaggtctctctgggtcaaaatcgacctgaccctcctgtccaggatcccagaacacctgccccaggagccaggggtattgagcgcccctgccaccaaggactctgagagcgcaccgcccagccacacctcggacacacctgcagaaaaggctttgccaaaatccaagaggaaacgcaagtgtgacaacgaagacgactacagggagatcaagaagtcccagggagagaaagacagctcttcaagactggccacctccaccagtaatactttgtctgcaaaccactgcaacatgaacatcaacagtgtggcaatacc

SEQ ID NO: 93794 - DNA, 568 bp, Homo Sapiens
  misc_feature (439)..(439): n is a, c, g, or t
ctatgcgcggtttctggcaacggcgccggactatcgtgccgcgagttgaagccgaattcagttcgtgatgtgcgcctgctggaccgcatgattgaacatcgcgttcagcgccgccgtgatgtcggccggcgtgttggccgtgtagaagaagccgggcgaggcgcagttctgcagactggccggaatgttggggatgttccagttggcgtaatcatcctcgtcattggcaaacgaggcattgaccggattgatcggctggtacgggatgtagagcacggagatgatgatgccgcggttcttcagcggcgtgcaggacgtcgccggattgatcgtggtagcatggttgctgccggaccatgatccgttcggcacgcccttgacctgcggatcctgcgcgccatcggtgacgaggaagacgtaaggcagcgtgttgttccancgcgctgccgtcgccgacgctcgatatcagcgtattcatgctcgacagcgccgtgtcgatacgcgtgccgcccgagccgagattggtgttgatgttggtgtcgagcagggtcgcgaggttcgcggccgc

SEQ ID NO: 93795 - DNA, 916 bp, Homo Sapiens
  misc_feature (670)..(695): n is a, c, g, or t
caggactgtagggtgatgaggatcactttcccagtgatgagaaggttgttctaggactgggcttctaccctcagtgcaagaccagtgccagatgtgcccccacttcctgcctcctgaagccttcttccctgctactccatgctggtggcctcacccatcaagaccactgtctcctggtactggactatctacctgccttgtccctgttctgggggaaggtgtccaccccgatcaagaacatggagaaagtcctctttcaaggctcccattaggaggatgagctgccttgacccagaagggatgagacgggctcttacctctctacaaccttccctccccttcccactccttccggagtaaggttagaagggaaggaaggaaagatcaaggaaccaagcgcctccacgggaggcgagggaggctctgtatgaaacagaagagcagggacataaaggaaaatgtcagtgtttacatgggacctatggaaacaaaggctggcgggcgccagctgactccagagtaagagagggcccttcccctgccaggacccacggtgctatccattcagtctcttcctcagttaatctcggagcttcctattccatgttgaggtttgtgggcccctctagaggagggctagttctatacttaaattgattcccaggggccnnnnnnnnnnnnnnnnnnnnnnnnnngatcaaaaggggtgtggggatgggggtgtctacggttaagcaacagatacctccttccctttgtaaatagtatttttatacttcatcctcgcctctcaggctttagatacgaaatctccagaatggaagggggtggggattttctgttcctccctggagtgggtgagggtgggagaaagttacatatttaaagaaaaataaatttaataacaagtttctct

SEQ ID NO: 93796 - DNA, 682 bp, Homo Sapiens
aagatttgttttgcaaggtttgtggagagctgatgcggtagtgaggctaagacgaggggtatttacttgctacttacattgagtccactaacatctgcagcactttgcttgcattatccacgcaattatcacgggaaacctataaaataagtattcctctcctcattttacaaatagggaagcagataagatttagaaaatttcccaaactcacacaattattaaatgacagaactaggactcaaacccaggttttattaattttagagacatgtttttaaccacttggacactgccaaccatggaattgttggtatgaaaaaaacgtactcttgagttatattatccatggtcttaatatcagagaagtgcagttgagtcgctattaaagaatatggtaaaattataaaatggatactatacaaaggtataaaaatattataaatacttatgtttggggtaaaaggatcaaagtagccatgctcagtggaagggtaaggaactcttagcagagattgattaattgggagataattgattaattgggagttgattgattaattgggatttattaatttgggagtaggtaggaagataggaagttgtataaaataagggagagataacttagtacctggaaaaaaagaaatggaaataggtagaagctaagagttcaattaaa

SEQ ID NO: 93797 - DNA, 812 bp, Homo Sapiens
cccccttgagtaaatgcaatgacacattctcccaaatgccagcgagctggcctgggagcaagtgatggtgtttttcctgctgccctttgtctgggctgaccgccccccctgcctattgtcccgccgcttgtcccatttccaaaagctagagctaagcgaggcgctggggctggggcaggtgactaaccagctcacaatgccccctgcgggggaggaagagggcactgcaggcccactgcccggcccagaggcgagaagaggccacttggcgggactttttccctcaagttcacaaggttcttcattcttcctccagtgaccagggagaatgtacatgggtgggggatttgtaattcattaatcagcacgaggcaacggaccagtttcaacaccacaggcttcttgggtgactcagcgggaatgctccgattcaaggcgatggaccgcccgagcgtccccatttgtgaaatgtttccccatgaagaccctggcattctccttcctttggggtttcgggttgttggtttttccggtggtaaggtgggggtggcttaacggtgagggctccccctccttcccgcaggcctgggttgggatttgctgggcaggatacctgggggtatgcctggaccctcccagagggggtcccctcctccctctccaagggctgccggggagaacacgctcagaggaggcagctctaacccagggctggggactgccctgcttcatgattttcctgggggagagtcatgtggtccccaaggcttgggtgccctatagccacaccaccaattaaatcactgggtaat

SEQ ID NO: 93798 - DNA, 1926 bp, Homo Sapiens
  misc_feature (1688)..(1688): n is a, c, g, or t
  misc_feature (1857)..(1857): n is a, c, g, or t
gtaacggctaggtacgaggctggtgttaatcggcacgaggctcacccttccccccgccaccgtgggttccagactggggataagtaaacagcgggtggagcgaggcctacggacccaggccaggtgggagtctgcactcttcaaggggcctgggctgctgctcacgggtattaaagaactccgcgttgttcatggctgaggcgatgcattaggaagatcctggacctagagaacaagtcccccgaacgctgagttggaggcgggacttcgggtgcgcgttggcgggagcatgctggggctctgggggcagcggctccccgcggcgtgggtcctgcttctgttgcctttcctgccgctgctgctgcttgcagcccccgcgccccaccgcgcgtcctacaagccggtcatcgtggtgcatgggctcttcgacagctcgtacagcttccgccacctgctggaatacatcaatgagacacaccccgggactgtggtgacagtgctcgatctcttcgatgggagagagagcttgcgacccctgtgggaacaggtgcaagggttccgagaggctgtggtccccatcatggcaaaggcccctcaaggggtgcatctcatctgctactcgcaggggggccttgtgtgccgggctctgctttctgtcatggatgatcacaacgtggattctttcatctccctctcctctccacagatgggacagtatggagacacggactacttgaagtggctgttccccacctccatgcggtctaacctctatcggatctgctatagcccctggggccaggaattctccatctgcaactactggcatgatccccaccacgatgacttgtacctcaatgccagcagcttcctggccctgatcaatgggggaaagagaccatcccaatgccacagtatggcggaagaactttctgcgtgtgggccacctggtgctgattgggggccctgatgatggtgttattactccctggcagtccagcttctttggtttctatgatgcaaatgagaccgtcctggagatggaggagcaactgcctgccaggcccacccaccagtctgagctgcttctgctgaggctggtctgcttgaagcctcccaggagaaagaagccaggtgggaatggagagagagaggaagcctgtagggtccagcgtcaaagcgaatcatggggtccagggctgagctgtgcactctcttaggcggattctccttcctcctgctactgataccaggcgagggggccaagggtggatccctcagagagaggtgacaacagagggggtagggcccggggtgagctcttctcaggagccttctgctgggggtggggcttcacaggaggcaaaacataactgtaagtttagaatgggggtgagaggctgtcatctggagggagagcggggggcctcagtagcctcttgagggaagtgggactcctggctccccagggcctggcctactcaatctctcccacctcatcctctggcatggacgcagtcagggagtctgctccaagcagacactggtggtcccgctccactacaacgagtcctacagccaaccagtgtacaagccctacctgaccttgtgcgctgggaggcgcatctgcagcacttacagggaccatgtaccgcgttatgtggcgggaggtgaagcgggaagttcancaccccatgcagtgtgctgccagggctgggaagagcggcacccggggggcgctcacctggggaggcatctggcggccagccttgcctgaacggaagcgtctgcgttaaggctgaccagtgcgagtgcgccccccgcttggctggtttatgctggaaaatctgaaaccgntggacgtgggtctcccggaatcatgtgcacactggggccaaatgtaaaaccctcccggatcggaatatc

SEQ ID NO: 93799 - DNA, 451 bp, Homo Sapiens
cgggacgaggagctggggccactgaggctcctcccaactaaagcaactgcagctgcaccttcagcctcaaggcctggccccatggccctggctgggcctctgtgccagccccgggggccccccagttactcagtctttcctggagacagcaagaagctgcaatgtgcaatccccctgcccccacagccaaggtcaggaagaggccctgtggtcaccgtgtctggccaatctcaggctttcacttctgtactgcactgtggcttgacctggcggggggcagggggttggcaggacatggcaatgggcaactggggtgggcacagggcttattcctcggagtagaagggtgtacagggggcccagactccacagtgacttgccacatttgccccccatttggagaatgcttttatatcaaaagtggagacgataataaagttattttgggtta

SEQ ID NO: 93800 - DNA, 630 bp, Homo Sapiens
cagggaggactgactgtcatgggatggttggtgatctgttaactcttcatgcttggcatacttacgcgctagaccttgaagtgttcttcaaggacattttggattttggagtcaggtcttatttcacgttagctttgccaattcagtgtttcctcattaaaaatggtgacttctgcaattcatttggctccttcgattgttgtgaaaaatagaatgtcctatggcatcctctgtgtagttgattccctgtcaaaacactggggagtgagagaggatttttcctaatatcaatagctcatgtatgtcaaaaggacacaaatgacattagactagtataagaaaggcttcttaaggacataagaatatatgctaaagggacataacatatgctgtagttattaaacaggtatgcacatacaagtgcacaatgaacagtccttatgagttgtgacattctgatataagcccgctttaaacacgtggctagttactattcctaacaggctccttctctcttcttggcctttttcttttggcttgaacttggataagaaccttgggtaccttattgtacatctgtcactgcctctagcttcagctgatcctcaaccaataaaatctcagtttatg

SEQ ID NO: 93801 - DNA, 614 bp, Homo Sapiens
aaggtctgcatacagagatgctggaactattggtggaggtgcccgttggagcccaggaaccaaggaacggaaggcgtccctgctctgatcgtgcgcctggcttggctgcctcctgcagcccagcgctacctgcacagcttctaggagaggcggcgcctcccacgcatcctaatcacatgtctacaggaattcagaggccaaggagcccatggaggcctggagagaggaggcagggtgtcccggagaaggaggagggcagagcacaagctgctgcgtttctactctgcctcctgtgtcagcaactctccccatccacaggaaggagtctgggcagaactgaaggttgtcacaaggagctgctaaacagatcaaaaggcattgaaggatggagtgacatgatatatgacctgcccaatccttgactgcacatcacataagcagtcctaaggatgtgaagtatatgatgccaccagttgaatggattgaagctcctacacgtacactgttggtttcagattctctactctacaacatcagaaaagaatctatttttggtgagataacaaatgtgctatgttactctagaataaagacatctgtttacttacaatttt

SEQ ID NO: 93802 - DNA, 477 bp, Homo Sapiens
  misc_feature (182)..(424): n is a, c, g, or t
aaagggaattaattgctcgttttatcctcttctcctgcaatgctctgaatccatgggtttggagtggggccctgggagttgggggaagcaccatacccagtgagtctgcactttgaggacccactgccagtgtcagcttcaaaatcacattgtaaaaggcccggcgcggtggctcacgctgnnnnnnnnnnnnnnnnnnnnnnnnnnnnnnnnnnnnnnnnnnnnnnnnnnnnnnnnnnnnnnnnnnnnnnnnnnnnnnnnnnnnnnnnnnnnnnnnnnnnnnnnnnnnnnnnnnnnnnnnnnnnnnnnnnnnnnnnnnnnnnnnnnnnnnnnnnnnnnnnnnnnnnnnnnnnnnnnnnnnnnnnnnnnnnnnnnnnnnnnnnnnnnnnnnnnnnnnnnnnnnnnnnnnnnnnnnnnnnnnnnnaggctccgactcaaaagtaaatacatgaataaataaaataaaatcacatcgta

SEQ ID NO: 93803 - DNA, 464 bp, Homo Sapiens
  misc_feature (387)..(410): n is a, c, g, or t
aatgtgatttattctgagggcgaacagccaagggaggactagtctggagcacgctcggccgtcctggcaggagctgagcctcaggtgtctggcggtgccccagcagccctggattcaccccaacaccagaatcccacttttctaaatccacctgttgttctgagcacctctgaacccgcagcttcggcaaaaggagtctgtaccaagctgcttctggatgaccaacactggagactctggccttaccatgtggaaatcattttcctgaagtctggaaccaattttgagaagtttttttctcaacacttttgtgtttctaacactgtatcttgactgtgtaaataccaacaaggctgtaaataaatgcagatgtagataccttctagnnnnnnnnnnnnnnnnnnnnnnnnccagaagtgatcccgtgtagccttcgttgacaaataaagactattttgtgttta

SEQ ID NO: 93804 - DNA, 1030 bp, Homo Sapiens
  misc_feature (706)..(706): n is a, c, g, or t
  misc_feature (804)..(804): n is a, c, g, or t
  misc_feature (830)..(830): n is a, c, g, or t
  misc_feature (925)..(925): n is a, c, g, or t
  misc_feature (958)..(959): n is a, c, g, or t
atttccgggatagggactgtcgcagcccggggaattgtccccatctgctggcttaccttgtgggcgtggatcccctctaactttcctaattcccgggcggcccgcgggcctgcggcagattcagctctcaggactccactttcagtttcttccacttctggggcaggctgcttgtcctgccactctcaggccccccaccagacacggcagcaacagctgttcctaagtgttcaactcgctccttcccgcaaatgtagaagctcaaatccctatagcaaattccatattctatgtcattcttaatgcttccgtctctctggttgaatctagattggatacaatcagtgatgcacatttaccagacagaggatgtgcagcgtttactgttgatttctctcttttcctccctatcacctcagtttagttccaggatccacactcctccaccatagtcaggagattcagggaaagttggcagggttcagctttcaagttgacccttgatgaaccatggtcaatcctgttaagaggcgtgaaagccaatcccagccaatgagactggggagaaatcactgaagaacttgtggaaaacagaccctctggataaaagacacgtgtggggaaaaaggggctttttaatgttattctggatgtttcccaaaagtactgctgctgccttgcctccctgacagacactgggccttangatgacatgcggcaggaaggaaggacggatctggggtttttcaagactcactgagatgcacaggggaccaaacccctcagtagcccactcgttcctgnttgcatgtgtcgactgaaaaagatcnaaattaaccaaatataacttattttctagaggttacaacttgcaggcaggaagcaggcctctacctgaggccataaagcatactttggaaggagnaaaagggaggtatttatggcctagtggaaaggnnaagaaatacgtatttctgtaaccatacgggagaaacctatgaaaaattctgggagggaaaatccctaaaaa

SEQ ID NO: 93805 - DNA, 747 bp, Homo Sapiens
atcacacctaaagtagaaaaagaaagctcttgtggaattattctaaagtctaatggatttttcttccccactcttaaggggcatctcagcaacaagttgttatggaactgtggcaacatcttaatattcccattctcaaaatagttcagaaaaagtgcatgaaaactgggggaactacttagtaagcacttcaggatagagaatgtagctaaaatgagtaaagtggagaaggagtcaacggcattgtgcacagcattgtattcatagcttgctcccttaaatcgtgtttgggacttggctgctattttggtacagctgctattactcagtgcagaacattaacatatgggggaaattgtatattacacaatgcagcttccacattatgctgacaccattcctctacttgtccatttactttaagagacacttactgatgcaaaggagactgaacagtgaaggatctcactcagaatcctgtccacaatctgtccagtttacaccttaccccaaagagaggtagcctgttatacaacgttcttcacctcattctctcacttcacaatatatcttggagatcttaccaaaagcacacagagacctcctgcgttgtgattagattttcattgcataatattccattgttcgtgtgtgtgtgagtgtttagttagtctcaaattgataggtgcatgaatttttccaatcttttgttaaggcaagcagtattgaataaacttgtacataata

SEQ ID NO: 93806 - DNA, 339 bp, Homo Sapiens
taaagaacctctaaattttctgttggcatatgaccactgaaaatgaagattagattttgtagctttccttacagctaggcttggtcatgtgattgatgtgtgcagttgccaggctgtgcccttaaaagaaagggtatgccttctcctttccttttccctccatctcactagttgggatgggacgtggcacacatggtggtaaattattttggaccttaaagatgaggactacttccttggagaaggcagaacaactgaaggctaccgtggtagcctcagagtacttatatttggatggttatgtgagagaaaaaaataaactatcatgtttaagccatg

SEQ ID NO: 93807 - DNA, 419 bp, Homo Sapiens
ggtcactacacaatgtgttacttatacatggcagggaagggaattttaaatcaaactcgcggtttggttcttaggtcctctgctgatgaattctcgctctatcagggaatgatatgtgacgccagccttaggaacctggtgttcaactgtaaatctttctatttagctttttgtattagttgaatgaagttatagaatatgaattattgaatacagttctgttcagccaataggcacttgatatacagaatggtaaatttaaatataaattaaatttttctaatattatgatcagcacttcactgtggttctgtgtctttaaccacctcataataagaactgttattgaggactgggctacagaatgtgcttagactacatctatggcttccatagattttagtaaaatttaaccagat

SEQ ID NO: 93808 - DNA, 859 bp, Homo Sapiens
  misc_feature (23)..(23): n is a, c, g, or t
ctctctctggagcctcatccctntgtccttcccaacaggtagtcgtacatcttcactgacacagcgcctctatgggagccttggccagcccttaggaaataaagtgtgtctgtggggtaacctgatggaccctatggtctgctgggttggcagatgcttcgtaattgcagatggtcacctcgtgtcggcgaagctcagtccactctcctctcaggccaatataaaagacctttgtcgtatctgctccgaagttttttgaaatatgaattgagagatgatagacatttgaaaaacgagaaatttttgtagcatactctaattctcctgtaagatcccggttcagactaaaggtctgatctggctccctttctgtatcatcaaaggacatctgtggaatattcttgtacagtctcatctcagaggggtgtgagtcatcatcctctcccattataatgatgcctttgagcttgacattgcccgtaaatggaatattaaacagaagctcttcatctgcatcactttcaacaaacttggagcggtcggtccgctcctcccacggcttgaagacgccgcggccgctgccctcgcggctctcgttaaggcattgcagccgctccaggtcgatgcgcaggtacaggccgtaggccaggccgcgctgctcggcaggctcctcccgttcggcggcgcagcggcagccacccccgccgtggctgtgaccgtgcgacatggcaacgccgccacctgcgcgtcctctcggccccaccgccgcgctcgctcggctcggctcagcctcagaccagctccgcgccgttcagctcccctcgtgccgatttaaaccagggcctgactagctgtggcc

SEQ ID NO: 93809 - DNA, 487 bp, Homo Sapiens
gcggccgctggagcagcggggctggcggggtaaaagctcctggccagggctgcctggagctgccccttccactccgcccccagggagctcccgggtcatcctctcatccgggctgccccgcggcccccaaggagccccacccccgggaccaaatggcccgcaaggtctggggcagcggcgttgcaggagatgagctcagcgcaaagggaaccccgcagcggcgagtgcggctgctggcctgcgcgctgtggccccaacaggctggcagggcgcgggcgggtggcggggttgcggtatgagctttgctccctgccctggggtcccgggcgctcctggctctggaggcctggccatcggtccgaaaagcaaagggacattgtcgggtcccctcggccgcttcgctccacccagagacgccctgaggagaagcgagcctttgtacgaaggcagagggctgactcctaagtctgtccccctcccgaaggcc

SEQ ID NO: 93810 - DNA, 468 bp, Homo Sapiens
  misc_feature (433)..(433): n is a, c, g, or t
gcggccgcgctgctgctccgcgcgcacccgggtgtcctctccgagcgctgcaccgacgagaagagccggcgcatcctggccgcgctgtgccaggactaccagggcggcacgctggccggggacctctgcgaggacctgtgtgtggcgggaaagctgctgttccaacgctgcctgcactacaacagaggcaagaaggtgctgcaggacgactggcgcggccggcccgtggtcctcaagtccaaggaggaggccttctccagcttcccgcccctcagcctgttggaagaggaggcaggggagggtggccaggacatgcccgaggccgaactcctcctgatggtggctggggaggtcaagagcgctctgggcctggagttgtccaacagcagcctggggccgtggtggccgggcaggcggggcccacgctggcggngacagctggccagcctgtgggccctgctgcagcag

SEQ ID NO: 93811 - DNA, 552 bp, Homo Sapiens
atgcaggccatcaagtgcgtggtggtcggcgacggcgccgtggggaagacatgcttgctgatcagctacacgaccaacgccttccccggagagtacatccccaccgtttttgacaactactctgccaacgtgatggtggacgggaaaccagtcaacttggggctgtgggacacagcgggtcaggaggactacgatcggctgcggccactctcctacccccaaactgacgtctttctgatctgcttctctctggtgagcccggcctccttcgagaatgttcgtgccaagtggtacccggaggtgcggcaccactgcccccacacgcccatcctcctggtgggcaccaatgctggacctccgcgacgacaaggacaccattgagcggctgcgggacaagaagctggcacccatcacctacccacagggcctggccatggcccgggagattggctctgtgaaataccttggagtgctccatgccctgacccatgcggggccttgaaagacagttgtcctggcctccccagggtaacctgagctcgaaattcgtaa

SEQ ID NO: 93812 - DNA, 382 bp, Homo Sapiens
  misc_feature (78)..(78): n is a, c, g, or t
ggctttataatctaggtggaaagatgaagcataaacacagtccatttgtagtttcccgggcctctgataacatctccnaatctgagttacttaagctttagagccacctgttagcagcattcaaagcaagattgttgaggttggtgacaggtgcactgcacagttgtgccctgtgggtgctctgtggccatgaggtgagccagaaagacaaactgcacatgagtaggccaaccgctctgcagaacgtgcagaaaggttcattgttcatggtcagaaaataacattttgtattgtggtaaaaagagaaataacattctgtctcctattgtcacaatttataatgtaagattttaaagatgtaataaaaagttatgcacatcaa

SEQ ID NO: 93813 - DNA, 120 bp, Homo Sapiens
gaaatcagtggtgacctgaaaggatgcttcgttgtgcctttgaaaaaaatatattaacctttattatcgagaacctaggaaaatttactcctaataaaaaccctctgactaaaagtgaaa

SEQ ID NO: 93814 - DNA, 491 bp, Homo Sapiens
tgatcagtctcaagaatattccattatattccattgcctgcctcccccaacttgtgctgatattttaaggatgtgctcaagagtatgaagcagggtgcttttgtccctttctctcctccctagtaattccctcctccctatcccatagccaagtagccacccctcaaatgagccattcctttttgctttcatcaatggtctctgtgaagttggggtcgttgttcatgatggcggcgtccgcgctctctgccgactccgccccctttgcttcgttggtatggtaggtgcccttgtggcggaacatgtaccggatcaggaagaccagggtgcacaggatggtgaaaatcaccacagcaatgacgcctccaatgatagccgagtttctgttgactccatttcttatagcttggccttgtcctggattatatggaaaatccgcactggctgaatccaggtgatccaggtgccaggggtcggtggcggacgacatg

SEQ ID NO: 93815 - DNA, 697 bp, Homo Sapiens
  misc_feature (13)..(13): n is a, c, g, or t
tctcacactgcanagaagccttatgagtgtaaccagtgtggaaagtccttcagcacaggctcttaccttattgtgcacaagagaactcacactggtgagaaaacctatgagtgtaaagaatgtggcaaggccattaggaattcctcttgcatgagggtacacgtgagaactcacactggagagaagcccttataaatgtattcagtgtgaaaaagccttgagcacaagcactaaccttataatgcacaagcgaatccacaatggccagaaactccatgaatgaaatgactcagggaagtgtttgttgcccctcatgcctcctttctcactttagaacatatattggagagaagccctgttatggtcacctggaaacagccttctggcccaactctggatgcctgttatactgggacaaaccttataaatgttatagctatgattgtttttatcagtgagtatttcattcttatatgtgtcacaactgtagatcctatgaatattttagttatcttttcagtttaattgcattgtgaacagaacacatggtcttcaatatgtagattctgtgtgacatagatttgaacataattgctggacactgactgatgtactgtggcagacagaactagttgctgtctcaatatccattcctcccttctttcttaaagtaataaaatttaccatttagttcaaa

SEQ ID NO: 93816 - DNA, 981 bp, Homo Sapiens
  misc_feature (41)..(79): n is a, c, g, or t
  misc_feature (82)..(116): n is a, c, g, or t
aagattggtatagactcattaagggcgctaggatgaagagnnnnnnnnnnnnnnnnnnnnnnnnnnnnnnnnnnnnnnncgnnnnnnnnnnnnnnnnnnnnnnnnnnnnnnnnnnncagtcgacggtaccggacatatgcccgggaattcggccattacggccggggtgatgccctatgtattctccttcaaaatgcctcaagagcaaggacagatgtttcaatactatccagtttacatggtcctaccctgggaacaacctcagcaaacagttccaaggtcacctcaagcaaacaagacagcaacagtatgaggagcagataccattctatgctcaatttggatacattccacaactagcagaacctgctatatcaggaggacagcagcaactagctttgatccccaactaggcacagctcctgaaattgctgtgatgtcaacaggagaagagataccatatttacaaaaagaagcgatcaactttagacatgacagtgcaggagttttcatgccctcaacttcaccaaaaacccagcacaaccaagtgttttcacttctgctgtagaccaaactattaccccagagctcccagaagagaaggacaagactgacagcctaagggaaccataagaagttgccctgatcattcagacattttgggaaaaagatgtggccatgccttggatataattttaggctattagcttcctcaatactagtatcagttctttggaatacatgaaatatctggaatcttctcctaaaattggttttacttatacatgttattaaactctttaaatatgtcatagaaaaaaatacaatcatgtaatgaggtcttgtcttacaaaattatatggtctcttcaaatatcctatcattggataatatggatatataacaagaatacaggagatcataaatcaatggaaatgggttagtaatggggctcgggaaaggagtacatggagaagaaag

SEQ ID NO: 93817 - DNA, 1006 bp, Homo Sapiens
  misc_feature (16)..(16): n is a, c, g, or t
  misc_feature (80)..(114): n is a, c, g, or t
aaaaaactatatactnatatggcgcctcctttacatccgaacgacgagcgcagcgagctagttagcgaggaagcggccgnnnnnnnnnnnnnnnnnnnnnnnnnnnnnnnnnnncagtcgacggtaccggacatatgcccgggaattcggccattacggccgggggcggatcccagcggcggtcgtgtagctgagcagccctggggcttggttctatgtccctgtggctatgtttccagtgtcctctgggtgtttccaagagcaacaagaaacgaataaatctctgacccttctcaggtgcagccagagagacactagcccactgatggatggacagacgtgggcagggtccgtgtcactaaaccacccaccactgccacagctgcctacaacagacacatcagatgacactccgggcaaataaatgattttcactgaggacttactggttttaataataggtcctggtgtagagaagtccctcaacctattgtgcaatgagttttgagaagcgggtaagctgtatgttttgtggttctgtttcataaatgcatctacaggaagaccaatattgactgaatgaagctttcatttaaagagctaaaatatgctttgtgtttttatatgtggatactactttaaacctaatgactattcattgtatcatagcttgtgatgtattctgctcacggcttttaaggtaaattgtgccatgatccactgccattctaattgctttaacaagtcattaccacactactgttacatcttaattatgcatacagacaggtagacttattttacatatgtgaactaactagttgtcaaagcaaatgcagattgtattctaacaagttagagtctttttctctcctgaaagttcctagggatggttctttaagtgaaattcatatttgaactgaaggatttagggtacaagaaatggagtgccgatttaaggcttttcgggattcaacttagtcaagagttcccctgtgaattttca

SEQ ID NO: 93818 - DNA, 662 bp, Homo Sapiens
  misc_feature (632)..(632): n is a, c, g, or t
tgctcactgactctaccaggccaccatggcgttgggctattggcgcgcgggccgggcgcgggacgccgccgagttcgagctcttcttccgccgctgcccgttcggcggcgccttcgccttggccgccggcttgcgcgactgtgtgcgcttcctgcgcgccttccgcctgcgggacgccgacgtgcagttcctggcctcggtgctgcccccagacacggatcctgcgttcttcgagcaccttcgggctctcgactgctccgaggtgacggtgcgagccctgcccgagggctccctcgccttccccggagtgccgctcctgcaggtgtccgggccgctcctggtggtgcagctgctggagacaccgctgctctgcctggtcagctacgccagcctggtggccaccaacgcagcgcggcttcgcttgatcgcagggccagagaagcggctgctagagatgggcctgaggcgggctcagggccccgatgggggcctgacagcctccacctacagctacctgggcggcttcgacagcagcagcaacgtgctagcgggccagctgcgaggtgtgccggtggccgggaccctggcccactccttcgtcacttccttttcaggcagcgaggtgccccctngaccgatgttggcgccagcagctggtgagg

SEQ ID NO: 93819 - DNA, 1280 bp, Homo Sapiens
acacaaaacaattcaaaccacaccaccctcaaaacgacccaaaatacggctaggtacgaggcctgggttgaatcggcacgagggtggagaggagagaggacagagagcaagtcactcccggctgcctttttcacctctgacagagcccagacaccatgaacgcaagtgaattccgaaggagagggaaggagatggtggattacgtggccaactacatggaaggcattgagggacgccaggtctaccctgacgtggagcccgggtacctgcggccgctgatccctgccgctgcccctcaggagccagacacgtttgaggacatcatcaacgacgttgagaagataatcatgcctggggtgacgcactggcacagcccctacttcttcgcctacttccccactgccagctcgtacccggccatgcttgcggacatgctgtgcggggccattggctgcatcggcttctcctgggcggcaagcccagcatgcacagagctggagactgtgatgatggactggctcgggaagatgctggaactaccaaaggcatttttgaatgagaaagctggagaagggggaggagtgatccagggaagtgccagtgaagccaccctggtggccctgctggccgctcggaccaaagtgatccatcggctgcaggcagcgtccccagagctcacacaggccgctatcatggagaagctggtggcttactcatcagatcaggcacactcctcagtggaaagagctgggttaatcggtggagtgaaattaaaagccatcccctcagatggcaacttcgacatgcgtgcgtctgccctgcaggaaagcctggagagagacaaagcggtggcctgattccttctttatggttggcacctgggggaccaaaaaatggctgtccttgacaactctagaagtcggccctatctgccacaagggagcactatggtgcacgttgatgcagcctagcaggcaggcgttcactgcccgggtccgggaacctcctacagtgcgcgcgcggctgtgacaatcactccagttataaccccaaaacgggacgcggcgaaatgagcgtccaccatggcggctacaacaacagacacatggggcagctataagggaccagtagtgggacaacgaccgataaggtaccatcaacagcaggaacacagcgcaaaagtacgggagggaactacatcaatgagcgagcgagaccatcgacgcgaatcctgcaccagatcgcgtctgctaccggcgcccgcgcgactgctccccagc

SEQ ID NO: 93820 - DNA, 555 bp, Homo Sapiens
tttaattgtagagaagtcaagaaagaaagagtaaactgagaaaatcttactactacagagtcacttttacaatgagacctgcactttatgccagcactgtttgtgaggagcagtactgccttaaattagtttgactctgactgatgtcagtgtacgttacttcctttatgtgactgacagtcagctttccattgagatataacattcacagatgatccccaagtatccttgtcatcagaagctttggaccttttctgccactgacttgtggctgatctgtaacacaataaatacataattttatttcatgttgtctgtccacctctgaataagcagtggcatgaccaaaaagactggtagaaggagagaatttcttggccaaatccttcataccaggtaccacttcttgagtaactgagagttgactgtcttctatggtgactacatagaagatatttccaaaggttctgttatgcagtgaagacattcagattatttgtaagaatttcaccaacacccttgtgtattgaaatgcttaaccattaacaggaaaaa

SEQ ID NO: 93821 - DNA, 369 bp, Homo Sapiens
agaatccctgaaaatgactttaatgaataatttcagagacagttatgactttgggtgattactgagcaagaatatgaaaaccagatttgcaaagcgaaggcgatggtcaaaaggcctggcagttactttctctcattaaaaccgcaccggctttccttcttcgccaagtactagttaccaactgaggttgcgttttcaggttttcttcttcaaaagtaacagtcttcttttcctgcttttctgccttatcctaaagacaaaatgtcagctccagggaacgacattaacaacccactttaaattgaaggcaactctgcactggcgtcagtggccattggcttccatctttttacaaaggttggatttact

SEQ ID NO: 93822 - DNA, 405 bp, Homo Sapiens
  misc_feature (300)..(360): n is a, c, g, or t
gcagggtgttcccaaaagcacgaggaggaaggcgtccacctgggtacgcttgtttatatgtaagataaaagccaaaaaacatcacgggggagacgtgctgtactacctgggctcgtcaaaggattgccaatctttgcataacgcctgtcctccgcaagcatctgtatcattatctttaaagcgaaacttcaactaagaatgcttcttgttcttaagatacccggacatcgggacctaagttccgggtctgctgcgtaaaagtttattaacctgttcccgtgaccgtaaacgcccgactcnnnnnnnnnnnnnnnnnnnnnnnnnnnnnnnnnnnnnnnnnnnnnnnnnnnnnnnnnnnnnctctggttggagcgcctgaccgcgagggccgaggtcaggccggac

SEQ ID NO: 93823 - DNA, 1358 bp, Homo Sapiens
  misc_feature (1336)..(1336): n is a, c, g, or t
tactatacggtcctaaggtagcgaggcctgggtggcgaattcggcacgaggggagagccggcggcgcggcgggcatggctcgggtggcgtgggggctgctgtggttgctgctgggcagcgccggggcgcagtacgagaagtacagcttccggggcttcccgcccgaggtacctgatgccgctggccgcggcgtacgggcacgctctggagcagtacgagggagagagctggcgcgagagcgcgcgctacctggaggcggcgctgcggctgcgaccggctcctgcgcgacagcgaggccttctgccatcgccaactgctagcggccccgcgcccgcggccaatgcccgatcccgacggcggccgcgcagacgagtgggcctgcgagctgcggctcttcggccgcgtcctggagcgagccgcctgcctgcggcgctgcaagcggacgctgcccgccttccaggtgccctacccgccgcggcagctgctgcgtgacttccagagccgcctgccctaccagtacctgcactacgcgctgttcaaggctaaccggctggagaaggcggtggcggcggcctacaccttcctccagaggaacccgaagcacgagctgaccgccaagtatctcaactactatcgggggatgctggacgtcgccgacgagtccctcacggacctagaggcccagccctacgaggccgtgtccctccgggctgtgaagctctacaacagcggggatttccgcagcagcacggaggacatggagcgggccttgtcagagtacccggcagtctttgcccggtgcctggccggctgtgaaggggcccatgagcaggtggacttcaaggacttctacccggccatagcagatctctttgcagagtccctgcagtgcaaggtggactgtgaggccaatttgacccccaatgtgggtggctacttcgtggacaagttcgtggccaccatgtaccactacctgcagtttgcctactataagttgaatgatgtgcgccaggctgcccgcagcgccgccagctacatgctcttcgaccccaaggacagcgtcatgcagcagaacctggtgtattaccggttccaccgggctcgctggggcctggaagaggaggacttccagccccgggaggaggccatgctctaccacaaccaaaccgccgagctgcgggagctgctggagttcacccacatgtacctgcagtcagatgatgagatggagctggaggagacagaaccgcccctggagcctgaggatgccctatctgacgccgagtttgagggggagggtgactacgaggagggcatgtatgctgactggtggcangagccggatgccaagggtgacg

SEQ ID NO: 93824 - DNA, 595 bp, Homo Sapiens
  misc_feature (141)..(156): n is a, c, g, or t
caaatgtccaaactgtatcagaaaggtaataacagagttcaaatgaagaagaaattacttcaggaaaggcaatcacatgatgaattgtagcagttagaacttgatgagatgcaagtgacagaaaatacaatcaaacaggtnnnnnnnnnnnnnnnnggaatttattgattcatataacagtaaagaccaggggtagaactagcttggggtgcgaatagttttagggcttaaacaatgttatcagggctttgctctgccttctgctcacgctgatattactcttaggctcttcctagtatctcctagtacttctaggtgaacatcacaacaccaagttccgaagaaaagaaagtctggtatcacaaagtcttggaattgagacttgtcttgactttcctcatataggtcattgtatctgtgaacattattgctctggggaatagaatgtgctgatgagcttagctttgtacatgtgctccatctgtttcacagatgttgattttgtgattgttattaattaaggtattcatttttgttttgtgaacttgtccatatatttgttatattttgcaataaagttttttttaaaaaagct

SEQ ID NO: 93825 - DNA, 500 bp, Homo Sapiens
agcgaccatggtggcccgggtgtggtcgctgatgaggttcctcatcaagggaagtgtggctgggggcgccgtctacctggtgtacgaccaggagctgctggggcccagcgacaagagccaggcagccctacagaaggctggggaggtggtcccccccgccatgtaccagttcagccagtacgtgtgtcagcagacaggcctgcagataccccagctcccagcccctccaaagatttactttcccatccgtgactcctggaatgcaggcatcatgacggtgatgtcagctctgtcggtggccccctccaaggcccgcgagtactccaaggagggctgggagtatgtgaaggcgcgcaccaagtagcgagtcagcaggggccgcctgccccggccagaacgggcagggctgccactgacctgaagactccggactgggaccccactccgagggcagctcccggccttgccggcccaataaaggacttcagaagtgttcaaaa

SEQ ID NO: 93826 - DNA, 479 bp, Homo Sapiens
accaaagaggcagctcttggctcctgcagaaggacgtgtttgcttatttttcattcacaagatcatgaagggtgcttcatgactgcttaggagctcagatgggcctgcgccgtgccccccggccccggcagctcccctccagcctgtgtcagcccagcatggcgaacagaactgctctcaacctccctgggcattgggcaggctggggtgacccctggtgggcttggggaatgtgttgagcaacctcagcacccctgtcttacagtttcttctcgtcaacagaaagatagaccttcctccgagggccgtctctcccagccgaacacagcccacccgcccagctccgccgcggtggcaaacagggggctggaaaggcacgtggacatgcctcctggggaggggctcgaggagcccacgcgggggccgcggtccagcaccgctcagtgagcggaggtgtaaataaacattcaggaggaaaa

SEQ ID NO: 93827 - DNA, 199 bp, Homo Sapiens
gagagggagtcttgctctggcacccaggctggagtgcagagtgaaaccatctctctctatatatctctccataaaaagctttccacaaagaatcttcacagcagttttaatcacaatagtccaaactgcaaagaggctaggtatctacccacaggaaaatgaataaactgctacattaataaaatctatacgataaaaa

SEQ ID NO: 93828 - DNA, 307 bp, Homo Sapiens
ataataattagccacatatccacacaacaatattgcattatcacaggtatagtgataaatactgtatgattccatttatatgaagttcaagaacaggcaagtaatccatgatgaaagaagtacttacctctgggggtggcagcattgactaaaaaggtacaagggagtcttctggggcctggaaatgttctatatcttgatctgggtggtggttacacaggtatacgcgtgttaagaaatcatcaagctgtatacttagtgtactgtaatggcattacactgtctttcaattaaaatgtgaaagaaa

SEQ ID NO: 93829 - DNA, 314 bp, Homo Sapiens
cctcagatgatggaagattttgtggagaagctgctgctggcttggactgcgggggggctgccccctccaggatgtgtctgtggctgcctgcaatttctgtcgccgtcctgtacactttgagctcatgagtgagtgggaacgttcctacttcgggaacatggggccccagtatgtcaccacctatgcctgagaagccagctgcctaggattcacaccccacctgcgcttcacttgggtccaggcctactcctgtcttctgctttgttgtgtgcctctagctgaattgagcctaaaaataaagcacaaaccacagc

SEQ ID NO: 93830 - DNA, 730 bp, Homo Sapiens
  misc_feature (83)..(117): n is a, c, g, or t
aagaatgtatagactcactatagggcgctcctctgcagccgaacgacagagcgcagcgaagtattgagcgaggaagcggccgnnnnnnnnnnnnnnnnnnnnnnnnnnnnnnnnnnncagtcgacggtaccggacatatgcccgggaattcggccattacggccgggactattagagggttagagacaaagaacagtttattactcacagcagtagccagcatccattttgcactggtttcctgagctctggattccatagggcaacatgggccagatgacaccagcacacacagttgtaaaactggaactcagatgagggtgtctaggttttttataactggcaggaagcaggcctacttttgctctgatggtttctcacttttgtcgctattaacgttttggaccaggtaattttgcatgtgggggaggggtgtctcttgtgcacggtacgatgtttagcagtatcctcccttctccaattgtgacaatcaaaaatgactctaaacattaccattattacctaattgagaaatgctgctgtaagcaaagctgccctttgccctggagggaggcagtatctttctgttaagaatattcacgatacaaacattcttggatagtcaaaacaaaaggcagtcagtgtttttgcacaaaagatgtgcagaagtgtgttacccatggagaattgtcaccgaagagaatcctgacaccattagtctctttgataa

SEQ ID NO: 93831 - DNA, 473 bp, Homo Sapiens
actactttttcctacaactttgaagattggaactcattttcagataaaaagttttaaaatgcatggaaattatcaagtagatatcacaaaatgtctgtcaaaggacatttgctcttaatccccagtttgtctttatcttttcatgtgtttggagatgatatctctgctctttcttacagatgaagttgtttatttgtctaatatttgatgttgaaacaactgctgtcaaagattgtatgggactctagccatatctttgagtttagacaaagactggaagagtttagatttactgtcattttactttttgtcagatcagagctttgatagcctagtgattccagctttttaatactctgagatctccaaaatggatgatgtgcacatgtgtaagatgcatgaggcccagcatttgggtgtgactctatcactttttgtcccactcaagaaagtaaactggagttcaagttaaa

SEQ ID NO: 93832 - DNA, 554 bp, Homo Sapiens
tcaagttttacctcctgcaacttaaaggcagattttgcagcaactttttggtaaactgtcaactagtggcttgctgttggactgtacttctctgagtgaggtgctgtgaggacccctggaaggacacaagggcagaatagtgaaggccgacgctgacttccagaagcaatgagtgggaaacgtcttcctgccacaccctgagcaacacagttgtgaagagtaaatagacactagtagcttctagactttttccgaattctcatcacataaaatatctccttgtgaaattctggcttattgaggacaaagaagattctggaacacaaaccccaaacagcgcatcttcggaaacatgcctgttttcaacataagaagtaatccacgcttcaggggctagcacaaagccacagttccactttgagtccttcagaagtgacaaagaccaaatgtggcccagtatgtgaggcaaggcggaagtaggaatttcatgctgttttaaggttgcttagtgtactttaactgaaggtgtaataaaagcaaattctaataaaaaa

SEQ ID NO: 93833 - DNA, 464 bp, Homo Sapiens
gtttcatcttaggatagtgtttgatatatctaagaaagtccagtaacagagaagaaatgtctcaaatgtctcgtatcagttttagtgtttttcagtattagggaaaggtaatataaaaacaggtaaaatgtataaaaatagacctgatcaacatcataggagataaatattcattatatagcataggatattattacttgaatgttctcagggaggcagcaagtcagaaggcctaggttctagtcctagctccatcatttaccaactgtgtgaccttacttcacctcttagccttgttctcctcactagcagtaggaaagtaacacctaccctgcctacctcacagggctgttgtgagggttcaattggtatatgtgaaaattctttcagaattgtaaaatgctatatgactgtaaggaattattgcatttgttccaaggttaataaaaatttgagcttaaaaa

SEQ ID NO: 93834 - DNA, 1153 bp, Homo Sapiens
  misc_feature (970)..(978): n is a, c, g, or t
  misc_feature (1000)..(1009): n is a, c, g, or t
cggctgcttcggatgccactatgccaaccgcatgagctacctcctcctgcccctggacagcagcaagagccgcctacttcgggagcgtgccgggctgggcgacctggagagcgccagcaacagcctggtcaccaacagcatggctgacagtgtggccgagagctatgacacggagagcggcttcgaggatgcagagacctgcgacgtagctggggctgtggtccgcttcatcaaccgctttgtggacaaggtctgcacggagagtggggtcaccagcgaccacctcaaggggctgcatgtcatggtgccagacattgtccagatgcacatcgagaccctggaggccgtgcagcgggagagccggaggctgccgcccatccagaagcccaagctgctgcggccgcgcctgctgccgggtgaggagtgtgtgctggacggcctgcgcgtctacctgctgccggatgggcgtgaggagggcgcggggggcagtgctgggggaccagcattgctcccagctgagggcgccgtcttcctcaccacgtaccgggtcatcttcacggggatgcccacggaccccctggttggggagcaggtggtggtccgctccttcccggtggctgcgctgaccaaggagaagcgcatcagcgtccagacccctgtggaccagctcctgcaggacgggctccagctgcgctcctgcacattccagctgctgaaaatggcctttgacgaggaggtggggtctgacagcgccgagctcttccgtaagcagctgcataagctgcggtacccgccggacatcagggccacctttgcgttcaccttgggctctgcccacacacctgggccgggcccccgcgagtccccaagggacaagggtccttccctcagaaccctggtcccgaaacctggtcaagaacgcccagaaaaacctccgggcggaagccatgccctccgcgagaaatacaannnnnnnnnagtgggaaacacgggggccagnnnnnnnnnntgagggccagaaggggcccggaactccagggctcgaaaggagcttgaatccccggtaggccttgacccgcttccgtccggcccggagaccccccctacgcgcatgaaaccttaaagagccccgggtggacgaagggctccccct

SEQ ID NO: 93835 - DNA, 461 bp, Homo Sapiens
  misc_feature (321)..(373): n is a, c, g, or t
tttttccaggtattaaagattattacaaagattatgtaattaaaacaatacagaacagaccagggttgactacaagatcaatgggacagaataaagttacatatccaatgcctgctgctgaccacagggatttgtcacagatctcatcacttagaaaccctacagtggtttccctggtcaccttccagtcaccactacaccttggctccttttagcactcctccctagcttatcactatatgaaattgctttatctctttgtattggctgtcacctgccaccataatgtgaatttctagacctccatagcatgcaaagctnnnnnnnnnnnnnnnnnnnnnnnnnnnnnnnnnnnnnnnnnnnnnnnnnnnnnaaagaagatacttcaatacctcagtttactaaggacgtggggctaccatatggctgcctgaacaaatacagcttgacattcactttct

SEQ ID NO: 93836 - DNA, 833 bp, Homo Sapiens
cctaggtagaggcccggtgtgaatcggcacgaggctcttcgtcgcggctctagtgcactttcggctccttccccttcccgggcctttcagcttggtctttccgggcctcgcttcccccagcccctgcgcccggcccgaacgagaggttccggagccccggcgcgggcgggttctggggtgtagacgctgctggccagcccgccccagccgaggttctcggcaccgccttgagagcttcagctgccccagggtgtgcaggtttgctttagagggtcggcgggcggagcttcggggaagaggagctctgggagagtcattccggccagtggccggagaccgtcgtcgctcttgggaatccttggccgcccagacagaagggaagtaggcgccggagagcccgttctgcattttgattcatctcgggccctgttccacagattagaatcccaagaaaatcaaatggcatccggggatttctgctcacctggagaagggatggaaatacttcaacaagtgtgcagcaaacaacttcctccttgtaacctgagtaaagaggacctgttacagaacccatacttcagcaagcttctcctgaatctctcacagcatgtggatgagagtggcttaagcctcaccctagcaaaggagcaggctcaggcatggaaggaagttcgactgcataagacaacatggttgaggtctgagattttacacagagtcattcaaagagttgcttgtggactactatgtgaagatacaagacacaaagtgtaactttctgaggacaaaaagtctcatgagaaccttgaacagcggctgcttgtaactgaacg

SEQ ID NO: 93837 - DNA, 1827 bp, Homo Sapiens
  misc_feature (1634)..(1643): n is a, c, g, or t
  misc_feature (1759)..(1759): n is a, c, g, or t
tcagtaactatagcggtttcaggtagcgaggcctgggtggcgaattcggcacgaggttggtctttccgggcctcgcttcccccagcccctgcgcccggcccgaacgagaggttccggagccccggcgcgggcgggttctggggtgtagacgctgctggccagccctccccagccgaggttctcggcaccgccttgagagcttcagctgccccagggtgtgcagattagaatcccaagaaaatcaaatggcatccggggatttctgctcacctggagaagggatggaaatacttcaacaagtgtgcagcaaacaacttcctccttgtaacctgagtaaagaggacctgttacagaacccatacttcagcaagcttctcctgaatctctcacagcatgtggatgagagtggcttaagcctcaccctagcaaaggagcaggctcaggcatggaaggaagttcgactgcataagacaacatggttgaggtctgagattttacacagagtcattcaagagttgcttgtggactactatgtgaagatacaagacacaaatgtaacttctgaggacaaaaagtttcatgagacccttgaacagcggctgcttgtaactgaactgatgcggctcttaggtcctagccaggagagggagatacctccactgctggggctggagaaagcggaccttctggaactcatgccactctcagaggattttgtgtggatgagggctcggctacagcaagaagtagaggagcagctcaaaaagaaatgtttcactctgctctgctactatgatcccaattcagatgctgacagtgaaaccgtgaaggcagcaaaggtgtggaaactcgcagaggtcctggtgggtgagcagcagcagtgccaggatgccaagagccagcagaaggagcagatgttgctgctggagaagaagagtgctgcttactcccaggtgcttctccgctgcctcactttgctgcagaggcttcttcaagaacaccggctgaagactcaatccgagctagaccgcatcaatgcccagtacctggaagtcaagtgcggtgctatgatccttaagctgaggatggaggagctaaagattttgtccgacacttacactgttgagaaagtggaagttcatcgtctgattagggaccgtttggagggagccattcacctacaggagcaggacatggagaactcaagacaggtcctgaactcctatgaggtccttggggaggagtttgacaggctggtgaaagagtacaccgtactcaagcaggcaacagagaacaagcggtgggccctccaggagttcagcaaggtctaccgttgagctctggcagggccaggagacatggcttctgcatagctgctgcctcctaatcttcctgctagtgggaccaccttcacctggggctgccttcagtacaagggagtgtggaaatgcttacgcttgaaacactgcagtcatttaggcactctcctggtttctctttattttttatgactgggcctcttctggaaaatctagcaaggagatttatataatttttatgcatagctgtgtgtcagtgtcagccctgtattgtatttgattatctcctgaataaagttatgatattatatcccnnnnnnnnnncgcaacgaaagggggagaacattggtcggccggcctcggcccctcgaaaaactttctagaaccatttcgtttggggccgcgggcccccgtagggaaaggggaaccatgggccatancgtggtgttcctaagggaagatcccggggtccatggacctaagtgcgttggggagttcctcccccaat

SEQ ID NO: 93838 - DNA, 528 bp, Homo Sapiens
gagcccatggtgactgccacccagaagctgggaagggtgggctggagcttaattacagcccactaggcttttagagttacaagaagttatgttaggattccgttagttttggaattgtcaggggtgatttgatttccattttcatgggatatgggattgggatgagtcttcagtctcctggtttgtttctggaatagagtgggccacacctcccaggagtctcccccagggaactcaagacaatcactttagaattcaagaaaacaaaaataatgtgtctcacttcgttcataaagaaggcctttgacaacgtggccaaaaaggggcagagcctaagggacagactcttagaaagatgcccttggaacagggtcccgcagagtgttcctctcaaattctttagaactttacactgttttgtggggccaccctctcccacgccctttcctaacaacagtgtctttcttgatagagtatgtttcaaatttgtagactgtttgcacaataaaataaagttcctcccaaatc

SEQ ID NO: 93839 - DNA, 499 bp, Homo Sapiens
  misc_feature (59)..(59): n is a, c, g, or t
  misc_feature (98)..(98): n is a, c, g, or t
caatgacgctggcccagagcagctttccccacatgacccccagagccgagggtctgccnctgtcctaggttaggtcttcatggtttagagtaaaaccngtgagggatgttaattatgggcattgaagacttaaggttttcctaaatttttagtgagcagtgattggccttcaatacttgtgctgagaggaattttaagccaggggaagtgtaagaaaatgttcccattcaggagagattgtgttggagtttctttcttcctctgtatgtattttgtggtgtccacctttaaccacgtttcatccaaaacgatgatgcagctttaacatgaatgttacatttttattttcaaggaattattatctatgttccctttgtaaaggaaagataatgttgtaaatctttttattagataatgtaaagatgtatatcagtatttttggatcatgttatagattatggatatattgtttaataaataaagtattttttggaacaaa

SEQ ID NO: 93840 - DNA, 420 bp, Homo Sapiens
ctggtgtgcagggttcaggcagtcttgacctgcaacaaccgaggttttttagtcttttaacccagccattttcaattttttaaaaattaggtaagttaaaaaagctgggtaaaagctgactcagccctgtgtgcttgtgttccttagagctctccttcaaagagcgccgggcaaggctgactgttttcacgtgtgcccgtcagttctcgccacatccccttgcctgtgggtgaaagctcaggtgtggggagggtgtcctgtgtcccacacggtgctgtgctgctgccagaatacgagtcccattgagcctctccaaagacggcctccaaggatctgaactcttggccactggtatagtggcctcctgttctcaccccattgttattttggcttttttaatataaaatgtacattgacaga

SEQ ID NO: 93841 - DNA, 556 bp, Homo Sapiens
gagggcggagggcagcgacccgaggctggtgaaggagacccaccagacgaagctggccaggagcagcaccagaacgcagtgccggagccgcagcgggtgcgcgagcgtcagcagcagccctacgcagctcagcaccagcagcaacctgcccgctgccgcctccgggggcgtgtgcggggccgcggaccctgcgtcgccatccccccaaggccaagaccaccactgccacaccaagaagtcccccaggtaacagcaggcgggcagcgccagcagccaccaggagccgcagctccggcccgggccgggtccccgcttggtccgggtgaggaagcaggtgaggaagaagaaggcacaggcgatgctgaagagggggctcaagctgtgcgaacacacgctcagcagcgtccgcagccaggcggccccggcagcccagctctcgggttccgcgcccagcagcagggcgaggacaaaggcagccagggcgcccagcgagaggcgcgcccggcagaagggggagcagcgccgcggctgctggggagaggccgccggcggccgc

SEQ ID NO: 93842 - DNA, 826 bp, Homo Sapiens
cagtcgacggtaccggacatatgcccgggaattcggccattacggccggggagcgtaagaggagagagacacattcagcagccaaaggactcggtggaaagagcagaacaccatagacaatatgtcgctcttgggacccaaggtgctgctgtttcttgctgcattcatcatcacctctgactggatacccctgggggtcaatagtcaacgaggagacgatgtgactcaagcgactccagaaacattcacagaagatcctaatctggtgaatgatcccgctacagatgaaacagttttggctgttttggctgatattgcaccttccacagatgacttggagtgctgggatgagaaatttacctgcacaaggctctactctgtgcatcggccggttaaacaatgcattcatcagttatgcttcaccagtttacgacgtatgtacatcgtcaacaaggagatctgctctcgtcttgtctgtaaggaacacgaagctatgaaagatgagctttgccgtcagatggctggtctgccccctaggagactccgtcgctccaattacttccgacttcctccctgtgaaaatgtggatttgcagagacccaatggtctgtgatcattgaaaaagaggaaagaagaaaaaatgtatgggtgagaggaaggaggatctccttcttctccaaccattgacagctaacccttagacagtatttcttaaaccaatccttttgcaatgtccagcttttacccctactctctactttttcacccaaactgataacatttatctcattttctagcacttaaaatacaaagtctatattattgc

SEQ ID NO: 93843 - DNA, 506 bp, Homo Sapiens
  misc_feature (42)..(42): n is a, c, g, or t
gctgaaggacttcttcacggccacagagggccagtaccagcntcagccttgagaggccttgacaggccctggggttctccccctttctctccagcctgacttggggagatggagctcttgtgccatagtcacatggcataagcacatatggactctgcacatgaatcccacccacatgtgacacatatgcaccttgtgtctgtacacgtgtcctgtagatgcgtggactctgcacatgtattgtacatgtgtagcctgtgcatgtatgtattggacactgtacaaggctacccctttctggctctcccatttcctgagaccacagagaaacggcagaagcatggaaatcacaaaagcttctgaccacccacttttctttcctcagatcatccacaagttcctcaagggccaggactttatctaatacctctgtgtgctcctccttggtgcctggcatggcacacatcaagagttcaataaatgtctgttgatgcctgttgtaaaaa

SEQ ID NO: 93844 - DNA, 342 bp, Homo Sapiens
tttaacgtgatcataaaaaggttcatacacctcttggaaatcattataaagaagcaagtgtcagactttatgggaccagttgcaatgctgagtcctccagttaagattagaatatcccccttacaccctatttaaggaggcaggtagccaagaaacatatattagccagattttcctcaaaagtagctaatatcacaagtgaaagaaggcattgtttccttcatggcccttaagttgtggtacattttttatattatcctcattgaacctcccgaatcgtatgccctgtgtgggcaagaccgtgttcaccctggcttccccaggagggaaacacctttcatg

SEQ ID NO: 93845 - DNA, 460 bp, Homo Sapiens
cctgtctcttttccctgggatccctctgtcaaccccacgccttttaggaaaaagaaaagtgagtgaacagcaaggaagagtgtttgcacagtacagtaacatttggttgttcttaaggctcttttcttacaaaaataagagaccctccaaccacgggctgtttaggaggatgcctgcttgggtctccaaatggctggggtaggaatggttgttggggcagagccagtggaggtgagtgaccctgagactaatgaacatcccacctaaatccagtcctccccttggatctgcctttgtcctgcttgtgtatccaggcaacctcttttcaagttggtcaggctttggacaggtgagtgatttgctgtatgtgtttgtttctctgcgttacctgggggtgccttgattaaaatcgaactttattacatactgattctggaacaaaacagttagaaaaacttta

SEQ ID NO: 93846 - DNA, 942 bp, Homo Sapiens
gcggcccaggctcaggggaactcatggcctgggctcccagggtcagctggacaaagggggtcgctggagccattggagtccaggggcagcaggctggagccgctgagcagctccacacgcagcttctgctcagaggcgcggtaggaggccttgactgtcacagcccccagctccttcagaggtggtttcttgcctgctgctggattcggctgcagaagtacttccggatgagttcccggctggaggccgcctgcagctccaggtccctctgcagagcctggaaggtggcagtgtgcagggcctcgggtggcaggccacagccctcagcgtggaagcagatctccaggttctgcagggcaatcttcagcctgttggaagccagggatgagctgcgctgggaggcggccgcctccaccagcactgtgagtgtgtgggtccagagcagggtcaggaggctgctgaagttctcctgcaccaagttggtgttcatgtagcaaagctccacctccaggaacttcatcaggggcagaatggcatcctcaggcaggacagactccctgacgcccaccagtttctggatgtgcttggcgatgcccacctccaactgctcggccagggtgcggacgccagtgcggatctcatggcccagcccggccagcgcccgcgccagggcctcgttgtacgtcttctgcagccaggaggggatggccggctggaaccagcggtggaaattatccagggccaggactccatccctctctgaggagctcatgcgcagctggcagagctccttgaggctgatgtagagctggaacagactctcgcccatctctggggacactacatcacccacaaccgtcgtgtggtcctgcacccgcttggccaccagccactgcagctccccctcgtgccgaaatcgccacccaggcctcgctaccttgg

SEQ ID NO: 93847 - DNA, 1060 bp, Homo Sapiens
aagcgaggcctgggtggcgaattcggacgaggttataaaggcccgggcccgcgagctctcttcaggccagaaggaccaaggccaggcagccaacatgctgtgtgtggtggtgaatgacatggagcagctgcggctggtgatcggcaagttgcccgcccagctggcatgggaggccctggagcagcgggtaggggccgtgctggagcaggggcagctgcagaacacgctgcatgcccagctgcagagcgcgctggccgggctgggccatgagatccgcactggcgtccgcaccctggccgagcagttggaggtgggcatcgccaagcacatccagaaactggtgggcgtcagggagtctgtcctgcctgaggatgccattctgcccctgatgaagttcctggaggtggagctttgctacatgaacaccaacttggtgcaggagaacttcagcagcctcctgaccctgctctggacccacacactcacagtgctggtggaggcggccgcctcccagcgcagctcatccctggcttccaacaggctgaagattgccctgcagaacctggagatctgcttccacgctgagggctgtggcctgccacccaaggccctgcacactgccaccttcccaggctctgcagagggacctggagctgcaggcggcctccagccgggaactcatccgggaagtacttccgcagccgaatccagcagcaggcagaaaccacctctgaggagctgggggctgtgacagtcaaggcctcctaccgcgcctctgagcagaagctgcgtgtggagctgctcagcgcctccagcctgctgcccctggactccaatggctccagcgacccctttgtccagctgaccttggagcccaggcatgagttccctgagctggccgcccgggagacccagaagcacaagaaggaccttcccccattgtttgatgagacctttgaattcctggtgcctgctgagccgtgccgcaaggctggggcatgcctcctgctcaccgtgctggactaccacacgctggggggccaacaaactggaaaggcga

SEQ ID NO: 93848 - DNA, 506 bp, Homo Sapiens
ttttttttaacacagtcgactaatatattttatttaaaaatttacttttgaagcctataaatggataaattccaaaatacagaatatttaacaatatttaatattttttactcaacagtctgcctttgtgtttttctttccataaacaaatacactggattaaagcaataatactcttatcttcaagttcaatgcctgagtttcttgcatactatttccatttaaagttcagtaattacttaacttcacattattctgtcacaaatgataaatgtgctacctatgtagtaaaaatcataaaactattataagccaagtcaagagaattcataaagttaatatgaaataataactatactgatacacatgtgcaatgggccctaccagaaatatgccaaaataacaagttttatttaaagaatgaggtctttgggcagaaagaaatgaggggtcattatcatcaaaaattattaggaagattgtaggtaaaaagaaatcagcctaca

SEQ ID NO: 93849 - DNA, 874 bp, Homo Sapiens
tttcttaaataaatgtttaatattaatcattcccaaactgacaagaacacaaaaataaaatgcaaatacagagccagctttgtcacccaaatctgtgtctatttctgatagtccatggaatgtggttttcttggaagccagggttggtctccccacagaccccaggctaaggtcaccagttaggaacccaggacttggaaggcagagcctgtgagctcttccatcagggatctgactccgcaaaacgacttgatgaatgcaattggcaaactcccatgttcggacttcatatgcatgagccgttggacagagggtttcttagtatatactttaatgcatgtttatgtgcaatcttgttagtgggtatacaagtttgtgaagaacttctcatttcaataggcagttaatgtaatgcattaaaagcctgggaatttggggctatatttttcctttctgactcaataatcttcaaagaattcataggaaagtcagtacttgcagacaagtggttagcttggctaaaatgtacaaaacacccagaacccacaaaacactcagaggtttaggagaatgttttaatgcttaagaggcaggatcaagtgaagaggttacagaaatcagtgtctctggctgggcagtcaagagagcgggctcaaattctgtgactcacttctctgtgtctcggttggaaatgaatgggtatcctggttcccaccttcccacacactgtgatacttcaaactccttgggtgaagggcctcttctcagcccaagatcttgattgggaacattaacaaagagaacagtcatcctccacagaagataactcattaatgacatttgattcagtgaataaatatatcatttaaaaaaa

SEQ ID NO: 93850 - DNA, 458 bp, Homo Sapiens
tgcggccgccaactctttcctatgggcctctactgagagcatggaggtaatacatctaatacactgaagaccagggcaagagagctggaagaaatccctcttaagcactccaggccttcactgagtatgaggtgctggtctccaaaggcagagggcaaggcaaggcagagagggatctcctggggcacagacaactgacaaaagaaacacttggattgttgtataagaggagtgagctttgtaaataccacgttagctggcctgctgtggaacagaatgcctatgaatgacagtagtcaggtagtggatgaacactgatctgagagcctgtaaaagaaactctttggaatgataatgtcatctagacctttgatacgcaaagtgtgattcctggacagatgtattggctttacctggcagcttgttggaaatgtaaaacctcaggcctcaccccagac

SEQ ID NO: 93851 - DNA, 551 bp, Homo Sapiens
gcggccgccgccgccgctgccgcggcccgggaagctgcggcctacagcagtggcggcggagcggcgggtgcgggcctggcgggccgcgagcagtacgggcgcgccggcttcgcgggctcctactccagcccctacccggcttacatggccgacgtgggcgcgtcctgggccgcagccgccgccgcctccgccggccccttcgacagcccggtcctgcacagcctgcccggccgggccaacccggccgcccgacaccccaatctcgatatgtttgacgacttctcagaaggcagagagtgtgtcaactgtggggctatgtccaccccgctctggaggcgagatgggacgggtcactatctgtgcaacgcctgcggcctctaccacaagatgaacggcatcaaccggccgctcatcaagcctcagcgccggctgtccgcctcccgccgagtgggcctctcctgtgccaactgccagaccaccaccaccacgctgtggcgccgcaatgcggagggcgagcctgtgtgcaatgcctgcggcctctacatgaagct

SEQ ID NO: 93852 - DNA, 749 bp, Homo Sapiens
gggggatgtacgactacaccgcgcagaatgacgatgagctggccttcaacaagggccagatcatcaacgtcctcaacaaggaggaccctgactggtggaaaggagaagtcaatggacaagtggggctcttcccatccaattatgtgaagctgaccacagacatggacccaagccagcaatgaatcatatgttgtccatccccccctcaggcttgaaagtccttttgtggctttcctagttactcaaattgactttcccccacctttgcacaggtgctttcaatagttttaaaattatttttaaatatatattttagctttttaataaacaaaataaataaatgacttctttgctattttggttttgcaaaaagacccactatcaaggaatgctgcatgtgctattaaaaattgttccaaatgtccataaatctgagacttgatgtattttttcattttgtccagtgttaccaactaaattgtgcagtttggggcttttcccccttaccatagaagtgcagaggagttcagtatctctgttttaaagacgtatagaatgagcccaattaaagcgaaggtgtttgtgcttgtttgtgtgtatcagctgtaccttgttgagcatgtaatacatcctgtacataagaaattagttctttccatgggaaagctattaccttggacgatgctctaatcatattgcatttaattttatttttgcacagatgacctttgtagcccggatgaaaaaaa

SEQ ID NO: 93853 - DNA, 797 bp, Homo Sapiens
  misc_feature (180)..(180): n is a, c, g, or t
cctttgcctctccagttgaaaaccagaccaactattgtttctgcacagaaaaaattatctcaaaaaattggacatcatatggtgtgctagacatcagcaaatgcaaagaagggagacctgtgtacatttcacttccccattttcttgtatgcaagtccctgatgtttcagaaccctattngatggattaaacccaaatgaagaagaacataggacatacttggatattgaacctataactggattcactttacaatttgcaaaacggctgcaggtcaacctattggtcaagccatcagaaaaaattcaagtattaaagaatctgaagaggaactatattgtgcctattctttggcttaatgagactgggaccattggtgatgagaaggcaaacatgttcagaagtcaagtaactggaaaaataaacctccttggcctgatagaaatgatcttactcagtgttggtgtggtgatgtttgttgcttttatgatttcatattgtgcatgcagatcgaaaacaataaaataagtaagtatgtaccaaaaaatattgcttcaataatattagcttatatattacttgttttcactttatcaaagagaagttacatattaggccatatatatttctagacatgtctagccactgatcatttttaaatataggtaaataaacctataaatattatcacgcagatcactaaagtatatctttaattctgggagaaatgagataaaagatgtacttgtgaccattgtaacaatagcacaaataaagcacttgtgccaaagttgccc

SEQ ID NO: 93854 - DNA, 848 bp, Homo Sapiens
  misc_feature (38)..(38): n is a, c, g, or t
  misc_feature (74)..(74): n is a, c, g, or t
  misc_feature (161)..(161): n is a, c, g, or t
  misc_feature (205)..(205): n is a, c, g, or t
  misc_feature (340)..(340): n is a, c, g, or t
  misc_feature (376)..(376): n is a, c, g, or t
  misc_feature (411)..(411): n is a, c, g, or t
cagctccttggaagtgccaaatctaagattctcacccnattcgtcgtaggtattagcatgtgggtgccttaagnatcctggtgattatctgtgcaggtgcaggtagtccatgcaacagcgatgccccatgaacagtcaaccagttagaaggggtgacaggncggccagcccgcagtacttcattcagctggccctggccgcagancttccattagaatgcagtagcagggagcctgggtgcacacaccctttgaagtgatgatgtggggtgcttcagctttcgcaagtgcttgatgtcggttccttgaggtctcgcaccttcttcacagccactcctccncgtgaagcgccccaggaagacagcaccctgggcccntgagcccacccactgcaggtccaggatttcctcanaggggacctcccaaaggtcttcctgctgctgcttgtgctcagtggagtaggctttgccaatcatggtccagacagggcgcaggcagccaaagaggccctcaaggaagccactgccactctggcactgcagtcgcacctcgtcagctcgaactctggatgcccgactctcaggtgacccagctgctccccctgggccccctgcatcctgctcatgtagctgcaggacatgggtaggcgtcaggtccttctcgggagtgcagtcagaagtgtctgggtccagcttgcgcatggatgcctcacttagggtagacacaaagcccccaaaggaaggagagggtgttcgggtctcatggaggcaagccatcgcctctggcccctggtatgatggtgaacactgggccttggaattcactcggctctaggccccatcctcctcc

SEQ ID NO: 93855 - DNA, 550 bp, Homo Sapiens
tcttggaccttagcccattgcttaaattatattcagtagaatattagcactaactaatatgtgctataacctcttcagtcatgaaaaatttagtagttacatacacatgaaataaaagattccaccaacagtgtttttgaacaggcatcagttatgaatctgctagtattaaatgctaagcaaaatactaaagctcttaaaacattagtgttttatttttaacttttaacctattatttacagaagtcctgttagatgctgaaagcagtcattttgcaacatgtatgttcttcatataaaatgatgttcaatgttaggtggtacagatttataaatatgtacaaacaaaacagtatgtctgtagttaacctactactctagtaaccaacacatggaagcatcatatgcacataaaagttaaacattaaaacaaaacttaaaactctcaaaacagataatcatgaatttgtgtttataaaattatatagaataaaggctttgtgtgtggggactttcagtggcccaccaataattttcatgaaaaaataaa

SEQ ID NO: 93856 - DNA, 593 bp, Homo Sapiens
ggagaattaattggtaactttattaataacaatagcatctatacacatttgaaaacacacatgtaggagacagttaagatctattcagtctgtgataatgtctagagctcatttggattcatcaaacccctgccatcagctccaaaagcccttagccaaaaacagctgaatcactcatcaaaccatcagtgtcttcctcggcagaatcaagggttggacagaaagagtaaatattctgcacctccacaaaataaaactaaaatgcaattgtcctgcatctgagaatacaagggtggacagtatgagctgcatgactgtgaaccaatgaggcttctcttggcctcatttgtaaaaaggagattaactctgtagtcccgcctatattgcatggcctccagaaaagcaaatgaggtggtaagtgtaaattaaaagctcctctcctttaagaggggaacaccatgaggggagagtaagaaaaggagaaggaaaaggctctttccagtgaccaacacgctgaatttgatgaaaatccataagaggttatgctaaactgagaagcataagggtggatctaccattgccacctcctcttt

SEQ ID NO: 93857 - DNA, 717 bp, Homo Sapiens
  misc_feature (61)..(78): n is a, c, g, or t
  misc_feature (80)..(172): n is a, c, g, or t
gtgccaagctaaaattaaccctcaactaaagggaataagcttgcggccgcatacgcggtcnnnnnnnnnnnnnnnnnnannnnnnnnnnnnnnnnnnnnnnnnnnnnnnnnnnnnnnnnnnnnnnnnnnnnnnnnnnnnnnnnnnnnnnnnnnnnnnnnnnnnnnnnnnnnnagtgtgagccaccgcgcctggcccaagccctccacattttcaatccaggagccttgagtctgtgttgtgtcctgacacctccaagttctagggccgtcaggacacgggagggtttggggacagagtgtccttcctctgtcctctcatcccagtcctgatggccgcttggtgagtgtctggtgccctggtggcctgccccagctctcttctggctttctgagcaggaagcgagcagaggctccacaggcttacgctgctctcctgacagccacacgcgaccctcggtgcagagtgcagaggcggctctggttcctccagccacctcagtccctctttgggaggtgatgttcccattgtttttcaaaggcctcaccttcaactgtctgtcttagaattcccctctggagggctatggcctccctatgctttcacttcccacctctctacctaagttccttcccagcacatcgccagccctgggcctggggatgtccccaatgctgtacctggctgaccccggattaaaagcctcatccacgaaaaaa

SEQ ID NO: 93858 - DNA, 564 bp, Homo Sapiens
gcggccgctggtcaaccgcagcgtgcccaggtcgctctcgggcgtggtggtcttgatgaagtagtgcgtgtccttgccctcgatggtgaagtgcaggttctccaggtagaaggcgttgttgagcacggccgccaccttgatgcagtcctcgttggcgatgttgagcacgttggtctgcacgcggccctggctgacggccagcatgacgcccttgccgatcagcgacttgaccgtggcgaaccacagccaggactgcgcgccgccggcccggcgccggctcacctgcacctcggccatcttccccagcgacaggaaggccttggcctgccgcgccacttgctgctggactccgaagatgggcggtatatcatcccactgctgactcttcacaagttcgtaagaaggttctgttaaatcaaatttgggaacagggaatccaggaatagcattgtgcagatggaaaccaaatgtcaccagccagctgttaacatctgtgatgtaatctttcacgtcatggattttgcttgcagggttgttattcctaaacatgtacaagttaaaagg

SEQ ID NO: 93859 - DNA, 314 bp, Homo Sapiens
aggagaatgcctgtcgagtgtcatctttcctcaaccgacaatagagatccatttctggagtatgggtcttaaatggcagcagcatgcgtgtgcgttgagtccagattggcaggtgctccaagagtgatacacatggtgaaaactggatcttgccagagagcagacccagacgctggttctagagtactgttcatggaatgggaccttccagcatgtgggcaaagccatcaaccagggcaacatgttcaagtgagcatctcttaccatcgcagaggcgcatgcacctgcccttcagggagatgggggtctttaga

SEQ ID NO: 93860 - DNA, 454 bp, Homo Sapiens
  misc_feature (161)..(169): n is a, c, g, or t
gtcttcttcaccaccatttaaacggtatttactgccagaattatctaaaaatggcaatttcataatgctgctactaaacactaagtgttcgtcagattgcacaaagacattagattctgttcacttagtgcctctggaacatcttataataatctaaatgnnnnnnnnngcggtttctctgaaaacttgcctatgatcctccaactctaccttctgaactagtatgaagctcatatttggtataattatgtcttttctgggacctatttgagggtggaatgtgggaggagggtaaggattaaaaacctgactattgggcattatgctgattacctgggtgacaaaattatctgcacaccaaacccccatgacacacaatttgctcatgtaacatgagtaacctttaacctaaaatgaaagttggacagaaaaataaagtgtcttaatatcaaaa

SEQ ID NO: 93861 - DNA, 491 bp, Homo Sapiens
cgtctggctcagggactccaccctggccccgagtcgccgtatgctgggcctttccttcctggctctgcaccccatgctggctgcccggtctggcttcccttcttgtctctgtcttgggcgaggcagctgtgagcattgcacagaggcaaagaccctcctgcagcctctgcgctgggccgtagaaacaagagcctttgtaatactgaacctcattcaaggattaggagtggtggttaggtcagggccacccccagtgctgcaggaacggcctccacccagctctgttggtcagagcctgggtcatgcacctggagttgggagatcaagctgggtctcagggcagtgaggtggccatatccaccacatcgcatttcgtgggggaagaggtgacctctttgttttaaacttaaggtgtctgcttatccagccagaaataaaaatctgccagtggtgttcccaagggaagacccccgtgggaatggatcgggaaa

SEQ ID NO: 93862 - DNA, 812 bp, Homo Sapiens
gtgctcttgaagtccataggacctcatgtctagcacagtttttgtctgtgaaatacacaatcagaatccttactttgtgacacaatttgtttgaggaatcgaaatcgggtgaataggcagacagacttgtcactggatttagagtctctcagctggtacacggcagggtcagggttctggatatggggtttgaccattaaccttgttccccctccaaaggtgagcatgttgcctgcattattgaccacagcacagaagtactcagccgcgtcgctcatatgggctgagggtttcgtcaggtggaaggaggtttcactcttcttaaattcagcctcaaaaccgttgatgcctttaaccagggtggccgctgatgtgtacttcaggagaagctggagtccttggttggggtattgcacataccagaagagagatggtgaaaaagaagatgagtagttgcaccccagcagaaccagggctccttcagagacagagacgtggctgccaagctgggtcaccgactgggctctggttcctcccagagtaaaaatcacctcgagcactgggacgagcagcaggagcatggctgagcagaggcaacgctgcaggaccctgagcagagaggacagaagccaagggccctgagcctcaggagctaggagcaacaggcaggttaggctggacaagtccctgcctttgaaaagtttcaaaaacggttaaagaaaggctttctcttaaggagcctggatgtgttctgacctcttgctctcgtcacagctccctgtctacacagacatcagtgagctacatcagcc

SEQ ID NO: 93863 - DNA, 751 bp, Homo Sapiens
gtgggtggcagcaagcactcttctagcccagagaagtctgttccaggacgggctctttcaggagcagctaaagtcaggggccatgtccaccatgtgatagaaagacaagatggtcctgaaattctccgtgtccattctttggattcagttggcatgggtgagcacccagctgctggagcagagccctcagtttctaagcatccaagagggagaaaatctcactgtgtactgcaactcctcaagtgttttttccagcttacaatggtacagacaggagcctggggaaggtcctgtcctcctggtgacagtagttacgggtggagaagtgaagaagctgaagagactaacctttcagtttggtgatgcaagaaaggacagttctctccacatcactgcggcccagcctggtgatacaggcctctggtctaactttggaaatgagaaattaacctttgggactggaacaagactcaccatcatacccaatatccagaaccctgaccctgcccgtgtaccagctgagagactctaaatccagtgacaagtctgtctgcctattcaccgattttgattctcaaacaaatgtgtcacaaagtaaggattctgatgtgtatatcacagacaaaactgtgctagacatgaggtctatggacttcaagagcaacagtgctgtggcctggagcaacaaatctgacttgcatgtgcaacgccttctactacagcattattccagaagacaccttcttcccca

SEQ ID NO: 93864 - DNA, 1371 bp, Homo Sapiens
gctttgcagagcactctgggggcggtgtggctagggcttctcctcaactctctctggaaggttgcagaaagcaaggaccaagtgtttcagccttccacagtggcatcttcagagggagctgtggtggaaatcttctgtaatcactctgtgtccaatgcttacaacttcttctggtaccttcacttcccgggatgtgcaccaagactccttgttaaaggctcaaagccttctcagcagggacgatacaacatgacctatgaacggttctcttcatcgctgctcatcctccaggtgcgggaggcagatgctgctgtttactactgtgctgtttctgggggttaccagaaagttacctttggaactggaacaaagctccaagtcatcccaaatatccagaaccctgaccctgccgtgtaccagctgagagactctaaatccagtgacaagtctgtctgcctattcaccgattttgattctcaaacaaatgtgtcacaaagtaaggattctgatgtgtatatcacagacaaaactgtgctagacatgaggtctatggacttcaagagcaacagtgctgtggcctggagcaacaaatctgactttgcatgtgcaaacgccttcaacaacagcattattccagaagacaccttcttccccagcccagaaagttcctgtgatgtcaagctggtcgagaaaagctttgaaacagatacgaacctaaactttcaaaacctgtcagtgattgggttccgaatcctcctcctgaaagtggccgggtttaatctgctcatgacgctgcggctgtggtccagctgagatctgcaagattgtaagacagcctgtgctccctcgctccttcctctgcattgcccctcttctccctctccaaacagagggaactctcctacccccaaggaggtgaaagctgctaccacctctgtgcccccccggcaatgccaccaactggatcctacccgaatttatgattaagattgctgaagagctgccaaacactgctgccaccccctctgttcccttattgctgcttgtcactgcctgacattcacggcagaggcaaggctgctgcagcctcccctggctgtgcacattccctcctgctccccagagactgcctccgccatcccacagatgatggatcttcagtgggttctcttgggctctaggtcctgcagaatgttgtgaggggtttattttctcttaatagtgttcataaagaaatacatagtattcttcttctcaagacgtggggggaaattatctcattatcgaggccctgctatgctgtgtatctgggcgtgttgtatgtcctgctgccgatgccttcattaaaatgatttggaagagcagaaaaaa

SEQ ID NO: 93865 - DNA, 740 bp, Homo Sapiens
gggagagctggcgctctagcccacggagttggttaactcctctcaccggcccctggaaagggttccaagtcctttagtacccgacgctgtctgggaattccgggcgtttcggctccttggtcgcagaggcaggaggcacccgaccgcatgtctgtcatggacctcgccaatacttgctccagctttcagtcggacctggatttctgttcagattgcggctcggtcctgcctctgcccggggctcaggatacggtcacctgtattcgctgtggcttcaacatcaacgttcgggactttgaggggaaggttgtgaagacttcggttgtgttccaccaactggggacggccatgcctatgtcggtggaggaagggcctgagtgccagggacctgtggttgacaggcgctgccctcgatgtggtcatgaaggaatggcataccacaccagacagatgcgttcagccgatgaagggcaaactgtcttctacacctgtaccaactgcaagttccaggagaaggaagactcttgacctttttcctgggcaactctacagtccctccctcctttcggaaggtgaaggatactgggtttttagatgccttgtccatcctgtctggttgcaatgttttgctcccagaagagaatcagatcatcatgtggggattaccattgttcctggagtactcctacccttagttgaatttccttattaaagttatatttttctataagaccctgaaa

SEQ ID NO: 93866 - DNA, 263 bp, Homo Sapiens
  misc_feature (234)..(234): n is a, c, g, or t
gcctactactactactatacggctgcgagaagacgacagaagggcaaactgtcttctacacctgtaccaactgcaagttccaggagaaggaagactcttgacctttttcctgggcaactctacagtccctccctcctttcggaaggtgaagcatactgggtttttagatgccttgtccatcctgtctggttgcaatgttttgctcccagaagagaatcagatcatcatgtgggngattaccattgttctgggagtactcctac

SEQ ID NO: 93867 - DNA, 616 bp, Homo Sapiens
  misc_feature (319)..(331): n is a, c, g, or t
  misc_feature (370)..(487): n is a, c, g, or t
ggcacgagggtcgtgttggtctcttgggaggtagtggggctaggccgggcgggtatccgcctctcccagcttaggtgagcgtccccgggcgcctccggagcgccgcggccgcatgcagttcgtcgtggcggggagccggagcctgaccggggttccagcgctcgggccgtagccttggctcctggactttccctggctccgccgccacgtgggagctgaggctctggggcttccgcctccggcgcgcgattatttctctagaacagttttcatttttaaaatttgtaaagcgcttttgcctgtgtgatttcctctgggnnnnnnnnnnnnncttcctttttgtagagacggaattggcggcgggggcggnnnnnnnnnnnnnnnnnnnnnnnnnnnnnnnnnnnnnnnnnnnnnnnnnnnnnnnnnnnnnnnnnnnnnnnnnnnnnnnnnnnnnnnnnnnnnnnnnnnnnnnnnnnnnnnnnnnnnncctctgagtttccagcctcggtggccctccagccttttaacctgttgggcctaggatcaggaaagattcattgattccaggtaattcagatgaacaagcaacatgaacagaaatatgtagaaaaagcta

SEQ ID NO: 93868 - DNA, 931 bp, Homo Sapiens
  misc_feature (215)..(227): n is a, c, g, or t
  misc_feature (266)..(383): n is a, c, g, or t
  misc_feature (738)..(789): n is a, c, g, or t
gcggccgcatgcagttcgtcgtggcggggagccggagcctgaccggggttccagcgctcgggtcgtagccttggctcctggactttccctggctccgccgccacgtgggagctgaggctctggggcttccgcctccggcgcgcgattatttctctagaacagttttcatttttaaaatttgtaaagcgcttttgcctgtgtgatttcctctgggnnnnnnnnnnnnncttcctttttgtagagacggaattggcggcgggggcggnnnnnnnnnnnnnnnnnnnnnnnnnnnnnnnnnnnnnnnnnnnnnnnnnnnnnnnnnnnnnnnnnnnnnnnnnnnnnnnnnnnnnnnnnnnnnnnnnnnnnnnnnnnnnnnnnnnnnncctctgagtttccagcctcgttggccctccagccttttaacctgttgggcctaggatcaggaaaggtttgttgaatggggaactaagaagtgaattcgttcgttcgacaaacgtttcctgagcagccgctgggtgctaggcgcagtgccagcgcggaatgtccagggagacctggtgcccaaagcttggacccatcgtgagaaatgagaagcagatacaaagcagtgtgggagtgcagaggagacaaagcaagcctcatcaggcccattgcttgctctgctctcccttgtacttaccagtgcttgacaatatacagttatttactagcttggttattgacttcctacccagcacnnnnnnnnnnnnnnnnnnnnnnnnnnnnnnnnnnnnnnnnnnnnnnnnnnnngattcattgattccaggtaaatcagaggaacaagcaacatgaacagaaatatgtagaaaaagctattatgcagaagcataattgttgtttcagaagtcccatctggtgcacttaacaatagagaatatattaaactctttcc

SEQ ID NO: 93869 - DNA, 544 bp, Homo Sapiens
  misc_feature (169)..(181): n is a, c, g, or t
  misc_feature (229)..(336): n is a, c, g, or t
ggttccagcgctcgggccgtagccttggctcctggactttccctggctccgccgccacgtgggagctgaggctctggggcttccgcctccggcgcgcgattatttctctagaacagttttcatttttaaaatttgtaaagcgcttttgcctgtgtgatttcctctgggnnnnnnnnnnnnncttcctttttgtagagacggaattggcggcgggggcggggggtcgatnnnnnnnnnnnnnnnnnnnnnnnnnnnnnnnnnnnnnnnnnnnnnnnnnnnnnnnnnnnnnnnnnnnnnnnnnnnnnnnnnnnnnnnnnnnnnnnnnnnnnnnnnnnngcctctgagtttccagcctcgttggccctccagccttttaacctgttgggcctaggatcaggaaagattcattgattccaggtaaatcagaggaacaagcaacatgaacagaaatatgtagaaaaagctattatgcagaagcataattgttgtttcagaagtccagcatctggtgcacttaacaatagagaatatattaaactctttc

SEQ ID NO: 93870 - DNA, 881 bp, Homo Sapiens
taggctaggtacgaggcctggtgttgaattcggcacgagggcaggatgaactggttgcagtggatgctgctgctgcgggggcgctgagaggacacgagctctatgcctttccggctgctcatcccgctcggctcctgtgcgcgctgctgcctcagcaccatggtgcgccaggtcccgacggctccgcgccagatcccgcccactacagggagcgagtcaaggccatgttctaccacgcctacgacagctacctggagaatgcctttcccttcgatgagctgcgacctctcacctgtgacgggcacgacacctggggcagtttttctctgactctaattgatgcactggacaccttgctgattttggggaatgtctcagaattccaaagagtggttgaagtgctccaggacagcgtggactttgatattgatgtgaacgcctctgtgtttgaaacaaacattcgagtggtaggaggactcctgtctgctcatctgctctccaaggaaggctggggtggaagtagaggctggatggccctgttccgggcctctcctgagaatggctgaggaggcggccgaaaactcctcccagcctttcagacccccactggcatgccatatggaacagtgaacttacttcatggcgtgaacccaggagagacccctgtcacctgtacggcagggattgggaccttcattgttgaaatttgccaccctgagcagcctcactggtgaaccggtgttcgaagatgttggccagagtggctttgatgcgcctctgggagagccggtccgatatccggctggtcggcaaccacattgatgtgctcactgggcagttgggtggcccaggacgcaggctcggggcttggcgtggcttct

SEQ ID NO: 93871 - DNA, 1886 bp, Homo Sapiens
  misc_feature (70)..(88): n is a, c, g, or t
  misc_feature (125)..(145): n is a, c, g, or t
aaaccaaccaccacacccacgcgacaacgggcgctcatactcttctcgcacccgacatagatgctcgagnnnnnnnnnnnnnnnnnnnatgatagccaaaagcaatttattatagtttagcctcnnnnnnnnnnnnnnnnnnnnnttatccagtggttatgaggagtctaggaaaacctgtcccagtaatgccaacttggaggtgaagggctgactggggcagctgagaagtgggaccttctgtttggcaggcttcctctcccttgcctggtcatggttttctggtgagaagagtgttcctggccttgctggaggttcccatggccccgaactaacagtgtttttctgaaatttcgacctgctccgtttgagagagtagaattccctcatcaagtcctccacctcccactgctcttccttcagcctctggcagcagtgcagggcggcagggtcgatggggtgagcttctgtgttgaagatgtaccccccagcccccaggatgcactccccatagggggtgatcaccgcgtcgaaggtggacccattgttgtggatgaagttggttgggtcaaacaggaggtagaggtatttcacagtctcggccaggaagaacgactccatgcggttgtccagcttgtggtctcgcagatctttgattgttgcaaatccgcactccaccttgctgattttttcaatggattccacagcatctcttccgagttctaggagggtgggatcccccgtggcacggtagaggtacattgcgctttcaataagttctggccgaagtgggtagccctctcgcttctccactgtgtatccctgaggaatgttgtagaattccgggagccccccaaactgcttccatacagtgtagtagttgaggaaggtcctcatggcattgtcaatgtctccaatgaggctctgaagaccaggccagtaggcctccaaggactggaagactggcatggacacagtccccttgtacatctgaacccacaggtaccagtcatcgaagcgggtgtagttccggatggctttgttatactctaggaacatggccatgagcttcttatcctgaagcaggatggctcctttcaccaagtactcaaagtaggagtccacgccagccccgatgcctgcgtcctgggccacccacttgccagtgagcacatcaatgtggttgccgaccagcccgatatctgaccggctctcccagaggcgcatcaaagccactctggccacatcttcgaacaccgggtcaccagtgaggctgctcagggtggcaaattcaacaatgaaggtcccaatccctgccgtacaggtgacaggggtctctcctgggttcacgccatgaagtaagttcactgttccatatggcatgccagtgggggtctgaaaggctgggaggagttttcgggccgcctcctcagccattctcaggagaggcccggaacagggccatccagcctctacttccaccccagccttcttggagagcagatgagcagacaggagtcctcctaccactcgaatgtttgtttcaaacacagaggcgttcacatcaatatcaaagtccacgctgtcctggagcacttcaaccactctttggaattctgagacattccccaaaatctgccccaggtgtcgtgcccgtcacaggtgagaggtcgcagctcatcgaagggaaaggcattctccaggtagctgtcgtaggcgtggtagaacatggccttgactcgctccctgtagtgggcgggatctggcgcggagccgtcgggacctggcgcaccatggtgctgaggcagcagcgcgcacaggaggccgagcgggatgagcagccggaaaggcatagagctcgtgcctcgtgccgaattcgccaccca

SEQ ID NO: 93872 - DNA, 1012 bp, Homo Sapiens
aaggtagcgaggcctgggtggcgaattcggcacgaggaacccgcagcagctcccaggatgaactggttgcagtggctgctgctgctgcgggggcgctgagaggacacgagctctatgcctttccggctgctcatcccgctcggcctcctgtgcgcgctgctgcctcagcaccatggtgcgccaggtcccgacggctccgcgccagatcccgcccactacagggagcgagtcaaggccatgttctaccacgcctacgacagctacctggagaatgcctttcccttcgatgagctgcgacctctcacctgtgacgggcacgacacctggggcagtttttctctgactctaattgatgcactggacaccttgctgattttggggaatgtctcagaattccaaagagtggttgaagtgctccaggacagcgtggactttgatattgatgtgaacgcctctgtgtttgaaacaaacattcgagtggtaggaggactcctgtctgctcatctgctctccaagaaggctggggtggaagtagaggctggatggccctgttccgggcctctcctgagaatggctgaggaggcggcccgaaaactcctcccagcctttcagacccccactggcatgccatatggaacagtgaacttacttcatggcgtgaacccaggagagacccctgtcacctgtacggcagggattgggaccttcattgttgaatttgccaccctgagcagcctcactggtgacccggtgttcgaagatgtggccagagtggctttgatgcgcctctgggagagccggtcagatatcgggctgtactattaacccatggaaattgaacacactttggaccagatgatctctaagggcggcaaccacattgatgtgctcactgggcaagtggggtggcccaggacgcagggcatcgggggctggcgtggactcctacctttgaggaccttggggaaaggaagccatctgcttcaagataagaagctcatgggcatgttcc

SEQ ID NO: 93873 - DNA, 957 bp, Homo Sapiens
  misc_feature (671)..(671): n is a, c, g, or t
gaagaacccgcagcagctcccaggatgaactggttgcagtggctgctgctgctgcgggggcgctgagaggacacgagctctatgcctttccggctgctcatcccgctcggcctcctgtgcgcgctgctgcctcagcaccatggtgcgccaggtcccgacggctccgcgccagatcccgcccactacagggagcgagtcaaggccatgttctaccacgcctacgacagctacctggagaatgcctttcccttcgatgagctgcgacctctcacctgtgacgggcacgacacctggggcagtttttctctgactctaattgatgcactggacaccttgctgattttggggaatgtctcagaattccaaagagtggttgaagtgctccaggacagcgtggactttgatattgatgtgaacgcctctgtgtttgaaacaaacattcgagtggtaggaggactcctgtctgctcatctgctctccaagaaggctggggtggaagtagaggctggatggccctgttccgggcctctcctgagaatggctgaggaggcggccccaaaactcctcccagccctttcagaccccccactggcatgcccatatggaacagtgaacttacttcatggcgtgaacccaggagagacccctgtcacctgtacggcagggattgngaccttcattgttgaatttgccaccctgagcagcctcactgggtgacccggtgttcgaagatgggggccagaagtggctttgatgcgcccctctgggagagccggtcagatatcggggctggtcggcaaccacattgatgtgctcactggcaagtgggtggccccagacgcaggcatccggggctgcggtggactcctactttgaataacctgggtgaaagggacccatcctgccttccggaaaagaaaactcatgggccatgttccctagaagtattaaccaaac

SEQ ID NO: 93874 - DNA, 207 bp, Homo Sapiens
ctttcatccatctttaaacaaattcaatgaccatctagagacagatgtgaccaaagtgttacaaatttctatgcattttctatgaattgctctgtgcagttcacacatgggttcattcaccccgcaagctgtgaacttccttatcctgtaggctgcaggtacttaggtttcagcaactacgcgacccaaaagactaaaggaggactt

SEQ ID NO: 93875 - DNA, 489 bp, Homo Sapiens
aggaccttaaaggctttgatccaggagagaaatactttcataacacatcatggggtgatgtttctctctgggaaccttctggaaagaaagtgagatatcgaacaaagccatactgttgtggcctctgtaaatactctacaaaggtgcttacttcattcaagaatcatttacatcgctaccatgaagatgaaattgaccaagagctggtgatcccttgcccaaactgtgtatttgcatctcagcccaaagttgtgggaaggcacttcagaatgttccatgcacctgtccggaaagtccagaactacacagtgaatattttaggtgaaactaaatcatctaggagcgatgtgataagtttcacatgtctaaaatgtaacttttcaaacactttgtactacagcatgaagaagcatgtgctggtagcccattttcactacttaattaactcctactttggcctaagaactgaggaaatgggtgagcaaccga

SEQ ID NO: 93876 - DNA, 537 bp, Homo Sapiens
  misc_feature (92)..(227): n is a, c, g, or t
tagagaaaaggtctcactctgtcaccaacactggggtacagtggtgtgatcatagctcactgcagcctcaacttcttgagttcaagccaacnnnnnnnnnnnnnnnnnnnnnnnnnnnnnnnnnnnnnnnnnnnnnnnnnnnnnnnnnnnnnnnnnnnnnnnnnnnnnnnnnnnnnnnnnnnnnnnnnnnnnnnnnnnnnnnnnnnnnnnnnnnnnnnnnnnnnnnngttgagcctcccaaagtgttattaggattataagtgtgagccaccatgcctgaacagtattatattatttctccaaattagttatgtgagaaattccctaggatttaatactaaacttgttttaaattctggactaattgtaaatttttcataaaaaaagacttagtaactgttacataatttttagatgttacaataattgagaaagaaacagctataacttatgtaacaaatgcacaataaaggatttccacttgcagctataaatgaaacagcttgtggcaaatcacccctactactaaaaacaact

SEQ ID NO: 93877 - DNA, 951 bp, Homo Sapiens
  misc_feature (65)..(134): n is a, c, g, or t
ggcgcggggggcgtggggcggtgctgaggagctgaagccgtggccagctcgacgccggacagtcnnnnnnnnnnnnnnnnnnnnnnnnnnnnnnnnnnnnnnnnnnnnnnnnnnnnnnnnnnnnnnnnnnnnnncctcgccgttcgcggagcgcagccgagccggccatggcgttgtcgatgccgctgaatgggctgaaggaggaggacaaagagcccctcatcgagctcttcgtcaaggctggcagtgatggtgaaagcataggaaactgccccttttcccagaggctcttcatgattctttggctcaaaggagttgtatttagtgtgacgactgttgacctgaaaaggaagccagcagacctgcagaacttggctcccgggacccacccaccatttataactttcaacagtgaagtcaaaacggatgtaaataagattgaggaatttcttgaagaagtcttatgccctcccaagtacttaaagctttcaccaaaacacccagaatcaaatactgctggaatggacatctttgccaaattctctgcatatatcaagaattcaaggccagaggctaatgaagcactggagaggggtctcctgaaaaccctgcagaaactggatgaatatctgaattctcctctccctgatgaaattgatgaaaatagtatggaggacataaagttttctacacgtaaatttctggatggcaatgaaatgacattagctgattgcaacctgctgcccaaactgcatattgtcaaggtggtggccaaaaaatatcgcaactttgatattccaaaagaaatgactggcatctggagatacctaactaatgcatacagtagggacgagttcaccaatacctgtcccagtgataaggaggttgaaatagcatatagtggatgtagccaaaagactcaccaagtaaaatcgcgtttgtaaaagaaaa

SEQ ID NO: 93878 - DNA, 759 bp, Homo Sapiens
  misc_feature (38)..(38): n is a, c, g, or t
tatctcccagaacaacgatctcactctagcgggatacntgcagtctacccctactgccaagcaggaagaaagtaagtacagtaatgtaatggaggactggatgtttacaatcagaacctggaccctaaagaacagtgactgcaaaggcaaagaaagtaaaaaaggaattggccattagacgttcctgagcatccaagatgaacattttgtagtgcaaaaagacttctgtgaaaagctgatacctcaatctttacgactgtatttttaaaaatgaaggttgttattgcaagtttaaaaaggtaacagaattttaactgttgcttattaaagcaacctcttgtaaacatttatcattaatatttaaaagatcaaattcattcaactaagaattagagtttaagactctaaacctgatttttgccatggattccttctggccaagaaattaaagcacatgtgatcaatataacaatataatcctaaaccttgacagttggagaagccaatgcagaactgatgggaaaggaccaattatttatagtttcccaacaaaagttataagattttttacctctgcatcagtgcatttctatttatatcaaaaggtgctaaaatgattcaatttgcattttctgatcctgtagtgcctctatagaagtacccacagaaagtaaagtatcacatttataaataccaaagatgtaacaattttaaaattttctagattactccaataaagtgttttaagttttcctatga

SEQ ID NO: 93879 - DNA, 905 bp, Homo Sapiens
  misc_feature (347)..(861): n is a, c, g, or t
gagtgtccgtgctgctgggtgctgtccccagccctcctggtccatcttcttaagatgcgtccactgctttatatttaaaattctctttttcacaggcaaggaaaggaaaccactgcttagagacactaggtacagggcatcaagagggtgcagcccagccccgccaggacgaggcgccgacttctcattcagggttgacggagccaagagtttgtgcaaaatgtatgcatggtggttgctgccagcctccctcatgactaaatgcatatctattcctgtcaaaacgtgtatcacaatgtacttgaaactgttatctttgtgctctattgcctcttgccgaattcttnnnnnnnnnnnnnnnnnnnnnnnnnnnnnnnnnnnnnnnnnnnnnnnnnnnnnnnnnnnnnnnnnnnnnnnnnnnnnnnnnnnnnnnnnnnnnnnnnnnnnnnnnnnnnnnnnnnnnnnnnnnnnnnnnnnnnnnnnnnnnnnnnnnnnnnnnnnnnnnnnnnnnnnnnnnnnnnnnnnnnnnnnnnnnnnnnnnnnnnnnnnnnnnnnnnnnnnnnnnnnnnnnnnnnnnnnnnnnnnnnnnnnnnnnnnnnnnnnnnnnnnnnnnnnnnnnnnnnnnnnnnnnnnnnnnnnnnnnnnnnnnnnnnnnnnnnnnnnnnnnnnnnnnnnnnnnnnnnnnnnnnnnnnnnnnnnnnnnnnnnnnnnnnnnnnnnnnnnnnnnnnnnnnnnnnnnnnnnnnnnnnnnnnnnnnnnnnnnnnnnnnnnnnnnnnnnnnnnnnnnnnnnnnnnnnnnnnnnnnnnnnnnnnnnnnnnnnnnnnnnnnnnnnnnnnnnnnnnnnnnnnnnnnnnnnnnnngacaggacataagatacagcgtttccctgaaactcctcggggcc

SEQ ID NO: 93880 - DNA, 422 bp, Homo Sapiens
ttttaaatttctaacaatgtatcctttaatagttagactcatactttattttgacaaatttaagatagaaaaatatcataatgtgaatatagcagttgctctttttgtaacatggtttgggatgtgcagtgaaacttgaaaggacttgctttacaggtggtccctcttctggctgggtttcagttaattctgaattatattccagccattgcatttgcttgaaagaatattggacacagtaaaaaaaagaacaggtttggcattcaataataaatattataaagcaatgaaccaaaacaacttttaaaataattactgaaagcaaacttcagacttcatgattaaagctaagaactcatattttcaaaatagctttaacagtttctatcaatatataatacaataataggacacttattttt

SEQ ID NO: 93881 - DNA, 429 bp, Homo Sapiens
gagtgcgttcctggagctcagtcctgcatttgttcacgtgcctcacagcaggcctttgtgcccttgaatctcaaacatggggatgtgcttggtacccagagctctggtcattgtgtccacacaacaccccaccccatccgtgtcctccatctcacccagaaccacagggtgcccactagtgtcagggcccaaagtgccagccttctcttctgccttacctagtctacctatttatttcctccactttttatcttaaaagtagctaagccatgctggtgcccatactccaagcaggctgcctcagctcagagaagtggtcagagagtagagcacagaacctgtgatgtggggacatttggttttcttgcagatcatttaatgaatcctcaaggactaatgaaataaatgctagactgctgaagatgaaaa

SEQ ID NO: 93882 - DNA, 1240 bp, Homo Sapiens
  misc_feature (815)..(816): n is a, c, g, or t
gcgtcctctgagaggtgaaggagcactgtgtggtcagagggctgcgagctctctgtttgggttccgaggaagacagaatgggctgaactggaactgacctaaatgtcagcaagaggagtcgtccagcatgctctgcccaccccacgccgaggtgcactgaccatgagcctcaactcctccctcagctgcaggaaggagctgagtaatctcactgaggaggagggtggcgaagggggcgtcatcatcacccagttcatcgccatcattgtcatcaccatttttgtctgcctgggaaacctggtcatcgtggtcaccttgtacaagaagtcctacctcctcaccctcagcaacaagttcgtcttcagcctgactctgtccaacttcctgctgtccgtgttggtgctgccttttgtggtgacgagctccatccgcagggaatggatctttggtgtagtgtggtgcaacttctctgccctcctctacctgctgatcagctctgccagcatgctaaccctcggggtcattgccatcgaccgctactatgctgtcctgtaccccatggtgtaccccatgaagatcacagggaaccgggctgtgatggcacttgtctacatctggcttcactcgctcatcggctgcctgccacccctgtttggttggtcatccgtggagtttgacgagttcaaatggatgtgtgtggctgcttggtacccggagactggctacacagccttctggcagaacaggtgtggcgtcttctcctctctggccatgatcggggtggtatggcgtatgtcttcctcctacggcgttcnnctatgcacgcggccaagggctgtgtgggaaacgtgcatcttgggggaggatgactccgatggaccaggagggaagaaaaaaatttacatacaacctcctccttcatgatagaagggagggaatgacgatccacgggaggaggggcgattccgggccggcaaccgccatagcccgccctcgcgcatcccttgttgggccctcccggggggcttaaatggtccacctttgggggccccgctaacaggggggtggccccttaccctctttaagggccccccccgcggggaaaaaacgcataagaggtttccccccatcccccgggaaaaattttggggccccccaagggggtgggggccaatttgtgccacaggcctttttttgtggccaaaccccccggggggaccatattggggactcttgggag

SEQ ID NO: 93883 - DNA, 511 bp, Homo Sapiens
tgcattgatatgaatagtttcactaattccattcatggttactgtaaacattcttaaaactttgttttatgggattatcagagtaacaaaataatgtagtccctttatggactataagtaacttaatgcttttctttccctatttcatatccccatatttggtgcaataatttaattcacttacttcattattttgttttgcattgtattttacacctacatttacactattaacttatttgtacatacttaaatggtttcagtgtgaaaaagcagcttctgacctagcattcacactaggcggtggcgttctcctgctgaacatttaacaattctcaaatctctaacatcagatgaggtcactgtaatccggataaaatgagatactgtaatcatgcctgagcacagataaaaacaaagtcactgtgcaaaccataaacagccaacctcttcttgtggctaacatgggtgactgttgcttctttcctttcctcccacccacaacataaaa

SEQ ID NO: 93884 - DNA, 534 bp, Homo Sapiens
gcggccgcctgaccacgcgggctggaggatcggacgtaccgccggtgccccaccaggagacgaaggcatggttgggatgcgcagccctcccacgaggcccatggcgccccagggccctagggattgaccgggacccccgactggcagagtccacctgcttgatacacttatttgagaagggaggcctgggactatcttactccttttaggaaaacccaactgtagctgctattcctttggttcaggccgcaaggaagaattgtaggttaccatgaatccatgaacccctctttagtatacaaagtccactttcatgacggaagaattggaaagctccctccagagttgtcagtactcaattattagcatataaaaagtcaaattttcccagggattttcagactttagaacctgctagtgacctgtggcctcagctttcttccagccactctgagtattgtaaaacaaagatattatcccaaccctgaaggcagataccagattgtacgccatggtcttctgtttcaaagggat

SEQ ID NO: 93885 - DNA, 429 bp, Homo Sapiens
ccccatcaccaaagacacctgtgcacaagtgtctgtcccttctgtcaccaacctagggcactacacccttcccaacatcatgaccctactgccaggtctacagattttgtaacactcaaagtgtcctgcattaaaaagcacgtgtctatttcctacgtgaaggggccaagggagccctggtggcccaaatatcttcacccaggactgggagggcggcctcgatgacaaccaaggggtggatgctgacactccatcccaggacaggtggctgggtaggattccctgagcccctgacagctgggacatagggccaggacttgtacccgaggcagctgggcagtgggcagtcacattccagtaggccctgaggaatccccaaataagtcacgctgggaggaaagtgagacaccaaaacagaaacatgccctg

SEQ ID NO: 93886 - DNA, 489 bp, Homo Sapiens
gcagaagtcttttgtccaggaggcaaaaagccagagattctgcaacacgaattcgaagcaaacaaacacaacacaacagaattcctggaaagaagacgactgctaagacacggcaggggggcctggagggagcctccgactctgagctgctccgggatctgccgcgttctcctctgcacattgctgtttctgcccctgatgctggacctcaaggagactccttcctctttctcagcagagctgtagctgactgtggcattactacgcctccccacacgcccagacccctcactccaaaatcctactggctatagcagagaatacctttgaaccaagattctgttttaatcatcatttacattgttttcttccaaaggccccctcgtataccctccctaacccacaaacctgttaacattgtcttaaggtgaaatggctggaaaatcagtatttaactaataaatttatctgtattcgtctttcaaaaaa

SEQ ID NO: 93887 - DNA, 791 bp, Homo Sapiens
cggcgagagagtatgaagtcgacggcgcgccgaattcggcacgaggactgcttcacctgcaagatgttccggccaccccgaacctcacactgcagtgtctgcgacaactgtgtggaacgatttgaccatcactgcccctgggtgggcaactgtgtggggagacggaactatcgcttcttctacgcgtttattctctccctctcattcctgacggccttcatcttcgcctgtgtggtcacccacctgacgttgcgcgctcagggaagcaacttcctctccactctgaaggagacaccagcaagcgtgctggagttggtgatctgcttcttctccatctggtccattctgggcctctcacggtttcacacgtacctcgtcgcctccaacctgactactaatgaagacatcaaaggctcgtggtccagcaagaagggcggtgaagcctctgtcaacccctacagccataaaagtaataatcaccaactgctgtgctgtgctctgtgcccccctacctcccagcctaattgaccggaggggatttgtgcagtccgacacctggttgcctcacccatcaaaaccaatgagccacctgccaaaccacccggaagcaccttttaggaagcccccctgaaccgggtctatatttgccccgctggctgttgaacctccccattcctggcgggacctccatttttccagggaccgaaatccaaaaccagtttttaatttttcccccgggggtttctgaagttcggggggccctgccccaaacagttccacctggcccgatc

SEQ ID NO: 93888 - DNA, 990 bp, Homo Sapiens
tacaatgagcacgtgattaaataacaattctccatggaattccgtcacatgacaaatgccctccagggggtagtggacggagggcatctagggtgtagggggaggtcggctgatatccaggaacactttgatcactggccaggcatggccctgttacccctcttccgcaccccgctcacttacctgggaggtagggggccacagagcacagcacagcagttggtgataatacttttatggctgtaggggttgacagaggcctcaccgcccctcttgctggaccacgagcctttgatgtcttcattagtagtcaggttggaggcgacgaggtacgtgtgaaaccctgagaggccccagaatggaccagatggaggaagaagcagatcaccaactccagcacgcttgctggtgtctccttcagagtggagaggaagttgcttccctgagcgcgcaacgtcaggtgggtgaccacacaggcgaagatgaaggccgtcaggaatgagagggagagaataaacgcgtagaagaagcgatagttccgtctccccacacagttgcccacccaggggcagtgatggtcaaatcgttccacacagttgtcgcagacactgcagtgtgaggttcggggtggccggaacatcttgcaggtgaagcagtacttcagcttcaccatctgcccgttgatcagcacctcccgggtccgagggggtggccggtatgtagaactgcctgtgttgtcgatctgtttctccagggcggctgcttcacagacagtggcccggggcaggatcccagggtcggtgaagcttgtctgcagcaggcagctcatgacgaaaaaaaagaggatggcagcgatgatggggatggcaagggtcagcttgcgagccaggtagggacagtcaaagacgaagaagaggccggtggtggtgaggatgagcagcagcgtgagcgcgaagacgccgccgtggccggccagcatgaggcggccgc

SEQ ID NO: 93889 - DNA, 1100 bp, Homo Sapiens
  misc_feature (48)..(82): n is a, c, g, or t
  misc_feature (402)..(402): n is a, c, g, or t
ggaaaccagtaaaccgagcgcagcgagttttgagcgaggaagcggcgnnnnnnnnnnnnnnnnnnnnnnnnnnnnnnnnnnncagtcgacggtaccggacatatgcccgggaattcggccattacggccgggcaaaaagacagttgtgaatctaatcataatatcacatgtaaagttggatatcccttcctggagaagaggagagatggtaactttccaaatatgtttcagtttaacacatcctatctcatggaaaatgtgaccatttatttaagtgcaacaagtgacagcgaagaacctcctgaaaccctttctgataatgtagtaaacatttctatcccggtaaaatatgaagttggactacagttttacagctctgcaagtgaataccacagttcaaantgctgccaatgagacagtccctgaagttattaagtctactgaggacatggaaaatgaaattaatatcttctacttgattagaaaaagtggatctttcccaatgccagagcttaagctgtcaatttcattccccaatatgacatcaaatggttaccatgtgctgtacccaactggattgtcatcttctgagaatgcaaactgcagaccccatatctttgaggatcctttcagtatcaactctggaaagaaaatgactacatcaactgaccatctcaaacgaggcacaattctggactgcaatacatgtaaatttgctaccatcacatgtaaatctcacttcttctgacatcagccaagtccaatgtttcgcttatcttgtggaaaccaaatttttataaaatcatattttttccagcttaaatcttactataaggggagaactccggagtgaaaatgcatctctggttttaagtagcagcaatcaaaaaagagagcttgctattcaaatatccaaagatgggctaccgggcagagtgccattatgggtcatcctgctgagtgcttttgccggattgttgctgttaatgctgctcattttagcactgtggaagattggattcttcaaaagaccactgaaaaagaaaatggagaaatgaaatattttacgaaagaaaataataacaattattcaataaaaa

SEQ ID NO: 93890 - DNA, 447 bp, Homo Sapiens
ttataaatgtttctaagaaaagtaaaagctcttttgaggcacaagataaagaggtttagctaatgagcagggtaacgaacctaactggaaaagtactgctaagggacatataataagaggtagcagattcagagagttggaggaaagtcactgaaatgatgaagttcttaatcttattatctctcacaaacccaaaataaatttaaaataattctaagtgattgaaaacatgaataaagaagtattttctattcatggaacaaatttcaaggtgatacaaatacagaaaacccacaagtactagcactaaaattataatgacattatttctataataaaaatttatgtcatattcttataaaggaaataattaaactagtctggaagatgctattaccttttagggatctgttttagcactgcagctcagaaaacagaaaggatttg

SEQ ID NO: 93891 - DNA, 531 bp, Homo Sapiens
aaaaattgataaactgtgcatacttcattcacaacagattttctatacattctacatttaaacagaagtacacagttactgttaaagatgcagtattatctctcagatatttgctttattactgttttttgtaaatttgtttgtcaggataaacttgatgtgttaggaattaaacatgtatatttaggtgccaaatatgattgttaaccatatgtaacttattaaatatgtttacagtttatctcagacttttacactaaataagcaatatttttaaatgaagtcttgaattagtgaaatcgtaaataacaaattaatttgaattcgttttgaactttttaggccaaaggcagcatgtaggaaactaacttttaaatgggtattgtggtagaatataactgtatatttttactgttactgcaatagcatctttaatgggatttttaggtgatatactgcatccttaattgtaattgagtgtagcaacactcatgtatcatgtgtagaaattaacacttgcagttaactgct

SEQ ID NO: 93892 - DNA, 312 bp, Homo Sapiens
tctgttataagctttttcttttttagaatttaagcttatgagtttatctacgcccactatattcataattacagttttatatctgcatacaaaagctatgtaaaaatccatttttcccaaatatacaaattttttttggatagtttaaaacattttgatcacagatttcaacagagttttaggctgaaaaaaatatcaccatctagcaatatcacttaacactgtttgcaaaacacaaatcttccaatgactgtaaatctttttctattctgtagtatttttctgattctcagggcatgaaaacattatggg

SEQ ID NO: 93893 - DNA, 802 bp, Homo Sapiens
tgcggccgcgggagccgagcttgcagcgagggaccggctgaggcgcgcgggagggaaggaggcaagggctccgcggcgctgtcgccgccgctgccgctcactctcggggaagagatggcggcggagcggggagcccggcgactcctcagcaccccctccttctggctctactgcctgctgctgctcgggcgccgggcgccgggcgccgcggccgccaggagcggctccgcgccgcagtccccaggagccagcattcgaacgttcactccattttattttctggtggagccggtggatacactctcagttagaggctcttctgttatattaaactgttcagcatattctgagccttctccaaaaattgaatggaaaaaagatggaacttttttaaacttagtatcagatgatcgacgccagcttctcccggatggatctttatttatcagcaatgtggtgcattccaaacacaataaacctgatgaaggttattatcagtgtgtggccactgttgagagtcttggaactattatcagtagaacagcgaagctcatagtagcaggtcttccaagatttaccagccaaccagaaccttcctcagtttatgctgggaacaatgcaattctgaattgtgaagttaatgcagatttggtcccatttgtgaggtgggaacagaacagacaaccccttcttctggatgatagagttatcaaacttccaagtggaatgctcgttatcagcaatgcatctcgacgagatggcgggctttatcgctgcgtagtggaaagtggtggtcctccaa

SEQ ID NO: 93894 - DNA, 440 bp, Homo Sapiens
gggtccatgaaggagccagtgcaggggttaggctgcgcagcaggagcgggtagggtatttatccaaataccaactgaattaactgggagcacatccactggccatatgttctgtaactgttcctggcataggcaacataaaggccaaagctgaagctgacataatgagaaggaagcagctggtgtttccaaatagcctgtttctcagtttacaaagatgcgattaaattgctagcagaactccccggcagccgcattcagcaggctgtgcctcagggcagggctggtgagatactcacaggtgctccaggccttccagccccgagaatgctctcttagccacagacttgatcttgtttccaaacagagtcctgtagtttccaaacatccagaaattaaggccagggaaggaaagcgaaacaggaagggttgagagaaaga

SEQ ID NO: 93895 - DNA, 302 bp, Homo Sapiens
  misc_feature (183)..(201): n is a, c, g, or t
gtcacgcaccgcacagccccttcctccgttacaaattccacagcagactgctcagcatagtatagtgctgcctctgaagaagccgcccaagtggattcgaaggcctgttggtgcttctttttcatttggaggcaaactggttacgtttgagaatgtcagaatgccttctcatcagggagctgnnnnnnnnnnnnnnnnnnnccatgtgttcattagtcagggtgtaacagaaaaggagttcctcagccgatcagaccaacttcagcaggctgtgcagtcacaaggatttatcaattattgcc

SEQ ID NO: 93896 - DNA, 520 bp, Homo Sapiens
tttctggatgtgagccactttaccccagacgaggtgactgtgaggactgtggataacctgctggaggtgtctgcccggcacccccagcgcctggaccgccacggcttcgtgtcccgagagttctgccgcacctatgtcctgcctgctgatgtcgacccctggcgagtccgagctgctctctcccatgatggcatcttaaacctggaagcacctccggggtggccgacatttggacacagaggtcaatgaggtctacatctccctgctccctgcgcctcctgatccagaggaagaggaggaggcagccatagttgagccctgattgccacagacccagcacccagcaaatccctctctacctcccaaggtgatatgggcagctgcccaccactccagaggtagcagcatccttgggggaagggaaaggtgcatggtccacaatgtatggtttggtcccatgggacatgtcatagccttggtttagttttgggtggagctgaataaacccaaatctcaggga

SEQ ID NO: 93897 - DNA, 694 bp, Homo Sapiens
  misc_feature (593)..(610): n is a, c, g, or t
tcttatgtgcactttaaagatagactttaggggctggcacaaatctgatcagagacacatatccatacacaggtgaaacacatacagactcaacagcaatcatgcagttccagagacacatgaacctgacacaatctctcttatccttgaggccacagcttggaggagcctagaggcctcaggggaaagtcccaatcctgagggaccctcccaaacatttccatggtgctccagtccactgatcttgggtctggggtgatccaaataccaccccagctccagctgtcttctaccactagaagacccaagagaagcagaagtcgctcgcactggtcagtcggagggcaagatcagatcctggaggactttcctggcctgcccgccagccctgctcttgttgtggagaaggaagcagatgtgatcacatcaccccgtcattgggcaccgctgactccagcatggaggacaccagggagcagggcctgggcctgtttccccagctgtgatcttgcccagaacctctcttggcttcataaacagctgtgaaccctcccctgagggattaacagcaatgatgggcagtcgtggagttnnnnnnnnnnnnnnnnnnattgtgtcctctaaggggacgggttcatctgagtaaacataaaccccaacttgtgccattttttataaaatgattttaaaggca

SEQ ID NO: 93898 - DNA, 673 bp, Homo Sapiens
gcggccgcggctgcggcggcagcagcactggctgggtctggctgcacagcaatggggctgatcatgtgctccactgtgtggattttgccatcttcaatcattttaggggctggagctgctggaaacatggaatactgagccccaatggcagggatggctactgtaccaggtttaatggcaactgggttgacggtagggatttccaaattcggcaccagttcatatcctttttcttgctgctttcctttcccttcatgatatcggctatatataccacggccagcagaatatcccccgaggtaggaacccctaggccctggggctctgttgccagctgcacctcgccctcggcctcttatgctgcctgctttcacaaagtagtccctgttgggcccaatgagcgcgttgtaggggtagccgtagtaggccagtgtgtaggggtcgcaggagtacacgtagctgggctgctgcgctgcctcagccgcgccgccgcccctggctgccttctggtagcgcgagtactgctccttgtccacgggcttggccagcgtgacctccaggcacgagccctccagctcagtgccggtgagagttgttcatggcatgcacggcatcctcgcggctggtgaagtgcacgaaggcgtaggtcgcggatcttcttgacgcgctccac

SEQ ID NO: 93899 - DNA, 478 bp, Homo Sapiens
cctatgagttggtcaaccacgccaagggactgccagactcctttcacaagccagcttctgacccaggcagctgaccttcaccatggacactacaggccctggaatggccagggtggaccaaaagccatgccagctgggcatgaccccaggcagccagccacaggctgaagggggcttgttggctgagtgatctgcagaggagaaagcagccccagctctgcccagaggaggcgctgaagtgggacaagcacaggaaagaaggggaccagtctaggaccccaacttgactcactctaaagctacaaccaaatggccttcgattttcaacctggggattaggggaggggagggtgccttccagggctctactcaggactaaccctaagggtgagctagtttctgtgcctctgtgctatgttttgaggctcccttacccaaaataatacccctgcctgcgtgatattctaccattcatttt

SEQ ID NO: 93900 - DNA, 733 bp, Homo Sapiens
gacgagaataacatttatttagcacttattagtttctacctttatgataatcattttaagcactttaacaaggttttcaatgtgcccccacatctctgcattccagccaccaccgtgcctttgtggagtttctcagagctaccaggctcctcccaccacagggcctttgcacgtgccgctctcatctgagacactcttctttggcccagttgctgggtaaggggtcccatcatggaggcaggctggagagaaatgggatggtccatccctggtgtcagaactgaacctgaaggctgcatgaggtatgaatggtggtgcatccaggatgggttaggtacttgtagaggagatgtctgagtcactccctgatacgaagacacaggagaggaaaggtatggggagagtgcagactgagcaagcatcctgttgggggtgatgttatagggggctgggtaaaacctgtgggaaggaacctcaatcagtactgagtcacaggaaaccacaagggaagggtcccaactgataggcacagccaacgttcccttgactttcaaatagagagaatcaagatgaatcatttgagtgtctggacacaggccattatcattttcaggtggcttgattatataaaaccttacccattctgaagagctgtggtggggtcataggtcaaggccatgacgcccatgtctgcattccttggccaagcccgtccattttgcacaattttcct

SEQ ID NO: 93901 - DNA, 1674 bp, Homo Sapiens
  misc_feature (1286)..(1286): n is a, c, g, or t
aaagagaaaatgctgctatccgtgacttccaggcccgggatttcgacttttggctacaataggaaacaacaagaagccatatgtgtcactggctcagcagatggcaccacctagcccaagcaacagtacacctaacagacagtagtggaagcaatggaaatgaccagctgagcaaaaccaacctatacatccgaggattgcaaccaggcactactgaccaagatcttgtcaagctgtgtcagccatatggcaagattgtttccactaaggccatactggacaagaccacaaacaaatgtaaaggctatggctttgtagattttgacagcccttcagcagcacagaaagctgtaacagcactgaaggccagcggtgtacaggcacagatggcaaagcaacaggaacaggaccccacaaatttatacatctcaaacctcccactgtcaatggatgagcaggaactggaggggatgctgaagccctttggccaggttatctccacccgtatccttcgagataccagtgggaccagcagaggtgttggctttgcaaggatggagtccacagagaagtgtgaagccatcatcacccactttaatggaaaatatattaagacaccccctggagtaccagccccatccgatcccttgctttgcaaatttgctgatggcgggccaaagaaacgacagaaccaaggaaaatttgtgcaaaatggacgggcttggccaaggaatgcagacatgggcgtcatggccttgacctatgaccccaccaacagctcttcagaatgggttttaacccagccccctataacatcacccccaacaggatgcttgctcagtctgcactctccccatacctttcctctcctgtgtcttcgtatcagagagtgactcagacatctcctctacaagtacctaacccatcctggatgcaccaccattcatacctcatgcagccttcaggttcagttctgacaccagggatggaccatcccatttctctccagcctgcctccatgatgggaccccttacccagcaactgggccatctctccctcagcagcacaggcacgtatatgccgacggctgcagctatgcaaggagcttacatctcccagtacacccctgtgccttcttccagtgtttcagtcgaggagagcagcggccaacagaaccaagtggcagtggacgcaccctcagagcatggggtctattctttccagttcaacaagtaaacagtggggattccccctccccatctttactgaatagaaatgaattctntggagatactcatgctcccagattccagagggttaaccaggaatggagaccatccgtcggccctgctaaggactaacacttagccatcgtttttcacaggcctgggcctggaaaaagaaatctctacgttcctgccctttactattgctgatggagcctgggggaaccatcactttttttgtgtgctacattcaaggagatcaaaaaaacttttcttcttttgcaaagaaagctttttgtttttaactgcaacgtacttttcccctaccttgaagagacatggtggtcgtagcttctcatctatatgaaaaagttttcgatgtattggaattatttgggaatgcttttaaaacaatttgtaattatttctttacaaaccaaaacagaa

SEQ ID NO: 93902 - DNA, 468 bp, Homo Sapiens
cgtctagaacagagaaaactaagatggggtcgtccccccagtaatctggaaaacagttacagcaacaggctcctctcatcagacggcagtgctggtcgtttcctcactggtttgcggggaaggctgggcagaaaaaggatgcaaccttgttctcaaccacttgctatctcgtgattcagggattggatgagtctctatggtttgttttgccctgaagagcagaaggcttctgtcccaactggtgttgccaaagcaacatattaattccatgccatgatcctgggtcaagatctgcacaatctgattgggcatgtcacctcggatggcaagggagtggaagtggtcaaaatcatggagtcccagctttcggagacgccttgcagctgcccggtgaagaaaatgcacaatggaaaccacccagatgtccagtgatagtggcatggacaaataaatgtggtataatcatga

SEQ ID NO: 93903 - DNA, 324 bp, Homo Sapiens
ctggtacactatctgacaagtgaaagtgacctgacagctcaggaacaaaatgaaaatgttcccatcatcagtgaagatacatctaaactgtatgctttgaaacaaagcagtattttgaaccagttgctactataagagtacttgaaaacctagaagaaactaccacagaagcaatttttcatgtttttctcctatgagacagatatgaaagaacaatttaaatttgaacatcaacaaaagattggtccttggtgaaataaacttttcaaaaatgaatgttcttttcaaaaaataaagtagaaaaatgcacttactaagaacatg

SEQ ID NO: 93904 - DNA, 328 bp, Homo Sapiens
cttaagatggacacagctgactggacccccatcctgcctcacccatgggtgctgcaccccagacccatcctgccacttctatgtctctggaccacaggatggtggtggcattgcaggttggcaagtgggctgatggggtccgccctcctcactgctgagctcctcacctggacagtctcctggacgaggagtttccagctgctggctggagtctcaggccaaattgcagagggtcctccagggtcctgaagagcactggactaagagtctagtggttccagggccctgaccagtaggtgctcaataaatgtttgttgttgaatgagaa

SEQ ID NO: 93905 - DNA, 938 bp, Homo Sapiens
cagtcgacggtaccggacatatgcccgggaattcggccattacggccgggcaaacagtctatagctccgtttcccttttttcaacctccacaagcagaaatttaaatccagtgaaagtttgggttttttgtaataagaagaaatattttcttattgaaacgacaacatttgaagctaatgaaagaatctcaccaataatgtatttttacactggattaaaccgctggcaaatagcctaatgtttaacaattctgtcataaattgtgcggaatgtctacttcctaaattggaaaatgaaataatacaacatggataatttaaaattcatacactgcctattttttttaaagattaaaatggtttacagtaaaaacatggatcaattatttttaaataaaaaggaaaattctgaaaacaactaataatgaaatgaagaataacaattccaaaacacttcagagatgatgtctatatgaagaaaagtattagcttattaatgtggctttgggtaaatgcatttccattgaaaacactacagtcattctggaagactgcgatgggagcaaagagcttcaacaatttaattacacctggttaagacttattaaatgtggagaatggtgtatagcccccatccctgataaaggagccgtaaggctgcacccttgtgataacagaaacaaagggctaaaatggctgcataaatcaacatcagtctttcatccagaactggtgaatcacattgtttttgaaaaacaatcagcaattattatgcttggacaggaaatttttctcaaaagatcctgaaaagtagctgcctgtgacccagtgaagccatatcaaaagtggaaatttgaaaaatattatgaagcctgaagtgtaactgatgtttttatatagtaaacccattaaatactgtgaaaataaccctgaaaaaa

SEQ ID NO: 93906 - DNA, 852 bp, Homo Sapiens
  misc_feature (635)..(692): n is a, c, g, or t
ggtattgaagaattaatagagaaacttcagtctggaatggtggtaaaggatcagatttgtgatgtgagaatatctgacataatggatgtatatgaaatgaaactatccacattagcttccaaagaaagcaggctacaagatcttttggaaacaaaagctctagcccttgcacaggctgatagactgattgctcagcatcgctgtcaaagaactcaagctgaaacagaggcacggacacttgctagtatgttgagagaagttgagagaaaaaatgaagagcttagtgtgttgctgaaggcgcagcaagctgaatcaccaaagagcgcacagtgatattgagcatctctttcaacataataggaagttagagtctgtggctgaagaacatgaaatactgacaaaatcctacatgggaacttcttcagagaaatggaaagtactgaaaaagaagaataaagatttacagatcacatgtgattctctgaataaacaaattgagacagtgaaaaagttgaatgagtcactcaaggaacaaaatgaaaaaagtattgcccaattaatagagaaagaagaacagagaaaagaagtacagaatcagctagtagacagagaacataagctagcaaatttgcatnnnnnnnnnnnnnnnnnnnnnnnnnnnnnnnnnnnnnnnnnnnnnnnnnnnnnnnnnnaggaagaaaccattgatatccttagaaaagaattaagcagaacagaacagataagaaaagagttgagcattaaggcttcctccctagaggttcaaaaggcacaattagaaggtcgtttggaagagaaagagtccttggtgaaacttcagcaagaggaatt

SEQ ID NO: 93907 - DNA, 417 bp, Homo Sapiens
tctcccccaccgccccaacacccacttgggaaaggaacgagcaaacatccctctaagaaagaaacctacacttgaatgatttaaattaaggtggatggaagttatttccctttctggcgcttgccagatttcaagaaaagctgaaaaatgggagcgggggagggaagcaacagacggctggagggcagcagcagaacaagcgaggggcagcagccgagttaaagtgggggccatccatttcgggcagaggagacaaatgaaagccgaccccgctgggatcacgtaggttcgtggctgcagcaaaagttgggtttcacaaagttgaaaaacagccggtttctcaaacaattgtgatttggaaggtttcgctgggtttgcccagatgtttacgaataaataagaaacgcagttttaaaa

SEQ ID NO: 93908 - DNA, 499 bp, Homo Sapiens
agccctccctgacccccaagcatgagccaagcatccactaggctctcccactccagccttgcccattctgggtcatcaccgtgggggacttgtttgtcatccccagtggactgtgagccccaagatagcagacctgaggctgtcactgtcatgactgtgtccccaggaccgcctaccactgggccgggcataaaagaggcactcgaggaagtgtttgctgagtgattcaatgtgtcagctccagagccagactgcctgtatctgggccctaaagctactgcttgattagtgatgtcaccataggcaaatagcttaagctgtatgactcagtttcctcatctgtaaaatggggtgatggtacctaataatacagtagagcacttaacacagtaggtggcacatggtaagccacatactgagtatgtatttgctatgattgttattgctattattactattattgttattattaacataaactgcacaagagcaggcaaaa

SEQ ID NO: 93909 - DNA, 469 bp, Homo Sapiens
gatgagggtctgggtacctcagtctcttgtcctgtttccctcccccaaatccaccattgtgaagttgccaaccccctgccgccttcccctgccaagtacatgttgtcagagtcagccctataatgttcatttcccctcttgtttgtgggattatggatctctgcagaaatctgcatgccaattaacccatttctaaagcagaatccattttgcatgtcacaatcaagatgtacttggcaatctaagacacactgggagactgtaagaggaattaatatagaaaagctcttaattataataacatttggaagaaatttttcctttgttttgtaaagtggctaaggttgtaggagtgtgtggtatttattaccttttaaatgaactgtaaatttgccttagaaatttgtttaaaaggctagcaagtgagacccttgaggatgatcatatactaataaagattaccaaaaga

SEQ ID NO: 93910 - DNA, 972 bp, Homo Sapiens
  misc_feature (13)..(13): n is a, c, g, or t
  misc_feature (108)..(108): n is a, c, g, or t
gcaccatggagtncaggagttcctccactcggcgtccaggtcggcttggttggcaaggcagcccttgagcacatttcggcaatagtcagggcagggcctggcgccggngactcccaggcagtgagcacagtagaccagcttcatgacagctctcgagcactccgggcccagggggacttgagccactttccggaccacgtcgctggccacgcccaggccctgcacaaaggagcgagcagccacgaaggcacgggtggcccgcaggcgcagctctctcggggcctccccgaagggccgcagcgcctcggcctgcttgcccaggcagtccaggtagtcatcaggcagcagcagctgggggtgcagctgcttgaagaggcgctcgagcaggcgggcccagaactcggccagcgtctcctccaggtgcaggttggcaccgcggtagtacaggcgcagctctgagtacaggtcccggaaggccctcgcgttctgcgtgtacagctctccgaaggcgccggggaaggtggcctgcagcgtccgctccgagtcgttcagcaggtgctggaagtggtcatcgaagctgcgcagctgggtggcaagcatggcctgcaggacgcggctgctgtcccggagcgcggtctccagctcggcatggctgcggttggccaggttctcctccatctcgctggtgcagcaggtgtagccctggggacagatccgcaggtgctcacccgagatctccgcctggggcacgtcgctcaggctgaagcccttggctccgtagatctggcggacctcgccgcagctccggctcttgctggccgggtccccgcgggcgcaggcgaccagcgctgcggccgcacatagcagccaccagcctcgggcccggagctccatggcggggccggcggcgcccccggccacccgcccgcgcctctctcggcctcgtgccgaattcggcgcgccgtcgattca

SEQ ID NO: 93911 - DNA, 518 bp, Homo Sapiens
  misc_feature (221)..(229): n is a, c, g, or t
tgggatttgggaagaggaaggcatccaagaggtgtggggaaaacattggcactctcggggctccaactgaactgtatttaaataagcagcaacacacacattgactccctaaggactaacgtaagtccatttgagggcctcctacttaaggttctaaggttgaagcagttttataattctacaaccctagttttttgttgttccttttttaagtacattcnnnnnnnnncaataagatggggacagggttggggcatataaaacaggtccctaaagagatgacagaccttgtccttttacccgtgtccagttaccagtaagtatacagtacccatctcccctcaatgaggctgtgtagttgtcttttccactgttgttcagtaagttccaacgattctaccttgaaataggtaacagtctttggaaaaagtcactctaggttgtacaaaggttctatgtatacgtctgttacaagtaacaaagctactttgcaagacccgcttctttccaaaattaga

SEQ ID NO: 93912 - DNA, 506 bp, Homo Sapiens
agatttcgcaaccaaaaaatatcgaaagtctctgtgtgatggaaaacatcaaggttaaaacacaaatgacagatatggaagaaaatatttgcagcacataaaaaaatcaacgagtacaattactttaggagaaaagcttgcttcagggtccttagagaaagtcactggggcctgccaagctgccacctaaagacaagagtgagagggctgagttcttccaggtcatcagagttgttgctgcccgtattaggccacacagtggaaccccatttatatcatagcagaagaaataggattatcaatgtgaactgcttagcatggtgcctggtatatacgagagctccacaaatgtgagctataatcctactagtaaaggatgctaagcagttccactgtggcaggtgtcatttgctagtagaatttgtaatcaaacaataggaggggaatctgtgaacgcctagaaaatgagcagaataaaggatattatctttggaagtcttaaaaaa

SEQ ID NO: 93913 - DNA, 421 bp, Homo Sapiens
  misc_feature (306)..(319): n is a, c, g, or t
tcatagtgaaggagaaatccttttcagacaagcaaatgctgagggaatttatcaccaccaggcctgccttgcaagacctcctgaaggaaggactaaatatagaaaggaaagaccactacacgctaatgcaaaaacatacttaaacacacagaccggtgacactataaagcaaccacacaaaaaagccaacataataaccagccaacagcacaatgacaagatcaaatctacacaaatcgatactagccttgaatgtaaatgggcaaatgccccacttaaaaggcacagagtggcaagctagatttnnnnnnnnnnnnnngcgagacccaatggtatgtcgtcttcaagagacccatctcacacataatgacactcatcgtctcaaactaaaaggatggagaaaaatctaccagacaaataa

SEQ ID NO: 93914 - DNA, 541 bp, Homo Sapiens
  misc_feature (436)..(436): n is a, c, g, or t
gcggccgccctatccccaccgcttcgactacccccagggggacttccctgccgaaatggggccccctcaccaccaccctggccaccgcatgcctcatcctggcatcaacgagcacccgccttgggctggaccccagcaccctgacttcggccctcccccccatggcttcaacgggcagcccccacacatgcggcgacagggcccgccccacatcaaccacgatgaccccagcctggtccccaatgtgccctacttcgatctccctgctgggctgatggcccccctcgtgaagctggaagatcacgagtacaagcctttggaccctaaagacatccgcctcccaccccccatgccgcccagcgagaggctgctggctgcagtggaggccttctacagccccccgtcccacgacaggcccaggaacagtgaaggctgngagcagaacggcctctatgagttcttccgagcaaaaatgcgggcccggcggaggaaaggccaggagaagaggaacagcggaccctcgaggtctcggagcagatcc

SEQ ID NO: 93915 - DNA, 749 bp, Homo Sapiens
ggctaggtagcgaggctgggtgtgaatcggcacgaggttagagcatgaactggccacttagaaatcctctcctcccagctcctcacaccctctgacacggtgcacaccctgcatccacaaaagtggagcctgttgcttccccgggcattcaccgaatgtagggaaagaatgaaagcaatggcaaagcctcgctacatgggcagcagttacgtctatcatcctaacatgtatcgtgtctgtatcccctagagcacagtgcagtgcccccagagggtgtgggggactgaatggccagaagatgaggcactcagcagattcccctgagcaacccagtcccaccagaacgcaccccgggcgaggaaaccctctgaaaacatctggagtttgaattccacacctgcagcttgacaaggtccctccttggtgcagaggaaaagctgctgcaattttcctagtacaagaaaaagagcaagcaagccctaggttgcaaccggtagggatgtggagtacagtgggcacaccaaggtggggtgagaggaaaacttcagttctaagtcccctcccagtgccaccgttacctggagtgtggctggaggaagagaggaagagaacaggggttgggagagatgcacaccacatatgaatgacatgcagactggtttaaagtaatgatggccactccttgcctctttgaagttgcatgtctatcactatttgatttcatggcactcttgaaaaacctctcaagt

SEQ ID NO: 93916 - DNA, 1354 bp, Homo Sapiens
cacgcgcgctccggaaggcgccctccagtgggaggttgctcaggggatggcggagctgtgaaactcggagctagaaggaaagtctcaacgcttgtctaaattttgctttgtcgtgacgagctacctagacccacgcagagctaacttgggagagcgcttgtgacgctacgaacctctcgaacacctgacgactgggcgccagggccggatggagggtggagagccagtgcggcgcagctgcctcctcttaaccgggacaccttgcaggaatgtgcggagtggagctaacgggagcggatagaaaccgagggaggggaagagagcgcgaaggcttggccggaaggagaggttaaaaaggaaaggcctaaaatgaggaagagagttaccacaacaagcagtacctagttccagttcttggtcccaggagtttgtggttgttgctgctttcatcttcctcagccaacacaaaaggaaagtgccaaggggcgattcctaggaccttcagtgcagtctccaccttgcggacttggctcatttgtgtccactcctttctccagccttttacacttgatgctcttggatgaatagaaaggagcacaattaatggaaaacacaagcttgggagtcaagggatttgggttctattcttgtcctcccttggtgacgacatcattaccttgggttattcaagctttcagtgccagagttcctatatcaataaaagattattacattgacctcttagagcaaactgttcttcatggtactgaattgcaaataaagtatgtgtagcgatgtgttaaacaaaaaaacacacgggcgcgcgctctacagtatccctccaggcggcccaaagtttaacacgtaacaagattcacttgtacaatgtggtccctatagcatgactcgcattataagctaggcactgcccgtcgtttccacacgtcatgactggcaacacggtacactcgggcaactcggtagaacggaccctaacttctgtggctgtgccatcacttggaccaccctaccctacaagacttacagctctacagcgaaaccctcaccttccacacctgtcacactggttacaccaaagctgcatatgcatgccgctgcacacattggcacacgactttctctcccaaccacttaataccgggccagagaaaaaaatataggcgaacaccagacacgccagccttgcacctgacacccgactcaagacgcccccaccgaattccatcacaataccaccacagcacccgaacacactagatacaactacataacgcatacacacgcacacgaaaggacgcagcctaccaacgccacagcaaatacacactcagac

SEQ ID NO: 93917 - DNA, 380 bp, Homo Sapiens
  misc_feature (88)..(97): n is a, c, g, or t
tgctgaaacctcaagagtgctgtaaggtacaggtttccatattgtgaacctgtgtacgcacacacacatatacatacagtcttagggnnnnnnnnnngcagaacttttgtaagtctgtgtaacattttaatattgtttgtaatattcactaggtgataatttcccctgtaccctataactgtaatcattcaccttgggttggccggtttgtcaagcttggtttactgaatcaagaaagagtcttgtcgaatgtggtactgttcttagtgtgtaatatttgcgtatggtgttcctctgcctcagaggacagttgcacagatggctagtgttaaatttctatagacgatggtaataaaatctgaatatatttaagtgctaaa

SEQ ID NO: 93918 - DNA, 438 bp, Homo Sapiens
  misc_feature (409)..(409): n is a, c, g, or t
gcggccgccctccgtggaaaaccggccaaagatctcagccttcctgcccgcccggcagctctggaagtggtcggggaatcccacacagcggcgtggcatgaaggggaaggcccggaagctgttctacaaggccatcgtgcggggcgaggagaccctgcgtgtcggggactgtgctgtcttcctgtcagctgggcggcccaacctcccctacatcggccgcatcgagagcatgtgggagtcgtggggcagcaacatggtggtcaaggtcaagtggttctaccaccctgaggagaccaagctgggcaagaggcagtgcgacggcaagaatgcgctgtaccagtcctgccacgaggatgagaacgacgtgcagaccatctcccacaagtgccaggtcgtggcgcgcgacagntatgagcagatggcccggagccgcaagtg

SEQ ID NO: 93919 - DNA, 458 bp, Homo Sapiens
cacaatgtaaacatggatgcccaccatttactttgtgagaaaaaaaacagaaaattatgaagccaccagcagccactttcaataggaagaaagatccagaacaaaggcttcggtcggtgtcacaacattgcactatctggccaaagaacttggactaccgatcaaatggaatattagcatgatactgttgaacactgggacacccgccatattctggatgattagagaaagggagaaaatgatagagccctgaaaagtattctttataatgatcagaatgcatcatcttcccccctccccacctttgccatatgtagtttcttttcaaagctattttcactatcacgtcttagtaaattttaagtgttcggagcagaaaacaaatactatgagctctgtctaataagaagtcaataccaataaataacatgttattctatgaaggaattcctactgaa

SEQ ID NO: 93920 - DNA, 439 bp, Homo Sapiens
ttaattttgaatgaggcatgtgaaaatatgttttgagaataaaaacacagcagaaaagattaagtactactgcctagttgctatcatgagattttcccaattctaagcatctgtttaacctgttcgtgtggtatatgaaaaagatacctaagcactagaatatccagctaaatggtgcaataggctaggaattgagccaggagaaaagagaagatatcccagaagtcaaaaaggcaaaatgaaagattgagttcgcccgtctttgttatggaaaggttaatgaaatcagaagaggattatgaaatataatgggaaaaggaatgatctggcttatgtaagacttacttttaaatatactctttggagttagtctcacaatgtccattcccctagctcctgtgctatgaatatcatattaataaatagcctaatatattaa

SEQ ID NO: 93921 - DNA, 592 bp, Homo Sapiens
tctcagaaaaatgtcagcttggaagtcacagttcaggaaatgaggtgtgtgtttggtgtcttacttttgagtggatttatgaggcatcctagaagggaaatgtattgggaagtctctgacaccgatcagaacctggttagagatgcaatcagaagggacagatttgaattgattttctcaaacctgcactttgcagataatggccacctagatcaaaaagataagtttacaaagttgagacctctcataaaacaaatgaataaaaatttcctcttgtatgctcccctggaagaatactattgctttgataagtcaatgtctgaatgctttgatagtgaccaattcctgaatggaaagcctattagaattggctataaaatttggtgtggtacaaccacacagggttatctggtttggtttgaaccctatcaagaagaatcaactatgaaggtagatgaggatcctgatcttgggttaggtggaaatctagtgatgaacttcgctgatgttcttttagagagaggtcagtatccctatcacctgtgttttgataagcttctttacaagtgtcaaattgttgtcagccttgaaa

SEQ ID NO: 93922 - DNA, 364 bp, Homo Sapiens
ccccccaccctaacatgcgatcttctaagaattttgcaaaattctaaacaaatatagagatggtatatagaattcatatctagaaaactttgattttaatgtgagcttatcaaatttgttctggcttttttggcactaaggcaaaaacatgttaaccagaaataatttattcttcatgtatgtaaaatatttgagaatgtttagccttttattagaattttatttggaaaatatttatctttctacacatgttacacttatgttcctttgcttataacccaatttcttaacttttttgttacttaagcaaatatcaattatgttttattatctaataaagtgtaagattcttactatctaaaat

SEQ ID NO: 93923 - DNA, 500 bp, Homo Sapiens
cagtgagaattggtggggcaagttgtcctgagaaaggctgtgtggcttttcttcagcacagacatttgggcaagcaactcagcataaggccagtgggtaccatcttctaaaccaggaccatcagcccaagagactcttctacactccagtatagggaggggcaaggttattaccatcctgccccttctcagaaccagtcccctgctgacctcaagttctcctccttgatcaccgtggccagagcatctcgtgtggaccatctaggctccttgggcttcaagcaggacctgagccacatgctccctgtacgagctgtgctatacctgtcccacatgagcacggagagcctcatgttggtgggtttccagagtgatgtgaaagcctctcaccccaatcctcggagactgagttccacaacttttttagtagctcatagtgttatttttctactctcttcatgaaactaactttattttataataaatatatatttacagtta

SEQ ID NO: 93924 - DNA, 644 bp, Homo Sapiens
cctggctcccagctggagataggaggcccaggtggcaggtagcaggaggcccagatcacccatcctcccctggggtcaggagaggccgagccccaggccactgtcactctttgtgggaggggacggggagtgaggttgggcagtgtggtggatgggcacccaagaagggttgaccagggaaggaggcagctaggctgtagatggaagatggtcctgggattcgaacacccgctgggatctggccagggtgctccctgggattcacagtcccttcccctctttgtgcccaagtgtttccctctctccctcaccaaaacaaaagggccatctctgccctgcacttgtgcagaaagtcagggatacggcaagcatgaatgcaatggtgtagagttgtgtgaaacccctagcatagagacagacagcgaagagatggtgtgaaaagcttgcagaaccagacagagaaccccacagactttccactccaagcacaggaggaggtagctagcgtgtgagggttggcactaggcccacggctgctgcttgggccaaaaacatacagaggtgcatggctggcagtcttgaaattgtcactcgcttactggatccaagcgtctcgaggataaataaagatcatgaaaaagaaa

SEQ ID NO: 93925 - DNA, 530 bp, Homo Sapiens
  misc_feature (391)..(404): n is a, c, g, or t
  misc_feature (407)..(444): n is a, c, g, or t
  misc_feature (446)..(470): n is a, c, g, or t
ctgtgcatgaaaatgttgaataaaatggcaattttaatagataaatgtaaatttgactgtgtaataccaaatggaaagtagctgaaccacacagagaaaacaaggctttacgtatctccaaatttagctgttttacaataaacaaagtattagaacatgtgaatattagaacctccttctaactggaaagatttcttcagtaagctataaccgaaattaatataaactaaaattataatttctaaaataagaattaacaaaccaaatttaagtatttttagtcagagattgaaacaaaataagcacagtcgatctagaaaccaaatatactgattatgtaactatcgtatcaaggtacagacattcttcacatgctacaaggttagcattnnnnnnnnnnnnnnatnnnnnnnnnnnnnnnnnnnnnnnnnnnnnnnnnnnnnngnnnnnnnnnnnnnnnnnnnnnnnnntgctcagccatacaacacccctccaggatgatagtataccagtgaggagcttacaatttt

SEQ ID NO: 93926 - DNA, 676 bp, Homo Sapiens
  misc_feature (157)..(170): n is a, c, g, or t
  misc_feature (173)..(210): n is a, c, g, or t
  misc_feature (212)..(236): n is a, c, g, or t
tataatttctaaaataagaattaacacaccacatttaagtatttttagtcagagattgaaacacaataagcacagtgatctagaaaccacatatactgattatgtaactatcgtatcaaggtacagacattcttcacatgctacaaggttagcattnnnnnnnnnnnnnnatnnnnnnnnnnnnnnnnnnnnnnnnnnnnnnnnnnnnnngnnnnnnnnnnnnnnnnnnnnnnnnntgctcagccatacaacacccctccaggatgatagtataccagtgaggagcttacaattttaatacaaatcagaatcccacagtttgactcgacaaaaaggcagttaaaaatttagcactcttaagatattctgaaggaaaatgaaatttcgaaagtatttcttgatgatcgaggctatggttatgaattataaaacatataccttacacactccattgtgtttgaacaaccagtcatcacagatgtagtagtgaggtagtattgttgtcccctcctcgggactgatgtttttatatgctgcccttccagaaaggtccaggttttaaaaataacattagttaccaacaaatgtatatttcggacgcgtgggtcgacgatatcccgggattccggccgtaccagcctgctttttttaaccacgtgttctatattcacatgca

SEQ ID NO: 93927 - DNA, 615 bp, Homo Sapiens
  misc_feature (158)..(454): n is a, c, g, or t
atatcagctcggtaccgtcaagccacaggactaaaggggagaatccagaacacactgccacacctaacagtgaccacagtgccctggggcttctgaggcagagccacctatgggaatctgagtcaggtgataaccaggaggtgaccctgcccgccttnnnnnnnnnnnnnnnnnnnnnnnnnnnnnnnnnnnnnnnnnnnnnnnnnnnnnnnnnnnnnnnnnnnnnnnnnnnnnnnnnnnnnnnnnnnnnnnnnnnnnnnnnnnnnnnnnnnnnnnnnnnnnnnnnnnnnnnnnnnnnnnnnnnnnnnnnnnnnnnnnnnnnnnnnnnnnnnnnnnnnnnnnnnnnnnnnnnnnnnnnnnnnnnnnnnnnnnnnnnnnnnnnnnnnnnnnnnnnnnnnnnnnnnnnnnnnnnnnnnnnnnnnnnnnnnnnnnnnnnnnnnnnnnnnnnnnnnnngcctaacaaacagataaggtaggactcaaccaactgaaacctgactttccccctgtaccttcagcccctgtgcaggtagtaacctcttgagaactctccctgaccagggaccaagcacagggcatttagagctttttagaataaaactggtgttctttaac

SEQ ID NO: 93928 - DNA, 1129 bp, Homo Sapiens
ttccaagatcatccttcacccgaggtcctgcccaagcacaggccagatgcaagaatggggaaaagtctggtcctgatctccaagtctcaacatcctatcagtgactctgctccctgaccacacatcggaagggctggatgaccccaatcaaaagaaagaacaaggactctggttacccttgcctccacccatgtgtcataagagtaggctacagaggtgaccaggcctggcagttgaaatctctggaagagggaacatgtggggactactcagaggcaaagaggagctgctcctgcctccatggttgctggccactcccaccaactactcttagggaggctaagcagtctctgttttgcttccatggctcaaataataccctgggtatgcaggacccactataccttgcatttgctgagtacacctagagagcttggctgtttccaaaaacaatcagggtcataaccatccatgcagacatggaggctcggctgaaccaggactcctcactgtctacctgagagaatgagcacccctcatccatctcagcatcaacacaatttccagggacctcaggtctacctcaggactgaacggccacacctcaagattcctcctccttgaatctgagactgcctgcccattctgagatgaggatgaaggtaagatgccgcatcacaaggcacgccgcccctgacagctgccttgataccagctctctgtgaaaaaccccgaggagttggatctggagaacagctgggcctcctcactcaggacttctctcctggaagaacacgcagggcgtaaaactgaggatgattcccctaatgcgttctgcttggccttatggaggagctgctccttccttacagccttgggggatggacttgcccacacctacaactcccatgagccctgtgagaggcacgaatgtctatgccaatgaggctcggtggggggctctcaagtgcctgatcctgccctgggctcagagccagcccagagggaagcaactgcacagccccacaggccctccttggcactgtccccccaaccccatctcagagctcagagggtacaagctccagaacagtaaccaagtgggaaaataaagacttcttggatgact

SEQ ID NO: 93929 - DNA, 730 bp, Homo Sapiens
ctaggtgcgaggctgggtgtcgaattcggcacgaggcctcgtgccgaatcggcacgaggccgtagtgcgaatcatgggaggcggctggtggtgggctcgggccgctcgccttgcccgtcttcgcttccggaggtcgctactgccgcctcagcggccccggagcgggggcgcccgggggtccttcgcccccggccacggtccccgcgccggggcttcgccgcccccagtgtccgagctggatcgtgcggacgcctggctcctccgaaaagcgcacgagacagccttcctctcctggttccgcaatggcctcctggcatcgggcatcggggtcatctccttcatgcagagtgacatgggtcgggaagcagcatatggcttcttcctgctgggcggcctgtgcgtggtgtggggcagcgcctcgtacgccgtgggcctggcggcgctgcgaggacccatgcagctgacgctggggggcgcggccgtgggcgcgggcgccgtgctggccgccagcctgctctgggcgtgcgccgtgggcctctacatggggcagctggagctggacgtggagctggtgcccgaggacgacgggacggcctccgcggaaggccctgatgaggcgggtcggccgccacccgagtgagcgacacggccgtggggcctggcaggcgctggacagcgcccgaggactgggacattaaacctgactcccctcctccaaaaaagaaagccg

SEQ ID NO: 93930 - DNA, 1670 bp, Homo Sapiens
  misc_feature (262)..(271): n is a, c, g, or t
  misc_feature (306)..(307): n is a, c, g, or t
  misc_feature (319)..(331): n is a, c, g, or t
tttcaatttataaaaagggtttcccaataaaaaaggggcgaattaggaaccatcccggtaatttggttctcaattttaagaaaaaacatagggcctttaaggaatcaaaaaagttaagttttccaaggctccggggcccagggattacaaacttccattatttccagaaaatgtttaaataccaaaatatttgactaacaggattattaattttggaagtttgtacatttttaaaaggccttttaatttttcttctttactnnnnnnnnnnctatgaactgatgacttcccaatagaaaattatanntaatttcagggnnnnnnnnnnnnnggcacatccaggcaccacattcaaggtgatcggtaaaacgcagtgtcccgggtctactgcacataatcaacagactgcaaataaactactccggaaaattctaaaataggacaagaatattctgtaaaagccgggataacacgactgcactgacgctctgctagagggctgttctgttgccaaggtgcgagcttcccagaaggagcagctgctggccatctaagcgctcactccccacagacgcttcccttccacggtccatcatctccgagccatcagaggctggaccgtctctccggtctgggcacacacctcgtgattgcagctctccacagcaccggggcgagcaagaggctgagcgtggtcacactcagtataaggaggtacacctcccgagagatgacgcccgctcttcgcgcccggctccccaggacaaaggaaaactcgctgacctgggcaagccccgcagagacgatccacttgatgtactggctgctcctcggcagaatgagagacaggaccagcgccgccaggagaaacttcatcaccaccactgacaaggtgaggaacaccagcaccgtgagctcgtacgccacaaacgtggggaacacgtggagccctatggaggcgaagaaaacgatggccaggaagtcgcggatgggttcgatggaggtggcgatctcctcggtgaccacggggccctgagaggagacgagcgctccagccaggaaacagcccagctccatggagacgtccagcagctccgtgaccgttaacattaagaagataaaggcagatattcccaagatcaggatttctttgttccccttgctttccatgtgcagcttccgataatagggtccaatgagatacttctttataacaagacataaaagaaaaaccgccgctagtgaaaaaagaatctgaccaatcaaaaccaggattcggagaacttccacgacaatgctagaagatgcactggcgcccgcctgtatgagagtcggcatgacggccatgaagagcccgagctgcacgtcctgcgtcaccagcatgccgaggagcacggtgctgtagtcaatgtcgccttctttgtcaccccgagcactgcccatgaggaacctggacacgaggggtgtgcttgacaaggacagacacgtggaaatgaagacgctctgcgtgggtttgatccgcaagagatgcccccacagcaagccaaatgcaatcattaacagtgtcatgtaacacggcccttgtaaggaaatcttccacacctttcttagcttttctggagaaaattctaagccaacaagaaaaagagtaaaaaacaccccaaattctc

SEQ ID NO: 93931 - DNA, 440 bp, Homo Sapiens
  misc_feature (108)..(108): n is a, c, g, or t
tgccatcgaccctggcagttccataacctggttctccctccccgtccttcggacccccccgcgtccttggccgtctacttggaaaaagtcgagcctctccccaccctncagtcgcatagacttatgtgttttgctaaaattcaggtattactgaattagcgtttaatccacttcctttcttcttcttctaaaatattgggcactcggttatcttttaaaattcacacagaaaaattccgtttggtagactccttccaatgaaatctcaggaataattaaactctagggggactttcttaaaaataactagagggacctattttcctcttttttatgttttagactgtagattatttattaaaattctttaataataggaaaaggggaaagtatttattgtacattattttcatagattaaataaatgtctttataatacc

SEQ ID NO: 93932 - DNA, 563 bp, Homo Sapiens
caaaggcttcatggtcctccagttgcttcattctcaaaatagccttcaaataaaccttcttccagtgcaaagcgtcctgaacagaatcatctatctgccagcccaaatttttacatgcagtctgccacacctctgtacaggcacttatcaccttattccactgtttagagacgaggcagcatgtgagtaaagtctgaggatcgagccattttaacaaataaaaactgagctccaggggaaggagtttgaggaagtcccgcttgaggagagtctctaggttattggagagatgcctgagctggactgccccactcagactaatcaggtgatccagagtttcatttttctgcaagtccgtcagagaaagaaatgtaacagaaatgttatcaagccatgtctcaaagtcctttctctccataaggttatggaaaaatttacatgagcgtagcgcccggggcccgggacctcgcgccgggttcacagctactaggcacgctcggaccgccagagccttgcagcggcctggtttcctccgcagccatggcgcccggacctgcggccgc

SEQ ID NO: 93933 - DNA, 943 bp, Homo Sapiens
gagcgaggcctgggtggcgaattcggcacgagggcggaccgggagcagcggccgcaggtccgggcgccatggctgcggagcggacccggccgctgcaaggctctggcggtccgagcgtgcctagtagctgtgaacccggcgcgaggtcccgggccccggggcgctcgctcagaaaaatgaaactctggatcacctgattagtctgagtggggcagtccagctcaggcatctctccaataacctagagactctcctcaagcgggacttcctcaaactccttcccctggagctcagtttttatttgttaaaatggctcgatcctcagactttactcacatgctgcctcgtctctaaacagtggaataaggtgataagtgcctgtactagaggtgtggcagactgcatgtaaaaatttgggctggcagatagatgatttctgttcaggacgctttgcactggaaaaagctttactttgaaggctattttgagaatgaagcaactggaggaccatgaagcctttgaaacctcgtcattaattggacacagtgccagagtgtatgcactttactacaaagatggacttctctgtacagggtcagatgacttgtctgcaaagctgtgggaggtgagcacagggcagtgcgtttatggcatccagacccacacttgtgcagcggtgaagtttgatgaacagaagcttgtgacaggctcctttgacaacactgtggcttgctgggaatggagttccggagccaggacccagcactttcgggggcacacgggggcggtatttagcgtggactacaatgatgaactggatatcttggtgagcgggctctgcagacttcactggtgaaagtatggggcttttatctggctggggacatgccctgaaacaccactcaccggggcacaacgggatggggtccacccaagggtagtt

SEQ ID NO: 93934 - DNA, 621 bp, Homo Sapiens
  misc_feature (476)..(476): n is a, c, g, or t
  misc_feature (504)..(504): n is a, c, g, or t
caggccacatctcttgactgctttccatgccagaccccaaagaggcaatgagactgagccgagacttctcccaaaggagaatattgttgggaacaaacaacactcatatccaaagtatgggggcagggagaggatatcagcaaggtgaacgagcccttccaaagtagatgacacaccagtcctggttgttaaagaggctggagtggagagggcaagctgtcactggatatgtccttagcagaatgatgtcggaattcaggtgggttctgtttcctgtccagcaggaggctgggcagttggaagtccttaactatgatgaatgaacaaccgggtgaccttcttcaatgggggctcaagccaggaagggtggccccagcaatctacgggtgaagctgcacacactggcctggtctgggtgagccaatggagccccaggtggattggtaggtatgtgggaagctcctgctgacaggtanagcatgttttcacgtgtacatactttantaatacgagagctcctctctcatagctgtggacttggcaatacatccagctcgtactcgctgaaatggaatgtcattacaggtgctgacacttaaagcctgcaaagtatctcactgc

SEQ ID NO: 93935 - DNA, 478 bp, Homo Sapiens
gcggccgccgtcggcgagtctggccgtcctcgcgtcgtgcctgggtgccagcctcccggggcgaatgagggacatgtttatcagtcccgcggggagaggagtgggggctcgactcgaatttcctcctcgggcaagacagggccgttcccccaccagctccatggacctagagagtccaggaggaaacgaacgctggttctttctttgcccgactctgccttaggcaccatctgacagcttccgaggccacgcggggggcggcaggacaggacaagccacagccccgccaattcccagaggctgctgcagctcagcgtccggctctatcacttactgcaattctcctccaattcttgaaaggtgatctcacagcctctgcttctgaggtcccactgtgaactttctttttctattgaaactaaggcatttactcacgtttgcttcttaacagttcaggcactgctagacatccgtctta

SEQ ID NO: 93936 - DNA, 688 bp, Homo Sapiens
  misc_feature (588)..(588): n is a, c, g, or t
  misc_feature (651)..(651): n is a, c, g, or t
  misc_feature (665)..(665): n is a, c, g, or t
tgcggccgcggctgtggtggttcccgcagagtggataaagaactgggagaaatcagggagaggcgaatttttgcatttatgtcggatcctcagtgaaaataaaagccatgatagttcaacatacagagatttccagcaagctctctatgagttgtcatatcatgtaattaaaggaaatctaaagcatgaacaggcatctaatgttcttagtgacattagtgaatttcgtgaggatatgccctccattcttgctgatgtattctgcatattagacattgagacaaattgtttagaagaaaaaagcaagagagactattttacacagttggtattagcatgtttgtatttagtttcagacacagttctaaaggaacgcctggatccagaaacactggaatcattagggcttatcaaacaatcacagcaattcaatcaaaagtcagttaaaatcaagacaaaactcttttataagcagcaaaaattcaatttgttaagagaagagaatgaaggttatgccaagctgattgctgaattggggcaagatttatctggaagtattactagtgatttaatcttagaagatatcanatctttaataggatgctttaatctggatcccaatagagttgttgatgtcattttagaagtgtntgaatgcaggccangacacgatgacttctttatatct

SEQ ID NO: 93937 - DNA, 508 bp, Homo Sapiens
tgggagacaggaacagggctcatcacagagggtggcgaggcttttgccagtagaacaagcatggaactccaatttgcacttgcatgtgtaggagtggccatctgagccgcagaccatgactgactgtgccacggaacagggcttgcacttgaccaaattcgaaggtccaacccagtgtttctggaccacgttccccttcttatgcctggggagcaggtgcttgcggctgacacacaggacggtctggtagtcctgggtcacacacactttgtgagggctgcattttaccttcaggcaggggtccttgaatgggtcaagggcttggtcaaagggcttgttgggattccagtttctgaaataatcatcgtctcgaaagcggttacagtacttgtcccggtcgtactgggagacggtgctcagccactggtcattgtctaggaaattgccgtggttggggcccgcgcatccggcgagcgcgtccaggtaccggctctataaaaaaagaaaa

SEQ ID NO: 93938 - DNA, 1154 bp, Homo Sapiens
aaaaagaggctggtaccggtccggaattcccgggatgggaggaaaaggaaccccgaggccggtgtggcaaccacagatttgtacggcaactgcactctgaggcattctgggacatctgcagctgcccccgaggcagctggtgtgtttgcactggctctggaggctaacctgggtctgacctggcgggacatgcagcatctgactgtgctcacctccaaacggaaccagcttcacgacgaggtccatcagtggcggcgcaatggggtcggcctggaatttaatcacctctttggctacggggtccttgatgcaggtgccatggtgaaaatggctaaagactggaaaaccgtgcctgagagattccactgtgtgggaggctccgtgcaggaccctgagaaaataccatccactggcaagttggtgctgacactcacaaccgacgcctgtgaggggaaggaaaattttgtccgctacctggagcatgtccaggctgtcatcacggtcaacgcaaccagaagaggagacctgaacatcaacatgacttcccctatgggcaccaagtccattttgctgagccggcgtccaagggatgacgactccaaggtgggctttgacaagtggcctttcatgaccactcacacgtggggggaagacgcccgaggcacctggaccctggagctgggatttgtcggcagcgccccgcagaagggggtgctgaaggagtggaccctgatgctgcatggcactcagagtgccccgtacatcgaccaggtggtgcgggattaccagtccaagttggccatgtccaagaaagaggagctggaggaagagctggacgaagccgtggagagaagcctgaaaagcatccttaacaagaactagcgctgcacatccgcctttcccaccgccctccctccccagctccgcctctgtcctcgctccacgtttcaggcaggcacctagcaattccatcacccgtacaggcaattccgtcttcttaatctgaagcttcactcactgtcaatgattattttcattacaatggaaacaatcttttttactctatgccccaaatatagcgttcccaacaacatccatgtcctatgtgtgactctaaattctttatttctgtcattcaaatgggtgatatcctg

SEQ ID NO: 93939 - DNA, 514 bp, Homo Sapiens
tctaaaacatgcttctctataggtgcaaagttataagatatttagaagaaaacatccatcagaatcttctggagaatatggtcagagtcttaaacaggcccagtgctgagttctttgtccacttagtcacacatcttttgtgggaatgggaaaggaaggagacagccaaactctgacaaaggcttttccttatagaataacccaaagcctaggtgagggttgatatataatgtcccatgatttaatatatgtggtttgggggaaaggacaagaaaaaactataattccacatataagaaggtagttgcccatttacaagttccagttatgtgtgtaaaacagaaaaattaagtaccaaacctattaggaaatttttttaaaaagtggatttaacttaaattactgtgtacttgaggttggctttggatatggattttctaaaaagtgatgttttattgtttatcatctaatggctgtaaactgtagtactagaataaaaaaaatggaaaatcaa

SEQ ID NO: 93940 - DNA, 975 bp, Homo Sapiens
  misc_feature (452)..(465): n is a, c, g, or t
aatggaatattagaacagttgttacaaaaaggaggctggtacggtcggaatcccgggatatcgtcgaccacgcgtcgctcggtgaaaggccttaggggtgtttgtgtgaggtggctgtagctagctacttccttacagatggtagagtattccaatcctcttgtgttagggttctgcttccagttgggatgtattaaaaccaccatttcactgcttcccttcctcaatatgctctgcagcttttcttgctgtttaaacctctcgcctcagctttatttatttgtaagctgcattactaactgcccagtgattcggtgaaagctttttactgaaaaagttaacatttctagtcatcccaatcaactggcttttttcaaccaaaattttatatcattctttgtctatcagatacgagaggaaggaagataatacgaagacatgttgaatagtgnnnnnnnnnnnnnngaacacaaaaactgggggcaagccaatggtgattgttatcactcactggtaagatgggcaaatggttttcatttttaaggattccgaatggtaaactagtggtggctagaaagcaaaccacccgccactcaaaccagtaattaccttaagccttaatatatttattaaaatacttttatgagaacattacctttgtgtaggttcaacccctgcggatacagtgtaaactatctgtgtcatgtgtcattctaatccgtgaatgggaatcatcaatttcaatgatggaatgcatggagtccagtcaaatcattgaaagaacattcggtgttgtttctgccaaataattgtttttgaaaccagattgttttgttgaggttaagggatcgtgttaggcaggggtgattaccctttcaagggtgtcaagggcttttttgggagggtaagttgtggacggctacggaaaggggccttcaaagaaaaaaatttgtggggccctgtttgtaaaagggg

SEQ ID NO: 93941 - DNA, 550 bp, Homo Sapiens
gcggccgccagctagttgagcgcaccccccgcccgccccagcggcgccgcggcgggcggcgtccaggcggcatggagaaggacggcctgtgccgcgctgaccagcagtacgaatgcgtggcggagatcggggagggcgcctatgggaaggtgttcaaggcccgcgacttgaagaacggaggccgtttcgtggcgttgaagcgcgtgcgggtgcagaccggcgaggagggcatgccgctctccaccatccgcgaggtggcggtgctgaggcacctggagaccttcgagcaccccaacgtggtcaggttgtttgatgtgtgcacagtgtcacgaacagacagagaaaccaaactaactttagtgtttgaacatgtcgatcaagacttgaccacttacttggataaagttccagagcctggagtgcccactgaaaccataaaggatatgatgtttcagcttctccgaggtctggactttcttcattcacaccgagtagtgcatcgcgatctaaaaccacagaacattctggtgaccagcagcggacaaataaa

SEQ ID NO: 93942 - DNA, 469 bp, Homo Sapiens
ctcagacacttctagggctggcagggtcagacagtaatcccccactttgtggggaggccctgtttttgctgaacagctcaagggcaggaagattctttcttccacacacccctgcaactgccaatacttgttctgtgtgacccttgcagccatcctatgcggtaggtgctaccattgccatggatcaagtggggacgcacagatccaagctccttcacctctcaagggagttgggccctcccacagatctcttggaggaaaaaaatggccttgctgggcctgtcgatttccagtccccacccacctccctcatgtacatgtgtctgtttgtgaaaccttcatagcaccttagcttccaggccctccatcccggctgcctctctggcacttgcccttttactgtgcgggtccaaagagacacctatgttcagtttgtcaaagtctgaaataagcctgtatttaaatttca

SEQ ID NO: 93943 - DNA, 140 bp, Homo Sapiens
caggtactttaaaagatagaaagatgctcatcctagtgacagaccaagagacaatacaacccaaattggacaattaaggtgccgtgattccctacaagtattgctttattcccttctgtagtcttctcgcagccgtatag

SEQ ID NO: 93944 - DNA, 590 bp, Homo Sapiens
gtgacagcgcgggagatggaacgactggagatgtactacgcccgcctaggctcccacctggacaggtgcatcatcgcaggcctcgggctgctcacggtgggcggcatgctcttgtcggtgctgctcatggtctccctgtgcaagggcgagctgtaccgccggaggaccttcgtccccggcaagggctccaggaagacctacggctccattaacctgcgcatgagacagctcaatggggatgggggccaggccctggtggagaatgaagttgtccaggtctcagagactagccacaccctccagaggtcttaagaactagcccaccttatctggctgctttagctccagtgctacaaggtccaccccctgctcccgcccacctgacccctgccaaggccctggggttttaaactgagctcacatagggcctcgtggaagaagtactgggtgctggagggagagctcggggcccagcccatgccccacacgggcaagcagcccactgatctgttttgtagctgaggttttgcatacggatttgtttggaggatggcttctgctgctaaaaatacaaaagtttggaaaccgct

SEQ ID NO: 93945 - DNA, 537 bp, Homo Sapiens
tttaaagaataaaaacatttattttaaaaataccatttagcatcaattgccccaagtttggcaggcatgaagagtgggcagttcatgttttattagtatataaaattggctttacaggaagcattatggcaaaaaaatgaatacttattatgaaaactgaaaaagagaagtgagtagtaagctactatcagaacgttaaggctaagaaaatgtcactatgcaatgaaaaccatctcctcctctaataagtactaacagaataggaggcttgacttacttgcatgctcctcatagaacgttttggttcatggctatgaagaggtaactgcaaaaagatgtgtgcagatcccggtactggtaggggatatacaagtggggaataagaaaaaagaaattaagcaaaatgtctttactcaaggatctctataaaaatttatttttaagaaagcatgagtaagcatgtatatttttttcctgtgactttaagtgtaatgacagcattaaaaataaattatgctgtcaatatacaaaaaatat

SEQ ID NO: 93946 - DNA, 557 bp, Homo Sapiens
gggcttgtttggagaagggaggctggctgggggagaaacccggatcccgctgcatctccgcgcctgtgggtgcatgtcacgtgctcatctgttgcacacagctcactcgtatgtcctgcactggtacatgcatctgtaatacagtttctacgtctatttaaggctaggagccgaatgtgccccattgtcagtgggtccacgtttctccccggctcctctgggctaaggcagtgtggcccgaggcttaaaaagttactcggtactgtttttaagaacacttttatagagttagtggaaggcaagttaagagccaatcactgatccccaagtgtttcttgagcatctggtctggggggaccactttgatcggacccacccttggaaagctcaggggtaggcccaggtgggatgctcaccctgtcactgagggttttggttggcatcgttgtttttgaatgtagcacaagcgatgagcaaactctataagagtgttttaaaaattaacttcccaggaagtgagttaaaaacaataaaagccctttcttgagttaaaaaga

SEQ ID NO: 93947 - DNA, 886 bp, Homo Sapiens
gcggccgccggggccgggatggcgacgcctcggccctgcgcggacgggccctgctgctcgcatcccagcgcggtgctcggcgtacagcagacgctggaggagatggacttcgagaggggaatctggtcggcagccctgaatggagacctgggccgagtgaagcatttaatccagaaggccgaggacccaagtcagcccgactcggccggctacactgcgctgcactatgccagccgcaatgggcactacgctgtgtgccagttcctgctggaaagcggagctaagtgtgatgcccagacccacgggggtgccactgctctgcaccgagccagctactgcgggcacactgaaatcgcgcggctcctgctatcacatgggtccaaccccagggtggtggatgacgacggcatgaccagtctgcataaggctgctgagaggggtcacggggacatctgctccctcctcctgcaacacagcccagccctgaaggccatccgggaccgaaaggcacggctagcatgtgacctgctgccttgcaacagtgacctgcgggacctgctatccagctgagccgccaccctatctccagctgcctttaaagggtacacagaccagttctccaagcccctgccttggtcagcatccatgctgctgggcagggaactgaggccagaccacccaggaagagccccagtctggtcactgtggaagcgagggagtagatttggtgtggctaaaagtgtttaagactggacagatgatcatattctaaattagttcatatgagacatctatttatttggaaaaaaataaagttatatccttacctcatcccacacccaaagataaattgcaagattaaagatctaaatataaaaacacaaaa

SEQ ID NO: 93948 - DNA, 634 bp, Homo Sapiens
ctgaaaagtgcttaagaaaatcttctcagttctccttgcagaggactggcgccgggacgcgaagagcaacgggcgctgcacaaagcgggcgctgtcggtggtggagtgcgcatgtacgcgcaggcgcttctcgtggttggcgtgctgcagcgacaggcggcagcacagcacctgcacgaacacccgccgaaactgctgcgaggacaccgtgtacaggagcgggttgatgaccgagctgaggtagaaaaacgtctccgagaaggggaggaggatcatgtacgcccggaagtaggacctcgtccagtcgtgcttgggttgggccgcagccatgatcctccgaatctggttgggcatccagcatacggccaatgtcacaacaatcagccctgggcagacacgagcaggagggagagacagagaaaagaaaaacacagcatgagaacacagtaaatgaataaaaccataaaatatttagcccctctgttctgtgcttactggccaggaaatggtaccaatttttcagtgttggacttgacagcttcttttgccacaagcaagagagaatttaacactgtttcaaacccgggggagttggctgtgttaaagaaagaccattaaatgctttagacagtgt

SEQ ID NO: 93949 - DNA, 115 bp, Homo Sapiens
cggccgcctactactatacggctgcgagaagacgacagaagggaagccttgccaagaactcgtaccctcactatctgcctaaataacttctatctcctgtgtcactaggagcagg

SEQ ID NO: 93950 - DNA, 561 bp, Homo Sapiens
  misc_feature (312)..(342): n is a, c, g, or t
tagttgatttgcaaactgtattggcatctcttggttttgagtgacccctgcccccctcaagtcttttgagaatttggagtgggcttcactggccattcagacaaagggccttattcataagtggacaggtttccccatagggaccatcgcacatatacatataagtacatacttccatcaggcttgtaacaattgatttaaaatcactccacagtattgataaatagctctatattttcaaggtgcagaagaattccacagccttaattatttcagtgtcttgctggtctgccttaagtgtatcttctgggnnnnnnnnnnnnnnnnnnnnnnnnnnnnnnnctgctgttgttcattttgtatgcacacaatgtcgttttgtaaaggtaggttgtaaatattttatttgtaagtcaaaatcactcatgtgtaatgttgtaaagtgatgacctgctgtcttgttactgctacagtaaatgttataagttatggatgaaacttcaaaatgtacatctcacatgttatgcattcctataaatatactatactaaagatactaaa

SEQ ID NO: 93951 - DNA, 776 bp, Homo Sapiens
  misc_feature (197)..(314): n is a, c, g, or t
  misc_feature (425)..(434): n is a, c, g, or t
  misc_feature (460)..(468): n is a, c, g, or t
  misc_feature (540)..(548): n is a, c, g, or t
  misc_feature (631)..(639): n is a, c, g, or t
  misc_feature (692)..(711): n is a, c, g, or t
tgcacatagctatcgagtgtgctttagcttgaaaaggtgaccttgcaacttcatgtcaacttctggctcctcaaacagtaggttggcagtaaggcagggtcccatttctcactgagaagattgtgaatatttccatatggattttctattgttactctggttctttgttttaaaataaaaattctgaatgtacacgnnnnnnnnnnnnnnnnnnnnnnnnnnnnnnnnnnnnnnnnnnnnnnnnnnnnnnnnnnnnnnnnnnnnnnnnnnnnnnnnnnnnnnnnnnnnnnnnnnnnnnnnnnnnnnnnnnnnnntttttaaaacaattacttttgccccgagaaccccttaaggaaaaagaactgggcaaaaaggggttcccaagaaaattcggggcccagaacaagggcctggaaattaaaccnnnnnnnnnnccccggggcggaaaccgacccctttnnnnnnnnncccggggggaaatccggagggccttaaaaggaattcttataaaaaagaggggccaggggaaacctccaaatnnnnnnnnncccgcccgccccagagaacacctctctccaaaaaaatgggtcgacaattcctttaaagccttttttgcgccaactggggaaannnnnnnnnaaaaaagggggaatgcggaaaccccttgaaatgggttaggggggcccttccgnnnnnnnnnnnnnnnnnnnntttagggggaagaagaggaatttctccgccccactgggaggagaaacacccgcgcgcgcggaaag

SEQ ID NO: 93952 - DNA, 471 bp, Homo Sapiens
gacataaatatgtgggagagtggaccacgcaaggacaaaaagaggagagaaggcagcaagaattatgactaattcaaaactgggttcctgagatagttaaataaatcctgcaccaaatccccagggggagaaattaacaaacaaaagacagccccacacggaccagtgtgcagaaggctccgggaaccgcagattatggttaatccaattctgtgcacctgaggtccataaataaaagaataagtattgaaatgaaagaatgacagaaagaatgaatggacacatgaacgactgaattagaaatggaaatgcctggcacagccaggaaggagctgcccatgggattgtcattcatctcactctgggcacctgaggtccataagcgtgaaaagaggcaggaagagaagtgtcagggagtcaaagatagagctaaggaaaggcaaaaatgaaactaaatgaaagcgaaaggga

SEQ ID NO: 93953 - DNA, 427 bp, Homo Sapiens
  misc_feature (34)..(34): n is a, c, g, or t
tcccggagcccctcggtctccacggacagccggnctctgggtggagttccgcagcagcagcaacatcttgggcaagggcttctttgcagcgtacgaagctacctgcgggggagacatgaacaaagatgccggtcagattcaatctcccaactatccggatgactacagaccttccaaggaatgtgtctggaggattacggtttcagaggggtttcacgtgggacttaccttccaagcttttgagattgaaaggcacgacagctgtgcatatgactacctggaagtccgggatggccccacggaagagagtgccctgatcggccacttttgtggctatgagaagccggaggatgtgaaatcgagctccaacagactgtggatgaagtttgtgtccgatggctctatcaataaagcgggctttgcagcc

SEQ ID NO: 93954 - DNA, 345 bp, Homo Sapiens
  misc_feature (96)..(135): n is a, c, g, or t
ggaacggtgtccgcagctcagcgtccctctcccatggactttctgaactttggtcttttaaccaggtttaccagccgctttctgcctctttgtgcnnnnnnnnnnnnnnnnnnnnnnnnnnnnnnnnnnnnnnnnaaataaagatgattatttggcccaggctgagggtgcaaacagaactcttcacgtgtccacgacaagaaaaatagtttttacaaacttctagttgtggcatcaaaagtgtgagtttttgcacctgcaaaattgtaatgcaagccctgactgggtggaagctgaagtcttgctgttttaaattaaataaataaattatttttctcctaaaaa

SEQ ID NO: 93955 - DNA, 499 bp, Homo Sapiens
  misc_feature (258)..(297): n is a, c, g, or t
gaggggctgttacatctgatcagggcaaaaggggctgtgctccttggacactttgcacagccccagtgggcttctttctcctctgttagtgtggttaatgttcatctgcctgcatccctgagtcacccaagtgtaacctcagccataacacgtactgcagccggaacggtgtccgcagctcagcgtccctctcccatgcaccgtctgaactttggtcttttaaccaggtttaccagccgctttctgcctctttgtgcnnnnnnnnnnnnnnnnnnnnnnnnnnnnnnnnnnnnnnnnaaataaagatgattatttggcccaggctgagggtgcaaacagaactcttcacgtgtccacgacaagaaaaatagtttttacaaacttctagttgtggcatcaaaagtgtgagtttttgcacctgcaaaattgtaatgcaagccctgactgggtggaagctgaagtcttgctgtttcaaattaaataaataaattattttttt

SEQ ID NO: 93956 - DNA, 194 bp, Homo Sapiens
gtgcatcttggatatctcttgttaatgtcagccctctgccccaaactagatttgaaaacttgtaggtaatcaagttttctggttaagagaaataatcccagccaacagttagtaagctcttatgtgtcaggccttatccaaacagttcacacgaagaccagatccaaaaataaaagtgtgctttgtcaaaaaaa

SEQ ID NO: 93957 - DNA, 275 bp, Homo Sapiens
acagtatagcattcctgcataaaacagagttgggtttattctcctgaaatgtttgagcaatgaatgctgagtaaatttcgatttgtagtcattttgtagagtctcttggtgtatctgcagatcttccagtgcagactgtgtaaatgaagatgtgagtccccggtttgcccattataccctttctagagccccagcagttctaagctcataggagatggcgagtttctacagagagaaacatttggagtttaaactgaaggatccagcttaacaaa

SEQ ID NO: 93958 - DNA, 569 bp, Homo Sapiens
acgctccttaggggcttgggaccttccacttggcactgagcatcttgtggggccttaactggctgagacatcccggccctctacatttgccctgttggccaggcagtccccttcccgcaattggagggcgacgctaacttcagaatcccatagtggccttgccgcaggtctggtgaggggtcttttttctcctccctcctttccacccctccgcgccctgccactccctggcctgccctgtttttgggtcaacattgctacggagccagcagtgaggcctttcccttcaagggctctgtggtatctctggccacatttgttctaatgtctgaacctctaaatcttttctttttgattggttttactgtttttaagaagccagcactgctgtctcatagatgggatttgtactcttggggcaacttaaagtgtctctctcgctgctaacagacgattgatgtcttgtctctgtgacccactcaccatgtaaagaattaacctcctatcttagcagacatcgtctcctaatatttccctttatttaataaaaatgttatggtgaagagaaa

SEQ ID NO: 93959 - DNA, 620 bp, Homo Sapiens
ttaaaccaggaaacggttctgtttttgggtgctatagcccgcatagatttcctgcagggaaatcagtcagcttggtttacagtcgtggcttccaacatcctccctgtgcatatcacctccttggacagggcagacgctctgtatcagaagcatgcaggtcatacgttactccagattccaatgggtggaaaagaacgaatggcaggatttcctcctcttgttgctgaagacattatgttaaaagaaggactgggggcatctgaagcagtggccgacatcaagttttcctctgcaggttgggtttcagtaacacctaattttaaggacagactgcatctccgaggctatacacctgaaggaacagttttgaccgtccggccccctctcttgccatatattgttaacatcaaaggacagcgcatcaagaaaagtgtggcctataaaaccaagaagcctccttcccttatgtacaacgtgaggaagaagaaaggaaagataaatgtatgagaccgaccttgttcactccagatattaactgtattgaacacaacaaaatacattgaatttgtattaaacatataacgcataaataaagctcccattcttacccttttaaaaaa

SEQ ID NO: 93960 - DNA, 799 bp, Homo Sapiens
acttcggagactgcagttgcagttgttccgtgtaggctgttgttgactctcgtatgaaagcccacgcgatccaagtgccctgcaggttttggtccaggaaaagttggtctctgcagatgactgtaaatgactacctggaggtcgattaaagtgcggtactgcgggattcagccgatttccttcttcctctgactgcccggaaatatcagccaaaggccagcgttctaaggacatatggaattggctatggataattcatatgctttcaatcaacgaagcacatgtaatggaattccatctgagaagaaaaacaacttccttgtatcagaagatcatggacaaaaaatcttaagtgtactacagaattttagagaacaaaatgtcttttatgatttcaaaataattatgaaagatgaaataatcccgtgtcatcgttgtgtgttagcagcatgcagtgactttttcagggctatgtttgaagtaaacatgaaagaaagagatgatggaagtgttaccattactaatttgtcctccaaggcagtaaaagcatttctcgattatgcctatactggaaaaacaaaaataacagatgataatgtggaaatgttcttccagttgtcatcatttcttcaagtttccttcctatccaaagcttgcagtgactttttaataaaaagtattaatcttgtcaattgtttacagttattatctatatcagatagctatggctccaccagtttgtttgatcatgcattacactttgtacaacatcacttttctttattatttacatccagtg

SEQ ID NO: 93961 - DNA, 574 bp, Homo Sapiens
  misc_feature (132)..(206): n is a, c, g, or t
gctaggtgaagaaagtttcagtattgatcctggaaaaaaagaagatctaagtaggatgggagaatgatttggcccacacaaggaagcaactttattctatatagctttaaaagtcagaactagaattgttcnnnnnnnnnnnnnnnnnnnnnnnnnnnnnnnnnnnnnnnnnnnnnnnnnnnnnnnnnnnnnnnnnnnnnnnnnnnatggaagttacaggatgggtactctggttttagacaaagaaagagcaatgactagattgctttgtgaagctcttggtagagacacgctccagaagggataacaaaatcaaatagtagatgggttcattgggcctcagaagttctgctcgtattttaggtgggtgtgaagtgaatttctatatgtccaggagtgaatacaacagaaagagttggatcttatttatttaattagggagttaaaacaagaccaaaaagactcaacagccgcttgaagccaagaactcttcaatgccagctactgccacctaaaaatcatctggctttatagtggatcagaataaaggttattctaactgtggggagaaaaa

SEQ ID NO: 93962 - DNA, 484 bp, Homo Sapiens
  misc_feature (47)..(121): n is a, c, g, or t
gcaactttattctatatagctttaaaagtcagaactagaattgttcnnnnnnnnnnnnnnnnnnnnnnnnnnnnnnnnnnnnnnnnnnnnnnnnnnnnnnnnnnnnnnnnnnnnnnnnnnnatggaagttacaggatgggtactctggttttagtacaagaaagagcaatgactagattgctttgtgaagctcttggtagagacacgctccagaagggataacaaaatcaaatagtagatgggttcattgggcctcagaagttctgctcgtattttaggtgggtgtgaagtgaatttctatatgtccaggagtgaatacaacagaaagagttggatcttatttatttaattagggagttaaaacaagaccaaaaagactcaacagccgcttgaagccaagaactcttcaatgccagctactgccacctaaaaatcatctggctttatagtggatcagaataaaggttattctaactgtggggag

SEQ ID NO: 93963 - DNA, 832 bp, Homo Sapiens
  misc_feature (366)..(648): n is a, c, g, or t
ggctaggtacgaggcccggttaatcggcacgagggaagagatgataaaacggataattcagtggtgatcttcagaagaattccacaaaaaaccaaattaacagatgaaacaatctcataagccacttgaaactgaatttctctagaacaagagtctataaaattttttgatcaaacacccactggaaaaattttttagcgtggacacccagtatttgaagttcttggtaaattactgtgagtaaagatttaaccaaccccttgtccttatctatgaacaaacttcactttgtgttaactttaacttgtcatagaaaccttatgaaggcagagtgttcattgtggtataaaacaacattggttgtannnnnnnnnnnnnnnnnnnnnnnnnnnnnnnnnnnnnnnnnnnnnnnnnnnnnnnnnnnnnnnnnnnnnnnnnnnnnnnnnnnnnnnnnnnnnnnnnnnnnnnnnnnnnnnnnnnnnnnnnnnnnnnnnnnnnnnnnnnnnnnnnnnnnnnnnnnnnnnnnnnnnnnnnnnnnnnnnnnnnnnnnnnnnnnnnnnnnnnnnnnnnnnnnnnnnnnnnnnnnnnnnnnnnnnnnnnnnnnnnnnnnnnnnnnnnnnnnnnnnnnnnnnnnnnnnnnnnnnnnnncaaataaataaaataaaacatagtcatggtaaaaatgacctctgacatgtgactgcctctggcttgaaagtctgaatatatcttaaaacacctattgggaagcataactttggctctgtactgtctcactgatgttgggactctaagaacaactccggacggtaccgccggcagatccagcaac

SEQ ID NO: 93964 - DNA, 823 bp, Homo Sapiens
  misc_feature (666)..(666): n is a, c, g, or t
ggcctgggtggcgaattcggcacgagggtcaggttccaggagtccttcgttccctccctggaacccggcggcattttgcacatccactcctcaccttccctgccttggtgctgccagcagcagacatagacgggtgcagaagcggggagctccaggtgcaggagggcaccggccggggcccacgccctctgcccgcctccctggggctccttcctgccacctcctcccatcacctcctgcggcagaacagcacccgtgacccacccagagagcaaggccaggggtcttggtgctccccgacggggcccggcaagttctctttcttctctctgggaaaatgaacgtccaggacacacctgtatcccagagagcaaagtgatgaggagactgagcgtccccagccccacctggcggcatggacacagaaaagctacgccggctggcctctccagaccagttcccaggctgggtctgccgctgggccctggggcggtggggacagatgttgacacaaattatttatgttttcttagtatcagaagaggattctcggcactaacacatagccagtcctaactccgtactctgtgtcagcccatcccctagacaccctctgtttcctttcccggccccacctggccggccctctgcccctgcagagctgangcagcctggggttgatggggaccacgcggtgcctgcaggtcctagaagtgagctgggcaggggctcttcagacacacagccctgaccggggcttgggaggagagccatggacaggctccctcatgccgtctttccttcttttgaaaatccctatcat

SEQ ID NO: 93965 - DNA, 490 bp, Homo Sapiens
tttgtttaaatttttttaataaaaatcttaaaacactttttttctaacctagactgagaaattcatgtttacttttctaggtgtatgatactttgtaaagttgatactttcctaagaatttaacatgtcatatttttgaaatagatttaagtgtgcttcttattgctaaaaatactaaatgtcatgggtcatagtatctgatatcaatatcgttgataacatatccacaggtaacaccatgatgtaggcataaatggaaaacaaaaaccctactatttcaaatatattgtacttttttatttctgtaagccaactgtgtgccattttcactggacttttaaatctagactttagtgatgtctacattgtaaatgatcttttgtggatatttgtcacttggtttcagaaagttcacaaatgtagcaacagctcacatgactgagtaggtagaaaatgtgaaataaatctcatatatatagttttgaaaaaa

SEQ ID NO: 93966 - DNA, 170 bp, Homo Sapiens
aggcccctgcccatctgcccctcacccacccgaggctctgcccaccgcctggacctgcccacccctgaaagactggcccctggctccccgcccctcggtctccacgtggtgtatggatctgtggtcattgtccctctgcagaataaagattgctcaggcctgcctggcaa

SEQ ID NO: 93967 - DNA, 623 bp, Homo Sapiens
caatttggttatggaagtactttaaaagaaaagttaaaaggcagacatagatagcatgaagcctaattgcaagatctttttcaaacatattagttttaggaaatagcacctgaatttaagtcccttaaaattgtctatgtcttcacgtccaagtctctatatttgcagggctgtgtacaatctagactgaacatgcttgacctaaaaacagaagtaatacctggggcaaagcacgatgtgcaccacagtcttctctctttagtgtgttaagataaagttgattcccagagtagcctgccatcactaactctgagggatggtgggctaattttgatagaaggagcagaggtggtagttaggaggaaggtgactcatcatcattgtatcagcaggcattgatgactggaaatatcagggggcacagcctgaaagagaatggcttaattggaattgatagtgggaacttggaaatcaatacatatgcactgaacagaaaatggtatgctataatctactatacactgtatgtgaaacccaagctccaaatttttcggcccatgcaatgtccagtaaaatttctcttagttacattataattgcaatgtacatgtatttgaggaaaa

SEQ ID NO: 93968 - DNA, 498 bp, Homo Sapiens
caggaacagagtgccatgcagccccggtactccttgttgttcctctcctggcgctcctagcctctgcccgagcttcagaggccgaggtgcctcccttctcagcttcatgcagggctacatgaagcacgccaccaagaccgccaaggatgcactgagcagcgtgcaggagtcccagtgtgcccagcagcgcaggggatgggtgaccgatggcttcagttccatgaaagactactggagcaccgttaaggacatagttctctcagttctgggatttggaccatgaggtcagaccaacttcagccgtggatgcatgagacctcaataccccaagtccacctgcctatccatcctgccagctccttgggtcctgcaatctccagggctgcccctgtaggttgcttaaaagggacagtattctcagtgctctcctaccccacctcatgcctggcccccctccaggcatgctgccctcccaataaagctggacaagaagctgtt

SEQ ID NO: 93969 - DNA, 582 bp, Homo Sapiens
gcggccgcccttctgcctgtgaggaagcagcagtgttcccctcctccttccgccgccttcccctcccctcccagagcgctaggatggacggtctcgcgggcgggtggtctggggtggaacatggtttggggaggtgatggacagggggcaactcctcggagggatggaagctcacaagagaacccgaggcggtggccgcagctggaaatgtggctgtggggtggggagggagcaggccgagcatgagaaaacccgggaagtgggttgggggaaaggggaaaggtggtaactggatcccaagagcagtgctgctcgaaggcccacacttttgagggtattcggggttattgcctgtcaggccttcactgttcttttcttggggaaggagcagtgagtccttaggtattgattaaaaaggaaggacattcagagttagtccttcttagttgggtgttaggagtcaaagggagacataatagaatactgtcttatttggtggcaggggtaagggaattttcacctgagttagcaagttaattccaaataagataattatctcttttccacttaacccccaaattc

SEQ ID NO: 93970 - DNA, 477 bp, Homo Sapiens
ttactgggcttttattggcaattacaaaagtaatagattttcttacataatacatttcttcagtaatatatgtttcaagtattttactgtagaatttctaaagtaccttgtcactgaccccataatttaatataaagtaggtcccataatcacattttttggaagttgctgaaactgagataaaaaaatattgctttcttatgggaaaaactggacaaaatacagaatagccaaaactagattcactggctcagttatgtctactaggtgaaagaaactgagtcttctaataattcattcagaatctgttactgtagaaattttaagaggttttgagtcagttccagtataaaaataaggccaaagtgctcctgtaaaattatcattaaaagtatagagaagagatctatcattcaaattataaaaggaaacttcattcatttcatagtctaaaaaaatgccaatcttactaggaat

SEQ ID NO: 93971 - DNA, 233 bp, Homo Sapiens
agactggatcctctgcaacactgttgcagtcctgaagctgggtactgctttcaccctccagaccctacagcatagccttagtgattaagacagagagctctggaagcctctaggatttggcaaattacttaacttctgtacgccccagttatcacatttataaagtaggaaaaataagaacccacctcacagagtttgttgtgaggatcaaatgagttaaaagcatgtaaaag

SEQ ID NO: 93972 - DNA, 435 bp, Homo Sapiens
  misc_feature (63)..(118): n is a, c, g, or t
  misc_feature (149)..(257): n is a, c, g, or t
agaactcctcaaggtctaaactgccgaatcgaacttcctattgtaatggaaatgttctatagnnnnnnnnnnnnnnnnnnnnnnnnnnnnnnnnnnnnnnnnnnnnnnnnnnnnnnnngtgtctagtgtgacgaagaattaagaatttnnnnnnnnnnnnnnnnnnnnnnnnnnnnnnnnnnnnnnnnnnnnnnnnnnnnnnnnnnnnnnnnnnnnnnnnnnnnnnnnnnnnnnnnnnnnnnnnnnnnnnnnnnnnntcaactgttttgcactcaacaaagacatacctctgagttggcaaccagcagggtggataacgggccagtggtgataaaatcaaagaataggtaatgaaacaatcatccagttaacaatcagcaaggttcttcagagcctaattaatgtttaattctaaataaattgcaacaattaaga

SEQ ID NO: 93973 - DNA, 382 bp, Homo Sapiens
  misc_feature (224)..(249): n is a, c, g, or t
tgtcactgcagtggtgcggtcctcaggcttttctgcctgtctttcccccttccttctcacctgacagcgagggagagggaagcctcttagggctggaagccaccacgctggccctctccttccccgaacacagcacacggtcaactccgcgggacacgaggacacgggacggcatctccagaattgcttgttacgtaggaagcgtgcattgttaaccagagtannnnnnnnnnnnnnnnnnnnnnnnnnaaactatgtcacatgaaatgaatgcgtctttgctgtctccaggtgcctttttattaattgttcagctttgtacatgggaaagatgaaaagcaacagtgtctgcaaataaagcaaaacagctctgagaacacaa

SEQ ID NO: 93974 - DNA, 538 bp, Homo Sapiens
catacaaattaacagggactgtgggtgacgtttctaacaataataattaaaaaacaacaaccctgcagcacatgtcagcctggcgttgggcaagtctgccacctttcttttatttcgatgtgtaatggttcacatgatttggatgagaaaaggagggatcaaactttatagacaaaacccagctgtgtgaaaaacaggattaatgccagtgattggggatgatcaaagagaaaccttactttttctcccccagtactcattccactaaagggcgaattggcagagttcggcatccctggggggaaagagaagtgctagaatcatgcaacgtgtgagtgacgataattccaagatcaaaacttacacacttaatctgctaactcttatggtgagggtttcttgccatagatgctatgtgggtctgtttctaagtagaatcactatattaccccagttaataaagaaacatggatttagcagatttaaggttaatattgtttaaatttaaataaccttaaaataaatctctttctcttct

SEQ ID NO: 93975 - DNA, 402 bp, Homo Sapiens
acccatcagagggcagccagaagctcagaaacagactgaatttgatctgattaatgtgaaggactggccagtctgggaaaccgcctgccacgtggaagagccaaacccgactctctgctgccacatgccgttcccatgcccggctgctgggcacctgggagagcttccagaatcctcgcagacagcccagagcctgccgctaccctcggcctgcccaccaccaagcaagcagcaagcaagatggggttctcatcagttcttcctcccacaatgtaggacctttcctttaccttccaatggataaaatagttcagagttcatagtcatattcatagacacagaatcaagcttttaacatatacatccacctctatatgttaaataaaacatcagattatcaac

SEQ ID NO: 93976 - DNA, 508 bp, Homo Sapiens
atgatattgagtcttctatctaagaccacgctttgcttttccatttctttggattttctttagtgcttttcagtaagggtttgtaattttcacttcacaatatagcttggagattgttccagatcacatatagagagctgtttattctctaaagagctacacggtgttccactgtgtggaatttattttaccaggcccctaatgatgtcctttgagggtatctgtgctttttttatactacggcaatgcttcagaggatatccttgaacttacttatttgagcacccttctaagtttatctgtaggagaaactcctagaagaaagattagggggtcaaagggtatttgcattctgtgagcgaacacaccctcccttccagagagggctgtaccataaaatcactttccttaaggtcaacaaatacaatcaggctttcattggattttcattctccttgtcttctttgcatcctcagagacttcaccatagactccttttggaaattct

SEQ ID NO: 93977 - DNA, 661 bp, Homo Sapiens
  misc_feature (544)..(602): n is a, c, g, or t
cagtcgacggtaccggacatatgcccgggaattcggccattacggccggggggcggcttcctgcacggcctggctgagccgcaggcggccgcgctgggccccgagggcggccgcgtggccatggacggcctgggcctccagttccccgagcagggcttccccgccggcccgccgctgctgcctccgcacatgggcggccactaccgcgactgccagagtctgggcgcgcctccgctcgacggctacccgttgcccacgcccgacacgtccccgctggacggcgtggaccccgacccggctttcttcgccgccccgatgcccggggactgcccggcggccggcacctacagctacgcgcaggtctcggactacgctggccccccggagcctcccgccggtcccatgcacccccgactcggcccagagcccgcgggtccctcgattccgggcctcctggcgccacccagcgcccttcacgtgtactacggcgcgatgggctcgcccggggcgggcggcgggcgcggcttccagatgcagccgcaannnnnnnnnnnnnnnnnnnnnnnnnnnnnnnnnnnnnnnnnnnnnnnnnnnnnnnnnnntccggaggcactgccctgccgggacggcacggaccccagtcagcccgccgagctcctcg

SEQ ID NO: 93978 - DNA, 762 bp, Homo Sapiens
cagtcgacggtaccggacatatgcccgggaattcggccattacggccggggactcagtccttgtctaaaagtaaatatgcctagctacccccatcttccaaagccagaaggtgaaactttaacaagttttctaaaagcaaattgtgttttttaaaagtgcatgtgtcatccaatcccatatgattgatctgtgctgggtgcagccttagaatgtaaattcttttgaattctaggcagagaatgcaggattggcattctaaatatttgtacatgataaacaaatgcttctttaggttagagcaaatagtttacttatcaagatcacaattgttagatactgttgtcaattacagaggttttagatgaggctttctggaatgatttagtttccctgtaagggagcctgtctattggaatagacaggttcacttctcccagtctttcaagttgcatgctttttatatctgattccactggctgagctgattgtgaatgtcctaaccctgttgattgtgtctggccactcatgggcaagaacagattatccattctttatagttgtcttttagttttacaagttgaaaaaacatctgagtaggttagataatttattctaccactttgtaaatgattagaatatgtcagtcataatcatgccaagagattatggatttatgcatattttgttttgctgtagtaccattcctagttgaatcttaacatccatgtctaaaatctatacagaacaaatattacagttgg

SEQ ID NO: 93979 - DNA, 409 bp, Homo Sapiens
agccagggccatcagcttccagtaacacttgactgaggttaagaaatttctgcagtcaatgaagctaggtccttaagaggaaaatcctcaggacagaaataactatttttgagaagagtatcctctaaactcactgaatagatgcaatgttaatgccaacgtaaacagcatgagacagacactgtgtaggctgtgaacagctctccgccctcttacctcatccagcaacgccaggtggacaggggtatggtcagtctgcagctgaaagtaccttggttctgatacagtccaatccacccacttcagcacacccattgctaccactggaaacctacagttaaggcagaatgcttcctttaaaaaacaatttaaaacacaaaatatgctagaaaagcattaaaggaaagtt

SEQ ID NO: 93980 - DNA, 497 bp, Homo Sapiens
  misc_feature (42)..(42): n is a, c, g, or t
  misc_feature (45)..(58): n is a, c, g, or t
cccccttccatgttagggcctgggcgagaagaggccaaaacnagnnnnnnnnnnnnnnactggttgtctccgctgcccttggctctttctgaggatcccgtcatgggggaaggtccttgagatgatgctcagctgtggggcgggcctctaagatgccccatactttgggggtctcagaaatggaacccccgttgtacaggggttgggtgggggttgcaggactccactcacaagcctcctgatgtcaaggacaggcggacagggctggcctcccccagtccccaagccccactgtgccttgttgtctgctggggggccatagctggcactgcccaccgtaaaggccctcgcacattttcccccttcctgtacacctcggggccagcatcctcaccttcttcaactgaccagtcgtggttactccctgctgccaggtccttccccttcccgggggtattctgtgaccatgaataaagttaccattctctttctctttc

SEQ ID NO: 93981 - DNA, 511 bp, Homo Sapiens
cgagctccccgccaggccacgccccagccactttgctccctctcacctctgggaagtgcaaatactcttggttgacatccccttcctcagccctcccagcctactccccatcccagcttttagaggatctgctccactgtctcctggggcagttgtgggtcactgtcccttccagctgccccagacaggaagcagagtcaccacgcagcagtgtcccttcttgggtctgagttcctattataggtaggggccccaccctctgggcttcccatcagcgacacacacacacttatggcaccagcctggactccagaaaaagggtgtccaggtattgtgtgtatgcatttagttgtgcacacacaaatatgctcctatactggcattaggcgtctcctcatccctcaccctgacctttctcctgtccttttcttggctggaagaagttggcctcctgggagtgtagttttctgttttaaatcccccacccctggctgggctcagtggctcaccc

SEQ ID NO: 93982 - DNA, 1251 bp, Homo Sapiens
ggcccccgggtgtcgaatcggccgagggactctgagggcgatagcagttggctcaggatgcactggaagggctcagagggctcctccatagtctgcaagggctccctgcagctgttcctgttcttccctgggagctgactgtcaccaagcacatactagcaagcaggtgcctacagacggggagggcaggagacgctgcagagcattacttggacctgctggccctgttgctggatagctcggagccaaggttctccccacccccctcccctccagggccctgtatgcctgaggtgtttttggaggcagcggtagcactgatccaggcaggcagagcccaagatgccttgactctatgtgaggagttgctcagccgcacatcatctctgctacccaagatgtcccggctgtgggaagatgccagaaaaggaaccaaggaactgccatactgcccactctgggtctctgccacccacctgcttcagggccaggcctgggttcaactgggtgcccaaaaagtggcaattagtgaatttagcaggtgcctcgagctgctcttccgggccacacctgaggaaaaagaacaaggggcagctttcaactgtgagcagggatgtaagtcagatgcggcactgcagcagcttcgggcagccgccctaattagtcgtggactggaatgggtagccagcggcaaggataccaaagccttacaggacttcctcctcagtgtgcaagatgtgcccacggtaatcgagaaacttactttcacctgcttcagactctgaagaggctagatcggagggatgaggccactgcactctggtggaggctggaggcccaaactaaggggtcacatgaagatgctctgtggtctctccccctgtacctagaaagctatttgagctggatccgtccctctgatcgtgacgccttccttgaagaatttcggacatctctgccaaagtcttgtgacctgtagctgccacgttttgaagagcttgagctgggtccccagtgggctgtctctctgtggggagggctttctgcttcaccatcattaggaatgtgaccattcctatataattcctggactggtgagattggtggtaggcctgtgaaatttgccctagttactaccattctcgttttggaggaaacaatctctgccaccaccaagtcattgactttgctcgaggcaccttttttcctgtttctccttttctgttgtcgagtaaaatttcatatttaaaa

SEQ ID NO: 93983 - DNA, 958 bp, Homo Sapiens
aaaggctaggtacgaggctgggtgttaattcggcacgaggctcggtggaagcgggaacccaggaggacctgggggtgtggcagcgaggaagggccgagccacggactgtggggccgaaactcgctcccgcccaccctttctcgaggctgtggcctccgcgagagccgagcgggccgcaccgccggccgtgcgactgccccagtcagacacgaccccggcttctagcccgcctaagcctgtttggggttgctgactcgtttcctccccgagtttcccgcgggaactaactcttcaagaggaccaaccgcagcccagagcttcgcagacccggccaaccagaggcgagcctcggccaccatgtcccgccagaccacctctgtgggctccagctgcctggacctgtggagggaaaagaatgaccggctcgttcgacaggccaaggtggctcagaactccggtctgactctgaggcgacagcagttggctcaggatgcactggaagggctcagagggctcctccatagtctgcaagggctccctgcagctgttcctgttcttcccttggagctgactgtcacctgcaacttcattatcctgagggcaagcttggcccagggtttcacagaggatcaggcccaggatatccagcggagcctagagagagtgctggagacacaggagcagcaggggcccaggttggaacaggggctcagggagctgtgggactctgtccttcgtgcttcctgccttctgccggagctgctgtctgccctgcaccgcctggttggcctgcaggctgccctctggttgagtgctgaccgtcttggggacctggccttgttactagagaccctgaatggcagccagagtggagcctctaaggatctgctgttacttctgaaaacttggagtcccccagctgaggaattagatgctccattgaccctgcaggatgccc

SEQ ID NO: 93984 - DNA, 1141 bp, Homo Sapiens
gggggtgtggcagcgaggaagggccgagccacggactgtggggcctgaaactcgctcccggccaccctttctcgaggctgtggcctccgcgagagccgagcgggccgcaccgccggccgtgcgactgccccagtcagacacgaccccggcttctagcccgcctaagcctgtttggggttgctgactcgtttcctccccgagtttcccgcgggaactaactcttcaagaggaccaaccgcagcccagagcttcgcagacccggccaaccagaggcgaggttgagagcccggcgggccgcggggagagagcgtcccatctgtcctggaaagcctgggcgggtggattgggaccccgagagaagcaggggagctcggcggggtgcagaagtgcccaggcccctccccgctggggttgggagcttgggcaggccagcttcacccttcctaagtccgcttctggtctccgggcccagcctcggccaccatgtcccgccagaccacctctgtgggctccagctgcctggacctgtggagggaaaagaatgaccggctcgttcgacaggccaaggtggctcagaactccggtctgactctgaggcgacagcagttggctcaggatgcactggaagggctcagagggctcctccatagtctgcaagggctccctgcagctgttcctgttcttcccttggagctgactgtcacctgcaacttcattatcctgagggcaagcttggcccagggtttcacagaggatcaggcccaggatatccagcggagcctagagagagtgctggagacacaggagcagcaggggcccaggttggaacaggggctcagggagctgtgggactctgtccttcgtgcttcctgccttctgccggagctgctgtcttgccctgcaccgcctggttggcctgcaggctgccctctggttgagtgctgaccgtcttggggacctggccttgttactagagaccctgaatggcagccagagtggagcctctaaggatctgctgttaacttctgaaaacttggagtcccccagctgaggaattagatgctccattgaccctgcaggatgcccagggaattgaacggatgtcctcctgacaagcatttggctaccgcaaggtctccag

SEQ ID NO: 93985 - DNA, 900 bp, Homo Sapiens
gcggccgctgctgcgcctggtggcgctgcagtcgctccagatgggcgacaaccggctgcgcgcgctgccggccgagctgccgcgcatgacgggcttgcgcggcctctggctctacggcaaccgcttcgaggagttcccgcccgcgctgctgcgcatgggccgcctgcacatcctcgacctcgaccgcaaccgcctgggcggcttccccgacctgcacccgctgcgcgcgctgcgcgtcttctcctacgaccacaaccccgtcaccgggcccccgcgcgtcgcggacaccgtgttcctcgtgggcgagggcgccgtcgagcgcatggcggagcgcgacgagcccacgccccggcctccgccccggcgcccagcgcgggcctttgaggatgaggaggaggaagacctgctcataggcggcgctggttcccgggctctgggcgcccccgggggcagcttccgcgccctggaagccgctccaggactgggcacctgagcctatgttctggctgatgggcttcagccactctgagaggaggggctctaggaagctttggctggttaggcctgcgggactggtgggtccctacttaggtcaatggaacggctacttttggcgagttgccgggcacaggcagggctggggctcatcttcagacactcctaggtagtaagaggactgactataccctggctgatctgtgggcaattgtcagaccaagaagtctgggctgggtccagtccccgatggagccactgataacagaggcaccagcttcctcctggaaccagggtctctgagggccacagaattgtcacgtctccctgagtctggatgcagggcacccaacaccctccctctttctggggtttggggctcctaggcccaccctttctaggaca

SEQ ID NO: 93986 - DNA, 378 bp, Homo Sapiens
gctgcctcgcccctgcctctgcagccaagttcccggaggctgagtgaaggggctgtgaacagttgccggaagcacccatcccctccccggcccgtgcagcagtgtctgagctgtagtgaaagtttcagggcctgcaaaagaagaggcttgggcacaggactgaccatggctccaggggtttaggacccccagacctgtgaaggtgggagcagctcaccaccttcacgcaggctttgtatgttctctgagccttagttgattttggcccccaaaccaaatccaaaggttctggcccaccttgtcagaggcttccaccctgctcacatgttgggaatccctggaataaaatgcttgttcagtgtgatggagcggcaaaaa

SEQ ID NO: 93987 - DNA, 646 bp, Homo Sapiens
tcatgctgcagtgaggtaacaagaccgtctgatgaaggagcacctgttcttcccggagcctatcagcaaagccattcccaaggctatggctacatgcaccagaccagtgtgtcatccatgagatcaatgcagcattcaccaaatctaaggacctaccgagccatgtacgattacagtgcccaggatgaagacgaggtctcctttagagacggcgactacatcgtcaacgtgcagcctattgacgatggctggatgtacggcacagtgcagagaacagggagaacaggaatgctcccagcgaattacattgagtttgttaattaattatttctccctgccctttgagctttattctaatgtatcccaaacctaatctttttaaaagatagaagatacttttaagacaacttggccattattttacaatgatgtatccttcctttgacaattagacacacaggtaccaggaagaaggaatgacctctgggctgaaaacagcagcattttcagtaattcctacaaacaaaaatctttgtgtctggacgcctggtgctgctaattgtgttcatggtttcctttgattggctattgaaccattctgggaaatgtatttttgtagactttaatagagaagttgattgtccct

SEQ ID NO: 93988 - DNA, 705 bp, Homo Sapiens
gcatagtgacatatagaaccagtggttacaaaaagcaggctggtacggtcggaatcccgggatatcgtcgacccacgcgtcgctttgcaagaaaatggcatacaaggcttgtaacgatcaagtgctaagtcgatggaaatgttaaggtagattaatcatatatgcagtatatattgatcacatggtccaaccagtccttttttgaagtaagggacaaggagtaagtattttcttgtcttaagtttctgccaaatgattttggacgctttcgtggaatcaagtaatttaatagtatagcttaattctagacaatgtttaagttggtctacctttattaaaaataagatatttggggtatattcaagtgcatggattagttttcctgacaaagcatgttttggtgtgtagtcttactttttagaaatagctatgcatcgttctacacaggtttaaaacaacttttttggggatttagggctattataggaatagtttgttgtcagaagcactttcacttgaagaacctaaaatgattgactcattcatagtaaatatgggcatgtaaactaataaatatgcactggatacatatatggatttatgaagaaggcgattgagatcaagaggatgtaagttaaacatatgtggttctctaagaatattccaggttacaagatattggtggcactgaatatttggtggcgt

SEQ ID NO: 93989 - DNA, 553 bp, Homo Sapiens
cactctaggatggatcatccacatccaactcaacctgcatttttatccagcgttgatctcacactcactgttcctatcaactcatgttgccagaggccattgccattgtttgctcaccaaagcataaagacactggcatcttcaggctcaccaatgctggcatgcttgaggtttctgcttgtaaaaaaaagggctttcatccacacaccaaggagcccaggctgttcagtatatgcaaacatgtgttggtaaaagacataaaaataattgtgttggatctgaggtgatatgttctgaatgtaagcaccgtcaacatcagacacctactcatggacatgtggttgccggattttcttaagatgtttccagaaatgactgatattttatatttatacattttagatgacaaagcttgatatttattgctgttgcacattttaaagttttctttttgggttgctctgtgtcaagagaggttacatggtgttaaatcggtacctgataatgtacccaaatactatggccagataataaattgtgctgcatacataaa

SEQ ID NO: 93990 - DNA, 443 bp, Homo Sapiens
aagatgtgggaggagtgagtggacccacaagcacggtcagttctccggcggctgcagcagggcctgtgtgggaaggcttagagatggtgagtcaggagaggtaaggaggggtggaaactatgaccatatccttaaaaagataaacaacatgcatgtggatggctttgccaccaactagctgtgatcccaacctgttagatgggaaaaggaggtgccttcttggccaagtgaaagaaaggcttgctgtctgctctaagcccagggaaccaatggggaaagaataagctaaatgtgttaacggattccaaattacttaaagcctttatgggaacacggtagattgtaggtaactagatagggttgccagatcagtttgatttgactttcagtataatttttcagtatatgttccaaaaattgcatgggatatgcttatactaaaa

SEQ ID NO: 93991 - DNA, 448 bp, Homo Sapiens
aggatgacgtcagatacaaatatggcgttttggacgggctcgatagtttgcttggcctctactcaaggaatgctgatggtatagcaagaaggtattctgagcattatatcaatggggaagttatagatcttttgcaaagcaggagcaagctgccctgttgtgagctctccggtggagagccccacatggcaagaaaatgagaagccccctgaacagacaagagctgaggcccaggatacaatatcctgaaaaaaactgaatcctgctgacagttgcccaagtgaagctggaagtggatctttctgcagtggatccttgagatgactgtagccctggctgacaacttgattgctgcctgtgaaggaccctgaaccagaggactcagcgaaattgtgcccagattcctgacctacagaggcagtgagataataaatgctgttgaggtccc

SEQ ID NO: 93992 - DNA, 517 bp, Homo Sapiens
cctcagcagtgtcacgacagctgaagtgtcacttattcctcatcctgggcacaccatgatggagtgcagccccactgattgggacccatgcagccagcctggcccagggccactctctctcccagaatgtgcacaagtcaagggatctctacttccatccttattttcctcaaaagctggtgccagcagtaatcaaccagacttctagaaaagaggagataatctgctctcaaggctgctgtgggctccagtgttgtaatctactacttgaatctagttgtttatttcattctataataatttaatacagcagatgtcaggagaaatctttgtttagatattatgtcatatctggatatatctgaatcctgaatgattaatctaaatattaacaatattcacttctgccaatgtcaagagtattttctgctactgggcttaaatcaattttaaaatttgagagttttaaaagcatatctttctgtgttcataaataaacagaacgaagattctttga

SEQ ID NO: 93993 - DNA, 555 bp, Homo Sapiens
  misc_feature (20)..(20): n is a, c, g, or t
  misc_feature (451)..(514): n is a, c, g, or t
caggcgcaatttgtatgggngacaccctatagaacacgttgtatcaaaaagcaggctggtacggtccggaattcccgggatatcgtcgacccacgcgtcggtgggggacagtagaagcctggaggaggagcttgagtccagccactgtctgggtactgccagccatcgggcccaggtctctggggttgtcttaccgcagtgagtaccacgcggtactacagagaccggctgcccgtgtgcccggcaggtggagccgcccgcatcagcggcctcggggaatggaagcggagaacgcgggcagctattcccttcagcaagctcaagctttttatacgtttccatttcaacaactgatggctgaagctcctaatatggcagttgtgaatgaacagcaaatgccagaagaagttccagccccagctcctgctcaggaaccagtgcaagaggctcnnnnnnnnnnnnnnnnnnnnnnnnnnnnnnnnnnnnnnnnnnnnnnnnnnnnnnnnnnnnnnnnccgtgtggagtcaaaaaaatctgggcaagtctgcaagaatc

SEQ ID NO: 93994 - DNA, 348 bp, Homo Sapiens
gaaagtgagttacatgagcatgcagcataccttgtggatagcatgtgggactgtgctactgagctgctgaaagactgggaatgtatgaatagcttgttactggaagagccacttaatggaaaagaagcactaacagataggcaagaaaatgctctgattgaaataatgctttgtaccattagacaagcggctgaatgtcatcctcccgtgggaagagggacaggaaaaagggtgcttacagcaaaggagaagaagacacagttggatgataggacaaaaatcactgggctttttgccgtggcccttccccagttattggcaaatactcctttggatgcagaaaggttg

SEQ ID NO: 93995 - DNA, 513 bp, Homo Sapiens
gggcttttaggatgcgctaaagggtcgtgagggctctcttaaaattttcttcacaagcggttatccagtcgtgccccgcggccctgctgctggccccggggatctgagtcgtaccctcttgtttttctctgagtcagtcttaaggtgaaatgaagtgtggcccagtggctcctcactgtcgcttctctagttttctgcctccttttagaaaattgaattgaaaagacaggatgaagtggacacagcatgtgaagacaattctttcaagaagtttggctgtcaaggaaaacagagaatgtgctaaagaacatacagacacagagcagacaggccacctttgcaaccacatggaggtttgtctgatattgaagctaaagaagctaagctggaagacagagagaccaagtcctgatgacattgtttgaacccagagatccagacatgcctgaaaactagttttaccactggacttatccgttgaatgagccaataaactctcttaaaaacttaaaa

SEQ ID NO: 93996 - DNA, 850 bp, Homo Sapiens
ggggccgttgctgggggaatgcagaagcggccgcgggctagcaagctcccggagccggcggcgcaccaccatgacccagtcggtggtcgtacaggtcggccagtgcggaaaccagatcggctgctgcttctgggacctggcactaagggagcacgccgcggtcaaccagaaaggaatttatgatgaggcaataagcagcttctttagaaatgtggacaccagagtggttggtgatggtggaagtatttccaagggaaaaatatgttctttaaaagcacgagcagtcttgattgatatggaagaaggggtagtgaatgaaattctgcagggaccactgagagatgtatttgatacgaaacagctcatcactgatatttctggctcaggaaataattgggccgtgggtcacaaagttttcggcagtctttaccaagaccagattttagagaaattcagaaagtcggcagagcactgtgattgcttgcagtgtttctttataatacattccatgggaggaggaacaggatctggacttggcacatttcttttaaaggtgcttgaagacgaattcccagaagtatacagatttgtgacttccatttatccttctggtgaggatgatgtcataacctcaccttataatagcatcttgggcaatgaaaggaacttaattgagcatgcagaactgtggttttgccccattggacaatcaattcttttatttggaccatccttaagcacaaatccgaccctcaggggggaaattctgggaaaagggttggggtacccacgtgtggaaaggccacaaacaagcccggggggtacctctccaagggttcctgggggagcc

SEQ ID NO: 93997 - DNA, 923 bp, Homo Sapiens
gcggccgctctcccgggatgaggagcgcgcggcgccgcggcctcgcgacgcggagcgctcccgggacgatgaggcccggtcctcccgcgtcgggggcggctgcaccggcggagtccgcctccccctcttgtacaatgccagctcgctggtcagcgtcttcagccgggcgcgcaggctccgctccgatgccttcgcctcctcgagctccttggccagacggcggcagtcctggccgcgacggccggccaccctgtgcccgaggccgcgctcctgccgcagctccagctccagcccgcgcaccagcccgcgcagcgcctcggcctcctggcgtgccgcgcgcccggccagcgcctcctcgcgcgatcggcccagctgcgcctccagctcccgcttctcggacgccaggcgcgacacctgctcccgcaggtgccagatctcattctccccggtgtcccgagtgttctggccatccagcccttgcaggcggcaccagttcctccattcagtgaccggatgatgacctgcagaaccacggggtctggcttgccctggtacgggaggggcagcgggtagtgaatcctgtcaaactccacggagtagatgaggatcaggtagcagcttggagttgagctgggccgacctgggggccaaggagcctgggcggccccccatcttgcggttccgcagggactccaggtctgtgtaggtcagcaggtccagggtgactgactcactactagccagcatcgaactcgccccgccactggtcagccgtcatccggtcctccacctccagctccagcacctgcccagaaaccatcacccgcacggcatgctccacaccccggaagacgtagtccacctgcaggccagccggctggtccatggccaaggttgcttctccactagcaaccctcctcgcg

SEQ ID NO: 93998 - DNA, 785 bp, Homo Sapiens
ctcgcgaacgtgttatcctggacccaggaccctcgcgtcctggtccacccacctcgtctactagtgtcccacagtgctgcgctagtcccttctgccacccttcccagccccaggacgggccctggagggagaaaggagcctgtgccccctgatggctctggctgtcctgatcctgtcttccctcccctgaaggaaagtttgcactggattttattggagccccatctccccagcgggcaggcgggcggagcctgtatatatgtatatactcagtgcctcagttcagcttcctccacctcgcttccactgcacaggcccaggaaggagaaaggccaagccaaagtgggccccaccctgcccccgtcgtgctccatccttccctgccggggcctgctggcccctgtaaggtcccgcccccaaagaccctggggccagcggggccgaaagcggagttgggtttgccctatcttgctcattggattcaagttcttttgcatagttttcttctaacccctgttggagtccaggggctggagaaaaggacagatttatgcagctattttcatacattccctgttcagagtggggtaggggttatccgccgttacccgatccactccatcccccaccctctgaggggtgagtgtgtctttgcatgttacctttgctgtggtgggagatagtttgactgaacccccaccttgaccttggtctccaggggtgtggaatggtgggggaatttgtttaaaaagacattttattataataaagtctattttcacaaa

SEQ ID NO: 93999 - DNA, 475 bp, Homo Sapiens
caagctgctcaccaccatggtgtacctttcccagccagggacggtgctgctttgggcaaacaaattcaggttcagcaccgactatgaatttttagataaattcaagcaagtttttgacacaacactgttggctgaatatccagagtcatcagtcaaactttttaaggggatactaaaatgggactaaatccaacaaaatgcctttcacaacgttactgtgtcttttgagcaatgtgttagaaattgctttggtaatagacttctttcacaggattgagaaggtagtgcatagaaacaacttgtatacttggaacaaatgtaacaatactgcagaaactttctaatttctaagataatttaagattatctggttaatctaaatatctaaaaagaacaacataaaaacatgaaagtagctttgttggttccaacgaagttacatgtttaataaatccttccttgtttaacttaaaaa

SEQ ID NO: 94000 - DNA, 613 bp, Homo Sapiens
  misc_feature (43)..(43): n is a, c, g, or t
  misc_feature (55)..(101): n is a, c, g, or t
ctcagattgaagagctacattcagctgatagttgacatctgtnccctcacacgtnnnnnnnnnnnnnnnnnnnnnnnnnnnnnnnnnnnnnnnnnnnnnnncggaatcttcggttgaatcatcctggctgtcctggtgatgcttcttatgtgcagctaggctggagaaccactacagggctgacacctggaatgggagcttgtaacttttacaaaataatagatgtttatcatcttttgcaatttttacttttaagtctatactaaaatgagccaaagaagtcttaacaatgatgtatggcacaattggttggttgaggctatcattccatgattacaaataggtggttatgtggggtggttttgcacttgtggcaattggactgcaatttggccttaaaatgacacaattcctcgttctcagatggagaggaattgccttgaaatttgcatgtaccagactaagtgccagtatatatatgactgatattttcgtgactcatagaaggtgtccatggtatagagtttatgcctacatctctatctttattttgggcacacatgagcttttgttaattatttctttgtacttgttagaatctgtttttgaaaaa

SEQ ID NO: 94001 - DNA, 1030 bp, Homo Sapiens
  misc_feature (65)..(150): n is a, c, g, or t
  misc_feature (245)..(283): n is a, c, g, or t
gccgtaccatgcggacggggaggacggggccaggggactgcagggcggctgcaccgcccgggggnnnnnnnnnnnnnnnnnnnnnnnnnnnnnnnnnnnnnnnnnnnnnnnnnnnnnnnnnnnnnnnnnnnnnnnnnnnnnnnnnnnnnnaggtaacgggacgggcgcgaccatggcgcggtgagggagcgggggtggggatcggtccgggggaggcctgaggccgctggcttgtgcgctgtctnnnnnnnnnnnnnnnnnnnnnnnnnnnnnnnnnnnnnnnggcatgtcgtccaactgcaccagcaccacggcggtggcggtggcgccgctcagcgccagcaagaccaagaccaagaagaagcatttcgtgtgccagaaagtgaagctattccgggccagcgagccgatcctcagcgtcctgatgtggggggtgaaccacacgatcaatgagctgagcaatgttcctgttcctgtcatgctaatgccagatgacttcaaagcctacagcaagatcaaggtggacaatcatctcttcaataaggagaacctgcccagccgctttaagtttaaggagtattgccccatggtgttccgaaaccttcgggagaggttggaattgatgatcaggattaccagaattcagtgacgcgcagcgcccccatcaacagtgacagccagggtcggtgtggcacgcgtttcctcaccacctacgaccggcgctttgtcatcaagactgtgtccagcgaggacgtggcggagatgcacaaacatcttaaagaaataccaccagtttatagtggagtgtcatggcaacacgctttgtgccacagttcctgggcatgtaccgcctgaccgtggatggtgtggaaacctacatggtggttacaggaacgtgttcagcatcggtcatgtgcatcgcagtatgactccaggtttaaggtgcaagaaggaggaaggagaggcaggttggcacttcagagatggtctcagaggggacgttttgggggggtaaaaattgggaatgggg

SEQ ID NO: 94002 - DNA, 447 bp, Homo Sapiens
ggggaggctcggcctcctgacacccgcgctggggctgcaaccgtgggtgcctccccaggccgagaccctgcccttggccaccatagtccccctctccttgggtagcttcctccctcctcaggcaggttaacaattgctgctgtttctgaactcgccgttctcagtaatctgcaatttggtggggttggtgggggagatgccgttacgggcttgcatgctgtacctctctttcagctgggtcagggcactcatgaggcgggcattggcggcatccaacgaggcaatgcgcttctcctgggcatcaatgatcttctgtttggagtccacagccgcttgcatctctgcgtggtccttcttcagttcttcctccacggacatcaacctgctgatgatgccttcatctggatgtccttgtcctcctgctgcagcgcagcgctcctcgccctc

SEQ ID NO: 94003 - DNA, 325 bp, Homo Sapiens
gcttggtcaaacagagctcaagatttaactacggcggcccagggcccatgctggctggtgggccaccggctggctcctggctgggcgcccggccgagatgcccacgcgggactccgcagtggggcctgactggctagctgcctgagcaatcacattcagctaaaccgctgcattgtgcacagcagtgccctggcctgtctgcctggccggggccgcgcagctcagcccaggggctcatgtatgggctgggtatggtgggggtggaggtgggtttgtccgagctccgtcgatgagcgggtgtagttcccagttctggctcttttca

SEQ ID NO: 94004 - DNA, 1056 bp, Homo Sapiens
actaaacttaatctgtactgtatggcataagaaagaagaggctgagggagacagggaactacacagtgacgggattgaaacaaagacaacaccttgagttcagccataatgaaggcactctcagttcaggcttcctacaagaaaaggtctgggtaatgctggtcaccagccttgtggcccttcaagctttgtaagccttgtgccaaaagaaacttttaaaacagctacagcaagatgagtctgactatggcttagtatctttctcattacaataggcacagagaagaatgcaacagggcacaggggaagagatgctaaatataccaagaatctgtggaaatataagctggggcaaatcagtgtaatccttgactttgctcctcaccatcagggcaaacttgccttcttccctcctaagctccagtaaataaacagaacagctttcaccaaagtgggtagtatagtcctcaaatatcggataaatatatgcgtttttgtaccccagaaaaacttttcctccctcttcatcaacatagtaaaataagtcaaacaaaatgagaacaccaaattttgggggaataaatttttatttaacactgcaaaggaaagagagagaaaacaagcaaagataggtaggacagaaaggaagacagccagatccagtgattgacttggcatgaaaatgagaaaatgcagacagacctcaacattcaacaacatccatacagcactgctggaggaagaggaagatttgtgcagaccaagagcaccacagactacaactgcccagcttcatctaaatacttgttaacctctttggtcatttctctttttaaataaatgcccatagcagtatttggagtcttttcttttctcctaaatccacaaactctcttctttctctttggacagatgacctcttgtcatagttaagcagagagtgggcaggatattcctgataggaggaactacatgaataaaggggtaagagcacagaaatttagctacagctccatggtgagccattaaaaggaaagagacactttacctgtgctc

SEQ ID NO: 94005 - DNA, 556 bp, Homo Sapiens
  misc_feature (35)..(35): n is a, c, g, or t
  misc_feature (98)..(98): n is a, c, g, or t
agggaggggttatttattatttacactgcagaggntgtgagtggagtctaggggagctattaatacaagggccagtgggcacctggggtgcagcagcnagaactgtcactgctctttcccatgtgggcatccaagtgtttctggagcctagaaggagagttgggtaaagtcagccccagaggagcagtgaccttctgtcagtcaggccatgcagccagttggaggcagctttgcagggaagggggctggggaggacgcactcggaaccttctccgctcctctctctgctctcctgctagggctccccatgaatcaaacccaaccaaaggccagagggcatgaaaggccatcgccttggtttataccaagtcccctggggcagagagcagagaatctggaggggcaaacggaatccctccagcaatcccacctaaaaaataattcagggattcagagagcttgtgagcaaaaagaaaaatgaaaaacattcaaaatcaagcacagaatcaaggcaagatgactctccgaggaacctaatgtgaaatgattactggga

SEQ ID NO: 94006 - DNA, 452 bp, Homo Sapiens
  misc_feature (12)..(12): n is a, c, g, or t
tagaggcgcccnccgcacaaagccccgggcgggccgaggcccgactgtagggactccagccaccttggccctccctgcccggggaaggccgcgctcaaggaatggcctcgcatccaaaggccagcgaggagcggcccctacggggcctgggcacagagctctgccttccagggacactgctcttccccaggagagaaacaagaagctggaggctgtggggacaggaattgaacctaaagccatgtcccagaaaaactttgctgacacctgaagtggaggttaagagcatggactgtggagtcagactcctgggttcaaaacccagctctacagctgactgtctgtgatcctgggcacattacagctcaatattttctcatctgtaaaatgggaatagtaatagtactgactattaggatcgttgtgaggattaaataagctaatatataagt

SEQ ID NO: 94007 - DNA, 455 bp, Homo Sapiens
gagcagctgcagccccggcggccgaacgcccgcggcgcgggactccatcgtcagagaagtcattcagaattcaaaagaagttctaagtttattgcaagaaaaaaaccctgccttcaagccggttcttgcaattatccaggcaggtgacgacaacttgatgcaggaaatcaaccagaatttggctgaggaggctggtctgaacatcactcacatttgcctccctccagatagcagtgaagccgagattatagatgaaatcttaaagatcaatgaagataccagagtacatggccttgcccttcagatctctgagaacttgtttagcaacaaagtcctcaatgccttgaaaccagaaaaagatgtggatggagtaacagacataaacctgaggaagctggtgcgaggggatgcccatgaatgttttgtttcacctgttgccaaagctgtaattgaac

SEQ ID NO: 94008 - DNA, 1464 bp, Homo Sapiens
  misc_feature (1267)..(1269): n is a, c, g, or t
  misc_feature (1271)..(1271): n is a, c, g, or t
  misc_feature (1273)..(1273): n is a, c, g, or t
  misc_feature (1290)..(1290): n is a, c, g, or t
  misc_feature (1379)..(1379): n is a, c, g, or t
  misc_feature (1390)..(1390): n is a, c, g, or t
catggactatgacagggtacaaaaagcagtggtacggtcggaatccgggatatcgtcgacccacgcgtccgctctacaactggcgatacaagaatctaggaaacttaccccatgtgcagctctgccagagtttagtacagcaaatgctggcttactgtatgacttccagctcattaatgttgaagattttcaaggagtgggagaatctgaacctaatccttacttctatcagaatcttggagaggcagaatatgtagtagcactttttatgtacatgtgtttacttggttaccctgctgacaaaatcagtattctaacaacatataatggccaaaagcatcttattcgcgacatcatcaatagacgatgtggaaacaatccattgatggaagaccaaacaaggtgacaactgtgatagatttcaaggtcaacagaatgactatattcttctttctctggtacgaaccaggcagtgggccatctgagggatgtccgtcgcttggtagtggccatgtctagagccagacttggactttatatcttcgccagagtatccctcttccaaaactgttttgaactgactccagctttcagtcagctcacagctcgcccccttcatttgcatataattccaacagaacctttcccaactactagaaagaatggagagagaccatctcatgaagtaccaaataataaaaaatatgccccagatggcaaactttgtatacaacatgtacatgcatttgatacagactacacatcattatcatcagactttattacaactaccacctgctatggtagaagagggtgaggaagttcaaaatcaagaaacagaattggaaacagaagaagaggccatgactgttcaagctgacatcatacccagtccaacagacaccagctgccgtcaagaaactccagcctttcaaactgacaccacccccagtgagacaggagccacttccactccagaagccatccctgctttatctgagaccacccctactgtggtaggagctgtatctgcaccggcagaagctaacacacctcaggatgccacatctgccccagaagagaccaagtagccaaactgtagtccttctaaaggaggacatggcagtcaaaaagtctgagtaaagctgttttttgtattttatatttgcttctgccattttactgtcactaattaatgtttagttcttatatttgttaactgatttcggtgtcttgaatatattttttttaaattatgtgcatgcannngngngacttcattgaaaaacnttaacatgtcggcccgacctcgggccctacgagaagcctttcgtagaccaattcgtgttgggcgccgcggggcccccagtaggataagntgaaacatggntcattagcctggttttccttagggaagaatccctggggccatggacctaggtggctttgggaatttctacccca

SEQ ID NO: 94009 - DNA, 469 bp, Homo Sapiens
aggctccatgccttcttgggagggtggccgccaacgcctttcctgtgttatggcaacagggagtgggcatctcatctgcctgtggtcagctctcagacggcagggagcggagctgacgttggctgtgcttggtcaccgctgccatgccgcagaggatgcgcctagctgggctggggccacacgactattatgttggccttgaacggggactgcagagccctcagtttgtctcccttgttcctctgtggctgaggtgggagggggagggtggggtaggtcccccagcaagaaagagggacaggagcaccccaggcaggaccaaggagtcgggaggcccctgccttctgtcctccatggtgagggcacagatgtctccccagagcccagcgctggcagaatggattctgctcctggctttgcttctgcggcttcggtggagacagttatggaataaaatgttccttgcaaa

SEQ ID NO: 94010 - DNA, 1231 bp, Homo Sapiens
  misc_feature (54)..(89): n is a, c, g, or t
gcctccctggtccagttgtcctgctagggcccttaaagaaagcggttaaaagannnnnnnnnnnnnnnnnnnnnnnnnnnnnnnnnnnnggggttctctccggaaggtactcccacccaagactcaaaaggcctcctgaagccgtcttgctgtctgccagcagcttgtccatggtgggcgagttggccctcaggaactccttgagcaccatgcagtcatcctgccgcacaaactctctctgtgtcaactctaggcctcgctgcagggagcgcacgtccgccaggacactgtccagggacactgagcccgccttgtccagaaagtgcaggtcgctgtggaagcctgtgagttgcgggtacttctcagcaatgaccttcaccaggtagtgcagcagcgtctgcttgcgatcagtcgacttcatctccaacagcgcatccaggctctggagccggaagccataggctgccccacgcttgctactgttcatgtagttgccaaaggccaggacaatctccaggatctggcggagtttgtcagaggacttgatggacattgaggctgcaatgatggcattcagttgcggcatgagcagctgggctgtgtccgggaagttgcccaggaaggtgagtgtggtcatgcgctccggcaggtcgcgggatgcggtctgaagcatagcatgaagcggtcctcctctgacaggctcctccattggccgctgctcccgctccaagcgggtgatgaggctgcgctcatactctgtgggcaggaagcgcatcagcagctccaggaagtccaggcccagagcctgcaggtcgtacgcctcaatggcgtggcaaaagcgctcggcccccaggttgcccttccgcagggtgatggccaagttcttggcccggttggcctcgatgagtgtcgccttgctgggggccttctgggctgccttactcttgagagcgctgaggtccaggctggggccttgggacttggtcttgaactgttcctcaaaatcactcatgtctagctcctgcagcaccttctcatccttgagctctgtgaagacagtgccggtgatctggctgggtttctatgccacccagttcaagagtggcattcggaacttagtctggatgggcttcttggccttcactcctgggcccacttctgagtcgcgtcttcccctcgtgccgaattcgccacccaggcctcgctaccttagaaccgctagagttactgt

SEQ ID NO: 94011 - DNA, 731 bp, Homo Sapiens
ccatggaacatagaacacgtggttaaaaaaagcaggctggtacggtcggaatcccgggatatcgtcgacccacgcgtcggtggaacagtggaaaaaagaagccgctgcccaggaggcaggcgctgataccccgggcaaaggggagcccccagcacccaagtcaccgccaaaggcccggcggccacagatggacctcatctctgagctgaaacggaggcagcagaaggagccactcatttatgagagcgaccgtgatggggccattgaagacatcatcacagatctgcggaaccagccctacatccgcgcagacacaggccgccgcagtgcccgtcggcgtcccccgggccccccactgcaggtcacctccgacctctcgctgtagccgctatttctgcaggtggattctgcaggggtgtggggccgtggacaggctgaggctcaaggaaggtggtcctcagctcggctggccgggcagcccctcctccgctgtggcccgcctcaaacgggctggtgcatcctcctcttggccacagagggcagcatcgcccgccccttcccccaaatgctgcttgcagcacccaccctaaagccccctccaaatagccatacttagcctcagcaggagcctggcctgtaacttataaagtgcacctcgcccccgcaaagccccagccccgaggaaccgtccatggaccttatttttatatgagattaataaagatgtttgc

SEQ ID NO: 94012 - DNA, 456 bp, Homo Sapiens
  misc_feature (228)..(284): n is a, c, g, or t
  misc_feature (297)..(315): n is a, c, g, or t
tctgcggcaggggatccgtgacaagcagtgctacgaactgtgtgcccggcgtggcatcttccacatcatcctgtccttcttccacagcccgctgtgtgacgaggcagcacagaattggattctggaaattctacagaatgctgcccaggttgccagatctgcgtatgaaatcatacgagactatagccttttaacatggattttacacatccttgaaagcaagtttcnnnnnnnnnnnnnnnnnnnnnnnnnnnnnnnnnnnnnnnnnnnnnnnnnnnnnnnnnagactccatctcnnnnnnnnnnnnnnnnnnngtttgtttttctataaaaagtcataacaaagtattagtatgactttttgaataagttaatttctgccagtgtttaattattttattaaagaaaaggatgttacactgaatccttaaagaataaaagtgatttgacctctga

SEQ ID NO: 94013 - DNA, 1147 bp, Homo Sapiens
  misc_feature (50)..(50): n is a, c, g, or t
  misc_feature (56)..(56): n is a, c, g, or t
agtgctgccaaggtccctaggcctgtctttacattcagaccttcccttgnctactngtaatccctgacagaagacattgtggtagtgggtactcaggagagaagcaacaagaatgggacaattctcccagggcaaacactgaatcctctctttctgttacagagtaaagttccctgagtcctggtcttgattgttcatgtagacagaatgataactattgaaactgtccctaatttagtaattctctctgagctcccttaagagggcccaagtactcttattttccatttctcttgacaaagagtaaaaaatgagactaagagccttgactatcatatgtctgttgagcacttgatacctgaaaaatttagatgactgggggtggggaacctttgaataaccagatatatacatatagatagatacgctaaaggaatctcatcactacactttcattttgttatttataaagtactccttatgtatccaactcttgtgctaggcacagaagatgcaatgctgaataaaacagacagcttagattcctttttgtgaagtgtaacatgtacccttcccaaatgttttattaatcacagattcctatcattgggtgcctcataattttgtattctttcaccacttctaaagtcaagctctacatggcaactttcctcagtttggagacactagacatgcttcccttcttctgtggagtttctggtgtctaagaaggctcgatcgcctactaaagtttctcttgcataagctacatgtataaggctgctcacctgtgtgagttctctggtgtttaataaggtgggagttctgaatgaatctttttccacattcatcacatttaaagggcttctctcctgtgtgaattctttggtgtgtgtgtagatttgtgttatgactaaagcttttcccacaccatgagcatctatatggttttattccttgatgggtcatgaagtgcttattaagatctgaactccatctaaacctcctgtcacattgttgacatttatagggtttctctccagtgtgaattctgtggtgtttaataagatcagagctaactctgaagcttttcccaccccggccgtaatggccgaattcccgggcatatgtccggtaccgtcgactg

SEQ ID NO: 94014 - DNA, 510 bp, Homo Sapiens
  misc_feature (77)..(91): n is a, c, g, or t
cagtcgacggtaccggacatatgcccgggaattcggccattacggccggggtagaaattcagtaagggtgcccaaannnnnnnnnnnnnnncacctatactctaccaatatatggtatttaggaaaacttcttttatccaagcacaaagaaaagcacacacatttttataatcatctgcttcatcagggtaaataaataatttaacaaattggatcagcatctctagtttaccagtactttaatattagttttcttacaaattaatggtatttggcaatatttccagaaaatcactgtgggagaataatggtaatatactttaggatatatttcctgaccttttcttaaatggcttcatgtgctattcccccaaattctgctttctctattttcttttttatttaacctataattatactttctagtatattctgagtctatcttctaagccaccttacatttttcctggaacaagggagggaataaatagttgcctccactaaatcagg

SEQ ID NO: 94015 - DNA, 913 bp, Homo Sapiens
caaggtagcgaggcctgggtggcgaattccgcacgaggaaagagaaaccttgccatatgggatacggcaggtcaagagagattccatgcattgggtccaatttactacagagattcaaatggagcgattttagtttatgacataacagatgaagattcttttcagaaggtaaaaaactgggtcaaagaattacggaaaatgttgggaaatgaaatctgtttatgtatagttggtaataaaatagacttggaaaaggagagacatgtttccattcaagaagcagagtcgtatgcagaatctgtgggagcaaaacattatcatacttcagccaaacagaacaaaggaattgaggaactctttcttgacctttgtaaaaggatgatagaaacagcacaagtggatgagagagcaaaaggcaatggctctagtcagccgggaactgcaaggcgaggtgtacagattattgatgatgaacctcaagcccagaccagtggtggagggtgctgttcttctggataactgttcacgcctaagaaattaaacagacagaacaaaactgtggatcattgccctcaacatgaagactgccatattccaagtcacattattttaccaatggaattatagaattaacagtattttaaattacgtttataacacgtgcagagaccttaagtgctaaacttagtggagtttgtgaccagagaattggcatttttctacaaatgtaacgggtaagaaaaagataacaaacgggacaaacagaagacggaagtctcaggtctgatcacccaggactgaagtgcactgggctcgaacatcggctacaatgcaagaatcagcactccaaagtacaacaccaatacacctggcatagactcccaagtaacagagaataatagggcgccaacag

SEQ ID NO: 94016 - DNA, 906 bp, Homo Sapiens
cagtcgacggtaccggacatatgcccgggaattcggccattacggccgggatacattacttgactttttcaaaagtatcaaaaaattgatagctgcagaaatgccattatttgattttctaaaaaacattgattcattcttaaatgtgtattctttaaaaaatagtaaatacctcaagagtgacagaaaaccttccttttctgttctgtaatgctaatttaaactttgagtcttagtttacatggtcataggggttaaataaaatgtataactgtacaattaattgtgttcttgtgacctgatgattttttgaaaatttgcttttctctttaagaaatttaagttttcaagggccgtattagttatctaaatattttgggctaatgttgacttataaataaataaaaatttagaaatatattcatgatgacaattttgttacttacactgcctattctttatttctttttttagttcaaaggtgaaattttgacctttgtattaacaaagcctcaagaaaagagaaattctgccttttaaacatgggttttccttgcattttatggtggtgtgattttgcctcagcaataataaaacataaaatatgttgttgcatcaagttcagttgggtctgctgagattattcttaagaaccaggttgaagcctctatgccaaaaaaagcgtttattgtctggatacatataaagcaagatatatggctacaaataagtcttgcaaccaaaattggtatattaaaatttactgcacactttgagattgctgccattttttggtgctttttggacctcgtcataaagggatgtatcgtataataagggaaaattactcaagttacacattctacattaactgcgctgtattatctacaggtacaatcaatggac

SEQ ID NO: 94017 - DNA, 1035 bp, Homo Sapiens
  misc_feature (77)..(111): n is a, c, g, or t
  misc_feature (898)..(898): n is a, c, g, or t
ttgtataatcactatagggcctagctctgagagcgaacgacgagcgcagcgaagtcagtgagcgaggaagcggccgnnnnnnnnnnnnnnnnnnnnnnnnnnnnnnnnnnncagtcgacggtaccggacatatgcccgggaattcggccattacggccgggggaaccggaagagggtgaaatgctttcggtaggcactccacggctgtgaagatggcggctgctgcgtggcttcaggtgttgcctgtcattcttctgcttctgggagctcacccgtcaccactgtcgtttttcagtgcgggaccggcaaccgtagctgctgccgaccggtccaaatggcacattccgataccgtcggggaaaaattattttagtttgggaaagatcctcttcagaaataccactatcttcctgaagtttgatggagaaccttgtgacctgtctttgaatataacctggtatctgaaaagcgctgattgttacaatgaaatctataacttcaaggcagaagaagtagagttgtatttggaaaaacttaaggaaaaaagaggcttgtctgggaaatatcaaacatcatcaaaattgttccagaactgcagtgaactctttaaaacacagaccttttctggagattttatgcatcgactgcctcttttaggagaaaaacaggaggctaaggagaatggaacaaaccttacctttattggagacaaaaccgcaatgcatgaaccattgcaaacttggcaagatgcaccatacatttttattgtacatattggcatttcatcctcaaaggaatcatcaaaagaaaattcactgagtaatctttttaccatgactgttgaagtgaaggggtccctatgaatacctcacacttgaagactatcccttgatgattnttttcatggtgatgtgtattgtatatgtcctgtttggtgttctgtggctggcatggtctgcctgctactggagagatctcctgagaattcagtttttgattgttgcttgcatctttctgggaatgcttgagaaagct

SEQ ID NO: 94018 - DNA, 1108 bp, Homo Sapiens
ctggtcacgtccggtatccgggatatcgtcgacccacgccgtgcggcagcggctcttccgccctgctgcaggcggaggtgctggatctggacgaggacgaggacgacctgggaggtgttcagcaaggatgcctcattgatggacatgaactccttcagccctatgatgccaacatcccctttatcaatgataaaccaaatcaagtttgaggatgaaccagatttaaaggatctcttcatcacagttgatgaacctgaaagtcatgttactacaatagaaactttcattacgtataggattattactaagacatctcgtggggaatttgactccagtgaatttgaagttaggagacgatatcaagatttcctttggttgaagggaaaactggaagaagcacaccccactctgattattccaccattgccagaaaagtttatagtaaaaggaatggtggaacgctttaacgatgacttcattgagacacgcaggaaggctttacataaatttttgaaccgaattgctgatcatccaactttaacatttaatgaagacttcaaaatttttctcactgcacaagcttgggaactctcttctcacaagaagcaaggtcctggcttgctaagcaggatggggcaaaccgtcagagctgttgcgtcctcaatgagaggagttaaaaaccgcccagaggagttcatggaaatgaataactttattgaactatttagccagaaaataaatttgatagataaaatatctcagagaatttataaggaagaaagggaatattttgatgaaatgaaagaatatggcccaattcatattctgtggtcagcgtcagaagaggatctgggtggatactctaaaggatgttgccagctgcattgacagatgctgtaaagccactgaaaaacggatgtctgggactctcagaggccctgcctcctggtgtacatgagtacgtgctttatagtgaacatgttaatgggtgttatggaaagaaaaagacccaatacccagccgaactggattcccaaagtgaagtttttgacctattaaaagggcgaaaccggatctggggcctttgcaacggggggagccatttctt

SEQ ID NO: 94019 - DNA, 542 bp, Homo Sapiens
tgagaagagtagtacatctcttcatagctaatttaagagaatagttgggttctcatctgtgtttttattcatattttttttgcgtcaccccagggttccctaggccacaccttaagaacccatatacctggagaatgaggggctcttaagtcaacaatggacaactttccattgctgtatcttagtaatgagttaacattcagaacgatggcattaaaggagtttctcaacctcagcactatgacgttttgggccagatgattgttgcaagggactctccagtgcattgcaagatgtttagcagcatcattggtttctacccactagatgccagttgcactgccccaccttcagttgtgataaacaaaaatgtctgtaggcattgccacatacaatatctgctgatgggcaaaatccacttgaaaactactagattagagaaaagaactgacaaaagatggaacacaattacaggtttttctaaaaattacttttccacaattatagggtaaagtttaagctgattaagtttgagtaattta

SEQ ID NO: 94020 - DNA, 1070 bp, Homo Sapiens
  misc_feature (75)..(109): n is a, c, g, or t
agaatgatgatcatatagggcgcccgcttacgccgaacgacgagcgcagcgagtcattgagcgaggaagcggcgnnnnnnnnnnnnnnnnnnnnnnnnnnnnnnnnnnncagtcgacggtaccggacatatgcccgggaattcggccattacggccggggagcctagcactctgacctagcagtcaacatgaaggctctcattgttctggggcttgtcctcctttctgttacggtccaggcaaggtctttgaaaggtgtgagttggccagaactctgaaaagattgggaatggatggctacaggggaatcagcctagcaaactggatgtgtttggccaaatgggagagtggttacaacacacgagctacaaactacaatgctggagacagaagcactgattatgggatatttcagatcaatagccgctactggtgtaatgatggcaaaaccccaggagcagttaatgcctgtcatttatcctgcagtgctttgctgcaagataacatcgctgatgctgtagcttgtgcaaagagggttgtccgtgatccacaaggcattagagcatgggtggcatggagaaatcgttgtcaaaacagagatgtccgtcagtatgttcaaggttgtggagtgtaactccagaattttccttcttcagctcattttgtctctctcacattaagggagtaggaattaagtgaaaggtcacactaccattatttccccttcaaacaaataatatttttacagaagcaggagcaaaatatggcctttcttctaagagatataatgttcactaatgtggttattttatattaagcctacaacatttttcagtttgcaaatagaactaatactggtgaaaatttacctaaaaacttggttatcaaatacatctccagtacattccgttccttttttgcttttcttttggaaaaagtctccgcttcttgtcgcccagggctggattgcgtggcccaactccgggctccagtgaaccctccacctcccgggttcacgccattttcccggcctagccccccgagttgtggcgtttacggggcccccgccc

SEQ ID NO: 94021 - DNA, 537 bp, Homo Sapiens
  misc_feature (465)..(465): n is a, c, g, or t
gacatcgctgtgtggcagagggtacctttctctatatgtgtttggaggttataacccagattatgatgaatcgggagggcctgataatgaagactatcctctcttcagggaactctggaggtatcattttgctacaggagtatggcaccagatgggcacagatggctacatgccccgggaattggcatctatgtcacttgtgctgcatggaaacaacctgttagtatttggagatacgggcatcccatttggagagagcaacggcaatgacgtccatgtgtgtaatgtgaagtataagagatgggctttgctcagctgtcgggggaagaaacccagtcgtatatatggacaggctatggccatcatcaatggctccctttatgtctttggaggtacaaccggctatatttacagcacagacctgcacaaagtagatctcaataccagagagtggacacaactganaccaaacaacctatcctgtgatctaccagaagagagataccgacatgaaattgcacatgacgggcagaggat

SEQ ID NO: 94022 - DNA, 1355 bp, Homo Sapiens
  misc_feature (48)..(60): n is a, c, g, or t
  misc_feature (1096)..(1096): n is a, c, g, or t
  misc_feature (1233)..(1233): n is a, c, g, or t
cagtcgacggtaccggacatatgcccgggaattcggccattacggccnnnnnnnnnnnnnccgcaggagcagtaggtgttagcagcttggtcgcgacaggtgcgctaggtagagcgccgggacctgtgacagggctggtagcagcgcagaggaaaggcggcttttagccaggtatttcagtgtctgtagacaagatggaatcatctccatttaatagacggcaatggacctcactatcattgagggtaacagccaaagaactttctcttgtcaacaagaacaagtcatcggctatggtggaaatattctccaagtaccagaaagcagctgaagaaacaaacatggagaagaagagaagtaacaccgaaaatctctcccagcactttagaaaggggaccctgactgtgttaaagaagaagtgggagaacccagggctgggagcagagtctcacacagactctctacggaacagcagcactgagattaggcacagagcagaccatcctcctgctgaagtgacaagccacgctgcttctggagccaaagctgaccaagaagaacaaatccaccccagatctagactcaggtcacctcctgaagccctcgttcagggtcgatatccccacatcaaggacggtgaggatcttaaagaccactcaacagaaagtaaaaaaatggaaaattgtctaggagaatccaggcatgaagtagaaaaatcagaaatcagtgaaaacacagatgcttcgggcaaaatagagaaatataatgttccgctgaacaggcttaagatgatgtttgagaaaggtgaaccaactcaaactaagattctccgggcccaaagccgaagtgcaagtggaaggaagatctctgaaaacagctattctctagatgacctggaaataggcccaggtcagttgtcatcttctacatttgactcggagaaaaatgagagtagacgaaatctggaacttccacgccctctcagaaacctctataaaggatcgaatgggccaagtaccagggcaagctgtgtcccaaacaaagcagctcaacccaactatacaaatgagctgaaagccagtggtggcgaaatcanaattcataaaatggagcaaaaggagaatgtgcccccaggtcctgaggtctgcatcacccatcaggaaggggaaaagatttctgcaaatgagaatagcctgggcagtccgttccacccctgccgaaaatgactcccgnggactcccaagttaaagagtgaagtttcaacaggcctgtcccatcccaagcccactaagtccagaattccgaagccctccaggttcttcctgaaaagttctccctccccaagcaattgaaaa

SEQ ID NO: 94023 - DNA, 946 bp, Homo Sapiens
  misc_feature (43)..(88): n is a, c, g, or t
  misc_feature (92)..(126): n is a, c, g, or t
aaaaagaacccttgtatcgactcactatagggggcacgcttannnnnnnnnnnnnnnnnnnnnnnnnnnnnnnnnnnnnnnnnnnnnnccgnnnnnnnnnnnnnnnnnnnnnnnnnnnnnnnnnnncagtcgacggtaccggacatatgcccgggaattcggccattacggccgggtgtcagaaagatggtcgctggttccctgagagaatctcctgcagtcctaaaaaatgtcctctcccggaaaacataacacatatacttgttcatggggacgatttcagtgtgaataggcaagtttctgtgtcatgtgcagaagggtatacctttgagggagttaacatatcagtatgtcagcttgatggaacctgggagccaccattctccgatgaatcttgcagtccagtttcttgtgggaaacctgaaagtccagaacatggatttgtggttggcagtaaatacacctttgaaagcacaattatttatcagtgtgagcctggctatgaactagaggggaacagggaacgtgtctgccaggagaacagacagtggagtggaggggtggcaatatgcaaagagaccaggtgtgaaactccacttgaatttctcaatgggaaagctgacattgaaaacaggacgactggacccaacgtggtatattcctgcaacagaggctacagtcttgaagggccatctgaggcacactgcacagaaaatggaacctggagccaacccagtccctctctgcaaaccaaatccatgccctgttccttttgtgattcccgagaatgctctgctgtctgaaaaggagttttatgttgatcagaatgtgtccatcaaatgtagggaaggttttctgctgcagggccacggccatcattacctgcaaaccccgacgagaagtggacacagacaagcgccaaaatgtgacaaatctcatgtggtca

SEQ ID NO: 94024 - DNA, 1339 bp, Homo Sapiens
ggcagtggggcgccgaccaagtggaagctgagccaccacctcccactccccgctgccgcccccagaaggacgcactgctctgattgtgcccggaagggttcaggagctgcccagcctttgggctcggggccaaaggccgcaccttcccccagcggccccgtggcgaccagctgcgctccggccttgcctgccgccacctcgcggagaacgccagccatgggcgcctgccggctcctccgcgctggcgcgctttgtcctcctcgcgcaatcccggcccgggtggctcggggttgccgcgctgggcctgaccgcggtggcgctgggggctgtcgcctggcgccgcgcatggcccacgcggcgccggcggctgctgcagcaggtgggcacagtggcgaagctctggatctacccggtgaaatcctgcaaaggggtgccggtgagcgaggcggagtgcacgggccatggggctgcgcagcggcaacctgcgggacaggtttaggctggtgattaaggcaagatggacacatggtcacttgtccgacaggagcctcgcctcgtgctcatctccatcattaatgagaataactgcctgatcttcagggctccagacatggaccagctggttatgcctagcaagcagccttcctcaaacaaactccacaactgcaggatatttggccttgacattaaaggcagagactcgttggcaatgatggcagctaatgtggttcaccaacttctggaaaactggaagctgtatagatgggttcaatttgagacaaacatgaagggaagaacatcaagaaaacttctccccactctgtgatacagaatttccaggtggcctacccagactactgcccagctcctgatcatgacatgatagcctccctggtagattttgaataccaggatggagaagaaagaatgataaatggacgaatttcaggctcaaatattgtaggtgaccggctgtgatgcttttgaggaggatacctgggatgaactcctaatgggtagctgtaggaagtgagaaaaggtaatggcatgccccaggtgtatattgagcaaacggtggacccagacactggagtcatagacaggaaacagccactgggacaccctgaagagctaccgcctgtgtgatccttctgagagggacatggtacaagtggtctccacttttggggatctattattcagtgaaaaagaatgtggaagcctgagagtaggtgacccatgtggtatcggatggtgtagttgatgagtgatgggatccatagggtgatatggcttccagaacaggagggattgatgagatcttaacaacacagcaaga

SEQ ID NO: 94025 - DNA, 1230 bp, Homo Sapiens
cagtcgacggtaccggacatatgcccgggaattcggccattacggccgggggagcccgtgtctgtcgggtgccgagccaactttcctgcgtccatgcagaccccgtgcgggcagacggctgcactgcctcccctgggtccgaggcgccagtgggcccgtagtcctccagcgacccgtctgctcgctgcatgctgctgttgcgtcgctcccggtggcggagcccgcggggtccggggaccccgacgaccctgggcagcctcaggatgctggggtcccgcgcaggctcctgcagcaggcggcgcgcgcggcgcttcacttcttcaacttccggtccggctcgcccagcgcgctacgagtgctggccgaggtgcaggagggccgcgcgtggattaatccaaaacgagggatgtaaagttcacgtggtcttcaccacagagcgctacaacccagagtctttacttcaggaaggtgagggacgtttggggaaaatgttctgctcgagtgtttctcaagaaatcagaaacccagaccaactatcaatgtaacttgtacacggctcatcgagaaaaagaagaagacaacacagaggattacctgctttacaagcaaatgaacgcaactgaaaaaccccttggaaatagtcagcatacctgataatcatggacactattgatccctctcttgagactcatctgggatttggctttccttggaagctcctacgtgatgtggggaaatgacaacaccaggtgtcacactactactttggaacagcccactagtgtgaggcagtggaaaactaatgatgatacaattgatcttgattatactgttcctacttcatgaattatcaacacaggaaaataattcccctgtccgcattcacttgggtcctggtaccctgggcaaaccctcttaaagggaagttacacctggctaggagcctaccgcaccccccggaacgaagccctcccggtaactgaaaaaagggcatcaccttgttatctacccaacaggaggctttagtaatattttcttaccaaagaaacaaaatgggatctttttttctctcggaaccttttttaaaacaaaggtggccctcataacctagacccattaaaaccccctcttcccctctctcaggtatacaaacccagcctctaaaggcggcgtcaaagaactattctccctaaattaaacttttttgcgcgaacaaaacccccttattta

SEQ ID NO: 94026 - DNA, 1149 bp, Homo Sapiens
  misc_feature (1003)..(1003): n is a, c, g, or t
cagtcgacggtaccggacatatgcccgggaattcggccattacggccgggtaactaattcatattcttaaattcttttgtactatatagagatagagagattttaattgtaataatctttcgtgagtttttcttctttatttgaaaaaggatccagacacagagatgaagaatgacttgtaccatcttctgagaacaaatggactgaaagcttgtgactagaatccactacttttcaacctcttactcctagagcccatccttttggccaagggcttttagatgctgtgaaggagagtgtttatatactaacaatttcttttaaattctttcccaaggtctgtcgagttgcttatgaaattatgcaaacactacatcctgatgcctctgcaaacttccattctttagatgacatctactattttgggggccagaatgcccacaatcaaattgccatttatgctcaccaaccccgaactgcagatgaaattcccatggaacctggagatatcattggtgtggctggaaatcattgggatggctattctaaaggtgtcaacaggaaaattgggaaggacgggcctatatccctcctacaaagttcgagagaagatagaaacggtcaagtaccccacatatcctgaggctgagaaataaagctcagatggaagagataaacgaccaaactcagttcgaccaaactcagttcaaaccatttgagccaaactgtagatgaagagggctctgatctaacaaaataaggttatatgagtagatactctcagcaccaagagcagctgggaactgacataggcttcaattggtggaattcctctttaacaagggctgcaatgccctcatacccatgcacagtacaataatgtactcacatataacatgcaaacaggttgttttctactttgcccctttcagtatgtccccataagacaaacactgccatattgtgtaatttaagtgacacagacattttgtgtgagacttanaacatggtgcctatatctgagagacctgtgtgaactattgagaagatcggaacagctccttactctgaggaaagtgattcttatttgatggtgggattgtgaccactgaattcactccagtcaacagattcagaatgagaatggac

SEQ ID NO: 94027 - DNA, 1038 bp, Homo Sapiens
  misc_feature (1004)..(1004): n is a, c, g, or t
cagtcgacggtaccggacatatgcccgggaattcggccattacggccgggggcggctcgggcttccgccttggggagccggcggcggagtccgggacgtggagacccggggtcccggcagccgggcggcccgcgggcccagggtggggatgcaccgccgcggggtgggagctggcgccatcgccaagaagaaacttgcagaggccaagtataaggagcgagggacggtcttggctgaggaccagctagcccagatgtcaaagcagttggacatgttcaagaccaacctggaggaatttgccagcaaacacaagcaggagatccggaagaatcctgagttccgtgtgcagttccaggacatgtgtgcaaccattggcgtggatccgctggcctctggaaaaggattttggtctgagatgctgggcgtgggggacttctattacgaactaggtgtccaaattatcgaagtgtgcctggcgctgaagcatcggaatggaggtctgataactttggaggaactacatcaacaggtgttgaagggaaggggcaagttcgcccaggatgtcagtcaagatgacctgatcagagccatcaagaaactaaaggcacttggcactggcttcggcatcatccctgtgggcggcacttacctcattcagtctgttccagctgagctcaatatggatcacaccgtggtgctgcagctggcagagaagaatggctacgtgactgtcagtgagatcaaagccagtcttaaatgggagaccgagcgagcgcggcaagtgctggaacacctgctaaaggaagggttggcgtggctggacttacaggccccaggggaggcccactactggctgccagctctcttcactgacctctactcccaggagattacagctgaggaggccagagaagccctcccctgactgcatgtggaagggcacacagcagcaggcagggaggaggcggaggtggcaaataaacctgggcaattttgtttatacnctgaatggaactgaaattatataaaaatacttgt

SEQ ID NO: 94028 - DNA, 676 bp, Homo Sapiens
  misc_feature (652)..(652): n is a, c, g, or t
  misc_feature (659)..(659): n is a, c, g, or t
cgaagtgtgcctggcgctgaagcatcggaatggaggtgagggtggctaggtcctgtgaactggactctggacttctctgagagggagaaaaccgtaaaagattatcgtttccatcctgcagtctacaggcctctaaggacttgagagacatcttagctgtttcatgcagttgaatccatggcaagtctccatggccaagggtctgataactttggaggaactacatcaacaggtgttgaagggaaggggcaagttcgcccaggatgtcagtcaagatgacctgatcagagccatcaagaaactaaaggcacttggcactggcttcggcatcatccctgtgggcggcacttacctcattcagtctgttccagctgagctcaatatggatcacaccgtggtgctgcagctggcagagaagaatggctacgtgactgtcagtgagatcaaagccagtcttaaatgggagaccgagcgagcgcggcaagtgctggaacacctgctgaaggaagggttggcgtggctggacttacaggccccaggggaggcccactactggctgccagctctcttcactgacctctactcccaggagattacagctgaggaggccagagaagccctcccctgactgcatgtggaagggacacagcancaggcanggaggaggcggaggtgg

SEQ ID NO: 94029 - DNA, 847 bp, Homo Sapiens
cagtcgacggtaccggacatatgcccgggaattcggccattacggccggggactcaccctcccagtgtgcttgagaaacaaactgcacccactgaactccgcacctaagcatccaaatcagcccttgagattagaggccttggagactcagatcctgaacaagtagagaacaaagatctctacttggatggaacttccattctgtggggaagagactgacaataagcaattaaataaataagaactcagcagtaggccttgcctcagatccaaggtcactcggaagaggccatgtctaccctcaatgacactcatggaggaaatgctgagagaagcattcagatgcatgacacaaggtaagactgccaaaaatcttgttcttgctctcctcatttggttatttgtcttatttttaggagttatgagagcaaaatgacaacacccagaaattcagtaaatgggactttcccggcagagccaatgaaaggccctatggctatgcaatcttggtccaaaaccactcttcaggaggatgtcttcactggttgggccccacgcaaagcttcttcatgagggaatctaaagacttagggggctgtccagattatgaatgggctcttccacattgccctggggggtcttctgatgatcccagcagggatctatgcacccatctgtgtgactgtgtgggtaccctctcttggggaggcattatgtatatgatttccgggatcactcctggcagcaacggagaaaaactccaggaagtgtaaggtcaaaggaaaaatgataatgaattcattgagcctctttgctgccatttctggaatgattctttcaatcatgg

SEQ ID NO: 94030 - DNA, 808 bp, Homo Sapiens
  misc_feature (694)..(694): n is a, c, g, or t
gggagtgtgcttgagaaacaaactgcacccactgaactccgcagctagcatccaaatcagcccttgagatttgaggccttggagactcaggagttttgagagcaaaatgacaacacccagaaattcagtaaatgagactttcccggcagagccaatgaaaggccctattgctatgcaatctggtccaaaaccactcttcaggaggatgtcttcactggtgggccccacgcaaagcttcttcatgagggaatctaagactttgggggctgtccagattatgaatgggatcttccacattgccctggggggtcttctgatgatcccagcagggatctatgcacccatctgtgtgactgtgtggtaccctctctggggaggcattatgtatattatttccggatcactcctggcagcaacggagaaaaactccaggaagtgtttggtcaaaggaaaaatgataatgaattcattgagcctctttgctgccatttctggaatgattctttcaatcatggacatacttaatattaaaaatttcccattttttaaaaatggagagtctggattttattagagctcacacccatatattaacatatacaactgtggacccagctaatccctctgagaaaaactccccatcctaccaatactgttacagcatacaatctctgttcttgggcattttgtcagngatgctgatctttggcttcctcccagaacctggtattaacctggcatccctgtagaattgatggaaaagaacgtggctccagacccaaatctaacataggttctcccggcagcc

SEQ ID NO: 94031 - DNA, 1097 bp, Homo Sapiens
cagtcgacggtaccggacatatgcccgggaattcggccattacggccgggggttaagagatcccttaagaagttagaaggcttaagaactgcttcatgtgaacatcccttattagttacaaagttatattcacagttttttaaaaatgtgtcaaaataaaggataactctgtattacagctttcacagtagctatgtggacaatgtgttatttccatttgactctctaaaatagctacatcctaaaatcagggctatctttaacaatagcaagatagcaatattatatacaactcagttatgagaccctttagttattctccattaatgcttcttagttggtaataccatacctcacagtaggtagaagaatgaaaacttctgcaggtgtgtaatttggaaactagtcctctaaaaattccctattactcctatagcaatctaataaaaactacctacatagttactgttttctttccttcttgtgccaaatgttttatacataaatctcttaattacatacatttttctacttaagattaaatcggaaatactgtattagcaaaagtcttgggactatctaaaatcccacacatagataaatctgaattggagagagaaatttcacaactatttaattaacaggtgatacccacattttcacgttttaaaaagagggagatggcttgtaatgcttaggagtaggtttaagaaacagatacacattagtaaaaagatagcaataatacattagaagctcaggaagtaatagggtgaggctctggagcatactcaggctgcagggcataatgggaaaataggagcataaataagaaatatccaggaagaggtacggcaagggaacacacacgcctacttaacggacgacctcgggacatccaatggcatagtcgggacacggagggacaaccttcggacaacagcgggaaatccaaccacaacaaggggcctggtagaggacagaatacggcgttgaaagagacatacaatggcaacacactccagcaaaaaagggacacgcaggcgggagcaccgcccacgaggatcacaacgccaacgacgaacgcaaacaaaaaa

SEQ ID NO: 94032 - DNA, 843 bp, Homo Sapiens
  misc_feature (70)..(108): n is a, c, g, or t
aataactcactatagggcgctagctcttgagccgaacgacgagcgcagcgagtagtgagcgaggaagcgnnnnnnnnnnnnnnnnnnnnnnnnnnnnnnnnnnnnnnncagtcgacggtaccggacatatgcccgggaattcggccattacggccgggattaacatctgagatagtttcttatgcccctttctagtcattcccctttcacctgcctgcctccccgcgagaaaacactgttctgaagttccttaaaactgtaggtttagttttgctgattctagaatttcatataaatggaaacactcaatatgtataaaaggcttctttcattaagcatagtgtgtttggtatttatctatgttgttgcatgtagcagtcgttctttccttttcattgctacatacactgtatgaatataccatgtgaatatactatagtttattttaccattcactgtttgatggacacttgggctgtttttcgttttcggctattataaataaagctttcatagatatttttgtacaaatttcacgtagacatgtgctaattctttctcttgggtaaatacttaagagtggaattatatgtttagttctcaaagaaacttccatcaactttttgcaatgtgggttgtaccatttttatattcctatcaacaatgtgtgcagagttgcagttgggctacatccttgctgaacacttcaatggtgtatcttgtcactgtttgtgccatacgggatgagtgtgtagggtatctcatggtttttaatttggaattttttgatggtaattatttgactttttatgtgattatcgggctttatctgctttgtgagta

SEQ ID NO: 94033 - DNA, 789 bp, Homo Sapiens
  misc_feature (673)..(707): n is a, c, g, or t
agatgatcagagaacccacatgcagaggcaggtgggggtgggaagcaggagaacagtgagagccaagatcgatggaccaaaaaataaagtctgccttggggaagtcctgactataggtagactgttttcatgaggtgttcttctcctagctcaagtaggggcccaggtcagggagctgcagcatcccagagctatgattgatgaacattgtacttttcccttctgtcttaacagttggggtgcaggattaggataggtagcctatgctgtctctaacagaaaacattacaggattgaacagaagagttccccttgcatacgtcatcttttggagctgctcttactcactgtcttgcgcctaaacagaggtccagattttggatgggaaaacaaagaggggttgagagcagcaagtgtttgatcaagtgaaaatctgctgtctgcctcatctcatgggtttctctgcaggattgagaacccttgccttggtgtacacaaattgcttgcatcagcttgagatcccaggacctttgccaggccacgggtaggcatctgtctggcttgggatgggagtttcttaggacacttattccctcatcttgctttcctaacccaggagttgcccggccgtaatggccgaattcccgggcatatgtccggtaccgtcgactgnnnnnnnnnnnnnnnnnnnnnnnnnnnnnnnnnnncgccgcttcctcgctcgcatgactcgctgcgctcggtcgttctgacaaaaaagcgctagcgccctatagtgatctatcattt

SEQ ID NO: 94034 - DNA, 570 bp, Homo Sapiens
cagtcgacggtaccggacatatgcccgggaattcggccatcacgggccggtccattgggagcgtacgtagatcagaatgacgaccaccctgcttcatgcgtggtgcgatgactagtagcatggagcgagattttggacgtggtgatattggaataaatcgaggctttggagattcctttggtagacttggtggtggaatgggtagcatgaacagtgtgactggaggaatggggatgggactggaccggatgagttccagctttgatagaatgggaccaggtataggagctatactggaaaggagcatcgatatggatcgaggatttttatcgggtccaatgggaagcggaatgagagagagaataggctccaaaggcaaccagatatttgtcagaaatctaccttttgacttgacttggcagaaactaaaagagaaattcagtcagtgtggtcatgtaatgtttgcagaaataaaaatggagaatggaaagtcaaaaggctgtggaacagtcagatttgactccccagaatcagtgaaaaagcctgcagaataatgaatggataaaaatc

SEQ ID NO: 94035 - DNA, 1337 bp, Homo Sapiens
  misc_feature (1129)..(1157): n is a, c, g, or t
ggggtttggtaagttccgtttttagccccggcctttttctagccaggctctcaactgtctcctgcgttgctgggaagttctggaaggaagcatgtgctccagaggttgggattcgtgtctggctctggaattgctactgctgcctctgtcactcctggtgaccagcattcaaggtcacttggtacatatgaccgtggtctccggcagcaacgtgactctgaacatctctgagagcctgcctgagaactacaaacaactaacctggttttatactttcgaccagaagattgtagaatgggattccagaaaatctaagtactttgaatccaaatttaaaggcagggtcagacttgatcctcagagtggcgcactgtacatctctaaggtccagaaagaggacaacagcacctacatcatgagggtgttgaaaaagactgggaatgagcaagaatggaagatcaagctgcaagtgcttgaccctgtacccaagcctgtcatcaaaattgagaagatagaagacatggatgacaactgttatctgaaactgtcatgtgtgatacctggcgagtctgtaaactacacctggtatggggacaaaaggcccttcccaaaggagctccagaacagtgtgcttgaaaccacccttatgccacataattactccaggtgttatacttgccaagtcagcaattctgtgagcagcaagaatggcacggtctgcctcagtccaccctgtaccctggcccggtcctttggagtagaatggattgcaagttggctagtggtcacggtgcccacccattcttggcctgttacttacctgagatgagctcttttaactcaagcgaaacttcaaggccagaagatcttgcctgttggtgatcatgctcctcaccaggacagagactgtataggctgaccagaagcatgctgctgaattatcaacgaggattttcaagttaacttttaaatactggttattatttaattttatatccctttgttgttttctagtacacagagatatagagatacacatgcttttttcccacccaaaattgtgacaacattatgtgaatgttttattattttttaaaataaacatttgatataattatcaattaactgnnnnnnnnnnnnnnnnnnnnnnnnnnnnnccttggtcggccgccttcggccccttgagaaagctttctaagaaccattccttttgggccgccccggcccccaggaagggtaaagtggaaacatggggccaaaaacctggttttcccctagggggaatccccgggggcccagggaacctaaggggctttgggaaattttttccccccaat

SEQ ID NO: 94036 - DNA, 1183 bp, Homo Sapiens
  misc_feature (13)..(13): n is a, c, g, or t
  misc_feature (48)..(48): n is a, c, g, or t
  misc_feature (57)..(57): n is a, c, g, or t
gctgcaggcggantggcgctgggagctctcgggctggggcgttgtatntattattantattccgcggcgccccgcgcgggcggctcctttgtgtccagccgccgccaccggagctcccggggcctccgcggggagcgcgtcccccgcatccgcccgacccccggggctggcacgtgctgcgcccggtccgctgagggggcggaggccccgatctccccgaccccccttctctgcttagaggaggaggagcagcggcagcggcagcaggaggcgacagctgccagccgaggaggcgcggcggagaggggactgcggtcagctgcgtccacttggggctgtgcggcggtcccgcgcccggcgatgttcccgggcactccctgagtagcggcagcttatcccccgcccgctagcccgccctggtccccggctcgctcgctggctggcgcggccccggccccgctctgcgtcggccccgccgcggtggaggcgcgcgagggggacgcggccggggatgagcggattgcgggtgaactcgccgcccgggggccccgcgaagccgtgagccgctgcttttctccgagtcgccgccctgcccttggatttgagatcatgtccatccacatcgtggcgctggggaacgagggggacacattccaccaggacaaccggccgtcggggcttatccgcacttacctggggagaagccctctggtctccggggacgagagcagcttgttgctgaacgcggccagcacggtcgcgcgtccggtgttcaccgagtatcaggccagtgcgttagggaatgtcaagctggtggtccacgactgtcccgtctgggacatatttgacagtgattggtacacttctcgaaatctaattgggggcgctgacatcattgtgatcaaatacaacgttatgacaagttttcattccatgaagtaaaggataattatatccaagtgataaaaagagcataaatccagccaccagtaattatgctgatgtggtaccagaaaactgaagagttactgtaacatgccactatgtactcagacagaggagctgtgttagtaccactgagggatcaactggcaaagaatagacaactaactgattcacagcttaagatctacataggaagttcgggaggtggagaaatatgatcagcctaacagagaaagtg

SEQ ID NO: 94037 - DNA, 945 bp, Homo Sapiens
cagtcgacggtaccggacatatgcccgggaattcggccattacggccgggggagtctgagccttttttcagtgctgtaagaaaggacggaggctgttatctatggcagatctatccaataaaggagagaaaggaccgcatacgcctggttctcatcatatgcaataaagagtttgaccatctgcctccaagaaatggggctgactttgccatcatggagatgaagaagctgcttgaggatctgggttacagtgtggatgtacgaagagaatctgacagccaggcaaaccatggggaacagtgggtcagagactgtccagcatctttgggagtcatgtcttcacagtcaccctaagaacctggaggatgcagtttgcaagacataccagagaaggacttccatcgttctctgctcttcaacctcatataacgtgtccaggagagacagcacaaggggctccatcttcatcacacaactcatcgcatgcttccagagatatcctggcgctgcacctagaggaagtatcctggaaggttcagcaagcatttgaaagtcggaggcaacagtccaaatgcccaccatagaacgagtgtccatgaccagatatttctacctctttcctgggcactgaaaatggttcagcattgagagtcgtgggggtgtattgaacatcacctgacaggtgtgatattgggagcagggaaagcgacaaggcagggcccaaggccttcccgtttaattcaaccttctcaaggcaaaacacccttttactagggtctacgggattgggaatggccttgaagacaattttggtaatttccacatacacgtggtgagtgaccacttggtcggacccagacgagctgcagcatcgagtataacaacgaagagcagtgtgtgttctgcggacctgccggccctacgagaaagatcttgcgtcaaaac

SEQ ID NO: 94038 - DNA, 672 bp, Homo Sapiens
acaaacacttctgagaaataatctgaacacttaattggatgcaaaagagtcagtatttactattctaccctttaattagcataatcagtgtttccagcagcaaaagtaattggaaaatcgctagttttattaggttaattattctcccttatcgtagtgtggcatcagcgtggctattattcttaaattgcctctttaaaacaagggctggtgcttcttacaggcaattcctaactcttgggttttgtagagagcccaaaactctttagaacctataattcaaggaaaggctccactttggttttgcattttgtctggtgtctttggctgacagaatttatgtcacaaggtgcacatatttgggggaggctcatggacagcccatcgtgcttgtgctttggtaggaagtacgtgccgttaaggggaaggagatagttactgattctagggaacaattgggtagaaagagatggactccctgtgtttgaaattcaaaactcaagcttggctctaagtgtttccttgctttgctttgctccaggggagtcactgagcagaacgaagcgagttgcctgagattcttcaaagccccagcccttttggaggttacattgttattctcagagcctttatgatgcataataaaagacctagccttgtaccaatattaaa

SEQ ID NO: 94039 - DNA, 439 bp, Homo Sapiens
cagtcgacggtaccggacatatgcccgggaattcggccattacggccgggggaagcagcctgtgctccccaggacctgcctggttgggggaattggaggcttctaggaggtggcacggtgcacgccaagatggctgtgtccacagaggagctggaggccacggttcagcgaagtcctggggaggactgcacagagcccaccagtttttccagtccgacatgggacactgttcgccgttcattgtattcctcaccttcatgggcaccggtgctgctcctgctgctgctggtcgtcgcccactgctgctgctgcagctcccccgggccccgcagggaaagccccaggaaggaaagacccaagggagtggataacttggccctggaaccctgaccctgtgtctcctgcccggtggcagtaacaaagccttctgtctgcccag

SEQ ID NO: 94040 - DNA, 279 bp, Homo Sapiens
cagtcgacggtaccggacatatgcccgggaattcggccattacggccgggggacgtgtacagtggttcacctgtgagaatgatcaacgatatttattatttgctgggggtcaggccctgtacacatcgctgagaacagaagagcaaaatcactgccctcacagagcttgcatttagtgaggagtcacacagaacacactcactgtgcaaaatcagtgtacttgcaaacaagagttgaacaagaggcaggctcacacaaatgagaggttatcccttagag

SEQ ID NO: 94041 - DNA, 1977 bp, Homo Sapiens
  misc_feature (1510)..(1510): n is a, c, g, or t
  misc_feature (1602)..(1602): n is a, c, g, or t
  misc_feature (1705)..(1705): n is a, c, g, or t
  misc_feature (1956)..(1956): n is a, c, g, or t
cagtcgacggtaccggacatatgcccgggaattcggccattacggccggggtgagcccctcggaaatccaggcacatctgaagtacattctctcagacagcagccccgcccccgagtttccccgtggcgatacctgacctagtgagaaccgagacatctgggcagagctcaggcagaagctgatgagtagtggcaatgaggagagcctgaggaaagtggactcggcaggtgttctgtctctgcctagatgacgttccccattaaggaccttgtccacttgtcccacaatatgctgcagtggggatggcacaaagccgctggtttgatagaatccttgtaacctcattatcgccaaggatggctctactgccgtccactttgagcactctatggggtgatggtgtggcagtgctcagatttttgaatgaagtatttaaagacagcactcagacccctgccgtcactccacagagccagccagctaccactgactctactgtcacggtgcagaaactcaacttcgagctgactgatgccttaaagactgggcatcgacagctgctaaggaaaagtttgattgccaccatgaaaaccctcactattgactgcgtccaggttgtcagagaggaggcaaagaattcctgaagaagcaaaagctgagccctgacgcagttgcccagctggcattccagatggccttcctgcggcagtacgggcagacagtggccacctacgagtcctgtagcactgccgcattcaagcacggcgcactgagaccatccgcccggcctccgtctatacaaagaggtgctctgaggcctttgtcaggagccctccaggcacagtgctggtgagcttcaacacatgatggttgagtgctccaagtaccatggccagctgaccaaagaagcagcaatgggcccaggctttgaccgaccacttggttgctctgcggcatctggcaccaggcaaagggatcatcttgcctgagctctacctggacccctgcatacgggcagataaaccacaatgtcctgtccaccagcacactgaccctcccaccagtggaacccttggggggctttgccccctgggggctcccgaatgggctttgggggcccggccactgctgttccatgacgacctgggatatggctcccaattggtctctttcccaaccccccggcctgctaatggcccccggggcgctttcctcccaaacgggtcgtgggagcacacggtccttgtccaaagaacactggatgtgggaatcgcgcctcgcagacagcgggttccaatctccccggcgtcgacacggagcttttcgcacctcttctctcggcgcggccgcaggacatcgccaatataaatgcccctctgaccgatggtaccgcgcggtggtcggcgctctcccgatgttccacaatggtgcagacaaaaaacaacaccgccgcgccccggacggggggccccctgctgcgcgtgccccgcatttaggtcccccgcgggnccttttcctccgtggggggcggccgcgggcgcttgtcacgcccgcgtctcgtcatcgtcccgcgtttttttgtgccggggaaacaacaaggnccacttgcaacgacctgcccacgcccccgctcgagcgccaccccgcccccgctgttgttccagcgcggccccccacgggcggccgcgggttctcatctgagtntatgatcccacgcccgccccgcccgcggggcagggacatgcacactgcgtgggggaccggcaagcccgcaccgccctcgattgccccgtggcctttgccgttccctatcagcctaactctggactcgtggacctagctgcgcgatagcgcgggagttcgggcctgggatagccgagaccccgcgctccagcgaagccccccgcttctctaccgtaccaccaatgtcgtccgtgcggtcacggccgggtggnccgccatagggcagcgccggc

SEQ ID NO: 94042 - DNA, 574 bp, Homo Sapiens
ctatccagtgtcatgacacatacccaacaccaaagccatcagagaccgagcacgaaagcccccaaggttcactgctgggctgctcagtgtgctcgtggacaggacattgtggtttatctgcccgtatgcagggtccaggtagagctcaggcaagatgatccctttgctgctgccagatgccgcagagcaaacaagtgtcggtcaaagccctggcctgtgagaaacaaaatggaaaaccagagtctcaggatggaaaaggacctcaggaaaacctcccaactcaccacatggtaggaatacccctcacagcatccttgagagtgggggaaggctctacctctatgcacaccaccaactgactaaccttcagagcagctcaagctagattattttaaattatttaggaaatatattatgtcatgttacatttaaaaatagctgtcaacagctgagctaaaaatgagcctaaaaggaaagcataattttaaagatgtgaaatcagtttagtcaaagagtcaagacagtacaggaagacagctatggactcaaaaactacaataaaactaaaagtctg

SEQ ID NO: 94043 - DNA, 855 bp, Homo Sapiens
cagtcgacggtaccggacatatgcccgggaattcggccattacggccgggggaggattgcatacagagacgctgtctgcttgctgccttaagacagctagctgaattgctgattaacttttaaaatacccagcttggtttatttttcttagaatctgttgctaagactggggacgctgttttcttttacaaagggaaatctaagttaatttcaaggcattcgaaatggggaaagactattattgcatttcgggaatcgagaaaggagcttcagatgaagatattaaaaaggcttaccgaaaacaagccctcaaatttcatccggacaagaacaaatctcctcaggcagaggaaaaatttaaagaggtcgcagaagcttatgaagtattgagtgatcctaaaaagagagaaatatatgatcagtttggggaggaagggttgaaaggaggagcaggaggtactgatggacaaggaggtaccttccggtacacctttcatggcgatcctcatgctacatttgctgcattttcggagggtcaacccctttgaacttttctttggaagacgacatgggtggtggtagcagattctgaagcaaatggcaatagatggtgatccttttagtgcctttggtttcagcatgaatggatatccaagagacagggaattctgtggggccatcccgccgttcgaacaagattccttccagttaatccatggaagttaagagtatcactgtgaagagatatataggagggtggtaccaaacgggatgaagaattctcgaaaagaggtaaacggtgatggaaggagttaaaagatctgaggaaaaaaattctaacaattgagattacaa

SEQ ID NO: 94044 - DNA, 960 bp, Homo Sapiens
cagtcgacggtaccggacatatgcccgggaattcggccattacggccggggcttgagatgaaaaaggagagacatggaaagggagacagccagatggcacctgcagcggctgccctctgggaccacttggtagtgtccccagcctacctctccacaaggggattttgatgatgggttctaagagccttagcagccctggatggtgaccagaaataaagggaccagcccttcatggatggtgacgtggtagtcacttgtaaggggaacagaaacatttttgttcttatggggtgagaatatagacagtgcccttggtgcgagggaagcaattgaaaaggaacttgacactgagcactcctggtgcaggtctccacctgcacattgggaggggctcctgggagggagactcagccttcctcctcatcctccctgaccctgctcctagcaccctggagagtgcacatgccccttggtcctggcagggcgccaagtctggctttttgtgttggcctcttcaggcctgctagtcactggaaattgaggtccatgggggaaatcaaggatgctcagtttaaggtacactgtttccatgttatgtttctacacattgtacctcagtgctcctggaaacttagctttcgatgtctccaagtagtccacctttcatttaactctttgaaactgtatcatctttgccaagtaagagtggtgggctatttcagctgctttgacaaaatgactggtcctgacttacgtctataaatgaatgtgtgaagcaaagtgccatgggtggcggggaagaagaagacagatgtgttgggtaggactctctgtggtccttccaatgctgtgggtttccaacaggggaaggtccctttggcttggcaagggcataccatgagcataatcacaatgttctggctctggcagcggctggttggacaatgaatgaatgatctc

SEQ ID NO: 94045 - DNA, 1038 bp, Homo Sapiens
  misc_feature (42)..(84): n is a, c, g, or t
  misc_feature (87)..(121): n is a, c, g, or t
aaagggggatgatcgactcatatagggcgctactccgttgtnnnnnnnnnnnnnnnnnnnnnnnnnnnnnnnnnnnnnnnnnnncgnnnnnnnnnnnnnnnnnnnnnnnnnnnnnnnnnnncagtcgacggtaccggacatatgcccgggaattcggccattacggccggggagagcctgagtcactctccccaggagacccagacctagaactacccagagcaagaccacagctggtgaacagtccaggagcagacaagatggagacaaattcctctctccccacgaacacctctggagggacacctgctgtatctgctggctatctcttcctggatatcatcacttatctggtatttgcagtcacctttgtcctcggggtcctgggcaacgggcttgtgatctgggtggctggattccggatgacacacacagtcaccaccatcagttacctgaacctggccgtggctgacttctgtttcacctccactttgccattcttcatggtcaggaaggccatgggaggacattggcctttcggctggttcctgtgcaaattcgtctttaccatagtggacatcaacttgttcggaagtgtcttcctgatcgccctcattgctctggaccgctgtgtttgcgtcctgcatccagtctggacccagaaccaccgcaccgtgagcctggccaagaaggtgatcattgggccctgggtgatggctctgctcctcacattgccagttatcattcgtgtgactacagtacctggtaaaacggggtacagtagccttgcacttttaactttttcgccctggaccaacgacctaaaagagaggactaaaggtggccgttgccatggttgacggtgagaggcatcatccggtttcatcattggcttcagcgcaccatgtccatcgttgctgtcagttatgggctttattgccaccaaggatccacaagcaaagcttgcttaagtcccggtcgtccctaacgggtcctctcctttggtggcagcaggctttttctcgtgtgggcccctat

SEQ ID NO: 94046 - DNA, 969 bp, Homo Sapiens
  misc_feature (703)..(703): n is a, c, g, or t
ctggaccggtccggattcccgggatcccaggaagccagaagcacacaggaaaaggagcttagctgctggtgctgctggcaagatggaaaccaacttctccactcctctgaatgaatatgaagaagtgtcctatgagtctgctggctacactgttctgcggatcctcccattggtggtgcttggggtcacctttgtcctcggggtcctgggcaatgggcttgtgatctgggtggctggattccggatgacacgcacagtcaccaccatctgttacctgaacctggccctggctgacttttctttcacggccacattaccattcctcattgtctccatggccatgggagaaaaatggcctttaggctggttcctgtgtaagttaattcacatcgtggtggacatcaacctctttggaagtgtcttcttgataggcttatcattgcactggaccgctgcatatgtgtcctgcatccagtctgggcccagaaccaccgcactgtgagtctggccatgaaggtgatcgtcggaccttggattcttgctctagtccttaccttgccagtaaatacctctactcagactacagtaactactccaaatggggacacatactgcactaacaactccgcatcctgcagtggcacccctgaggagaggctgaaggtggccattaccatgctgacagccagagggattatccggnttgtcattggctttagcttgccgatgtccattgttgccatctgctatgggctcattgcagccaagatccacaaaaagggcatgattaaaatccagccgtccctttacgggtcctcactgcctgtggggggccttctttccttcatctggttgggtttccccttttccactggtttggccctttctggggcacccgtcctggccttcaaaaaaagaagtttgttcccaatgggccaaagttaccaaaaatcctttggaccattcctc

SEQ ID NO: 94047 - DNA, 887 bp, Homo Sapiens
  misc_feature (411)..(426): n is a, c, g, or t
  misc_feature (813)..(847): n is a, c, g, or t
ctggtattacccccaagccacggccaaccaagttgcccacttaggctatccccgaatgcgaaacccctgggcatttataaaatataacaaaaggcagccctacagaatgggagaaaaatatttgcaaatcatgcatctgataagaggttaacatccagaatatacaaggaacttcaacataaaagagcaacaccctatttttttaatacgccatctaccaccttaaccattttaagggagtttaacccatttgaatgatttaactcattcaaaatgacttgagacatctctccaaagagatatacaaatggccaacaagtacatgaaattatgttcaccactaatcattaggaagatgcaaattaaaaccacactgagatacttcacacctattaggatggccactatttnnnnnnnnnnnnnnnntaacaagtataggcaagaatgtggaaaagttgaaatccttgtgtgctgttactgtagactagtatggctgctgtggaaaacagtacggctgatcctgaaaaaattagaataactgtgtgctccagcaattccacttatgggtatatacccacaagaactgaaagcagggtcacagaggtatctgtatacccatattcacagcagcattattcacagttacccaaaggcacaagcaacccaagtgtccactgacagataggtaaacaaaatgtgctatatacatacaactgaatattatttggccttaaaaaaggaaggaaattttgatacatactacccggccgtaatggccgaattcccgggcatatgtccggtaccgtcgactgnnnnnnnnnnnnnnnnnnnnnnnnnnnnnnnnnnncggccgcttcctcgctaactgactcgctgcgctcgtcgta

SEQ ID NO: 94048 - DNA, 975 bp, Homo Sapiens
  misc_feature (702)..(800): n is a, c, g, or t
  misc_feature (844)..(878): n is a, c, g, or t
  misc_feature (882)..(929): n is a, c, g, or t
  misc_feature (955)..(955): n is a, c, g, or t
cactataccagaactacaaggatgtaacttagtgatttccctaaagaataccaaggactaaggaacaagggattttgaggggtttggccttctaatgtatacttttttagcatcttctaaatctgtaccataaatgtgtactacagtgataattatcagaaaaaggtttatataaaatggatttgctgaagtggaacagtgataatgtaaaggagttaaacttagctgtaagatctgtagatggcttcaggcaataggtctgaaaacactgactcctggggaaatccctttggtaatttattttcatgccttaatcttaaatatgtgtgtataaatgtgtgcacataaaaatcatgggacttacggaactaatctcaatttcaaaccattcttaatttaactgcatgttcagaatagtgtatgatggcatggatataaaatcatcaagggatgactttgcttcactcatttatccaaggcacattccgtgagagactgagaagtgccaggacacagcaatgaacgaggcaaagcccttattgtccagaaatgtacaggctaagacacaatcaaatgtgatggacacatgctaagatagaggaatttacacagggctaaggaacacagagaaaggagcatctagtcatacagggtgtggtgagagggggttgtctgagaacatttcaaagagaaagtgagatnnnnnnnnnnnnnnnnnnnnnnnnnnnnnnnnnnnnnnnnnnnnnnnnnnnnnnnnnnnnnnnnnnnnnnnnnnnnnnnnnnnnnnnnnnnnnnnnnnngtaatggccgaattcccgggcatatgtccggtaccgtcgactgnnnnnnnnnnnnnnnnnnnnnnnnnnnnnnnnnnncggnnnnnnnnnnnnnnnnnnnnnnnnnnnnnnnnnnnnnnnnnnnnnnnntacgagctagcgcccattgtagtgtnaatttccaaaggggtctttt

SEQ ID NO: 94049 - DNA, 947 bp, Homo Sapiens
  misc_feature (833)..(867): n is a, c, g, or t
ctctatggaagacttcggaccacagagcagcatccactgacacagatgtccttgagttccattctaataatagtcaataaagtgaacacgtttccgtaattatttgtaaggtttgttaccatatccagtataaattcttctcacattccatgctgctgacctctgtgtttttcagaaaaacacacttgtcagaccctgtaacgttgaaccagttgttaaattctttgccatttgaccacttccatgggtgaccaggttcctttttcagtccaacccagtgttcctctctacctgcgtatcgttttagaaagttcatgtccttttcagaatcaatgacagcaagagtagcaccatgttcagaacaagcattttgggctgaagtccagctcctcttcacagtagaaataaagtagcatttcctctggtagccaacccagtcctcagagcatgaagaaacatggctgtctgatggcattgagaatgtgtattggcctggacaattgtattggcccactgataaggcaatgagagctatgattaaaatggtgatgaagaccacattcattacagcacacaggacaggaacttggaaggacccttcatgacgtgttgagaaatggggactggtggcatcattttcttgtccactctccggatgcaaagagctgttctctgctacgaaacaattttcagagctcatctttattctcaagattccctagttaatctcaggtcaagtcaagctacagtgaaagtctttgctggagctcttgttgagtctccccggccgtaatggccgaattcccgggcatatgtccggtaccgtcgactgnnnnnnnnnnnnnnnnnnnnnnnnnnnnnnnnnnncggccgcttcctcgctcactgacttcgctgcgctcgtcgttcggctctacggcgggcgcccatagtaggtagatagtttt

SEQ ID NO: 94050 - DNA, 990 bp, Homo Sapiens
  misc_feature (81)..(115): n is a, c, g, or t
gcggatactatacacctcatatgggcctcgcttttcagcgaacgacgagcgcagcgagctagtgagcgaggaagcggccgnnnnnnnnnnnnnnnnnnnnnnnnnnnnnnnnnnncagtcgacggtaccggacatatgcccgggaattcggccattacggccgggagaaaggattgaaaatattgaggaaaaagagattatcctgtcatgtgagatgcataagaagccatgcctccatgctgcacccctggaactcacaacaattcttgacccacaccctggatggaattttggcctctggttgccaacactcatgctgagctacgcgtagtccctctttacacccagcacactttcttctggaactttgggctatagatcccagtattgctccacctccattgaggaaactgcaaataactcaaaccagagagcttggccctctttctctgcttagccacatcagaatttcacccagtcctgtcaatttggtctcctagatgtagaaaatgtttacaggtttttcttccctatagtctccacttatctgcccccactgtgattcccaggaagcactgacaagtcctgtctgttaccacatgttaccaccctttcattcctttcttgctttgacccttgaagaagatcagaatatgacaccccaaaatgtgacactttggccagaaggattattttgacctgcaggaaattgagaaccaacagatgtagaaacagttctctgccttccccttatctgcctaaaagcagggggaatgaatttccctttgagaaaggtgctccctaatatggatcggggttgagtcccacccaaaatctcatcgtggaaatggtaatcgccaatgtcgcgaggagcggccatggtgggcaaatgcttggatcttgcggacagaatttccatccttgctggaatctgtgaatagtgcaatggaattctaatgatatcgggagttaaaagtgttgtagcaccac

SEQ ID NO: 94051 - DNA, 899 bp, Homo Sapiens
  misc_feature (75)..(109): n is a, c, g, or t
tatagatcatatagggcgctactcggcctctagcgaacgacgagcgcagcgaagtagtgagcgaggaagcggcgnnnnnnnnnnnnnnnnnnnnnnnnnnnnnnnnnnncagtcgacggtaccggacatatgcccgggaattcggccattacggccgggactggtgaaaagattataatcaaaggctaaaattttatattctcttttgttaatgtcaggacaaagtccggattgaatataagtctgctttattttataggcctatgaagaatacaccagcaagctagatgcactccaacaaagagaacaacagttattggaatctctggggaacggaactgatttttctgtttctagctctgcatcaatggataccgttacatcttcttcctcttctagcctttcagtgctaccttcatctctttcagtttttcaaaatcccacagatgtggcacggagcaaccccaagtcaccacaaaaacctatcgttagagtcttcctgcccaacaaacagaggacagtggtgagtcagttttaatatcaccattttgctgtttctttgtatttttcagacagatcagttgttgaaaattaatatattattacttcatactcagaggtcatgcaaatagaggcatccatgtcatacaggaatgaaaaatatgtaattatttggtggcaaagtctatattccttaactgaaataaatggtattgtctctagtgttggatttgacatttaaacctgtctgccaaacttgaaccacagtcatgtctaagcactagtttaaaataaatcaggattttaagacttgagcttgttcattatctaatgtgtgtcaggtaagactcattcttcacccttgagaaatctcctttctgagttatattatcagatgt

SEQ ID NO: 94052 - DNA, 1246 bp, Homo Sapiens
  misc_feature (66)..(100): n is a, c, g, or t
tatgggcctagctcgtcgcagacgaacgaccgagcgcagcgaagtagtgagcgaggaagcggccgnnnnnnnnnnnnnnnnnnnnnnnnnnnnnnnnnnncagtcgacggtaccggacatatgcccgggaattcggccattacggccgggggcgctgcgactgacaagcggctctgcccgggaccttctcgctttcatctagcgctgcactcaatggaggggcgggcaccgcagtgcttaatgctgtcttaactagtgtaggaaaacggctcaacccaccgctgccgaaatgaagtataagaatcttatggcaagggccttatatgacaatgtcccagagtgtgccgaggaactggcctttcgcaagggagacatcctgaccgtcatagagcagaacacagggggactggaaggatggtggctgtgctcgttacacggtcggcaaggcattgtcccaggcaaccgggtgaagcttctgattggtcccatgcaggagactgcctccagtcacgagcagcctgcctctggactgatgcagcagacctttggccaacagaagctctatcaagtgccaaacccacaggctgctccccgagacaccatctaccaagtgccaccttcctaccaaaatcagggaatttaccaagtccccactggccacggcacccaagaacaagaggtatatcaggtgccaccatcagtgcagagaagcattgggggaaccagtgggccccacgtgggtaaaaaggtgttccagagagatgggcaagtgtcctatttcttagtgagagcctctaaacaaaccagcttgtgaaccctccactgaaaaagatctcatctgatgagcatttcacataaagtgtcctgagtctgggaggcttgccgacttactcttggatacaatatcttcatactcctaagacttggaaaaacacaattttcttcctgcgggtatccccattggccgtgtcttgagctgctctggatgataacccgtaatcactgccaatacttgatacaaacagccgcaacacagtaaaccccaaagaactctacagatgatcatcaaggaccactggacacttaaccatttgactgccttgcgttcgacaattctcaactggcctccgtaaattctcattctcgagcactattacattcctaacagattggatactcctaatcctgcctcaaccttcacgcactgactacacatctcagtaccgcactgattgctcctaaagct

SEQ ID NO: 94053 - DNA, 1200 bp, Homo Sapiens
  misc_feature (166)..(166): n is a, c, g, or t
tttcaatctaccgcatgtagacagcatgcggacacattcaggcgtgagcgtgatcttcatagtggttgatcagagagctttctgagtggagctgacatgagactcctgaggagtgaagacgtgacatgtactccggtgctgctgtactgagaaagcaatcgtgatncccatcaccaagtcccgagagccttagcatctggcgggttatgcagagggacatcataaacaccatccctttcctgggggtttgctttctcactggtttctgctggtggctcaagaaactgaacgcctcgggggacatcatatgcgtcgttctgagagcccactgactgtccgagttgcgggggtgggtgattcggggacaggctctggtgccttcgagccaccggttctgcagctcctggaatgtcacagttgtattttacatgaaggtccttccctgctggcttggtgcaggttggaggaatgtcataaaccccctccggtctgaggtccggccttccagcttgtctcatgggaggggggaagtcatagtctttttccctaagccctgcttcatcccggcaagcagagggcggaatggcatataccccttttgtaggcgggatgtcatacaccccttgaggttttatctctcccactggaactgaaaacacagggccttttgctgatgagggagggatgtcgtataccccttgagtggtatgagaaggagggatatcatagacatccttttggtatctggatgggtactcgtatacgtagccatggcctgtcctcacgggggttatcacctttttacccacgtggggcccactggttcccccaatgcttctctgcactgatggtggcacctgatatacctcttgttcttgggtgccgtggccagtggggacttggtaaattccctgattttggtaggaaggtggcacttggtagatggtgtctcggggagcagcctgtgggtttggcacttgatagagcttctgttggccaaaggtctgctgcatcagtccagaggcaggctgctcgtgactggaggcagtctcctgcatgggaccaatcagaagcttcacccggttgcctgggacaatgccttgccgaccgtgtaacgagcacagccaccatccttccagtccccctgtgttctgctctatcctcgtgccgaattggcgcgcctcgacttcatactcttcc

SEQ ID NO: 94054 - DNA, 1478 bp, Homo Sapiens
ttcatccacgaagttgaggaacgcgcatgatcgccgacaggatgtactgttgtcagagtgtgtggtcggtaccgaggatggattggaggaggaagatatgtggtgtggggtggctgtggatggcccgggccaccgacgcctcgccgcaggccgtagatcatgtcgaggctcgtcgggggcactggtggaggtggggtggaggtgctgcgtggtcccggaggacgggcaggccgcgcgcaggggtaggctgcagggcagccaccagtgtgtctgaggaggcggcgccagagctcgtagcggaaggtgccatagggaaatgaggatatcgatgacacacacccactcacacagggctgccccatgtggcagctgagaactctgcatggacaaagaagactccactgaggaccagggtgataaaggcgatgacagccagcacactgtcgcagataggccacagccaggtccaggcggggcggtggccccttggtaggagagagcacagtgcaggcaaacaaagagcagccccgcagggaaggccacgccagctccgacgtagtgcagagacctggcatgatccacctgaaagttgccaaccaccaagaggcccgcagcgttggtgcagcctgtgatgagtgccgtggtgttaacccaagagtgccgactctgctccaggagctgcccgtagcgcaggaggcagatcagggccaccatgaaagcacccatgttgccaatgaggctgaagaggcagctttctgggggataggacgccacacttgctgatgagggggacatcggtccagggtgcagcaggtcttgggacccccttgctcagcagggtcaggagggcaggactcgttgtaggacctggcaggcaggacagggagtagactgggggaagggactgcccaccaggcccttggcctatagcctcaggcctcaaagaggactctctcccagacctcccctacagggacagaagatcccactccccagtgcccgcctgaagcagtaaccaaaggggcaaagggatagtgggaagtgggtaggtggcaagaagccatgcctggggacctatttcagagaagagcagtgaggctcagggttgcagtctggctcgtggcagcctcaggcccaagaggggacagagatgaaggaagctttagagcaaggttgtctgcagagtccttcataccagttctccacagggcatacatggtgcttcatcacagccatggcatacacagtccatatgccagtgattggagaacgctcgacaggtctgacagccaggaggatccagcgcggtcatgacgggaggggacgccagggtggtcggttgcgtgttggcggggaggacaagaggtagatggggaagtgggggcggaccagctaccttgagatgtttctgccacaaccatcagctgtcctggcctccccggagcgccccgccgccgccgcacctgctcgccccctcg

SEQ ID NO: 94055 - DNA, 629 bp, Homo Sapiens
  misc_feature (21)..(21): n is a, c, g, or t
gaagaggttctgcttgtccgnccgctgatgggctgcaatgcaccggtccagccagcggattgacctgtacatggcctcctccacacgtggcccagtcacagtactgctaaccacgtcgtccagctgcatgatgatgtccgagcccagcgcattctggatctgcacggatttctccgggctcagcagggtctcattgccgtcgtagggggagcggaagcggacgccctcctccgtcaccgttagcagattatgaggccaaattcaatgaagccagtggagaccagttggctttctggatcagctcagggtcaaccggcacttagacccagatggtaggtattgcccaggcagatgcggcaacaccagagcagtccagcatgttcaggtcgtgatgcccttcatggtggcctgcgtgcaccactggcatgaacacaggagtggccactgtcaccatgcaggcagccacagctcgcctgcaccgggccactggagcaggctgcattcaggccaccagccgcatgatccgtggggccgactcacagggaagcctgggtagctgctacccgcaatcattgactgtccctcgtgccgaataagccacgccagcctcgtacttagacagatttttt

SEQ ID NO: 94056 - DNA, 1021 bp, Homo Sapiens
ataggctagtacgaggctgggtgtgcgaattcggcacgagggacagtcaagatggcgggagcagctacccaggcttccctggagtcggccccacggatcatgcggctggtggccgaatgcagccgctccaggcccgggcaggcgagctgtggctgccgcatgggacagtggccactcctgtgttcatgccagtgggcacgcaggccaccatgaagggcatcacgaccgaacagctggacgctctgggttgccgcatctgcctgggcaatacctaccatctgggtctaaggccgggacccgagctgatccagaaagccaacggtctccacggcttcatgaattggcctcataatctgctaacggacagcggcggtttccagatggtgtcgctggtgtctctgtccgaggtgacggaggagggcgtccgcttccgctccccctacgacggcaatgagaccctgctgagcccggagaaatccgtgcagatccagaatgcgctgggctcggacatcatcatgcagctggacgacgtggttagcagtactgtgactgggccacgtgtggaggaggccatgtacaggtcaatccgctggctggaccggtgcattgcagcccatcagcggccggacaagcagaacctcttcgccattatccagggtgggctggacgcagatctccgggccacctgccttgaagagatgaccaagcgagacgtgcctggcttcgccatcgggggcctgagcgggggtgagagcaagtcgcagttctggcggatggtggcgctgagcacctctcggggtgccgaaggacagccccgatatttgatggggggtggcgtatgcactgatctggtagtctgggtggtcttggatgtgcatgtcgctgggtttcccccacgacagggctttggtcgccctggtgccgtgacgccgttaggaaggttgaagaattggccaaacggggggacccccgaaaagcgggctttactgagaaagagggcacccaaatcatttgcgcacga

SEQ ID NO: 94057 - DNA, 867 bp, Homo Sapiens
  misc_feature (61)..(95): n is a, c, g, or t
cttatgggctccctgccgacgaacgacgagcgcagcgagtagtgagcgaggaagcggccgnnnnnnnnnnnnnnnnnnnnnnnnnnnnnnnnnnncagtcgacggtaccggacatatgcccgggaattcggccattacggccggggggacagaggctgtggctggaaggagctgggcatccggcctgaggcgcagcggtcgcgttagttcggcccaatggcggcaccgctgcttcacacgtgtttgtcgggagatgcggccgcttcgtcctctgcagtcaacgacgctgggcgcgtcgaggactgggtaagattcaggccgcttccttctgcgcgtctgggaccaaagctcaggaccgcgcttagaggagcggattgaacaggatgtgggacaaagctaatggcgtgtgataggagcacggggtcgagggtcatctcacgttcacagaaatgagctcattcctcctaactgggtaatagacatgggtggggcctggaaaagtgagtatgttctctgttctggaggcccactttcccgactgtgtctcttcgtgatttcccaggcctgggtactgccttctgcgccttgacccctcttccttccctcttcttcgtccaacatttggcaagggatttccctgggctatgtgggttatcagccgaacgttgtcactcatggcaaattgaatattacatctttttggtttgaacattggtttcgacacacgtattgtttcgcagtctttatttggctccacttttaaaatccctaaccccatagcactcttggcgttaactttcagagtcattaggatgctatgtttttcattatttactacgtgtaagtgaagcaaaccttgtaaaacac

SEQ ID NO: 94058 - DNA, 541 bp, Homo Sapiens
ctctcacaggccaggtgctgtcatccacaaaggatgggtgaaataactggggtcctcaggtcacggtctagccacaccagcttctcccaagtactaaccaggcttgaccctgcttagcttcagaggtcagacaagatctggcatgttcaggatggtatggctgtagaccaggctgggttctggccagagctgttgcactaggcaatgctgccagagatgaggaggcatcagggcagtcatcccttctgctgtttgccccaagaatgccatacaaacctggggatgacccttaaaagtctcccgtcacccccagtattggggggaagctgactattcctcagatgatagcccagtcacttgaagaacaggacaagactattctgtgtctagggggctcaagcactgtgtgtgggtctaacgaatgcattttgtggaaatgggctcagactccccaaagggccatccaacctatgggagtgtctggccttctgaggtcctgaaatgtctcttttgtcagtaaacagctaataccctcaaaaaa

SEQ ID NO: 94059 - DNA, 339 bp, Homo Sapiens
tttgcagcatgcagactttaagtgactaggaaacagaatcattacccaaggaggccatgctatggtgattttctggcatcatgttccactgcagggctctcaggactgagtgtgagacttttccatttcttctgagtgtagtctacagataggtcctcatatgccacagtatcctggggcctgaccatccgaagtacagttgcccctgcttggtctcctgagttccccacttgaggaagggtaggaactggagaagtacattgagcgaagtccccactggggaggtggtgtgtccctgggtcataaggaggctccaggtgggctccaggggctgagccc

SEQ ID NO: 94060 - DNA, 777 bp, Homo Sapiens
  misc_feature (683)..(691): n is a, c, g, or t
ggcggatacgctggagtcctcgctggaggacccactgcggagctttgtgcgagttttggagaagcgggatggtacagtgctacgactacagcagtatagctccggtggcgtgggttgcgttgtgtgggacgctgccattgtcctttctaaatacctggaaacgcccgagttttctggcgacggggcccacgcgctgagccggcggtcggtgctggagctgggttcgggcaccggggccgtggggctcatggctgctaccctcggggctgatgttgtagtcaccgatcttgaggaattgcaagacttgctgaagatgaatattaatatgaacaagcatcttgtcactggttctgttcaagccaaggtactgaaatggggggaagaaatagaaggctttccttctccacccgacttcatactgatggccgactgcatatactatgaagagtctttggagccattgctgaaaactctaaaagatatcagcggatttgaaacttgtattatatgttgttatgaacaacgaacaatggggaaaaatccagaaattgagaaaacaatattttgagaaatttccatcgtgaagcctttaatcatcttacccaaggtctctaacaacctgggtaaactaaagatgtgaatagagcatgtgaatacagcatgggaagattgtgttcacagannnnnnnnnccggcacgtccttagagatccgatgtatagatgatgaccaccaggggctgtctgcaatacgaaaaattcctgcttgcctgctgcct

SEQ ID NO: 94061 - DNA, 701 bp, Homo Sapiens
  misc_feature (682)..(682): n is a, c, g, or t
gtacggaatgccggaagggccgggctcaaagctccgcctctggcgcgaccgacgactggagcgcagggcaggggtagaggctcgtagatggaactggtagtcagctggagagcagcatggaggcgtcctgggggagcttcaacgctgagcggggctggtatgtctctgtccagcagcctgaagaagcggaggccgaagagttgagtccgttgctaagcaacgaacttcacagacagcgatccccaggtgtttcatttggtttatcagtgtttaatttgatgaatgccatcatgggaagtggcatccttggcttagcttatgttatggctaataccggtgtctttggatttagcttcttgctgctgacagttgctctcctggcttcttactcagtccatcttctgcttagtatgtgtattcagacagctgtaacatcttatgaagatcttggactctttgcatttggattacctggaaagttggtggtggcaggcaccataataattcagaatattggagctatgtcatcttatcttttaattattaaaacagagcttcctgctgctattgcagaatttttgactggagactatagtagatattggtatcttgatggacaaacactactaataatcatatgtgttggcattgtgttccctcttgcacttcttcccaaaataanctttgttagctacaccact

SEQ ID NO: 94062 - DNA, 1205 bp, Homo Sapiens
  misc_feature (81)..(115): n is a, c, g, or t
cccatgatcatcactataggggctagtcggcgtatactgaacgacgagcgcagcgaagtagtgaagcgaggaagcggccgnnnnnnnnnnnnnnnnnnnnnnnnnnnnnnnnnnncagtcgacggtaccggacatatgcccgggaattcggccattacggccgggtctggtaggctgccctgctttgcagaagccccactgcatgaaggcctgagtgcaagcacccttgctcctgtactgcccccagcagcgcagtctggggtatttcccctgctgaggagtgacagggctggagactgtgtctgctttctgcctcctcttccacacatcctgggtcagcctttcccaagtgatactgcccctggggtgtcctaaccccttggttgtgcagggactggtagcttggatgacatggctcagagtcccagcatccacttgaaacctccctctccacctccccgcccccgagagctacagcgtgtgatggaatcagtgaccggccaggttagcctctcccctcttggcctcctttcccacacgggcagatcatcagccttcatgtcctttgtggaccctgtctgttacggagtcacactggcccctgccccaaccagaagtgactcagtgcctcaggatcttatggctccttcctccacgctgtcgggactcttaacagggcgctgccgtacagactaagagtgccgtacggacgggcacagattgtgcttgataggtcaggtccaagatacagtgggttctagcaatttcccccagggcatcacgcgcggcctaggggcccaccctttctgactttacattaccactctacaactggcgcatcaccactatgagaaccccacaccagtaccttcctatacgtgccgaatacgtcggagaacacttcgcacactcacgggctcaaagcacaccattccgtcgcgaaagaaccccctgaaaccgcgagcacacaacatccgtatgactgcccaccacatagtccactgaaaaaatgctgtagtactaccagcaccaccacacggctggcatctcccaccatgtatggtcccagaaacgtgtcctcaacgaccgtgcccccagtgatccacacctagctggcgccaccagaagaagcggttgaatctccgtggtagtgcactcaggctcccgcgccgactcggctgctaaacaagctggccagggttgtg

SEQ ID NO: 94063 - DNA, 899 bp, Homo Sapiens
tatggctaagaaaactcttatgactagatggcttaagtccaatatgtcaggtgcccagcccggaccaacttaggaaaactgtaaatatagcatctccagaaaagagatcttatacttggttctagaaatctgcattgaaacctacttggattatattttaggaagatctatagcctagaatagataatttgaaaaatctactgataaggaagcaaatcaattatactctattgaaatactgaattaagatttcaggatttcagaacactatgaaatcgctaaactttcttttgagaatatcacaaaagagtaatggaaatttttcacctaaaagaaataagaatactttggatgacacacagcaatattcaagaagaactttttactgcttttcccactcttacttgttttggactaattcagtttctagaaatcagatctacatattttgtcatgtaataactattttcagttcatatgcaaatttgtccttgtttcctactaaaaattctctgaatacacaagaatctcagagtcctaattttggataccaaaaacacaaagtacttctaacctaaatgatatgatttttcaaactttcttttcaaccttaagagcagaacttctagggacaaaaaatagctgtttctcccctttgatatgaattattatgcaaagaatgacagacatagagactgcaaaggccaaagggacatatgcaaagtagagacattaagttacaaaaagaaacacatgaaaaacttgagagcaagtttcaaggcatccattcttccccctgaggaattcatttttaaggttaaaatatatcttcaagcctcagctcagtatcccggccgtaatggccgaattcccgggcatatgtccggtaccgtcgactg

SEQ ID NO: 94064 - DNA, 1169 bp, Homo Sapiens
  misc_feature (1053)..(1087): n is a, c, g, or t
cagtgtttaataaataccttgttcctgtatgttgcacgttgcgaatgtgtttaaggggcaatcactggccccctttttccgggtaacaaggggtaaaccggcccttcgggaacggttaggcacgggtttcctgctgcccaggcattaaagcattccaagatgttggacaataacacatgccccacaccggtattttatgaagcccagattccagggacagtgacgaacctaaggtccacgggtcacggtacccaaccaggcccagtcgccgcgagcagataccaggccagtcaaatccgaaccaagtgaggtactgggaacccaaaatttatgccaaaagagttcgggatcaatacagcgataggaaaaccggtaatgaaaaacattttgccacttcgaaatcaaataaagctatctagaaaaggccaagtaaagggtaatttcaagagacagaaatactcaaacaaggaaaaagaaattaataaatgttaactacagcaatgtaaatatggtcatcccaagtcaacccgtaattgaagtactggcttaatacatcacaatggtgacattttccgtaataaatagaagagttcttgaaaatacaaaggtgcgtattgggatagagagctgtttttatttatatcatcatagctttcagctaattaaccttcccgcttgtctctactgagggtttttgtccaaaccagagggccttacaagccttaaaaggatcattctctgtaaagaaaactaaatagctgccctgtattttatacatgtgggacaacctgctttgtttcactagtttctaataaaacaaagacaaatgtttagttgcgatcagagtactgcaaaagcatcagactccaggagcttgctaaaatctcaggccattgctatcatctcagcaaagaggaatgcctgtcacacaaaccctcattgttcaaaagcaaaacatgaaaaaggagttggatttctcttttcctttcttcttcccttttccccggccgtaatggccgaattcccgggcatatgtccggtaccgtcgactgnnnnnnnnnnnnnnnnnnnnnnnnnnnnnnnnnnncggccgcttcctcgctcactacttcgctgcgctcggtcgttcgctgcggaccgagtagcgccctatagtgatctatacatct

SEQ ID NO: 94065 - DNA, 963 bp, Homo Sapiens
  misc_feature (53)..(91): n is a, c, g, or t
  misc_feature (95)..(129): n is a, c, g, or t
aatgtaatcgaatccacttaataagggcgcgcccttaagtttcgggccgaagnnnnnnnnnnnnnnnnnnnnnnnnnnnnnnnnnnnnnnnccgnnnnnnnnnnnnnnnnnnnnnnnnnnnnnnnnnnncagtcgacggtaccggacatatgcccgggaattcggccattacggccgggcagtagttaataatttctatagttctgccttaatacgtttgcctcctaaagtccataaattaatagaaatacaggaatttttattctacaggaaagcccctttcaccaaccactcccattcctcacagttcacattttcaaacccagaaaccaggagatggtaatttttgtatcatggaacctttctgcaaggcccattgaaatagtttgtttcattaatacattaaatattacctatagaacataaactccttaacaaattaagtacaatcagaaattaagataaagcatctcttaaattttaaattcaaatttactgtaactttttgtgaatacatatgtggtgcaaagaggcctatttgtaaagcctgttaggtatgaatttaatagccatatgtattaattaatttgaaaactgtcattggcagctggtccagacaggaactggcaaacagtactcattcactaggtagtatctaggggctatttgacagcttccgtttcctatagtgaaagcttttatctgattacatggtgtgtgcatgtggcaagggctgagtgctgtgtatactgtcagctgttgtgaaattattcagtagaaaccgtagctttcacaaccagaatatttccattcttatatctgtacgtggattgagggacagaagcaggtcacgattaaaaattcaaaacaatattgaggtagttcatctttaaataatcctgaatgaggtctgtacatttgtgatgtgatctgtccttttattttgtaaatgaatcttctaga

SEQ ID NO: 94066 - DNA, 629 bp, Homo Sapiens
  misc_feature (67)..(128): n is a, c, g, or t
cagtcgacggtaccggacatatgcccgggaattcggccattacggccgggggttagccaggatggtnnnnnnnnnnnnnnnnnnnnnnnnnnnnnnnnnnnnnnnnnnnnnnnnnnnnnnnnnnnnnntgagccactgcgcccggccacattcagttcttatcaaagaaataacccagacttaatcttgaatgatacgattatgcccaatattaagtaaaaaatataagaaaaggttatcttaaatagatcttaggcaaaataccagctgatgaaggcatctgatgccttcatctgttcagtcatctccaaaaacagtaaaaataaccactttttgttgggcaatatgaaatttttaaaggagtagaataccaaatgatagaaacagactgcctgaattgagaattttgatttcttaaagtgtgtttctttctaaattgctgttccttaatttgattaatttaattcatgtattatgattaaatctgaggcagatgagcttacaagtattgaaataattactaattaatcacaaatgtgaagttatgcatgatgtaaaaaatacaaacattctaattaaaggctttgcaacacagaccccgaaacccgcgagagcaaagaattgccttg

SEQ ID NO: 94067 - DNA, 899 bp, Homo Sapiens
  misc_feature (41)..(80): n is a, c, g, or t
  misc_feature (84)..(118): n is a, c, g, or t
aagactttggatctaactatagggcgctagctcgctagagnnnnnnnnnnnnnnnnnnnnnnnnnnnnnnnnnnnnnnnnccgnnnnnnnnnnnnnnnnnnnnnnnnnnnnnnnnnnncagtcgacggtaccggacatatgcccgggaattcggccattacggccgggcaaatgtgtaaactagcgggggaagacagtattgtatcataaatgagatgcgtagtttgttttctttcatgggaagtagagataaaaatatatacatttctctaattgagttgtttagagaaagaactaatgtctcatatgatgtatttacttattttaaaaaaaagaataggaatgagatgtccctgagctgtacttttctattattataaggcctttaggcatcagtgcatctgggttatcaacattttctcaaatgctgtcaatattttactgtaatttatgttcttatatttatgtatatttgttaaaactgtaaaaaaatttcacagatttttttccaatacctgtgcaagatacatgtgtagctcaaaactatttgtgatctactgtttgcatgtaagagaccaggatatgtaactcttatattttaagtgtatacatattgtgtatataacatatggatattaaaaatggggaattgcacattttacctttgtggacagtaatttctatcacagttagaaggaaatgatagtcaaatacacgtttagattaaaactagtttaaaaaattatacaatgaatctaatcaaaatgtgaattagtagtcaaaagcgataatttaataaagcattttacgttactaaatttgttcatttcaatattaactaaatttcccctcattcaaagcaatcttggtgatattacttcggtattaacataaagaac

SEQ ID NO: 94068 - DNA, 546 bp, Homo Sapiens
  misc_feature (43)..(77): n is a, c, g, or t
aataaacggacgagcgcccgaggtatgagcgaggaagcggcgnnnnnnnnnnnnnnnnnnnnnnnnnnnnnnnnnnncagtcgacggtaccggacatatgcccgggaattcggccattacggccggggagttttggcgagagtttgtggaagatggcgcctgttgtgacaggtcattgaaattatgagactatcattcaaatggaagcattatagttcttcggaaccattatgatctcaaaacgaaaggagaatgatacagatacactggctgaggtgttcagaggtgcagtcgaagtgttccaagctgtgacgttaacttaacatgttctgtgaagtaccatgggcgtggattaaaaggaaatttggtgagcggcctccacctaaacgacttactagggaagctatgcgaaattatttaaaagagcgaggggatcaaacagtacttattcttcatgcaaaagttgcacagaagtcatatggaaatgaaaaaaggtttttttgcccacctccttgtgtatatcttatgggcagtggatggacagag

SEQ ID NO: 94069 - DNA, 910 bp, Homo Sapiens
cagtcgacggtaccggacatatgcccgggaattcggccattacggccggggagacaagcttggtatcttctgaggacggtgcccgagagcaggagaacatggatgacacaaacagcgagcagcagtttagagtcttcagagacttcgacttcctagatgtggagctggaggatggagagggtgagagtatggacaatttcaactggggagtgcgcagacgttctctggacagcctggataagtgtgatatgcagattctggaggagcgccaactgtcaggaagcactcctagcctgaataaaatgcaccatgaggactccgatgaatcatccgaggaggaggacctcacagccagccagatcctggagcactcagacctaatcatgactctctccccctctgaagagacgaatcccatggagctgctcaccacagcctgtgactcgacccctgcagaacctcattcctttaacaccagaatgtccagctttgatgcttccttgcctgatatgaataatctgcagatttctgagggttcaaaggctgaagctgttcgtgaggaggaggacaccaccgtgcatgaggatgatctttctagttccatcaatgaactcccagcagcttttgaatgcagcgacagctttagcctggacatgactgagggggaagaaaaaggcaatcgggcactggaccaggtttaccctggcgagctttggagaaggtgacacggcaagtctctccacctccctcgcccttcttctcagacattccttgccgactttcaagccaggagacctgtggacgatgccgaggaggcctggtgcagcacattcaaccagcttatgtgtgactccaatgggtcctgtgctgtgggtacatttcatggtgtcttcctctgtgttaagaatag

SEQ ID NO: 94070 - DNA, 1592 bp, Homo Sapiens
gccgggcatggcggcggcggtggcgggagctgctgtctgagcagcggttgcggaccgagcggaacttggcccaggagcccgggcctagggagaggcgcggcggcggcgggagcgcgaacggctggagctggccttcttcgccttctcctcggctgtggagccctggtggggggtctgcgcccggtcaccatgacgacgccggcgaatgcccagaatgccagcaaaacgtgggaactgagtctgtatgagctgcaccggaccccgcaggaagccataatggatggcacagagattgctgtttcccctcggtcactgcattcagaactcatgtgccctatctgcctggacatgctgaagaatacgatgaccaccaaggagtgcctccacagattctgctctgactgcattgtcacagccctacggagcgggaacaaggagtgtcctacctgccgaaagaagctggtgtccaagcgatccctacggccagaccccaactttgatgccctgatctctaagatctatcctagccgggaggaatacgaggcccatcaagaccgagtgcttatccgcctgagccgcctgcacaaccagcaggcattgagctccagcattgaggaggggctacgcatgcaggccatgcacagggcccagcgtgtgaggcggccgataccagggtcagatcagaccacaacgatgagtgggggggaaggagagcccggggagggagaaggggatggagaagatgtgagctcagactccgcccctgactctgccccaggccctgctcccaagcgaccccgtggagggggcgcagggagggagcagctgtagggacagggggaggcggcactggtgcgcggtggggtggcgggtgccggttcggaagactctgcgtgaccggggagggactctggcgacggggcgaaacgcctgaggccacaccggaagcgccaacccgtgcgcgacccaccaaggacgccccacagcagcaccaaggatgacaagagacaccccgaccacccgaagcacaccaggcccacaaaaaacccaactgccaacaggagacacgcacaggcggaacaaaacgcacccaggccccacgacaccgaaaggcactcggcgcaacgcaacaagactccgcgaaaactggacaccgcagacgagacacaacactactacccgaggcaagcactgcgacacctgagaacaaaggcacccctcggaagcagacagcgggccacaacagcccacagccacaacgccacacgggcgcaacgagcccaacggcaagagcggcccactcgacacagagaacggagcccgaccacacgatgacaccacccccggccaggggaaccccaggatggcacacaaagcgaggccagagagacaggaggacaggcaccgcgcatagcccagcgaaacccacgccagaaccacagaggcacacctaacacaggacagcccagacgcaatagggcaccacagacccttaggcaaagacgcaatgcacaaagccgaacaaacccacgacacaaacaccacacaaacaatcgaaacgcgtcggaaagagagagcgacggcacacgaag

SEQ ID NO: 94071 - DNA, 1012 bp, Homo Sapiens
  misc_feature (219)..(521): n is a, c, g, or t
cccaagttgtctatcagatcctactggttgactctataataaaccctcaaataaattgtagaaaccaacaattttgccagccatgtccaacttcttatcggaaagcttgtttcaaaatgaactgtgtaaaatggtcttaaaatacagccagcaattccgaattttttcactagtcatagctttaataaacttgtactctcgttttgtccgttctgttcnnnnnnnnnnnnnnnnnnnnnnnnnnnnnnnnnnnnnnnnnnnnnnnnnnnnnnnnnnnnnnnnnnnnnnnnnnnnnnnnnnnnnnnnnnnnnnnnnnnnnnnnnnnnnnnnnnnnnnnnnnnnnnnnnnnnnnnnnnnnnnnnnnnnnnnnnnnnnnnnnnnnnnnnnnnnnnnnnnnnnnnnnnnnnnnnnnnnnnnnnnnnnnnnnnnnnnnnnnnnnnnnnnnnnnnnnnnnnnnnnnnnnnnnnnnnnnnnnnnnnnnnnnnnnnnnnnnnnnnnnnnnnnnnnnnnnnnnnnnnnnnaaattatatattgatagcttattcatttgttaattcttgttccatggaataagcctatttttgaggcttggcacgatattaacaagaaatttaaacaggacgctcatgtccagaagtttaactaaaaaatcttttctatatataatataactaccaacttaaattacaaattgcttccactaaaaattatcactccaaacttcagaaaaagtaaattaaaataggttatggcaaaaggtacactctgaagcatgttcacattacaaagataaatgataaaggttaaccagcaaaaattcaaaaaggcatatatgcaaacatctgtatgcaaactttcatgaataagatataagaaatgattcatttggctaattttatgtacagcttgtatacaatttaaaacaagtacaactgaatatgtttctatgtaaaagccacaatcccggccgtaatggccgaattcccgggcatatgtccggtaccgtcgactg

SEQ ID NO: 94072 - DNA, 926 bp, Homo Sapiens
  misc_feature (77)..(111): n is a, c, g, or t
tgaataatcatataggggctcactcgttgtatgcgaacgacgagcgcagcgaagtcagtgagcgaggaagcggccgnnnnnnnnnnnnnnnnnnnnnnnnnnnnnnnnnnncagtcgacggtaccggacatatgcccgggaattcggccattacggccggggagaaataagttaggataaaggaaatttgaatctcaaaaatatcaaaagtaaaaatgtattctcaaaactttaaatttatgaagaatgatgacagtagaagccttcctcttcccttgtcaccttgagataaaaattctttaggcaggaaaagaaatggaagtcagaaaaacattagaataagacaataatgtgggtgtctgaaaaggaacaaatacttattcctcacatagggttagtgacaatgggaaaagggacgggagtagaagccacagacatatctaggagccctgaatagaggcgcagtctgcctcacctcctgaatgaagctgtactagataaccatgtagctttccctgtgccactctggcatgaaggagacagtatagtgaatatggctacaggatgtttcttggaaacatgccaatatcttcagaaatccccagccctttcccctaacccctcctgactaaggaaagcatgagcttatgagagaaaccctaggaagaacaacaccagttgagacaatgtagcagcagcagtgggtgctgtgtcctccaatggattcgccatctccgaggagaaactctcacagaggaaatgggtcagccagcgaacttcaaggctctacagagctatgaataccatgaggattatacttaacctggtaacatgaataagtgagttaaatataaaatggaagaaatcatccaaacataactgacatatctgatacagtaaagtatggtgcaaagaaactaatccaa

SEQ ID NO: 94073 - DNA, 447 bp, Homo Sapiens
aacgggtgatgcggttgggcagaggtgctccccacatctcagacgatgggcggccgggcagagacgctcctcactgccgagatgcgatggcggccgggcagaggcgctcctcacttcctagatgggatggcggccgggcagagacgctcctcactttccagactgggcagccaggcagaggggctcctcacatcccagacgatgggcggccaggcagagacgctcctcacttcccagacggggtggcggccgggcagaggcgctcctcacttcccagactgggcagccaggcagaggggctcctcacatcccagacgatgggcggccaggcagagacgctcctcacttcccagacgaggtggcggccgggcagaggcgctcctcactgtccagactgggcaggcaggtctgagggctcctcacatcccagacgatgggcggccaggc

SEQ ID NO: 94074 - DNA, 1448 bp, Homo Sapiens
  misc_feature (1254)..(1254): n is a, c, g, or t
  misc_feature (1410)..(1410): n is a, c, g, or t
ggaattcggccattacggccgggggcgctgtggggcgggggcgaggttcgggctggttgttccgttgcgagctgcagctgcgatctctgtggtaggcccagaagtgtatgctgacttgtaaagtgaagaagccagtggtgctgcgggtgttcttttggggtagtgtctgggatccagtacgagttgaatcattgttcaaataaggtgtaattgaaaagtgatcctctcttcagagatgtcaaaaacaaacaaatccaagtctggatctcgctcttctcgctcaagatctgcatcaagatctcgttctcgttcattttcgaagtctcggtcccgaagccgatctctctctcgttcaaggaagcgcaggctgagttctaggtctcgttccagatcatattctccagctcataacagagaaagaaaccacccaagagtatatcagaatcgggatttccgaggtcacaacagaggctatagaaggccctattatttccgtgggcgtaacagaggcttttatccatggggccaatataaccgaggaggctatggaaactaccgctcaaattggcagaattaccggcaagcatacagtcctcgtcgaggccgttcaagatcccggtccccaaagagaaggtccccttcaccaaggtccaggagccatttctagaaactctgataagtcgtcttctgaccggtcaaggcgctcctcatccctcccgttcttcctccaaccatagccgagttgaatcttctaagcgcaagcctgcaaaggagaaaaagtcctcttctaaggatagccggccatctcaggctgccggggataaccagggagatgaaggtcaaggaccagacatttctctgggaggcaccctctcaagatacaaaagcatctgagagctcgaagccatggccagatgccacctacggcactggttctgcatcacgggcctcagcagtttctgagctgagtcctcgggagcgaagcccagctctcaaaagccccctccagtctgtggtggtgaggcggcggtcaccccgtcctagccccgtgccaaaacctagtcctccactttccagcacatcccagatgggctcaactctgctgactggtggtggccgtgtatcagtctgggaacacccccagggtcagttcgaccattggtttctgggtccctggagtccaatccaaaaagaacccctggtgggtaagaagtccaccatccaactggctccccattattggctcatctccanaaaggaggaaaaggggctggcttccgggaaggagcagccctataccaaagagggtatcctaagaagaagccggaaaaaccgaagaagggggaaaaaattagggggaccggggaaccctacctgtttctccgtgcgaagtatgcatgacggcggatnacgtaagaagaaactttggttggcccggctcccgccgc

SEQ ID NO: 94075 - DNA, 841 bp, Homo Sapiens
ttcacagggagaaaagtaaatgaatccagaaatgctcaccagtgcatagatatgtaactccagtaacccttcagatgaccagtaattcggctttctaaatgatgttacccatttacaactgtagcccattttgccccctcccatttgttgtttcctgggacatagctgctgataataaacactgttatgaacatgcctcctttagttgatctcaccatttcatgaaacatgtatacagaattcattatacgataatacacctgttttatcttctgacacacagcacagcaccagtaagtagatgtgctggagggtagaggaagaggaatgaatgtacgaaaggcaggggagaaagggaagggtatgtataacaaaataaggaaggaaaataaactgaaagggaaataaatgtcaaatggacttactataaaacacaataatcaaatctttgacaatggtgtgcattattctatggtagaacattaaacaaatgtctttagaaactggcttgaaaaagatttctaagcagccaactgctgaacatcatcttgagaaacagctaaatgacagatacatgtacagagtaggtaacgaacatatgaataaagaggcaagcatttgtgtgtgtcagaagttatactgttctgagtaaattattaaaaatcttgtattttaagcttttgcaagaaaaagctcttgtagcatttagctgccagaatgttataactgattatgtaaccatccaacatcgttctctatggtttgtgcaagctaatattgttgaggtcacccccggccgtaatggccgaattcccgggcatatgtccggtaccgtcgactg

SEQ ID NO: 94076 - DNA, 818 bp, Homo Sapiens
  misc_feature (79)..(113): n is a, c, g, or t
aaagatgtatagatcatataggggctactcttcgtacgaacgacgagcgcacgagtcagtgagcgaggaagcggccggnnnnnnnnnnnnnnnnnnnnnnnnnnnnnnnnnnncagtcgacggtaccggacatatgcccgggaattcggccattacggccgggattcttttttgatgttcacattgtgccatctgtagccattaggaattactaagttggttcctgtattttttaattccttcccccatttatctttgatagtttcttgttttctggaatagtaagacgtcccaggctcatgtatacttcctgcgtcatgcctggaatcagccatgtttctaaggaaccgtgatccttttaatagataatactatttggaagcaacaatttggatgctgacatgttcattcctactggttgtcattgtttctgggtcttttcagtaggtagtgctaggtaaatcatgaattaatggtgatatttcaaatttataaatacaggctaattttgggttatgttatacttgtatcatttttatcttatgctgaatatcttggttcttcaaatgatgttgttacttatgtaagtatcacaacatatatgtgtttctaaataatacagtattactactaacaataagactgttaaatgcaatttgggcttttgttttccttgtctttaggacatatcccactagaatgtaatgtcaaaacactgtgcttaaagtcacttgaaagaatttttttgtgtcatacagcaccaacttaatagttaggttcttgttctctaatgctaggattgctttttcttttattac

SEQ ID NO: 94077 - DNA, 884 bp, Homo Sapiens
  misc_feature (58)..(58): n is a, c, g, or t
  misc_feature (80)..(114): n is a, c, g, or t
gaacgtatctagctcatatggcgcatcctcattattcgaacgaccgagcgcagcgagntagttagcgaggaagcggccgnnnnnnnnnnnnnnnnnnnnnnnnnnnnnnnnnnncagtcgacggtaccggacatatgcccgggaattcggccattacggccgggggccgcggggcggtgccaagatggcgaggcccaaagaggtgaggagccggcagcgggggcggctgtaactgtgaggaaggctgcagagtggcgacgtctacgccgtaggttggaggctgtggggggtggccgggcgccagctcccaggccgcagaagtgacctgcggtggagttccctcctcgctgctggagaacggagggagaaggttgctggccgggtgaaagtgcctccctctgcttgacggggctgaggggcccgaagtctagggcgtccgtagtcgccccggcctccgtgaagccccaggtctagagatatgacccgagagtgcccatctccggccccggggcctggggctccgctgagtggatcggtgctggcagaggcggcagtagtgtttgcagtggtgctgagcatccacgcaaccgtatgggaccgatactcgtggtgcgccgtggccctcgcagtgcaggccttctacgtccaatacaagtgggaccggctgctacagcagggaagcgccgtcttccagttccgaatgtccgcaaacagtggcctattgcccgcctccatggtcatgcctttgcttggactagtcatgaaggagcggtgccagactgctgggaacccgttctttgagcgatttggcattgtggtggcagccactggcatggcagtggccctcttctcatcagtgtaggcgctcggcatcactcgcccag

SEQ ID NO: 94078 - DNA, 1111 bp, Homo Sapiens
  misc_feature (42)..(86): n is a, c, g, or t
  misc_feature (90)..(124): n is a, c, g, or t
aaaagactgtatacgactcactatagggcgctagcgtcgtannnnnnnnnnnnnnnnnnnnnnnnnnnnnnnnnnnnnnnnnnnnnccgnnnnnnnnnnnnnnnnnnnnnnnnnnnnnnnnnnncagtcgacggtaccggacatatgcccgggaattcggccattacggccggggagtattgtgtgcaaaatcagagaggggtgcaagatcctgatttttcaggagttcaagcgacaatggcagcccaatacggcagtatgagcttcaaccccagcacaccagggccagttatgggcctggaaggcaagagcccagaaattcccaattgagaattgtgttagtgggtaaaaccggagcaggaaaaagtgcaacaggaaacagcatccttggccggaaagtgtttcattctggcactgcagcaaaatccattaccaagaagtgtgagaaacgcagcagctcatggaaggaaacagaacttgtcgtagttgacacaccaggcattttcgacacagaggtgcccaatgctgaaacgtccaaggagattattcgctgcattcttctgacctccccagggcctcatgctctgcttctggtggttccactgggccgttacactgaggaagagcacaaagccacagagaagatcctgaaaatgtttggagagagggctagaagtttcatgattctcatattcacccggaaagatgacttaggtgacaccaattttgcatgactacttaagggaagctccagaagacattcaagacttgatggacattttcggtgaccgctactgtgcgttaaacaacaaggcaacaggcgctgagcaggaggcccagagggcacagttgctgggcctgatccagcgcgtggtgagggagaacaaggaaggctgctacacctaatacggatgtaccaaagggcggcaggacggagatccagaagcaacgcacaacgccaatgcaacgaactccacagagtgggagctggacgagagagacacagcgcggataagacgaggagctctgaccgagacaaatctgcacacgctggaacgcatcaaccgtggcacgccaggacaacagagaaaggaagccaatggcgcacaga

SEQ ID NO: 94079 - DNA, 1381 bp, Homo Sapiens
  misc_feature (42)..(81): n is a, c, g, or t
  misc_feature (85)..(119): n is a, c, g, or t
  misc_feature (660)..(713): n is a, c, g, or t
aaaactgtatcactcactatagggcgctagcgcgttattagnnnnnnnnnnnnnnnnnnnnnnnnnnnnnnnnnnnnnnnnccgnnnnnnnnnnnnnnnnnnnnnnnnnnnnnnnnnnncagtcgacggtaccggacatatgcccgggaattcggccattacggccggggagtgtaagaaggccatctacaatcaagattgagagtggctctaacaagtgccatttttccttgttagctttcatttctcagccctttacaagattaaaatagtctgcagtttaatctctccaaagctttacggacagtgattctgtcctaaacaagacagtgactccaggatttctgaagactattgtggaagaagcatccattaaggccaagctataacatcagaaatggtgaatgaatacaagaaaattcttttgctgaaaggatttgagctcatggatgattatcattttacatcaattaagtccttactggcctatgatttaggactaactacaaaaatgcaagaggaatacaacagaattaagattacagatttgatggacaaacaaagttccaaggcgttgcctgtctagacaaactaatagaacttgccaaagatatgccatcacttaaaaaccttgttaacaatcttcgaaaagagaagtcnnnnnnnnnnnnnnnnnnnnnnnnnnnnnnnnnnnnnnnnnnnnnnnnnnnnnnccaggaagaagtgggtcttgcggcacctgcacccaccgcaagaaacaaactgacatcggaagcaagagggaggattcctgtagctcagaaaagaaaaactcaaaaaaaagaaaagactgaagccaaaaggaataaaggtgtcccaagagcagagtaagcccccgggtccctcaggagccagcacatctgcagctgtggatcatcccccactaccccagacctcatcatcaactccatccaacacttcgtttactccgaatcaggaaacccaggcccaacggcaggtggatgcaagaagaaatgttccccaaaacgacccagtgacagtggtggtactgaaagcaacagcgccatttaaatacgagtccccagaaaatgggaaaagcacaatgtttcatgctacagtggccagtaagactcaatatttccatgtgaaagtcttcgacatcaacttgaaagagaaatttgtaaggaagaaggtcattaccatatctgattactctgaatgtaaaggagtaatggaaataaaggaagcatcatctctgtctgactttaatcaaaattttgaggtcccaaacagaattatcgaaatagcaaataaaactcccaagatcagtcaactttacaagcaagcatctggaacaatggtgtatgggttgtttatgtta

SEQ ID NO: 94080 - DNA, 946 bp, Homo Sapiens
  misc_feature (827)..(861): n is a, c, g, or t
gtctgggttattgggggatgatccacagctgcagatgggctggctcctggagggacccggggcttactctgctcttgggacacctgtattccttttggcttcagtcttttctttgtttggagtttttcttgttctgagctacaggaatcctccctcttgcttccgatgtcagtttgtttcttgcggtgggtgcagtgccgcacagacccacttcttcctggtttatttttttcactggagctttttcttgtgttttaattttcttagcaaactgtttgacttctcttgtcgaagattgttaacaaggtttttaagtgatggcatatctttggcaagttctattagtttgtctagacaggcaacgccttggaactttttttccatcaaatctgtaatcttaattctgttgtattcctcttgcatttttgtagttagtcctaaatcataggccagtaaggacttaattgatgtaaaatgataatcatccatgagctcaaatcctttcagcaaaagaattttcttgtattcattcaccatttctgatgttatagcttggccttaatggatgcttcttccacaatagtcttcagaaatcctggagtcactgtcttgtttaggacagaatcactgtccgtaaagctttggagagattaaactgcagactattttaatcttgtaaagggctgagaaatgaaagctaacaaggaaaaatggcacttgttagagccactctcaatcttgattgtagatggccttcttacactgtcctaattccccccggccgtaatggccgaattcccgggcatatgtccggtaccgtcgactgnnnnnnnnnnnnnnnnnnnnnnnnnnnnnnnnnnncggccgcttcctcgctcactgacttcgctgcgctcggttcgttcgctgcggcgagctaggcgccctaagtagtaaccaaagtctt

SEQ ID NO: 94081 - DNA, 835 bp, Homo Sapiens
  misc_feature (151)..(159): n is a, c, g, or t
cagtcgacggtaccggacatatgcccgggaattcggccattacggccggggtagcagcaatatcataaccaaagcaagtaggaagttgactggtttggagaatcttcaagtagttttaaatactgtaatgtatcagattgttaaccaggannnnnnnnncctgtattactgctaaatatattactatattaatgcacttttgtatatataactgtcttctgtacattctgtacttactacagtgtatataaagcctgttttccctgaagctgtgagggaataacaatagttgtatcataagtcgtttctattttgagttccttcttgtacttgaaagtagttcagtagtgaaatctaaatgagtgtgtatggttgtaattaaaactggcaatgtggcagagctgtcttttgaaactgaataccagaatgaacaagttgtcgtttggttaagaactcttataatatatcatttctttggatgtaccctgagttgttacacagccccactcaactgctgcttactactttatacttctgagtcagctcctttcatgctctatcccagaatatttaccaacagaggagaactgtcccttttctgtttctcacagttggttatggatttataaacttttattgggtgaaagccccccagatacccaaatgtcatgtgggcaaacttattgtttttctgggcaggatcagatttctaggagagagcagaatttctagagagatagcattcatagtaaggtgaaaattggctagttttaatccatggtaatatgggcagaaggcaaatttttttggacaaaaatagatctatgcgtaattt

SEQ ID NO: 94082 - DNA, 1150 bp, Homo Sapiens
  misc_feature (56)..(94): n is a, c, g, or t
  misc_feature (98)..(132): n is a, c, g, or t
  misc_feature (596)..(679): n is a, c, g, or t
  misc_feature (909)..(917): n is a, c, g, or t
aagacttgcaaatagaactcaacttaattacggggcgccggcttagtgcgccgagnnnnnnnnnnnnnnnnnnnnnnnnnnnnnnnnnnnnnnnccgnnnnnnnnnnnnnnnnnnnnnnnnnnnnnnnnnnncagtcgacggtaccggacatatgcccgggaattcggccattacggccgggggggacttcagtgtctcctccatcccaggagcgcagtggccactatggggtctgggctgccccttgtcctcctcttgaccctcctggcagctcacatggaacagggccgggtatgactttgcaactgaagctgaaggagtcttttctgacaaattcctcctatgagtccagcttcctggaattgcttgaaaagctctgcctcctcctccatctcccttcagggaccagcgtcaccctccaccatgcaagatctcaacaccatgttgtctgcaacacatgacagccattgaagcctgtgtccttcttggcccgggcttttgggccggggatgcaggaggcaggccccgaccctgtctttcagcaggcccccaccctcctgagtggcaataaataaaattcggtatgctgaattcnnnnnnnnnnnnnnnnnnnnnnnnnnnnnnnnnnnnnnnnnnnnnnnnnnnnnnnnnnnnnnnnnnnnnnnnnnnnnnnnnnnnccccacagaaaaaaaacccccgacaggagcgccacacaaatattggagcactaacagcgggtctctatataaacaaggggcgcacaaataatgggaggcaaaataaaaaacacacaagaaagcacaggcacgcagccaaaaacaacacagcgcacatagaggacaaaacatgcgcaaaaaaggagacaccctcgtgagggaacaaggacacacacatcaaaaaccaggannnnnnnnncacaacaaagaggggcgaacaaaacacaaccacaccgagaagagagatatacgaaacacaccacccgagaacgggaaacaaatcaacaagaactgtcaacaagcgggcatgaaacgggcgtgctacaacacacagcacagacgaatacagggcccggacgcaggacaaaagaaaatagagcgcaccgaacgcgaataaacagacgctaagaggagaaaataatataacacggg

SEQ ID NO: 94083 - DNA, 622 bp, Homo Sapiens
cgcagtggccactatggggtctgggctgccccttgtcctcctcttgaccctccttggcagctcacatggaacaggtgagggctagagggcaggactcctgggtccctgtggcaagaagaggccagagaaaaggggtgggacttcatggtccctgagagtgacagagacaccccagtcctgagcttccaagaggctctggaggggcattgctggggaagaggaactgtgccggggagcgtgagcaggaaggttctgtgtctccggaggaatcagccctgactgctgggtcctaagctgtacttctggatccgcagggccgggtatgactttgcaactgaagctgaaggagtcttttctgacaaattcctcctatgagtccagcttcctggaattgcttgaaaagctctgcctcctcctccatctcccttcagggaccagcgtcaccctccaccatgcaagatctcaacaccatgttgtctgcaacacatgacagccattgaagcctgtgtccttcttggcccgggcttttgggccggggatgcaggaggcaggccccgaccctgtctttcagcaggcccccaccctcctgagcggcaataaataaaattcggtatgctgaatt

SEQ ID NO: 94084 - DNA, 521 bp, Homo Sapiens
cagtcgacggtaccggacatatgcccgggaattcggccattacggccggggccacctctggacaggatgcacaacaggatgctgaacggagctgcagccaccttggcactatggtggaatttgccgtggccctggggtctaagctggacgtcatcaacaagcattcattcaacaacttccgcctgcgagtggggttgaaccatggacccgtagtagctggagttattggggcccagaagccgcaatatgacatttggggcaacacagtgaacgtggccagccgcatggagagtacaggagtccttggcaaaatccaagtgactgaggagacagcatgggccctacagtccctgggctacacctgctacagccggggtgtcatcaaggtgaaaggcaaagggcagctctgcacctacttcctgaacacagacttgacacgaactggacctccttcagctaccctaggctgagattgcactcgccttctaagaacctcaataaagggactctggggtgtctgg

SEQ ID NO: 94085 - DNA, 1287 bp, Homo Sapiens
  misc_feature (75)..(109): n is a, c, g, or t
  misc_feature (337)..(371): n is a, c, g, or t
agatgtatagatactatagggcgctactcttcaccgaacgacgagcgcagcgagtattgagcgaggaagcggcgnnnnnnnnnnnnnnnnnnnnnnnnnnnnnnnnnnncagtcgacggtaccggacatatgcccgggaattcggccattacggccgggagaataaaattgtattcttatgttttaagcagggtcccctccacctctgagtggaagatggtctgggagcaaaggtgacaggtcttctaaaaaatctggccacattctcaacccaccacacccccgcttttttaaacagctatttaattgccattgtaatcctaaggattggatcaannnnnnnnnnnnnnnnnnnnnnnnnnnnnnnnnnnactaagaaaataaagtaataaagtgactgccaaatggagaaaactgtccactaaatatgaattaataagtgctattatcagaaattgtgtaaaagcaacataatggcactataaaaaggtattatcttagaatcaaaaaccttgggtttatattatagccctgctactttctagtcatatgacagtgatcaagctatattacctctttggcttgacaaaataggggtcatctctatttctggcttgttatgattgatgtgaaatattcatacaaactaccactgtgcctggtaagtagaagacactcaaatatgtcttggagtcacagtcaatactggtatcgtttaaatttgagaaaaaccaactttaaaaaatcacatagatacagttgtttactgctagaaattttatttaaattagttgatactctgtggttaggtaatgaaaaacaatggttttatctccattatgctgtgatagggaagagtaacacagttcaaatggccaaggcatacctgacaattaaaatgcatagttaaaggctaatactttcctgaacacaagaagacaagtctctacttgatactaatctccacagttaaatcattgatactttgtgccatacagtgaaaacagaaccatctaggtgttcacggattgtatttttccttatgaaaggtagaaggttagagaaaattattcccaatacaattaatacaaataaaattggttattaggtgccttttaattaggcagtaagggcatatgaagcttcattacctatgagaattttgtcaaaattatttcccagttaccatgttttaaaacagcctctcagaattccccacttctaatttctcctttctattctaccaattttactccatacctttttgctaaataaacattttcttcc

SEQ ID NO: 94086 - DNA, 994 bp, Homo Sapiens
  misc_feature (77)..(92): n is a, c, g, or t
  misc_feature (225)..(225): n is a, c, g, or t
ccaagaagggtttggcccccaggtttccaatagaaggattacccttttttgccttagggcccaggatttaagccccnnnnnnnnnnnnnnnnggattttggacctttcccccccaagcccgggtttagttggcccaaggtaaaataccccttggtaaaaggcaggcttgcttttcccaagaaaaaatgccaatggatgtaattaaaaatcattcaccatcacttntgcaggagactttctatagcatgaaagcctcaaattaaattcagagctccacataaagactaaggataaatcctacaatccctgacagagttgctggttccagtcgctggtgagcagaagaaatcttaccagcacctttacagtcaacagaaaatgctgatgtgactccattggctgaccccagttcgcacatggaaatttgataaggaggcctcagcttgatttccgtctgcatgtcagaaagatttatctttgttgaaagagacctgggattattatatcgctgcttggtcctctgaatgaagttatcaaattcaatgaaacagtatggtctgacagcagtatttgtcttcatcatgttataagtagtaatgaactccttctgaagctcatccaggaaagagaaggcgagaacatttgggtaattttcagtgcacaacatcatgtagctcactcccagagagctaataaaattaatgttataatgtccagttttcagtgtacatctatcaggaagttgagcaagtttcctcgaaagcattttaaaatactttctgcactcctgcattcctgtgctttgttcataatcagtagaagcagaaagtggcagtccatctctgacacgaatgactgaggcagataaaatcatagacatttcaaccaacagagaagacctgtcgagacgggacccgccgctccgagtgacgcgccccgaagtccccggccgtaatggccgaattcccgggcatatgtccggtaccgtcgactg

SEQ ID NO: 94087 - DNA, 735 bp, Homo Sapiens
cagtcgacggtaccggacatatgcccgggaattcggccattacggccggggaaaatgaactacctccaccagaaaatatagaagtcagtgtccaaaatcagaactatgttcttaaatgggattatacatatgcaaacatgacctttcaagttcagtggctccacgcctttttaaaaaggaatcctggaaaccatttgtataaatggaaacaaatacctgactgtgaaaatgtcaaaactacccagtgtgtctttcctcaaaacgttttccaaaaaggaatttaccttctccgcgtacaagcatctgatggaaataacacatctttttggtctgaagagataaagtttgatactgaaatacaagctttcctacttcctccagtctttaacattagatcccttagtgattcattccatatctatatcggtgctccaaaacagtctggaaacacgcctgtgatccaggattatccactgatttatgaaattattttttgggaaaacacttcaaatgctgagagaaaaattatcgagaaaaaaactgatgttacagttcctaatttgaaaccactgactgtatattgtgtgaaagccagagcacacaccatggatgaaaagctgaataaaagcagtgtttttagtgacgctgtatgtgagaaaacaaaaccaggtcagaatcttttattgtcttttttaaaaatgtagctagacataataaaagtaattctatactgta

SEQ ID NO: 94088 - DNA, 1290 bp, Homo Sapiens
  misc_feature (77)..(90): n is a, c, g, or t
  misc_feature (102)..(102): n is a, c, g, or t
attcacattgataccataaccctaaaatgattggtaacgttgaaacggcacttatttacacaaaaaggtcacaaaannnnnnnnnnnnnngtagtcaccaangaactatggttcctgtaaaatactaatagccagatactagtatataaaatgtgaagttctgatattgtatacattttttggaaataaaacaaaatccaaaaccatttttgttattgtcaaaagtcaaacatgccaagttaacttagctatggccagtgtcaccaagtaaagccatacttgaatgagatgacgactggatacaaagctggtgaactggggactggcacagttaagagttgtactaattctaggaaaggggtagaagacataaaaacacccatctatgtaatttaattcacattttctcccctgcatcaccttcccttgagagtttcacaaaatgccagtgcccagaaagaatcacaatgctataactggcagggtaaaaaagtccccccgccccgacttccttgctgccgggctataggcaaatattaaagcatgcatcagctacccaaagccatcagtcacccatctggaagaccatggtgtacagtttccgcctaggctggctgcactaggaagtactccagtttttaaatggagccagctttatgttagccctgtaaaatattgagctactgtagcagcaaatatgacattacagaaaaacaaaattttatttaaaaaattgttacatcaaaatttttttccttcaaatctgtgtcctttaaccaacaacagtttcttctatcacttaattctggtcttattacctcagtctgactttctcattatgcttctctggaaagacacttctaaatcctggagattaaatttactcttaaaaatggaaatacaggaattttaaagtaaaaagaaaaggtctgttctaaaagttctttcacaaatatatatatttaaatattaaaataggctacctaggatttttataaaatggcctttgaaaagatagtagaggcacaaagaagccatatactatcctccaagttggacataaggtgccacaaggctgccctacaaagaggcaggcaatctctacctgatgcaacgggaggcaccagtaaacaacagaaacattaaatacattattgggaacttggaccaaaaccaaattttactctattagggaccgttgcttttttaaaaaataccttgagatataagcattagaagtcatcactttgtacaaggaagaaaatgaatacagtttatgatcttactcct

SEQ ID NO: 94089 - DNA, 1441 bp, Homo Sapiens
  misc_feature (1331)..(1365): n is a, c, g, or t
ccagggagagtgcgtccgtgtgtgttcgatgagcccccgtgttgagtggttgattggacaccggggtaagggtgataatcgtccgagagcgtgacttgtcgttgtaagaagtgagaagccatgtgagaggaacccagtgcgtgctttgcggaacaccagttcttcgttcttgcccatggaccatatcgccggagatgccagagtggtggtgtgaaatgaagtttgttggggaaagtagaaagatgcctgcccttcgcgttccctctcgttcctatagtcctggtcgtttccttgcctgccttctttcaggttggccatgtgcgttcttctctaagagtaatcagcacaactggtctgccaaccttcaaattataccttaactctcccagaaataccatatgcatttcaggtgtcattcattatctctcagtcacaacaactgacaaatgaaagcatgctggcatgagaatctcttacgtccaggctatttgcttaaaataattactctaaaaggtacttaaattctaatgttcttgagccatttgagaattagtaatttttaaacagacatattaatgctggagtgtagagaatatcattaaatatatcaaaaatatatcttttaagcctagaaaatggatgcctttggattaccttcatttcagggtagagaaaagcccttcctactgaattaggctctgaacatgtgatttctttccctaacactagtttttccaatctactaatttatttataaacaaagcaaagtaagagatatttttgctgttactttggcaattctctctctccaatccccaacatcccgagttcagtgcacatctaacaattcactcaagactaggcacctgacaataagtgtttacttagtgtgtaaagtgaacaagaaaagcagcataataaaggagctgtgtttttatcagaggagccttccttctgagtttttacataagttgatgccttcactgcaactttgaatacaatgctttgaattttgaaacacttgaataaaatgtttgaatgctttgaataaaattcctcctctttcagagtaaaccttattttagtcaccagcatttccttccatagcacataaatatgttcaaaatgtacattgacatatatttgtaaccacatagtgtaaactaagttttaatcctttgcatggcaggaaaatgctggtattctgacaccaatatcttttgatgtgaacaagaggcctaaaatatcagtctagtgaaactactaaccaccatcttcaccccggccgtaatggccgaattcccgggcatatgtccggtaccgtcgactgnnnnnnnnnnnnnnnnnnnnnnnnnnnnnnnnnnncggccgcttcctcgctcacatactcgctgcgctcgtcgttcgctatgagcgagtagcgcctataggattatacatt

SEQ ID NO: 94090 - DNA, 1090 bp, Homo Sapiens
cagtcgacggtaccggacatatgcccgggaattcggccattacggccggggacttctgcaatgccagacagcatagaggctgaggctggggccaggacccagacagagacacacggtcactgcagctgaagccgctgcccctgctacaggcaccaccaggaccagctgatcattccagcccacagcaatggagccacatgactcctcccacatggactctgagttccgatacactctcttcccgattgtttacagcatcatctttgtgctcggggtcattgctaatggctacgtgctgtgggtctttgcccgcctgtacccttgcaagaaattcaatgagataaagatcttcatggtgaacctcaccatggcggacatgctcttcttgatcaccctgccactttggattgtctactaccaaaaccagggcaactggatactccccaaattcctgtgcaacgtggctggctgccttttcttcatcaacacctactgctctgtggccttcctgggcgtcatcacttataaccgcttccaggcagtaactcggcccatcaagactgctcaggccaacacccgcaagcgtggcatctctttgtcctgtggtcatctgggtggccattgtgggcagcttgcatcctacttcctcatcctggactccaccaacacagtgcccgacagtgctggctcaggcaacgtcactcgctgctttgagcattacgagaagggcagcgtgccagtcctcatcatccacatcttcatcgtgttcagcttcttcctggtcttcctcatcatcctcttctgcaacctggtcatcatccgtaccttgctcctgcagccggtgcagcagcagcgcaacgctgaagtcaaggcgccgggcgctgttggatggtgtgcccggtcttgggccggtgttcatcatctgcttcgtgcccccaccacgtggtgcaagctgccctggaccctgctgagctgggcttcccgggacagcaattcccccaggccattatgatgccatcagtcccctctgctccttagaccactggtcttaaacccgtttctacggttcccaccaaaattccgagcctca

SEQ ID NO: 94091 - DNA, 1145 bp, Homo Sapiens
  misc_feature (42)..(51): n is a, c, g, or t
aatatagagagtctgggccctcccaaaattcacacaatttgnnnnnnnnnnaaaggaaatttctttttcctttcaaaggggatggtgggaaattccaagtgtaggtccagggaagggatttaatatttggattggattcccaagggggattaaaacgtgggtttttattcccggaaagtttacccgttcccaggattttggaaataggttcattccccgccacaggcccgcctttttttcttcatttcagcccccaggtaagtccccccagaattaaacggcaggtatttgccatctttcccgtctctatagaagtatgtcttatacttcttcagatatcccagttgtattagtgcccaccaaagcctgatgcgttacatgccctggaaaacagacctcactgagttgaaaaagctggacttcccagctccaattggacccagcagcagaattcgtatttgttgaaccagggatccatatggttcataagttctcaaggcagacagtaagctcttcctgagctcaatgaccccttttatctttctttcatccagtgaatcttcgcatcgaaaaacttcataatcctgaatagagatagtacaattttgagcaagtccaagattttccattgtctttaagtccataatcacttttctatttcttccatctatctggaaattagttggggagttatattttgtaacatcacaacaaaacagtgtttctggtgtacatagtcctagtttccattctgaaattttagtatcttgaagtgcaaaaggatgatggaagcatactttccttcctggtaactctcttccgcatatgctccataatatgatcttcactataaatcactgttagagtaggcccttgattacaacatctgtcaagcaaactccattacggaatccatggacactacccttatagagaaggctaaccgcttccctccaaatgattttgcaggatcttttcgtgcaaccgtgtcaacgagttgtcactgccatacttcttgatctgttgtactgtctgtagtatcagctagagctgagggtagctgctctgtctggatagctaggcaggcacaaatgccccggccgtaatggccgaattcccgggcatatgtccggtaccgtcgactg

SEQ ID NO: 94092 - DNA, 1046 bp, Homo Sapiens
  misc_feature (212)..(221): n is a, c, g, or t
  misc_feature (623)..(881): n is a, c, g, or t
tgatcacctgagccaggagctcacaagcagcctgccaacatgtccctactaaataccagaaattaaccagggcgtgttacccacatgcctgtaatcccagctacttgggaactgaggcaggagaatctcttgaacttggaagcggaggattcggtgaaccaaatcacgccacagcactcccagcctgggagacagagcaaggcttagttttnnnnnnnnnntcaaatattgtgtgattctgtttataggaaatattcagaattggtaagtccataaggacaaaaaccagatttgacaggggctgagatgaaaaagagaatggggtatggggagtgacagcttgataggtatgggttttgttggggggagataatgaaaacatttggaactaggagaatcacctgacatcaggagttcaagaccactgaactcgaacctgggtgacagagtgagactccgtctcagaaaaaaagaaaatgtttggaactagatggtggtggttgtacagctttgtgaatgaaccacacacccactaaattgtacactttaaaatggctaattttatcttatgtgaatttcatcttaatttttaaaattatatatatacatggccgggcatggtnnnnnnnnnnnnnnnnnnnnnnnnnnnnnnnnnnnnnnnnnnnnnnnnnnnnnnnnnnnnnnnnnnnnnnnnnnnnnnnnnnnnnnnnnnnnnnnnnnnnnnnnnnnnnnnnnnnnnnnnnnnnnnnnnnnnnnnnnnnnnnnnnnnnnnnnnnnnnnnnnnnnnnnnnnnnnnnnnnnnnnnnnnnnnnnnnnnnnnnnnnnnnnnnnnnnnnnnnnnnnnnnnnnnnnnnnnnnnnnnnnnnnnnnnnnnnnnnnnngactctgtctcaaaatatatatatataatttcgtatattataattttcgaataatctcacatcctcccactcatttgcactgcgacctcagacaactggtgccatggaagggaaggaagctggcttgcagcaggtctctcagaggcaggaagttgcagggagtca

SEQ ID NO: 94093 - DNA, 1237 bp, Homo Sapiens
  misc_feature (79)..(113): n is a, c, g, or t
cttatactgacttctatgggcgcctacgcgtatagcgaacgacgagcgcagcgagtcagtgtgagcgaggaagcggcgnnnnnnnnnnnnnnnnnnnnnnnnnnnnnnnnnnncagtcgacggtaccggacatatgcccgggaattcggccattacggccggggggcggctccgggtttggcaacgaggacgggggagtgcgactgcgtctcgggcagcatggccgagaagcggcacacacgggactccgaagcccagcggctccccgactccttcaaggacagccccagtaagggccttggaccttgcggatggattttggtggcgttctcattcttattcaccgttataactttcccaatctcaatatggatgtgcataaagattataaaagagtatgaaagagccatcatctttagattgggtcgcattttacaaggaggagccaaaggacctggtttgttttttattctgccatgcactgacagcttcatcaaagtggacatgagaactatttcatttgatattcctcctcaggagatcctcacaaaggattcagtgacaattagcgtggatggtgtggtctattaccgcgttcagaatgcaaccctggctgtggcaaatatcaccaacgctgactcagcaacccgtcttttggcacaaactactctgaggaatgttctgggcaccaagaatctttctcagatcctctctgacagagaagaaattgcacacaacatgcagtctactctggatgatgccactgatgcctggggaataaaggtggagcgtgtggaaattaaggatgtgaaactacctgtgcagctccagagagctatggctgcagaagcagaagcgtcccgcgaggcccgcgccaaggttattgcagccgaaggagaaatgaatgcatccagggctctgaaagaagcctccatggtcatcactgaatctcctgcagcccttcagctccgatacctgcagacactgaccaccattgctgctgagaaaaactcaacaatttgtcttccctctgcccatagatatgctgcaaggaatcataggggcaaaacacagccatctaggctagtgtaaagatgagcgctagccttccaagcatgaagtcggggaccaaattagcctttaactcataaagagagggtagggcttttctttttccatatgtcaattgtggtgttcccagaatgtatagcagttataaaaataggtgaaagaattg

SEQ ID NO: 94094 - DNA, 1015 bp, Homo Sapiens
cagtcgacggtaccggacatatgcccgggaattcggccattacggccggggagagctgctcgtctgaggctgctgaggcgacggccggtgtcgtggtcgcggtacctgttccaacacggctcgcgggcccgtgccggctccggtccccggcgcggctgtccgagcccctgcggcgggcggacgatggtgtggcggagcacgcggacgcgggcggtgcggcggcgggcatgaaggaggatggaagggcaggacgaggtgtcggcgcgggagcagcacttccacagccaagtgcgggagtccacgatatgtttccttctttttgccattctctacgttgtttcctacttcatcatcacaagatacaagagaaaatcagatgaacaagaagatgaagatgccatcgtcaacaggattcgatgttttgagcacgttcacttctcgcagtgtcagctggggctgttttgcttttaacccttctcaatcatcagcaatgaaatccttgctttcttttcctcagaactactatattcaggtggctaaatggctcccgtgattcagtggtttggggaatcttgcttcccctttttttccaacctttgtttattgtgtatcgatgccctttgccttttctctttctgggaatcagaaggctttgctggccctgaacaaaggggacatccgagcccgcattttagagactttggtcatggcttcttcttacttgcgtaactcattcttgggaatagtgttgggtagcttcagcacttcatgacaacggtgccggaggatggaatcttgaatattgatcctggaggtcaaataacgcgaataatattcgtgatttactgggcggggttgactcttgggtaccaagtggctttggatgtaccggggcgcatgcttacgcaatttgaacctgctgagtttctctagggaaggccagacgagggggtcgggaaaagggggcaagaggagttaaagagaaggaaatgagggataaaggggagtgagaagg

SEQ ID NO: 94095 - DNA, 764 bp, Homo Sapiens
cagtcgacggtaccggacatatgcccgggaattcggccattacggccggggagcagttggggcaggaggaagccgactgctgcctggtctgcaaagaagtcctttcaagtctctaggactggactcttcctaagcaagtccgagaaggaagcaccctcactatgtggctctacctggcggccttcgtgggcctgtactaccttctgcactggtaccgggagaggcaggtggtgagccacctccaagacaagtatgtctttatcacgggctgtgactcgggctttgggaacctgctggccagacagctggatgcacgaggcttgagagtgctggctgcgtgtctgacggagaagggggccgagcagctgaggggccagacgtctgacaggctggagacggtgaccctggatgttaccaagatggagagcatcgctgcagctactcagtgggtgaaggagcatgtgggggacagaggactctggggactggtgaacaatgcaggcattcttacaccaattacctttatgtgagtggctgaacactgaggactctatgaatatgctcaaagtgaacctcattggtgtgatccaggtgaccttgagcatgcttcctttggtgaggagagcacggggaagaatggtcaatgtctccaagcattctgggaacgacgtggctttccttgtaggaggctactgtgtctccaaagtatggagtgggaagcttttcagatattgctgaggcgtgagattcaacatttggggtga

SEQ ID NO: 94096 - DNA, 982 bp, Homo Sapiens
  misc_feature (33)..(33): n is a, c, g, or t
  misc_feature (50)..(50): n is a, c, g, or t
  misc_feature (82)..(120): n is a, c, g, or t
  misc_feature (124)..(158): n is a, c, g, or t
gaaaggaactgttaattaccgtaaccccaattnaattaaagtggggcccngccccaagttccgccctgttcctttcggtagnnnnnnnnnnnnnnnnnnnnnnnnnnnnnnnnnnnnnnnccgnnnnnnnnnnnnnnnnnnnnnnnnnnnnnnnnnnncagtcgacggtaccggacatatgcccgggaattcggccattacggccgggcacttcagggagcatgatgatatatttttacagggaagagcctaggttccaggtgccttttcagttgctgacttctcttatgcacatagatacactgatgacccaaatggagatataaccatgtgtgcatggtgcacagaatgctggccagcaaagctggcaccggtggttcatcaggctatcactacccgcgatcaactgtgagtcataggcacaaggtatttgtagatttatctaatctttcaacatacctgattcccccacactggataccgaagatgaacccaaccattcacaaatttctatatacagcagaatactgtgatagctcctacttcagcagtgatgaatcagattaaaatcgtctgcaaaatctatgaagaatactggtttcacagcctattttttattttctatggattttcataaatacagtttgaatatatgtatgcatatatggttcagcaccacgatgctctgatttaattctaaaaacaatttgattacctcttgtttgtgacaagactaagcattaagatgagaaagaatacatctaaatagtaacattgtacatagggtggtttcctatttaaaaattcagtttcccctgagacttaatgtaaccacttaatgtaatcactatctcattgtttcatctttataaacttgtaaacttcatctatttcaaatattttatgcagtacattatattattctgtacaaaggctttcaaacaaaatttttaaaataataaagtattaatctttctccctg

SEQ ID NO: 94097 - DNA, 800 bp, Homo Sapiens
  misc_feature (81)..(115): n is a, c, g, or t
aagatgtatagactcactatagggcgctacctcgtaagcgaacgacgagcgcagcgagtcagttgagcgaggaagcggcgnnnnnnnnnnnnnnnnnnnnnnnnnnnnnnnnnnncagtcgacggtaccggacatatgcccgggaattcggccattacggccggggaggtgccggccggagcggagctagtggcgccgacgggccgggccgggccgggacccgggccgaggcgaaccgaggggcctgtgcggccgcccggcccggccgcggatcaggctcctggaaccatgggcctcaggccctgaggatacggggctcccggtggccatgacgacgggtgactgctgccacctccccggctccctgtgtgactgctccggcagccctgccttctccaaggtcgtggaggctacgggcctcggaccgccccagtatgtggcacaggtgacttcaagggatggccggctcctctccaccgtcatccgtgccttggacacaccgagtgatggtcctttctgccggatctgccatgagggagcgaacggggagtgcttgctgtccccgtgtggctgcaccggcacgctgggtgccgtgcataagagctgtctggagaagtggctttcctcatctaacaccagctactgcgagctgtgccacacggagtttgcagtggagaaacggcctcgacccctcacagaggtctccttccgctaccactgccagctgtactccgagtggagaaagaccaaccagaaagttcgcctgaagatccgggaggcggacagccccgagggccccc

SEQ ID NO: 94098 - DNA, 966 bp, Homo Sapiens
  misc_feature (102)..(151): n is a, c, g, or t
  misc_feature (250)..(250): n is a, c, g, or t
ggctgagctgtttagagggcatttatccagcagtgaaccgtcctagcgcaagagttagtaattgctcccctgttccttcacctccccactttggagctcagnnnnnnnnnnnnnnnnnnnnnnnnnnnnnnnnnnnnnnnnnnnnnnnnnnaagagactggacgactggagtcttgcatctgttacccatggctggagtgcatgtggtgtgatcactagctcactacagccttgaactccatgggctcanagaggttgaggctccctcctcatgcctcccaagtagcatgggactacagtgctttcacgcaccgatgcactggctaattcaagaaaaacccttcacgagagatacgggtctctctactgttgcccttagctcgtctcaaactcctggcctcaatgtgatcctcactgctttggaccttcccaaagcgctaggattacaggctcctggaaccatgggcctcaggccctgaggatacggggctcccggtggccatgacgacgggtgactgctgccacctccccggctccctgtgtgactgctccggcagccctgccttctccaaggtcgtggaggctacgggcctcggaccgccccagtatgtggcacaggtgacttcaagggatggccggctcctctccaccgtcatccgtaccttggacacaccgagtgatggtcctttctgccggatctgccatgagggagcgaacggggagtgcttgctgtccccgtgtggctgcaccggcacgctgggtgccgtgcataagagctgtctggagaagtggctttcctcatctaacaccagctactgcgagctgtgccacacggagtttgcagtggagaaacggcctcgacccctcacagagtggctgaaggacccggggccgcggacggagaagcggacactgtgctgcgacatggtgtgtttcctgttcatcacaccgctggccgccatctca

SEQ ID NO: 94099 - DNA, 746 bp, Homo Sapiens
  misc_feature (612)..(612): n is a, c, g, or t
  misc_feature (652)..(652): n is a, c, g, or t
cagtcgacggtaccggacatatgcccgggaattcggccattacggccgggggcattcttccgactgcggacgccaggaaacagcaaatccaatagatccgactttatcaggctgggctctcgcttcagattcagtgggcggacagaatatcaagctacacatggctccaggttacgaagaaccagcacctttgagaggaagcctagtaaacgttatccatcccggagacattcaacgttcaaagcaagcaacccagtgatagcgagcccagctctgctctaaaacaaatccagaagtccataattaccagcctcaatatcatcctaatatccatcccagccagccccggtggcatcctcactctccaaattgtcaggccatcctttcaggatgacaggtcgcattggaaagcatcggccagtggagatgacagccattttgagttatgtccacgaccagaaccagaagaacttaggagggatgcaaagtatgatgtatcgagataaactcatgactgcactttgagagactgaagcatctctcttccattcaccttcatagtttcattgcattccatgaaaagtgtcttggcctcagatggatggatgtgtntggacgagtgtctttaaggagtagtcctgaaaggtgtganggtgtccatgtaaatattcgaagataaaaccactatagcttgtcataatttgactgtttgactgcattctcattaagaatgaaggtaaaggctc

SEQ ID NO: 94100 - DNA, 782 bp, Homo Sapiens
  misc_feature (664)..(698): n is a, c, g, or t
ttaaagtgtagtcttcttgagtggtcaagaagtgaagatttttattgcccagccaatattcaccatgtttttggacaaaatttccaaagccattttcatagtctttccatcctctgttaaagttttcactgccatcagatcgcctctgaattacagtccatcctcctccatcggacatgtcacaataaacagaaaattctgctgggctctggagaggtttgattttgtaaaatccactgagcttatacccatcattgaaaatctctgaacaatctgcatactgcctcttgcttccaagatcaacgacagtattctcatctcctttatcaaggaactggacttcattctcctgcaaaagctgcttgatcttgacctgttgctgtttgacccgggtctcaagcaggcgcacctgggctctgagccgcatctgctcctgggcacagtcctcgagcgccgaaatttccctgcccattgtcagagcggtggtaacaaggatgaaactgaacacctttgccatgttcccccttgaaaaaactaaagtcagaagtgagtcagagacccagctcaggttccatccagacactctgcttcccaggatcctgtaactgcattccccggccgtaatggccgaattcccgggcatatgtccggtaccgtcgactgnnnnnnnnnnnnnnnnnnnnnnnnnnnnnnnnnnncgccgcttcctcgctcactacttcgctgcgctcggtcgttcgctgcggacgaagctagcgccctatagtgagtctatacatttt

SEQ ID NO: 94101 - DNA, 574 bp, Homo Sapiens
  misc_feature (93)..(101): n is a, c, g, or t
tgcagaaattccaaaagaagagtggctcaggcccccaggcccaaaggtgctggtagaaatgaaattcctaggggagctcaagagcctgtgttnnnnnnnnncccctggttttttgccatgaccgagaaccaataagggaaccgtctgtttttaaatgatgatcccttgagcattttatatccacatctttaagtattgttttatttttatgtgctctcatcagaaatgtcatcaaatattaccaaaaaagtatttttttaagttagagaatatatttttgatggtaagactgtaattaagtaaaccaaaaaggctagtttattttgttacactaaagggcaggtggttctaatatttttagctctgttctttataacaaggttcttctaaaattgaagagatttcaacatatcatttttttaacacataactagaaacctgaggatgcaacaaatatttatatatttgaatatcattaaattggaattttcttacccatatatcttatgttaaaggagatatggctagtggcaataagttccatgttaaaatagacaactcttccatttattgc

SEQ ID NO: 94102 - DNA, 928 bp, Homo Sapiens
  misc_feature (74)..(108): n is a, c, g, or t
  misc_feature (847)..(847): n is a, c, g, or t
  misc_feature (904)..(904): n is a, c, g, or t
atgtatagatcactatagggcctacttcgcagcgaacgacgagcgcagcgagttagtgagcgaggaagcggcgnnnnnnnnnnnnnnnnnnnnnnnnnnnnnnnnnnncagtcgacggtaccggacatatgcccgggaattcggccattacggccggggacaattcagaggctgctgcctgcttaggaggttgtagaaagctctgtaggttctctctgtgtgtcctacaggagtcttcaggccagctccctgtcggatggcttttatgaaaaaatatctcctccccattctggggctcttcatggcctactactactattctgcaaacgaggaattcagaccagagatgctccaaggaaagaaagtgattgtcacaggggccagcaaagggatcggaagagagatggcttatcatctggcgaagatgggagcccatgtggtggtgacagcgaggtcaaaagaaactctacagaaggtggtatcccactgcctggagcttggagcagcctcagcacactacattgctggcaccatggaagacatgaccttcgcagagcaatttgttgcccaagcaggaaagctcatgggaggactagacatgctcattctcaaccacatcaccaacacttctttgaatctttttcatgatgatattcaccatgtgcgcaaaagcatggaagtcaacttcctcagttacgtggtcctgactgtagctgccttgcccatgctgaagcagagcaatggaagcattgttgtcgtctcctctctggctgggaaagtggttatccaatggttgctgcctattctgcaagcaagtttgctttggatgggttcttctcctccatcnagaaaggaatattcagtgtcccaggtcaatgtatcaatcactctctgtgttcttggnctcatagacacagaaacagccatg

SEQ ID NO: 94103 - DNA, 707 bp, Homo Sapiens
cagtcgacggtaccggacatatgcccgggaattcggccattacggccggggactccagcactgcgcagggaccgccttggaccgcagttgccggccaggaatcccagtgtcacggtggacacgcctccctcgcgcccttgccgcccacctgctcacccagctcaggggctttggaattctgtggccacactgcgaggagatcggttctgggtcggaggctacaggaagactcccactccctgaaatctggagtgaagaacgccgccatccagccaccattccaaggaggtgcaggagaacagctctgtgataccatttaacttgttgacattacttttatttgaaggaacgtatattagagcttactttgcaaagaaggaagatggttgtttccgaagtggacatcgcaaaagctgatccagctgctgcatcccaccctctattactgaatggagatgctactgtggcccagaaaaatccaggctcggtggctgagaacaacctgtgcagccagtatgaggagaaggtgcgcccctgcatcgacctcattgactccctgcgggctctaggtgtggagcaggacctggccctgccagccatcgccgtcatcggggaccagagctcgggcaagagctccgtgtaggaggcactgtcaggagttgcccttcccagaggcagcgcccagaatgccatcgccggggaaggaa

SEQ ID NO: 94104 - DNA, 958 bp, Homo Sapiens
gggtcttcgcggcgcggggcggggctgggcgcggggtgaaagaggcgaagcgagagcggaggccgcactcccgcactgcgcagggaccggaattctgtggccacactgcgaggagatcggttctgggtcggaggctacaggaagactcccactccctgaaatctggagtgaagaacgccgccatccagccaccattccaaggaggtgcaggagaacagctctgtgataccatttaacttgttgacattacttttatttgaaggaacgtatattagaggcatctgctttattttaagcttactttgcaaagaaggaagatggttgtttccgaagtggacatcgcaaaagctgatccagctgctgcatcccaccctctattactgaatggagatgctactgtggcccagaaaaatccaggctcggtggctgagaacaacctgtgcagccagtatgaggagaaggtgcgcccctgcatcgacctcattgactccctgcgggctctaggtgtggagcaggacctggccctgccagccatcgccgtcatcggggaccagagctcgggcaagagctccgtgttggaggcactgtcaggagttgcccttcccagaggcagcgggatcgtgaccagatgcccgctggtgctgaaactgaagaaacttgtgaacgaagataagtgggagaggcaaggtcagttaccaggactacgagattggagatttccggatgcttcagagggtagaaaagggaaattaataaagcccagaatgccgtcgccggggaaggaatgggaatcagtcatgagctaatcaccctgtagatcagctcccgagatgtcccggatctgactctaatagaccttactaggctaaccagagtggctgtgggctatcaacctgctgaccatgggtattagatcatgacacgcatacagaagtacagttctatggcggagacaatc

SEQ ID NO: 94105 - DNA, 1383 bp, Homo Sapiens
tggagagaagcaggcctgagcctccccaaaggcagctcctggggactcccaggaccacaggctgagacgagacgcagggtggctggaggaagtgagaggtgaactcagcctgggactggctgggcgagactctccacctgctccctgggaccatcgcccaccatggctgtggcccagcagctgcgggccgagagtgactttgaacagcttccggatgatgttgccatctcggccaacattgctgacatcgaggagaagagaggcttcaccagccactttgttttcgtcatcgaggtgaagacaaaaggaggatccaagtacctcatctaccgccgctaccgccagttccatgctttgcagagcaagctggaggagcgcttcgggccagacagcaagagcagtgccctggcctgtaccctgcccacactcccagccaaagtctacgtgggtgtgaaacaggagatcgccgagatgcggatacctgccctcaacgcctacatgaagagcctgctcagcctgccggtctgggtgctgatggatgaggacgtccggatcttcttttaccagtcgccctatgactcagagcaggtgccccaggcactccgccggctccgcccgcgcacccggaaagtcaagagcgtgtccccacagggcaacagcgttgaccgcatggcagctccgagagcagaggctctatttgacttcactggaaacagcaaactggagctgaatttcaaagctggagatgtgatcttcctcctcagtcggatcaacaaagacttggctggaggggcactgtccggggagccaacgggcatcttccctctctccttcgtgaagatcctcaaagacttccctgaggaggacgaccccaccaactggctgcgttgctactactacgaagacaccatcagcaccatcaaggacatcgcggtggaggaagatctcagcagcactcccctattgaaagacctgctggagctcacaaggcgggagttccagagagaggacatagctctgaattaccgggacgctgagggggatctggttcggctgctgtcggatgaggacgtagcgctcatggtgcggcaggctcgtggcctcccctcccagaagcgcctcttcccctggaagctgcacatcacgcagaaggacaactacagggtctacaacacgatgccatgagctgacggtgtccctggagcagtgaggggacaccagcaaaaaccttcagctctcagaggagattgggaccaggaaaacctgggaggatgggcagacttcctgtctttgaggctaatggacccgtggggcttgtaatctgtctctttctactatttacatctgatttaaataaaccattccatctgaaagggaaaaaaa

SEQ ID NO: 94106 - DNA, 1079 bp, Homo Sapiens
caagtcgacggtaccggacatatgcccgggaattcggccattacggccgggggtagttttttattttaatatgttccatagagtggataggcagacaggtactattgtaatgtattctgtatttaataatttaatatactctagaaagtagacctcatgcattcttttagcatgattttcttttaaactgcttttcattttaagggcacccgtggcggaagctggttttgcaaggactgtgtaagctgtatgcgttctagctgtatgcgttctgtagtcttttcttaggtgggtaacattttcaataacgcgcgcacagcacacaggggtgccctgagccgaaggagcaaaaaaagccaccgctcgtttctataatccagctttgcttttcacaggcgtgggatccaggatggtgtcctctgtgaggacttgaactctggggctttaattccactgtttaattttcaggtaccacagcagcaaagcacagagtgtgacctttttcatgtctgagctgattctgtttgctccacgtgcctgcttcttgctactgttcatttagtaatgggatcacctcaccatgccatgctctgggctctccctctctgtccatttctgttttgctttcctggctaaacccatctaccattcttaacagttggtagatcctgtcccattccaagatcatctctcagacctttccatctccctggctttccatgctcttctcctcagctcctggcttacactgggttgaaggccgatcctggcatctgatccgctacagcttgaagactccacgtggctggttgggaaagtgctgacagaattttcacacctgggtgtaaacccaattccatttcacgtctccaaccttgggatactaacagggattcttcgatcagacagatgtagttcatccacggattttgatatggaacaaaataacattataaaatgcgtaggttagtcagttgagggtcatgcatgaactgtaggctgagaatcacagatgagcagaaatccccagaatgataggtggagcctataaacccgcagtattgtttccgagcgctgtt

SEQ ID NO: 94107 - DNA, 2528 bp, Homo Sapiens
  misc_feature (1791)..(1791): n is a, c, g, or t
  misc_feature (1927)..(1927): n is a, c, g, or t
  misc_feature (1929)..(1929): n is a, c, g, or t
  misc_feature (2007)..(2008): n is a, c, g, or t
  misc_feature (2025)..(2025): n is a, c, g, or t
  misc_feature (2473)..(2473): n is a, c, g, or t
cagtcgacggtaccggacatatgcccgggaattcggccattacggccgggggaaatggcccagcttggctctgccttctgcagtgtgagtaacacactgaagccagaagctgtgggctgtggggaagtggctgcatcgccacccaagggaccctggactttgccagacgtcagggttgagaggagccactagcaccatcccagagctgtcagcaccggcctcagcccaggcggctctctccctgagcttcctgtaccctgaccctctccagcctcagacctgagacagggctggacaaggaagcagagagcagaagaaaagcagaagcgaagctcagatctgctgggaggagattacattttgtcccctcctggggtcttgcacagtggcaggtgacattcgtgttacaggaatgactgccagggcctgggcctcgtggcggtcttcagctctgctcctcctgcttgtcccaggctattttcctctgagccaccccatgaccgtggcgggccccgtggggggatccctgagtgtgcagtgtcgctatgagaaggaacacaggaccctcaacaaattctggtgcagaccaccacagattctccgatgtgacaagattgtggagaccaaagggtcagcagggaaaaaggaatggccgagtgtccatcagggacagtcctgcaaacctcagcttcacagtgaccctggagaatctcacagaggaggacgcaggcacctactggtgtggggtggatacaccgtggctccgagactttcatgatcccattgtcgaggttgaggtgtccgtgttcccggccgggacgaccacagcctccagcccccagagctccatgggcacctcaggtcctcccacgaagctgcccgtgcacaactggcccagcgtgaccagaaaggacagccccgaacccagcccacaccctggctccctgttcagcaatgtccgcttcctgctcctggtcctcttggagctgcccctgctcctgagcatgctgggtgccgtcctctgggtgaacagacctcagagaagctctagaagcaggcagaattggcccaagggtgagaaccagtagcatctgctgtccatcaaggccctgtgctgcaacagagcccctctgggggactggaatgacctcctgaccactccctcccgggctgctctctccacatctcctggaatcctttgtgagcctccttcagccttttccctgtgcccgatcctcatgtgtcacatgtgaacctgacggacatggacgccctgagctgtgagtccacgtctcatgtgcaacgccccggccagctaagcctcgggccggcaagcaatacctctgagtgcccggatgccctccctgcacccttccatttctccaggagcctggcactgcttcctccacccgttttcacgggggacaagcaggggctagggactccgcctgcaccctttgccaccataatgggcccaacactccctggggtccaggagtggaagaattaatgcggctgctttccacttttgctgagtggtggccgatttccatgagtgctcttcaaaacctgttaataaaatggacaaatggtgtataggcttgggggaatggtcgggaggacccacccacccgaaaacccgcagtggttgccgagggtgtgccgcgcgagcccactaacggacgaaacaagaaccggcacctacaactaaacccccgctactgtcacagtgatacggagggtgtggtgtagagggtgagagagtaaaaggagagagaggttccacagacncaatagggtgcaggggcctgttgcccgcggcacgggccggcatgaggagggagaaagaaaagcagccaagaagttggtttttttcgtggttgaagagtaaaatggggggagaaagaccggaagggacgaccaaggntnaccccctcacgagaaagttgcgtaaaccgccacttccctggaccagtttccccccacccgaaggacaccccaaacttnntcctataggttcgaccngcagacgcaacagctggaagggtgtggaaccggcgggggcgcgccaccactcaccaggtgaggtcttgaataagggaacggggggccgtcttcccttcaacatggatacacgtttactttaggggtaacttcaagtagcccttggcggtaggcggaggggaaggactgtgtgacgggttttcggaggggagttctactgtattaccgagccggacgtcacctgccctccgccaccacggcatcccccaatctaatacacacaccccgcgacgattctaaccacaacccgtgcccgaggacgacgcgcatccccgcgccttgtatggcggtgtgaggatgtaggcaaaaagggttgctcatccttactcctgtactgtcgggtcgcggacggcttaccgcgccaccactcatttgtctgcgtgtaaatgagtagaaagatggtgaagcnagacgggagggggaggggaatggaatgtggtgggcccccccttaattactaaacc

SEQ ID NO: 94108 - DNA, 1341 bp, Homo Sapiens
cagtcctgcaagctacggagtcactacagggagaggtctcatcactagaaatagccgaagaacctgcagcctcaaccagcgttaaggaggacgtgccgtttctagggagtcttagtcggggctcaccagcttcctgcattttctgaccggctccaggaatagaaccaaaagaagctgaacaaggaagcagcgcggcaccaagaaaagcagaagtcggggcctggaggcgtgactttcccctcgggtccaggtagggcctggagctgctgcaagtgccgcctgtgctggggaagggaccatgtggctgccttgggctctgttgcttctctgggtcccaggatgttttgctctgagcaaatgcaggaccgtggcgggccccgtggggggatccctgagtgtgcagtgtccctatgagaaggaacacaggaccctcaacaaatactggtgcagaccaccacagattttcctatgtgacaagattgtggagaccaaagggtcagcaggaaaaaggaacggccgagtgtccatcagggacagtcctgcaaacctcagcttcacagtgaccctggagaatctcacagaggaggatgcaggcacctactggtgtggggtggatacaccgtggctccgagactttcatgatcccgttgtcgaggttgaggtgtccgtgttcccggcatcaacgtcaatgacacctgcaagtatcactgcggccaagacctcaacaatcacaactgcatttccacctgtatcatccactaccctgtttgcagtgggtgccacccacagtgccagcatccaggaggaaactgaggaggtggtgaactcacagctcccgctgctcctctccctgctggcattgttgctgcttctgttggtgggggcctccctgctagcctggaggatgtttcagaaatggatcaaagctggtgaccattcagagctgtcccagaaccccaagcaggctgccacgcagagtgagctgcactacgcaaatctggagctgctgatgtggcctctgcaggaaaagccagcaccaccaagggaggtggaaggtggaatacagcactgtggcctcccccagggaaaggactttcactatgcctcggtggggttttgattctaacaccaaacagggatagctgctcaaaaggcctccgggagggagaaaccagattccggattacagtggtgataaagaaagacatagggctttttgttcctgccttcgcccatcgggagctcctcctgggggccccagggaagtcccagggacaggcttccctttataccctgggccccaaggtccttctttcagccctggcccctcgaacaacaggg

SEQ ID NO: 94109 - DNA, 1259 bp, Homo Sapiens
  misc_feature (49)..(97): n is a, c, g, or t
  misc_feature (101)..(135): n is a, c, g, or t
aacttgaaatcaaaaaatccaacttaattaaaggggacggcttaagacnnnnnnnnnnnnnnnnnnnnnnnnnnnnnnnnnnnnnnnnnnnnnnnnnccgnnnnnnnnnnnnnnnnnnnnnnnnnnnnnnnnnnncagtcgacggtaccggacatatgcccgggaattcggccattacggccggggattcccatactaactatgtacttcaatccatatcagaaggaatccccctctaaaatgaagattgttctatatccaggtacttttatgttgattaccagtgagggtggaaacttcatagtggtttttagttttacagatgttttgtccactgacatctgcattgaaacaattaatataggtcatacaacaaatacctgctgaaactagtctttataaagaagaatcttacttaacaattttaaagtgtgctaatttcataaccttgtgttactttgagattacaaactatgtcccgataactctgtgtcctggtaacggttccttttctttgcaataattttaattttgtgttgcaagataaatcaagcttctttaggtaatcattttaatttcatacattttgtagtgtttgattaattttcatttacaaagtctgcagtggcaaaactattttggtattatcctattagctatttaatggttcctctgatcatattacacgaatagtcatgcctttaaacagcaggttaaacagggcatgtacatttatgcatgcaatatctgtacaaggaaaacattttgtatcgacatgacaggtgctgtatacctgatcaacatgaagcaactgcatctgtagggctgggtctcgaagttcctgacctcaggtattcttggcccgtctcgagctcccaaaagtgctgggaataaccaggtgttgaagccaccgcacattcagacaggacagatgacctatttgtaattgactcgctcctaacaggaagtccctgcgtacaaatgggcctacaaatacacgggacaggataacacccacaaagtgtagacacattatcatgacaacataaagggccacagtcacgtgagaggaacacctgcacacaggtatacctacgagcacgctggggaacgaggagagaacagatgagaaacacgcagaacgacgaggaagaccacgaaccagacatgacccaacacgggacaagccagaactcgtcaacacaaatgcacaacatgaagacggcaccatgcggagcccacacgtgcgctacacgcaa

SEQ ID NO: 94110 - DNA, 924 bp, Homo Sapiens
  misc_feature (170)..(170): n is a, c, g, or t
agagagaatggataaatgtcatgtggaaatatgctggacttaggatactattaagaaagaaacacatttatggaaccccattggtaaagatgtcatgtataacttaatgaaggaaaattacatattttgaatataggctgtctttcctatcttcaaacatgtcaaaaggnccattttcttaactactttcgcctgaaatgttctatcatggttgattcctgtgtttcatctcagagatttttatttctaccccatatagctagagttctgcttacaaatgataaaatacaggtaaagcataagaggaatgcaaatatggaacaaaactgagaacattacattttacttactctaccacataccataaaacagtacataaatatttcattttgaaaaaaaagtcctgagtacttatttttgttaggaataaagtggtacttaataatggcaaaacatttctattattgttaaaacaaaattttgagacagtagagtgaaatgagatagctatcagggaatgaagaaaacaggatgtattaataacgatttaagggcgaatataagatgctccccctgctcaaaacctcgaaattccaacctcatttctgatgatcttcaagaataaagtctatccagagtgtaaaaaatgtctatgctttccagatctcaactattctcccaaccctagaaaaaactgtaacatctttgagagccgtacctaacacttctatgagccctcaagtctgacaatcacttgatatcacttttgccataaagtataataaaagcaaaaaattcacggcagatagcatttgaaaagcatacagctactctaaaagaggaatgcacatttattcaggagcattcactaaatcccggccgtaatggccgaattcccgggcatatgtccggtaccgtcgactg

SEQ ID NO: 94111 - DNA, 1228 bp, Homo Sapiens
  misc_feature (235)..(284): n is a, c, g, or t
ggcgcagctacggcaagagagtgagaaggaagggaagccggaaggggcgcgagtgaagcaaagcgaggacagacagctcccagagggcgaggggtgcgtgtgcgtccgcttctcacctcaggtctcccttcggccccgctgccctccctcgcggctgggtgacagctgggtccggtccgtcgcgggctgcctggggtgcgaggatcgcgcaccccgtcttcgcgcgctgtgcctnnnnnnnnnnnnnnnnnnnnnnnnnnnnnnnnnnnnnnnnnnnnnnnnnnctcgggtgctgccagccgggtgctgatgcgagtcggtggcagcgaggacattttctgactccctggcccctgacacggctgcactttccatcccgtcgcggggccggccgctactccggccccaggatgcagaatgtgattaatactgtgaagggaaaggcactggaagtggctgagtacctgaccccggtcctcaaggaatcaaagtttaaggaaacaggtgtaattaccccagaagagtttgtggcagctggagatcacctagtccaccactgtccaacatggcaatgggctacaggggaagaattgaaagtgaaggcatacctaccaacaggcaaacaatttttggtaaccaaaaatgtgccgtgctataagcggtgcaaacagatggaatattcagatgaattggaagctatcattgaagaagatgatggtgatggcggatgggtagatacatatcacaacacaggtattacaggaataacggaagccgttaaagagatcacactggaaaataaggacaatataaggcttcaagattgctcagcactatgtgaagaggaagaagatgaagatgaagggagaagctgcagatatggaacgaatatgaagagagtggattgttggaaaacagatgaggctaccctagatacaaggaaaatagtaagaagcttgttaatgccaaaactgatggctgggcgtgaaagtatggctcattttggcaacacgaagaaactttattgacctttttaactttaactttattgattaaatttttaccagtagtcacagaattaatgggtaggttgggggtattgagtggagcaagggtagggcttttaaacagtttgaagcacatgtttgtgaagacattacggtcgggttcctggtgaagaaacaacgagtgtacacatttgataaattacccttatttgtgcacaact

SEQ ID NO: 94112 - DNA, 380 bp, Homo Sapiens
tccatcccccttcggctacatcttcttcctcttcacatagtgctgagcaatcttgaagccttatattgtccttattttccagtgtgatctctttaggggcttccgttattcctgtaatacctgtgttgcgatatgtatctacccatccgccatcaccatcatcttcttcaatgatagcttccaattcatctgaatattccatctgtttgcaccgcttatagcacggcacatttttggttaccaaaaattgtttgcctgttggtaggtatgccttcactttcaattatcactaaatcatattgacgataccgctcttctgcctctgctttatattcccactgccactgggagcacaaacatttacaaaatggcttttattt

SEQ ID NO: 94113 - DNA, 704 bp, Homo Sapiens
cacgtttccagcaaaatccatatcatcctttccagagctgaaacagttatcatcttcaaatgtgtcaatcagctcttcaaattcttcatcatccacgtcttctatactttcttcatctgcatcccgtttttgtttctctttaacagcaacttttttataatacctgtggaaaaacacttcatccactggtatttggctttcttcttttgcaaggaactccttactgttcacaggaagatgacgaatatccttaataaaatgttttcttttcggctgcatcacaacactatctgtgttttctttgcctttatggggctttggatttcggtatacaaatcgatccaaaaatctcattagagtgaaatcctgcagtgggtcccctgaatactgaatatagtttccctgaaggatggtctttgcaaaaagggccacggagggatgaaaatgcacagataactttttgagttcccaaagacttgtattttcagctccacagaacagagggtttctactgaatggatcgtatttatttaactgtttcccacctttcaaattatcaaagtgcacccaggaagcaacctctggttttttggtttctacatcagtttcaggaactgtttcctctgtctctgcgtctccctccgcacgtcttcccccggccgtaatggccgaattcccgggcatatgtccggtaccgtcgactg

SEQ ID NO: 94114 - DNA, 856 bp, Homo Sapiens
  misc_feature (129)..(145): n is a, c, g, or t
cagtcgacggtaccggacatatgcccgggaattcggccattacggccggggtcttgttagcttgaaatgattattcctacaagtgaaacactagactatttggagttgtatatggcttgtgtttgggannnnnnnnnnnnnnnnngggcttggtttggtggtttggtccatggggatagttcccatctgccgttttaacccatttcaccaaaattttaccttgttaccaagcttcaccatgtgaaccttttcaggagcatctgcgattttttaacagacctaaaaataaatcctataaggcaagctcggtagaaaagtgctcggtgggtgctaagtgaaactagaggggcgtacatttaccacaggcctaggatattttcaaaaacgttagaaattcaaaatctcgtggccccgaaacatgctaatgggtataggggtacccttggaggagggtttcccaggtactgtaaattttaaagcgaggttttattttgtttaaaaagcggtggcgaatatatataggggatatagggacatacataatccaaagtgtaatttgataaattgtctatgtccgagtaacagaattaaacgttaagaaggcgtttttctaaagcagtaaggcaaatattttgtttattgggccaaatggatcgcgtggaaaggggttaaattattcagcctgtggctttagaatgaaacgacgttgcacattcggaagaaaaatattcccggttttaacgctaatatgttacgagcaggatttaaacgcaaggagtttttgaaaagtggcacaatttttaagtagcatccagaggggctaagattagtggtttgagaaggatcggcaagaaag

SEQ ID NO: 94115 - DNA, 1877 bp, Homo Sapiens
  misc_feature (1582)..(1582): n is a, c, g, or t
ggaatcgacggcgcgccgaattcggcacgaggcctggccccaggccgggcggctcgagggggaggagttaccgccgttcttcggcatcagaacacaccatgatggctgtgacctaagaccctcaggaagccccggggtcatggcccagaagcaccccggagaaagagggttgtatggagcccaccacagtggtggtgcctccctcaggactttaggaccctccgtggaccctgaaataccttcattctcaggactcagggactcagcagggactgctcctaatggtacccgctgcctcacagagcactctggtcctaagcacacacagcacccaaacccagcccattggttggacccaagccatggccccccagggggtccaggaccacctagagatgcagaggaccctgatcagagtgagacgtcttcagaagaagaatcaggagtggaccaggaactctcaaaagaaaacgagactgggaaccagaaggatgggaactcttttctttccattccatctgcttgcaactgccagggaacacctggaattccagaagggccttactctgagggaggaaatggttcttctagcaacttttgccaccactgtacctctccagctttgggggaagatgagttggaagaggaatatgatgatgaagaatctctcaagttccccagtgatttttcacgtgtgtccagcggaaagaaacccccatcccggagacagcggcaccgctttccaacgaaggaggatactcgggagggtggacgtagggatcccaggtcccctggtcgacatcggctgggtcggaaacgaagtcaggcagataagcgcaaaggcctgggattgtggggagccgaggaactatgtcaacttggacaggcaggctttggtggctgattgaactgctggtattggtgggagagtacgtagaaacttgtggccatctcatctatgcctgcaggcaactgaaaagcagctgatttggacctttttcgagtttggatgggagtgtggacagggcggttagggggctgggcccaggtcatgtttcagtttctaagccagggttttactgtggagtaggactgtttactcgtttccttaagctgctgggtgctttgctgctcctggctctgggccctctttttgggctttctacagttgggatggcggtttctggtgggactaggtgaccggttaggctggagggataaggctacctggctcttctcttggctggattctccagccttgcagcgttgcttgaactctgcttgaagagatacgcaggccatggcagcgggctggtaagaatagttcagtggggctggctggagttgccttgggtcaagcagaatattaataggcaggggaatgcacctgtagctaggtgggcgctactgccagcctgaagaggaagtggctcgactcttgaccatggctgggttcctgaggatgagctaaagcctttccatgtcactgggggttgaggccacagcatcagatgttgaactgaagaaggctatagacagctggcagtgatggttcatccctggaggacaaaatcatcattcnccggggctgaggaggccttccaaggtttggcgagcagcttgggacctcgtcagcaacggttgaaaagcgaaaaggggtttgcagaggaacgaagggaagatggactgagccggccgtaaaagacattctggcaaaggaaatgacctccagcaggcgaaacatggtgggtccccagcgggggaaaatagaggtttatggccccggaaaagagcccacgtgtggggaaagcgggcgcacgagaaaagggcgccacctgggagcaccaggaggaagacataaacggccgggtcttaca

SEQ ID NO: 94116 - DNA, 1232 bp, Homo Sapiens
  misc_feature (76)..(110): n is a, c, g, or t
atgtatagactcattagggcgcagtctccgagcgaacgacgagcgcagcgagtcagtgaagcgaggaagcggccgnnnnnnnnnnnnnnnnnnnnnnnnnnnnnnnnnnncagtcgacggtaccggacatatgcccgggaattcggccattacggccggggacttaaagctttggaagaaagcattgcaaacctcaataggtcgaccagtgttccagagaaccccaagagttcagcatccactgctgtgtccgctgcccccacagagaaggagtttccaaaaactcactctgatgtatcttcagaacagcaacatttgaagggccagactggcaccaacggtggcaatgtgaaattgtataccacagaccaaagcacctttgacattttgcaggatctggagttttcttctgggtccccaggtaaagagacgaatgagagtccttggagatcagacctgttgatagatgaaaactgtttgctttctcctctggcgggagaagacgattcattcctttcggaaggaaactcgaatgaggactgcaagcctctcattttaccggacactaaacccaaaattaaggataatggagatctggttttgtcaagccccagtaatgtaacactgccccaagtgaaaaccagaaaaagaagatttcatcgaactctgcacccctggggtaattaagcaagagaaactgggcacagtttactgtcaggcaagctttcctggagcaaatataattggtaataaaatgtctgccatttctgttcatggtgtgagtacctctggaggacagatgtaccactatgacatgaatacagcatccctttctcaacagcaggatcagaagcctatttttaatgtcattccaccaattcccgttggttccgaaaatgggaatagctgccaaggtcctggagatgacattgactctctggggaactctgaattcctggtccgacaaggttttccaaggggcgatccaggcgaagaaccacggcgctccggggggcgctaagaaaggggcgcctagacggagaataacaagaggtgaaccccatgggcgagaacggagggccccaaggaactggggcgggacaatgaaaagagaaagggcgctgaaaatagcagggaagacccagagacccaggggagacaaaggtgtgtcctaaagggtggcacccagcgccgggcggatgatctcctaaaaagcagagcagcaaaacgat

SEQ ID NO: 94117 - DNA, 754 bp, Homo Sapiens
aggttgtcaggacaacacatataaccaccaagatgtgttggcctttggagttcccctttaggttcctagtgatgtggaggtttatgggtgaaaaattagtggagagggaactcctctcccccattttgtgtagagtgaaaatagcctgaagcccctactcagcagggctctgggaatgtgccttccttattttagtttcagaattgctgggaaagttaccccactggtgggtgaggatctatcctcaacctacatccagatcctatgtgctgcttgcacagaggcctttggcttttgacccaggagggccgcgaggctggagctgccctgtctttcattgagccttagcatttccctctcaggcttcctctcaagctcaaggaactcacccccagataagaagctggtgcctcttgtctctctcatttcagaaacggactttctcatcatgctttcctatggtgggtatgaggggccagctgataccaaccaactggcctgtatctatctatctggatttgacttgaatttttaaaatgtgtatcgtttaaaaacaaaaatgtttgcaaatgttgcacataggatcttgcactgttcattttcagtggggtgagtcttcacactaaaaacacaagcagagctcctgggaaaagagactggaagtggttcaggcatacaagagatccatggtgggcagggctgttaggtcacagagctctagaagcagctggacttgaacccacaatggcttgtg

SEQ ID NO: 94118 - DNA, 1078 bp, Homo Sapiens
cagtcgacggtaccggacatatgcccgggaattcggccattacggccgggggagctccctggagcccgtgtgctctcgtgtgactgaacgtttgtgatgaaaggaggagaggctgtctgcctttatgaggagccagtgtctgaattgctgaggagatgtgggaattgcacacgggaaagctgtgtggtttccttttacctttcagctgaccatgaactcctgagcccgaccaactaccacttcctgtcctcaccgaaggaggccgtggggctctgcaaggcgcagatcactgccatcatctctcagcaaggtgacatatttgtttttgacctggagacctcagctgtcgctccctttgtttggttggatgtaggaagcatcccagggagatttagtgacaatggtttcctcatgactgagaagacacgaactatattattttacccttgggagcccaccagcaagaatgagttggagcaatcttttcatgtgacctccttaacagatatttactgaaggaatctaggttgtattttcagtggacaatgggaataaagcatttctaaagcaccgactggagaggaaggcaacagagacaaggagagaagccgagagacatgtctgcgtgctgccacgcatctgagcgattgctctgtgaagagttgtacactgaacattttcaggggaggctgtttacccaggcaatgtcctcaaacaagcctgtgccggggtgtcctggaatctgtgccaggactgtgtttttagcccttcacctctcagctttagcaggacatgaaccagttataacaagatggccctgcagctggttacaagaatgtgacatggcaggatctatggaaccaaatggaaggttttgaggtgatgtaggtctttcacagctagctttggggaatacggaatactcaaataaagtgctttgttattatttcagagggaatggcgattgaaatgttacaacagagatttcttggtggtagctatttgggtaaaggtatatgggtatttttctgtacatgtgaaattatataaaaataaaagttatataaattccattgcc

SEQ ID NO: 94119 - DNA, 1504 bp, Homo Sapiens
  misc_feature (75)..(87): n is a, c, g, or t
cagtcgacggtaccggacatatgcccgggaattcggccattacggccggggaattctggcagaacacctaaagannnnnnnnnnnnnaaaaggttttaaatacattatcttacacaaactgtgacctaatggcaataattacctcaaatgtgggcattcatcctggtttatagcctttttggaaatcatgtagccagcttgatcttggaatttaaagactatgaattctctggtgggctgaaaataatgattacttcatacccccggtcatcgttgcttaagtgaattctgaaaatagctcatctttacaacaaaaattaaaccaaggaagagattattcttgtgtgtgttgtactcaaatgcgatgttcaaatgcacatgttaagtatatatgttttaagctacggtaaaatgctgttagccttctaagctatcaaaacagtcacattttaaatgagtaaactaaacaatggactgtggatacttaagcatatttctggctacgtttaatagttaaagtgtttatatagtttacatttagacctgggtactttttaaagaaaagttctggtttataactgacatccgaaaccccagtgaatgcctcttagtgggaggttgtgtctcccccaaggcaagtgtgttgtcccagactcttctgtagtccagcatgcgcacttccctctggattattactttccacgtgaactcaagagaacatgaaaggcaatccagatggagggaaaaggtgtgagtccgcagcccgggccagatgcgaaggtctcatgcgtgtcgtctaaacacttgtcttcaaggccttctctctgacatcttggaagagtcattgagaacagataacctggttcattgatttttgtcttgatttgaatatttaacttattaatagatccactgatttccaggcaccaggcagtagaagagactgggattcaggtgaccatgaaggcacagctgctacttctgggccgggggtgatattttgatcagcgttttgtaggggaggaccatatacccctattcccatggtcgctggctgggttttccatatatctgctgtcatttattcgttttccccttaaaagcaaaatcaatgtaaaaggctatgtttacgttttactcattgtccagcttagactcaaagtctagttcggtgggagggggaccttagcatcctctcagagatggtcagggctgagcaggaggaggcagagacagaggggcagctcagcctggtccattgagacccactctaaacagacatcatattttggacaagaagatgcttcgagacaggaatgggcccccactgtcatgcagaaacagactgggggaaatggcagtttcccctgagcctgggttccttttatggttttccctggggccaccacccaaactgcaaaggaccctgctgtgacctaaaagggcattccttttagcaaataaaaaccttggaaaactgcaaaacacccggggacccagggag

SEQ ID NO: 94120 - DNA, 918 bp, Homo Sapiens
cagtcgacggtaccggacatatgcccgggaattcggccattacggccgggggctgcaaactaatcaggaatcgatcggattgtaaggacattgattggacgacatatacctgtgtgctaggatttcaagtatttggtgtctggccagaaggatctgatgggacagatatcaatgcactggtgcgatcccacaatagaaaggtgatagctgttgccgatgacttttgtaaagtccatctgtttcagtatccctgctccaaagcaaaggctcccagtcacaagtacagtgcccacagcagccatgtcaccaatgtcagttttactcacaatgacagtcacctgatatcaactggtggaaaagacatgagcatcattcagtggaaacttgtggaaaagttatctttgcctcagaatgagactgtagcggatactactctaaccaaagcccccgtctcttccactgaaagtgtcatccaatctaatactcccacaccacctccttctcagcccttaaatgagacagctgaagaggaaagtagaataagcagttctcccacacttctggagaacagcctggaaacaaactgtgggagccaagtgaagaccacagcgaggaggagagtgaagagggcagcggagaccttgggtgagcctctttatgaagagccatgcaacgagataagcaaggaggcaggcaaaagccacccttctggaggaccagcaaagaacccttcgcctcgtcctaaaacccttggttcagtgcaactcttttccttcagctgcatgtgatttggggataaagtcaggtaccaggatggcagtgatggagaatccctgtgatgagattggttccagtgattgattcttcaatagctattcaggtctcattcggcactaagttagaggggtatgaattaca

SEQ ID NO: 94121 - DNA, 1736 bp, Homo Sapiens
  misc_feature (1662)..(1662): n is a, c, g, or t
gcacccctctggaagccaatataataatccagaaggtggatgaaggtgcttggtggttatacagtggaagtgttgaaagtggcttgataatgaatatatttcaacgatgaagccgacagaatttgtggataaatcacaggtgaattttggatgaaaaaaagaagagacaacagtgacatcaaggtttttggcttgagcaactggaaagatgatgggatcttcacccatccctgggaagaagactgttgcaagaacaggttaggtagatatcaggaattcatttggggggtatgttaggtttgggatgtccattacacatgcaaatgcagctcttgagtaatcagttcgatatacaagtctaaagttcaataacatttatgtcccacagtcagactggagttaccaatgcgggagtcttgcagcatgcacgcaatacgcattggaagccaaaagcgcggaggagctccccagggagtgggggaacacggaggtcagctggtcagatgactgagcacggccaggatggctgaggaggagcacacggtgaacggagcacatttcttctctgagccttggttcctttcctgtaaatggagtataaccactcccatcttgcaggagctttttggtgataattaaggtgacttcgtgaaaagtaccagggtctcaaaaatctcaaattttgtggaaagtatgcagtttctaggttggagaggctagagtttggtttcaaaagcctcgaccacacacaggggcggttacagctcttgaggtcccgggggtcacaggacgccttccgagttggggggaggagaaaacaaaaccacaggaagaaacgaacaacgctttcgggtgggcccgggaccatagagggtcgctccgccactttcctagagcgaccgcggcggcgccagagcgcggcgaggccctcacttccggcggcgcgggaggcgcccagcgagccagagtggtggctggtcccgcgcgaaaattctgagctgtacacctctaggaaatgaaacactagttcagaagaagcctgtaaactctcttacaaatacatttggttattcaccatgaggttagcaaagcctaaagcgggtatttctcggagctcaagccaaggaaaggcctatgagaacaagcgcaaaacaggccggcagcggcagaagtggggcatgactattcgatttgactcaagcttcagtagactcagaagaagcttggatgacaaaccctataaatgtactgaatgtgaaaagagtttcagtcagagttcaactctttttcaacaccagaagatccatactggaaagaaatcccataaatgtgctgattgtgggaaaagtttctttcagagttctaatctcattcagcatcgacggatccatacgggggaaaagccctacaaatgtgatgagtgtggagaaagcttcaaacagagctcaaatctcattcagcaccagagaattcatactggagaaaaaccctatcagtgtgatgagtgtggccggtgtttcagccagagctcccaaccttattcaacatcagagaacccacactgggggagaaaacctaccagtgcagtgaatgtggcaaatggttcagtccagagctctcatctgaagccagcacatgaaggtgcataaagaagagaagccntcgtaaaacccggggcaaaaatatcaggggtgaagactcactttaccctcttggaaaagcttggtacaaggaag

SEQ ID NO: 94122 - DNA, 886 bp, Homo Sapiens
  misc_feature (262)..(284): n is a, c, g, or t
gggagagagtatgaagtcaaggcgcgccgaattcggcacgaggggagaaagggaagaacaattttttctcctcttttgggaaggtttgcgtctagtagtgcctgtgcccctgggcagattggagagaagagggacgactggagaatcgtcgagaaccagcggagaaaagaaaaagcaacgtttaattctagaaggcctcctgtccctgcctgctctgggtgctcatggaatcagctgctgccctgcacttctcccggccagnnnnnnnnnnnnnnnnnnnnnnnagcctgtgtgcactggtctcagcccagtttattgtcgtggggcccactgatcccatcttggccacggttggagaaaacactacgttacgctgccatctgtcacccgagaaaaatgctgaggacatggaggtgcggtggttccggtctcagttctcccccgcagtgtttgtgtataaaggtggcagagagagaacagaggagcagatggaggagtaccgaggaagaaccacctttgtgagcaaagacatcagcaggggcagcgtggccctggtcatacacaacatcacagcccaggaaaacggcacctaccgctgttacttccaagaaggcaggtcctacgatgaggccatcctgcacctcgtagtggcaggactaggctctaagcccctcatttcaatgaggggccatgaagaaggggcatccggctgaagtgctatctagagggtggtaccacagcccctccagtgtgaaggaccctacggggggtgccctgcctgaagaggttcatgccgagcaacgcctttctggcactcggtggatctaaataaatttagtaattcggtctctcaacctgtcgcataaaaagtgcttttccatctttg

SEQ ID NO: 94123 - DNA, 1009 bp, Homo Sapiens
  misc_feature (161)..(211): n is a, c, g, or t
  misc_feature (957)..(957): n is a, c, g, or t
  misc_feature (964)..(964): n is a, c, g, or t
ttaggggcgagagagtatgaagtcgacggcgcgccgaattcggcacgaggagaacaggtcccagataccgagtccgcaactccaaacatcgcgattaataggaggcctctggtctctgcctgccctgggtgctcatggaaccagctgctgctctgcacttnnnnnnnnnnnnnnnnnnnnnnnnnnnnnnnnnnnnnnnnnnnnnnnnnnngtgtgcactggtctcagcccagtttactgtcgtggggccagctaatcccatcctggccatggtgggagaaaacactacattacgctgccatctgtcacccgagaaaaatgctgaggacatggaggtgcggtggttccggtctcagttctcccccgcagtgtttgtgtataagggtgggagagagagaacagaggagcagatggaggagtaccggggaagaatcacctttgtgagcaaagacatcaacaggggcagcgtggccctggtcatacataacgtcacagcccaggagaatgggatctaccgctgttacttccaagaaggcaggtcctacgatgaggccatcctacgcctcgtggtggcaggccttgggtctaagcccctcattgaaatcaaggcccaagaggatgggagcatctggctggagtgcatatctggagggtggtacccagagcccctcacagtgtggagggaccctacggtgaggttgcgcccgccctgaaagaggtctccatccctgatgcagacggcctcttcatggtcaccacagctgtgatcatcagagacaagtctgtgaggaacatgtcctgctctatcaacaacaccctgctcggccagaagaaagaaagtgtcatttttattccagaatcctttatgcccagtgtgtctccctgtgcagtggccctgcctatcattgtggttattctgatgatacccattgccgtatgcatctattggatcaacanactccanaaggaaaaaaagattctgtcaggggaaaaggagtttgaacgggaa

SEQ ID NO: 94124 - DNA, 701 bp, Homo Sapiens
cagtcgacggtaccggacatatgcccgggaattcggccattacggccggggaaatgtagaaagtagaaagtgtaagtccctggttgtcccttctgcctgagacaaccactgctcacagtttgatgtatatccttccagagactctcaaatttaagcaaataatttttattaccatgtctttttatttgaagacgtacatttgcctccaaagttcaacacaagttcaactgaccatatccttccatgacctgaatagatgctatcctttatcacgatgttcaattgcctttgaaagagagtagtccaggtatattcctgatcaaaatttggcatttttgatgatactactctacacagatcagactcatgtgcagaatcgtgcctggagagagaggtttggttaagacagagatttctggaaacattcaaattgcaaatggaaacttgaaacccacaatctaatgaggaatgtactggaaaaataatctgaagagttgacaaatcgtgtactagattgaacacatggaatgcaattgcaatgagactttctgcactaaaactttatcctcatatgtacaacaatgatgtgtgtattatataacagtgatgtgtacatttctgacaccccatacataatatacacagtttgtataaatgcatacattttaaaaactatatatgtacaatacagttaacataaa

SEQ ID NO: 94125 - DNA, 942 bp, Homo Sapiens
  misc_feature (868)..(902): n is a, c, g, or t
tgagccaccacacctggcccggcataaagttttaatttaagcaaaaagcaagtaataaaagtactgtcagccacggcctattgagggaccacatgctgtgttctaaacactttccaggaattatctcatttaggtctccggacaatcttgatggaaattctccccactctacagatgagaaaactgaggctgagggagggggttgcccaaggtcacagaggtagcaagtgttagacgtgtggtttgtatctaggtctatctggttccaaagtccatgctgctaaccatttcaccacatcagaatgtcaaggacagctcatctgaaaggaaaaagcctcaacaaggcaagaggtgggttgacgctatgagaaatgctgggtccacagagcccactgccaagtgctgactgtcaggtccggccacagtgtctcagcattttctgcccaagcagacatgcgcagagtgggaggctgcatgcagttagcgaggagcggcccacactcagacccgccaatggccatgcccagcagccatgcgagctggtgcctgcctggccagaggtggaaatcctctccgtggtgctgggtgtgcccatggccatggcacatggaagctctggctgttccttcccgtcctgggtggcagcttccgtggtgccctctgggctccttggggtttcaggtccctgggttggcctggccacacttcccctctcggtcatctttgcacctagctgctccgtggtaactgaggcaggggagctgcttcccagcctcctggctctggccttggcctctcctgctgtaggccatgttcccccggccgtaatggccgaattcccgggcatatgtccggtaccgtcgactgnnnnnnnnnnnnnnnnnnnnnnnnnnnnnnnnnnncggccgcttcctcgctcaaaactcggtgcgctcggtcgtt

SEQ ID NO: 94126 - DNA, 946 bp, Homo Sapiens
  misc_feature (48)..(82): n is a, c, g, or t
tggaacctgaaagtccagcagccgagtttgtgagcgaggaagcggcgnnnnnnnnnnnnnnnnnnnnnnnnnnnnnnnnnnncagtcgacggtaccggacatatgcccgggaattcggccattacggccggggggcggcggcggcggcggagagagctggctcagggcgtccgctaggctcggacgacctgctgagcctcccaaaccgcttccataaggctttgcctttccaacttcagctacagtgttagctaagttcggaaagaaggaaaaaagaaaatccctgggccccttttctttcgttctttgccaaagtcgtcgttgtagtctttttgcccaaggctgttgtgtttttacgaggtcctatctccagttccttgcactcctgttaacaagcacctcagcgagagcagcagcagcgatagcagccgcagaagagccagcggggtcgcctagtgtcatgaccagggcgggagatcacaaccgccagagaggatgctgtggatccttggccgactacctgacctctgcaaaattccttctctaccttggtcattctctctctacttggggagatcggatgtggcactttgcggtgtctgtgtttctggtagagctctatggaaacagcctccttttgacagcagtctacgggctggtggtggcagggtctgttctggtcctgggagccatcatcggtgactgggtggacaaagaatgctaggacttaacagtggccaagacctcgctggtgggacaggaatgttccagtcatcctgtgtggaatcctcccgaaggagggttttccttacctaaacatgaaccttctgaccatgtacccttggaatggggttcctcccttcccggggatgatcccgggagcctccccctctcggccagcgattgggcacatctggggcaaagacctgggatgcccggcacaaca

SEQ ID NO: 94127 - DNA, 906 bp, Homo Sapiens
  misc_feature (75)..(109): n is a, c, g, or t
ctgataatcactatagggcgctagctcggtccatcgaacgacgagcgcagcgagtagtgagcgaggaagcggcgnnnnnnnnnnnnnnnnnnnnnnnnnnnnnnnnnnncagtcgacggtaccggacatatgcccgggaattcggccattacggccgggacaaacattcgccatgaccgtctatgctctttcttttccgcatgagatttggctttaggtaatcctgtggttcgaatgatatcactatttagtttgagtgcatcaaagatcatcttttcatctagtttgttagcttcccgacctctcagctcaaatacactggaagaagtaagggcaccattagagcataaagaactaacatccagtgttctgtgactgtagggtaaagttcgatctgtaaaatgcctggaagatagactaccttttgaaccagagtctatctgttcatttagtctaacagtatcatagattgaccgctgtgggacgtaacagtcttcgatatttaggtcctcctcttcttcacccttccctacacatgggggattctgacgtaaacagtctggtctgctgagtggcttccccattttgcagatagttaaaacaaatattgcagctcttgacacagataagaaataagataaagcatcttccaaaaaagtatacttctgaacagagctatggagtgtctttagcataaagacacatgctcaaataatatatttcataatacatgaggtgtttaaggtcatcagcagtgcatcagtataaaatgcaactatccttttacctggttgattttaggatgattctaaacaataaagtgcatcaataaccagagaacaaaaatctcctttgtccacctttccagctcccaaagtccccgttcaacacactccaaaaaacaga

SEQ ID NO: 94128 - DNA, 1096 bp, Homo Sapiens
  misc_feature (1017)..(1052): n is a, c, g, or t
ggtgctgtgcactatggccttagatggtcagttctgaaagttgattagaccatttctctgggagaatacattttatatcaatcgttgtaatgtgcctaaatttgtcaaattgtttaatggtacttaatactcaaggacattattttgtatggcccctacatgtctggcatcatcgtcgtcgtcatcatcatcatctttggctctgaaaggcatttttctgaactctcgtctgctcattgaaggacaagatgaagacgcaggttgggaggtcctgcatgagctcaacgtttccaaaagaaccggctcacgggcattggctgattgctgtcgtcatctagaaagacgctgttgtccatctgaagtggtggcttctgcacatcctctgtctgtagccctggctcattctgcttctgcacagtggagctgctgttggattcttctgctccggacccggcactgtgttttggcacggacaggccatctctagtctttgctaagcgagagtcactcacaactctgcagccaccgagaggaagacttgcagccccctgctgcacagaaacgccagcctcgctgcctggaagcaaggcactgccttcagcaaactcattttcacaaggggtctcaggtgtcacttttggcaaagaagcgctgtcattcttagggacaagcttctgtaattctgacttcacaagatgtcctttgtcacatttgaacttcttggacgttcgcctgtctgtggctttgtgggatgaggaagtcagacatgctgtcttggcagacgtggaaccagcaacttcctgggcagaggccaacctggctgccgaacaacttcgtgctttcaagcgcgctgaagaccgcactcgcacctgtgagcttccggctcctcatgagtgtgagcaccgcagccaagcaccgcgcgccccggccaacgcgtcccggcggagcggcgacccggagtctgcccccggccgtaatggccgaattcccgggcatatgtccggtaccgtcgactgnnnnnnnnnnnnnnnnnnnnnnnnnnnnnnnnnnnncggccgcttcctcagctcatatactgcgctgcgctcggtcgtta

SEQ ID NO: 94129 - DNA, 954 bp, Homo Sapiens
  misc_feature (364)..(364): n is a, c, g, or t
ttaagattaatttgttaattttatttaatatttaccattcagcagcaaccaacatgaacatgtgggctaacagaatctcttaaaatgttctgctatgtagctgcttcagaaatacacacacatgataaattcaagataaattcaactgctcactgccaaaattttttttaaaaaatggctccaagagcaaataacactgatttataatgtgcccaagcactagtcaacaaatctattaaattacacaggaaaaggaaatcaaggaagctttgttatcttatgcatgtcatcttatttaaatggaaggttttacttctttaaagcaacagaaatatggagcttcacatatatatgtatatatatnagaatgtggttacaaacacgaagtgttatcaaaagcaaaagctagttcaaaaaatttctgactgcaaaacttgcaagatacaaagctaaaatgcatatgttccttttctcaattatgaacactttcactaaacataaatatttaacatatattaatttttccgacattcaaaattgtaaagtcaatatggcagaattgttaaaagcacatatgtacaaatattctttttccatacgtaaagtatttggcataattataacaatcatactgcatcaacaactgtttgcgtttatttttactttgtgttttacacataatggtatctcttattaaaattaaccagttatatacaaaaatacttgaacatttattatagaaaacctctataaccagcctcaacagcatatacctgctgaatggtttcattaagagaatataaaaaagtggtcactgccttccaggtaagctaccaacaaaacaaacatggttaaactaaaatgagcttcccaacaaaagagggaaaatatttaacagtatgatttaaaatacagttcatatctattgtcaattgagtgttataaacagtcagt

SEQ ID NO: 94130 - DNA, 1853 bp, Homo Sapiens
  misc_feature (1387)..(1500): n is a, c, g, or t
ggtccggaatttccgggatccggcagcagcatgcgggggttgctggtgttgagtgtcctgttgggggctgtctttggcaaggaggactttgtggggcatcaggtgctccgaatctctgtagccgatgaggcccaggtacagaaggtgaaggagctggaggacctggagcacctgcagctggacttctggcgggggcctgcccaccctggctcccccatcgacgtccgagtgcccttccccagcatccaggcggtcaagatctttctggagtcccacggcatcagctatgagaccatgatcgaggacgtgcagtcgctgctggacgaggagcaggagcagatgttcgccttccggtcccgggcgcgctccaccgacacttttaactacgccacctaccacaccctggaggagatctatgacttcctggacctgctggtggcggagaacccgcaccttgtcagcaagatccagattggcaacacctatgaagggcgtcccatttacgtgctgaagttcagcacggggggcagtaagcgtccagccatctggatcgacacgggcatccattcccgggagtgggtcacccaggccagtggggtctggtttgcaaagaagatcactcaagactacgggcaggatgcagctttcaccgccattctcgacaccttggacatcttcctggagatcgtcaccaaccctgatggctttgccttcacgcacagcacgaatcgcatgtggcgcaagactcggtcccacacagcaggctccctctgtattggcgtggaccccaacaggaactgggacgctggctttgggttgtccggagccagcagtaacccctgctcggagacttaccacggcaagtttgccaattccgaagtggaggtcaagtccattgtagactttgtgaaggaccatgggaacatcaaggccttcatctccatccacagctactcccagctcctcatgtatccctatggctacaaaacagaaccagtccctgaccaggatgagctggatcagctttccaaggctgctgtgacagccctggcctctctctacgggaccaagttcaactatggcagcatcatcaaggcaatttatcaagccagtggaagcactattgactggacctacagccagggcatcaagtactccttcaccttcgagctccgggacactgggcgctatggcttcctgctgccagcctcccagatcatccccacagccaaggagacgtggctggcgcttctgaccatcatggagcacaccctgaatcacccctactgagctgaccctttgacacccttcttgtcctcctctctggccccatccaggcaaccaaataaagtttgagtgtaccaggaacagaatcctggggcttgcnnnnnnnnnnnnnnnnnnnnnnnnnnnnnnnnnnnnnnnnnnnnnnnnnnnnnnnnnnnnnnnnnnnnnnnnnnnnnnnnnnnnnnnnnnnnnnnnnnnnnnnnnnnnnnnnnnccaccccagaatctactgtgacaaaagggacgcccaaaaagagggaggcaggacatacatcacagacccagacgacgcgacggcgtaaaaacaaggcacaaaactggagaacacgggaaacggagcgacactaggaagagaggcgccccccatacagatggagggcagggcacaacactcggcggcacccaccaccccaccgcgaggagactacacaccccacaggggggacaacaaacacagaagtacccaagcgtacaacacggggctaaaccacagagcacgaaatatgcgcccggccaccgcgagaaaccttcgccaccccgaacgtacacgcgagacgccttatcacc

SEQ ID NO: 94131 - DNA, 850 bp, Homo Sapiens
cagtcgacggtaccggacatatgcccgggaattcggccattacggccggggcatttatcttcaaataccctaattttaaaacaaaagaacaagaaaagtttataacaccatgttcactaaaaccacggttgaatcttgggtgtgggcatcctttcgagtgtgtccataagagcagttcgtgggattttgcccatctgacccatattatcagcttattctgccaccagagtagagtctaataaattccaaagtttttatttgctccatggtgtatgttctgactttgaaaatgtcagattctataatcatacccctaacatccaggaaacaaatgacagattatctttaaactgaaattgactctacaatgcaacccttaatgctgaatggattaaaaaagtcagcccttttagtatctgtttgaaagggccgtaaaaagttgacacttttgttgttgtggatcctgcgtgtctagacccacgtgttgtttccatcgtatactgtagggtgcaccccttgggattcatcattaagaacttgaggctcactgttgtcagaaacaaagctcccaccccccaggttcaaccttgtgggagaactgtttgagcatgagaatgttctagactcagaggtactaaaaatttgttaccacatcattgcttcctttctacaggacgaattgaggcttaaactttactgttaatgatactggttcatttttaatgtgcttgtggtaatggtgtatttttcatttcatagctttcaaaattcatgctaatgtatacttgtctagttaaggctatttaaaatatgtcatattattacagatttagttcgtaaatttattata

SEQ ID NO: 94132 - DNA, 1017 bp, Homo Sapiens
  misc_feature (43)..(43): n is a, c, g, or t
  misc_feature (89)..(123): n is a, c, g, or t
cagaagtgatagatcactatagggcgctagctcggtctgatanccgaacgacgagcgcagcgcagtcatgtgagcgaggaagcggccgnnnnnnnnnnnnnnnnnnnnnnnnnnnnnnnnnnncagtcgacggtaccggacatatgcccgggaattcggccattacggccgggggtgcccgaggcggcggggctcgcgcgggtggagccgcctcggcgttcgagcggggtgggggctgcccggttgagatttcccggcgggtcccggcctctgcgtgcacgcgcctgcgtgctcgcgctcgcggttctggcgctgctggaaaggaataatgctgacagcatgtctgcacattccatgctctgtgaacgaatcgccatagccaaggaactgatcaagagagcagaatcactttctagatcaagaaaaggtggcatagaaggtggtgcaaagctgtgcagcaaattgaaggcagaattaaaattcttgcagaaagtagaagctgggaaagtagctattaaagagtctcatttacagagcactaacctaacacacctgagagccattgtggaatcagcagaaaacctggaagaagtagttagtgttcttcatgtctttggttatacagataccttaggagaaaagcaaacccttgtggtagatgtagttgcaaatggtggtcatacttgggtgaaagccattggccggaaggctgaagctcttcataacatctggctgggcaggggccaatatggtgacaaaagcatcattgagcaggctgaagacttcctccaggccagtcaccaagcagcaagtgcagtatagcaaccctcacatcatcttttgcattttacaacagtgtctccagccccatggcagagaagctgaaagaaatgggcatatctgtgagaggagacatagtagcagtcaacgctctgttagatcaccctgaaggagcttcaaccaagtgagagtgaatcaggatgatgagggccctgaactttttgcagggtgaccaga

SEQ ID NO: 94133 - DNA, 973 bp, Homo Sapiens
cgccgtccggtgttatcgatgcacgcgagcttcaacagcttcaaagaagtttagtttttcaagaggttgtcctaaagagtaaatgacataagactgaaggtgatctgtgtatttttgtttggcttcttttttttctgcttctagacatgagattttcaatcgagaaagagttgcaaaaatatggtgaaagttttccatcatagaccgacatccctgggggtcttctggctttcatttgctactttctccacattaacaaatactcctctgataagtttggtgtatgctttatccaggtctccacgacgctcagcatttttgaagattgattctgcaagtccagcaaattcttcaaattcagcaacaaatggaagaattccaactttactcttttttgagatctttacttcttccatttgccttatttggttactaatgcatttgtcaaagttccttttgacagtcaccaaaacatttcccaatgtagtacttaggaaagaagcagggtccacattttgtgcagtccacacatgatgactcattttgactaacatataaagagagttaaagctatcaattttgtctcctaatgcaattaggttgttcagctctggctcaatgcagcgaaatattttaatcatcatttggcggatcatatctttctcagatgaaacaggcagtggtgtgccacaattatgttgccgtgataatgttcctccatccaggtcctctgcttcagccatagttccaggcatactttgatgttgctgtagtttgaaaaatttacttatgaagtcctgttctgccagacataggggctccagttcacttagtacctgttcaaagatcttatcaaatttggtcctgtcagcaacatcgagatcagaggcagacatgtttcccatatccaacagggaagatgactgagatctgcgattccctgaactctgaacactgagcttatttagactcc

SEQ ID NO: 94134 - DNA, 1066 bp, Homo Sapiens
  misc_feature (49)..(88): n is a, c, g, or t
  misc_feature (91)..(125): n is a, c, g, or t
  misc_feature (164)..(323): n is a, c, g, or t
aacaccccggtaaagacgtatagatcatatagggcgcccggttattagnnnnnnnnnnnnnnnnnnnnnnnnnnnnnnnnnnnnnnnncgnnnnnnnnnnnnnnnnnnnnnnnnnnnnnnnnnnncagtcgacggtaccggacatatgcccgggaattcggccnnnnnnnnnnnnnnnnnnnnnnnnnnnnnnnnnnnnnnnnnnnnnnnnnnnnnnnnnnnnnnnnnnnnnnnnnnnnnnnnnnnnnnnnnnnnnnnnnnnnnnnnnnnnnnnnnnnnnnnnnnnnnnnnnnnnnnnnnnnnnnnnnnnnnnnnnnnnnnnnctaacaactgagcactgggaaattcaaaatctcagtgataaccccaaaacatgcaatcctttcatttattttttaatcctggtctcattgtacatgcaatactttctaatacattatctgtaataacttattctttaagatctaagaaaaggaaacagttctgaaacaaaacattctggaaaagtctgccaaaattttaagctttttggagtaacatgggagatagatctttggagaaaaaagtaatgatgtcaatctaagacaatattccattaacagtactggtagagctatttcacaatttagcatacataatgtcacacgactgtagaaatgtttccaaacatgtatattaacaaaaatatttttaaaaatttcttcccacaagaataagtcttaatgattgttttcttaaacagttactgacatcactcagttataccaagcactgaaatttaaataagactatccaatatgtagattggaagttcgtcttttaacaaatcaccaagcaaaattattagctagccatgtaatatcactgttgcatatatcacaaaattttaaaacttttactgataggtaggacttccacaatcttgaaaacaaactgcatgttacaggggggtctgacgactcaggcccgttgacgtggttctgcctgtaatccagcatcgagcagcttgtgggtgatcacctgaggaggattcgacacagctggccgagggaaagcggtcctataa

SEQ ID NO: 94135 - DNA, 986 bp, Homo Sapiens
  misc_feature (80)..(114): n is a, c, g, or t
agatctatcgatcactatagggcgctacttgctagacgaacgacgagcgcagcgagtctagtgagcgaggaagcggccgnnnnnnnnnnnnnnnnnnnnnnnnnnnnnnnnnnncagtcgacggtaccggacatatgcccgggaattcggccattacggccgggggaggaaactgcgactgggagcgggacccaggcgtgcagcattcgccatgctccgctcacgcgtgggagactgggctgtggggtaccggcccggaaagcacgcagcctccaaagccgccttcctcagggaaatttgcgtgaccttactgccctccgtctacaggccttgtacctctccaggccgatttttccacaatttaaatctcagttcacctggtatccagctccagcaacttagagcgtttcacgtcacgccgggcgccaggcgtcggcttgtataacctgaaaacgctcctgtttttctcatctgtgcagtgggttttgattcccaccatggccatcacccagtttcggttatttaaattttgtacctgcctagcaacagtattctcattcctaaagagattaatatgcagatctggcagaggacggaaattaagtggagaccaaataactttgccaactacagttgattattcatcagttcctaagcagacagatgttgaagagtggacttcctgggatgaagatgcacccaccagtgtaaagatcgaaggagggaatgggaatgtggcaacacaacaaaattcttgggaacaactggaacctgactattttaaggacatgaaaccaaatatttaggaaaactcagaaaattgttattaagaagagagaaccattgaattttggcatcccagatgggagcacaggtttctcaagtagattagcagtacacaagatctgccttttattcatcagtcttctgaattaggtgaacttagatacctggcaggaaataccaatgcatggggaagaagaaaa

SEQ ID NO: 94136 - DNA, 802 bp, Homo Sapiens
cagtcgacggtaccggacatatgcccgggaattcggccattacggccggggggggtagctcttcactcctcagcgcgacgtcgtgtcgagttcccaaaaagtctccgcaggggctgtagggatggcatacaagaattaaattctgaataagtctgcaggtaggatggacagttattttaaagcagctgtcagtgactctggacaaactccttgagtgatttggaacagaacccagatgaacaagattatctccaagatgtacaatacatgcagtatgattctaaccactgctcagtttcttcagagttggcttcctcacagcgaacttcattgcgtcccaacaagaccaagagtgcgttcaagtagtatgtgcctcactcagaaacatagctatggaacaaatgagagttccctgaataaaaaaacactcaagggagcttacttctatagcaactaatgagcaaaaacatgtaacaggacttgatcttcttctcttctgtggatggtggtacttcagatgaacagtccagccgttatatatgggacgatgtagtaaagcctatctgtgatctgataagtgacactgggtaacttagttcatgctagaccaactagtgagagaacgatattaccagcattgattggccagatgatctggaagtctaatgcgagattccttgattggattcgcatatatcttacagctgtcagatactccctgtgtaacttcaaacagaccatgatagtgatactcgtcagagaacaacagaatgataccagttctgaatcacaaaatagcgaa

SEQ ID NO: 94137 - DNA, 925 bp, Homo Sapiens
  misc_feature (27)..(27): n is a, c, g, or t
  misc_feature (34)..(34): n is a, c, g, or t
  misc_feature (96)..(130): n is a, c, g, or t
  misc_feature (818)..(818): n is a, c, g, or t
caagaaaaaccgtaattaaactgaacnccttccnatatggccctcctgttcagtcgaacgacgagcgcagcgagtagtgagcgaggaagcggccgnnnnnnnnnnnnnnnnnnnnnnnnnnnnnnnnnnncagtcgacggtaccggacatatgcccgggaattcggccattacggccgggggcctgttttcgactcgcgctccggctgctgtcacttggctctctggctggagcttgaggacgcaaggagggtttgtcactggcagactcgagactgtaggcactgccatggcccctgtgctcagtaaggactcggcggacatcgagagtatcctggctttaaatcctcgaacacaaactcatgcaactctatgttccacttcggccaagaaattagacaagaaacattggaaaagaaatcctgataagaactgctttaattgtgagaagctggagaataattttgatgacatcaagcacacgactcttggtgagcgaggagctctccgagaagcaatgagatgcctgaaatgtgcagatgccccgtgtcagaagagctgtccaactaatcttgatattaaatcattcatcacaagtattgcaaacaagaactattatggagctgctaagatgatattttctgacaacccacttggtctgacttgtggaatggtatgtccaacctctgatctttgtgtaggtggatgcaatttatattgccactgaagagggacccattaatattggtggattgcagcaatttgctactgaggtattcaaagcaatgagtatcccacagatcagaaatccttcgctgnctcccccagaaaaaatgtctgaagcctattctgcaaagattgctctttttggtgctgggcctgcaagtataagttgtgcttcctttctggtcgattggggtactctg

SEQ ID NO: 94138 - DNA, 876 bp, Homo Sapiens
  misc_feature (129)..(206): n is a, c, g, or t
  misc_feature (208)..(220): n is a, c, g, or t
  misc_feature (230)..(238): n is a, c, g, or t
  misc_feature (788)..(805): n is a, c, g, or t
ggaccggtccggaattcttgggatatcgtcgacccacgcgtccgccttactctctcagataagtggctggacttatcttgtgatttggggccatggaagattggaaacaaagattttaagccttcttcnnnnnnnnnnnnnnnnnnnnnnnnnnnnnnnnnnnnnnnnnnnnnnnnnnnnnnnnnnnnnnnnnnnnnnnnnnnnnntnnnnnnnnnnnnnggaggtgaannnnnnnnnaagttttgtaacactgtcctactttatttattagaatctaaggctgttacaatcaagtcgttgcagggtttggatcagctgtaagttaggtatgcctaccaaacatccaaaggtagacgtggagacattttaatactacaaaactaggaaaatcagaactcatggccatttcctgccctcctccaacttgttaaaacatgtttattctaaagttcgaatggataaatttgagtataaaggttttgttataaaactgttctttagtgtaaggctgcattgtgggtttgggggaaatgtaaataattttctgtgtaaaacaaattcataggatctgatttgctcagagtattattcaagaatgtattaataaggcattgccccctgtttgcactcagggttaatatgtcaaatgaaatttaagaaggaaatggaagaattcaggtacattaattgcatattattttgggaaagatgagtcctatacgtggcaatttttcaatgtcatctgaagccagcattatcttccaaagaaatcgatcttttttttctnnnnnnnnnnnnnnnnnngaccgcgtatgcggccgcaaacttatttccttttgtgaggttaatttagcttgcactgcctctctccagca

SEQ ID NO: 94139 - DNA, 835 bp, Homo Sapiens
  misc_feature (83)..(117): n is a, c, g, or t
ggagattatagatcactatagggcgctagctcggtttatcgaacgacgagcgcaagcgagtcagtgagcgaggaagcggccgnnnnnnnnnnnnnnnnnnnnnnnnnnnnnnnnnnncagtcgacggtaccggacatatgcccgggaattcggccattacggccggggaggaacccctcgcgcacccagcgcagaaggctgctgccgccggacgcctccattgtttgaccacaacaagggccggattctcacccagcaggatcctaaggcctttgtagtccttcagccactgtgggccctgcctctgcctgttcttctggaatgtcttgggggttttgatcctgtcactgtgacctgcaaatccaagagacacatctttggaagataagagagcttcttcaagaccaaaaaaggagacggcatgatacccatgtagggaattccccaaagcagggcttgccatacctggaccccgaggagcctgcttgctggaaaggctttcctgtctgatgtgcaggaggcagaatgccaaactgactcttcaaggggcaactgcaggggctcgagaccagccagcagtatctcatccttcgatacaggggatatactgtacagtcctttttctagaagtgagacatacaagattactctacaagaggaagattccaggggctcaaaaacgcaaaggtttgcactttgagagccccttggcaatgttgacaactcaggatctaaaacaaagttctgtgttactgagttacagaattcacgtggaagtcaatgtcactttataatcgatactactactgagtgaggaacactatgcaggaagaaa

SEQ ID NO: 94140 - DNA, 789 bp, Homo Sapiens
  misc_feature (46)..(80): n is a, c, g, or t
tcgaacgacgagcgcagcgagtcatgtgagcgaggaagcggccggnnnnnnnnnnnnnnnnnnnnnnnnnnnnnnnnnnncagtcgacggtaccggacatatgcccgggaattcggccattacggccggggacctgaataggcaatcccccaggatttctgattgaattctacctgaaagtttagattttaaaagacaacctgtaggaagctaagtctcaggcaacaaaatttaaaaccatcagaacttgtttctccaaacatcaacctgctcctgtcaagtcctttttcatctctcccttttgtccctttacatactgttttgtaagttccttttgatatcatttattgcaggcagtatttttacatccatcttcaagaaacttgggagacatttagacatttagtatgtgtacttttagttgtcttgcctctttatttcagataatgcctgtgattagtgaatggcggcattattcctgaagacaaatgaaggaagatagggagcaagattgactgtcatttgaatgatggaagagaagtagaattactgtgaggttacaaaaatcgtaagttagcagacattgagaaaggaaaacttcctacttgggcttttcaggcttatgtcgacattatctggatgtgttttctagtctttcctaaaggagaaatttttattcctgggttgctgaaaagcttttctggactaaaaggatataagcagctcaattagcagcatagaggattagatttaatggaacagcactgcattcaggaaagctacatctcc

SEQ ID NO: 94141 - DNA, 1109 bp, Homo Sapiens
  misc_feature (81)..(115): n is a, c, g, or t
aagaattatcgactactatgggcctagctcttcacagccgaacgacgagcgcagcgaagtagtgagcgaggaagcggccgnnnnnnnnnnnnnnnnnnnnnnnnnnnnnnnnnnncagtcgacggtaccggacatatgcccgggaattcggccattacggccgggggtttctgcaggagcccaagaagaggccgaaaccgagaccatgccagggaagctgaaggtgaaaatcgtggccgggcgccatttgccagtgatggaccgtgctagtgacctgactgatgccttcgtggaggtaaaatttggtaataccacctttaaaacagatgtgtaccttaagtcactcaaccctcagtggaactcggagtggtttcaactttgaggtggatgatgaagacttacaagatgaacctttacagatcacagttcttgaccatgatacttacagtgcaaatgatgccattggtaaagtgtacattgatattgatcctttactgtatagtgaagctgcaacagtcatctcaggatggtttccaatttatgacaccatacatggtatccgtggggaaatcaatgtagttgtcaaagtagacctcttcaatgatttaaatcgatttaggcagtcatcatgtggagtcaacattcttttgcacaaccgtctattccaaaatgctatagagcctgtgataacttacatgcgaatcagtcacgacacgacactcgctggctccaacgcacagcaccccagaatattcacgctcggcatccgcactcgacattccgccactacccaacgcgcccacttcccccctcgcaccccccagcacaacaccgcacctcacccacgccccacctgctccgcctgacacctgcccaaccgaacgaccctgcccctcgcaaacgccaccccgacacctgacaacggcaaaaccgccagacacgctgcaccgccacaccaaccaaccggatcccccgacctcctggccacaccgcgcagctcctagggcacccaaccgaggcgcgcgacacccccgcaacagccacagggccgcggccagccaagacacaacacccacactacaccgccacgcaccccaccagccccccgc

SEQ ID NO: 94142 - DNA, 1209 bp, Homo Sapiens
  misc_feature (42)..(81): n is a, c, g, or t
  misc_feature (84)..(118): n is a, c, g, or t
  misc_feature (1187)..(1187): n is a, c, g, or t
aagacctttattcatctatgggcgctagcgtcggttttcctnnnnnnnnnnnnnnnnnnnnnnnnnnnnnnnnnnnnnnnncgnnnnnnnnnnnnnnnnnnnnnnnnnnnnnnnnnnncagtcgacggtaccggacatatgcccgggaattcggccattacggccgggggccaggacagtgactgctggccgcgaatttcacaacacaggtggcttcctcacaggaagctcctctgtataccacaccctgttgctactgagtggagcagccaaattaaattaagcttgcattgctcaaaattaattttcctaagagaaatacaaatacaccaatagattagggtattttatacatttttaatttcatttttgctcttcttttatagccagtgtgcacatgtaagagttatggaatcacttagagcaatactgagcattttcatttatataaaacccaaatcatttgggtgcagaagtttggatgattgaagctcagagggaaggagaaaagcatttgagatgaaaaccaaagagtaaatttgagtttggcaaaagaacagattgcacttttggtttgtaccacctctttacaaatttgttaaaggaatactaggtgccaagcctgtgtgggcaccatagataatgcagataaatagaatacaatcccagcaagctcatcttctagctagaaacctcagaaagacacaaataagagcagtaaaaagggattggccggaaagaatgacagaaaagagtaatggagaaatcctagaggtgctgaagggagaaggagaatagatcaaagatcaggcagtgttctttccttttaaatgattagcctttcattttcatcaccaacaactggacagcaagataaagtaactggacttcaaactagtgagtgtatttttaaggccctgcttgttaaagaaaggcttgaactggcctctcctcatcactgcttcttccaacaggccctcatcaccttttttcaagtcaagatttcatcccatacatgcatgactcaatcagatttggaaatgtgggtaagagaaagatgtcaaaggaaatgtgaagtattcacttctctattagtcacaccttttacaccatagactccaaagaggcgttaagcacctggttttcctttggctcagaaaaaccaaccaccaaaaaccgccgttttntttaccatttatatttaagcca

SEQ ID NO: 94143 - DNA, 984 bp, Homo Sapiens
  misc_feature (875)..(910): n is a, c, g, or t
aggttctgggaaattaaaatagggatgcagaatttagaagtcaaagaattaggaaaaaacgttaagtttagaaaatgccagttgagataactgcccagaaagtaggacgtaaatttagagatagaaaatagaagagaataattggaaaaatccattgcaaaggtcttacatctgacgatgagaattccaggaccaagaagttattaaagaaacaatggaagacccatggccccagaactgaaggacgttaagtttccaagattaaaggggttcacctgttaatccatcattatgactcaaaacctacaccaaggaacatcactgtgaatttctgaacatcagtgactaaacaaacgactacgacaacaaacccaaagcttggaggaaggaaaggatttataaagaaaatgcctttgaatctgcctggaagttaaaaggaacaatgcttcaaattctgaactatcatcactagtacttacctatgtactgaaagtacccgctaacacaaccactcaagagaaattaaaagtatagaaactgggaaggaaactatcattatttgcagataacacctgggaaactcaaagagaatttactgaaaacgacccaacaataaggtaccagagcataaaatttaaagaaatcaagaattctcatatataccagtaacaagaagacagaatgggggaaattttcccacttataatagcaacaagatgaaatacctaagaatacactcagtattgctataactatataaagaacaacttaaatactactgaagaatacaaaagtagacatcaacaaatagaatgacataccatcccggccgtaatggccgaattcccgggcatatgtccggtaccgtcgactgnnnnnnnnnnnnnnnnnnnnnnnnnnnnnnnnnnnngcggccgcttcctcgctcactgacttcctgcgctcgtttcgttcggctcaacaggctccgcccattgattataa

SEQ ID NO: 94144 - DNA, 1625 bp, Homo Sapiens
  misc_feature (980)..(1039): n is a, c, g, or t
  misc_feature (1231)..(1243): n is a, c, g, or t
  misc_feature (1480)..(1530): n is a, c, g, or t
cagtcgacggtaccggacatatgcccgggaattcggccattacggccgggttccaatagtggctggttggaagaaatacccactctttttggtactgctgtatttgcttttgaaggcataggagtggtccttccactggaaaaccaaatgaaagaatcaaagcgtttccctcaagcgttgaatattggcatggggattgttacaactttgtatgtaacattagctactttaggatatatgtgtttccatgatgaaatcaaaggcagcataactttaaatcttccccaagatgtatggttatatcaatcagtgaaaattctattcctttggcatttttgtgacatattcaattcagtcctatgttccagcagagatcattatccctgggatcacatccaaatttcatactaaatggaagcaaatctgtgaatttgggataagatccttcttggttagtattacttgtgccggagcaatgtcttattcctcgtttagacattgtgatttccttcgttggagctgtgagcagcagcacattggccctaatcctgccacctttggttgaaattcttacattttcgaaggaacattataatatatggatggtcctgaaaaatatttctatagcattcactggagttgttggcttcttattaggtacatatataactgttgaagaaattatttatcctactcccaaagttgtagctggcactccacagagtccttttctaaatttgaattcaacatgcttaacatctggtttgaaatagtaaaagcagaatcatgagtcttctatttttgtcccatttctgaaaattatcaagataactagtaaaatacattgctatatacataaaaatggtaacaaactctgttttctttggcacgatattaatattttggaagtaatcataactctttaccagtagtggtaaacctatgaaaaatccttgcttttaagtgttagcaatagttcnnnnnnnnnnnnnnnnnnnnnnnnnnnnnnnnnnnnnnnnnnnnnnnnnnnnnnnnnnnnacttctattattcttttatctcagtaagaaataccttaaccaagatatctctcttttatgctactcttttgccactcacttgagaacagaataggatttcaacaataagagaataaaataagaacatgtataacaaaaagctctctccagatcatccctgtgaatgccaaagtaaactttatgtacagtgtnnnnnnnnnnnnntctcagttatgtttttattagccaaattctaatgattggctcctggaagtatagaaaactcccattaacataatataagcatcagaaaattgcaaacactagaattaattttacaccccaatggaagtggatctccaaagccaagaggcactgttcaagatcatgacttagtgtttcaatgaaatttgaaaagggactttaaaacttatccagtgcaactcccttgtttttcgtcannnnnnnnnnnnnnnnnnnnnnnnnnnnnnnnnnnnnnnnnnnnnnnnnnncttgagatcaagaaaacctaatcttctgactcccaggccaggatgttttatttctcacatcatgtccaagaaaaagaataaattatgttcagctt

SEQ ID NO: 94145 - DNA, 586 bp, Homo Sapiens
  misc_feature (22)..(22): n is a, c, g, or t
ccacggaatatagcattttcantgattaaaataccaacatcctgggggaagatttaaagttatgctgctttggatttcatcatggaacacatatatcctaaagtagctatgttacatacaaagttgtaacaatccccatgccaatattcaacgcttgagggaaacgctttgattctttcatttggttttccagtggaaggaccactcctatgccttcaaaagcaaatacagcagtaccaaaaaagagtgggtatttcttccaaccagccactattggaaggttgtggggatctggcatgttcctgacaacatactggtaaattatcacaagactgacagccatggaaacgttggcaaggaatgaaagtacaaatagattctttagttcacgaatgaagaccaaaagaattataaatggaagaaagcaaagcatatatatccttaggtcaacacttcttctctcacaagggtttgatgaattggtactatttgaaataaacactttactctccaggaatccttcatgaacttgtttcacattttcagctaagaagacaatataaacactacagaatcccagctgtgt

SEQ ID NO: 94146 - DNA, 505 bp, Homo Sapiens
cagctcgtgggatgcagggaccctgaatttactactcctccactatcccccactactgccaccttgccctatggcaggcggcaaatctcagcgaccttattctaatatataggaaacaattttgcatcataattacttagaaaatacccgggagggggtgggggaggaggaccctttgtcatactccatgtaactcaccatcgcataactctgctcggcatccaggtactttttatactcatggttgagtttatcaaaaacagtggctatcacgggcagcgatgctctgtctgactcacttaacactggaaaggcacaatgttcacacacggatcaaaccaacttcatgtcagcttcagaatttccacacgttgctatgataaaaactaatctcaaaaggttaccaatgcaaaagtacctttaaaggacactctaagaaatacaatactttaaagacctgacagctagatgtcattcgcaacccctttctggttacggttaaaaa

SEQ ID NO: 94147 - DNA, 746 bp, Homo Sapiens
cactgcagcctcgggcactgtggggagtgcatgcctggggcctctgggtggggaccatggacaggccctggtcactgtcctaacctttgtcaggacaaaggtagcaagaggatttcctggcgggtgggaaggaatggctggggcggccagttttgacacgccccagtgccctggagaacaaccagggtcatctgcacttgatgactgctccccgacccccagcccggacacctcattcccctcccactacagggatcaagtgacctgggaagaaccgagttcaacaccaggatgtgtttccttagatttcctttcctaggcgatttccagggagagccctgattggacaatcacatcacagatcacactgcagtttccatgttagcactgtggatgggtttttaatcaataaaaactgggggtttcttctcaccgactctccacttgcccaaactgccaaaagctggtgattctgggacaggccttcactttggagccacgggatggggtgggggagccccatgggcctgggaaggagggtgctgtggagggggctgcagggctgaccagcaggcagcctcatctggtcgggggcgggggcggcaggagcagaagcggggtctccgtccttgggactgtcctggttggccacgggccctgaggatgcacggtgcctggggctcctgtgccggtgggcggggggcatgctggcctctgagcgatcaggcgaggccagcgagggtgtg

SEQ ID NO: 94148 - DNA, 1273 bp, Homo Sapiens
  misc_feature (88)..(88): n is a, c, g, or t
  misc_feature (136)..(136): n is a, c, g, or t
ttcacggcgctggtggaagtgtttcatctcggcctgcagggcgaaacccaccacgcggcagcgcctgcgaatgccgtctgcctcgtcntgcaccatgcggccctcgtcactcatgcgttggctctccttcacctgngcgaaggcgcctttttgtagatggatgatgtcagggaagttggagagcaggccctggtagagagacagtgtgtccagcatctggaagaggtcattcttgggctgctcagcaaacatctccccgatggcttcataggtacggcccgtgtgagaaatggcactgttgaggttacggcccaccacactgcctcgcttggcagatgccaggctgtcctgccgctccagtggtggcttgggccggaaggccatgtgctggctggggtaggcaccagggtaggagaggttgaggggagggtgcccgttggtgcccagcccaccagcccgtggctcctccaccactgtgcatccgtcgtcccagtcatcccagtcatcatcatcatcctcctcaaagctaccctggtttgagaggaagccactgcccccaccactcctagctgggctggccacactggggctgttgtacaagctcacctgggctccgggagagcctgcagggctgctggagtagtcagcatggttggtgctgatgccagaacggacgatctccacataagaggcaggaaagagccctgtctccccacggctgttctggccctgcagccagccatccagtgaggtctcgctaaagatgaccaggtcctcatcctgctggatgctgatttcctccttgttctcactgtgaaagtcatagagggctcggcctttcagtgccatggctgggctgggtggtatagaaagatgggaaggagagggtcctgcccagaccggggatgctcacaaggcagtccaagaatgcactcgcagctgaatggcgcttacacagttcaatctctcaggtcctaaggtggggtctcagcacccacagatgctgtccagtctccccctcttcaaagcaatgtccatggcccagaaactgccctatcaggtctccgggcatatgcttgtgagcagggagggctcatgtccacagtctcctcctcccttagcagcctctggggggttagaggggaatctctcctaactcctactcccagaagaaaagtcaagtgacctggagaaatctgccctgcgaggggaaaaattcgacactttccactggaacaacgttctaaaatagaagagactcactctgaaacca

SEQ ID NO: 94149 - DNA, 1026 bp, Homo Sapiens
  misc_feature (85)..(119): n is a, c, g, or t
aaagatgtatagatcactataagggcgctacctcgtcacagacgaacgacgagcgcagcgaagtcagtgagcgaggaagcggcgnnnnnnnnnnnnnnnnnnnnnnnnnnnnnnnnnnncagtcgacggtaccggacatatgcccgggaattcggccattacggccggggatatttgctaagagcaccatgcgcgcagcagccatctccactccaaagttagacaaaatgccaggaatgttcttctctgctaacccaaaggaattgaaaggaaccactcattcacttctagacgacaaaatgcaaaaaaggaggccaaagacttttggaatggatatgaaagcatacctgagatctatgatcccacatctggaatctggaatgaaatcttccaagtccaaggatgtactttctgctgctgaagtaatgcaatggtctcaatctctggaaaaacttcttgccaaccaaactggtcaaaatgtctttggaagtttcctaaagtctgaattcagtgaggagaatattgagttctggctggcttgtgaagactataagaaaacagagtctgatcttttgccctgtaaagcagaagagatatataaagcatttgtgcattcagatgctgctaaacaaatcaatattgacttccgcactcgagaatctacagccaagaagattaaagcaccaacccccacgtgttttgatgaagcacaaaaagtcatatatactcttatggaaaaggactcttatcccaggttcctcaaatcagatatttacttaaatcttctaaatgacctgcaggctaatagcctaaagtgactggtccctggctgaagggaattaacagatagtatcaagcgcagaaggaatgtgccagtatggctccctgggtgaaaccagctaggacctaatcgcggtgtctcgacaggccaagaaaaacaactgatcagacagggctacctgacagatccagggcagagtcgaagagcataagcagacaaaccgaagacgcaacgacgcgaactgg

SEQ ID NO: 94150 - DNA, 997 bp, Homo Sapiens
  misc_feature (85)..(119): n is a, c, g, or t
caaagaatgtatagactcatatagggcgctacgtcgtctctttcgaacgacgagcgcagcgagtagatgagcgaggaagcggcgnnnnnnnnnnnnnnnnnnnnnnnnnnnnnnnnnnncagtcgacggtaccggacatatgcccgggaattcggccattacggccgggtcacccggccccactgggtggctaccatgtttctgccaaatgttttggatacatgacgcagcaactgatgaacctggcaggaggcgcagtggtgctggccttggagggtggccatgacctcacagccatctgtgacgcctctgaggcctgtgtggctgctcttctgggtaacagggtggatcccctttcagaagaaggctggaaacagaaacccaacctcaatgccatccgctctctggaggccgtgatccgggtgcacagtaaatactggggctgcatgcagcgcctggcctcctgtccagactcctgggtgcctagagtgccaggggctgacaaagaagaagtggaggcagtgaccgcactggcgtccctctctgtgggcatcctggctgaagataggccctcggagcagctggtggaggaggaagaacctatgaatctctaaggctctggaaccatctgcccgcccaccatgcccttgggacctggttctcttctaacccctggcaatagcccccattcctgggtctttagagatcctgtgggcaagtagttggaaccagagaacagcctgcctgctttgacagttatcccagggagcgtgagaaaatccctgggtctagaatgggaactggagaggaccctgagaggagacgggctgggcggcgacccccacagggctctcgagaacagattctcccctcaagtatgggccatggctgtggcccccattcctcaggactgcacagaggaggactggctccggctccgtcgggctcacccttaaccactattcctggctctgcaaaccccagactttgcacacag

SEQ ID NO: 94151 - DNA, 911 bp, Homo Sapiens
tgctcctccgcctggcctgggccgtctgcccgcagccatgagcgtgctcggccccggtggagcccgcagtcctctagattagtctccaccgccgtccaggacccacttgcagcatggagtcgcccgcctcgagccagcccgccagcatgccccagtccaaaggaaaatccaagaggaagaaggatctacggatatcctgcatgtccaagccacccgcacccaaccccacacccccccggaacctggactcccggaccttcatcaccattggagacagaaactttgaggtggaggctgatgacttggtgaccatctcagaactgggccgtggagcctatggggtggtagagaaggtgcggcacgcccagagcggcaccatcatggccgtgaagcggatccgggccaccgtgaactcacaggagcagaagcggctgctcatggacctggacatcaacatgcgcacggtcgactgcttctacactgtcaccttctacggggcactattcagagagggagacgtgtggatctgcatggagctcatggacacatccttggacaagttctaccggaaggtgctggataaaaacatgacaattccagaggacatccttggggagattgctgtgtctatcgtgcggggccctggagcatctgcacagcaaagctgtcggtgatccacagagatgtgaagcccttccaatgtccttatcaacaaggagggccatgtgaagatgtgtgactttggcatcagtggctacttggtggactctgtggccaagacgatggatgccggctgcaagccctacatggcccctgagaggatcaacccagagctgaaccagaatggctacaatgtcaagtccgacgtctggagcctgggcatcacatgattgagatgggcatcctgcggt

SEQ ID NO: 94152 - DNA, 1206 bp, Homo Sapiens
  misc_feature (908)..(918): n is a, c, g, or t
ttttttcccacaccttaattctagcacctgttgtcagaccactgttcagcaccaaaagaactcctcagcctggagttctttggagttttaagtgattgcctaactcagcaggggacagtggtcttgacttcttggttgacggtttaaaaacataaaagaattttatattttaaaactgacaaactagaaaatgttagaaactctatctgaaggcagaaagtataaagttggtgggtacctgataaaacatgatgtatgtaaatacagttcaaaacaatttaaaagtataaatatttgtcaattatttttcctccagtgctctggctattgctgaaaacaccttctagttccaccttgtaactggactcccaaaagatgaatgctgacatcttctgatgcttaacaagaaataaaaatagtcaccttaatcatcaaaaaggtaattgcaaagggcactgttgcctgaaattctctagtcacctgaaaactgaaataactgaggcaagacttccttaaaatgcttagtttcaaacgttaaacacgaatggcctgataatgagtgcaaacaagtacagaggaaaaccatggaaatccaggaattgtgaaatgccagagaaataactgttttgctagtttaaaagtctgaagcttttccctcctccccagctgttaatgtaggagacacacagcctaaccaggacagtctcaatgccccaggaatggttgtgtgatgactgataaagcagaaatttcttgcctattaatagtttcccactgttagaaggctacagccgttggcaatcagatgtgggctcaggttttccttatcctggggcaggaatgcctggagggaccacgatgtgggtcacactgtacattctgtttactgtgggcacaaacacagaacnnnnnnnnnnnagcttattaaatcgagaatattcctgaggaggcatccgctatgggctaaaggtcccaacatcacaataataaataacagctatgtttacagagacacattcaggacacatgcaaaagcttttccctagcaggaggacttggggcctttgcaaaacaagctgcttgggcctccccagagggcccaccctcccatgcacctaccccaccacctgccccaactcattacacaactcggccccccggccgtaatggccgaattcccgggcatatgtccggtaccgtcgactg

SEQ ID NO: 94153 - DNA, 1460 bp, Homo Sapiens
  misc_feature (78)..(112): n is a, c, g, or t
tcgactcactatagggcgctagctccgtctgctagcgaacgacgagcgcagcgaagtcagtgagcgaggaagcggcgnnnnnnnnnnnnnnnnnnnnnnnnnnnnnnnnnnncagtcgacggtaccggacatatgcccgggaattcggccattacggccgggatgagcaattagagtaaaccataatcatacctcctaaatgagtttctgagtgttaatattagtgctgtactcaaaggaatgtccatgttccacatggaaagtgttaaattactgagattagtgatttgtgtgtatatccatctgttgactgaccatctgtatgtgtgtcactgactgttgcgaggcttctgtgttccttagcagtgcctccaggtcaccataggacatttaattattgcatgacttaaaagattcaatacggcaaccacagcaaagagaaaattctagttctgccactaacacttcctttaacacaactctgctcaaacatgtgcctttcattgcattccaaagttatcgataattaccagctatcattgttttgggtgttttctctgctaatttctattggcatgcattctagatagttgcccattgtaactataaattgactatttaaataaacaaaagcataattcatggaaaactgccattctaaggtatgatgcaagatggtagatattctgcttccttttccatattctatcatagagatgcattactataaatcaggacttggtatatccatttgttacattattttcttaatgtggggacgtcaacagtgaagctacatagctaacaagtcttattcatttagtaagttggctgccctctgctgctcataatgtgtcttaaacagattcgtttcctctaagagaaagttctatctccccttggcaaaacaaaatactatccttgaaaacagaagttataataattaatgatatcattcagtgtgtaacattagaaactatgaagtttaaaagagtcagaggttagttttcctgtagaagaaatagtatgtctctctaaacagaagagaaattactggaaattctctctcctgtcagttaccctaaaaaccagctccagcaaagccatttcacgaacaattatgcatctataatgatctaaataataattggagaaaaatagtattttatggacattaaaatctcaattaatactattgcaactattgaatcaacatataaattgaaattaaaatttttaaattcaaccagaaaaatagcacaattggttactagaatattttgtctctaccaattttcactattacttctgaggtgtaaaccaaaatataatactggcataaagaaggacaaaatatctcaagatttctaggcattttcctatgtctaatagtaggatgttctctctgaatttatttattacaaaaataacattacaacaataaagcaaaataatattta

SEQ ID NO: 94154 - DNA, 1063 bp, Homo Sapiens
  misc_feature (988)..(1022): n is a, c, g, or t
ctcctgtctctttcgtgggctatgttcctgcgtgttgggcgctgactgtcgtttgggcacgcagcttctgtggtttgatccttctggggtccctccttctgtcctactctcccttgttcccccccctatgatggcgcctttttcccccagagcctgcggttatcaccgtcgtcccacagcgttcagttctcgtcgtaatgcctcagtttccccatctgtgtcatgtgtgaggttggattccatattctcacactccagactctgctcaatagagtactaagggaatgagagaatgcaagagcacagagagctccggagtacccacacctgggtgtgaaggaagggtgaggagtgttacagtccgagaatgaggtagtagtctgccttcagctgcctgcctgggagtagtagtagagatcaggtgtgtcactatcacaggatgcttccagacccctgctcgggctaatgtggggccacttccttgtccaacttaaacggccttgcagcccctgccaatggtaaagatcaggcccctggagacagaaggatgaaggtttgaatctcacctatggcattagttagctggggccctggaaggagattttcagaacttcagtttcctcttttataaaacggggataaaatatagagctgtcacataggggcagacacaaggcttggattcaaatccacatctgccaagctgggtgcaaaacagaaccagatatctaaggttttagctcctggctcagcagccaaggtggggctgcgatggagaagtggggctgggcagggacggtgcttagagcagcactggggtcagggtatgcaacatgagagtgccaggaagggagagggcaagtccagagcaggagacggaatggtccagtgctgggctggaccccttaaccagaccctgctggagccgccgtggccccccggccgtaatggccgaattcccgggcatatgtccggtaccgtcgactgnnnnnnnnnnnnnnnnnnnnnnnnnnnnnnnnnnncggccgcttcctcgcatcactgactcgctgcgctcgtcggc

SEQ ID NO: 94155 - DNA, 948 bp, Homo Sapiens
  misc_feature (278)..(290): n is a, c, g, or t
cagtcgacggtaccggacatatgcccgggaattcggccattacggccgggagaatatgaaatgttaatttattaaatgttgatactctatttgaaatttaatagtttctataatgtattataaaacttttccaagtatagttttttataaataataatttagtacattagttatagctgtgtttatatttacatttatctaagtcagctaaaaatacatgagccaaactgaaataaaataagaatgttttatgatggatctttgaaacatgatttcannnnnnnnnnnnnctagagatacaatcttgcttgaccgtttgggacatcaatcttccacatgaagtgcaaaatttagaaaaacacattgaagtgagaaaagaattagctgaaaaaatgagacgaacatctgttgagtaagagagaaataggaattgtctttggataggaaaattattctctcctcttgtaaatatttattttaaaaatgttcacatggaaagggtactcacatttttttaaatagctcgtgtgtatgaaggaatgttattatttttaatttaaatatatgtaaaaatacttaccagtaaatgtgtattttaaagaactatttaaaacacaatgttatatttcttataaataccagttactttcgttcattaattaatgaaaataaatctgtgaagtacctaaatttaagtactcatactaaaatttataaggccgataatttttggttttcttgtctgtaatggaggtaaacttaattttaaattctgtgcttcagacaggactattgcttgttgatttttctagaaatctgcacggtataatgaaaatattaagacagtttcccatgtaatgtattccttcttagattgcatcgaaatgcactatcatatatgcttgtaaatattcaaatgaatttgcactaataaagtcctttgttggt

SEQ ID NO: 94156 - DNA, 881 bp, Homo Sapiens
  misc_feature (856)..(856): n is a, c, g, or t
tggggagagagtatgaagtcgacggcgcgccgaattcggcacgaggcgcccgtcgagcattgcgttgctgcattgcgccccaccgactccactatgttgaagaaattcgacaagaaggatgaggagtcaggtggaggctccaacccattccagcaccttgagaagagtgcggtactccaggaggcccgtgtatttaatgaaactcccatcaaccctcggaaatgtgcccacatcctcaccaagattctttatctcataaaccagggggagcacctggggaccacggaagcgaccgaggccttctttgccatgaccaagctctttcagtccaatgatcccacactccgtcggatgtgctacttgaccatcaaggagatgtcttgcattgcagaggatgtcatcattgtcaccagcagcctaacaaaagacatgactgggaaagaagacaactaccggggcccggccgtgcgagccctctgccagatcactgatagcaccatgctgcaggctattgagcgctacatgaaacaagccattgtggacaaggtgcccagtgtctccagctctgccctcgtgtcttccttgcacctgctgaagtgcagctttgacgtggtcaagcgctgggtgaatgaggctcaggaggcagcatccagtgataacatcatggtccagtaccacgcactaaggctcctgtacatgtgcgtaaaatgaccgcctagccgtcatagatgatcagcaggtcaccggcatggcttagtctccttgctacgcatgagatccggtgcagcagcactggagagagatgcacgtgacgcactgttactctcgaactctgccacacacaatgtgtgtgacnctcgcactcattcagtgctgcagat

SEQ ID NO: 94157 - DNA, 1114 bp, Homo Sapiens
aggggggagagagtatgaagtcgacggcgcgccgaattcggcacgagggtggtccctgtagaaccactgtggcaccgctactccgtgccgcgcccgtcgagcattgcgttgctgcattgcgccccaccgactccactatgttgaagaaattcgacaagaaggatgaggagtcaggtggaggctccaacccattccagcaccttgagaagagtgcggtactccaggaggcccgtgtatttaatgaaactcccatcaaccctcggaaatgtgcccacatcctcaccaagattctttatctcataaaccagggggagcacctggggaccacggaagcgaccgaggccttctttgccatgaccaagctctttcagtccaatgatcccacactccgtcggatgtgctacttgaccatcaaggagatgtcttgcattgcagaggatgtcatcattgtcaccagcagcctaacaaaagacatgactgggaaagaagacaactaccggggcccggccgtgcgagccctctgccagatcactgatagcaccatgctgcaggctattgagcgctacatgaaacaagccattgtggacaaggtgcccagtgtctccagctctgccctcgtgtcttccttgcacctgctgaagtgcagctttgacgtggtcaagcgctgggtgaatgaggctcaggaggcagcatccagtgataacatcatggtccagtaccacgcactagggctcctgtaccatgtgcgtaagaatgaccgcctagccgtcaataagatgatcagcaaagccacacggcatggccctaagtctccctttgcctactgcatgatgatccggggtggccagccagcacctggaaaaaggaggatgggagccgtgacagcccactggtttgatttcttccagagctgtttgtgcaacaagttacaaaaatgctggttgtatgaaacccccctcgggccattcggcaatcttgcccaggcttgtagtgccccaaagaatttgtccccgggctggggttcagtggctcccaacttttttccggcgacttcacccccaggggcggctccctcccgctaatgcgtggcgggttccgccaccccctccacatc

SEQ ID NO: 94158 - DNA, 535 bp, Homo Sapiens
  misc_feature (221)..(253): n is a, c, g, or t
  misc_feature (479)..(494): n is a, c, g, or t
aaacaaaaactgttgctatttcctaacctgcaggcagaacctgaaagggcattttggctccggggcatcctggatttagaacatggactacacacaatacagtggtataaactttttattctcagtttaaaaatcagtttgttgttcagaagaaagattgctataaggtataatgggaaatgtttggccatgcttggttgttgcagttcagacaaatgtannnnnnnnnnnnnnnnnnnnnnnnnnnnnnnnngagacacatcttaaggggacccacaagtattgccctttaacaagacttcaaagttttctgctgtaaagaaagctgtaatatatagtaaaactaaatgttgcgtgggtggcatgagttgaagaaggcaaaggcttgtaaatttacccaatgcagtttggctttttaaattattttgtgcctatttatgaataaatattacaaattctaaaagataagtgtgtttccnnnnnnnnnnnnnnnnctcgagcatcatgtcggtgcgagagtaatgctgcccactcg

SEQ ID NO: 94159 - DNA, 616 bp, Homo Sapiens
ttcgattagcatacaggtcaacccagtggagggtaaactcatcttttgcaatggggtggtcttgcacaggttgcaatgcgttcgtggctttggggaatggattgattccattgttgaattctcctccaacttgcagaatatgaacatcgacatttctgccttctcctgcattgctgccctggctataggtcacagagagacacgggctcaaggaacccaagagagtggaagaactgcaaaacaagattgtaaattgtctcaaagaccacgtgactttcaacaatggggggttgaaccgccccaattatttgtccaaactgttggggaagctcccagaacttcgtaccctttgcacacaggggctacagcgcattttctacctgaaattggaagacttggtgccaccgccagcaataattgacaaacttttcctggacactttacctttctaagacctcctcccaagcacttcaaaggaactggaatgataatggaaactgtcaagagggggcaagtcacatgggcagagatagccgtgtgagcagtctcagctcaagctgccccccatttctgtaaccctcctagcccccttgatccctaaagaaaacaaacaaac

SEQ ID NO: 94160 - DNA, 1222 bp, Homo Sapiens
  misc_feature (41)..(75): n is a, c, g, or t
  misc_feature (1012)..(1012): n is a, c, g, or t
ccgacgagcgcagcgaagtcagtgagcgaggaagcggccgnnnnnnnnnnnnnnnnnnnnnnnnnnnnnnnnnnncagtcgacggtaccggacatatgcccgggaattcggccattacggccgggggtcggcggtcggcgtggggcgctatgccggggcggcacgtttctcgagtccgggcattgtacaagcgcgtcttgcagctgcaccgtgttctgcccccggacctcaaatccctgggcgaccagtacgtgaaagacgaatttaggagacataagaccgttggttctgacgaggcacagcgtttcttgcaagaatgggaggtgtatgcaacagcgttattgcaacaggctaacgaaaacagacaaaattcaactggaaaagcatgttttggcaccttcctcccagaagaaaaacttaatgactttcgtgatgaacaaattggacagttgcaggagctgatgcaagaagccacaaaacccaataggcaatttagtatttctgagtctatgaaaccaaaattttagtctatacaacaaagcttaataagacatgcaaaaatttagaacccctactttaactgtcattggtttttgaaatatatttaagctttgaaaacacctgttattaatgaaatactcttttattttggatattatgattgcagtatatggatcaagatcactagtgacaattgaaaaaaactattggaataatagcacttgtataaaattcagttttggaactaaacagcaaatttctagaattttgctgaaaatgttttaaaatgctattctcatccagccatattagtcttctggcttttctttagcttcatcaaataagcatgttgtgataatgatagatgtacaattccccacaaggttattatttttttaaatacattgtcattctgaacattttatcacttctagtttaataatacatacatgatttttcttctgaatgtctcttctccctgcatcactgttcattcacaatgaaagggtangaagaagctttaaaattcactattttactatcaatctttggtataataaactatacaaaggattaaacccaccctgctcacgtttccccctgttccaacgccgcataccccgcccagccataccacctcccttcatcgaacccgccgccagtactccccccgcgggaatacccccgtttatccgtccccggcgatccctacctacttata

SEQ ID NO: 94161 - DNA, 1874 bp, Homo Sapiens
  misc_feature (1366)..(1366): n is a, c, g, or t
  misc_feature (1444)..(1444): n is a, c, g, or t
  misc_feature (1635)..(1635): n is a, c, g, or t
  misc_feature (1698)..(1698): n is a, c, g, or t
cagtcgacggtaccggacatatgcccgggaattcggccattacggccggggtgactccatggatagtctctacagtggacagagctcatcaagtggcataacaagctgttcagatggtacaagtaaccgggacagctttcgactggatgacgatggcccctattcaggaccattctgtggccgtgccagagtgcatacggatttcacgccaagtccctatgacactgactccctcaaaatcaagaaaggagacatcatagacattatttgcaaaacaccaatggggatgtggacaggaatgttgaacaataaagtgggaaacttcaaattcatttatgtggatgtcatctcagaagaggaagcagcccccaagaaaataaaggcaaaccgaaggagtaacagcaaaaaatccaagactctgcaggagttcctagagaggattcatctgcaggaatacacctcaacacttttgctcaatggttatgagactctagaagatttaaaaagatataaacaagagagtcacctcattgaatcaaatattgaaaacccagatgacagaagaaggttactatcagctgctgaaaacttccttgaagaagaaattattcaagagcaagaaaatgaacctgagcccctatccttgagctcagacatctccttaaataagtcacagttagatgactgcccaagggactctggttgctatatctcatcaggaaattcagataatggcaaagaggatctggagtctgaaaatctgtctgacatggtacataaagattattatcacagagccaagtgactgaacacgcatttcccaaatatatatctacagatgcattccattttaactcttcttgagctaaaacgtcaaataggagaggaagataagataaatatttgtaaataaaacctaaagcttacatgttttactctgaataattgtacataaaattttgtatctctaacattccaaattactgtcaataaaatatatatttattattttaaatgctatgtgttaatatttcacttgcttgtattacaaaggcaaaatgtaagactttggtaatgtgtgacatatgcttttatttggctttattttcaccaagacccgtatcttggaaaaaacccaacacaccttttttttgatacctggccagtttttggaatttatatactgggtattggaaacaaattagctaaccccgcaggaatttcgtctgggttggaaaacggaggtctgagccccaaagcaaacaggcgtacttaatctcccatttatctttgcactaccctcccacctccgggagaaacacaccggctgagaaagctctacaagtcatagcgcgggcgaactaancacgagctcacctctaaaatccccccctggcaaatccccacaccctgagaggaggctcacgacccttctcttatgaangagacaaaccttccaactactcgtcatttagggtgaaggaaaccactaccccgtctctcagaaatatatatgagcggagttggtgcctcgtgcggtgtcattgtacacagaatggacctctcacaagaaatatagaacatgcgccgcgctacaggagtgccagccttttttccctggcgactcaacattanatagtggcgaaaagaaccccccacacactgtgtgtctggcatataaagacctgcggcgggggngaaacaaagagctcacctcctggtggcttctgtctcgacaagagggtgcaggcgagaacaacgttctgtgaagacagaatctccccgcagcaaagtcgcccccctcatatagacgtgctgtacctggaagtctaagagcgcactgtcgcgacttagtgtgtgttcgctctttagat

SEQ ID NO: 94162 - DNA, 774 bp, Homo Sapiens
gggagttgtttctgtaacagcagaaagtgcactcactaggagtagtcagaattcaaaatgctcaagagaaagccatccaatgtttcagagaaggagaaacatcaaaaaccaaagcgaagcagcagttttgggaatttcgatcgttttcggaataattctttatcaaaaccagatgattcaactgaggcacatgaaggagatcccacaaatggaagtggagaacaaagtaaaacttcaaataatggaggcggtttgggtaaaaaaatgagagctatttcatggacaatgaagaaaaaagtgggtaaaaagtacatcaaagccctttctgaggaaaaggatgaggaagatggagagaatgcccacccatatagaaacagtgaccctgtgattgggacccacacagagaaggtgtccctcaaagccagtgactccatggatagtctctacagtggacagagctcatcaagtggcataacaagctgttcagatggtacaagtaaccgggacagctttcgactggatgacgatggcccctattcaggaccattctgtggccgggccagagtgcatacggatttcacgccaagtccctatgacactgactccctcaaaatcaagaaaggagacatcatagacattatttgcaaaacaccaatgggggatgtggacaggaaatggtgaacaattaaagtggggaaacttcaaattcattttatggtggatgtcatctcagaaagaggaagcagcctcccaagaaaataaaggcaaaccgaa

SEQ ID NO: 94163 - DNA, 1256 bp, Homo Sapiens
cctaatggttacttgatactgtcacgccgacagtgtccagttcagtggtctttgcagttgaaatgctcccgtacacactgtcttgttaaaaatgccagtaagttcatacaaacccagcttgcacccaaggtcacattcagagagcgtagggctgggatgggttgttttccaagcttctgccactgtgtggctagctcttcccactgggaagttctgtgtacccggaatgtcggagtggagtcctgttctagtgtccagcacctgaccctgtgcccaacccctcaacagcctattcctgctgtccacagcctgctggaactttttacaaaatatgttgccatgctggaccctgggcactggacataagccccctggcagcctttttcatgtcacccaaaggggtaattgtcctactggtggtctgtaagatgagttagggtgacttgctaatagacattgtaaatcttaatatttatgtatgtattttattattaccggttttccatttatgatggtaatattgtttcttctaagaatatttatttttccttctaaatattgagataaaattcatgcttttgaaatgttctattcagtggcttttagtatatttgctatgttgtgcaaccatcgacactatccatttctagaactttttcgtcatcccaaacagacgctctgtattcataaaaaaataacttcctacctgtctctccccctagtctttggtaacctttgttatactggtaaactttgttgtgctctctgtctgtgtgaatttgcctattctaggggcctcatataagtgtaatcatacagtattggtcttttgggtctgtctgatttcacttagcgggttttcagggttcattcatgttgcagcatataacagtactggcgttccttttttctggctgaataatattccactggtatgggattgaaccccaattctggtttaattcaccaccctccctgtgcgacccttgggattacttccctggctgttgggatattattgaaaccaaggctgcttattgcacagctggcgctacacacgttttgggtgcacccttttgtttcactcctcccattattataccagggggaaatacggggcatatggcacacggatatttggaggacaggcgcaaattttccacgtctgtccttcattcctccgagatgaaggtgcactctggtgtgccaacaatacttgactcggagacactacaggaaccccggctgaacaccga

SEQ ID NO: 94164 - DNA, 856 bp, Homo Sapiens
  misc_feature (24)..(24): n is a, c, g, or t
  misc_feature (90)..(124): n is a, c, g, or t
  misc_feature (207)..(226): n is a, c, g, or t
  misc_feature (320)..(750): n is a, c, g, or t
cccttaaaaagaactatatacctnatatggcgcctcgctctgtagccgaacgaccgagcgcagcgaagtaatgagcgaggaagcggccgnnnnnnnnnnnnnnnnnnnnnnnnnnnnnnnnnnncagtcgacggtaccggacatatgcccgggaattcggccattacggccgggggagttttcttcatgactctttacagtacaagnnnnnnnnnnnnnnnnnnnnaatggtcagatggatagaacaacacaggttttgtttgttttgttttaacttttaaaaaaattataatagataaagggtctcactacgttgtccnnnnnnnnnnnnnnnnnnnnnnnnnnnnnnnnnnnnnnnnnnnnnnnnnnnnnnnnnnnnnnnnnnnnnnnnnnnnnnnnnnnnnnnnnnnnnnnnnnnnnnnnnnnnnnnnnnnnnnnnnnnnnnnnnnnnnnnnnnnnnnnnnnnnnnnnnnnnnnnnnnnnnnnnnnnnnnnnnnnnnnnnnnnnnnnnnnnnnnnnnnnnnnnnnnnnnnnnnnnnnnnnnnnnnnnnnnnnnnnnnnnnnnnnnnnnnnnnnnnnnnnnnnnnnnnnnnnnnnnnnnnnnnnnnnnnnnnnnnnnnnnnnnnnnnnnnnnnnnnnnnnnnnnnnnnnnnnnnnnnnnnnnnnnnnnnnnnnnnnnnnnnnnnnnnnnnnnnnnnnnnnnnnnnnnnnnnnnnnnnnnnnnnnnnnnnnnnnnnnnnnnnnnnnnnncgggacgcgcacgtggagttgaagattggtgcccatcggcacctccaagccatgggcgaacaagaaggttggagaacctcctgatggaccaagagaaccaaagcag

SEQ ID NO: 94165 - DNA, 958 bp, Homo Sapiens
  misc_feature (43)..(77): n is a, c, g, or t
cgaacgacgagcgcagcgagtatgtgagcgaggaagcgcgcgnnnnnnnnnnnnnnnnnnnnnnnnnnnnnnnnnnncagtcgacggtaccggacatatgcccgggaattcggccattacggccggggggactgagtctgtgccgcctaggctggcagggactcggccagatgcactagcggcaaggctgggctgacatcgcctgggactcgctcgccgtacctccaaggggcccaggccatgaggggtgcggctggggagacgcccgcccggtgcccgccctgggcccggcgggtgccccctgcccgccgcctgacgcaatccgaggctgcccttgctgcatgccggcgctggagaaacctcccctgccgttgcatcactcctgccaggtttgccacagaggtggagctgaaccaatcagcgggcgcgctgggcccgcggcgcggttaagtgagaagcagaatccgaagttgattggccaaaaggggatttgccccaccccaatcaccgcggcagctggccgcggtgggcgtggtctcccggcaagaaggtttaaagggcgcctccatggggggcgctcagctggagctaccgagcggtgccaggccaggtgtgtgcgtccgtcggtctttccgtgcccacgccggagaccagccccggaggccgcctgggcctatccctgtgccaggcaccatcgaagcaggagtctgcagccccgaacaccccgcccacctcggagtccccctacgccgtccgctcagttccccccgaacgacggcgaccctcaagcgctggggatttttcgggaacggctcccctggtgtggaagccccgacttccccctacagccgacagcccgggagggcctttcgtggcggggggttacaagccccgcccgttttctcgggcagagggagaacccccctttccacttccggggggacagcggaacaaacac

SEQ ID NO: 94166 - DNA, 934 bp, Homo Sapiens
  misc_feature (16)..(16): n is a, c, g, or t
gagaaagagaaagctnccagccaccccacccatttttgttcagtggctcaagcggtcgcaagtctgtcttgtgcactggagtgggtgtctggccctgatgtccacatgagcactccccgcaggggctcagcccctcacaccagcgccagagcctgctcggtggggcagaagcagggcaacatggtgcccacagcgtccacgatggctgccaggtgctcgtcctgcgcctgaggcccacagagctgcatgaagtctgccagacgcagcaagtattcaaggttgtggccggagaagccccggcaggccaggatctgcgtggcaatggcctcttcaggcgcagggcccaggtaaccagggttctgtggggtggccacataggccaatgccttcagtggttggtcaggagcatcttggggatagaaggtgacctccttggtatcgtagccaccaagcactgcctctcgcacattcaggtacttcagggccttgcttacctgctccccttgcacttggtatgccacgccccaagtgcagccctcatgatcttcaaggagcgtcaccacacggccaggcatcttgtcgctgccccgatggaaggtgtctccctgccagaaacggcggctgtagccgcgcacgaagcccacacggctgtcgctgtaggcgaagtcgggcctccacaccagggagccgtacccgaaaatccacagcgcttgagggtcgccgtcgtttcgggggaactgagcggacggcgtaggggactgcgaggtgggcggggtgttcggggctgcagactcctgcttcatggtgcctggcacagggataggcccaggcggcctccggggctggtctccggcgtgggcacggaaagaccgacggacgcacacacctgcggacgcgtgggtcgacgatatcccgagaattccggaccggtacc

SEQ ID NO: 94167 - DNA, 1115 bp, Homo Sapiens
  misc_feature (76)..(110): n is a, c, g, or t
tgaaatcactatagggcgctagctcgtcatagccgaacgacgagcgcagcgagtagttgagcgaggaagcggcggnnnnnnnnnnnnnnnnnnnnnnnnnnnnnnnnnnncagtcgacggtaccggacatatgcccgggaattcggccatttggccagcaagccaaggtaaggcgaaggggaatggggtaggggtgagatgggctgattcaggagtctgaatgagaggccttgagctcatgctactcttggaattgattttagttattatcacccattgttgaatgaatgactcctcaactcaatcatgcaaaatgaatacacttattttatggataaggaaaataagattcaaagaagtcaagtaacctacccaaagccatgtagccagtcagaactaagactgaactggctgaatccaggtctgtccacctcccaaacccctgcatttccattcctccaagatgcctttctcaccaaatatccaataacctatggaagtagttcaagatctgcggagagagagcttaagatacccatcaaagcctttcccaggaccccaggaggatgattttattcagggactctggaagggaactggttgcagtttatttaacacctgctgaagaattccagatgtcttattttggatctccacaggcaggaattcctcagggacacatgtagttcaaacttaagggaggatcagaaaaacagaagtccttctgtggtaggatgttatacgcatagccacatcaagtccttctatccttatgtgcccactccttttacacatgtgaacttgccttttttccccaaccaagaggtaggggtctattttgctaaccccttcagtctgaactaagcccatgacttgctttgaccaatccagtaagagcagaagagatggctgtgtgacctctctaaggcctcaactttcaagaaggtggttgccgcttccgatcctcggtactctatacaaacctctggcatccacgttaagaaacttcagccggacatactatggataagatcttcccaaagatgacgcagagagtttccaatggaggcccggacacattgccgaattgtacgaaagcctttaacaagcaggca

SEQ ID NO: 94168 - DNA, 962 bp, Homo Sapiens
cagtcgacggtaccggacatatgcccgggaattcggccattacggccgggggcccctgggctgggacagcccactgttccatgctgcccaagaaggctcagcacaggcacaaaccattgcccggcactggcccgtgctgcctgagaaggattggcacgggcacagaccactgcccccacctgccctgcgccatctacccaagaaggctcggcacgggcaccaaccactgcctccaactgccccatgctgcctgagaaggcactgcacggccacccccaactgccccgcactgtccctacccgggcagccatgcgagcggctggaactctgctggccttctgctgcctggtcttgagcaccactgggggcccttccccagatacttgttcccaggaccttaactcacgtgtgaagccaggatttcctaaaacaataaagaccaatgacccaggagtcctccaagcagccagatacagtgttgaaaagttcaacaactgcacgaacgacatgttcttgttcaaggagtcccgcatcacaagggccctagttcagatagtgaaaggcctgaaatatatgctcgaggtggaaattggcagaactacctgcaagaaaaaccagcacctgcgtctggatgactgtgacttccaaaccaaccacaccttgaagcagactctgagctgctactctgaagtctgggtcgtgccctggctccagcacttcgaggtgcctgttctccgttgtcactgacccccgcctcttcagcaagaccacagccatgacaaacaccaggatgcatgctccttgtcccctcccacccgcctcatgacccagcctcacagaccctctcaggcctctgacgagtgagcgggtgaagtgccactgggtcaccgcagggcagctggaatggcagcatggtagcgccctcctaacagattaaatagatcccatttgcttctaaaatt

SEQ ID NO: 94169 - DNA, 1075 bp, Homo Sapiens
  misc_feature (74)..(108): n is a, c, g, or t
  misc_feature (868)..(889): n is a, c, g, or t
tgataatcactatatgggctagccgttgtagcgaacgacgaccgcagcgagtcatgtgagcgaggaagcggcgnnnnnnnnnnnnnnnnnnnnnnnnnnnnnnnnnnncagtcgacggtaccggacatatgcccgggaattcggccattacggccgggggtacaggtggtctcttgggttccggtaaggcggcggctgcggaactcccgtggaggggccggtgggccctcgggcctgacgatggcagtggccactgcggcggcagtactggccgctctgggcggggcgctgtggctggcggcccgccggttcgtggggcccagggtccagcggctgcgcagaggcggggaccccggcctcatgcacgggaagactgtgctgatcaccggggcgaacagcggccttgggcccgcgccacggccgccgagctactgcgcctgggagcgcgggtgatcatgggctgccgggaccgcgcgcgcgccgaggaggcggcgggtcagctccgccgcgagctccgccaggccgcggagtgcggcccagagcctggcgtcagcggggtgggcgagctcatagtccgggagctggacctcgcctcgctgcgctcggtgcgcgccttctgccccgagatgctccacgaatggcctaggctggatgtcttgaccaataaccagagggatcttccggtgaccctaacaggaaaacctgaacagagcctttaacatccctctctcccattggaacccctgcctatccaccctttctacatgagccacctccccccatctttacgatttccatggaaaagagtcgaagcctcagagagaaggggtttacggggaaatctctttcccgccagcgtgggggatannnnnnnnnnnnnnnnnnnnnntgtttaggttactacatactaatcaaattatagacccaacccaactgatccaagagccgctttcctattttacaaaccccgcaggtataacaaacaacacaccacaaaaaagtccatcacgtctaaagcgccgggcgggcaccagtcaagggccgccccctacaattttcgacaaagcggaggcgg

SEQ ID NO: 94170 - DNA, 944 bp, Homo Sapiens
acccaccccacaaccactaggctaggtagcgaggcctgggtgtttaattcggcacgagggtcatggcggatggtcaggtggcggaactgctgctccggcggctggaggcgtctgatggcggcctggacagcgccgagttggcggctgagctgggcatggagcaccaggcggtggtgggcgccgtgaagagccttcaggcgctgggcgaggtcatcgaggctgaacttcggtccaccaagcactgggagcttactgcggagggcgaggagattgcccgggagggcagccatgaggcccgtgtgtttcgaagcattcccccagagggcctggcccagagcgagcttatgcgactgcccagtggcaaagtgggcttcagcaaggccatgtccaacaagtggattcgggtggacaagagtgcggctgacgggccccgggtgttccgagtggtggacagcatggaggatgaggtgcagcggcggctccagctggtccgggggggacaggctgagaagctgggggagaaggagaggagcgagctgaggaagaggaagctgttggctgaagtgactctgaagacctactgggtgagcaaaggcagtgcctttagtaccagcatctccaagcaagagacagagctgagcccagagatgatctccagtggctcttggcgggaccggcccttcaagccctacaacttcttggcccacggtgtcctccccgacagcggccaccttcacccgctgctcaaggtccgctcccagttccgacagatcttcctggagatggggttcaccgagatgccgactgataacttcatttgagagctccttctggaactttgacgccctcttccagccccagcagcacccagcccgtgaccagcacgacacctttcttcccttcaagatccaagcggaaggccctggcaacttcccaatggaatc

SEQ ID NO: 94171 - DNA, 1309 bp, Homo Sapiens
  misc_feature (43)..(77): n is a, c, g, or t
  misc_feature (1180)..(1257): n is a, c, g, or t
aaccgaccgagcgcagcgaagcatttagcgaggaagcggccgnnnnnnnnnnnnnnnnnnnnnnnnnnnnnnnnnnncagtcgacggtaccggacatatgcccgggaattcggccattacggccgggggacctccatcagctcgccgcgcagcgcggctgtatttgcggcctgtgcgagtaggcgcttgggcactcagtctccctggcgagcgacgggcagaaatctcgaaccagtggagcgcactcgtaacctggttatcccagaaggtcgcgaaggcagtaccgtttcctcagcggcggactgctgcagtaagaatgtcttttccacctcatttgaatcgccctcccatgggaatcccagcactcccaccagggatcccacccccgcagtttccaggatttcctccacctgtacctccagggaccccaatgattcctgtaccaatgagcattatggctcctgctccaactgtcttagtacccactgtgtctatggttggaaagcatttgggcgcaagaaaggatcatccaggcttaaaggctaaagaaaatgatgaaaattgtggtcctactaccactgtttttgttggcaacatttccgagaaagcttcagacatgcttataagacaactcttagctaaatgtggtttggttttgagctggaagagagtacaaggtgcttccggaaagcttcaagccttcggattctgtgagtacaaggagccagaatctaccctccgtgcactcagattattacatgacctgcaaattggagagaaaaagctactcgttaaagttgatgcaaagacaaaggcacagctggatgaatggaaagcaaagaagaaagcttctaatgggaatgcaaggccagaaactgtcactaatgacgatgaagaagccttggatgaagaaacaaagaggagagatcagatgattaaaggggctattgaagttttaattcgtgaatactccagtgagctaaatgccccctcacaggaatctgattctcaccccaggaagaagaagaaggaaaagaaggaggacattttccgcagatttccagtggccccactgatcccttatccactcatcactaaggaggatataaatgctatagaaatggaagaagacaaaagagacctgatatctcgagagatcagcaaattcagagacacacannnnnnnnnnnnnnnnnnnnnnnnnnnnnnnnnnnnnnnnnnnnnnnnnnnnnnnnnnnnnnnnnnnnnnnnnnnnnnggagcgtgaaagggaacgagaaaggcgagaacgggaacgagaaagggaaaaa

SEQ ID NO: 94172 - DNA, 1155 bp, Homo Sapiens
  misc_feature (41)..(75): n is a, c, g, or t
  misc_feature (762)..(782): n is a, c, g, or t
acgaccgagcgcagcgagtcatgttagcgaggaagcggcgnnnnnnnnnnnnnnnnnnnnnnnnnnnnnnnnnnncagtcgacggtaccggacatatgcccgggaattcggccattacggccgggtgcaaacaccagccgaggatgtacccctcaacccctccaaaggaggccctgcccctttggcctggtccttgctaccctaagcctggcctggcctggcctggcccccaatggtcagaagagccatcccatggccatgtcacagggatagatggacatttgttgacttggttttacaggtcattaccagtcattaaagtccagtattactaaggtaagggattgaggatcaggggttagaagacataaaccaagtctgcccagttcccttcccaatcctacaaaggagccttcctcccagaacctgtggtccctgattctggagggggaacgtcttgcttctcattttgctaaggaagtttattttggtgaagttgttcccattctgagccccgggactcttattctgatgatgtgtcaccccacattggcacctcctactaccaccacacaaacttagttcatatgctcttacttgggcaagggtgctttccttccaataccccagtagcttttattttagtaaagggaccctttcccctagcctagggtcccatattgggtcaagctgcttacctgcctcagcccaggattctttattctgggggaggtaatgccctgttgttaccccaaggcttcnnnnnnnnnnnnnnnnnnnnngggtgaggggaccctactctgttatcccaagtgctcttattctggtgagaagaaccttacttccataatttgggaaggaatggaagatggacaccaccggacaccaccagacactaggatgggatggatggttttttgggggatgggctaggggaaataaggcttgctgtttgttctcctggggcgctccctccaacttttgcagattcttgcaacctcctcctgagccgggattgtccaattactaaaatgtaaataatcacgtattgtggggaggggagttccaagtgtgccctcctctcttctcctgcctggattatttaaaaagccatgtgtggaaacccactatttaataaaagtaatagaatcaaaa

SEQ ID NO: 94173 - DNA, 899 bp, Homo Sapiens
  misc_feature (75)..(109): n is a, c, g, or t
agctgacagaccatatgggcgtactgctgcagcgaacgacgagcgcagcggagtagtgagcgaggaagcggccgnnnnnnnnnnnnnnnnnnnnnnnnnnnnnnnnnnncagtcgacggtaccggacatatgcccgggaattcggccattacggccgggatacacacatatttctctaccacttatactttttcaaagtgctttcacatccttatagcaattctgcaaggtagccagggaaggctttcctatttcaggtcagaaaacagatttagaaatattaaatgacttaatgaaggtcacatgtttagcagtagaactagaactgggacccaagtctgatgttcagtcctagaccttttctacttgcccggtctgcctcttcacaagggaagacttgggttttagaatccagagaccttagaaggagcaacattggacgaaggtgaggacatgatggcctttactaccggaagcaaaaagtgaatgtccagaggtgaagggacagagaagtaacaggacccatcagcatttcaggcaatttgcttcctttaccaggagggtctctgtcctcttacaacctgggaacaaaataagtcgtgtcccaggtcgtaagtctcgctttacttaggcccaacaggaactaaagaatggcactatcagaaatctcaccccaatcgtccagtcttacaggcacagaataggttctagcctcagcattttcattaatgtagtgtttttattaacatctccattaacttgcttgcagcaatgagatggaattatgcctcccacaaggcctggggcaagatacttgcataggtgccccctttgtttggacagtagaaacactggctcccctgcatggtgttcaatccagttggcaggtgggcagttca

SEQ ID NO: 94174 - DNA, 2154 bp, Homo Sapiens
acttacggctaggtacgaggctgggttgaaattcggcacgaggcagacccatcagaaggaccacccaaccgatctggggttctctctacagaagtctgttgcagagttcacagaggagaattccagaattcagtagctttgttgtccggaccaacacatgtggagagttgcgttcgtctcacttaggccaagaagtcaccttgtgtggatggattcagtaccgaaggcaaaacacattcttggtcctaagagatttcgatgggcttgttcaagttatcattccccaggatgagtcggcagcctctgtgaagaagattttatgtgaagcccctgtggaatctgtggtgcaagtgtctggtacagtcatttcccgtcctgcaggacaagagaatccaaaaatgccaacaggtgagattgaaatcaaagttaaaacagctgagcttctgaatgcctgcaagaagctgccctttgaaattaagaacttcgtgaagaaaacagaggctcttcggttgcagtatcgctacttagacttgcgtagtttccaaatgcagtataacctgcgactgaggtcccagatggtcatgaaaatgcgggaatatctctgtaatctgcatgggtttgtggatatagaaacccccacattgtttaagaggaccccaaggggtgccaaagagtttttagtaccatcccaggaacctgggaaagttttattctctccctcagagtcctcaacagtttaagcaacttctgatggttggcggtttagacagatattttcaggttgcccgatgttatcgagatgaaggttcaagaccagacagacagcctgagtttactcagattgacatagagatgtcatttgtagaccagactgggatccagagtttaattgagggtttgctccagtattcctggcccaatgacaaagatcctgtggttgttccttttcctactatgacttttgctgaggtgctggccacctatggaactgataaacctgacactcgctttggaatgacagattatacgatatcagtgatgtgtttagaaacacagagattggatttcttcaagatgcacttagtaagccccatggaactgtgaaagccaatatgtatccctgaaggagcaacaatacttaaaaaggaaagacattgaatccattagaaactttgcagctgaccattgtaatcaggaaatcttacctgctattcctttaacgccaataggaaactgggaattctccagttgctaatttcataatggagtcacaaagactggaattaatcagactaatggagacccaagaggaagatgtggtcctactaactgctggagagcacaataaagcatgctctttgttaggaaaattacgactggaatgtgctgaccttctagaaacaagaggagtggtgctccgtgaccccactctgttctctttcctttggggtggtagattttcccactcttcctgcccaagggaggaaaatcccagaagagctggaatcggcccaccacccatttactgctccccaccccagtgacatacatctcctgtacactggagcccaaaaaggcccgtagccaacactatgacctgggtttaaatggcaatgaaataggaggtggttcaattcgaattcacaatgcagagctgcagcgttatatcctggcaaccttactaaaggaggatgtgaaaatgctctcccatctgctccaggctttagattatggggcaccccctcatggaggaattgccttagggttagacagactgatatgccttgtcactggatctccaagcatcagagatgtcatagccttcccaaagtccttccggggacatgacctcatgagcaataccccagattctgtccctcctgaggaactgaagccctatcatatccgagtctccaagccaacagactcccaagcagaaagagctcatttgaatcatgcataccatgcagaaagttgagcttttaggttttggtcctctttgcttccccaggctaaagtcagatcctagagttctgccccaggtctaacaatccagccttttagatggaaagaatcccaggcaacattctttcccccccaacgaaaaaacccgataaaagaataccccaattttgaacttgatttcatggcctt

SEQ ID NO: 94175 - DNA, 803 bp, Homo Sapiens
cagttaccaaacacaaagttattacagaccacagcatcatatactgatagaacttcccatattttctggttgtgcaaatcacttcaaataagctgattaatggccccgaaagcacttacctaaaatgcaaagtgctccaggaaatgtaacatattatcatgattcataccgtaattcacggctgtgggctcccaggtagatatagagagacagaagtagcagaaatatcaaatgagaaaagaaacactaggataagtataaatatttttaatcagaagtcaggagattcccaacagatttgcactatccagagggcaaaatagtcaggtcaacactcccttcatagaagaaattttgttctctcagggcttctttttcctttgggcttgacgtgcgttctagcagtgaatgctcactgggctattaggctcacagattcttctcctactggaactgtaggcaattgttggtaagacttggggaaaattttatgcgtacaggatggccagtgactggaacaactgaatcttcatttattcaataggtaatatcttgcacatcagccatgtgctactatagggcactggggatgcaatgatgtgtaagacaatcaggtgcctgcaccccggccgtatactggccgaattcccgggcatatgtccggtaccgtcgactgataacttcgtataactgtatgctagtatcgaagttatagcgcacgcttacctcgctcaatgatattgctgcgctcggtcgtatcggctaatgaagagcgggcgccatatagtgattatcagttctcc

SEQ ID NO: 94176 - DNA, 807 bp, Homo Sapiens
  misc_feature (77)..(111): n is a, c, g, or t
aaaattaatcactataggcgctactcctcagaagcgaacgacgagcgcagcgaagtagtgagcgaggaagcggccgnnnnnnnnnnnnnnnnnnnnnnnnnnnnnnnnnnncagtcgacggtaccggacatatgcccgggaattcggccattacggccggggacagccaaacaatgcgcaggcaatccacagcaagctgcccctgcaaatgtcagcgccagtcccagtctaaagagcttgaaacctaccaagccggaggactgtgcatgtgcctctctcgcccacattttccccaagcactctcagtgaacctggcaacagtgtccccttgtggccaagacctggaacatcacatctgtacgttgcaatctgtggatcagcttacgagactgagagtaaaggaatgaaaggatggaagaattacaagatcaggcactgctgtctgtctgttccacggatgtaaccacagcacacgcgtggctcacggtactagtgtgataaatgcttgttacatgaaggcgtgaacagggatgagaagagacttcctggagaaacaaaaggactaacaatcaggaaggggaggtgatcggggcaggagtaaagtggacacctcagcgaaagccattcgctgtgatctctgattgtgcagtgtcatgtcctgtcaccagagccccctcgtggtctgatgttggccaatgccgccagctatgatctagtcgaggccaaatcctaatctaccattctctgacaccagctgggtccctgggtctgtccaccgaatgtccccattctccccattgggctccc

SEQ ID NO: 94177 - DNA, 896 bp, Homo Sapiens
  misc_feature (379)..(415): n is a, c, g, or t
cagtcgacggtaccggacatatgcccgggaattcggccattacggccgggggagcctctgcttctcctacactggcatgctgatgagatcgtgacatgcccacattggcttcttccacatctggttgcactcgtcatgatgggctcgctgcatctccctcagtcccaaattctagagccaagtgttcctgcagaggctgtctatgtgtcctggctgcccaaggacactcctgcagagccatttttgggtaaggaacacttacaaagaaggcattgatcttgtgtctgaggctcagagcccttttgataggcttctgagtcatatataaagacattcaagccaagatgctccaactgcaaatataccaaccttctctgannnnnnnnnnnnnnnnnnnnnnnnnnnnnnnnnnnnnctaaagtatggctctgaatagaatgcacattttccattgaactggatgcatttcatttagccaatccagtaatttatttatattaatctatacataatatgtttcctcagcataggagctatgattcattaattaaaagtggagtcaaaacgctaaatgcaatgtttgttgtgtattttcattacacaaacttaatttgtcttcgttaaataagtacagtggatcttggagtgggatttcttgggtaaattatctttgcactttgaaatgtctcatgattacatatgaaatcgcttttgacatatctttagacagaaaaaagtagctgagtgagggggaaattatagagctgtgtgactttagggagtaggttgaaccaggtgattacctaaaattccttccagttcaaaggcagataaatctgtaaattattttatcctatctaccatttcttaagaagacattactccaaaataattaa

SEQ ID NO: 94178 - DNA, 887 bp, Homo Sapiens
  misc_feature (89)..(123): n is a, c, g, or t
agcaaataaaaagaacgtatacatatatggcgccgtcgcggatcagtcgaacgacgagcgcagcgagctgatgagcgaggaagcggcgnnnnnnnnnnnnnnnnnnnnnnnnnnnnnnnnnnncagtcgacggtaccggacatatgcccgggaattcggccattacggccgggcagacagacgggtatcgggctccagaagcagaattgcaaaattgcttggcccaggctggcctgcagagtgatacagaatgtacctcagctgttgatctgtggagcctaggaatcattttactggaaatgttctcaggaatgaaactgaaacatacagtcagatctcaggaatggaaggcaaacagttctgctattattgatcacatatttgccagtaaagcagtggtgaatgccgcaattccagcctatcacctaagagaccttatcaaaagcatgcttcatgatgatccaaccagaagaattcctgctgaaatggcattgtgcagcccattctttagcattccttttgcccctcatattgaagatctggtcatgcttcccactccagtgctaagactgctgaatgtgctggatgatgattatcttgagaatgaagaggaatatgaagatgtcgtagaagatgtaaaagaggagtgtcaaaaatatggaccagtggtatctctacttgttccaaaggaaaatcctggcagaggacaagtctttgttgagtatgcaaatgctggtgattccaaagctgcgcagaaattactgactggaaggatgtttgatgggaagttagttgtggctacattctacccgctgagtgcctacaagaggggatatctgtatcaaaccttgctttaatcagtaacctaaggactgtttccttttaaa

SEQ ID NO: 94179 - DNA, 2251 bp, Homo Sapiens
  misc_feature (1555)..(1802): n is a, c, g, or t
  misc_feature (1834)..(1875): n is a, c, g, or t
  misc_feature (2109)..(2159): n is a, c, g, or t
  misc_feature (2184)..(2196): n is a, c, g, or t
cagtcgacggtaccggacatatgcccgggaattcggccattacggccgggggcagccggaagtggcggctgctgcggagaattggagatggggaccgccctggacatcaagattaaaagagcgaataaagtttatcacgccggggaagtgctctctggcgtggtggtcatatcgagtaaggattcagtccaacaccaggagtgtctttgaccatggaaggaactgtaaacctccagctcagtgccaaaagtgtgggtgtgtttgaagctttttataattctgttaagcctatccagattatcaacagcaccatagaaatggtgaagccggggaaatttcccagcggcaaaacagaaatcccttttgaatttcctctgcacttgaagggtaacaaagttctgtatgagacgtatcatggcgtgtttgtcaacattcagtatacactgcgctgtgacatgaagcggtctctgttggccaaggacttgacaaagacctgtgaatttatcgttcactccgctcctcagaaggggaagtttactcccagtcccgtggacttcacgattacacctgaaaccttacagaacgtcaaagagagagctttgcttcccaaatttctccttcgaggacatctcaactcaacaaactgtgtcatcacgcagccactaacgggagagctggtggtggagagctcggaagccgccatcagaagcgtggagctgcagctggtgcgcgtggagacgtgcgggtgtgcagaaggctatgcccgcgacgccacggagattcagaacattcagatcgccgacggggatgtgtgcaggggcctctctgtccccatctacatggtcttccctaggctgttcacctgccctacactggagaccaccaacttcaaagtggaatttgaggttaacatcgtggtgctgcttcaccctgaccacctcatcacggagaacttcccgctgaagctctgcaggatatagcccggaggagggaagcatagagaacgggagtggccatctggaaatccagctggttatccaaatcctaaggggagctacagccagcggcatatacttgttttttgtgattattctgtatcagaaatgaaacagaccctcaaaataactttccttcctcatttcttgaggcttctgcttccaacaggcacctctaatcagacctttttcttggaaattcaaccaagatttcttaatgctatttgccaagaccatttcacagaaaacattgactgtggctcttgccttatctgttcctttttaggtacagtaaaacaattgtgacagcagtttgagcttgctggagagtggcatcatggggacaaaaggaaacctctgacttgctaatggatgtagccagggactccccatagcaaagggtctgtggccagttgacatccaggatggctgcaagcgcacttgatggtcaggaagtttgcagatactcgccaaggcagagcgcaaagtgctagccactggaaatgcatgacttccctccacccctactctattctgtagttttttggttttgtttctgnnnnnnnnnnnnnnnnnnnnnnnnnnnnnnnnnnnnnnnnnnnnnnnnnnnnnnnnnnnnnnnnnnnnnnnnnnnnnnnnnnnnnnnnnnnnnnnnnnnnnnnnnnnnnnnnnnnnnnnnnnnnnnnnnnnnnnnnnnnnnnnnnnnnnnnnnnnnnnnnnnnnnnnnnnnnnnnnnnnnnnnnnnnnnnnnnnnnnnnnnnnnnnnnnnnnnnnnnnnnnnnnnnnnnnnnnnnnnnnnnnnnnnnngtgtgagccaacacacccagcctctgtaagtnnnnnnnnnnnnnnnnnnnnnnnnnnnnnnnnnnnnnnnnnngcaactggaaaaatggttccttgcttccccttgggggggatttgccttgtggcccaaatggtttcttgaagtctctcaaacatgcccataaaaattctcccgctgggcaattttcccgggaacgggtttccttcctttgaaaagagacacgggtttttccaaaacggggggtcaccccacgggttgaagaggccctggggcagggaatacaagggttccacgggagagccccannnnnnnnnnnnnnnnnnnnnnnnnnnnnnnnnnnnnnnnnnnnnnnnnnntggagaaaaactgtgaaaaacacannnnnnnnnnnnncgccccaaaatttagggattaaattttccaaaattttttttgtgaaaaaaggggg

SEQ ID NO: 94180 - DNA, 1123 bp, Homo Sapiens
  misc_feature (266)..(374): n is a, c, g, or t
  misc_feature (720)..(966): n is a, c, g, or t
ctgaggaaatgctggctttaggccaaaaaaccctggctcaaaacagcttcctccagtggctcagaggcagaccaaattcatcaagtcaaggaccttttcctgctaccaccttgcggagaggggccttcaccagcccaccctgcacatgggtttctgctgttcagaacctacccagtaacaacaggagcaaacatacatgttttcccctcatgtaactttgcatttaaatatattctgggaaactgctgggcacagtggctcacacnnnnnnnnnnnnnnnnnnnnnnnnnnnnnnnnnnnnnnnnnnnnnnnnnnnnnnnnnnnnnnnnnnnnnnnnnnnnnnnnnnnnnnnnnnnnnnnnnnnnnnnnnnnnnttagctgagtgtggtggcactcacctgtagtctcagctactcaggaggctgaggggagggatcgcttgagccagggaggttgaggctgccgtgagctgtgatcctgccagtgcactcagcctgcgtgacacagtttggaaaactgtctctctctatgtatgtatctgttcagggaaatggcagcgtgagattttatggcagttcttgagacttcagaaacacttcggcaccagccaaatccccccaagagagcaaggaacacttttccagttgcttaaaaaatttaaagttataatgaaaaatgttgtaaaaagaactacagaggctgggtgtggtggctcacacnnnnnnnnnnnnnnnnnnnnnnnnnnnnnnnnnnnnnnnnnnnnnnnnnnnnnnnnnnnnnnnnnnnnnnnnnnnnnnnnnnnnnnnnnnnnnnnnnnnnnnnnnnnnnnnnnnnnnnnnnnnnnnnnnnnnnnnnnnnnnnnnnnnnnnnnnnnnnnnnnnnnnnnnnnnnnnnnnnnnnnnnnnnnnnnnnnnnnnnnnnnnnnnnnnnnnnnnnnnnnnnnnnnnnnnnnnnnnnnnnnnnnnncagaaacaaaaccaaaaaactacagaatagagtaggggtggagggaagtcatgcatttccagtggctagcactttgcgctctgccttggcgagtatctgcaaacttccccggccgtaatggccgaattcccgggcatatgtccggtaccgtcgactg

SEQ ID NO: 94181 - DNA, 631 bp, Homo Sapiens
  misc_feature (82)..(116): n is a, c, g, or t
aaaagactgaagatcactatagggcgctacgtcgtcaagccgaacgacgagcgcagcgagtagtgagcgaggaagcggccgnnnnnnnnnnnnnnnnnnnnnnnnnnnnnnnnnnncagtcgacggtaccggacatatgcccgggaattcggccattacggccgggcaaccagagcaggaactgtcttctgcaatgccttggacttgagcctccagcctccacttgaacaccatgtgaagggaacctcagtacttcataaaatggcctttctcattcatctttcatgggaacatttattagtacaagcgctttgaatatcatgggcaccatgactgtgaccctacaggtaggattggatcactcaatgagagtagccggcaggtttctacaatggcctgggaatggactgattatttttatacattttctggcctgagagaaagccaaagtcccctgctgttcacagcaaccctgcctgggagcttggaatcttggtaatctgcccggttggatctatggaggtagtctcacccttttgtctttgtgggaaattaagagaaataattatcagacatatcatcacctccagtggaactacagagacctggacccagctgcactattttaatg

SEQ ID NO: 94182 - DNA, 851 bp, Homo Sapiens
  misc_feature (77)..(111): n is a, c, g, or t
ggactgatcaatcatatagggcgcccgtcttatagccgaacgacgagcgcagcgagtagtgagcgaggaagcggcgnnnnnnnnnnnnnnnnnnnnnnnnnnnnnnnnnnncagtcgacggtaccggacatatgcccgggaattcggccattacggccggggctgtggtctggggtaacagcctcttcccagcacccacctgccagccctgcttgcctggccctgtcctggacccagctttgctaggtctccttggaaaccaggcctgggcctcaaaatggagatggatcccaggtcttgtgggaccctgggatgtttggggactttactatctagcaccccagtaggcctgtcctggccagagaagactggtaggggccgagtggggtttgaaggcagccggcccggcccagcccaggagcgctatttattgcatatttattgtttggatgtcaccatcagagacgaagggaagggtagccagggagggagtccagcccagctgcctgcaggaagatctggctcagtctactatgggcagggccccaccaccaagctgagccgaatggagacagctgagctgaggcctgactttttcaatagaaacattgtgtagttctggggcaaaaagaagcaagctgagaatataatgaagagacttttgggggccgccccgggccccctgaaaagcacctttgagaaaccacttggtggggacgcgcgcgggggaccccaaagagagtcaagtggtgcactagcgtggtccgacaaggcggttgcccaagagggataacaccgggcgaacgacaaagagaacaggggcccggggaagactcgccccgcccggatat

SEQ ID NO: 94183 - DNA, 508 bp, Homo Sapiens
gagtgagggcccttatgcaaaggctagaatgtaacaaaaggccaccaagggttttgcccaggccttttctgggccttgaagcatgacaagataacaaaggaacccatttaggattaaacaagttttattgggggtctgaaggaacttattgagggggtctgaaggcctccacaaacaagtttactgggggtctgaaggaagtccccaaacctccatgatttagcaggaaacaagataagggtaatcaccccagcacctggacccatttagattaagtaaatttactgaggctccagaggaaggtcttcagggctcagatcttatttatagatttaaaaaagtgaatcacttatgtctttagatgaatgtacactcacatgtagacatatagcttataatgtaaataagctctggaaaactttgtagttttgagttggtcttgggatcatttccaggctttctccccatacctggttacagaaataaactccctcctttaatcgattaa

SEQ ID NO: 94184 - DNA, 975 bp, Homo Sapiens
  misc_feature (82)..(116): n is a, c, g, or t
  misc_feature (902)..(902): n is a, c, g, or t
  misc_feature (946)..(946): n is a, c, g, or t
  misc_feature (961)..(961): n is a, c, g, or t
aaagaaactgtaatcactatagggcgcccctcgtcattgcgaacgaccgagcgcagcgaagtattgagcgaggaagcggcgnnnnnnnnnnnnnnnnnnnnnnnnnnnnnnnnnnncagtcgacggtaccggacatatgcccgggaattcggccattacggccgggagagagggaagccccggcggtgagagtcggcccaaaaagcggcggccgttggagatgtggcctcatggatgagctggtacacgacttagcctcagccttggagcagacatctgagcagaataagcttggtgaactgtgggaggagatggcgctgagcccccgacagcagaggcggcagcttcggaaacgccgaggtcggaagcgtcgttctgacttcactcacctggcagagcatacctgctgctacagcgaggcctctgagtcaagtctggatgaggccactaaggactgtcgagaagtggctccggtgaccaattttagtgactctgatgacacaatggtagccaaacgacacccagctctcaatgccattgtcaagagtaagcaacattcttggcatgaatctgactcctttactgaaaatgcaccttgtcgaccactcaggcgcaggcggaaggtgaagcgagtgacatcagaggtggctgctagccttcagcagaagctgaaggtgtcagattggagctatgagagaggctgcaggttcaagtctgctaagaagcagcgtctgtcccgctggaaggagaatactccctggacctcatcaggccacggattgtgtgaatcagcagaaaataggactttcctaagcaaaacaggaaggaacagaacggatggagtgttgaaaccagatgaacaaaaacagggctctgatgagaaacatgtcagaatgtgaaanccagcagtgtggtgtagcagcagtgacactgggctcttttaccnatgatgaaggcgacnaggtgatgaccaaa

SEQ ID NO: 94185 - DNA, 1428 bp, Homo Sapiens
ggtaccggtccggaattcccgggatatcgtcgacccacgcgtccgcccacgcgtccggaaagaaggcgatgtcactattgggagaagatgcaccaaatctttcttttagcaccagtgtgggaaatgaggacgccaggacagcctggcccgaattacaacagagccatgctgttaatcagctcaaagatttgttgcgccaacaagcagataaggaaagtgaagtatctccgtcaagaagaagaaaaatgtcccccttgagggcattagaacatgaggaaaccaatatgcctactatgcacgaccttgttcatactattaatgaccagtctcaatatattcatcatttagaggcagaagttaagttctgcaaggaggaactctctggaatgaaaaataaaatacaagtagttgtgcttgaaaacgaagggctccagcaacagctaaaatctcaaagacaagaggagacactgagggaacaaacacttctggatgcatccgagaagctaaaacttacttatgaggaaaagtgtgaaattgaggaatcccaattgaagtttttgaggaacgacttagctgaatatcagagaacttgtgaagatcttaaagagcaactaaagcataaagaatttcttctggctgctaatacttgtaaccgtgttggtggtctttgtttgaaatgtgctcagcatgaagctgttctttcccaaacccatactaatggtcatatgcagaccatcgaaagactggttaaagaaagagatgacttgatgtctgcactagtttcccgtaaggagcagcttgggcagatacgcagcaaagaagaagcaagtggcttatgaacaggtgaaacaagttttgcaaatatctgaggaagccaattttgaaaaaaccaaggctttaatccagtgtgaccagttgaggaaggagctggagaggcaggcggagcgacttgaaaaagaacttgcatctcagcaagagaaaagggccattgagaaagacatgatgaaaaaggaaataacgaaagaaagggagtacatgggatcaaagatgttgatcttgtctcagaatattgcccaactggaggcccaggtggaaaaggttacaaaggaaaagatttcagctattaatcaactggaggaaattcaaagccagctggcttctcggggaaatggatgtcacaaaggtgtgtggagaaatgcgctatcagctgaataaaacaacatggaagaaagatgaggcagaaaaggagcacagagagttcagagcaaaaactaacagggatcttgaaatttaagatcaggaaatagagaaattgagaatagaactggatgaaagcaaacaacacttggaacaggagcagcagaaagcagccctgggcccaaaaagagtgccctgaaactaacggaactgctggggcgaatctgaaac

SEQ ID NO: 94186 - DNA, 829 bp, Homo Sapiens
gggaggctcccctgtgacagccgcggcaggaagcaggcgggcgctccccggccacaggcctgttgttctcggaagggagaaagctggacatttccccacgtaactcccagctctgggcctagagtgcgtgcatggcgaagtccccggagaactctaccctggaggagattctggggcagtatcaacggagtctccgggaacatgccagcagaagcattcaccaactgacatgtgccctgaaagaaggcgatgtcactattggagaagatgcaccaaatctttcttttagcaccagtgtgggaaatgaggacgccaggacagcctggcccgaattacaacagagccatgctgttaatcagctcaaagatttgttgcgccaacaagcagataaggaaagtgaagtatctccgtcaagaagaagaaaaatgtcccccttgaggtcattagaacatgaggaaaccaatatgcctactatgcacgaccttgttcatactattaatgaccagtctcaatatattcatcatttagaggcagaagttaagttctgcaaggaggaactctctggaatgacacaataaaatacaagtagttgtgcttgaaaaacgaagggctccagcaacagctacaaatcttcaaagacacagaggagacactgagggaacaaacacttctggatgcatcccgaaacatgcacaaattcttggattacaacaggtgaagattctggggtggccgaaacctccaaaagaccatttcccatgacaatgcacataccggcaacacttgcaatctgctggtgagccactaagaacctgaattctgacccatc

SEQ ID NO: 94187 - DNA, 1243 bp, Homo Sapiens
  misc_feature (74)..(109): n is a, c, g, or t
agatctatcacgtataaggcgccccgtcaagcgaacgacgagcgcatgagtatgtgatgcgaggaagcgggctnnnnnnnnnnnnnnnnnnnnnnnnnnnnnnnnnnnncagtcgacggtggaccggacatatgcccgggaattcggccattacggtccgggcttcctggctatcctgctgcaaccggtggaattcagcgtgtccactgggcgtgaaggtgcacatgacccccatctatgggctaaccatgaagcatgcctgctgtgagcacttccaaatgcagctgcgctcttaggtgcttgagagccctgaggcctagactctgtccacctggtctggttgggcagccagaccagcaggctggcctatgtggtctaaggttcagcctgaaactcatagacactgatctggctgcagttttgctatctgggctgtgggcaagcctaagggatcctgcctgcccctaccctggacttgcctctgcacaccctccagagacaacaggtaaaacagggccacatagatgctgatggagccttcccaagttgtgcttgagccaggaggcctgctagggttaggaggtccttaggcctctgagaagctctgaagaactctctggaagcccctgggcccagtacctagctggctctgtgagggtgctgactggcttcagcaagttagaactagccaaaccaggaccctgtccaatctttgacaattgggagctgccaagagtgaagggaagagacagcccaggatactggcacagaggtagtctcactgcttgaactaggctgacgcaatctgaccctatgggtctaggacacagttcctgggaacatcacattcctctgcccttcctgcaggcaggaacaaacagggctgccttctggccttgtaagacccttattgctgtcctggaggggctggggacttgtgtctgcggggatcagagcgcacagggagtgcacatatccaggcaccaggactagggctggagtgaggggggggtatttcaattaccttctattggtctcccttctctacactcttgtagtaaaatgtctatttttaatgtttgtacacaacaatccttctattctagcctgcattgagcttgcatgcttgcataagagcttaagaaccattgatttaatgtaatagggaaaattctaacccaggtatccaaaaatgtgtaagaacaactacctgagctaaataaagatattgttcagaaatcct

SEQ ID NO: 94188 - DNA, 1081 bp, Homo Sapiens
  misc_feature (953)..(963): n is a, c, g, or t
cagtcgacggtaccggacatatgcccgggaattcggccattacggccgggggcacttgttgatacaggagcagagaggtgaggccgactgctgaagacagctcgccaccctccttgcctccactccaatccaggggctggggccacattctttgccttcatttatcctcagatcaggtgagatcgacaggaggtgttgatgtgcagtgccagcaattattgctaatccgtttgcatccttatgcatagatctgaattcagactttgtgaatttccagaggtgtgggtaatataatagaattcagtgagtgggcatggctgatcttgtgcaaattaaaagttatggggcataagaatagcaaaagttgaacttcttttaaaaaggaaagtaccctgagagccagtattggttgaggctcttcagtatgcccaggttggcagcactgagaaccgcaggaacggcctgtgttacaaaaaggagattgactcagctgcccttggtgcatctgactgactatgactgctgagagattccaaggtacccttaatgccagggctaacctctccatgtgcagtgagacctctggaggaagtgtcatcctctggctttgtgtggtactcattatggtgcagtgcgggcatgaaatgaagacacccaaataggcttacagatacgatatgttttaaatgtccgtatttaacaaaaacatactgacactgtttggaacattggcaacaggaagatagcaaaatgaatactaacattacgaaaagatgaacaggtaccatgttccacaggcaggttggctgtgaactttcctctgagttgaaggcatcccctccagaacctttcagcctgctagttaggacgacccgccgccaccctccaggacctccagccctgcactgcctttcctctcttttaaataattcttcattgagttctaatatgtnnnnnnnnnnngtttactgtaaagtttgcaaataaggaaattttttttaaaagtcctcagtaatcttaccagtaacattgttatgggcacatttgcttttgagatttctttgtatgcatggatacacgt

SEQ ID NO: 94189 - DNA, 912 bp, Homo Sapiens
cagtcgacggtaccggacatatgcccgggaattcggccattacggccgggggatccacgtttcaacagatcaaggtggacacatggagcatggcccagctcccctccgtgggacaggaacagttctattctattctggcagcaaataatgacatggtattcatgcatgtagatgaacctggtagacactgggtttggcacaatctttacctcagatgatcgaggcattgtctattccaagtctttggaccgacatctctacactaccacaggcggagagacggactttaccaacgtgacctccctccgcggcgtctacataacaagcgtgctctccgaagataattctatccagaccatgatcacttttgaccaaggaggaaggtggacgcacctgaggaagcctgaaaacagtgaatgtgatgctacagcaaaaaacaagaatgagtgcagccttcatattcatgcttcctacagcatctcccagaaactgaatgttccaatggccccactctcagagccgaatgccgtaggcattgtcattgctcatggtagcgtgggggatgccatctcagtgatggttccagatgtgtacatctcagatgatgggggttactcctggacaaagatgctggaaggaccccactattacaccatcctggattctggaggcatcattgtggccattgagcacagcagccgtcctatcaatgtgattaagtatgcatgaactcatctcacacacactgtcagcatagagggcaactgggggaaagttcttcagtttattggggggatgttacagactataattcaaatttttgaatttgacagaactatagataagattctagaaagcattgcttttaattggcaactcagattaaatggcattgttttttgttcaaaaaaa

SEQ ID NO: 94190 - DNA, 922 bp, Homo Sapiens
  misc_feature (44)..(78): n is a, c, g, or t
ccgacccgagcgcagcgagtcagtgaatgcgaggaagcggccgnnnnnnnnnnnnnnnnnnnnnnnnnnnnnnnnnnncagtcgacggtaccggacatatgcccgggaattcggccattacggccgggggcacaagaagggtaggagagaaaagccatggccgacaaggtcctgaaggagaagagaaagctgtttatccattccatgggtgaaggtacaataaatggcttactggatgaattattacagacaagggtgctgaaccaggaagagatggagaaagtaaaacgtgaaaatgctacagttatggataagacccgagctttgattgactccgttattccgaaaggggcacaggcatgccaaatttgcatcacatacatttgtgaagaagacagttacctggcagagacgctgggactctcagcaggtccgatacctggaaattagcttagtacacaagactcccaattactattttcttccttcccagctcttcaggcagtgcaggacaacccagctatgcccacatgctcaagcccagaaggcagaatcaagctttgctttctagaagacgctcaaaggatatggaaacaaaagttgcagaggtgccatgttcagaatacaataataaagtggagtgaaaggtcaaaaacaacaaaacttcaacacacaacaaacctgtttgggccgccttgggcccctgcataaaaaggggtttcttgtaggcgacaatttgctgtttgtgcgccgtggggaaccccagattagtgttatagtcgaactggtggcaataagagtgggtaccacagaggagacactgtgggaccaatagaaaatagagtcgtgtagaagttcctagcgaagttaaaaacgccgccgggggagacaccgcgcggctctgtgaaaacaacgttcgaga

SEQ ID NO: 94191 - DNA, 883 bp, Homo Sapiens
  misc_feature (655)..(655): n is a, c, g, or t
cagtcgacggtaccggacatatgcccgggaattcggccattacggccggggaagggcgggagtctcggtatgtggtggcttcgctgaggcagtggtggccgcactataccgttagaaactcaatttcccggaggttgtgaggccctttgaggcgaaatcgctctgggcgtgaaaggagcaggcgttggcaatggaaggaccaccgcgacctcaggctgaccgtagggagggatcttgagggccctccgagtcccctgggcttgcgctttctttctttgcagccaccgtgcctaccgcgaggatgagctcggcctcggtcaaccgctttcgagaaggagcatctctggatgtatctgcaggcgctcggcttcgagccaggcccggcaaccattgcctgcggaaagatcgtgtcgcacacgcacctcggagtgaacatgtttgacaagctgaaccgtgatgcctttcatataatttcttattttttgtttcaagttctggaccagtctctcaccaaagaagttttcaaattttgttggcccccattttgaccaaaaaagtgacactgaattccgaaaacattgctgtgaatggataaaaaggatttctggtgaatgtggaagcagctttcctcaagttgtaggttcacgtatttctnttctcctggtggtcctaagtttattcatctgatgtatcattttgcaagattagttgcaagtgaaagtatattaaagtccaattctaaaaattcttctcatcattttgtagagacatttaacataaaaccacagggacttgcacaaatgccattgccagatgccattttcgcacggtagcagattttttacaaattttggcaaaaaacaagattgtggttaccccaaaa

SEQ ID NO: 94192 - DNA, 859 bp, Homo Sapiens
  misc_feature (43)..(77): n is a, c, g, or t
aaacggacgagcgcaggacgtcgttgagcgaggaagcggccgnnnnnnnnnnnnnnnnnnnnnnnnnnnnnnnnnnncagtcgacggtaccggacatatgcccgggaattcggccattacggccgggctctttaaagggtaaaatattaatgtttagaatgacaaagatgaattattacaataaatctgatgtacacagactgaaacacacacacatacaccctaatcaaaacgttggggaaaaatgtatttggttttgttcctttcatcctgtctgtgttatgtgggtggagatggttttcattctttcattactgtttcgttttatcctttgtatctgaaatacctttaatttatttaatatctgttgttcagagctctgccatttcttgagtacctgttagttagtattatttatgtgtatcgggagtgtgtttagtctgttttatttgcagtaaaccgatctccaaagatttccttttggaaacgctttttcccctccttaatttttatattccttactgttttactaaatattaagtgttctttgacaattttggtgctcatgtgttttggggacaaaagtgaaatgaatctgtcattataccagaaagttaaattctcagatcaaatgtgccttaataaatttgttttcatttagatttcaaacagtgatagacttgccattttaatacacgtcattggagggctgcgtatttgtaaatagcctgatgctcatttggaaaaataaaccagtgaacaatatttttctattgtacttttcgaaccattttgtctcattattcctgttttagctgaagaattgtattacatttggagagtaaaaaacttaaacacg

SEQ ID NO: 94193 - DNA, 924 bp, Homo Sapiens
  misc_feature (78)..(112): n is a, c, g, or t
  misc_feature (507)..(516): n is a, c, g, or t
  misc_feature (720)..(757): n is a, c, g, or t
aagaactgtactagatatataggggccagcttatagcgaacgacgagcgcagcgagtgtgtgagcgaggaagcggcgnnnnnnnnnnnnnnnnnnnnnnnnnnnnnnnnnnncagtcgacggtaccggacatatgcccgggaattcggccattacggccggggtgcctatatgacgtagtgagtactagagagttctgtattttattattgactataataattagtttaattagcgttgcaaactgatggcatcaaggtaaatatatttttgccaaagttctggccttccaaaactcacccccttatttaaatgtgtgctatgacccactatgaccacagcatctgcattttctaaaaaattccatgcaggtgtttgggggagaggtattttttaagcaatgaaaattcaactgagtacaaagccccctcttggggggtagggggaagtctcttttttgaaacacttcagaactgctgctataaagaaattctctaatgggttgaannnnnnnnnnaagtaaatagtactttaggccaaaatttatatgaatatttgatcttctggagattttcatactatcatttaaccaccaggaagctgaagtgtgtgaagtacaaagctgacagcactttattttatggctctccattattgggtattcattatatcccttcagtcagaaaattattactctctatggcacgtgtgttaatcacannnnnnnnnnnnnnnnnnnnnnnnnnnnnnnnnnnnnngcaatcagacacgaacaataaagtaaagtgtctattaagctgatctctttgccctttggctatgtgaaggagtgacatgagtgggcttctgatgctctgatcttctctgtatggtaaactcatccctggcacaagaaattcagtcatgtgaagcaactggcctttga

SEQ ID NO: 94194 - DNA, 512 bp, Homo Sapiens
ctctagagtatcccgggatgcagagaatgcaagtgaaaaggtcatgagactaagtatgcgaagttatggaatatcgtggaaaggatactagttgtgaaatggaaagagacaagttatagtaccccaaaagcaaaacaagcaggagatgcaagagatgccccaaaaggacaaagcaacaattttctgttgccacctttataccggaagactctgttgtagaagaaaagaaggctttggtgcaccttatgtgggaggaggaggggcagggcatgctgatgctgagcgtacaggcagacaagagcgtagcctgctgttgcctccatcactatgaaatgacttattttacctgaaggacccatggtttatgttcctctaattcctttcactctccctaagccctctgagagagatgaagatagatgattttattgctactaaattgaagggagcactatttctttttgtcttttgttagcaaaaaattgcaaaaagaattgtacattcttgccgaa

SEQ ID NO: 94195 - DNA, 1145 bp, Homo Sapiens
ctggtaccggtccggaattcccgggatatcgtcgacccacgcgtccgccactgcgttgtagtcggcccggctgcaaagcgtttttctgcaggctgttttcccaggttccctcggcctgtacctcgcgcactcctcttgctccaggtccttcagtctccgctcgtctcaccgtaggctgtgacgacatgagcaacaaagaaggatcaggagggttcaggaaaaggaagcatgacaatttcccacataaccaaagaagagaagggaaggatgttaattcatcttcacccgtgatgttggcctttaaatcatttcagcaggaacttgatgcaaggcatgacaaatatgagagacttgtgaaacttagtcgggatataactgttgaaagtaaaaggacaatttttctcctccataggattacaagtgctcctgatatggaagatatattgactgaatcagaaattaaattggatggtgtcagacaaaagatattccaggtagcccaagagctatcaggggaagatatgcatcagttccatcgagccattactacaggactacaggaatatgtggaagctgtctcttttcaacacttcatcaaaacacgatcattaattagtatggatgaaattaataaacaattgatatttacgactgaagacaatgggaaagaaaataaaactccctcctctgatgcacaggataagcagtttggtacttggagactgagagtcacacctgtcgattaccttctgggagtggctgacttaactggagaattgatgcggatgtgtattaacagtgtggggaatggggacattgataccccctttgaagtgagccagtttttacgtcaggtttatgatggggttttcattcattggcaacactggacctttacgaggtttcctaaagaagctgtataccttgaaaacaaagttttggccaaagtgggaaaaggcttggttatgccttggaagtcagaggggcaaaaaatcccaaaacatatggttggcaagatgtggtcttcagtttaaaaccgaaattgttagattcagaaacagggccttttcttaaaaattctaacgttacctcggttactaatttcctttgtaaaaatcccctaaaaaaccatttttgtaaaaaat

SEQ ID NO: 94196 - DNA, 973 bp, Homo Sapiens
  misc_feature (889)..(899): n is a, c, g, or t
  misc_feature (959)..(959): n is a, c, g, or t
acagataccacttgctgtaggctacggaccaagatgtccaaaattattcttgagcactgataaaaattacggtcttctttgaggtcaaaattcagccatcatggtaggcagtgcttgaatgagaaaaggctcctggtgcatcttcaaaatgagtcctaaagaacatactgagtacttagaagtagaagaacataagatgtatttctgactaaaacaaatggctctttcacatgtgctttattagactctgggagagaaaattaaccaagtgcttcagaacaggtttttagtatttaattcttcacggtaagaaaatgaagttctaatgaactgtttctcccaaggttttaaaattgtcaagagttattctgtttgtttaaaaaataagaaacctctttaagcaatagattttgcttgggttttcttttttaaaaacataatactgtgcaggcaaggcactgtaaaagttttaattccttccagaagaaccagtggaagaatttaaatttggcgctacgatcaaaactactgaattagtagaaataatgatgtctaaagcttaccaacaaaagaaccctcagcagaataacaaaaactttgctcaggacatttgaggtcaaattgaagacggaaaccggaaaccgttttcttgtaagcccctagaggcagatcaggtaaagcatacatagtagagggaaaggagagaatggaaataaaactcaatattatgcagatttatgccttattttttagcattttttaaggttgggtctttcaggctggttttggtttgtattagatctgtatagtttaattaactggtgatttagttttatattttagctaccattaatcttttttcctttggtggatattatttctttgcccnnnnnnnnnnnaacaactttccatcttcagaaggttccgtttgaatcttatttagagccttcaccattgcncaatatgtattttc

SEQ ID NO: 94197 - DNA, 672 bp, Homo Sapiens
  misc_feature (41)..(87): n is a, c, g, or t
  misc_feature (91)..(125): n is a, c, g, or t
aaagcactgtatagactcactatagggcgctagcctcggtnnnnnnnnnnnnnnnnnnnnnnnnnnnnnnnnnnnnnnnnnnnnnnnccgnnnnnnnnnnnnnnnnnnnnnnnnnnnnnnnnnnncagtcgacggtaccggacatatgcccgggaattcggccattacggccgggcacaaaggctcactgctgataggaatttgtatatgatcaaaggtgtttagttttataaaacagttaagtccagtcttaattttccacattatcactttcaatttgtattgtggattacgcattttaaataaaaaattgtgtgattgctacattttggaaaacatttttttcaagaggcccatccgtaatttaattgtaaaagatactgacaaactaacttggtttattattttggttatgaccccgtcatttgacttgtctttagttgtcttaacggggactgaatatgcgtgcaaaggcacgattgatttatcatgctggcttttatgcaacttgtatatattttaacaattttcctgtttgctaaaggcttaggttaaaagttcattatgattgtttatacatttctggtgaatacatcatgatttaacaagtggaaagaacatctctttccttccattttctggcatactccccttggaatcagatctgaaact

SEQ ID NO: 94198 - DNA, 795 bp, Homo Sapiens
  misc_feature (80)..(114): n is a, c, g, or t
aactgatatgcctcatatcggcgcctcggcgttcagccgaacgaacgagcgcagcgaagtatttagcgaggaagcggcgnnnnnnnnnnnnnnnnnnnnnnnnnnnnnnnnnnncagtcgacggtaccggacatatgcccgggaattcggccattacggccggggagaggggcggtgtgacttaggacggggcgatggcggctgagaggagctgcgcgtgcgcgaacatgtaactggtgggatctgcggcggctcccagatgatggtcgtcctcctgggcgcgacgaccctagtgctcgtcgccgtggcgccatgggtgttgtccgcagccgcaggtggaaaaaatctaaaatctcctcaaaaagtagaggtcgacatcatagatgacaactttatcctgaggtggaacaggagcgatgagtctgtcgggaatgtgactttttcattcgattatcaaaaaactgggatggataattggataaaattgtctgggtgtcagaatattactagtaccaaatgcaacttttcttcactcaagctgaatgtttatgaagaaattaaattgcgtataagagcagaaaaagaaaacacttcttccatggtatgaggttgactcatttacaccatttcgcaaagctcagattggtcctccagaagtacatttagaagctgaagataaggcaatagtgatacacatctctcctggaacaaaagatagtgttatgtgggcttggatggtttaagctttacatatagcttagttatctggaaaaaaatcttcaggtgttaggaaga

SEQ ID NO: 94199 - DNA, 1394 bp, Homo Sapiens
  misc_feature (1289)..(1289): n is a, c, g, or t
tagcgaagttgataaacaacttcaatatttgcctttttgtgagaaaaggtatttcacagtatttaccactttgatgtcctcgcagttttattaaatgtatcctctctgtaaaactttgcctgttttaaatgagcctttccttgatttaaaaaaatacctgtttacacatcttctagattcttgagaacgccagacacagttcttaaggccaaatttgtatcgttattgttaagaatcgtcatcaaaagtgtctttggaaccatacaaatctgctagtttcttaaaacgaggtccccagttctgtagataatcatagtccaagtctgaatctgtggtggccgactctagggagctcagggacccggccactgagcccctgccttcataaccgtagatttgaatggagtcataaggaggagccgtggggtcattgtctgcctcctgtattctcgtgttgatgaagtcatcgacatccacgctgttgggcgctggccggagcccaggtctaggcatgtactgatactcaggtttgatgtctttgcgggggataaatccattgataccatcaggattctggagggtggcaatatcaaaggcttctgtgtcttcttccccacccccttcatcatcataagtaatgatgttctcacggacatcttcttcctcaaagacaatgagtggttctttcttttgccttctcagggtcacaaacaatactacaatgaccaggagaatgacgatgcaggcgaggatggcgatcagggcgcctgtgctcaggccggcgttcagaatgtaggcctctgcgttgcaggagagcagtgccccgttcacgtcgcacccgcagactttgatggtgagggtgttggtgctactcatgggcgggatgccgccatcgctgatcactatgggcagaaggtacaagtcctgcttctgccgactgaaccctccacgccgggcgtacacgcctgctgtgttatctcggttgtctctgactgtgaaatttggattgtgaatgatttcagggggtaggctgaagataaatcttggtccattggccgtgtcatccttgtcatctgcactaattgtaacaattggctggttggaaagtggcttggtctgatcactctcacagatgaaaccttcataaggggcagcaaacttgggagcattatcgttgacatcaaggaccctaatggccactgggactttggcttcctgatgccgattgtggatttctgctgcaaagacagtgatgttgagccaggctgtttcctctctatccagaggtnttgagttgtaataaaaccatcctctggattaatagtgaaaaatctgtcgaggtcagtgtgacgatcgatggaataccttatcgggctgttggcagcatcaaggtc

SEQ ID NO: 94200 - DNA, 1034 bp, Homo Sapiens
  misc_feature (42)..(80): n is a, c, g, or t
  misc_feature (84)..(118): n is a, c, g, or t
aaaaccttcttaaatcactatagggcgctagctcgttatagnnnnnnnnnnnnnnnnnnnnnnnnnnnnnnnnnnnnnnnccgnnnnnnnnnnnnnnnnnnnnnnnnnnnnnnnnnnncagtcgacggtaccggacatatgcccgggaattcggccattacggccgggcactcctgcatcctctctcacctctctcctgcgtcctctctcagccattcagcactctcacgggatggacagagcagtgttcatgcagtgggtaggggagaatttatgtgaaccaacgttgagagacagtgccccattgagatgaatgccagtatgctgttgtgagatccctcttaggaagctaaagataatcaattaacattaacctatgtagccagtatggtaccttgtcttgcccgcaagaaaaagaggaatggatttttttcatcatttgtttttaatcaagtggtggacatcatgctaagtagtttatatgcagtagctcatgtaatacttgaaaaaggtaggtctaattactgtactcattttataaatgaaaaatacagagacttagtcaggtgaaataacttgcataatactatagtataaatgatagcagcgcatacattattctaggttctcctaccttggtcattctctgcttaatctcacaatcatggcggaaggcaaggaggagcaagtcatgtcttaatctctatgctatattatcctatattataaaatctttattaccataaagggatccatagagaagtgacattcagagctggatctttagggattgtgcctaggtccccacagtaccattaagataggatcagtctacatctagatgtactgaacactccttgtttaagaattgatcccctctgtaaggtcactcaggacaggtgggcaagtaaactcttgtgggtaaaatgcaggtattaataaaacaactgcatccttctaactgtctaggatattccactaatcttaaaacacacccttaaataacgtcctgacttaagcactgtattattccg

SEQ ID NO: 94201 - DNA, 423 bp, Homo Sapiens
gaataattataagtatcagtaaaggaagtgaaagacaggattgcatttaatagataaaacgtttaggcaataattgaacaaaagaatcctggcatatttctaacactaatggcaatttacttatggtatttattttcagtagtaaagacccagcttgaatgtaaattttgtatagtgtaagtatgaagaacatagtgcaactgtacaggtagtcaccagttattgtgatatgataaataattgggctattttgatgaagaaaactttgttcatttgtttctactttctaagagaaattgccacgattcctctgcttttcaacatttcgtatgacttttttttcgggtgggaataaaaagctgtgaaattgttcaacctactttgtaaccaaagaagcaaagctgtgtaatggagtttggtttt

SEQ ID NO: 94202 - DNA, 1424 bp, Homo Sapiens
ccagccccacccagacccatggctggacctgccacccagagccccatgaagctgatgggtgagtgtcttggcccaggatgggagagccgcctgccctggcatgggagggaggctggtgtgacagaggggctggggatccccgttctgggaatggggattaaaggcacccagtgtccccgagagggcctcaggtggtagggaacagcatgtctcctgagcccgctctgtccccagccctgcagctgctgctgtggcacagtgcactctggacagtgcaggaagccacccccctgggccctgccagctccctgccccagagcttcctgctcaagtgcttagagcaagtgaggaagatccagggcgatggcgcagcgctccaggagaagctgtgtgccacctacaagctgtgccaccccgaggagctggtgctgctcggacactctctgggcatcccctgggctcccctgagcagctgccccagccaggccctgcagctggcaggctgcttgagccaactccatagcggccttttcctctaccaggggctcctgcaggccctggaagggatctcccccgagttgggtcccaccttggacacactgcagctggacgtcgccgactttgccaccaccatctggcagcagatggaagaactgggaatggcccctgccctgcagcccacccagggtgccatgccggccttcgcctctgctttccagcgccgggcaggaggggtcctggttgcctcccatctgcagagcttcctggaggtgtcgtaccgcgttctacgccaccttgcccagccctgagccaagccctccccatcccatgtatttatctctatttaatatttatgtctatttaagcctcatatttaaagacagggaagagcagaacggagccccaggcctctgtgtcctttccctgcatttctgagtttcattctcctgcctgtagcagtgagaaaaagctcctgtcctcccatcccctggactgggaaggtagatagggtaaataccaagtatttattactatgaactgctccccaaacctggcctctgccatgggcactgggaatgacccgctgcgagcccctggaccctgagggcccccaccatggcaaccccttgacacgatatggtccgcgccccggccggagaaaaaaagcccccggctcataatatttacacccgccactgcactccccatcccgcgcaccctagcacgccccccattccagccaataaccccgacccgcacagacccacctacctgcagagtcccgtgacattgccccgacaacaccaatcgccaaacctaaggttagtacaccccaccaacgtccacgacccgcccccatcggtcacctcgcccccaccgtattggcgacaccgccacctactcaactactccctccaccaacg

SEQ ID NO: 94203 - DNA, 1097 bp, Homo Sapiens
tacaagtataagtaggcatttttaaatatgtatcagttagccatttatttgaggtaagcctacactttccaagaaatgatctggctctgaaacaaaggatattcaagactgcatagccactttccattattatttcaagaactaatacataagatgtttcaagtgggtacttcttcaaaaatataaatatgacttacataaagttaactcagtcttcacatatttaaactattacataaattaaacaataattaaaatagtgtcctaacgctcatacttttagttctccatagagaacaacataagttctgtgcccagtggacaggtttctgaccagaagaaggaatgcccattaacaacaacaatctgaggtgcccatgctacatttgccgaagagccctcaggctggactgcaggaactccttaaagctgcgcagaatgagatgagttgtcatgtcctgcagccactggttactgtgcctgcagcttcgtcagcaggctggcattagtaggttgggtcaggggtggttatagcatctagattctttgccttttactgcaggaactggatcaggactttagtactcatctgcacagctctggctttgtgcctcactactctcaagatctgttctggaggtactctaggtatagctcaaagtccaaaagaccagtgatgattttcaccagggcagtctcctcttgaatccagatgggaagcatccatctcttgcaagcctctgtggaaggttcaggtagatttctgccagtgcctctttgcctgttgccagctggttctcttgttacatgtctcgcttctcgggctgagatgccgtcgaggatggtaccgcaaatcggctaggtcaagatcccgcactggaagaacggatcaagtgggcagacagatggagaggagggcaggcgcacaaagtcactgggaaaaacatccccagggggagacaccaggggcacagggaacgagacgaaggaacacacacaggtgatgagccccggagaaaggacacctggccacaagacgcccagtggaaaagaggggtcacaaaggcagccttagaagggagagaaaacaacacagg

SEQ ID NO: 94204 - DNA, 1205 bp, Homo Sapiens
aacgcacatgtgaacctatagaaccacagttggtaaaaaaagcaggctggtacggtcggaatcccgggatatcgtcgacccacgcgtcgcccaccgggaacgaaagagaagctctatctcccctccaggagcccagctatgaactccttctccacaagcgccttcggtccagttgccttctccctggggctgctcctggtgttgcctgctgccttccctgccccagtacccccaggagaagattccaaagatgtagccgccccacacagacagccactcacctcttcagaacgaattgacaaacaaattcggtacatcctcgacggcatctcagccctgagaaaggagacatgtaacaagagtaacatgtgtgaaagcagcaaagaggcactggcagaaaacaacctgaaccttccaaagatggctgaaaaagatggatgcttccaatctggattcaatgaggagacttgcctggtgaaaatcatcactggtcttttggagtttgaggtatacctagagtacctccagaacagatttgagagtagtgaggaacaagccagagctgtgcagatgagtacaaaagtcctgatccagttcctgcagaaaaaggcaaagaatctagatgcaataaccacccctgacccaaccacaaatgccagcctgctgacgaagctgcaggcacagaaccagtggctgcaggacatgacaactcatctcattctgcgcagctttaaggagttcctgcagtccagcctgagggctcttcggcaaatgtagcatgggcacctcagattgttgttgttaatgggcattccttcttctggtcagaaacctgtccactgggcacagaacttatgttgttctctatggagaactaaaagtatgagcgttaggacactattttaattatttttaatttattaatatttaaatatgtgaagctgagttaatttatgtaagtcatatttatatttttaagaagtaccacttgaaacattttatgtattagttttgaaataataatggaaagtggctatgcagtttgaatatcctttgtttcagagccagatcatttcttggaaagttgtaggcttacctcaaataaatggctaacttatacatatttttaaagaaatatttatattgtatttatataatgtataaatggtttttataccaataaatggcattttaaaaaattcaaa

SEQ ID NO: 94205 - DNA, 1102 bp, Homo Sapiens
cagtcgacggtaccggacatatgcccgggaattcggccattacggccgggggcgtcaggttgcagtttcacttttagctctgggcacctccagctcctgctcgccggacggctcccagggagagcagacgcgccagacgcgccaccctcggggcgccgacggtcacggagcatggggtcggcctttgagcgggtagtccggagagtggtccaggagctggaccatggtggggagttcatccctgtgaccagcctgcagagctccactggcttccagccctactgcctggtggttaggaagccctcaagctcatggttctggaaaccccgttataagtgtgtcaacctgtctatcaaggacatcctggagccggatgccgcggaaccagacgtgcagcgtggcaggagcttccacttctacgatgccatggatgggcagatacagggcagcgtggagctggcagccccaggacaggcaaagatcgcaggcggggccgcggtgtctgacagctccagcacctcaatgaatgtgtactcgctgagtgtggaccctaacacctggcagactctgctccatgagaggcacctgcggcagccagaacacaaagtcctgcagcagctgcgcagccgcggggacaacgtgtacgtggtgactgaggtgctgcagacacagaaggaggtggaagtcacgcgcacccacaagcgggagggctcgggccggttttccctgcccggagccacgtgcttgcagggtgagggccagggccatctgagccagaagaagacggtcaccatcccctcaggcagcaccctcgcattccgggtggcccagctggttattgactctgacttggacgtccttctcttcccgggataagaagcagaggaccttccagccacccgcgacaggccacaagcgttcccacgagcgaaaggcgcctggccacagctgccctctggcctcctccatgaatgaggtgccctccacaacttccttgacagatggggtcccctgccggaagggggccgttccctggaagaacttccagggccctaacggccaaagggtgggagaaccttctcccagggaaattgggaaactt

SEQ ID NO: 94206 - DNA, 638 bp, Homo Sapiens
gggcacctccagctcctgctcgccggacggctcccagggagagcagacgcgccagacggcgccaccctcgtgggcgccgacggtcacggagcatggtggtcggcctttgagcgggtagtcctggagagtggtccaggagctggaccatggtgggtgagttcatccctgtgaccagcctgcagagctccactggcttccagccctactgcctggtggttaggaagccctcaagctcatggttctggaaaccccgttataagtgtgtcaacctgtctatcaaggacatcctggagccggatgcctgcggaaccatgacgtgcagctgtggcaggatgcttccacttctacgatgccatggatgggcagatacagggcagcgtggagctggcagccccagtgacatggcaaatgatcgcagtgcggggccgcggtgtctgacagctccagcacctcaatgaatgtgtactcgctgagtgtggaaccctaacacctggcagactctgctccatgagaggtgggcccgaagagggcagggcagggcagtggcaggggcagtggacccaagagaagcaccaatgcaagacctgacatttatattattttagtatagtttaagactttattttatagatggtgag

SEQ ID NO: 94207 - DNA, 1045 bp, Homo Sapiens
  misc_feature (83)..(117): n is a, c, g, or t
aagaatgtatagatcactatagggcgctcctccttcataccgaacgacgagcgcagcgagtcattgagcgaggaagcggccgnnnnnnnnnnnnnnnnnnnnnnnnnnnnnnnnnnncagtcgacggtaccggacatatgcccgggaattcggccattacggccgggggtgggcaaaggtacttaaagccctgaccgtcgttctccgtcctcctctgggtaccaactctattgcgcagctcgctgccgtgcgtttaacccaggcgaggaggaggaggagaaaattcccccagattcgggcaggcccgcaccccacattccgtcctgttttgagaggaggagggaagagaaataaacgtggcagcgcatagaaggccagcagggagactgctttccagacacctccggcccacacagccgttcaccccccgtcttttcagtcctggaaaaggaattcggtctgtccttaggatgaagctctaactgaactgaagtaaggagaaacagccttgaatctttggagggtctgtcttccttttgggctctgtgcaactgcagctacagtggaaaaaagcaaactgctcttgatcccaggccctgcctaagcctcagcagaacttgtaagcctaaactgaagagcctcacccggacgagcaggcatcccttaaccttaagcaatccagttccacgccctggatcagtgaataaccccagctgcaccatgagccgcgttcgggatgctggctgtgtagcggcggggatagtgataggggctggtgcctggtactgtgtctacaaatacaccagggggagagaccagaccaagaagagaatggccaagcccaaaaacgggctgtggctgggactgtagccagggctagagctgggctaagagccggattccatcgaccttggtcaagattcatcccctacccagtccggctgaacaaagacgggccagatgagctctgctcggaccagtgactgagcatggcccgtgctcacgcgagtcaatgtgcagatcagccaaagaatgaccgatggca

SEQ ID NO: 94208 - DNA, 939 bp, Homo Sapiens
ctctattgcgcagctcgctgccgtgcgtttaaccctagtgcgaggagtgaggaggacaaaattcccccagatactgggcagactgcttaccagacacctccgtgcccacacagccgttcaccccccgtcttttcagtcctggaaaaggaattcggtctgtccttaggatgaagctctaactgaactgaagtaaggagaaacagccttgaatctttggagggtctgtcttccttttgggctctgtgcaactgcagctacagtggaaaaaagcaaactgctcttgatcccaggccctgcctaagcctcagcagaacttgtaagcctaaactgaagagcctcacccggacgagcaggcatcccttaaccttaagcaatccagttccacgccctggatcagtgaataaccccagctgcaccatgagccgcgttcgggatgctggctgtgtagcggcggggatagtgataggggctggctgcctggtactgtgtctacaaatacaccagggggagagaccagaccaagaagagaatggccaagcccaaaaaccgggctgtggctgggactggagccaggactagagctgggctaagagccggattcacaatcgaccttgggtcaggattcagtcccccaaccccagtccgtgctgaagcagaggacagggcccaggatgaagcctctgctctggacacagttggagctgaggcaagtggcccccaggctgcatccagcgctgaggctcagaggtggggcaggcaagtcaggcccaagaggcagatggagcccggggatgagcctaaggcccgaaatcacgtagttcggggactgcaatggcttcctgaaatagcaccacctcccgaggttgacagaaggccttggggcattgcagagagcccctgcaatgggagaggggctcccaagtggcagaatttccaaaa

SEQ ID NO: 94209 - DNA, 883 bp, Homo Sapiens
ggcagtaactataacggtcctaaggtagcgaggcctgggtggcgaattcggcacgaggggaggataggagctacgggctgtcgtgcgggcgggttagcgacggcagcaaggtgtcggtgttccacgtgaagctcaccgacagtgccctgagggccttcgagagctaccgcgccagacaggattctgtttcactgaggccatctatccgatttcaaggaagccaagggcacatctccatcccccagcctgactgccccgcagaggcgcggacgttctccttctacctctccaacatcggccgcgacaacccccagggcagctttcgactgcatccagcagtatgtctccagtcatggggaagttcacctggactgcctgggcagcatacaggacaagatcacggtgtgtgccaccgacgactcctaccagaaggcgcggcagagcatggcccaggcggaggaggagacgcggagccgaagtgccattgtcatcaaggctggaggccgctacctgggcaagaaggttcagtttcggaaaccagccccaggtgcaacagacgcggtgccctcccggaagcgggcaacccccatcaacttggcgagtgccatcaggaagagtggtgccagtgccgtgagtgggggcagcggggtgtcccagagtgcccttccgtgaccgagtgctgcacctcctggcactacggccctaccgcaaggctgagctgctgctgcgactgcagaaggacggcctgacgcaggccggacaaggacgcgctggatggcctctccacaggtggccaacatgagtgctaaggacggcacgtgtacactgcaaggactgcctgtaccaggatgtgcagaaggactggcctggtactccgagggcg

SEQ ID NO: 94210 - DNA, 482 bp, Homo Sapiens
gtgtgagctaccacacccagccttgtgacagtgattcttatctcatagtgcaaaagatggcatttggatgggagataatagttcagaaaagttccattctacagcaactcacaatttgaagaccatagttctaagaaatatccacaaagtcagttgaactatgatttttagctacttggcatataaagttttgctggtaagtaatgacttaaatccataacttttcaaaaacataagccttacttcaaaagcattatttgtacattgtagaaaattagaaaatacagataatcatctgcggtaactttcccaaaaaagagaaaatacagataaaatattaaatgaaaatattcttaccacctacaggcgaccaattttaaaatctccataagtcttccccagctctatcttttgacttaaagtaggatcatatttaacataattgtcttgtaacttgccattttcatttaataacctccatc

SEQ ID NO: 94211 - DNA, 1134 bp, Homo Sapiens
  misc_feature (76)..(110): n is a, c, g, or t
  misc_feature (223)..(251): n is a, c, g, or t
aatgataatcactataggcgctcccgcttatatcgaacgacgagcgcagcgagtcattgagcgaggaagcggccgnnnnnnnnnnnnnnnnnnnnnnnnnnnnnnnnnnncagtcgacggtaccggacatatgcccgggaattcggccattacggccggggtaaactagtgaatgtttgagctttggaagcatgaacagttataaacgtgcatgcatacatgnnnnnnnnnnnnnnnnnnnnnnnnnnnnnttgttaattttgtatagtatttttatacttggacagaacttataaagttaaatatacttgctgcatttcaacacatctgttggaccaacagtcacataactaacctttttgaatttttggaagccattgctgttttaaagtcattatgtagaatgctacaaaccctaaacttaatatatactaattcctgaaaaagactttgagacagtactatgtcagttcagccacctattttgcattgttttctataaggaggcaaagcatatgtgttttcctgttatgcaccttttatagcctttaccactgtgtaatgttcacaaacaccaaagtaaaggaaaaatgcaggatgttaccgtaaaatccagctgctattcatggagctgaaaaacaaagcacaaataatagatagctaagttaagaactactaagtagtttatagaagtagggaaaaacgtaatactgctttttattcatgtctttaaagcctttttcagaataagtgccaatcactgatgttgtaaataatggtgccttaactttatatgcttccctggcacttcgtttctgatttttttcctgatttgataaataattagtacatagttttcactcacttgcagcttactaaagacaagaaattatgtacatgtactaatgtttttcccacaaaaaaatcctttacttctgatgtatgaattagttatctaaatagttaagcctaatacctgaataagactcaccaatgtgattgtacaataaattctatcattccattaaaatcctacatctatccccaggaatggtaatctcacctccctacatctatactccactccctcagtaaataagtgacaattgttcaaccatgttccccattcctgag

SEQ ID NO: 94212 - DNA, 1144 bp, Homo Sapiens
  misc_feature (45)..(84): n is a, c, g, or t
  misc_feature (88)..(122): n is a, c, g, or t
caaaaatcgatacggatcactatagggcgctagctcggcgatagnnnnnnnnnnnnnnnnnnnnnnnnnnnnnnnnnnnnnnnnccgnnnnnnnnnnnnnnnnnnnnnnnnnnnnnnnnnnncagtcgacggtaccggacatatgcccgggaattcggccattacggccggggaggaagaggagggcaaggtgtctggctgcgcgtttggctgcaatgagctcggcctcggggctccgcagggggcacccggcaggtggggaagaaaacatgacagaaacagatgccttctataaaagagaaatgtttgatccggcagaaaagtacaaaatggaccacaggaggagaggaattgctttaatcttcaatcatgagaggttcttttggcacttaacactgccagaaaggcggggcacctgcgcagatagagacaatcttacccgcaggttttcagatctaggatttgaagtgaaatgctttaatgatcttaaagcagaagaactactgctcaaaattcatgaggtgtcaactgttagccacgcagatgccgattgctttgtgtgtgtcttcctgagccatggcgaaggcaatcacatttatgcatatgatgctaaaatcgaaattcagacattaactggcttgttcaaaggagacaagtgtcacagcctggttggaaaacccaagatatttatcattcaggcatgtcggggaaaccagcacgatgtgccagtcattcctttggatgtagtagataatcagacagagaagttggacaccaacataactgaggtggatgcagcctccgtttacacgctgcctgctggagctgacttcctcatgtgttactctgttgcagaaggatattattctcaccgggaaactgtgaacggctcatggtacattcaagattggtgtgagatgttgggaaaatatggctcctccttagagttcacagaactcctcacactggtgaacaggaaagtttctcagcgccgagtggacttttgcaaagacccaagtgcaattggaaagaagcaggttccctgttttgcctcaatgctaactaaaaagctgcatttctttccaaaatctaattaattaatagaggctatctaattttacactctgtattgaaaatggctttc

SEQ ID NO: 94213 - DNA, 1975 bp, Homo Sapiens
  misc_feature (81)..(115): n is a, c, g, or t
  misc_feature (1399)..(1399): n is a, c, g, or t
aaagactatcactcactatgggcgctagctcggttgcagcgaacgacgagcgcagcgaagtagtgagcgaggaagcggcgnnnnnnnnnnnnnnnnnnnnnnnnnnnnnnnnnnncagtcgacggtaccggacatatgcccgggaattcggccattacggccgggggcagagggcggggaggtgggcaagatggcgcttgccgagtgattctcctcgaatacctcctgccggcgcggagacaccggggcgggggtcctgccgcaactacctcccttcctcctctcccccgcccccggagccttcatccttcccttccccccccacctcgaggggcgggcctggttcccgggacaccatgtcggactctgaggaggagagccaaggaccggcaactgaaaatcgtcgtgctgggcggacggcgcctccgggaagacctccttaactacgtgttctgctcaagaaacttttgggaaacagtacaaacaaactatagcgactggatttctttttgagaaggataacattgccaggaaacttgaatgttacccttcaaatctgggatataggagggcagacaataggaggcaaaatgttggataaatatatctatggagcacagggagtcctcttggtatatgatattacaaatttatcaaagctttgagaatttacgaagattggtatactgtggtgcaagacaagtgagcgaggagtcagaaactcagccactggttgccttggtaggcacataaaacttgattcggagcatatgcgaacaactaaacacctgaaaaaccacttacggtctttgccaggaaaatggtttcagtagccactatgtctcagccaagacaggagactctgtcttcctgtgctttcagaaagttgctgctgaaatccttgggatcaaattaaacaaagcagaaatagaacagtcacagcgtattgtcagggcagaaatagtgaagtacccggaagaagaaaatcaacataccacctctactcagagtagaatctgttcagtacagtagtgcagagggtggtgaaggcagatattgtaaactacaaccaggaacctatgtcaaggactgttaaccctcctagaagctctatgtgtgcagttcagtgagcgcatttttcttttgtgttgatagttctggctgcccttcacctctaggtgggcccgaggacttctaggaacttgttttatcagtgaccatctctgtagttcagttaacactttactcccaacttgcttcatcattgctattgcctcacagtggcaggcagctccttggatttgaaagaattcaactttgggaccacacacttttgaattcaaaatggaaaacccattccctggaattagactgcttcattgcaaaagaatgatggtgntttctttgtatggcctttgcttctttttttcattgatgtaaattttttttaacttaatatgaaaactctccaagtcttgatcatcagccaggattttgccacagcaatttcattctcttatcggaacttgtatgtgtcaaagtatacttcagagtgcaaacattaagcaagtaatatattttacctacagatacttatgaagacattctttcgctatcgtgagtaaaagtatataaagctgtttctaactgaaaatgcttgaaataagcctgtaatagaaatattttttcattttttaaaaaagggcctaaattgtttatattgtagtttgtaactcacaaagtaatatttgatattgtatttttattactgtatcgttgtcgttatgtattgtgtaatactcaggtttgaaggctttctgaattctgataaatgttcagctgatgctccacgtggaatttctcttgcaaactgcataagagtactcccgagaatgagttatgacattgtggatcagactgtacctgatgttcagatgtttttctttcacaaataaacttattaaaaataaaaaaa

SEQ ID NO: 94214 - DNA, 1201 bp, Homo Sapiens
  misc_feature (58)..(96): n is a, c, g, or t
  misc_feature (99)..(133): n is a, c, g, or t
aaaaaaaatctaataccttaaacttcctaccgaattaaaatgggcgcctccttttatnnnnnnnnnnnnnnnnnnnnnnnnnnnnnnnnnnnnnnncgnnnnnnnnnnnnnnnnnnnnnnnnnnnnnnnnnnncagtcgacggtaccggacatatgcccgggaattcggccattacggccgggaacgctaaaaatcccacctgttactccatccatcctggattgctgcattatcagagtggactattccttagctgtatacattcacattcctggtgctaaaaaattgatgctcgaactgccattagtgatcggtacaattccatataatggttttggcagcagaaactccagcattgccagccagttcagtatggatatgagctggttgacactgaccctgccagagcagcctgaagcaccaccaaattatgcagatgtggtatcagaggaagaattctctagacacattcctccttaccctcaaccccctaactgtgagggagaagtgtgctgtcctgtgtttgcctgtatacaagaattccggtttcaacccccacctctttattcagaggttgacccacatcctagcgacgtagaagagagccagcctgtttccttcattctctgaacgtatttcagaaatcactgtgttcatcatcaaattagaatgttggttcttttccttctgcctttttgggaaagagacaggaaagattcacttgaaaacataaatgaacgtcaagactgaaggcaatagaaattaaagaatgtgagaaagttctggtgggccggcaggattgccgcacaagtttatatgatggtcgtatatatatccctgttaaaaactgggatgaagatgtgcaaagtcacagaatgtaatggaaatcctgatggttacagagtaaagtgaaagggtgccctgcgctgacgtgagagaaaggaatctgtaaacagtggaaacactgtggggagtttcccatggtgaagagtggaacgaaggcgatatgaactgaaggggtgaagacttgattttggagagggcaacaaaacaagggtgtgtgtgcataggagaatggccactccaaatacgaagtgagatcctgagtctttgggtgcttcatgatttcctaccatattcaggcctaaaagacattgaaaaagcatctttcttgcagatcatggtcataatgaggtccta

SEQ ID NO: 94215 - DNA, 1088 bp, Homo Sapiens
  misc_feature (57)..(74): n is a, c, g, or t
  misc_feature (534)..(534): n is a, c, g, or t
gcggccgcagttcccaggcgtctgcgggcgcgagcacgccgcgaccctgcgtgcgcnnnnnnnnnnnnnnnnnncctcgcctgcacaaatagggacgagggggcggggcggccacaatttcgcgccaaacttgaccgcgcgttctgctgtaacgagcgggctcggaggtcctcccgctgctgtcatggttggttcgctaaactgcatcgtcgctgtgtcccagaacatgggcatcggcaagaacggggacctgccctggccaccgctcaggaatgaattcagatatttccagagaatgaccacaacctcttcagtagaaggtaaacagaatctggtgattatgggtaagaagacctggttctccattcctgagaagaatcgacctttaaagggtagaattaatttagttctcagcagaaaaactcaagaaacctccacaaggagctcattttctttccagaagtctagatgatgccttaaaacttactggaacaaccagaaatagcaaataaagtaaacatgctctggataatntggtggcagttctgtttataaggaagccatgaatcacccaggccatcttaaactatttgggacaaggatcatgcaaaactttgaaagtgacacgttttttccagaaattgatttggagaaatataaacttctgccagaatacccaggtgttctctctgatgtccaggaggagaaaggcattaagtacaaatttgaagtatatgagaagaatgattaatatgaaggtgttttctagtttaagttgttccccctccctctgaaaaaagtatgtatttttacatttagaaaagggtttttggttgactttagatctataattatttctaagcaactagtttttattccccactactcttgtctctatcagataccatttatgagacattcttgctataactaagtgcttctccaagaccccaactgagtccccagcacctgctacagtgagctgccattccacacccatcacatgtggcactcttgccagtccttgacattgtcgggcttttcacatgttggtaatatttattaaagatgaagatccacatacccta

SEQ ID NO: 94216 - DNA, 928 bp, Homo Sapiens
  misc_feature (41)..(104): n is a, c, g, or t
gtcctaggtagcgaggcctgggtggcgtactcggcacgagnnnnnnnnnnnnnnnnnnnnnnnnnnnnnnnnnnnnnnnnnnnnnnnnnnnnnnnnnnnnnnnngaacttacatacttaaacatcgaattgctttaagtgtttggcattcactgttcccgtgcatgccagcagcttcttactgcaaacacctgagacttgctatagagcagctggactatgttccgcccacacacaggacagggagctgacaaccaaggaggggggcgggatcaatactccagctttcccccctccatttccctgtatctcagcagtatggagcttgttatcgatgagaacctgctcgctgactttaaattgcttttcttaccttctcagttcagtttctccgtacctcaattgatgatttctggtatgacctagcaaatacactgctttcactgaaatttcagtcttgcaatctgctttgggttccccaatctaagacagaaacatactcattttcccatcactggacttccaggttgttttcaatttttcactgttacaaacaaggtggcaacatttatctacaaacctctggatatacacgtaggaagcttttggtatttccactagtgaaactgctcagttgaagggtatgtggatcttcatctttaataaatattaccaacatgtgaaaagcccgacaatgtcaaggactggcaagagtgccacatgtgatgggtgtggaatggcagctcactgtagcaggtgctggggactcagttggggtcttggctccccagcccaggggctcggggggcagcaggaacagccccaaaggaacaaccctttgtcaaggaggaaggggacaaagatgaaagcaaacaggagcctgaaagtcatctatgagaacaaactgtccactgggaaaggctgccccc

SEQ ID NO: 94217 - DNA, 716 bp, Homo Sapiens
  misc_feature (21)..(21): n is a, c, g, or t
  misc_feature (83)..(117): n is a, c, g, or t
aaagaaacttatataccctanatatggcgcccgctgtgagccgaacgacgagcgcagcgagtagtgagcgaggaagcggccgnnnnnnnnnnnnnnnnnnnnnnnnnnnnnnnnnnncagtcgacggtaccggacatatgcccgggaattcggccattacggccggggggaccaaggtggagatcaaacgtaagtgcactttcctaatgctttttcttataaggttttaaatttggagcctttttgtgtttgagatattagctcaggtcaattccaaagactaccagattctttcaaaaagtcagatgagtaagggatagaaaattagttcatcttaaggaacagccaagcgctagccagttaagtgaggcatctcaattgcaagattttctctgcatcggtcaggttagtgatattaacagcgaaaagagatttttgttcaaggggaaagtgattacgttaacactgtggatcaccttcggccaagggacacgactggagattaaacgtaagtaatttttcactattgtctgctgaaatttgggtctgctggccagtattgccttttagaggcttaaataggagtttggtaaagagtggtaaatgagggcatttaagatttgccatgggttgcaaaagttaaactcagcttcaaaaatggatttggagaaacaaagattaaattgctctaaactgaatgacacagagtaaaaaaa

SEQ ID NO: 94218 - DNA, 1235 bp, Homo Sapiens
  misc_feature (329)..(337): n is a, c, g, or t
taactcaccctttaactttacacttttacttaagagaacattcctaagtactctctgttatgaacaccttcttttccgctatatctcttcaagataatacatggaaggatttgaaaatcggatcacccaactatggtttctcactccaatctaagtgaagcagcaccagctgtgagaattttcaaaccgaaagatgctgatgtgacctctggattcagacatctgagctatggtcagaatgttttacttaaaagcaaccatcccacggaataactgaataggaaccagcaacacaagccagcttgtttgtattttattaatacagtctnnnnnnnnngcaaaccacacacacatccccaacataactctcaatcacatagctaattgcttcattattttgtaaaactgacatcctaacactggcacctagaatacttttccatctgagtctaacgtaccccactgcctctaatacggcccgcactacgatgagctacttcagtgggtgggaccaagcaggaactgtaagggaaaattagtcactagttctattatcgttttatttttcaagatgtgtgacaggtacaggtgacaatatggttgccaagtaacctgctctccctccctcaacaagacgcaacatgaaacctggaagtatgaggccttggtatgatttttaacctaagcaggtacacccatggtaaagaatggataccctgccctccatggaaaagattgcctgcaaaaataaatggaacaaaatagaaaaggcctaaaagccagaaatcttcaaacttactaaacaaaaatattttttaatgattctgatctaaacaatactgtatcttcttccatttgctcaattttcagtctatcaggactcatttctccagcttgagtttattattctgaatatatattactctacgatagtaactaattggttaacctgcagctatggtctatggttataccacaagtttatatataggtatgtaatgtatgcatatataaaaagcttccccatcctcccctccccaccatcacatctttaaattatagacttgtaagacttttttccaacactaacaaagtcagggtttctcagcataacagcatctcacaactgctctaaaccttccacatgaagacagagagttcaactattttattttgcaatctaagggatttttctctgcaccggacgcgtgggtcgacgatatcccgggaattcc

SEQ ID NO: 94219 - DNA, 1244 bp, Homo Sapiens
  misc_feature (60)..(94): n is a, c, g, or t
  misc_feature (884)..(884): n is a, c, g, or t
  misc_feature (915)..(915): n is a, c, g, or t
  misc_feature (1007)..(1007): n is a, c, g, or t
  misc_feature (1075)..(1075): n is a, c, g, or t
  misc_feature (1140)..(1140): n is a, c, g, or t
gcgctagctcgtcaagccgaacgacgagcgcagcgagtccagtgagcgaggaagcggcgnnnnnnnnnnnnnnnnnnnnnnnnnnnnnnnnnnncagtcgacggtaccggacatatgcccgggaattcggccattacggccgggtaatgcagcactgtgatctaatttaaataatacttttttattatttatactactatatataatatacatcaacacttttgctatataacctaagtgataaccctcttttagttacctgccaaactctggacttggtttatattgcagttaacacagttacaaagctgtaatggtgtctttttttcctttgtaacggaatgtgtaaatcaaagtatatacattgtgtggtgttcctgtttctggagtttcatgaggatttacacatggcattcagtgttctgtatagatctgcctacctttgtgaattcatctgttaacccctcttcctttgagagagcaccggcgatggtggttaactccttgtgttttctctctctcctactggttattcttgaattaagcacagactcgtcagctcggttgctttatcatgaataatgtgtgtgaccttgcagttcttccacagttcagcaaacaagtgctagcttcactgaccaaaaattaaggaaggaaaacacagtttttaaaacgatccatcttttaacagccgaaaccgatgtgtctatggtgctgcaccttgctgttgtacttctgaaatcagacgtgtgtgaaccgatcatttctgacttaaccgtgagatgctcacgagtacccttcctgttgttttgttagcattgaaatcgagactaattatttggaatatatacaacagtgtttttccactgtatttcatttgcaanagttgagaactgctttctctaccttttgcanaataattgatattccatattggattctcaaagacttcgatatggtgaacctattaaacctagaaattgtattcatcctttcatgactgtggncctgagttccccagcccctctcccctcctttttttagatgagatttagcacactctcagttatttaancatggcacatttctttgagaatgtatgttgaggccatctgagctcatagctgaatcagaaacaantttcatgctggggccatcacactccctacttaaatacggccatggggggaaaatggggaggaaaaaatgaatccatggggtggctggggaaaacatataacctc

SEQ ID NO: 94220 - DNA, 670 bp, Homo Sapiens
aagagagtccctggcatacaggcactgctctgctccaggcatctgccacaatgtgggtgcttacacctgctgcttttgctgggaagctcttgagtgtgttcaggcaacctctgagctctctgtggaggagcctggtcccgctgttctgctggctgagggcaaccttctggctgctagctaccaagaggagaaagcagcagctggtcctgagagggccagatgagaccaaagaggaggaagaggaccctcctctgcccaccaccccaaccagcgtcaactatcacttcactcgccagtgcaactacaaatgcggcttctgtttccacacagccaaaacatcctttgtgctgccccttgaggaagcaaagagaggattgcttttgcttaaggaagctggtatggagaagatcaacttttcaggtggagagccatttcttcaagaccggggagaatacctgggcaagttggtgaggttctgcaaagtagagttgcggctgcccagcgtgagcatcgtgagcaatggaagcctgatccgggagaggtggttccagaattatggtgagtatttggacattctcgctatctcctgtgacagctttgacgaggaagtcaatgtccttattggccgtggccaaggaaagaagaaccatgtggaaaaccttcaaaagct

SEQ ID NO: 94221 - DNA, 744 bp, Homo Sapiens
cagtcgacggtaccggacatatgcccgggaattcggccattacggccggggtatgtgaagcctgcaaaaataaaaatgatgatgacaacgacataatggaaacgctttgtaaaaatgattttgcactgaaaataaaagtgaaggagataacctacatcaaccgagataccaaaatcatcctgggagaccaagagcaagaccatttacaagctgaacggtgtgtccgaaagggacctgaagaaatcggtgctgtggctcaaagacagcttgcagtgcacctgtgaggagatgaacgacatcaacgcgccctacctggtcatgggacagaaacagggtggggagctggtgatcacctcggtgaagcggtggcagaaggggcagagagagttcaagcgcatctcccgcagcatccgcaagctgcagtgctagtcccggcatcctgatggctccgacaggcctgctccagagcacggctgaccatttctgctccgggatctcagctcccgttccccaagcacactcctagctgctccagtctcagcctgggcagcttccccctgccttttgcacgtttgcatccccagcatttcctgagttataaggccacaggagtggatagctgttttcacctaaaggaaaagcccacccgaatcttgtagaaatattcaaactaataaaatcatgaatatttttatgaaggtttaaaaatagctcactttaaagctagttttgaataggtgcacg

SEQ ID NO: 94222 - DNA, 1040 bp, Homo Sapiens
aacgccaccccacataggctaggtacgaggctgggtggtgaatcggcacgaggcttgcgttccagtgttccagcttctgcgagatgaccctcaaggcgagcgagggcgagagtgggggcagcatgcacacggcgctctccgacctctacctggagcatttgctgcagaagcgtagtcggccagaggctgtatcgcatccattgaatactgtgaccgaggacatgtacaccaacgggtctcctgccccaggtagccctgcccaggtcaagggacaggaggtgcggaaagtgcgactcatacagtttgagaaggtcacagaagagcccatgggaatcactctgaagctgaatgaaaaacagtcctgtacggtggccagaattcttcatggtggcatgatccatagacaaggctcccttcacgtgggggatgagatcctagaaatcaatggcacaaatgtgacaaatcattcagtggatcagctgcagaaggcgatgaaagaaaccaaaggaatgatctcattaaaagtaattcccaaccagcaaagccgtcttcctgcactacagatgttcatgagagcgcagtttgactatgatcccaaaaaggacaatctgatcccttgcaaggaggcgggactgaagtttgctactggggacattatccagattatcaacaaggatgacagcaattggtggcagggacgggtggaaggctcctccaaggagtcagcaggattgatcccttcccctgagctgcaggaatggcgagtggcaagtatggctcagtcagctcctagcgaagccccgagctgcagtccctttgggaagaagaagaagtacaaagacaaatatctggccaagcacagctcgatttttgatcagttggatgttgtttcctacgaagaaagtcgttcggctccctgcattcaagaggaagaccctggtgctgatcggagccagtggggtgggtcgcagccacattaagaatgccctgctcagccagaatccggagaagtttgtgtaccctgtcccatatacaacacg

SEQ ID NO: 94223 - DNA, 1008 bp, Homo Sapiens
  misc_feature (732)..(732): n is a, c, g, or t
cagtcgacggtaccggacatatgcccgggaattcggccattacggccggggggcactccgttggtcttccagctggtgggagttgacgacgcggtgctgggcgttgggaccctactttatctagttcgggaagttgggttgtggggtcatacctgtctgtctgctcccagctttcttgggtttcttccgacggcgtggggcctcgctaaggaattcccggcccctcagggccacggctttagcggtgtcttttgcgagttcttcgtaagtacatcttaaagctgtcaagatggttctagcagaccttggaagaaaaataacatcagcattacgctcgttgagcaatgccaccattatcaatgaagaggtattgaatgctatgctaaaagaagtctgtaccgctttgttggaagcagatgttaatattaaactagtgaagcaactaagagaaaatgttaagtctgctattgatcttgaagagatggcatctggtcttaacaaaagaaaaaatgattcagcatgctgtatttaaagaacttgtgaagcttgtagaccctggagttaaggcatggacacccactaaaggaaaacaaaatgtgattatgttagtggattgcaagggagtggtaaaacaacaacatgtgcaaagctagcatataattaccagaggaaaggttggaagacctggtgtaatatgtgcagacagcattcagagcaggggcttatgaccanataaaacagaatgctaccaaagcaagaattccattttatggaagctatacagaaatggatcctgtcatcattgttctgaaggagtagagaaactctaacaatgaaaatttttgaaattcattattggtgataccaaggtggcgcaaaaaacaagaagatctttgttgaaagaaatgcttcaagttgtaatgctatacaactgattacatgtttatgtgatgggatgcctccatgggcaaggttgttgaagccaagggtaaggctttaaagacaaag

SEQ ID NO: 94224 - DNA, 892 bp, Homo Sapiens
atctcctgcgtagtaccaaggtaggggactagtggatcttatcatagttttggctgactatgcagggcttaaaaggccagcgtctgtttgagggggaatgacctctaacatctgtaaaatttgtctcatcttttaatttctttaacttatttcaaaatcatctcatgacccttgtgtgcctctttgtgaagccctatttagcaatttcaggggagtcaaaaaccttgcaacttccttctccactaacccaggactaaaaatggacaggctgacctcagtgtttacaaattcagaattttgataggggtagatatggagaaagacctatttcctgggtctctgctgtgtagtctccttcaggcttattgtgctcagtgaacatccagtgctgggtgcagctccatcaccctcttgtgtgtttacatgtctctttctatgataagagggttgtgttggtggcacctccactactcttttctgtttgttgagtttgaattgtgtaacatctttgatcagtgggtgtatctgtaatgaaggaggttcaagaggctgtgctttccaagtgatagtctataggagtgtttaatttcttgcagctccatctggttgctgcatttgaagcatggcattaatttgtatttgccctgttctttgacctaaagttgaagggtttagagtttttaacctgatctgtagagcagagaggttgaaagcacttaactcttgtttagtatcctcattgccttgctgcctgggtatctggcccctttccataaacatttcttttcagttcatgtagctctttaatagaaagctgctattatggatattgccatttggggaaggaagttggagaggcccagctttactgggacaggttatgccccaggct

SEQ ID NO: 94225 - DNA, 988 bp, Homo Sapiens
cagtcgacggtaccggacatatgcccgggaattcggccattacggccggggaagagggaagtcgtggtggtcgcgagggagccggaaagatggtggttaccagatctgcacgggctaaggccagcatccaagccgcgtcggctgaaagttccgggcaaaagagttttgctgctaatgggattcaagcgcatccagaaagtagtactggatctgatgcccgaactactgctgaatcacagaccactgggaagcaaagtttaatccctagaactcctaaagctagaaagaggaagagcagaactacaggctcactaccaaaggggactgaaccatctacggatggagagacctctgaggcagagtcaaattattctgtgtctgagcaccatgataccattttaagggtaactaggagaaggcagatcttaattgcatgctccccagtgtccagtgttaggaaaaagccgaaagtaactccaacaaaggagtcttacactgaagaaatagtgtctgaagcagaatctcatgtttcaggtatttctagaattgtgcttcccacagaaaaaactacaggagccagaagaagtaaggctaaatctctgacagatccaagccaagaatctcatacagaagctatatctgatgctgagacatcaagctcagacatttcattctctggaattgcaactagaagaaccaggagtatgcagaggaaattaaaggcacaaactgaaaagaaagatagtaagattggtaccaggaaatgagaaacacgatcgtggggtacacctgggaattcagaggattcagataccagacaaaactccccatttacaaacaagatctcttttctgagataaataagcccaaatttctataataatgactttgaatgatgatttctcccacagaaagtccagaaaatatatttaacagtggcacgaacaggcccaatgttgaaattctcttaaagaaaaccaaccggaat

SEQ ID NO: 94226 - DNA, 986 bp, Homo Sapiens
  misc_feature (82)..(116): n is a, c, g, or t
aaagactgactatcatatagggcgctagctcgtcgaaggcgaacgacgagcgcagcgaagtagtgagcgaggaagcgtgcgnnnnnnnnnnnnnnnnnnnnnnnnnnnnnnnnnnncagtcgacggtaccggacatatgcccgggaattcggccattacggccgggaactgtggaaggggtgggatttgaacagggcgtctacaaatagtgaagatcatggagttagaggaagaacaactagcttcagggcatggaatgagaaaggctctgagtcagaaggacctgggtcttatctggaagtggctatcatttgcattatttgcactgggtccagtggctgcagctggacgcagagtccctgagaaaatccatgcttggaaactagaccaggaatagtaagctgagaccagaaatgccatctgggggtgtctggactcatttcgtgtgcagtaaaagccactgaaaacaagggaatctcgtgttccagataactgaggtggccgtatagaaagctgattatggcaagataccagcaataaaagtcaagtaggagataagtagtccaaatgagagaggatggacacttaaaccttagtagaagcagtgggattagagatgaggagacaggatttacttttcactaaatgtaatatgccatcaatgatgacacacaccatttttaaaaattatagctcatctaaaaaagctgccaattcaatgatgacacaatgctaagacactgggcattgaaaaaaattgcatctttatttcagaggttaaaaaaggtgtccatcttagaactgatgaaattacaacagaataatttgaagaaggatggacatttggcattttgggaccttgagcaggtggtggaggtacatgatgccattaatagcgaatcatgggaaacatgggaatgacgaattgagtccaaaggaaaagaaggattctgcttggacctattgggtggtggcctaaaaatttg

SEQ ID NO: 94227 - DNA, 1236 bp, Homo Sapiens
  misc_feature (263)..(391): n is a, c, g, or t
  misc_feature (1117)..(1151): n is a, c, g, or t
ggatcagcagagtaaggcataggaagacttggtcgggctccgcggcccctctttaccggattggaggctgcgcgggtgaaatcgagctttaaactcccctggcctcggaacaccatttgtagcctctgaaggaggaggacttataagattctgtactaaggcagccgtgggaagggaggagaaccaggtcggcccgcgcgctcccggctgcttttgctctccctttggtttcgaaagcgtcaagtcccaagactttcgctctnnnnnnnnnnnnnnnnnnnnnnnnnnnnnnnnnnnnnnnnnnnnnnnnnnnnnnnnnnnnnnnnnnnnnnnnnnnnnnnnnnnnnnnnnnnnnnnnnnnnnnnnnnnnnnnnnnnnnnnnnnnnnnnnncagaccctgagagcctactgaccacagcagctcctgttaccacggctgccagtttctgctctcaatgctactgctcattgatcccagggaggaaaattctggtgcatcacttagtatttatttcaggtatggttaggacatttcagaataaaggatggcttcttctggatgtatctgaattgatctgctgtcatatacttatgaatcacatgctcagaccaaagtacataaaaaaatcattctctttccagacaattttaggggtttgtaaccttggtcttatattgctccatggcctatgaattagtaacaggactagtgaaattcctagtaacatagtcctgttactacaagattacccatatcctttgatgatccatctactgcaaactcatagaatttactggacagtcttcttcattttatgtaagaatgaccactgtatcatcatatgtcaatgtcctgcataactgtcaccacccctccatgccgaatacctggtagcttgtgatgagttgagaacctcactaaacagtcttatccacatcctcaggttctctgaggttttccttctgtccagtccatgcacttgtaccctggtggtcaaagtacagtcacgcactgcctatgatgttctcatcagtggtgggctgcatacacagcagtggtcccatacccggccgtaatggccgaattcccgggcatatgtccggtaccgtcgactgnnnnnnnnnnnnnnnnnnnnnnnnnnnnnnnnnnncgccgcttcctcgctcactgcttcgctgcgctcgtcgttcgcttcaacgacgctagcgccctatagtgatctaacagattcttta

SEQ ID NO: 94228 - DNA, 736 bp, Homo Sapiens
  misc_feature (42)..(80): n is a, c, g, or t
  misc_feature (83)..(117): n is a, c, g, or t
gcccccctcaatgtcgatatatagggcgcacgtcgtgatagnnnnnnnnnnnnnnnnnnnnnnnnnnnnnnnnnnnnnnncgnnnnnnnnnnnnnnnnnnnnnnnnnnnnnnnnnnncagtcgacggtaccggacatatgcccgggaattcggccattacggccggggaaggtggaagaaaaatacaagaaagccatggtttccaatgcacagttgagacaatgagaagaacaatttgatctaccaagtagacacactcaaggatgttattgaagagcaggaggaacagatggcagaattttatagagaaaatgaagaaaaatcaaaggagttagaaaggcagaaacatatgtgtagtgtgctgcagcataagatggaagaacttaaagaaggcctgcggcaaagagatgagcttattgagaaacatggcttagttataatccccgattggcactcccaatggtgatgtcagtcatgaaccagtggctggagccatcactggttgtgtctcaggaagctgctcaggtcttggagtcagcaggagaagggccattagatgtaaggctacgaaaacttgctggagagaaggaagaactactgtcacagattagaaaactgaagcttcagttagaggaggaacgacagaaatgctccaggaatgatggcacagtgggtgacctggcaggactgcagaaatggctcagacttgcagttcatcgaaatgcagagagatgcc

SEQ ID NO: 94229 - DNA, 1154 bp, Homo Sapiens
cagtcgacggtaccggacatatgcccgggaattcggccattacggccgggaggtgagatgagtgagagccgagcaaagagagttagaataaaagaggtagatggctggaccctgaggatgctaattgattatgtttacactgcagaaattcaggttacagaagaaaatgtacagagcaacattttgcagatgttgtacttagtgaagaatttctcaatcttggcatcgaacaagtgtgcagcttaatctcaagtgacaaacttaccatttcttcagaagagaaggtatttgaagcagtaatagcatgggtgaaccatgacaaggatgtgaggcaagagtttatggcccgactgatggaacatgtacggttacctttgcttcctcgggaatatttagttcagagggttgaagaggaagcattggtcaagaatagcagtgcttgcaaaggattacctcattgaagcaatgaagtaccatttgctgccaacagagcagcgtatattaatgaagagtgtccggacccggctgaggacacccatgaaccttcccaaattgatggtggtggttgggggccaagcaccaaaggctatccggagtgtggaatgctatgactttaaagaagaaaggtggcaccaagtagcagagttgccttccaggaggtgcagggcaggcatggtctacatggctggacttgtttttgctggtggtggctttaatggctcattaagaagttcgcactgtagaattccctacgaacctgttgaaaggaccagtggaccagcgttgctaacattgagagaccgcagaaagcacttgggaagctgctgtgttaaatggattattatacgctgtgggaggctttgatgggagtacaggtttgtcatctgtggaagcatacaacataaagtctaatgagtggtttcatgtagctcccatgaatacaaggaggagcagtgttggtgtgggtgtagtggaggtttgctctatgctgtaggaggttatgatggagcatcacgtcagtgtcttagcacagtagaatgctataatgctacaacaaatgagtggacctatatagcagaaatgagcaccaggcggagtggagcaggtgtaggtgtgttaaagaaattaatgtatgctgtaggaggtcatgatgg

SEQ ID NO: 94230 - DNA, 1051 bp, Homo Sapiens
  misc_feature (79)..(113): n is a, c, g, or t
aaatgtatagatcatatagggcgtagcggcctatttgcgaacgacgagcgcagcgagtctgtgagcgaggaagcggcgnnnnnnnnnnnnnnnnnnnnnnnnnnnnnnnnnnncagtcgacggtaccggacatatgcccgggaattcggccattacggccggggaccattcagaagactgtccacccgtcctcagccccctctcttcgtgggctatctactcagttgatccctccctcgctggcttggctctgactcctgctcagacccatcacctttgccgggaatgatgtctggagaacccctgcacgtgaagacccccatccgtgacagcatggccctgtccaaaatggccggcaccagcgtctacctcaagatggacagtgcccagccctccggctccttcaagatccggggcattgggcacttctgcaagaggtgggccaagcaaggctgtgcacattttgtctgctcctcggcgggcaacgcaggcatggcggctgcgatatgcggccaggcaactcggcgtccccgccaccatcgtggtgcccagcaccacacctgctctcaccattgagcgcctcaagaatgaaggtgccacagtcaaggtggtgggtgagttatcggatgaagccttcgagctggccaaggccctagcgaagaacaacccgggttgggtctacattcccccctttgatgaccccctcatctgggaaggccacgcttccatcgtgaaagagctgaaggagacactgttgggaaaaagccgggggccatccgcgctgtcacgtgggcggcgggggcctgctgtgtggacgtggtccaggggctgcaggaggtgggctggggggacgtgcctgtcatcggccatggagactttgcgtgcccacaggttccacgctgcaccaccgcgggcaaccttgtctcccttgcccaagatccaccagtgttgccaaagggcctgggcgtgaagaatgtggggggctcaaggccctgaaagctgttttcaggatcaacccaattttctctgaaggttattctcggaccaggag

SEQ ID NO: 94231 - DNA, 965 bp, Homo Sapiens
  misc_feature (42)..(83): n is a, c, g, or t
  misc_feature (87)..(121): n is a, c, g, or t
  misc_feature (469)..(477): n is a, c, g, or t
aaaatgtatagactcactatagggcgctagcgtctttcattnnnnnnnnnnnnnnnnnnnnnnnnnnnnnnnnnnnnnnnnnnccgnnnnnnnnnnnnnnnnnnnnnnnnnnnnnnnnnnncagtcgacggtaccggacatatgcccgggaattcggccattacggccgggcaaacgaaggacacgctctttgctacttggcaggaagaaatgggcttagattaaaacttggccaccaagcagataatctgaatataaataaagaattctttattctaaccaccagacttacggtgagccctgggttaaaagattccatttgtaataaggcctggttgcttgggtgaatcctgtattctattcaagaaagcagcaaaatcagtgatctcagtgcaggtgaagattgtgatcgttcttaacagctgggtgattacctgtaagagaagataagctacattgacggagcagnnnnnnnnngccgtgaagcattttattgcagaatgtcttccctattattagaatataagagtatagtagtaattactgttcattgaacagaaaatagcacgacttacatttagtttccagtggtcaagttgtagattcggaactgtggtgaaatctgttgaaccagacgattttcacttaactaaactctagttcatgttggaatcaatctgggtacaaccgtactcatggttcatgggaagcagagacttcacgtcacaaatcactcattgtcatgctatccatgttcaagtcacgacttacatgatttttgaacccagagcaacatccacttgtagcaaagtaggtttgcacagtgctaactattaaatcttctagtagagtttctaaagcaacaagttcgggtctaaatagagttagattactgcttatttccctagttaagctctggatggaagtggtaatgaagcttagttaggataagggggaaaggcaga

SEQ ID NO: 94232 - DNA, 783 bp, Homo Sapiens
cagtcgacggtaccggacatatgcccgggaattcggccattacggtcgggggcggaaatcggaagcgggggcggtccgcggtgccggctggtggcggagcagtgggtgcggaggtgcgtccctgtaggtgtgtgagcccgttgatggaagcctgggcctcgtcagccagtgcagcgggggtgtcggttgccgacgtggctgccgctggggctgttggctgtcggtcggtgctggctgtggctgcgctccgccgtttggcagcaggtccggcatagggtcttgccacggacctccgtgtcggagcagcagttgctggaggtggaggacttgtcccgtgtccctcctgcagggtggagggctggggcctctgtcgatgcccccggacctgccggatctggatcctgagtgccgggagctcctgctggacttcgccaacagcagcgcagaggctgacagggtgtctggtgcgcagacgcccggaccgtgcgcctctgtcagacctgctacaccccttcttccaacaggtcgacagcaagatggacaacatcagccgagaccgcggggaatacttcagagagtcagagttgtgccagaagtctcttaatggcagatagaatgcaaatagttgtgattctctcagaattttttaataccacatggcaggaggcaaattgtgcaaattgtttaacaaacaacagtgaagaattatcaaacagcacagtatatttccttaatctatttaatcacaccctgacctgcttttgaacataaccttcaggggaa

SEQ ID NO: 94233 - DNA, 695 bp, Homo Sapiens
  misc_feature (86)..(120): n is a, c, g, or t
  misc_feature (231)..(231): n is a, c, g, or t
aaaagactgatagactcactatagggcgctaggtcgttatagcgaacgacgagcgcagcgaagtcagttgagcgaggaagcggcgnnnnnnnnnnnnnnnnnnnnnnnnnnnnnnnnnnncagtcgacggtaccggacatatgcccgggaattcggccattacggccgggcagacccctcccgttaggcttcacctccaacactgaggatcaaatttcaacatgagattgngaggaggtcaaacaaactaaactgtagcagtgtttcataaaattgtttgcctgactcaggttgctagtaagccagcagagggatatttgcctcctaaatcttgggcagaggcaggagtaaggaagccatttctggagtccttgctactaatttggaaaactgagcttctttctttcattgctttttcccttaagagacaagtccttactatattgccctgtctctcaagggaagacatcaagactggacttgaagctcctgggctcaagccatcccccaaccttggcctctcgagtagatgggattataagcatgtgccacggtgcctgacttgagtttcttattctagaacacttggagcctgaactctgaccaggcccctcacttgagcctttgctttctgctccttgtaaactgccatattgggtgcacttgccctgccacagtaatgctatatatttctg

SEQ ID NO: 94234 - DNA, 931 bp, Homo Sapiens
  misc_feature (52)..(110): n is a, c, g, or t
cagtcgacggtaccggacatatgcccgggaattcggccattacggccggggnnnnnnnnnnnnnnnnnnnnnnnnnnnnnnnnnnnnnnnnnnnnnnnnnnnnnnnnnnnacttaaggggctgggatgctttgaactagcttaaggcccaggactgtggagtgtgtggaccaccccacagaggagggactcagatttatttactcttgctggatctgtagtgatggagttccttctggtgtcagccccacaggaggctcccaggcctccctcacttcccatacccagtctaggagctccttctggctcccaagcacccagagctttcctccgccttttagttctggttcctccactggaatgtaggcccctcacgggcgatggctgtcttttcttgactttgtatcttcactgccaagcaaaaagtctgccaagtgggaatgtttaataaatattcattgaataatgaatgaaccatcttcgtacatgaataataatactggtcttacgtttttctggtgctttataatgtatacattacatctgagtatttagtttatttaattttcaaaacaatcctttaaggtcaacattgttatccttatttgctgatgaggaaactaaggttagaaacatttggatttcctctaggaccgtatagctaggaagtgttactatcttgatttgaacacattttctggtgctaagtctgatgttctttccatgaatcatgtggtggttgagatggagctttgtaatggggaatagaacagtaacttaggttctttctggaaagggaggtatctagcaagtggataatagatacaatgattgaatttaatgtcgattaggaacaatttaagggttaaaaaatactttatgagcaggaagatggtttaatttaaatgaagttgggtgctcggttggtaatg

SEQ ID NO: 94235 - DNA, 680 bp, Homo Sapiens
  misc_feature (20)..(20): n is a, c, g, or t
  misc_feature (250)..(302): n is a, c, g, or t
tttcctccgccttttagttntgttcctccactggaatgtaggctcctcacgggcgatggctgtcttttcttgactttgtatcttcactgccaagcaaaaagtctgccaagtgggaatgtttaataaatattcattgaataatgaatgaaccatcttcgtacatgaataataatactgtcttacgtttttctggtgctttataatgtatacattacatctgagtattttattttatttaattttcaaaacnnnnnnnnnnnnnnnnnnnnnnnnnnnnnnnnnnnnnnnnnnnnnnnnnnnnnttagaaacattttgatttcctctaggacgtatagctaggaagtgttactatcttgatttgaacaaattttctggtgctaagtctgatgttctttccatgaatcattgtggtggttgagatggagctttgtaatgggaataaaacagtaccttaggttctttctgaaaaggaggtatctagcaatggataaatagataccactgaatgaaattaaatgttgattaggaacaaatttaaggcttaaaaaatactttatgagcagcaagattgctttaacttttaaaatgaagctttggttctctgatttgtaatgagcacctggatatgtcaattaaaatgcccatttgtgaagcttactcaataaaactttaaattgtc

SEQ ID NO: 94236 - DNA, 933 bp, Homo Sapiens
  misc_feature (50)..(94): n is a, c, g, or t
  misc_feature (97)..(131): n is a, c, g, or t
  misc_feature (723)..(733): n is a, c, g, or t
gttggaacacagacctccaccttaaataaagagagcccggctagctcttnnnnnnnnnnnnnnnnnnnnnnnnnnnnnnnnnnnnnnnnnnnnncgnnnnnnnnnnnnnnnnnnnnnnnnnnnnnnnnnnncagtcgacggtaccggacatatgcccgggaattcggccattacggccgggcttttcctcttgtctactccagacagttattccataaagcatttgtataattaaaaggaaaacagaaaaaggaaaagtaggcaaatgtgaaaatagtttcaatatatcttatgatttcttaatgtaaaatgttttgttgaagtatatggctatcatgactaagtgctagaatttatagttacaggcggtgtccttttaaatgtggaaggcttttaaaatattttaaaactggacctgtattatcctgaatacactattttgaaaatttttaaaaatgacttctttattttgctttaccgtatgtttatatctaattgacatattgactaatgtttgaaagaattcaaccataagttaaaatctgaaggttatctttatcatgtttcatccctgtctgaagatttcctagtcttcttatgtaaatcacatgactcatgtccgtaaatgaactatgaaagatatcgatcagtttatgatcattgaccatgtgatttcaaaacacagtgttcttttaaaaatctataatatgtcaaaatacaagnnnnnnnnnnnaacatcgtttaagtaagttaattccatttatttacttggggagctatatttccacttagaaaaatagggtacttttacaatatatgtgagattaaaaaccagggtacaaatgatcaaccttttttgaaatggagtcttagatttatggaattcactcgaaaattagtggatcagaagaaatctcattttaacaacacacg

SEQ ID NO: 94237 - DNA, 1031 bp, Homo Sapiens
taggacgtatagaccagtgttacagaaaagcaggctggtaccggccggatatcccgggatatcgtcgacccacgcgtcgctctaaagaacttaattcatttgttacataaaatataaggaaatctttatactattttacagtaaccacaatctaaatatttacatatacccaaaattaacttatgctcatatattaggatgtgagaatatcatctgtttatggacacatgaaacctcctaatgacctggaatggtagaatatttgactttttatatgcaaagtttttcaagccaagtggtttgtctaatatttaaacatgtactggcacaatttgtgatgaaaatattagcacatttgcaataatgtttctccataacagagaatgttaatggataccagaattttatttttgtatttatgttcatagtacttttcctcttgtctactccagacagttattccataaagcatttgtataattaaaaggaaaacagaaaaaggaaaagtaggcaaatgtgaaaatagtttcaatatatcttatgatttcttaatgtaaaatgtttgttgaagtatatggctatcatgactaagtgctagaatttatagttacaggcggtgtccttttaaatgtggaaaggcttttaaaatattttaaaactggacctgtattatcctgaatacactattttggaaaattttttacaaaataccaaatgaaattaagtaaagaggacaccatagcagacaagataaagaggcaagaaattgtccacgatcaaaaagagactatatacgacagtgagaaagagggtagcctataagatagcaaacggagggtgacaacaatctattaatgaacaatatttaacagagggagcacaaatagcaggataaaacaacgggtgagaataaaaaagtggagtagaaaaagagattagtagtacgagagaaaataggggtggaaaacccacagtaatagaacaagagataatgatgaatgtgaaacatatgtaaacgtattgtttatacg

SEQ ID NO: 94238 - DNA, 928 bp, Homo Sapiens
  misc_feature (70)..(104): n is a, c, g, or t
  misc_feature (671)..(671): n is a, c, g, or t
  misc_feature (785)..(785): n is a, c, g, or t
gaagactatatggcgctagcgtgtaggagcgaacgacgagcgcagcgagtagtgagcgaggaagcggcgnnnnnnnnnnnnnnnnnnnnnnnnnnnnnnnnnnncagtcgacggtaccggacatatgcccgggaattcggccattacggccggggatataacagcactcccaaagaactgggtactcaacactgagcagatctgttctttgagctaaaaaccatgtgctgtaccaagagtttgctcctggctgctttgatgtcagtgctgctactccacctctgcggcgaatcagaagcagcaagcaactttgactgctgtcttggatacacagaccgtattcttcatcctaaatttattgtgggcttcacacggcagctggccaatgaaggctgtgacatcaatgctatcatctttcacacaaagaaaaagttgtctgtgtgcgcaaatccaaaacagactttgggtgaaatatattgtgcgtctcctcagtaaaaaagtcaagaaccatgtaaaaactgtggcttttctggaatggaattggacatagcccaagaacagaaagaaccttgctggggttggaggtttcacttgcacatcatggagggtttagtgcttatctaatttgtgcctcactgggacttgtccaattaatgaagttgattcatatngcatcatagtttgtttgtttaagcatcacattaaagttaaactgtattttatgttatttatagctgtaggttttctgtgtttagctatttaatactaattttccataagctatntggtttagtgcaaagtataaaattatattggggggaatagattatatggactttctgaagcaacagctatttttaaaaaaactattacatctttgttatatgttgctcctaatgtgtaatgctataataagaaatttataagc

SEQ ID NO: 94239 - DNA, 535 bp, Homo Sapiens
cttaagtagtgaaaggatcaaatgctcattgtagggcaatgggagttcttttaaatgttataattttcatgaaaagaaatgttgacaccagtgaatgaaacaattgctttcattctgaaaattctaccaccatttgcatctaagattatttccaaggcttaaagcctgaagctgaataaaataatctttcagagtccagcttcaagtttagttgatgtaagctcactatttttttcctaccgcatgcattttctaatgtttggggtggatggtgtgtcggttatggaaggcatagacgtcattacaggtgctacgatctcacacacacacaaggaaatgttagtctccttattttatgattggaaaatcaatgacctagaggcaaaatggcatgtttaaggacctgggatgacaagtcattctgcagtcagccacagagccaaatttggactcctcaaccagaactccatgaaaagcctgacttggccaaacactgtgctggaaaagctaagcccctttcatttgtgaagtaaat

SEQ ID NO: 94240 - DNA, 622 bp, Homo Sapiens
tttacagctatagaaaagttcaaaaggtaactactatatttggaagtattattcacacatagtgtcttgcatagagtagaccttcaataaaatatatgtgttaacgaagattatactttcaaatgaaagtaatatttgcttgtttgtttttaaacagatagccatcacaactcaatgtaactgcatgcactttcttgtcgtcatttggaaccaggcttctatcaactactatactagtcgaggggctttagacctttcctctgaggagggctggcatctcttcaggtttaacagagaagaactcctggacatggcatgggaagaatgaaagaggctttgtaacaactcatcccaacacagcctccaacatttgactgtcacctgagtctaacagcagtttgactttgttgtacaatacagcaagtgatcatcacattcttgtttgagcagatcttttattttgaaacagattttgtagctctagtcaactttccattatccaaaccaatattctaacggctagtagcagtagtgataatccaaagagcagataatttaaaagtcacttataccccggccgtaatggccgaattcccgggcatatgtccggtaccgtcgactg

SEQ ID NO: 94241 - DNA, 1032 bp, Homo Sapiens
aaaagcaggctggtaccggtccggaattcccgggatatcgtcgacccacgcgtcggcctcctttgtcctggatttgggagttgagcaccttcgtcgccattggctttcctcccccagctccagcctctctcatcttgggaatctgcgtcagaagtcactcgcagtcccgtcagcccagaagaagacgtaaagcaggctaccagcaattttgagaacttgcaaaaacagcttgcaaggaaaatgaagcttcctattttcatagcagatgcattcacagcaagagcatttcgtgggaatcctgctgctgtttgcctcctagaaaatgaattggatgaagacatgcatcagaaaattgcaagggagatgaacctctctgaaactgcttttatccgaaaactgcacccgacagacaactttgcacaaagttcctgctttggactgagatggtttacaccagcgagtgaggtcccactctgtggccatgccaccctggcttctgcagctgtgctgtttcacaaaataaaaaacatgaatagcacgctcacgtttgtcactctgagtggagaactaagggccagacgagcagaggacggcatcgtcctggacttgcctctttatccagcccaccccaggacttccatgaagtagaggacttgataaagactgcataggcaacacactggtccaggacatctgttattctccagataccaaaagctcctcgtccgctcaaggacgttcacaacaggcgtctggaaaccgaagtgacacgggaactgcgcagctgaaaacccacgacggcaggctatcttacctaaaggagcctggtggccacccaagccttgcttacacaacattgccgggtggggcggcgaccccgacgggtgcaccggcgtccgcacgggcccctgggacagaccttcgtggccagagaaagagacacccaagaggacgaagcgacgccagaccacagcgggggcccacatgcacagggcggaccaaagacacaagggcgagagagatagagtacgg

SEQ ID NO: 94242 - DNA, 526 bp, Homo Sapiens
  misc_feature (46)..(90): n is a, c, g, or t
  misc_feature (94)..(128): n is a, c, g, or t
  misc_feature (181)..(283): n is a, c, g, or t
ccagcttattcacaacatatatacctcatatggcgcctcgctgttnnnnnnnnnnnnnnnnnnnnnnnnnnnnnnnnnnnnnnnnnnnnnccgnnnnnnnnnnnnnnnnnnnnnnnnnnnnnnnnnnncagtcgacggtaccggacatatgcccgggaattcggccattacggccgggcannnnnnnnnnnnnnnnnnnnnnnnnnnnnnnnnnnnnnnnnnnnnnnnnnnnnnnnnnnnnnnnnnnnnnnnnnnnnnnnnnnnnnnnnnnnnnnnnnnnnnnaacattctgaaccttgtcttttctctgtcatgtattcaaagtccacgctggaaactccaatttcaggtcccttcagttttttgtccgttgtctttcgttctttgtccacgttgcccgtcccttgtgaactggatgctgtgtgtgagcaacagggactgaaaagctcagtgcagtgccctcgctcccgtccggagtcggttactgatccggtcgaagataaagaaaatcacgttgaacacggag

SEQ ID NO: 94243 - DNA, 808 bp, Homo Sapiens
  misc_feature (82)..(116): n is a, c, g, or t
aaaattgtataactcactatagggcgctagctcttagcagcgaacgacgagcgcagcgacgtagtgagcgaggaagcggcgnnnnnnnnnnnnnnnnnnnnnnnnnnnnnnnnnnncagtcgacggtaccggacatatgcccgggaattcggccattacggccgggggttgcgtcccatatctggacccagaagggacttccctgctcggctggctctcggtttctctgctttcctccggagaaaataacagcgtcttccgcgccgcgcatggagcctcccggccgccgcgagtgtccctttccttcctggcgctttcctgggttgcttctggcggccatggtgttgctgctgtactccttctccgatgcctgtgaggagccaccaacatttgaagctatggagctcattggtaaaccaaaaccctactatgagattggtgaacgagtagattataagtgtaaacaaaggatacttctatatacctcctcttgccacccatactatttgtgatcggaatcatacatggctacctgtctcagatgacgcctgttatagagaaacatgtccatatatacgggatcctttaaatggccaagcagtccctgcaaatgggacttacgagtttggttatcagatgcactttatttgtaatgagggttattacttaattggtgaagaaattctatatggtgaacttaaaggatcagtagcaatttggagcggtaagcccccaatatgtgaaaaggtttcgtgtacaccaactccaaaaataacacatggaaaacacacctttagtgaaagtagac

SEQ ID NO: 94244 - DNA, 964 bp, Homo Sapiens
  misc_feature (64)..(72): n is a, c, g, or t
  misc_feature (859)..(893): n is a, c, g, or t
cacaatttcaaagtcctaaaccttgaaaaatttacctcaccgtaaattatctaaattataattnnnnnnnnnctttctaagacaaaataaacaaatgtagaccgtgataatcaaaggattattaaagaatcttttacccaaaaatttcaaaccctacaacctaaacgcaaatttctaatttttaaacatcagaaaataactcttggttcattacttatgacccaaagtttttactttcactattcaatatctgacaaagtatcatgtattttccctgaaccgccccctctggatggctgattctaagtatctcagcccaaaaaaacacaacttttttacaacaaaccactaagtttctccactatgactctcagttacgaaaactacttaaagatatgcacttagaaataaccttaaaaattactcttataaccagtgacaaattaattcttcatgaccagcagcatctacgaagcttaaaaactcttaatcttttcggtggacatgtctatatttgactatatagacaatacagaatatgaattactcagcttaaccatatgtacaataaaatacattcacgtggcataatctctaagataacaattatctagaaagcgtgaagcattacttgattggccatgtggcaagcgacaggcacaaaacaaatgttccaagtcaatacggaaaaacctcagagctgtacaatctttatatgctgtactacacacctgtattctgggcacttatgaatgttaaggaaacctgtcttaaaagttaactaggcttaaaaaacctcaaacgagagcccggccgtaatggccgaattcccgggcatatgtccggtaccgtcgactgnnnnnnnnnnnnnnnnnnnnnnnnnnnnnnnnnnncggccgcttcctcgctcaatactcgctgcgctcgtcgttcgctgcaaaagctagcgccctatagtagtcta

SEQ ID NO: 94245 - DNA, 966 bp, Homo Sapiens
  misc_feature (83)..(117): n is a, c, g, or t
  misc_feature (369)..(377): n is a, c, g, or t
aaatgtatagactcactataagggcgctagcttgtcgcaagcgaacgacgagcgcagcgaagtagtgagcgaggaagcggcgnnnnnnnnnnnnnnnnnnnnnnnnnnnnnnnnnnncagtcgacggtaccggacatatgcccgggaattcggccattacggccgggagagaattccttatttgtaaattggaagtttgctactatgccttacagagcttaaattcagaagtttgtgcctctatatctgatagacataagggaaataactaggcacccatgtcaaaagtaaatagaatctcctagaagtttattgtattttaacatttccatataaagagctctgttgaatgtcatgaatagagctggnnnnnnnnnttttaagaacctgcatatgttgtttacataggcagacttgacatatctagcaagaaggggaaatcgtggatagagacgactgtacagatagcttttggtaatctgttatctatgtatcttttctgtggggaaataaatattgaagtcgtgagtataggggccattattttataaataaaagggtggtattggtgcaggtgtaaaagggggagcagtaggtataacaaccttttttatttcggggataatgtttattggatatctttatagtcttgtggaaagcgtgcgtatcagagagggtgtttaacgcgacaaaacgcgtgggtggatgtttctaagaaagcaacttttcctttttcacccagggcgcgcctagcgtgttagattgttggtataaaggatgttcttagagagttggcatccttatagaggtgtatgggcagacatgttgtgggtgtggaaaaaacggcaattgttagagagttgggcggggggaacttatgagggggctccaaagaaacgtgcaactgttgtattttgggggaaaggagacaaaatttatagagttacaggtggggtagagaaaaat

SEQ ID NO: 94246 - DNA, 868 bp, Homo Sapiens
ggtttggagtacaacaagtgttggcgttgcgtggcaccggttgccatagttgtgttgcgaaggcggtgtgccgaatccggcgtatagctttggcgccatgccttactgatgcactttatttgcatcagttgtcaggtataatgtgacaagtaccggtcggacacttggacatcaagatagtttgtgtagtcctataagtttagtgtccccttagccgggattaccttgttaaaataggcctggctagtgtatctcccttttggatacaagttttacgtgttcttcagattccttttgtagttgtcatctgctagtaagacacatatgcaggttcttaaaatgtttggttttccagtctattcatgacattcaacagagctctttatgtggaaatgttaaaaacaaaaacttctaggagatttatttacttttgaatgggtgtgttatttccctttgtttcagatatgaggcacaaacttctgaatttaagctctgtaaggcatagtagaaacttccaatttacaaataaggaattctctgggggttagaactgccatgtcacgcaaaagggaaaaatcatctgtaaactggtacactgcaatgtgttaagtgagtcatgaaatggctgcttgccttggtatgctgaagaaaggtttctgtgttttatgtttttgtttttgaataagacatgcccaagtcaccataaaactcaccacaggcctccattacctaagcatcaacataggaggccagtggcacacgcttataacgcttgcatcacatataatataaagcatgagtaaactttgtttttacgacgcgtgggtcgacgatatcccggaattccggaccgtaccagcctgctttt

SEQ ID NO: 94247 - DNA, 1143 bp, Homo Sapiens
  misc_feature (41)..(84): n is a, c, g, or t
  misc_feature (87)..(121): n is a, c, g, or t
  misc_feature (1096)..(1096): n is a, c, g, or t
caaagccattgtatagactcactatagggcgctaggttcannnnnnnnnnnnnnnnnnnnnnnnnnnnnnnnnnnnnnnnnnnncgnnnnnnnnnnnnnnnnnnnnnnnnnnnnnnnnnnncagtcgacggtaccggacatatgcccgggaattcggccattacggccgggggagtggaggcgcgtcgcgagactatgcaaggcgacgcgcatgttcggcggcgagatccttatccgagaaagcgagagatgctctggcgcgggcggagccacagaacagtccagaggatgcccaacggatgggttaacttcttgtattacccgtgaaggtcttcagcttcactctcgggtgctgggactttctgctgatgcgcgtgcgacgacgattggctcgaggtactgtgagactcgaccgggccaggtgtagggctgtaggactgatggagtccgctgtggggatggagagggacagggggggtattcgggccaggaacttgtatataattctgctcgaactaaacgagaagacgacaaatggcggcagtagcagttaagagtgtcgtgggacatgaggtgcagggaacaccgaatcttcccgtcgtaacacggccgctcggtctctagatgtttctgtttaaatcgtcgtagccctagtctagagcgccggcttaggggtcaggcccgggttcgagtcccagccttcgccgctgcgtcgagtgacttaacctctcctagcttcagtcacctgcagattgagagtctactactttttactgcgtcagaacttcctattccttagctgcaaaataggcagaaagtaagcataaaatccttgtctcaaagaattgagaagcgttaaactaagagaacccggtaaaaacatcgatcacacaggttgttgtagacatacaacaaaatttagttccctttaaaacacgtagtttgccaccatcttaatgataacagcagccaacatttagataggacttatgtggcagatgctactgtaagtgcttttatgtattacatagaataactcatttaatagtcacgatatccttatgaggtaagtactattatccctattttatatatnaggaaatcgagggcctggaggattcaaataacttggcagttacacag

SEQ ID NO: 94248 - DNA, 1221 bp, Homo Sapiens
  misc_feature (53)..(104): n is a, c, g, or t
  misc_feature (855)..(855): n is a, c, g, or t
  misc_feature (940)..(940): n is a, c, g, or t
  misc_feature (1074)..(1074): n is a, c, g, or t
  misc_feature (1083)..(1083): n is a, c, g, or t
cagtcgacggtaccggacatatgcccgggaattcggccattacggccgggggnnnnnnnnnnnnnnnnnnnnnnnnnnnnnnnnnnnnnnnnnnnnnnnnnnnntataaaataataatgatggctgatcctgcaaagaggcggcggtgacatcaaacagtgactcagtctctatgatggtattagtaactggacagacctgactctgcctattgtatctatcaacgttaatgttccgacaataagacttgtcaagatctcgaggaaagaatgacaaatcaccttccaggcatgggttcaacgttaagaagctgaacactagtgtcttcgtatcagctcaaagagaggtttcgatagtgtcgtggcttccttgtgtattggttgaggaactgtgccttggcatgcggtgcaggggtagtcttgagaatgggtcaactgatggagggggagtggaagacattggttgcccaagaaatatatgtgcaacatctgtccatcactgcaactccggcctgattatcatctcttctgcttctgtaagcaccaatgagacaagtgccactgaaacacattctttgtagcctgtcagtgatttcccaccactgcgccaccgctgtatatgctaagtgaggaagcccagggtttagtgtggctgaaatagacttttcaggcacaatacagtgggtcaacaatctcagactctgtacagcggctcagcctgctctgtgagaggctcctctttcggacgggtccttcctcacaccttttctgtgagtgcgtctgtgcttaaggaagggcaattaaccatctggctgcttgtcccctggagaaattgacagaacatcaaacagaatanactcataccttgaaaactgccaagtggcacatgactgtccggttcactgtggggagaagccactaaccaatggtctgaatctaanaatgacccagtggcaccggtttgtagtaaaactttgaagatagaactccatgcaaattctgactccatagtgctgggttcttgatgtaaatctccccatgtaactggtcaaggtttaaaaatatcttaccgtanggtgttcanaaatcataaaggtcctaaaaattataaaaatggttaaccggccagaagtattttttcatcctttgtcctaaccgaaaaaagaggaattttgcctccataataagcccttcccaatatttaattggtattggcaattcc

SEQ ID NO: 94249 - DNA, 923 bp, Homo Sapiens
  misc_feature (484)..(484): n is a, c, g, or t
  misc_feature (630)..(630): n is a, c, g, or t
cagtcgacggtaccggacatatgcccgggaattcggccattacggccggggacccactggaaggagaggccaggcggaagaccctggctccgtcatggcctctgccctgaggccaccccgtgtccccaagcctaagggtgtcctgccttcacactactatgagagctttctagagaagaaggggccctgtgaccgggattacaagaagttctgggcaggcctgcagggtctcaccatttatttctacaatagcaatcgggacttccagcacgtggagaagctcaacttgggagcatttgagaaactcacagatgagattccctggggaagctcacgtgaccctggcacccacttcagcctgattctccgggatcaggagatcaagttcaaggtagagaccttggagtgtcgggaaatgtggaaaggcttcatcttaacggtggtggagctccgtgtcccgaccgacttgaccctgcttcctggngcacctatacatgatgtctgaagtcttggccaaagaggagggcgcgccgtgcactggagacaccctcgtgctttcctgaaggtgagccggctggaggcacaactgctcctggagcgctaccccgagtgcgggaacctgctgctgcnggccaaccggggacggcgcccacgggctgttcggccaccacgccggcaaatgaccacgggaacccaccgtggtccggcattacaaaggggaaaccggaagggcccccaagtaacgggatccaagggggaaacaacccgttttctttgaccctccccgggaaccccggggggccaatatttttctggtcgcgatacccaaaaagggggtggggggccatttccggtttttaaccgggggcttccccaaaagggggcttaggccttcccggggaaccccaattagggggaaaagg

SEQ ID NO: 94250 - DNA, 669 bp, Homo Sapiens
cagtcgacggtaccggacatatgcccgggaattcggccattacggccgggggtcttcatttatgccaggtaaactgtatttgaactatgtgcagctagcttgttttaatctgcttggcaaccagtgtagctgctgtaacaatctatcttattgttcaaatatataagagccaaactcttttccattccatctaaaatgttttcatttagtactcttctttcctcctactctatgaacttcaaaacaaaaacaaaactttgagagcagcacatgcatccaggtatttatagattattgccagtgtcttttctgtatgctataagcaagggagcttaggtgttatttctttaatttatgcttgaatctgaaaaattatttctgacttactccatggcctccttataataagtagaagttttatatataattaattttcagcatgggcactgaattaggacagtcctcatctcattgcttggcccttcaagcaacctagctaaaaggtgctgatattttatttagtactgccaacttcaagtgatttagatatctatctatctatctagatttctgaaccaagatatatttatagttcacttttgggtttttatacccacggtaggattctgcattccagcattaaatctgcttcattttagaacctttata

SEQ ID NO: 94251 - DNA, 607 bp, Homo Sapiens
  misc_feature (42)..(76): n is a, c, g, or t
aacgacgagcgcagcgaagtcagtgagcgaggaagcggccgnnnnnnnnnnnnnnnnnnnnnnnnnnnnnnnnnnncagtcgacggtaccggacatatgcccgggaattcggccattacggccggggggcagcagagacctgctctgccaagttgtccagcagcagagtggccctggcctgggcatcacaagccagtgatgctcctgggaagaccaggtggcaggtcgcagttgggtaccttccattcccaccacacagactctgggcctccccgcaaaatggctccagaattagagtaattatgagatggtgggaaccagagcaactcaggtgcatgatacaaggtagaggttgtcatctgggtagggcagagaggagggcttgctcatctgaacaggggtgtatgtcattccaggccctcagtctttggcaatggccaccctggtgttggcatattggccccactgtaacttttgggggcttcccggtctagccacagcctcggatggaaagacttgactgcataaagatgtcagttctccctgagttgatggataggcttaatggtcaccctaaaaacacccagcatatgcttttcgatggaac

SEQ ID NO: 94252 - DNA, 892 bp, Homo Sapiens
  misc_feature (45)..(83): n is a, c, g, or t
  misc_feature (86)..(120): n is a, c, g, or t
gaaagatcgtatagatcactataggggctagcgtccgtcatagtnnnnnnnnnnnnnnnnnnnnnnnnnnnnnnnnnnnnnnncgnnnnnnnnnnnnnnnnnnnnnnnnnnnnnnnnnnncagtcgacggtaccggacatatgcccgggaattcggccattacggccgggggggcggggctgggcgcaggcagtctcccgccgccgccgccgctgccggacgcgcagagcgaggggcggctggaccgacggctgccgggccgagcgcacagagtcgcggcgcagggggcgtccccggccgggacgcgggtcgcgtcgttgtcctccgcgagcgtccggattgcaggctgtctgtccccagaccccagagcacgtccggcaccaccatgactgggctgttgaagaggaaatttgaccagctggatgaggacaactcctcggtctcctcctcctcctcttcctctgggtgccagtctcgctcctgctccccaagctcttctgtctcccgtgcctgggactcagaggaggaaggcccctgggatcagatgcccctgcctgaccgtgacttctgcggccccagaagtttcacccccctgtctatcctgaagcgggctcgccgggagcgcccaggccgtgtagcctttgatgggatcaccgtcttctacttcccccgctgccagggcttcaccagtgtgcccagccgtggtggctgtactctgggtatggcccttcgccacagtgcttgccgtcgcttctctttggctgagtttgcgcaggagcaagcccgtgcacggcacgagaagctccgccagcgcttgaaagaggagaagttggagatgctgcagtggaagctttcggcagctggggtaccccaggcagaggcaggctgcact

SEQ ID NO: 94253 - DNA, 970 bp, Homo Sapiens
  misc_feature (300)..(356): n is a, c, g, or t
taggtagcgaggcctgggtggcgaattcggcacgaggtgtacatagagttatgaatgaaaatccagtaatgccctaaagcaactttcttccatagggtcaaagctcacttaaggtaaacgtgtgaaaaaagtgactgcagtgtgtttgaaaccacaagctgtttctatgtcataaattaacatcagcttgcaagtctctgaaagaaccactcatttgtaattggtatatatgtcacaacctcccacattcctttagcccatctcagggaattattgaaacgctggcagggttagtttcannnnnnnnnnnnnnnnnnnnnnnnnnnnnnnnnnnnnnnnnnnnnnnnnnnnnnnnnatcatttgtttgctcctgtgtaagcttaatatataatggcagtttggcatctgttcttcgcacatgtctaacccagcagagttatgcaaaaatgatgacttcattttaggtcaaattggctttgttcccagtcctcattgttggtcactttgttcagttctggtgactcattggtgatgttgatgaaactgctcagcctgccagctgggatattgatggcaggtctaggcttcattgttaggtagaagattgaatacttctcactttatacaaatttacattggctattgctcccatgtgttagctagtcttaacatgtttgttatttcattatcttattagctgacatacggagtggtattattagtgtcgtactccttagcgtgagcatgacaattaagttaccttactaacagtgatgagtaaaccatactctgatctaaacccattgttaccaatgatgtggattatgaagttagctgaatctatggtctacatttgaaaaaatagttcaggaattctctactacatttgtaagttacttgcctaataaaagattgggcattatttatgtacttcctcccctttttacattcctaccccaaagtacacaa

SEQ ID NO: 94254 - DNA, 1746 bp, Homo Sapiens
  misc_feature (1550)..(1559): n is a, c, g, or t
cagtcgacggtaccggacatatgcccgggaattcggccattacggccgggggctgggaagcagggaggcctggatattgtttctcctggctctgtgtcctgccattctcgtccctgtgctcagagctctcaagcacccacgatggccttctcaggccgagcgcgcccctgcattatcccagagaacgaagaaatcccccgagcagcccttaacactgtccacgaggccaatgggaccgaggacgagagggctgtttccaaactgcagcgcaggcacagtgacgtgaaagtctacaaggagttctgtgacttttatgcgaaattcaacatggccaacgccctggccagcgccacttgcgagcgctgcaagggcggctttgcgcccgctgagaagatcgtgaacagtaatggggagctgtaccatgagcagtgtttcgtgtgcgctcagtgcttccagcagttcccagaaggactcttctatgagtttgaaggaagaaagtactgtgaacatgactttcagatgctctttgccccttgctgtcatcagtgtggtgaattcatcattggccgagttatcaaagccatgaataacagctggcatccggagtgcttccgctgtgacctctgccaggaagttctggcagatatcgggtttgtcaagaatgctgggagacacctgtgtcgcccctgtcataatcgtgagaaagccagaagccttgggaaatacatctgccagaaatgccatgctatcatcgatgagcagcctctgatattcaagaacgacccctaccatccagaccatttcaactgcgccaactgcgggaaaagacctgactgccgatgcacggggagctgaaaaggggagctatactggcctcccatgccatgattaaaatgggggtccccatctgtggtgcttgccgacggcccatcgaagggcgcgtggtgaacgctatgggcaagcagtggcatgtggagcattttgtttgtgccaagtgtgagaaaccctttcttggacatcgccattatgagaggaaaggcctggcgtattgtgaaactcactataaccagctatttggtgatgtttgcttccactgcaatcgtgttatagaaagtgatgtggtctctgctcttaataaggcctggtgcatgaactgctttgcctgttctacctgcaacactaaaataacactcaagaataagttttgtggagtttgacatgaagccagtctgtaagaagtgctatgagaaatttccattggagctgaagaaaagacttaagaaactagctgagaccttaggaaggaaataagttcctttattttttcttttctatgcaagataagagattaccaacattacttgtcttgatctacccatatttaaagctatatctcaaagcagttgagagaagaggacctatatgaatggttttatgtcatttttttaattaaaaaagaaaaattcatataatcgtgtttaaaacacaaatgaagtcagtatttgcctttgttaacccttatccatttgttgacatgtagactgtttacnnnnnnnnnncacatggttaaatgttaaattttaattaaggcccccaaaaattaaatataactttttaaaatgaaaggagtcaccttttacatgactcaggtgaaaaaacagtataaacattaatttactttgtgttcaaaagaaaattccaactgctgttggggaaggacacagaaaagaaaaataaccacccaag

SEQ ID NO: 94255 - DNA, 823 bp, Homo Sapiens
  misc_feature (411)..(420): n is a, c, g, or t
tccaacaaacaacatggttaaactaaatgaattcccaacaaggagggaaaataattaacagtatggatttaaaaacagtcaaatctattgtcaatcgagtgttataaacagtcagtaaaagaaacccaagatatgaaatacattactacaatacaaggtgcttttttcacacttctacaactggcattagcatccctatctagacctaagatgctatgttgcaatattcaagctagagaagtctacacaatcctccttcaagagaaagacgacaggtcagctaagacaaactccactggtaaaagtggagatcgtgaggaattttttattttgtgcaggactgaaagttaatgcccttgccttttataagtccttttgccatttaatcgtgctaatacattttcactaagnnnnnnnnnncttcacttaagctattaatttaatactgtctgtattgattcctgaattcttgctaatggggcacagtcatttgtgcctcattaatacttcagcatttgctcttgttcaatgacaaattttatataggaaactatcaagaaaggaagcgcaaaattcaagtaaacatttcttctggagcctcttgcttaatctagctgactggaactctgaagcaaattgcaccttgaaaagaaatacagtagataccacggtgtcagggtagtaagggatttagctaccaattcacaaaatagaattttacgaatgtagacagcagtcaaacagcaaaagcaaccttaaagaagtattttgttcccggccgtaatggccgaattcccgggcatatgtccggtaccgtcgactg

SEQ ID NO: 94256 - DNA, 1113 bp, Homo Sapiens
aagtcggaaggagaaccatcttgtaaccagttgcggacaaaatctccccattggggggatcgcactttggagtgtagggaaataaaactgagggagcaaaggggaccttagtttctccccagggtcaaggggcgcggttaaacccgcaaggtgtttgggtgtcccaggaaaggggggaacaatccccccggggccaagcctttttttggggttcccatcaattcgggccagtccttgactcggggcctggtccaactggtgcagaaaggctcccggaggcgagggcctgggactgcgtagactgatggggtggtggggccccggttctcaaacagggcagagcggatccccgccaggggcaacggctcctctaggcccaccaaagtgaataaaggccggtcccagcgattccgagaatcgggagcctcaaagcgcagcgttagggcctccaggagttcgggagagtaaaaggcaccggacccatgctttgcagatttctctgaatccggagtcacaagagctggagactccgcagccccggattcttctcgctccagttccttgggtacgtcggcctgggcacttccatttactacagagtccgcagtatgcagttccctgaggacgctgctgcccgccgcctgggctctcccgtcctcctcagcgcgtggccgccaactcacactgacgttccggccagggttctcgttcgcgcccgccacctgaggtcccgcgatcgggccgccgggccgtacgcagtagaccaggcagagcggggtgcgcgccgcccgtgccaggcagtagagctcgtaacggaaacctttgatgtagttaagcgagtccaggatgaccacgtcgtggcgactcaggcgccgttccacggaggctcgcagagctccacgcaatgccttctcacgggcagaatcgccgtacaccgctgggtcctctgcgcccaggacagctgcgtcgtccaccacgtacaccgcgcggccctcggcagccagcgccacgcgcaactcttcagcacgccggctcttgccgctgtacggcagcccgcaaaacaccacgagcggcatcctctcagggagcgaccattggcaaccgcgctgcgcc

SEQ ID NO: 94257 - DNA, 558 bp, Homo Sapiens
agatgattgaaggaactactgactgtgctcttagcacattctggactctgaatggagccataccacctacaggaattctggacctgaactgctgagttaggagtaggaccagcctgtgggggtggaggtaacaaggcctcattcactgaaacattcaccccatgacctctcttaatgaatgaataaatgactagttctttaatgggcacctgaaaaaataataagaacttcctcttggctgtaaagcattgatacatcatgaattatatgatgcattctcaaatatgtgttgatgctacaatgagctacatgtactttgtcaaacattgactgtatagtttctttctcttaggaggacctagaagcattcttgggaaaagatattgaggcttctgtttttgtggcgaataataaaggagataaaaattataactgttaaacccttttttaaaaaggtaaaatttcaattattgtgaagtatcataccttaaatagttcaaagagcatatgatggaggtgagaaggaacatacacgatgtgaattggttggtctggaaa

SEQ ID NO: 94258 - DNA, 1102 bp, Homo Sapiens
taatatgaacaggtttgttacaaaaagcaggctggtacggtcggatatcccgggatatcgtcgacccacgcgtccgcggacgcgtgggccctgacaaactcaaaaggatgagcaagtctgttccagcatttctccaagatgagagtgatgacagagaaacagatacagcatcagaaagcagttaccagctcagcagacacaagaagagcccgagctctttaaccaatcttagcagctcctctggcatgacgtccttgtcttctgtgagtggcagtgtgatgagtgtttatagtggagactttggcaatctggaagttaaaggaaatattcagtttgcaattgaatatgtggagtcactgaaggagttgcatgtttttgtggcccagtgtaaggacttagcagcagcggatgtaaaaaaacagcgttcagacccatatgtaaaggcctatttgctaccagacaaaggcaaaatgggcaagaagaaaacactcgtagtgaagaaaaccttgaatcctgtgtataacgaaatactgcggtataaaattgaaaaacaaatcttaaagacacagaaattgaacctgtccatttggcatcgggatacatttaagcgcaatagtttcctaggggaggtggaacttgatttggaaacatgggactgggataacaaacagaataaacaattgagatggtaccctctgaagcggaagacagcaccagttgcccttgaagcagaaaacagaggtgaaatgaaactagctctccagtatgtcccagagccagtccctggtaaaaagcttcctacaactggagaagtgcacatctgggtgaaggaatgccttgatctaccactgctaaggggaagtcatctaaattcttttgttaaatggtaatagtattgatgactctgtctgcaacagttctgtagcctggtctttgctgtaccatccttccagatacaagtaggaaaagtcgccagaagacaagagctgtagggaaaaccaccaaccctatcttcaaccacactatggtgtatgatgggttcaggcctgaggatctgatggaagcctgtgtagagcttactgtctgggaccatgtacgagaa

SEQ ID NO: 94259 - DNA, 1186 bp, Homo Sapiens
catcgatgttaccgccaccaacagccaggtttcaccctgctgcaccatgcctccctcaagggtcacgcgctagctgtgagaaagattctggctcgggcgcggcagctggtggacgccaagaaggaggacggcttcactggcgctgcatctggctgccctcaacaaccaccgcgaggtggcccagatcctcatccgggagggccgctgtgacgtgaacgtgcgcaaccggaagctgcagtcccctgctgcatctcgccgtgcaacaggcccacgtggggctggtgccgctactggtggacgctgggtgcagtgtcaacgccgaggacgaggagggggacacagccctgcacgtggcgctgcagcgtcatcagctgctgcccctggtggctgatggggccgggggggacccagggcccttgcagctgctgtccaggctacaggcctcgggcctccccggcagcgcggagctgactggtgggcgcggcggtcgcctgcttcctggcgctggagggcgccgacgtgagctacaccaaccaccgcggtacggagcccgctggacctggccgccgagggtcgcgtgctcaatggcccttcaggggctgatgcccagcgcttccgggagcggcaggcgggcgggggcgcggccccgggccccaggcaaacgctcgggaacccccaaaaccgtgacggaacctgcacgtgggagccgcgccggggcccgaaggccgctgagtgcctggtgtgctccgagctggcgctgctggtgctgttctcgccgtgccagcaccgcaccgtgtgtgaggagtgcgcgcgcaggatgaagaagtgcatcaggtgccaggtggtcgtcagcaagaaactgcgcccagacggctctgaggtggcgagcgccgcccccgcccccggcccgccgcgccagctggtggaggagctgcagagccgctaccggcagatggaggaacgcatcacctgccccatctgcatcgacagccacatccgcctcgtgttccagtgcggccacggcgcatgcgccccctgcggctccgcgctcagcgcctgccccatctgccgccagcccatccgcgaccgcatccagatcttcgtgtgagccgcgccgtccgccgcgcccgagctgccttcgcgtgcccccgccctgtgttttataaaaagaaagattctcggaaaa

SEQ ID NO: 94260 - DNA, 1133 bp, Homo Sapiens
  misc_feature (786)..(849): n is a, c, g, or t
cagtcgacggtaccggacatatgcccgggaattcggccattacggccggggtctacaagctagacggtcttcttaaagcaccaacattacttgagtctttggataaaattgagaaaagagtctacaagtattgtggactctacaggaggcaggaggctgacaactggcagtaaagacaaagatgtcaggcctgcggaccggcactcaagtggaccctgagattgagctttttgtaaaggctggaagtgatggagagagtattggaaactgtcccttttgccaacgccttttcatgatcctctggcttaaaggagttaaatttaatgtgacaactgttgacatgaccagaaagcctgaagaactaaaggacttagccccaggtaccaatcctccgttcctggtgtataacaaggagttgaaaacagacttcattaaaattgaggagtttttagaacaaaccctggctcctccaaggtaccctcacctgagtcccaagtacaaggagtcttttgatggtgggctgtaacctctttgccaagttttctgcatacattaagaatacacaaacaggaggcaaataagaattctgaaaaatctctgctcaaagaattcaagcgtctggatgactacttaaacaccccacttctggatgaaattgatccagacagtgctgaggaacccccagtttccagaagactattcttggatggggaccagctaacactggctgattgtagcttgttacccaagctgaacattattaaaatagggtcttgctcttgtcannnnnnnnnnnnnnnnnnnnnnnnnnnnnnnnnnnnnnnnnnnnnnnnnnnnnnnnnnnnnnnnctcccaacccaactcttgaagtagctgggactacaggttgctgccaagaaatatcgtgactttggacatccaggcagaatctcaggagtctggggttatcttccacaaatgctatgcccgtgtaagaattttcccaccgtggtctggaaacaagaaattgacactctttcgcaattgttgtaaacgacacatttgaaacctctcagggaacaggctactgtgaccgtttttcttgactttagaaggttggcgcttaaatgtcaatcgttctttcatctttttaa

SEQ ID NO: 94261 - DNA, 1216 bp, Homo Sapiens
cagtcgacggtaccggacatatgcccgggaattcggccattacggccggggagagcttgtggaggccatggggcgcgtcgtcgcggagctcgtctcctcgctgctggggttgtggctgttgctgtgcagctgcggatgccccgagggcgccgagctgcgtgctccgccagataaaatcgcgattattggagccggaattggtggcacttcagcagcctattacctgcggcagaaatttgggaaagatgtgaagatagacctgtttgaaagagaagaggtcgggggccgcctggctaccatgatggtgcaggggcaagaatacgaggcaggaggttctgtcatccatcctttaaatctgcacatgaaacgttttgtcaaagacctgggtctctctgctgttcaggcctctggtggcctactggggatatataatggagagactctggtatttgaggagagcaactggttcataattaacgtgattaaattagtttggcgctatggatttcaatccctccgtatgcacatgtgggtagaggacgtgttagacaagttcatgaggatctaccgctaccagtctcatgactatgccttcagtagtgtcgaaaaattacttcatgctctaggaggagatgacttccttggaatgcttaatcgaacacttcttgaaaccttgcaaaaggccggcttttctgagaagttcctcaatgaaatgatttgctccctgttatgagggtcaattatggcacaaagcacggacatcaattgcctattgtgggggcggtgtcactgtacctgtctgatactgggccttgggcagtagaaggtggaaaataaacttgttagctcagggcttctgcaggcatccaaagccatcttatatctggctcagtactgtacatcgcaggagaaacaagaccaaggtacacaggaaatccaccaacgatgtactgaagggtctaccaattggcactgagactcgatcagactcctatgacatcagacgtgggggcaaccgggatcgaaatgcgaaaactgccaactgaacaccatggcgatcccaaataacacatagcgcacagaagggacggaaacaaccccaaaagcaaaagcgaaaagacacgagaaaagaaaacaggacgcccggaaacacagaacaaaaggacaacaaaacaaacgaccagaagacacacaaacaccacaagacccacaccac

SEQ ID NO: 94262 - DNA, 894 bp, Homo Sapiens
  misc_feature (82)..(116): n is a, c, g, or t
aaaaactgatagactcactatagggcgccacgcgtatagcgaacgacgagcgcagcgacgtagtgagcgaggaagcggccgnnnnnnnnnnnnnnnnnnnnnnnnnnnnnnnnnnncagtcgacggtaccggacatatgcccgggaattcggccattacggccggggttcatgtcatcttcatgatctcaggatagctctatcattccaaacatcgtatccatatctgtggtacaaactggaagaaggaaaaaggaggaagggcaaaaaaccacaggcttctgtcagctgaatttgtaccttcttttatcagaagaacaacagttttcttggaagccccacccagtaatgtttacctacatctccttggccagaactgtgtttaatggctacccgaagctgcagagaggactttggaaaatagagtttttagcccagcacattgcttccaggaaaaccagtgttctgttagcaagtagcactcgatgtatcccaaaaccatcattgaattagtcctttttaaacagaggtccatgttgcggtcttcactgaatctagattcagattaacgctgcagatatttactgagtgctttcagtcataaaccaagcacagtaattgcatggaggaatgtgtatggcaaattacaccgtctgccttcaaggtaatcacaatctaaatagaaaagcagagaaatagctacacaaataactccaataaagtttaataagtattatatatatgatcttagaactgattatgtggactaataagtaaaataatatttgaaatccatcctatgcattacagataatatgtacatcatatccactcctaaggaagaaatctaatggtcagagttcaagaggaaacggtgcaggtaagtgaaggtgcg

SEQ ID NO: 94263 - DNA, 977 bp, Homo Sapiens
  misc_feature (76)..(110): n is a, c, g, or t
tgggcggcctaaagccggtcttgtttttttgagcgaacgacgagcgcagcgaagtagtgagcgaggaagcggcggnnnnnnnnnnnnnnnnnnnnnnnnnnnnnnnnnnncagtcgacggtaccggacatatgcccgggaattcggccctcaagaacgtgcctagaccattcgtgatggctcgacgggcccagatactgtagtgatgaaccctgtgtcgtatctgtatcctaagagatcggcgcaatgacttactgccttggattctcagatgataacaagaatggaccgagggggacgcatgcgtactgatcccacctcccagatggcattccctgggtcattcactggaagtctatcaaacagagagtccactcgtacctcgatgtcagtgtatgctgagccctgatacaagcatttgcctacaggtcctcactctatcagttatacctatttggctgaacccattctttgggcttctcccatatggttccctgcatggtgtaccttgcctccctctctaggagcctttgagtataataaatcctttaatttcatttacctgctccaagtataattcccacagctatgttggagtgatccttgaggaccccacagggagacttactccctcccccatttaccacacagagagttatagatgataagctgattattggtggtggtatgccatcagcagtcaaagaaaagagaatgcccagggttttaggtaagtaggttagtctcagaggatagagaagaaaggcattttgagtttcatgggacaagagtcctttgaactgactctatacatagtgtgtcttaccaaatgtgatatattcagtgattcagaaacaactaaacctaaatctgatcaagactctagctcccaactgccagttttgcaaggacataccaagaacttaggcccatattctaaatgatttgcatggcgaacaaccaagaaaatccaaatgc

SEQ ID NO: 94264 - DNA, 1123 bp, Homo Sapiens
  misc_feature (44)..(78): n is a, c, g, or t
aaccggacgagcgcagcggagtcaatgagcgaggaagcggccgnnnnnnnnnnnnnnnnnnnnnnnnnnnnnnnnnnncaagtcgacggtaccggacatatgcccgggaattcggccattaccggccggggatctcctaccttctcgggcagcgccagtcttagccatccttgcccagccgtatgtggtgctctgatgtgtcacagccttgtaaccagggacgtcgcatgccgaagtgaggcagctcaagttctctcgggtcgtcatggctgtgctacagaatactgtgaacccggagcagctggctggcttggataagtacaagtacagtgctgtggataccaatccactttctctgtatgtcaggcatccattctggaacactatagtaaaggtatttcctacttggctggcgcccaatctgataactttttctggctttctgctggacgtattcaattttctgctaatggcatactttgatcctgacttttatgcctcagcaccaggtcacaagcacgtgcctgactgggtttggattgtagtgggcatcctcaacttcgtagcctacacgctagatggtgtggacggaaagcaagctcgcagaaccaattctagcactcccttacgggagctttttgatcatggcctggataggtggtcatgtgtttactttgttgtgactgtttattccatctttggaagaggatcaactggtgtcagtgtttttgttctttatctcctgctatgggtagattagtttgctttcatcctgtcccactgggaaaaagtataacacaggagattctttttcctgccatggggatatgacattagccaggtgactatttctttagtctacatagtgactgcagctgtgggaattgaggcctggtatgaacctttcccggttaatttcttatatagagacctatttaccggaaagaataatggttggggcataatgggggactctttccaatgaggttataaaactttttcacaaagctataaaaaataacacccttgaaaactccaatcagctcaatgaaagatatgggttccctttatttttctccccaggcttggagggtccatttaggtcctacagccggggattact

SEQ ID NO: 94265 - DNA, 924 bp, Homo Sapiens
  misc_feature (436)..(487): n is a, c, g, or t
cagtcgacggtaccggacatatgcccgggaattcggccattacggccgggggtctctggcggcagccggagcttcttggtgtagtcttcactgctctgtgtcttctgctcctagaggcccagcttctgtggcctcgttaccatgcaggtattgggagatccacagctaacgacgccaggacccactggaagcctagacaatgggaccattgacatttatggatgtggcatagaattctctttggaggagtggcaatgcctggacactgcacagcagaattgatataggcatgtgatgtcgagagaactacagaaacctggttttctccgggtgaagggtattgctgtctctaagccagacctgattacctgtctggacgcaaggaacaaggagccctggaactatgcagagagctgagatggtagctaaacatttnnnnnnnnnnnnnnnnnnnnnnnnnnnnnnnnnnnnnnnnnnnnnnnnnnnnattcaagcaatctccttgctcagctccagaagttgctgggatataccggcatgcggccagccatatctgggctaaattcttcatcgttcaggtagaaccgggttcctcgcatgttggtcaagcgtgagcccggaacgtcctgaactcagctgatcttggccggctgaggttccccaaggtgtcggcatccaggttgaaccggccaccggcccggggccaggtaactacttaagtgctcctaaatgttgacgtgcgtccacacaacacttttacaaccctatagaaaccccaggaagttgcacctgatcaattggcctgggcaacattgggggatcgcagaagacttgttggcgcccagacgacaaggggtcgtccctaaagatgtcctaagcgtcacgtgataagggcagatatatgccagtagtggggagtccacg

SEQ ID NO: 94266 - DNA, 798 bp, Homo Sapiens
  misc_feature (42)..(76): n is a, c, g, or t
  misc_feature (257)..(310): n is a, c, g, or t
acgaccgagcgcagcgaagtgaattagcgaggaagcggccgnnnnnnnnnnnnnnnnnnnnnnnnnnnnnnnnnnncagtcgacggtaccggacatatgcccgggaattcggccattacggccggggtaatttgaagccaaattctcatgctgtttctcattaaaaagaatgagaatttggtccatagttagctttaagttctctcttcctttctttcccttacagttaagggtttggtgggggatggggaggttgnnnnnnnnnnnnnnnnnnnnnnnnnnnnnnnnnnnnnnnnnnnnnnnnnnnnnngcctgtatccaactgcttctttgagtattttcatctagtttaatgtgagtaatagatgctgtgctgtcattgaagtgttcaacattctgttcatttaaacaaaagtgtaattcatacatatatagatacatatcttaattgatttctcaactattttataagtaactggaatttttcattagatcttatacagagaagtattttattaaaaattcaaaagggaagacttttatgtgctcattttgtaatttttgattttaaatatctttacattgtctgccaattaaagtgttttaaacttgcattggaatggactccgaatgtatttttgtggtgttacgttatccgtagatttctagcatgaagttagcctcacgatgctgtgcaaaggattttaaacatatgagagtcactgaaagagtttaaacatctgttcatgttaaatgctctatggattttaattaaagacttgagaatgattttaaaaa

SEQ ID NO: 94267 - DNA, 375 bp, Homo Sapiens
  misc_feature (143)..(173): n is a, c, g, or t
ccgctaaggtctcgtaatatttatatgatatatattcttctaattcatagtcagcaaactttatctatgaagagctagatggtaaatgttttatgctatgtgagccacatatggcctatgtcacatgttattctttcttattnnnnnnnnnnnnnnnnnnnnnnnnnnnnnnnccattcttagcttgagggccatacaaaacaggtctgggaccaaagttgggtgacctctcctctaactgtttcataattagccttgcctttgcggtcaacgtcaactttgctgaatgcacggtaaggataatttggtatttccacatagagatttgcacagggtctatgaatacaagaacagaggttctaaaaatacttgaac

SEQ ID NO: 94268 - DNA, 1048 bp, Homo Sapiens
  misc_feature (379)..(438): n is a, c, g, or t
ggaatcttaaacattttcccaggaaattttatatccagcctttaaaaaggggaggaaagtttctgatgcatgctaccaacatgaatgaacccttgagggcattatccaggtgaataaagccaggcagagaaggataaatgctgtatgattctactcatatgaggtacctagagtagtcaaactgatagagaaagtagaatgttggttgctagaagctgtggggatgggaagatgggaagttgttaatgggtagagtttcagatctgcaagatgaaaagggttctagtgatggatggtagtgatggcttgcaccacaatgtgaatgtactttactaactgcacatttcaacatggttaagatagcaaattttcattgtgnnnnnnnnnnnnnnnnnnnnnnnnnnnnnnnnnnnnnnnnnnnnnnnnnnnnnnnnnnnntcacaggacaaaacaaggtgagaatggtctcatgaaaaccaaagatatagagtgtttctagaatgaaggattcattgaatgctgctaagaaaaagatgagatgaggaatgaaaacatcagggggactaatgaacaggggcactactgctgaaaccatacagtgtctttaagatgcagaagtagggttgaaaccacactgaagtaggtgacactctcttcttccttatccgggaatgagttggttgttggtgatcatcagtctgatccactccaagagagatcgtagcagggtccagtctgtgctctcctgcgatcattcgccatgactagaagttaaaactacacaaacgcgcgatcaaaacccgggacccgcacgcccagatgaccgggacgaggccatacttcacatcttctctcacagactcacaattacgcaacggtcacctcaaacgactttatggcggacactcccggaccttccgctgtccgcccctcctcgtcccttctccccgccggggtgagcctcatccacccagtctcaaccccgacgcagtcagtctcactgccagcccgccggctacgcaggcgcaatcccgggaattccggaccc

SEQ ID NO: 94269 - DNA, 793 bp, Homo Sapiens
  misc_feature (58)..(209): n is a, c, g, or t
cagtcgacggtaccggacatatgcccgggaattcggccattacggccgggcaggcgcnnnnnnnnnnnnnnnnnnnnnnnnnnnnnnnnnnnnnnnnnnnnnnnnnnnnnnnnnnnnnnnnnnnnnnnnnnnnnnnnnnnnnnnnnnnnnnnnnnnnnnnnnnnnnnnnnnnnnnnnnnnnnnnnnnnnnnnnnnnnnnnnnnnnnnnnaaaagaacactgctatagaagaatttacacaccaaattccctgaaagctaaagtattgttccataacttacacttgaggcaatctgctcagtgtgtaaccactttataaaaaataacttaccattgataacctggaaggtggactacttgtaagtagctggtgtttattgattaaaccatggaagttttcatgatacccaagcatgttgctgaaactgatgcatttgaaagagctgttgaaataatgcaaaactttggttttataagaatctactcatgttttaaaagtatttaactctgtagaccacaattatagaaagctcagtaatgctgctaatgacatttgtaaactatatctgtaatgtagtgcaatatttttatatttcactgggagaggcagtagagacatcatagttgtactttagtgcaagtgggggaacactccaaatagcctagagtatagtaaggtacaaagcttcaatgaaaaaagctgtattatattacattactgatgtaatcttgctgccatgctatgtatcaatagctaaaaaataataataaagactaccacagaaaacaagaaa

SEQ ID NO: 94270 - DNA, 1347 bp, Homo Sapiens
  misc_feature (44)..(83): n is a, c, g, or t
  misc_feature (86)..(120): n is a, c, g, or t
  misc_feature (1146)..(1277): n is a, c, g, or t
gaagaatgtatacgactcactatagggcgctaggtcggtttttnnnnnnnnnnnnnnnnnnnnnnnnnnnnnnnnnnnnnnnncgnnnnnnnnnnnnnnnnnnnnnnnnnnnnnnnnnnncagtcgacggtaccgggactttatgcccgggaattcggccatttacgggccgggcaagagggatgtgaaatactgggagatacttagaagggagtcaccacactaataaaatagttgttagacttatgagaaaggtgagagaactcaggttggagtagaatgagaattagaacactcttcaggttcctgatggtttttatgtgaaagacagtgagcagctggttattaccactgaggcaataaagagatactgtgggctttagcagaaacaccagtatatatatttagtttttaaaataaggttttaaaaggaatgttttatttaattgcctacacagaatgaataaagtgatatttatagtaggactctgggtttgtttaggagcacatgcttgcacatgtgtggcttaggaaaaaccactgggaccactagtctaaaatattcataagtaaagatgcaaacattctgaataaagtagaacggcagttgcattgactttctcccacttcgctctacttctgtgtacaacagtccgtagtctttgcacaggatgtgttcttggagacttttcactaactctagaattcaccctatttcaagatttctctccagcccccatagtaataaatctgaagtaggagggatgaggtctccaaacacataaatcttacagccattttagcttgggggcatgttatagttacaaagatcttatagccatatcaatagaactttttctgctttttttctgttaccctcctttgctcatttgactttttttaaacatttagaaacattcccagtttgctgctgtttttcatttacttggcattgtctctaataaaacctagagtgtactctcttctaaataaagaggtcctacattgtggaggttgttcattcttcttcctagcattttagctcatctaacccaacctattttacagttatgggttaagggtcacctcaaaactaatgtcacacttcatgaagaatcggatgacatagaataaaatataaaaaannnnnnnnnnnnnnnnnnnnnnnnnnnnnnnnnnnnnnnnnnnnnnnnnnnnnnnnnnnnnnnnnnnnnnnnnnnnnnnnnnnnnnnnnnnnnnnnnnnnnnnnnnnnnnnnnnnnnnnnnnnnnnnnnnnnggagtgcgaacataaccatgactagttatcaccatctgatagtgcttcctttgcatgtaaatcatgcttt

SEQ ID NO: 94271 - DNA, 1455 bp, Homo Sapiens
  misc_feature (1272)..(1272): n is a, c, g, or t
  misc_feature (1431)..(1431): n is a, c, g, or t
cagtcgacggtaccggacatatggcccgggaaattcggccattacggccgggggccttaacctctgctggtgaccagaagcctgcatttctgcattctgcttaattccctttccttagatttgaaagaagccaacactaaaccacaaatatacaacaaggccattttctcaaacgagagtcagcctttaacgaaatgaccatggttgacacagagatgccattctggcccaccaactttgggatcagctccgtggatctctccgtaatggaagaccactcccactcctttgatatcaagcccttcactactgttgacttctccagcatttctactccacattacgaagacattccattcacaagaacagatccagtggttgcagattacaagtatgacctgaaacttcaagagtaccaaagtgcaatcaaagtggagcctgcatctccaccttattattctgagaagactcagctctacaataagcctcatgaagagccttccaactccctcatggcaattgaatgtcgtgtctgtggagataaagcttctggatttcactatggagttcatgcttgtgaaggatgcaagggtttcttccggagaacaatcagattgaagcttatctatgacagatgtgatcttaactgtcggatccacaaaaaaagtagaaataaatgtcagtactgtcggtttcagaaatgccttgcagtggggatgtctcataatgccatcaggtttgggcggatgccacaggccgagaaggagaagctgttggcggagatctccagtgatatcgaccagctgaatccagagtccgctgacctccgggccctggcaaaacatttgtatgactcatacataaagtccttcccgctgaccaaagcaaaggcgagggcgatcttgacaggaaagacaacagacaaatcaccattcgttatctatgacatgaattccttaatgatgggagaagataaaatcaagttcaaacacatcacccccctgcaggagcagagcaaagaggtggccatccgcatctttcagggctgccagtttcgctccgtggaggctgtgcaggagatcacagagtatgccaaaagcattcctggttttgtaaatcttgacttgaacgaccaagtaactctcctcaaatatggagtccacgagatcatttacacaatgctggcctccttgatgaataaagatggggttctcatatccgagggccaaggcttcatgacaagggagtttctaaagagcctgcgaaagcctnttggtgactttatggagcccaagttggagtttgctgtgaagttccatgcactggaattagatgacagcgacttggcaatatttattgctggccattatcctcaggggagacccgcccaggtttgcctgaaatgtgaagccccatttgaagaaccattcnaagaccaacctgtgctacaagcca

SEQ ID NO: 94272 - DNA, 827 bp, Homo Sapiens
cagtcgacggtaccggacatatgcccgggaattcggccattacggccgggggtggcgcgggccgccgtttccgcaaacagaatcgcgtttggctgtgctgtgttggttcatgaagttttaccatcaagttcaagtaatcataaatggcaaattctgcaaaagcagaagaatatgaaaagatgtctcttgaacaggcaaaagcgtcagtgaattctgaaacagagtcttcattcaatattaatgaaaacacaacagcttctgggactgggctttctgaaaagacttctgtctgtaggcaagtagacatagcaagaaagagaaaagagtttgaagatgatcttgtaaaggaaagttctagttgtgggaaagacactccatccaagaagagaaaacttgatcctgaaattgtcccagaggaaaaagattgtggtgatgctgaaggcaattcaaagaaaagaaaaagagaaactgaggatgttccaaaagataaatcttctactggagatggcactcaaaataagagaaaaatagcacttgaggatgttcctgaaaagcagaaacaatctggaagaaggacacagctcaacagtggctgcccattacaatgaacttcaggaagttggtttggagaagcgtagtcaaagtcgtattttttagctaagaaagtttaataattggatgaaaagtgttctcatttggagaactttttgcacacaggtacgacagaagaaaaaaatgtgatatcacggtttggacctgggatgtggtacaggtggagatttgctgaaatggacaaagggagaattacaagctagttgtacggtatg

SEQ ID NO: 94273 - DNA, 881 bp, Homo Sapiens
  misc_feature (669)..(669): n is a, c, g, or t
  misc_feature (812)..(812): n is a, c, g, or t
ggggtggcgcgggccgccgtttccgcaaacagaatcgcgtttggctgtgctggatgtgtgaacctattgggtactgtacaacttcaagcctcgaaatcagataggcaccaccaacctcatttcctgtttcaccttgattttctgtgataccaaaatctcagcttcacaaagtcattgaaagtgttggttcatgaagttttaccatcaattcaagtaatcataaatggcaaattctgcaaaagcagaagaatatgaaaagatgtctcttgaacaggcaaaagcgtcagtgaattctgaaacagagtcttcattcaatattaatgaaaacacaacagcttctgggactgggctttctgaaaagacttctgtctgtaggcaagtagacatagcaagaaagagaaaagagtttgaagatgatcttgtaaaggaaagttctagttgtgggaaagacactccatccaagaaagagaaaacttgatcctgaaattgtcccagaggaaaaaagattgttggtgatgctgaaagcaatttcaaagaaaagaaaaagagaaacctgaggatgtttccaaaaaataaatcttctactggagatggcactcaaaataagagaaaaatagcacttgaggatgttcctgaaaagcagaaaaatctggaagaaggcacagctcnacagtggctgcccattacaatgaacttccaggaagtgggtttggagaaccgtagtcaaagtcgtattttttacctaagaaactttaataattggatggaaagggttctcattgggagattttttggaaaggtacgaacgaaanaaaaaacgtgatatcccctgttttggacctgggaatgtgggcaaaggcgggaaaattttgctggaaaac

SEQ ID NO: 94274 - DNA, 593 bp, Homo Sapiens
atgtatgaactctttctcatcatcgcacagttctctatttgaaacagcaaatgattcttgggctgaggcgtcggggtggtattcgggctcctccctccggggggctctgcaggaagtagagctgctccggcagcatgctggcgatcttcctccttccctaggacgtgggtactcaggagagggctgacgctccgtttcactttctctctcctttcatgggccataatttttttggtccgagccttgatgttctcccagcacttcttcagctgtttgaaatccggcagggacagctcggctgagagttgcattcgtgggtcagcgcctgcaggtacattgattgcttaagggcaatagttcacacatcacttttcttacattccagcacatatttatacttttctactaaagccagcaggatgctcttttccaattctgagaagtatttggcaggctttataatttcgttgttttgcattttccactgtatttctcctggccgccagatatcctcgtagtcccagctacttgggaacttgaggtaggaggacgtgcctaagcccaagaggtcaagctgtagtgagattccatca

SEQ ID NO: 94275 - DNA, 845 bp, Homo Sapiens
  misc_feature (129)..(311): n is a, c, g, or t
gatgtgcagcatttcacttatttagattcacttaacaaacaaatttttctgctttaaaaatgtcttatgtcccaagtgtactatagcggcatatagagctagctaatctctacaaaccctctgtaggcnnnnnnnnnnnnnnnnnnnnnnnnnnnnnnnnnnnnnnnnnnnnnnnnnnnnnnnnnnnnnnnnnnnnnnnnnnnnnnnnnnnnnnnnnnnnnnnnnnnnnnnnnnnnnnnnnnnnnnnnnnnnnnnnnnnnnnnnnnnnnnnnnnnnnnnnnnnnnnnnnnnnnnnnnnnnnnnnnnnnnnnaacctgttctagacaaatacccaagcaacaactccgcaggcagttacccagtacggctggctacaactgctccatccgtgcctctttttaaagttcaaactcacaggtgactctaaggttatctacttttactcataagtaaaagccctagactggtgctaatgtcaaaccactggcctccactcaggcctccatcttctcatgccctcttaccagtatttaacttctgaggaagacaagtgatgctaaaaacctgaaattccaatgaagccatatgaacagctgttcagttgcacttctaagactttacttagcagtaaaattatagctcatgtgcattattttccagataacttagcttatgagtagcttatacaatttatgaagatttaatattacagataaaatggtaagtgttctttaaaatggggttcaattggaattcacagggctaaataaagattctcaaagtcttcgcaggatacttattagtaattttctgaaggttaatgttcattgatgatgtacttaagc

SEQ ID NO: 94276 - DNA, 950 bp, Homo Sapiens
  misc_feature (122)..(142): n is a, c, g, or t
cagtcgacggtaccggacatatgcccgggaattcggccattacggccggggacatgccaagcgggctgcgcgcgcccctgcccggcccgggagtccctgacgacgcgcgcgcggctgacgcnnnnnnnnnnnnnnnnnnnnncaggtgcgggactttaacccggaggccccgcccctcgggcgtacaaaaccggagcctcgggccgggctgcgtgagggaggagggttcatcatgcctagtggcgtataagaagaccccgccaccggtccctccacgcaccacttcaaagccgttcatctcagtcacagtccagagcagtactgagtctgcccaggacacctacctggacagccaggaccacaagagcgaggtgactagccagtcgggcctgagcaactcgtcggacagcctggacagcagtacccgaccgcccagcgtgacacggggtggagtcgccccagcccctgaggccccagagccacccccaaaacatgcagctctgaaaagtgaacaagggacgctgaccagctctgagtcccaccccgaggccgcccccaaaaggaaactgtcatcgataggaatacaagttgactgcattcagccagtgccaaaagaggagcccagtcccgctaccaaattccagtccatcggggttcaggtagaggacgactggcgaagcagcgtcccctctcacagtatgtcctcccgacgggacacagactcggatacccaggatgccaatgactcaagctgtaagtcatctgagaggagcctcccggactgtacccctcaccccaactccatcagcatcgatgccggtccccggcaggcccccaagattgcccagatcaagcgcaacctctcctatggagacaacagcgaccctggccctagaggcgtcctcgctgtccccacccgagccctggctcgagtactccgtcagttccca

SEQ ID NO: 94277 - DNA, 964 bp, Homo Sapiens
  misc_feature (83)..(117): n is a, c, g, or t
aagaaaatgtagatcacctatagggcgcctgctcttgcagcgaacgacgagcgcaggcgagtctgtgagcgaggaagcggcgnnnnnnnnnnnnnnnnnnnnnnnnnnnnnnnnnnncagtcgacggtaccggacatatgcccgggaattcggccattacggccggggagaggaaattgcggtagtgaccctcgggcctcgccatgaagagccgctttagcaccattgacctccgcgccgtactcgcggagctgaatgctagcttgctaggaatgagagtaaacaatgtttatgatgtggataataagacataccttattcgtcttcaaaaaccggactttaaagctacacttttacttgaatctggcatacgaattcatacaacagaatttgagtggcctaagaatatgatgccgtctagttttgccatgaagtgccgaaaacatttgaagagtcggagattagtcagtgcaaaacagcttggtgtggatagaattgtagattttcaatttggaagtgatgaagctgcttaccatttaatcattgagctctatgatagggggaacattgttcttacagattatgagtacgtaattttaaatattctaaggtttcgaactgatgaggcagatgatgttaaatttgctgttcgtgaacgctatccacttgatcatgctagagctgctgaacctttgcttactttggaaaggttgactgaaatagtagccagcgcacctaagggtgaactactgaagaggggtgcttaacccattacttccctatggaccagctctcattgaacacctgtcttttagaaaatggattctcggggtaatgtcaaagttggatgaaaaaccttgaaacctaaagatattggaaaaaagtactttggtttctcctgcagaaaggcagaagactatatgaaaaacaacatccaaactttcagtggggaaagggaatatac

SEQ ID NO: 94278 - DNA, 1113 bp, Homo Sapiens
  misc_feature (996)..(1030): n is a, c, g, or t
ctcctgggaatgtagtttagtaacttcgcatgtgtaactccctgtttctgatgtatcatcgaatgaagttgaacccaagagttctcatcttcctttggtctcaacaattgttacttcttgtatggacagacacttcgatagagcctttcatctggaatggatcctaaaccatatagcgcaatctttgtgcttcctttttgaagcaaaaccggactaatgtctatcttctccacagacattgaacgtccaaaggtgattgacaaatccagcacaacttaaaatgtccaaggcacaaagtgcatctgcccctgtgggatcgtcatgattgccatgaatacctaaacactggaattgaaatgttgaggttgccatcttgatagttcacccatggaaacttactagaaaccaaagttgactgactgatcactgagaatttcaaactggacaggccgatcacccatacaatattttcttaataactcgaggcaggtatgtaatgttttccttgagggcttattttcatgaaaaagatcaccacctgaacaaaataaaatccacttcattttcctgggcaagtcttaaaatttcatcgagtgttacaaacgtatcatttcctctgactgcatctttctccataaatccaagatgaatatctgttgccaactaatattttaaatgtgttttcatcatcaagtgcatctgcagtactcatttttatggtcagtcaagctcctctgggaccaggttcttctccaagaacccctgggtactgtactcaaatgtcagaaaatgcactcgattccaaattctagaaattcccactgctggactcttcgaagccccacaatcgcgacccaaggctgtcttcttttcgggaagaaagggcaggatccgtgaaaagaaaacaacacggtctgaacttgcctctgagaacccgcagggccccccggccgtaatggccgaattcccgggcatatgtccggtaccgtcgactgnnnnnnnnnnnnnnnnnnnnnnnnnnnnnnnnnnncgccgcttcctcgctcactactcgctgcgctcgtcgttcggaaaaaccgacgctagcgccctatagtagtctatagatttttg

SEQ ID NO: 94279 - DNA, 906 bp, Homo Sapiens
  misc_feature (46)..(80): n is a, c, g, or t
aaaacacggaacgagcgcagcgagccagtgagcgaggaagcggcgnnnnnnnnnnnnnnnnnnnnnnnnnnnnnnnnnnncagtcgacggtaccggacatatgcccgggaattcggccattacggccggggttggctcgccccgcccttccttgtaagatggcggcgcccaggtggagcgcgtcgggcccctggatccggggaaacggccaaggttgcgggagtctcttcactctcgtctcaaagccattttgtgccgctgccgctgcctctacggccataaatgcccagagattagcggagaagctccgagcccagaaacgggaacaagacacaaagaacggagccggtgtccacaaacgctgttacagcggagagtgcaagaaatagtgcggttcacacggcagctgcagcgagtccaccccaacgtgcttgctaaggcactgacccgaggaattctaccaccaggacaagaaccctgtggtcatcaatcaagccctacaggtctccctgtgcatggtggcccctggtggtaccagctctgcatcactgatgtactacctatcctggcaaagatgcttcatggccacaaagcagagcccttgcactctgtgcccaccggctgggacaaggaaaccacaggtgtaatggtgtcggcttgggacaaggacatggcacatcaaggtccaagacgtcgtgtagaacccgtcaggtggatgaagaaggtacatgcggccagccactgcggcagtgtccccccatggcgcatacagacaggaacatcgtggaacatccaccgatcgacgcgagaaaagggaggggcaagggaccagcaagaacacagcaacacagaaagacagtggacccacgaagcaaccgcactggcagaacggaaaaaggagcaaaa

SEQ ID NO: 94280 - DNA, 905 bp, Homo Sapiens
  misc_feature (80)..(114): n is a, c, g, or t
aagctgtatagatatataggggctagcgcgtagtagcgaacgacgagcgcagcgagtcatttgagcgaggaagcggccgnnnnnnnnnnnnnnnnnnnnnnnnnnnnnnnnnnncagtcgacggtaccggacatatgcccgggaattcggccattacggccggggaacagattttaactctgaaaagccatttccagtgtctatagactattgtgagcctggagaagtagcatttagttgggatagctccactagagctgcctgccaaagacttccttccacaggatcttgtcgcaccagcaactgacaggagcttgggagctcgggagcttgggagagggcttatgtttttaataatgtagctgtcagttcgaagcctggaaatgttgaccctcaaagggcataaaatcttgttattttaatttgcatctgggagaatgtctgagcaaggagacctgaatcaggcaatagcagaggaaggagggactgagcaggagacggccactccagagaacggcattgttaaatcagaaagtctggatgaagaggagaaactggaactgcagaggcggctggaggctcagaatcaagaaagaagaaaatccaagtcaggagcaggaaaaggtaaactgactcgcagtcttgctgtctgtgaggaatcttctgccagaccaggaggtgaaagtcttcaggatcagactctctgaaaactgcaaatggaaaggaattcaaaagaatttagattaaacagttaaataaaaagtaggcacagtagtgctgaattttgcctcaaaggctctctttggataaggctgaaacaaatataatcccaagtatctctctccttccttgttggagatgtcttacctctcagatccccaaaatggacttggctaataagaaac

SEQ ID NO: 94281 - DNA, 1061 bp, Homo Sapiens
  misc_feature (68)..(103): n is a, c, g, or t
tatcactataggggctagcgcgtagatgcgaacgacgagcgcaggaagtggtgagcgaggaagcggcnnnnnnnnnnnnnnnnnnnnnnnnnnnnnnnnnnnncagtcgacggtaccggacatatgcccgggaattcggccattacggccggggggatcgggtcggcgccatttggggactgagactggttgtgggggagggaaaagcggcaaaaggggattattcaaagtaccgaaaaccttctcccgggatcaggcgcggcggcacccccaggccaggggcacctctggtggggcagaaggtgattgaattactcagatatgaagatcatcatctaggtttggtgtaaaaggccctggatattttaagtggccattttggatttacagtgtttttggataattttgccccagaagtttattaaaatgggcaagaatcgtctgtgaagtgaattgatagtagtgaacaattcagcaagctacttaaaaagagacccaggcagcatttcttcagtattttggttcaaacggattatataactggttacagtatttcagctggtggtaatttttgcctccccttcccccaccccgttgttggggttcttcagccgaaactgagagacgttgatttgtgtactgagtagtttcagcagtttcaacatgactgagtattgctgaagtttcatggcagtttatttttacctttattgaaagttttaggaatttttgacttcagctctttcatgtcacaatgggacactttttctgaatgaagagattgaaagaatacagagtttttttccttttatcttttatttacgtggaaatttagaatgtgcagttttccggcagcatggtagtattgagatagctatgggtgtctctgtatatgctgatgtttaggaatggctctcagatgtgaaattttctttttgttttggcttttgggctcgtaaattggaatttcatctggagtggaacagtacaacagtgggcaagtacatgggataataaagaagaactttgatcttaaatctaaagaaacttggctaaattcg

SEQ ID NO: 94282 - DNA, 1401 bp, Homo Sapiens
  misc_feature (1270)..(1270): n is a, c, g, or t
  misc_feature (1330)..(1330): n is a, c, g, or t
gcagtaactctaacggtttaaggtagcgaggcctgggtggcgaattcggcacgaggagcgggagcgggtaccgggcgcgggcagagcgcggcggcgcgggtgtgttccagagaacaagccttcagacatttgctatattgacgctgagctgtcaggggactcaggcttatgaggaggtatgttacacaaaacagtgtctagtgaagacgacaagaaagaggggaaaggatcggaaaaagaagctaaaatactatagaaaaccatgagatctattcgatcttttgctaatgatgatcgccatgttatggtgaaacattcaacaatctatccatctccggaggaacttgaagctgttcagaatatggtatctactgttgaatgtgctcttaaacatgtctcagattggttggatgaaacaaataaaggcacaaaaacagagggtgagacagaagtgaagaaagatgaggccggagaaaactattccaaggatcaaggtggtcggacatggtgtggtgtaatgaggattggcctggtggcaaaaggcttgctgattaaagatgatatggacttggagctggtagtaatgtgcaaagacaaacccacagagaacctgttaaatacagtcaaagataatcttcctattcagattcagaaactcacagaagagaaatatcaagtggaacaatgtgtaaatgaggcatctattataattcggaatacaaaagagcccacgctaactttgaaggtgatacttacctcacctctaattagggacgaattggagaagaaggatggagaaaatgtttcgatgaaagatcctccggacttattggacaggcagaaatgcctgaacgccttggcgtctcttcgacatgccaaatggtttcaggcaagggcaaatggattaaaatcatgtgtaattgtcctccgcattctgcgtgatttgtgcaacagagtccccacatgggcaccattgaaaggatggccactagaacttatatgtgaaaagtctataggtacttgtaatagacctttgggcgctggggaggccttgagacgagtaatggagtgtttggcatctggaatactacttcctggggggcctggtcttcatgatccttgggagcggaaacccaacagatgctcctgacctatatgaccatccagcaaaaagaagatattacccacagtgcacagcatgcactcaaactatcagccctttggccagatttacaagtggctggagatggacccccttccatctagtaangccttttcagaagtattcctggtcagtacctggataaaggaaggtggctggggtcttcangctctaaagaggcccattttgaagatgggatttaggggggatgataaaagacccccaacaaggaagaggaa

SEQ ID NO: 94283 - DNA, 969 bp, Homo Sapiens
  misc_feature (18)..(18): n is a, c, g, or t
  misc_feature (41)..(79): n is a, c, g, or t
  misc_feature (83)..(117): n is a, c, g, or t
  misc_feature (212)..(240): n is a, c, g, or t
  misc_feature (310)..(319): n is a, c, g, or t
aaaactatatgacctacntctgggcgctactcgtctgtagnnnnnnnnnnnnnnnnnnnnnnnnnnnnnnnnnnnnnnnccgnnnnnnnnnnnnnnnnnnnnnnnnnnnnnnnnnnncagtcgacggtaccggacatatgcccgggaattcggccattacggccggggtctgttttattgttgtaactatctgagagctggtaagttgagannnnnnnnnnnnnnnnnnnnnnnnnnnnntcatgcttaaaactggttctttccaaggttgcatttttgttaagatctacttaatagttgattggatgannnnnnnnnncccccctccggtctgagggatggttgcttctactgtataccactgttatcgccagtatttaattatatttgtcctggtctgtgaagttgggtaggaagggaagaaagagctctggttggcttttctagattgacaagttagaaatttcaccttaagagttaactgttctttttattttaaagggacaatttggataattgtcaacatttaaaaaccaaactactagatacactagttaagtttcacttcatagtatcttctctcaggaaatgtgcctgcatatgtatacagaggagaaaatacgaggatatatattgctgtagtttcacacccctctgcccttgtaatgtggtcacgggaatactctgcctccactatgagaaaataacccagctgtctcaactaacatgttatgtcattgatcattactatgggtctagaaaagcaggctgctgacacaatatggtttctagtttaaaaatgcaaaggaaaagtatgtgtttcctgtagacataccagtatgtgttgtaactttggtaaaccaaaagttttaacaggaattacagaaaactccccaatttttccgacttaactgatgggtgtgaccacttgatagcttatccaatatccccctcaagttggggatggga

SEQ ID NO: 94284 - DNA, 887 bp, Homo Sapiens
cagtcgacggtaccggacatatgcccgggaattcggccattacggccgggggcggcggctgggcaccgccattttggccggtggccgtgagaacacgctgtgtggctgaaaagtgaaggcaagagctgatttggcctctgtgctcccctccgcaaggggatcgttttctccagaagagctggatattctttcgcccagttatggcagacaagttaacgagaattgctattgtcaaccatgacaaatgtaaacctaagaaatgtcgacaggaatgcaaaaagagttgtcctgtagtttcgaatgggaaaattatgcatagaggttacaccccagagcaaaatagcatggatttccgaaactctttgtattggttgtggtatctgtattaagaaatgcccctttggcgccttatcaattgtcaatctaccaagcaacttggaaaaagaaaccacacatcgatattgtgccaatgccttcaaacttcacaggttgcctatccctcgtccaggtgaagttttgggattagttggaactaatggtattggaaagtcaactgctttaaaaaattttaagcaggaaaaacaaaagccaaaccttggaaagtacgatgatcctcctgactggcaggaagattttgacttatttccgtggatctgaattacaaaattactttacaaagattctagaagatgacctaaaagccatcatcaaacctcaatatgtagaccagaatcctaaggctgcaaaaggggacatggggatctaatttggaaccggaaagatgaacccaagaacccgggccattgtatgtccccaacctttgttttaacccaccttaaaaaaccgaaatggttgaacaaatttttccgagagaaaatttccccata

SEQ ID NO: 94285 - DNA, 1055 bp, Homo Sapiens
  misc_feature (44)..(84): n is a, c, g, or t
  misc_feature (88)..(122): n is a, c, g, or t
cagaatcgtatcgactcactatagggcgctagcgccgtttcttnnnnnnnnnnnnnnnnnnnnnnnnnnnnnnnnnnnnnnnnnccgnnnnnnnnnnnnnnnnnnnnnnnnnnnnnnnnnnncagtcgacggtaccggacatatgcccgggaattcggccattacggccggggagcggacccaagatggcgaccgagttggagtacgagtctgtgctgtgtgtgaagccagacgtcagcgtctaccggattccgccccgggcctccaaccgcggttacagggcctctgactggaaattagaccagcctgattggactggtcgcctccgaatcacttcaaaagggaagactgcctatatcaaactcgaggataaagtttcaggggagctctttgctcaggcaccagtagaacaatatcctggtattgctgtggagacggtgacagattctagccgctactttgtaatccggatccaggatggtactgggcgcagtgctttcattggcattggcttcacagatcggggagatgccttcgactttaatgtctccttgcaggatcacttcaagtgggtaaagcaggaatctgagatttccaaggaatctcaagaaatggatgctcgtcctaagttggatctgggcttcaaggaaggacaaaccatcaagttgtgtatcgggaacattacaaacaagaaaggaggtgcttctaagcccaggactgcaaggggtgggggtctgagcttactcccacccccgccaggaggcaaagtcactattcccccaccatcctcctcagttgccatcagcaatcatgtcaccccacaaccattccgaaatctaaccatggaggcagtgatgcagatatccttttagatttggattctcctgctcctgtcaagacaccagcacaaactccaggtttcggtaagcaatgacttgtggggagacttcagcactgctccagctccgttccaaaccaggcacaaagcatcaactgggtcagtctgaatggcttggcaggctttaggaagatgagataaaatgcctaggcccacg

SEQ ID NO: 94286 - DNA, 918 bp, Homo Sapiens
  misc_feature (533)..(550): n is a, c, g, or t
  misc_feature (805)..(839): n is a, c, g, or t
  misc_feature (842)..(842): n is a, c, g, or t
tctcttcagttgcccactattattgcttatttttccttttcttgtctatcagtcaccttgaaactggtaatctgattcaagttaaacaatgttccttttgaatctagaaaacaagagaaatgcaaagtcattattccctcattctatgcttccatttactctaagaattcagaaacaaacatgtgggtaacttcctgttatcttaaaaaaagaatcatcccttcggtattcccttaactatctggaacttgtactgtcattttataatttaccatgtgacataattgtttgacctgcctcttttatttgatgcatgacttctcagagaacctgttatcaactcactgtgtaaaaccacgatgaaatgaaggataactgatcacaaagaattatgtcttttgagatccaacaaatttacaaattataagagaaaaatgcaattttttaaaaaaggatatccttaaaggactttcctcttagaagccaaaggtaaattatcctatgagttacatgaatttgatgtttcaaatttnnnnnnnnnnnnnnnnnnacaatttccaacaccattttgtagggttttttgttctggtacatttacagcccaattatactctagtaaagaaactatgatattagaaattaactcatcagaacttccaactagatcaaaagcctattaagatctcatgactagatacattagctaacaaaatacaccatgtgtcttagttaatacaaaagaatccttcgttcccccggccgtaatggccgaattcccgggcatatgtccggtaccgtcgactgnnnnnnnnnnnnnnnnnnnnnnnnnnnnnnnnnnncgnccgcttcctcgcttcactgactcgctgcgctcgtcgttcggtagagacgagtagcgcctatagtgatctatacatt

SEQ ID NO: 94287 - DNA, 1069 bp, Homo Sapiens
gccggcccgcgaacgtcacgtccctgcgcgctccctgcactctcccgagctgcgctaggcgggcgccacggctgcccggcgaaggaaaccgaaaccgagtccgggcccgtccctccgcggccccatccgcccggtgcacccggggtcgcgctcgccaggccgcggagcccagagctgcgcgcacgaaccgtgcgccgggagggcgtgggcgtggcgccgaagggtcccgggtcttcgacgcctctgcggcggctcctccctccttgcagttggatccctggcgggtgcggcccggcccggcccgtgagcggcgcacagaatgggccgatgctgcttctacacggcggggacgttgtccctgctcctgctggtgaccagcgtcacgctgctggtggcccgggtcttccagaaggctgtagaccagagtatcgagaagaaaattgtgttaaggaatggtactgaggcatttgactcctgggagaagccccctctgcctgtgtatactcagttctatttcttcaatgtcaccaatccagaggagatcctcagaggggagacccctcgggtggaagaagtggggccatacacctacagggaactcagaaacaaagcaaatattcaatttggagataatggaacaacaatatctgctgttagcaacaaggcctatgtttttgaacgagaccaatctgttggagaccctaaaattgacttaattagaacattaaatattcctgtattgactgtcatagagtggtcccaggtgcacttcctcagggagatcatcgaggccatgttgaaagcctatcagcagaagctcttcgtgactcacacagttgacgaattgctctggggctacaaagatgaaatcttgtcccttatccatgttttcaggcccgatatctctccctattttgcgctattctatgagcacccagcggactacagacggagaccaagctgcctaaccggagaagaccgtcaccctcaccttcaccaacactgcggccgggaccgggaacccgtcccttgccggcggactcccgaccagtgccacccgctacgggaa

SEQ ID NO: 94288 - DNA, 982 bp, Homo Sapiens
  misc_feature (33)..(33): n is a, c, g, or t
  misc_feature (75)..(110): n is a, c, g, or t
aagttatacatcactatagggcgctacgcgtantagcgaacgacgagcgcagcgagtagtgagcgaggaagcggnnnnnnnnnnnnnnnnnnnnnnnnnnnnnnnnnnnncagtcgacggtaccggacatatgcccgggaattcggccattacggccgggcaggtgctcaatcatcttctcctggccaaggctctgaccatgcttagtactggaatagaggtggccaggcccccagcgactcttcttggcctgatgtttgtcctcacaggcatgccacgtggcctgagatgattcagaacaaatcatgctaactttgaatccatccagccacttgcaaatgataatcagaagtcagcttgttcactgttagaaagaaactaacaaaagagaacccagagcaatctagaatctttgagtgcttggctttccaaggatactgcggagactctggccaagctgatgaccttctgaagtgtcactggcaccatatgcaacaagaaccaccattcacttgagtagctaatgggtttggggcctgggacattccatctgaggtccttcctggaacatgtcaattccacagcagaggaccggttgcagcttacccagaaccactcctccaggagagctggatgttttgcgtgcaacaccttgagcactgactgctattgttcaaaaaaagcctttgctgcattcggaggactgcccgtgcctgaggtgacttcctaactatgtgggtctccattagccgaatctatttttgtgccgggtggacatctgtatttgtcaggttgctgtttaaggctcaagtttgctgtgccctctgcagttacaaaacatcttggcctttttaagagttcgcttttataaaatagcttatctgaattaacacaattcccattttctgcgaattcggccccggccttacgaaatggcctgccttgaaaacccgcgcctgggcccgcccctgattctaatcga

SEQ ID NO: 94289 - DNA, 1187 bp, Homo Sapiens
  misc_feature (85)..(119): n is a, c, g, or t
gggggaggaaagatgatcatcatatagggcgctagctctccgagcgaacgacgagcgcaggagtcagtgagcgaggaagcggcgnnnnnnnnnnnnnnnnnnnnnnnnnnnnnnnnnnncagtcgacggtaccggacatatgcccgggaattcggccattacggccgggggacttcccccgggctgagctgcgcagcggggttttggccaaattgggcgagggcacaaaataaccacttaccccttctcaccgaggaagagcgggagaaagggtatggcacagtcacaagggtgggtgaaaagatacatcaaggccttttgtaaaggcttctttgtggcggtgcctgtggcagtgactttcttggatcgggtcgcctgtgtggcaagagtagaaggagcatcgatgcagccttctttgaatcctggggggagccagtcatctgatgtggtgcttttgaaccactggaaagtgaggaattttgaagtacaccgtggtgacattgtatcattggtgtctcctaaaaacccagaacagaagatcattaagagagtgattgctcttgaaggagatattgtcagaaccataggacacaaaaaccggtatgtcaaagtcccccgtggtcacatctgggttgaaggtgatcatcatggacacagttttgacagtaattcttttgggccggtttccctaggacttctgcatgcccatgccacacatatcctgtggcccccagagcgctggcagaaattggaatctgttcttcctccagagcgcttaccagtacagagagaagaggaatgactgcatgaatctacctgagttgctggcattgggaggccagttactggaaaggaatggaaaaaagaagcctccaaaagggaaaaacttctgacaatatgatgctgtgcgagaaatatttacagcacattaagacgatctgtattattaaataaataattttcaaatgttaaacagtattaaatggcacctgattttgtgttaaattttagttccctgttgtttaatgcccccaaaatatgcagacctttgggaatataaaaatattgcacccacatgtcttaatggggctgaatttcagattatttgttacatatacttattatattgattgttgggttttgattttggtgcttgctgctgccataaattgaaaattaatattcaa

SEQ ID NO: 94290 - DNA, 1082 bp, Homo Sapiens
ttttcaagtgaaaggcacagaaatgcaattacagtcctcaaagggttaaatttgacactaccaggttctatgacctttattgtcatggcaacttcaccattttaggatgtctttttatcattgttatttgtgtctttctttactgctaaataatgtctctgagtagtgtgccccactatttcctacaaaagatagcttaacaccaagaacagatgttgaaaataaaggtcagactttgactcacggaaaaagaaaaataacatgcacagatcggacagagagcatataaatatacaaaatatgtgtaagaaaaccaaggtccagagaggcgggccagcaacaaaggaaagactgatttcagaggctcaggccaggcctagtgcagctcgacgacgtttagtgcaatgttccgcggtctcttgcatacctggacgctactgtttctccaactcagtcacatagatcaggtggtcctcgggagacttgccgtgggtcttactaaggtgcagtttgactgcgtgcttgctcgcaaaagtccggttgcagagcttacattggaatgtggagcccaagtcttcctcggtggcccccagtgggcccagagttttgttggtgaggactttcgaaacattctgctgttcttgaatctgattgagtggcagcttggagagatccttcaggctgaagcccaagtgtgtctccaaatgacttatgtatgtagaagcagttctgaactgagaggcacaatcgttgcaaaagaaaacaggatgccctgtgtccaggtctctgttaggaatttccagttccacctgtcctcctcaagctggtacttcacattatgggtccagccagtggcctgcatggtggctcatggagagctccagtaaacttctgagatgtgcaccctgctccctgcgggcccaagtcccagacatgatgtacttgccctctgtggtctcccgcaagctacgagacgaactgggcctgcaaggatgagagaggtgctgcgggttccagttggtctcccggccccccggccgtaatggccgaattcccgggcatatgtccggtaccgtcgactg

SEQ ID NO: 94291 - DNA, 989 bp, Homo Sapiens
  misc_feature (79)..(113): n is a, c, g, or t
aactgaaatcatatagggcgctaccgccttagtagccgaacgaccgagcgcagcgaagtattgagcgaggaagcggcgnnnnnnnnnnnnnnnnnnnnnnnnnnnnnnnnnnncagtcgacggtaccggacatatgcccgggaattcggccattacggccgggggccccgcccgttgcttctgccctccggccttcccgccgccgtcgccgggaccagccgctcggggccgggctgatacagccgcttcaccgtgcccctgcccgcgaccatggcctcctccgaggtggcgcggcacctgctctttcagtctcacatggcaacgaaaacaacttgtatgtcttcacaaggatcagatgatgaacagataaaaagagaaaacattcgttcgttgactatgtctggccatgttggttccgagagtttgcctgatcagctggtgaacagatccattcagcaaggtttctgctttaatattctctgtgtgggggaaactggaattggaaaatcaacactgattgacacattgtttaatactaattttgaagactatgaatcctcacatctttggcccaaatgtcaaacttaaagctcagacatatgaactccaggaaagtaatgttcaattgaaattgaccatgtgtgaatacagtgggattcggtggaccaaagtaaataaagaagagagctaccaaccaatagttgactacatagatgctcagtttgaggcctaatctccaagaagaactgaagcattacgcgtactctctttaccctaccatgaattctcgcatccatgtgtgtctctaccttcatttcaacggacaggccaatctctgaagacatttgatctcttaaccatgaagaaccttgagcagcagggtaaacattatccaggtgatggcaaaagaagatagggttctaaaatgaattacacgaagttaagatcgagtcatgagtgaatggggtcagcatggggtccagattttc

SEQ ID NO: 94292 - DNA, 1202 bp, Homo Sapiens
  misc_feature (48)..(65): n is a, c, g, or t
  misc_feature (929)..(929): n is a, c, g, or t
  misc_feature (1155)..(1155): n is a, c, g, or t
cagtcgacggtaccggacatatgcccgggaattcggccattacggccnnnnnnnnnnnnnnnnnnaaagatggcggagctgatgctgctcagcgagattgctgacccgacgcgtttcttcaccgacaacctgcttagcccggaggactggggtctgcagaacagcaccttgtattctggcctagatgaagtggccgaggagcagacgcagctcttccgttgcccggagcaggatgtcccgtttgacggcagctccctggacgtggggatggatgtcagcccctctgagcccccatgggaactcctgccgatcttcccagatcttcaggtgaagtctgagccatcttccccctgactcttcctcctccctcagctccgagtcatcgcgtctctccacagagccatccagcgaggctcttggggtaggggaggtgctccatgtgaagacagagtccttggcacccccactgtgtctcctgggagatgacccaacatcctcatttgaaaccgtccagatcaacgttatccccacctctgatgattcctcagatgtccagaccaagatagaacctgtctctccatgttcttccgtcaactctgaggcctccctgctctcagccgactcctccagccaggcttttataggagaggaggtcctggaagtgaagacagagtccctgtccccttcaggatgcctccctgtgggatgtcccagccccctcacttggagctgtccagatcagcatgggcccatcccttgatggctcctcaggcaaagccctgcccacccggaagccgccactgcagcccaaacctgtagtgctaaccactgtcccaatgccatccagagctgtgcctcccagcaccacagtccttctgcagtccctcgtcaagccaccccagtggtccccagttgccctcatccagggntgctattcaagtccagccctggaagggcccggctccctctctaccacgggcctggagaggaaaagcatcgttccccgctcctatgcctggaaactcctgcccccccctggaggtggaatgcaagcctgctgaagcgggcagcaccgaatgattcaagaaacgggaagtcaggctgcccaattcccgggagaaaagaaaaaaggaaaatcctggccagggaactggnaggcttccgcttggcaaaccaaatactggggttggaaaacccagcca

SEQ ID NO: 94293 - DNA, 1056 bp, Homo Sapiens
  misc_feature (955)..(955): n is a, c, g, or t
  misc_feature (958)..(958): n is a, c, g, or t
  misc_feature (984)..(984): n is a, c, g, or t
gattctcgggatggcgcacatggccgcagcctcgcctctgcgcgactgccaggcctggaaggatgcgaggctcccgctctccaccacaagcaacgaagcctgcaagctgttcgatgccacgctgacccagtatgtaaaatggaccaatgacaagagtctcggtggcatcgagggctgcctgtcaaagctcaaagcagcagatccaacctttgtgatgggccacgccatggctactggccttgtgctgattggcactggaagctccgtgaagctggacaaagagctggacctggctgtgaagacaatggtggagatttcaagaacccagccgctgacaaggcgggagcagctgcacgtgtctgcagtagagacatttgccaatgggaactttccgaaagcctgtgaactatgggaacagattctccaggaccacccgacagacatgttggccctgaaattttcccatgatgcttatttttacctgggctatcaggaacagatgagagattctgttgctcgaatttaccccttctggacacctgacatccccctaagcagctatgtgaaaggcatctactcttttggcttgatggaaaccaacttctacgaccaggcagaaaaactcgccaaagaggctttatctattaacccgacagacgcatggtcggtgcacaccgtcgctcacatccacgagatgaaagcagagatcaaggatgggttggaattcatgcagcactcagagaccctctggaaggactctgatatgttggcttgtcataactattggcactgggctttatatctgattgagaaaggcgaatatgaggccgcgccgaccatctacgaatacccacatccttcccagcctgcaggccaacgatgcaatgcctggacgtggtggacagctgctccatgctctaccgcctgcaaatggaaggagtgtctgtggggccancgntggcaggatgtcctgcctgtggcccnggagacaaccgaagacacatcctggctgtttaatgagcacactttcctgatggcatccctggggggcaaccg

SEQ ID NO: 94294 - DNA, 753 bp, Homo Sapiens
cagtcgacggtaccggacatatgcccgggaattcggccattacggccgggcaatctgaaaatgaaattaagaaaaccctatatactgaaaactttaaaacataattgaaagaaacaacacctacgttaatgacaaatagtctcatgttcatggattgaaagacagtattatttacatggttgtacttcccaaattaatagagagattcagcacattctttataaaaatcctggctttttttgtagaaattgacaaggtgatcctaaaattcatatggaaatgcaagggatggagcatagccaaaataatcttggaaaatcttggaaaagtacaaagttggaggactcacacttccaaacttattaccaacctacaattatcatgactgtgtggttctagtttaaggatagacacatagatcaatggagtagaattgagagtacagaagtaaactcactatggttaactaattttcaacagtgatgccaagacaatggtgaaagaatagtcttttttgacaaatggtgctaggacaaactagataccacatgcaaaaagaaatgaagttggacccctacctcaaacacacaaatattacaacttacttaccactgtatccaaaaaacttaaccaaaaactataaaactttttaggagcaaacattaccttttcactctttgtataatcttatatcagggttttcacgcacttaacaccaacatccacatgaacaaggaaaaacttgggcgggtc

SEQ ID NO: 94295 - DNA, 806 bp, Homo Sapiens
  misc_feature (648)..(691): n is a, c, g, or t
cgcgagatgtttcttcgccggcccagttttaattcggccgcacacattttgttgttgttctttgtccaaaatcgtaggttaacagccggacagctggcgaaaacgagaagtaagtgaattaagtacctgggaggagcacacatgaaaagcgggtttaagacataccgcccagttataccgttgaacatgaagaatttgtaaccagggactctttcagtattggttttgtaagaccaacaaaataacaagaaaaaggtgggctttgttttttgttgttacaaaggaagaattagagaagtaacaaaggaataaatctgtaaaacctagagtgatgacatattcagagcaatgagaaaatagattccgagtctgataaaccaacaaatgccttaagttctttcatggattattgaactgctcccttacataaggtatgcaccaacatttatggaatgaggataaagtgcacatttcataagtagtattcttgttatttgtgtgggtatgctggtaaaacagaagttaaagttatacatatttcatagtatgtatataacaatatcattttaaaactaattcactaagggggaaaattttatatgcttggaatacaagcagattttagagctacagtgaaatgaattcaannnnnnnnnnnnnnnnnnnnnnnnnnnnnnnnnnnnnnnnnnnncatacagtatttccaagggtattatggttccatcagggaatcccccttttgccgttagtaatgggcatgtttgaaacagtcctggaaaatccatgaacctcagttcagttctgtg

SEQ ID NO: 94296 - DNA, 865 bp, Homo Sapiens
cagtcgacggtaccggacatatgcccgggaattcggccattacggccgggagtttcaattgtttccccacaaaacaaagcaattctttcaagtcagttctgtgatctgggtctctaatctgtgctgtttcaaagttctctgtggcaaagcagcaactattcacaaaatatcaccaaaaacctattccacttacatccaaggcactgtcactacggtgattgtatgaagtttgaatgctgcacgttatgaaatatttggcccgctggattcccacatttgtcttctttctgtctataagactcagggaggctaaatcagtgtttgattgccccgccaacccttcctgaaacttcagaccctgggtaggggaagagaagggggcatgtggtatcctggagcattgtgtatagaactggattttcagacctgctgaggaccgtaaggcctgatggaacacagaactgaactgaggttcatggattttccaggactgtttcaaacatgcccatttactaacggcaaaagggggattccctgatggaaccataatacccttgggaaatactgtatggtttgtctgttgtcggtttacagatttgtcgttattgaattcattcactgtagctctaaaattctgtgtattccaagcatattaaattttccccctagtgaattagtttaaatgatcatgttattactactatgaattgttacttacttctgtttaccgctaccacagtacagatctaatttgaatgtggcttttccatcctagtgggttcctgtgagggcggcaacgaaaactcaggtttgcttcaaaccgcacatttctcgcgaatgcaccggagattctgcctcttctcgg

SEQ ID NO: 94297 - DNA, 977 bp, Homo Sapiens
  misc_feature (43)..(82): n is a, c, g, or t
  misc_feature (86)..(120): n is a, c, g, or t
caagactgtatagactcactatagggcgctagctctttcgtannnnnnnnnnnnnnnnnnnnnnnnnnnnnnnnnnnnnnnnccgnnnnnnnnnnnnnnnnnnnnnnnnnnnnnnnnnnncagtcgacggtaccggacatatgcccgggaattcggccattacggccgggggaggagggacctacaaagactggaaactattcttagctccgtcactgactccaagttcatcccctctgtctttcagtttggttgagatataggctactcttcccaactcagtcttgaagagtatcaccaactgcctcatgtgtggtgaccttcactgtcgtatgccagtgactcatctggagtaatctcaacaacgagttaccaatacttgctcttgattgataaacagaatggggtttcggatcttagcaattctcacaattctcatgtattccacagcagcaaagtttagtaaacaatcatggggcctggaaaatgaggctttaattgtaagatgtcctagacaaggaaaacctagttacaccgtggattggtattactcacaaacaaacaaaagtattcccactcaggaaagaaatcgtgtgtttgcctcaggccaacttctgaagtttctaccagctgcagttgctgattctggtatttatacctgtatcgtcagaagtcccacattcaataggactggatatgcgaatgtcaccatatatcaaaaacaatcagattgcaatgttccagatcattcgatgtattcaacagtatctggatcagaacaaaaattccaaaattccatcgtccctaccattgacctctacaactggacagcacctcttgagctggcaaagaatcgccaggctctccacggactcacggtacagggcgcacaagtcaacacaggacatcgactcatcgtgatgactgaggacgcaggtgataacacctgtcaatcatacacaacgaaaatggagcca

SEQ ID NO: 94298 - DNA, 1028 bp, Homo Sapiens
aaaaaaggaattctgtgtcaagtataactcaaaataaatacaaattcacaagtagaactattgaatacttcatatggggtaaacaccattatctcccaactagatcgctagatctaccaactgcaagcgattgtcccttttgaacgtactaaaaccacacactttcccatcccctgggctcctggccctctgagcacttaattctcaatggcacctggcctgcatggcaggggctttgctgaccacaagagagttccccagttcagccagagccgagtcaaggggagtatggaaggtgggcctcaaagcgggaaccccagcccccaaggtggctggctctgcacagatggcagggcagtggctacctgctgaacagctcactggcaaggtcactttggggtgatatcccaactccccttagcccgtgcagggaagccctggcctccagtggtctggggcctgggttagttttagggtgtgggccccccacctttgcagcacagctggcaggccccaggcatccttgggccaaggtcccccatggccgggtccctggaagggttggcacaggcacgccgcccaccactgcgaacattctctttagcagtgcggtaggatgactgtcagtggcagcttctccttgggacagaagcctgggccggggccaaccccagctcacctcaacaccttggagaagacggggaacaacgtgctcggggagtcctcagtggcagtccccagtggtggcaagggtgtccacagcctgctgcctggcctggagcaaataccttttttaagtgctcagagggtatggcccctcaaatccaccctgcagctccctggctgcaaatacactcactccatcttttcaactcgctccctggacccctggttaacacttcactgtaactcctcagttgtacaaagcattttcatttgaatacaaaaggcaactggacaccagatgggcatccttgagccatggtaaacactgaatttcaggctcatttcttggtctgatttttttc

SEQ ID NO: 94299 - DNA, 1086 bp, Homo Sapiens
  misc_feature (270)..(270): n is a, c, g, or t
acctcaatgttgagttttcataaaacaggtgtataacagtgtttatcttgacagctgtttaaaaaatttaaaatttcttctccctcccagaaaaacacacacatctgtattgggataagtccaatagtaggacacaaatgattttcaggtcagtctttctgagttgacattcaccgaacattccccttgggtaatttacatgctcctcttctgtcactgcaaaaaggggattgaccttaatccatttgattaaaaaacaaaatcagatcnacatcaaaaagtgtttttccccatacaagctatcacagtatataggcctctagctctaaataatagagttccagatttgtaaattttcttcagacttcagaacataggcattccaaatcctgaatcatcttctatgatagctgcagagtcaaagaagtctggccttagctcagctctctctcgccgatttcttgatggaggcagatcaataaccatggtgtcctcaaattcttcattcatatcttctaactggcttcgggatgacatcatcacatcttcaaagatgggctcagcatcttcctccattagaccccgaacagcatgcctcactccagttctcactttcatgtagttcattcctgttctgtccttccgatttaagtcttctaacttcggctggcctaaccaagagatctgcatctgaggattgtgtaaaaagtctggttcagaaccatgttcagactcaggttcttgaatctggtctcccatgggccgactgttctcccgcagtacagtggatgtgagttgtggtgctggcagggggccaggagtctgaatcatggtgtcagtcctgtttagccatgtgttatccagactctcatcttctactcgttttttatgaagtggaggtcgtcctttcttattccttactgatgaggttttgctgctgctacttccactgttcacagacattctatcatcttcacccccagtgactaatgaatttctataggagatgagtggaagccatacatcctccctcctttccatcatctgctcggtaaggaatttctctaggtatgaatgaactgtctt

SEQ ID NO: 94300 - DNA, 1627 bp, Homo Sapiens
  misc_feature (85)..(128): n is a, c, g, or t
  misc_feature (383)..(383): n is a, c, g, or t
  misc_feature (421)..(432): n is a, c, g, or t
  misc_feature (544)..(597): n is a, c, g, or t
  misc_feature (678)..(741): n is a, c, g, or t
  misc_feature (863)..(863): n is a, c, g, or t
  misc_feature (879)..(879): n is a, c, g, or t
  misc_feature (928)..(928): n is a, c, g, or t
  misc_feature (972)..(972): n is a, c, g, or t
  misc_feature (1034)..(1034): n is a, c, g, or t
  misc_feature (1041)..(1041): n is a, c, g, or t
  misc_feature (1097)..(1097): n is a, c, g, or t
  misc_feature (1146)..(1146): n is a, c, g, or t
  misc_feature (1183)..(1183): n is a, c, g, or t
  misc_feature (1189)..(1189): n is a, c, g, or t
  misc_feature (1201)..(1201): n is a, c, g, or t
  misc_feature (1205)..(1205): n is a, c, g, or t
  misc_feature (1325)..(1325): n is a, c, g, or t
  misc_feature (1380)..(1380): n is a, c, g, or t
  misc_feature (1401)..(1401): n is a, c, g, or t
  misc_feature (1422)..(1422): n is a, c, g, or t
  misc_feature (1495)..(1495): n is a, c, g, or t
  misc_feature (1601)..(1602): n is a, c, g, or t
accacacatcacagatctacgatcccacaacgaccaacacaacaccccgaaccgaggcctgggtggcgaatccagcacgagggannnnnnnnnnnnnnnnnnnnnnnnnnnnnnnnnnnnnnnnnnnnagcaggaccattctggctgctgtctggacaagaagtcgtagggggtgagggtggaagctggcgaaacccacaggaggcaaccacactagtttagatcttctggtgaccccacttctcgctgctcatgccgctgggactggggcggcggaaaaaggcgccccctctagtggaaaatgaagaggctgagccaggccgcggagggctggccgtgggggagccagggcctctgggcggaagtgggtcggccacaccccncagccccccagggcgcgcacgcccgccgcgcgctggcnnnnnnnnnnnnagcgcccggccgcccaggccggcgcggaagcgcggcggcgcccaggcggaagcggctccccgggcgtcccgtccgcccgccctccctgccgccgttggtcaccgtgttcgtnnnnnnnnnnnnnnnnnnnnnnnnnnnnnnnnnnnnnnnnnnnnnnnnnnnnnntccccaaccccgccgggcgccggcctccgtcgtacaccatcgccgcgctgccgcgcggctacggcaccgcactaaggggcnnnnnnnnnnnnnnnnnnnnnnnnnnnnnnnnnnnnnnnnnnnnnnnnnnnnnnnnnnnnnnnngcccgggccggattgcatgaggcagttgtgctgaccggggcggggcgctcgacgcgcgtcgagggcgacagcacaacgtaccatgagcctgcgacggcgtgcgtcgcgggcggcgcgccgangatcacggctgggganggcctcgggcccacatgcagaccactgcaccgtcccgccgccgtggcgntgagcgcgcggcggatgcaggcgtgctgcgtggcggtagtccancgcgcccgcccaaagcacacgcccgccactgcctccgcccctctgacacgctcgcagtacanagggcanaaccctcttcgtatggcggtcaccggtcccccaggtgtaagagggtggaatgactnggttcatacgctacggtatagagggggcggtggggggtcgtttaatgcntatggaacgaatgcccccctcgcgggctgcccgagtncttgtnacgatccggatnaggnaagaagggtagagagggggccggagatagcccaagatgaggggacgaggaactcgggtgctaaatgatggtgacgcgcgcggcaccgtgcgacgggcgtagagggccctcacatgggaanaggacgttgtgatgacgcacgtatgcggtgcggtggcgcccgccggctcttcacnccggtgccctgccctgttgtnggtgatgcgcctctatatgtnatccccactacacacctcacctcgccgccacgggtatcgtgcagcgagggtaatccacagcgctgcgtctccntacaacgcttaatcaatcaaaactgtactcttttgaggaacgcgttattgctcgtgcgacgcgagggcgctgcggtcggtattctgtagtgcttttaccggatatnntgtctgtatgtcaatctctgggtgc

SEQ ID NO: 94301 - DNA, 1400 bp, Homo Sapiens
  misc_feature (51)..(94): n is a, c, g, or t
  misc_feature (1057)..(1057): n is a, c, g, or t
ggcctgggtggcgaattcggcacgagggccgagccgggtgcgcacggggannnnnnnnnnnnnnnnnnnnnnnnnnnnnnnnnnnnnnnnnnnnagcagatgaagaaactgaggccctgtgatgtgaagtgacttgccccccagccacacagctggaccattctggctgctgtctggacaagaagtcgtagggggtgagggtggaagctgggaaacccacaggaggcaaccacactagtttagatcttctggtgaccccacttctcgctgctcatgccgctgggactggggcggcggaaaaaggcgccccctctagtggaaaatgaggaggctgagccaggccgtggagggctgggcgtgggggagccagggcctctgggcggaggtgggtcggggggcccccaaatgggcttgcccccgccctaaacttagccatgtccggcaccgaccccgcggcggggagggttgggttccctcacgcaccatagtttcccgtcgaccacgaaaaagccctggctaatatgctgagcgccacccaacccgctttcggggattccataccccctttgccgcgaccttacgaataaatatgtgaaactcccgcccgggagtgtggcgtagtttggtcccctgcggtatcgacagcctccccggggtgtgtctattttaaccccccacgagtaggaacacacctccgcgccggattcccatagaagcgcccgcacccccccaaattggtcggacaccttggcgttcctttcacgcaactcgggtctcacatataatattatgtgggcgtgccgctcgcacataggggtgcttttgctgtaaatcaccctcacgcgcttggcgctgggtaacgccatattctcttatttcgctctccgcactccgctcgtgttccacctgtttatctcatacctatatcgcccggttagggtgaactcaccctcctcctccctctttctatcgctcggacattccgccaccccctcggcccaccgcgcaaatacaaagagaggctcgccctccaccacaccctttgtgtgcccgtcancgtttaaaacgaagaccgcccaccccaaccacactattgtcgcgcacgaccagcctccctctaggcggcgcccctgtcggcggcgctgcgccatcgggcgataaatgtatctgcgaccaccctctttgccaataacctcacacgcgatgaggatctggaatacatgtgcgccgcacccctcttttttttggaccacagggcaccgccgaatcccctctcaaaaagtgggcgatcgtcatgagcgcgtaatacgccctcgccctctgtacagcacgcccgcgctgcccatacgatagaaagccaattgacacgcctgcgtcggcgcggttctttgcttagactt

SEQ ID NO: 94302 - DNA, 855 bp, Homo Sapiens
  misc_feature (45)..(88): n is a, c, g, or t
  misc_feature (91)..(125): n is a, c, g, or t
aaaaagagaatttggaattaacatataggggctagctcgcttggnnnnnnnnnnnnnnnnnnnnnnnnnnnnnnnnnnnnnnnnnnnncgnnnnnnnnnnnnnnnnnnnnnnnnnnnnnnnnnnncagtcgacggtaccggacatatgcccgggaattcggccattacggccgggggggaccgagcgtgacccagctgcggccggccagccatggagactggagcgctgcggcgcccgcaacttctcccgttgctgctgctgctctgcggtgggtgtcccagagcaggcggctgcaacgagacaggcatgttggagaggctgcccctgtgtgggaaggctttcgcagacatgatgggcaaggtggacgtctggaagtggtgcaacctgtccgagttcatcgtgtactatgagagtttcaccaactgcaccgagatggaggccaatgtcgtgggctgctactggcccaaccccctggcccaggacttcatcaccggcatccacaggcagttcttctccaactgcaccgtggacagggtccacttggaggaccccccagacgaggttctcatcccgctgatcgttatacccgtcgttctgactgtcgccatggctggcctggtggtgtggcgcagcaaacgcaccgacacgctgctgtgagggtcccggtgagatggagtggggtcacacctggcaagctggaagaaagttccctggggatgggagagcgggtgggtgctgccaatctccagctactgtgtgcaaccccactggtcatgggcaagacccctcccttcctgggctgacctgtccctcgaggcaagctgttccctggctgaaggcctcaggctatccgc

SEQ ID NO: 94303 - DNA, 1396 bp, Homo Sapiens
  misc_feature (968)..(968): n is a, c, g, or t
  misc_feature (993)..(993): n is a, c, g, or t
  misc_feature (1006)..(1006): n is a, c, g, or t
  misc_feature (1095)..(1095): n is a, c, g, or t
  misc_feature (1344)..(1344): n is a, c, g, or t
ggaccggtccggaattcccgggatatcgtcgaccacgcgtccgcggacgcgtgggtgaccaggagtgagatccaggatgtgaactattcccttgaagctgtaaaggtgaagacagtgtgccagataccattgatgaaggaaatgctaaagcgattccaagtggctgtaaacctagctgaagacacagctcatcccaaactcgtcttctcccaggaagggagatacgtgaaaaatacagcatcagccagttcttggccagtgttttcttcagcatggaactactttgctggatggaggaatcctcagaagactgcttttgtagagagatttcagcacttaccctgtgttctgggaaaaaacgttttcacctcagggaaacattactgggaagttgagagtagagatagtctggaggttgctgttggggtgtgtcgggaggacgtcatgggaattactgatcgttcaaaaatgtccccagatgtgggcatctgggcgatttattggagtgctgctggctattggcccttgataggcttccctggaactcccacccagcaagagccagctctccaccgagtgggggtttacctggatcgtgggactgggaatgtctccttctacagcgctgtggacggagtgcacctgcacaccttttcttgttcttctgtctcacgcctccggccatttttttggttgagtccattagcatctttagtcattccaccagtgactgataggaaatgaggcttttcttcccctgaccaaaactccttccctgtagtccagctgagggacacacatccctgggccctcttctgcccttcatgtctctatcctggatggtccatcttctgggtctccctaacggtaccgtttggtatctgccctttgtgtgcttcacaagaggcagtcccatgggaggtgggtatggccaatggagatgggacaggaaattttccagacgcttntgggaaatctttttgtagcttttanagagatgtgcggngaagacatatggatgttagcagccatattggaactgagaacacaggaatggtggaaaaggtagaagaaacagagttttttgttgccgtntgtgaaattgttgaaatttccttcatgccaagcttcctgttatatgagataattacgccccttatggtataagacaattttagttgtatttggttacttgcagccctgaagtaccgtaactgcactaaagggacgtagtgtgaacatcccgcagtataggcttaagtcacttttgtgaaaatttgacaagcatagaatctttttctatccagtcaggcattgcctattctttccagtactactgattcnccccactttctggcttaaaaaaatgtgggaatcccccctcactctgcctatg

SEQ ID NO: 94304 - DNA, 1290 bp, Homo Sapiens
  misc_feature (94)..(128): n is a, c, g, or t
gggcatgcagtgagactatctcctcattatgggcatcgcgttttgtcgaacgaccgagcgcagcgaagcctaagtgtagcgaggaagcggccgnnnnnnnnnnnnnnnnnnnnnnnnnnnnnnnnnnncagtcgacggtaccggacatatgcccgggaattcggccattacggccgggtcccgaaaacagcagatgttcctggacggtcattactcacaaaagtaacacacttggagatcagctttgacaacaacttcctaatccccagcggtgatggacaatgtcagaatagcttcgtgaaggtgtgggcaggaactgaggaggtggacaaagccctgctagccactggctgtgggaacgtggctccgggtcccgttatcacaccaagtaacacattcactgccgtcttccagtctcaggaggcaccagctcagggcttctccgcgtcctttgttagccgatgtggaagtaatttcactggcccttcaggttacatcatttctccaaattacccaaaagcaatatgacaacaactatgaattgcacctatgtcatagaggctaatcctctgtcagtggtcctcttgacttttgtgtccttccacttagaagctcgttccgctgtgacgggaagctgtgtcaacgatggcgtgcaccattatcagaggttacagcgtcatgtccaccccatttgctactgtgtgtggggatgagatgccagctcccctcaccatcgctgggccggttctgcttaacttctactccaacgagcaaatcacagacttcggattcaagttttcctataggataatctcctgtggtggtgtgttcaatttctcttctggaatcatcacaagtcctgcctattcatacgcagactacccaaatgatatgcactgtctgtataccatcaccgttagtgacgacaaggtgatcgagctcaagttcagtgattttgatgtggttccctccacctcctgctcccatgactacctggcaatttacgatggtgccaataccagcgatccccttcttggcaaattctgcggttccaagcgcccaccaaatgtgaagagcagcaataatagtatgctcctggtgttcaagacagattcatttcagacagcaaaaggctggaagatgtctttccggcagacattggggcctcagcaagggatgtgggtggttatctgaccaggtcggaataatacctttgccctctcctggaatctgattcaaatgggaatggattgacaagaatttaaaactggggtatgggatcctaaattg

SEQ ID NO: 94305 - DNA, 879 bp, Homo Sapiens
  misc_feature (75)..(115): n is a, c, g, or t
  misc_feature (118)..(152): n is a, c, g, or t
  misc_feature (191)..(363): n is a, c, g, or t
cactacacaaaacacaacacacaaaccaacgcaccaagatgatcactcactatagggcgctagcgcggtattatnnnnnnnnnnnnnnnnnnnnnnnnnnnnnnnnnnnnnnnnncgnnnnnnnnnnnnnnnnnnnnnnnnnnnnnnnnnnncagtcgacggtaccggacatatgcccgggaattcggccnnnnnnnnnnnnnnnnnnnnnnnnnnnnnnnnnnnnnnnnnnnnnnnnnnnnnnnnnnnnnnnnnnnnnnnnnnnnnnnnnnnnnnnnnnnnnnnnnnnnnnnnnnnnnnnnnnnnnnnnnnnnnnnnnnnnnnnnnnnnnnnnnnnnnnnnnnnnnnnnnnnnnnnnnnnnncaacaataatccctactactggagttaacagattactgcaggttacaggtagggctctgctgggaagaacaaagcaatcagaatcacagactgatgaagctgtccctactataaaagtcccaagcaaaaatgctccaatactgtatcctctggatctccctgagccgctaagggggagaacaaagtccaggtaagcagctgtaacagttcatgtctaaatcatttgtgcacatgataaaatcatcataggtgagcgatgaccattttaaacaatgttctagtctgaagcaaaaggaactacacagctcatgattatctagggtccaacgtagcttttctcttacactttttatgtccaaggacaacagagtctcaatccgtatccccggaatggccaacaggggcccggatcaccgcctcactgacacaccggacccccacggggtacagagcatcacccctgccacaaacccccacgaacagcggagactaacggacttgtgccccaatactaac

SEQ ID NO: 94306 - DNA, 410 bp, Homo Sapiens
ttctgaataagctcttgttgcctttccgtaagttcttgaatttgaatttctactgcatgtagctcactggttatagaatccagttcctcagttagagctgaaacggacgccattctttttctttccaaatttgtttctaaaataatccaaatttctttcaacaaatggcagctgctaataaacaggctttggtggccaatcctcccttgacccttcaaagctgtaacagtagttatcccagagcctctccccaccgagaagcccagtctaactctccggtgtttgactgtccggtgtccgactgtcctgtgtccgactctccgatctccgactctcggatctccgacaccaaagcacccaggcctcgagcagatctttccgctactcgggagtaaaatcttcccgccccc

SEQ ID NO: 94307 - DNA, 813 bp, Homo Sapiens
  misc_feature (596)..(653): n is a, c, g, or t
ttttttaaactctgtgcagtttattctcattacagtgttcaaccagtttgacatataaagataacacactttaacagtaaatgttgggaggcacacatatattcccattctgaaagaagacatgttatatatacggaaaaaaatgcagcaaatattaaggtattcaaagtaatttttttgaactcagatgtgacatatttacaagaaaagtgtgtacgttttaaaataattaaataatttccatagacttataaaagaattgagataaatattaggagaccctgacaatcaccagaacattttcctatgctatcgaacaaggatagttctattttaaaatgtcccaaaacagagctaatattttgccaccatgaaatatatcaaattgcaaatactaaagtgaacatgcaatgtggaagctgtaccaaaattaaacagcattaggttcttaaatattgcaaagtgtctatttaagatttctcgggtgtgttcatgaaaaaggaactttcaaaaaagccattaaaatgaatatatcagctgaaaaagtgataactcattaaaatctctttattctatcactttcaaatgtagctgcnnnnnnnnnnnnnnnnnnnnnnnnnnnnnnnnnnnnnnnnnnnnnnnnnnnnnnnnnntgagtggtgcattctttatgcatacagatttttaaactgatattgtataattctaatacatcttaacctctggactgcactgctgtagtaggaaatttttctgtctcagacaagaagtcatctaagaaaatgaaaacgagaaattttcaatgatatgcat

SEQ ID NO: 94308 - DNA, 1656 bp, Homo Sapiens
  misc_feature (300)..(312): n is a, c, g, or t
  misc_feature (670)..(679): n is a, c, g, or t
aaacagaggggatgagggaaatgaattctgttaataattattcttcctggtatgcctgttttgcttcacaaaggctactatcatgctggatagataagaacaggagatggcagtggaaagggattgcttgttaccacagagaattctcttcaaattaagatatgtcattagaatgcttggaccagtcaatcttttgtacttatttgaaaatataggaacaatttagcagctgcaaatatgcccaagctatttttaatagatatactaaacttattgttgacaaatttcagcctccttaannnnnnnnnnnnnggtaattacctataggcttaaaagtcattcgttgctgttctagtataattagtagttccgtgattgaaagtttattgtaattctactatcttcaaattagatacattttcaaaaggaaaagataattttttagaaacatcttaatattcactatttcctgaaaaaatccaagcagttaacgctttctggatggtaacaaagtaccttctaaaagataagtgctatgacaccatgtatgaatgtaattctcttagtaatttacctctgactatttggtgtcttaacgctttggtttatataatctcaggggttgtctgcaaaccaaaactgacatattctgtggttagcttttattacnnnnnnnnnnaacagaatgctttgctttggttatatttcttctttcttcttttgtcttatatggattaataactagtctccatgaacttcacttgaaagagcctgtaaaagttagatgagtctaaaagtgctctttgaagtagcagcaaattgggagtatatgctctgttatatagaaataaattgtccttgctattttcttacatttagctttgctagattgtatatacattgagctaagaccttaggaaattcactttctgcatgataaaatgacccaataaatattccactttgcttaataatgtacatacagtgcattattttttctatttgtagatgaatttaatgacagataattgtctgttccccgctgaaactgaagaaatctagtttttttgtgaacatttttgtggtcttatggataaagtacatgaagatttttgcagcagtattaggtggttcagtgggctgcactttattaatcagtgtgttaatttttgacagtgattggactagaccttttcaaatagagtctgagggtatcagacagtgaaaatgtgctgtaactaagtagcatgtaaatcagttgattgtaaaacgtttcgctgggaacttattttagctatattttacttcagacagattatgatacaataatctacctgtgcatcagttagtaggtgctgcagggtttcttactatttacagaaacattttgtgcagtctttgttataaattttcagaagactatactctttactttgaaggtctattttttaattatacctcatttagctaactagtattctaatacctggtagaaaaacagtgagccagcctttaagcatctaacaaaatttagactctttgtctgttttgaactgaagacatcattgggaaaggtagggaaatattagtttaggatagagcattcatgtcatattcagtagcataaaaacgtattatcttcctgtttcattatta

SEQ ID NO: 94309 - DNA, 1287 bp, Homo Sapiens
  misc_feature (85)..(119): n is a, c, g, or t
aaggacgatacacctacattgggcgctagcggtcgctaagcccgaacgaccgagcgcagcgaagtagtgagcgaggaagcggcgnnnnnnnnnnnnnnnnnnnnnnnnnnnnnnnnnnncagtcgacggtaccggacatatgcccgggaattcggccattacggccgggggtaaaccagccggagcggcgcggcagcggcaggaccgccgtggcgcctagagtagcgacccggggggagcgcggggcgacgctggctgcagggacccggtgacagcgtgagaggtactaggttttgacaagcttgcatcatgcgtgagtataagctagtcgttcttggctcaggaggcgttggaaagtctgctttgactgtacaatttgttcaaggaattttgtagaaaaatacgatcctacgatagaagattcttatagaaagcaagttgaagtagatgcacaacagtgtatgcttgaaatcttggatactgcaggaacggagcaatttacagcaatgagggatttatacatgaaaaatggacaaggatttgcattagtttattccatcacagcacagtccacatttaacgatttacaagacctgagagaacagattcttcgagttaaagacactgatgatgttccaatgattcttgtggtaataagtgtgacttggaagatgaaagagttgtagggaaggaacaaggtcaaaatctagcaagacaatggaacaactgtgcattcttagaatcttctgcaaaatcaaaaataaatgttaatgagatcttttatgacctagtgcggcaaaattaacagaaaaactccgagtgcctgggaaggctcgcaaaaagtcatcatgtcagctgcctttaatatactaaatgcattgtagctctgagccaggtctgaagaaactgttgcccaattcaacagtgccagcattccaactttgttaaacctaccaacatcttaaatggactttcctgtggtggtaccctttaagaggcggatgaaagctactatatcagtttgcacattctaatcactttccagtatcacaagagagatttttacttatataatagtcctagagtttgcagctggtaaaaccagaggctacatccagtattactgctaagagacattcttcatccaccaatgttgtacatgtatgaaaatggtgtactgtatactttaacatgccccatactttgtattggagagtacaataatgtaaatcctaaaagcaccactattttagcataataaaagaaagtccaaagagctcctaaaaa

SEQ ID NO: 94310 - DNA, 1188 bp, Homo Sapiens
  misc_feature (41)..(116): n is a, c, g, or t
  misc_feature (617)..(717): n is a, c, g, or t
  misc_feature (748)..(759): n is a, c, g, or t
  misc_feature (843)..(934): n is a, c, g, or t
caagacttggatagatcatatagggcgcaggtgtagtagannnnnnnnnnnnnnnnnnnnnnnnnnnnnnnnnnnnnnnnnnnnnnnnnnnnnnnnnnnnnnnnnnnnnnnnnnnncagtcgacggtagcggacatatgcccgggaattcggccattacggccggggggtactcggacggagctctgcgactggcgcagatccctaggacgtgggtctagtaggaggcggtggagcggccgtgctggggtcgacggggtactttggactacagagccgctccactggctcttccggcgttcccggacgccgcgtgacgcaccatgattctcgcgacctgcaggagaagcctcgaccggggcgagggccgaggtcgtgacgggcatgaccgtctctctgcttggttagggttagtgtcccgccgggcacatcaccctatgaatggagccactgagatagactgggctgaggagaaccggttggaataatgagccatggcagcaactgcctgagagagaggaccggcgggttgctgtagggctccctaaccggaatgcctgtcagaaacctgcacagcttggtttctgttctttgtgtcccaaatctgactcgggtcannnnnnnnnnnnnnnnnnnnnnnnnnnnnnnnnnnnnnnnnnnnnnnnnnnnnnnnnnnnnnnnnnnnnnnnnnnnnnnnnnnnnnnnnnnnnnnnnnnnnggtgaggactaagaatcctaatcacaaatcnnnnnnnnnnnngagacatggtctgtcacccaggctggcgcgatctcaggctcaagtggtcctcccgcctcagtctcctggaaagctgagactacnnnnnnnnnnnnnnnnnnnnnnnnnnnnnnnnnnnnnnnnnnnnnnnnnnnnnnnnnnnnnnnnnnnnnnnnnnnnnnnnnnnnnnnnnnnnagggcgagccactgctcctggcccataagtcttttcactggaaaaaaggggaaccaaaagaggtccaagtgggtgccatgggaaaagctcaaccaccctttgctgggaggaagggaacccaagcccagctgggaaaaaggggatctcgcctctgttcgcccaagctggaagggccatgggcgttaatccccgatctcggtgaaggtccacccgcccaagagctccgccaattcttctggcctcacgcctccggg

SEQ ID NO: 94311 - DNA, 946 bp, Homo Sapiens
  misc_feature (73)..(107): n is a, c, g, or t
  misc_feature (591)..(612): n is a, c, g, or t
tgatagatcactataggggcctactctagagcgaacgacgagcgcagcgagatagtgagcgaggaagcggcgnnnnnnnnnnnnnnnnnnnnnnnnnnnnnnnnnnncagtcgacggtaccggacatatgcccgggaattcggccattacggccggggcaaggcaggtggagccatttaaagaaacacctaattgtaaagttttcacccagtgcagaggtgttcaggtctctgatgtctggtgtttcttcatttgctgatgcaatccactttcccaccccaccttcaggttatactcagtacaaattaaatgccattttattctctaaacgtgcagagacaagaaagttgatggtaaagtgatgatcatcattatggaaaaacaaatcttgatttccattggaacatgggaatctattttgttaaatgatttaggggcagagttaaatttattcggcttttaaagttttaaattatttgccttgctgacccctcctccataatccaggtctacaaatatttattaggtagtcaactactgtttgttagaagtcgggagtaatggtttaggggagaaaataaacaactaagnnnnnnnnnnnnnnnnnnnnnnaatttatttagttctcatagcaaatcccgtgcggaaggctttgttggtcatgtgtctgagctcataactggctgtgtagtgtgataattgtgagccaaagtgtggagattagaagggaaaagtaaattaaatcatgcaaaatcttataaaattataataaatgatttttccttaacagttcatcattttaaatttagactataaatatttttaatgtgaattataaaaattaactatatttgtgatactacaggattttattaataaggctaagatttaacaaaatgttaaccagtaaaatatttgcgctatattaaacaagagtttgggccaa

SEQ ID NO: 94312 - DNA, 1414 bp, Homo Sapiens
  misc_feature (1245)..(1245): n is a, c, g, or t
gggagagactggatggacccacaagggtgacagcccaggcggaccgatcttcccatcccacatcctccggcgcgatgccaaaaagaggctgacggcaactgggccttctgcagagaaagacctccgcttcactgccccggctggtcccaagggtcaggaagatggattcatacctgctgatgtggggactgctcacgttcatcatggtgcctggctgccaggcagagctctgtgacgatgacccgccagagatcccacacgccacattcaaagccatggcctacaaggaaggaaccatgttgaactgtgaatgcaagagaggtttccgcagaataaaaagcgggtcactctatatgctctgtacaggaaactctagccactcgtcctgggacaaccaatgtcaatggcacaagctctgccactcggaacacaacgaaacaagtgacacctcaacctgaagaacagaaagaaaggaaaaccacagaaatgcaaagtccaatgcagccagtggaccaagcgagccttccaggtcactgcagggaacctccaccatgggaaaatgaagccacagagagaatttatcatttcgtggtggggcagatggtttattatcagtgcgtccagggatacagggctctacacagaggtcctgctgagagcgtctgcaaaatgacccacgggaagacaaggtggacccagccccagctcatatgcacaggtgaaatggagaccagtcagtttccaggtgaagagaagcctcaggcaagccccgaaggccgtcctgagagtgagacttcctgcctcgtcacaacaacagattttcaaatacagacagaaatggctgcaaccatggagacgtccatatttacaacagagtaccaggtagcagtggccggctgtgttttcctgctgatcagcgtcctcctcctgagtgggctcacctggcagcggagacagaggaagagtagaagaacaatctagaaaaccaaaagaacaagaatttcttggtaagaagccgggaacagacaacagaagtcatgaagcccaagtgaaatcaaaggtgctaaatggtcgccccaggagacctcccgttgcgcttgcctgccgttttggaagctcttgaagtcccattcccgggacacgggggcaagtggcaaacccttgtcttctatgcccaggctcagtccccatcccaaaaagcgaagcgcctaacccactttctaaaataaacaatttccccccccnttgaaacaaggaaaggggcaaaaacccaccttaaaaaacttctcccatttcttaattttcccaggggcaaaaaggggggtcccatctaaaaaccattgacatggggttatgggcaacccacatcccttcccctaacaatgcgaccaccgccatgccttctttgtttggg

SEQ ID NO: 94313 - DNA, 953 bp, Homo Sapiens
cagtcgacggtaccggacatatgcccgggaattcggccattacggccgggacacatacggcaagctaataattccaaaaaaataatttctttcctttgtagccatttaaaactaacagctagaaatatttcttcttccaattattaaaaataagctgtttctgagtcggtgctgactacatttactgattgaagcagccaactccaaatataccatcttttagtattgacacttaaaataaaacttctccccagaaaaagagttctataaatgatggctgtagaaataggcactgtccaggcagttgttttgtggaagtagtgttgttattttctggtgttttccaagtcatctcagatggtgcgtgaaaatgagatgccaaagaaggcttaaaaaagataccctgcaccagcttcagaatgtaagcaaatctttcattccagcgcttaaaagttttgagaaagctaatctaaagttaaatgtttactagcatctctccgattatattttagaaactactgcacaaaaataaaacaaatttcttattttctctgggttgaaaagtgcacataaaatggaaaatgctttttataccactatttccagcagggatcttattttcatttgtcatttgccagcctggggtaatgctgggaagaaggaacaattgattttgaaaaggtgcattgtgtgaaaacaaaaatggtgttcaacaaataatactaataaccatatgtggatatatgtgttttatacatgagcaaaagaaaaacatcgcacacaccacaaacaccgttgcggccgcctctgggccccaaaaaaagttcttaaacaactccgtgggcccccggacccaatcagtacggaacagggccaaacggtcccagaaaacctgggccagcaaaagcggttggtctcccctaaaaagcccggggaacggagcttggacaatc

SEQ ID NO: 94314 - DNA, 1198 bp, Homo Sapiens
  misc_feature (508)..(517): n is a, c, g, or t
  misc_feature (595)..(609): n is a, c, g, or t
gagtggcgatatgcgtaccctgagggaacgtattcctggtttacgaagttgatgtttctaagttcatactgaacaagtgtgtaattgggaacaacagggatggtttgtaatgtagggaagaaatgcgcatttggctaagattcaccaggtaaagagggacctatattttaggaaaaccatggctctgtccagtatcacacagtatgaaatagacatagtcgtgataaagtttttgtgtgcctttccctaagtcaagggaaagttatttcagactaccagctcatcaccggggggctatgattgtgcttagctagtaggaagtgctgctcttagtagacacatttagcatagagaaaacccggctttctcaccatctcccgccttatctatccactggtaaacaccatttaacctttacataagactatcttccatggtcataatcatcagattgaaactcagagcaaagccatgctgtgtttcttcccagtccatttgtttccaaggnnnnnnnnnntctctgtatcccaacatccttatgacattacactgaaatttttgaactcattttccagcgctaaaatctgatcctctnnnnnnnnnnnnnnntgactagtgtggaaattggacaaggtaaaaacagaaaaggaacatcaacaggaagagtaggcatttttagtgaaaagtatcacccttttgccaaagagtcaactggattcatccaatgatgatgactagagcagggtggtcacactcttgaaattatgaaacatagctgttccaacctcacccgtagcttatgtaatggggctccttatatggaaaagagaatggtggctgactgcaatggcatggagtccatcttccatagtttgtccccttttacttccatttggtaaaactgggttaggtaggagacaactttatgaccaagaggacaccaagagcttccttggataaaggttaagtggaggtatcttgctttgcccaaacagaggcatattcaagtgaatatggagccaactgacttagaaggaaagggaacgacttggcaagtgtaatctgccagctggttgagtcagacgacacattgagaacgatcttttttggaatcatgtcctcccttcaacccttctcctacaatcatccactgtctacctcgtcctatttacatggaccctctcctattgccacctct

SEQ ID NO: 94315 - DNA, 645 bp, Homo Sapiens; identical to SEQ ID NO: 8925
  misc_feature (552)..(593): n is a, c, g, or t

SEQ ID NO: 94316 - DNA, 1890 bp, Homo Sapiens
  misc_feature (1099)..(1107): n is a, c, g, or t
  misc_feature (1151)..(1290): n is a, c, g, or t
  misc_feature (1294)..(1299): n is a, c, g, or t
  misc_feature (1306)..(1322): n is a, c, g, or t
  misc_feature (1368)..(1381): n is a, c, g, or t
  misc_feature (1419)..(1465): n is a, c, g, or t
  misc_feature (1631)..(1641): n is a, c, g, or t
cagtcgacggtaccggacatatgcccgggaattcggccattacggccgggctaaaatatttttgtatcatgtgcctttgaaatttgacagctgatttgggtgttggatttctgcccagccatttatcagtattatcattttattcagtagctggcaggtgtattagacaaacgagacttaggtaaggaatggaacctttcctgtggttgactgcacatcacaccagaagactccagtatccctcattccagaatgaggaaaaagtattctacaaagaacctaatcacctctgtgaaatctatgggatggaaacagtgtggccttaggagtcaaatagtctctgcatggtggggaggatcatgatggaatatgtgaatttctacttctagaagttgtgaaataggtcctgcacttttgcagaatgtccttctttaaacctggcttattccacagctgtagctgataacatgacctggggcttagctgctctagccctgggttcttggagacctcacactgcctggcccctggccatccacctaaggactgcctgctttctggtcacatgtggaccttgatacgactaagcggttacatatgtggttgtgcaaaagctttctgtttaatgcatagtgttaccgatttacatcttggttttcaggtggcactatgtctaggaggcaatatccttttaaacagtgctttggctaagatagatacttgtgaatcaaagatagcacagaaatgaactaagtatatcccatttggaattatattttgatactatttaaaatggtttcacctgttaaagggccaacagaactcttggttttacttttgtaattactgtacagaaaatttcaagagtgtttgagtgcttgtcatcaggtgttttccttaataagtagggatatgatcatttacaggaattatatatgaaaaaagtttttgaaatgtatttttgtgatgtgctatgttgaggggaaaccaaatatttatgattttaaaacattcgtatgaaaacattgtacaatgtaatatgctcaactttctcaattttttgctaatttttctaagatacattaaaaatgttttatannnnnnnnnaagtaaaatggacccagtaagaaaattaaaaataccagaacatnnnnnnnnnnnnnnnnnnnnnnnnnnnnnnnnnnnnnnnnnnnnnnnnnnnnnnnnnnnnnnnnnnnnnnnnnnnnnnnnnnnnnnnnnnnnnnnnnnnnnnnnnnnnnnnnnnnnnnnnnnnnnnnnnnnnnnnnnnnncccnnnnnncgggcgnnnnnnnnnnnnnnnnnaaaaaatttttaaaacacctttgttggggggggcgccccccccagnnnnnnnnnnnnnngggggcataatttgttcctcaaaagaaaatcccgcccnnnnnnnnnnnnnnnnnnnnnnnnnnnnnnnnnnnnnnnnnnnnnnngcggggaaccacggagggtttttttacaaaaccccccccacggggggtctcctggcggggctttttttggggtgcctttctaaacaggggggccccttgcgcgggggtctcaataaaccaattattcccgccgcccccccgggggccctctttttaggggagaatnnnnnnnnnnnaattatctttattagccctttctcgccggcggcggcggggggggaccctcccaacccgggttgtgggaacattttatttccccgggggaaaccacgcggggccgggggaaatatttccccgggaacggggggcaaaaactcccttgcgcccttaaaagggggcaccccggggggggacaaatctcaaccttagaaggcgttccaccctctgcatttaaccggtacgggtctcagaaatctttcgaaggg

SEQ ID NO: 94317 - DNA, 943 bp, Homo Sapiens
  misc_feature (43)..(77): n is a, c, g, or t
gaacgaacgagcgcagcgagtcattgagcgaggaagcggccgnnnnnnnnnnnnnnnnnnnnnnnnnnnnnnnnnnncagtcgacggtaccggacatatgcccgggaattcggccattacggccgggggagacattcctcaattgcttagacatattctgagcctacagcagaggaacctccagtctcagcaccatgaatcaaactgccattctgatttgctgccttatctttctgactctaagtggcattcaaggagtacctctctctagaactgtacgctgtacctgcatcagcattagtaatcaacctgttaatccaaggtctttagaaaaacttgaaattattcctgcaagccaattttgtccacgtgttgagatcattgctacaatgaaaaagaagggtgagaagagatgtctgaatccagaatcgaaggccatcaagaatttactgaaagcagttagcaaggaaacggtctaaaagatctccttaaaaccagaggggagcaaaatcgatgcagtgcttccaaggatggaccacacagaggctgcctctcccatcacttccctacatggagtatatgtcaagccataattgttcttagtttgcagttacactaaaaggtgaccaatcatggtcaccaaatcagctgctactactcctgtaggaaggttaatgttcatcatcctaagctattcagtaataactctaccctggcactataatgtaagctctactgaggtgctatgttcttagtggatgttctgaccctgcttcaaatatttccctcagcctttcccatcttccaaggggtataagggaatctttctgccttgggggtttatcagaattctcagaatctcaaataattaacaaggtatgcaatcacaatctggtgttaaagaatgctccttacttccatggacttcactggcatcctccaa

SEQ ID NO: 94318 - DNA, 939 bp, Homo Sapiens
accttgggaggccaaaccccccatttccccctttttgtgtggcggggcccccagaggtcccctccccagggggaaaatgggcttgggggggcttgtccaggggctaaggaacgttttcccgtccaaaaggctcaaccccgggcctttacagggccggaggtgcacactctttcggaaagtgcccaggacccggtcgagggcccccgcgggactcagctgctgagagctcggggctgcgccaacttcgggagacagaggacaagtacttgtagatcttctcaaagtccaccagcaaagtcttcttcagtggagggaccagccgacgactcagaagctttctcaggggccagggtcaggagtcctgggtgcggagctaggtgcagcaggggcagagctaggtatttcaggggcggggtcttcctgtcctccaggggcgctcaggagcaaaggctttccacgggcctgcgtgggcttggggggcttggagtgcaggagggtgaccggttccgtggccgcgatggtgagcacctgcgagaaagccaactgccagggcttcttccagtggccctgttatcttctcagccagatccgtccagacctctatgggggctgggggctgtgcctcccggcgccttggtccctgaaggccacccggatgcactttctgaatggcctcccgggctacgcggcccttgagctgctggaggaagacccggatctcagcctcgctccggccccgcagctcccgggccagctcggtggcgtaccggctccggtctggccctagccgcgcactgcaggagtcgcactagctgccgcttctcgcgagcgctccagctcgcgggaccggtcacctcgcccagatagcgcgccggggccgctcgccgcactgggaggtggcttcatgccgctcagaaagaggcaggcgctgtaaggtcg

SEQ ID NO: 94319 - DNA, 1018 bp, Homo Sapiens
cagtcgacggtaccggacatatgcccgggaattcggccattacggccgggggaaggagagacggctggccaccatgcacggctcctgcagtttcctgatgcttctgctgccgctactgctactgctggtggccaccacaggccccgttggagccctcacagatgaggagaaacgtttgatggtggagctgcacaacctctaccgggcccaggtatccccgacggcctcagacatgctgcacatgagatgggacgaggagctggccgccttcgccaaggcctacgcacggcagtgcgtgtggggccacaacaaggagcgcgggcgccgcggcgagaatctgttcgccatcacagacgagggcatggacgtgccgctggccatggaggagtggcaccacgagcgtgagcactacaacctcagcgccgccacctgcagcccaggccagatgtgcggccactacacgcaggtggtatgggccaagacagagaggatcggctgtggttcccacttctgtgagaagctccagggtgttgaggagaccaacatcgaattactggtgtgcaactatgagcctccggggaacgtgaaggggaaacggccctaccaggaggggactccgtgctcccaatgtccctctggctaccactgcaagaactccctctgtgaacccatcggaagcccggaagatgctcaggatttgccttacctggtaactgaggccccatccttccgggcgactgaagcatcagactctaggaaaatgggtactccttcttccctagcaacgggggattccggctttcttggtaacagaggtctcaggctccctggcaaccaaggctctgcctgctgttggaaaaccaggccccaacttccttagcacgaaagaccggcctccatggcaacagaaggctccacttgcgtaacaactgaggtcccttccatttggcagtcaccagctgtcctccttggatgaaggagccattaacgttccgcaatggaccatgttcctatccca

SEQ ID NO: 94320 - DNA, 992 bp, Homo Sapiens
  misc_feature (54)..(92): n is a, c, g, or t
  misc_feature (96)..(130): n is a, c, g, or t
ggaaacaaaacccccccaactgcaaccgactcctataggggctacggttttagnnnnnnnnnnnnnnnnnnnnnnnnnnnnnnnnnnnnnnnccgnnnnnnnnnnnnnnnnnnnnnnnnnnnnnnnnnnncagtcgacggtaccggacatatgcccgggaattcggccattacggccggggggcgggcggcgaggcaagatggcggcaaccaagaggaaacggcgtggcaggctttgcagttcaggcgaagaagccaaaaagaaacgaaatagatgcggagccgccagctaagcggcaccgccacagcagaggaggtgcaggaagaagagagggaccggatcccaggccccgttttgcaagggacacagtggacaaataaggaacggattctcatcttttcttccagaggaataaattttagaacaagacatttaatgcaggacttgagaatgttgatgcctcattctaaagcagatactaaaatggatcgtaaggataagctatttgtgattaacgaggttgtgacatgaagaactgtaataaatgcatctattttgaagctaagaaaaaacaggatctctatatgtggctttcaaattcagctcacggaccatctgctaaattccttgttcaaaatattcataccctcgctgaactgaagatgactgggaaactgtctgaaaggttctcggcccttggtcttttgaccctgcttttgatgaattaccacaattatgctttggttaaacagaactcttaattcagatctttagtacaccagggtatcatcccaaaagccaacatttgtggacacgtgtttcctttcaaccattgggatatcggattggttcggaactctcagatccttgaaacacgatgctgctcttgtccaaataggacctcggtgggctactctcattaagatttcagggaagttggagaccactttattgaaatctcctacgttcacactgcctgggggacaagtcca

SEQ ID NO: 94321 - DNA, 1220 bp, Homo Sapiens
  misc_feature (87)..(121): n is a, c, g, or t
caaaaagaaagtatactgacgcacatatggggccccgtgttatagtcgaacgacgagcgcagcgagtagttagcgaggaagcggcgnnnnnnnnnnnnnnnnnnnnnnnnnnnnnnnnnnncagtcgacggtaccggacatatgcccgggaattcggccattacggccgggggacggtgcagagctctaagcgcgcgggctggcaggctgcggcgcgtcaaggtcagcctggagctgggtggcggcctgcctgggggcgggggaccctactggaggcccgggctggggcctcccagcgcctcggccatattgaatagcttcgactggaccgtctttgtctgcagaagtcctgtcccaagttccagccgcgtccctggggcctggggcaggacagagtcgctggcagcccgcgcgccccaacttggagctgggacaccacgtttccagcttggagtgggccttgtagcccttgggactgacctcgcccccggctcacgtaggcatcctggaaattgattcccccaagtccttggtgggggagccggacttggtcaagactgtacttgttgcaggcgaagagattggaggcgtttggctcgtccctggctagggaggtgagactctccggtcagcgttgctggaactccccccatccagtccctccctcaagactaagggctacagtagtttgttggggctcattgccccctcaccccagatatcaccctggagatcttaaagactctcgagaaaagccacgtggggggctggttcccctggggcttcctgccgtcccccgactgcctcattctttggagcgtccccgatgtctgcaaagatgtggatttggacgtcctcgtggaagccctaaagcccgtggggacatttaagaagatcggcaaggtgttccgcaaggaggaggactccacggctggggatgctgccagatcggggaggacgtcgactatttgctcatcccccgggaggtcaggctggctgggggcgtctggagagtcatctctaagcccgccaccaaggaagcagaatttcgggagcggctgacccagttcctggaagaagagggccgcaccctgtaggacgtggcccgcatcatggggaagagaccccgcacccgccccagccccaaaaagcccaaggagccccgagtgacgaggagagtgcagcagatggtgactcctccgccccggctggtcgtgggc

SEQ ID NO: 94322 - DNA, 949 bp, Homo Sapiens
  misc_feature (77)..(111): n is a, c, g, or t
acatgtatagactcatatagggctacctggtaacagcgacgacgagcgcagcgaggtattgagcgaggaagcggcgnnnnnnnnnnnnnnnnnnnnnnnnnnnnnnnnnnncagtcgacggtaccggacatatgcccgggaattcggccattacggccgggatgatgcggataattcttaacctctctcactataggattgtaagaatatcatatacttcatacagttcttactcatgtttccagtcaatggaagctatgctatgccaacagtatcattatctctaaagaataaaagcaaagtggaagtatgtattttggaacttcatgtttgtttttactttaaaaaaaagatttttgtagcttttttccccctgaaagtaggtatcatggagttttatataaatataaaattttcatgttgcccactatgatattaaaattcatgagagcagacagttttattattttgtatttgattcccaaagttaagaaaatgcctggtacctaactagattctcaggtgatatttttattgaatgaatgaatttattgacctgtgttcacacccccagctaagttcacttctgttctggtttactaagtgtgctcctttagacaagtataatctcgaattgtaatttcgcatctccaaatggaaaccctaactgatatgaatgtattacatgtaatgataaatgaacctcatgcaggtaacacgctacctacgcattatgagtggtatacaatgaataactcaataagtattagcaatgattatgattatgattttatgtgccatctacttaggacatgtggaggaaagaagagcatttgtggccatgaaagcaatgagcgtcacatttcctcacagatgaccgatcactgatagacccactgggaaatgactgccttgtgcttacatagttggacttatttctctgttcgct

SEQ ID NO: 94323 - DNA, 778 bp, Homo Sapiens
cagtcgacggtaccggacatatgcccgggaattcggccattacggccgggtgagaaacagatttctgctcacttcatgggctggcctggaattgacgatggtgcaaacccaaattatcctgatgtaatttatgaagattatggaactgcagcgaatgacatcggggacaccacgaacagaagtaatgaaatcccttccacagacgtcactgataaaaccggtcgggaacatctctcggtctatgctgtggtggtgattgcgtctgtggtgggattttgccttttggtaatgctgtttctgcttaagttggcaagacactccaagtttggcatgaaaggttttgttttgtttcataagatcccactggatgggtagctgaaataaaggaaaagacagagaaaggggctgtggtgcttgttggttgatgctgccatgtaagctggactcctgggactgctgttggcttatcccgggaagtgctgcttatctggggttttctggtagatgtgggcggtgtttggaggctgtactatatgaagcctgcatatactgtgagctgtgattggggaacaccaatgcagaggtaactctcaggcagctaagcagcacctcaagaaaacatgttaaattaatgcttctcttcttacagtagttcaaatacaaaactgaaatgaaatcccattggattgtacttctcttctgaaaagtgtgctttttgaccctactggacatttattgacttaattgcttctgtttattaaaattgacctgcaaagtt

SEQ ID NO: 94324 - DNA, 566 bp, Homo Sapiens
gccgatcctcactgttcccaaacacacggagtacacgatggctccagctggataatcccactcacatgaacaatggggactacactctaatagccaagaatgagtatgggaaggatgagaaacagatttctgctcacttcatgggctggcctggaattgacgatggtgcaaacccaaattatcctgatgtaatttatgaagattatggaactgcagcgaatgacatcggggacaccacgaacagaagtaatgaaatcccttccacagacgtcactgataaaaccggtcgggaacatctctcggtctatgctgtggtggtgattgcgtctgtggtgggattttgccttttggtaatgctgtttctgcttaagttggcaagacactccaagtttggcatgaaaggttttgttttgtttcataagatcccactggatgggtagctgaaataaaggaaaagacagagaaaggggctgtggtgctggttgtgtggatgctgccatgtaagctgaactcctggcactgctgttggcttatcccggaagtgctgcttatctgggttcttacaa

SEQ ID NO: 94325 - DNA, 946 bp, Homo Sapiens
  misc_feature (82)..(116): n is a, c, g, or t
  misc_feature (164)..(268): n is a, c, g, or t
  misc_feature (910)..(910): n is a, c, g, or t
aaagacgatcatcactatagggcgctccgcgtagcagccgaacgaccgagcgcagcgaagtattgagcgaggaagcggccgnnnnnnnnnnnnnnnnnnnnnnnnnnnnnnnnnnncagtcgacggtaccggacatatgcccgggaattcggccattacggccnnnnnnnnnnnnnnnnnnnnnnnnnnnnnnnnnnnnnnnnnnnnnnnnnnnnnnnnnnnnnnnnnnnnnnnnnnnnnnnnnnnnnnnnnnnnnnnnnnnnnnnnncaaggctgtggctactgtatttgacccctgaaacagttaatttttcttgacatcccttccttggtatatgtattagtcagggttctctagagggacagaactaataggatatctctctctctatagatttatataaaggggagtttattaagtattaactcacacaatcacaaggtcccacaataggccatctgcaggctgaggagaaaggagagccagtccaaatcccaaaaccgaagaacttggagtctgatgttcgaggccaggaagcatccagcacaggagaaagatggaagctgcgaagccaggccagactctccttttcacatttttctgcctgcttacattatagccgtgctggcagccgaatagatggcgcccactcagattaagggtgaatctgccttccccagcccactgactcaaatgttaatctcctttggcaacaccctcacagacacacccaggatcaatactttgaatccttcaatccaatcaagttgacactctgtataaaccatcacagttggtaaatgtttaacttactgttttccaaagtggttattctatttcacattcctgtgaacagtgtgtaagagttccagttgttcaacatccttaccaacacttggtatggtcagntttaacatttttaacccatctactaggtgtgaagtg

SEQ ID NO: 94326 - DNA, 1082 bp, Homo Sapiens
  misc_feature (828)..(940): n is a, c, g, or t
ccatagtgactataaacagtcgtcacaaaaagcaggtggtacggtccggaatcccgggatatcgtcgacccacgcgtccgcgttctgctctcgggggcaccttccggggttcctaagccgcggggcccctcgctgcccctcgaggccctttccctgacctaggcttggcctgggctactcgttccggagccgccatgtcgtccgacttcgaaggttacgagcaggacttcgcggtgctcactgcagagatcaccagcaagattgcgagggtcccacgactcccgcctgatgaaaagaaacagatggttgcaaatgtggagaaacagcttgaagaagcgaaagaactgcttgaacagatggatttggaagtccgagagataccaccccaaagtcgagggatgtacagcaacagaatgagaagctacaaacaagaaatgggaaaactcgaaacagattttaacaaggtcacggatcgcctacagtgacgaagtacggaatgagctcctgggggatgatgggaattcctcagagaaccagagggcacatctgctcgataacacagagaggctggaaaggtcatctcggagactagaggctggataccaaatagcagtggaaaccgagcaaattggtcaggagatgttggaaaaccttagtcatgacagagaaaagatacagcgagcacgtgaaagacttcgggaaacagatgctaatttgggaaaaaagctccaggattctgacagggatgttgcgaagactggcgtcagcaggaaagatcagctctgccatttgaaacacccaactgctaccttctctcagaaatcaaannnnnnnnnnnnnnnnnnnnnnnnnnnnnnnnnnnnnnnnnnnnnnnnnnnnnnnnnnnnnnnnnnnnnnnnnnnnnnnnnnnnnnnnnnnnnnnnnnnnnnnnnnnnnnnnnctggaagtgctcagtacatcatatgaaccagagtgctggccaggaatgagaccacgctttgcctgttggtcaccgcatctccagggaactcagaggcatctccaggaaacacctgaatatgtgagctggttagggatggtgt

SEQ ID NO: 94327 - DNA, 522 bp, Homo Sapiens
agcgagcagataccaccccaaagtcgagggatgtacagcaacagaatgagaagctacaaacaagaaatgggaaaactcgaaacagattttaaaaggtcacggatcgcctacagtgacgaagtacggaatgagctcctgggggatgatgggaattcctcagagaaccagagggcacatctgctcgataacacagagaggctggaaaggtcatctcggagactagaggctggataccaaatagcagtggaaaccgagcaaattggtcaggagatgttggaaaaccttagtcatgacagagaaaagatacagcgagcacgtgaaagacttcgggaaacagatgctaatttgggaaaaagctccaggattctgacagggatgttgcgaagaatcatccagaaccgcatcctgctcgtcatcctagggatcatcgtggtcatcaccatcctgatggcgatcactttttctgtcagaagacactgatgtatctgctcgcgagccgggatcctctagatcaacgcgcat

SEQ ID NO: 94328 - DNA, 1198 bp, Homo Sapiens
  misc_feature (79)..(113): n is a, c, g, or t
  misc_feature (163)..(255): n is a, c, g, or t
gatcgataactcactatagggcctagctctcgagccgaacgacgagcgcagcgaagtcagtgagcgaggaagcggccgnnnnnnnnnnnnnnnnnnnnnnnnnnnnnnnnnnncagtcgacggtaccggacatatgcccgggaattcggccattacggccggnnnnnnnnnnnnnnnnnnnnnnnnnnnnnnnnnnnnnnnnnnnnnnnnnnnnnnnnnnnnnnnnnnnnnnnnnnnnnnnnnnnnnnnnnnnnngtgtgagccaccgcgcccggctcattcccctcatttttgaccgtaaggatttcccctttcttgtaagttctgctatgtatttaaaagaatgttttctacattttatccagcatttctctgtgttctgttggaagggaagggcttaggtatctagttgatacataggtagaagtggaacatttctctgtcccccagctgtcatcatataagataaacatcagataaaaagccactgaaagtaaaactactgactcgtgtattagtgagtataatctcttctccatccttaggaaaatgttcatcccagctgcggagattaacaaatgggtgattgagctttctcctcgtatttggaccttgaaggttatataaaattttttcttatgaagagttggcatttctttttattgccaatggcaggcactcattcatatttgatctcctcaccttcccctcccctaaaaccaatctccagaactttttggactataaatttcttggtttgacttctggagaactgttcagaatattactttgcatttcaaattacaaacttaccttggtgtatctttttcttacaagctgcctaaatgaatatttggtatatattggtagttttattactatagtaaatcaaggaaatgcagtaaacttaaaatgtctttaagaaagccctgaaatcttcatgggtgaaattagaaattatcaactagataatagtatagataaatgaatttgtagctaattcttgctagttgttgcatccagagagctttgaataacatcattaatctactctttagccttgcatggtatgctatgaggctcctgttctgttcaagtattctaatcaatggctttgaaaagtttatcaaatttacatacagatcacaagcctaggagaaataactaattcacagatgacagaattaagattctcaag

SEQ ID NO: 94329 - DNA, 1465 bp, Homo Sapiens
ggacaggactggactgagggcccctgactatactacaccagaaatataccagaccatgctgtactgctggcacggggagcccagtcagagacccacgttttcagagttggcggaacatttgggaaatctcttgcaagctaatgctcagcaggatggcaaagactacattgttcttccgatatcagagactttgagcatggaagaggatactggactctctctgcctacctcacctgtttcctgtatggaggaggaggaagtatgtgaccccaaattccattatgacaacacagcaggaatcagtcagtatctgcagaacagtaagcgaaagagccggcctgtgagtgtaaaaacatttgaagatatcccgttagaagaaccagaagtaaaagtaatcccagatgacaaccagacggacagtggtatggttcttgcctcagaagagctgaaaactttggaagacagaaccaaattatctccatcttttggtggaatggtgcccagcaaaagcagggagtctgtggcatctgaaggctcaaaccagacaagcggctaccagtccggatatcactccgatgacacagacaccaccgtgtactccagtgaggaagcagaacttttaaagctgatagagattggagtgcaaaccggtagcacagcccagattctccagcctgactcggggaccacactgagctctcctcctgtttaaaaggaagcatccacacccccaactcccggacatcacatgagaggtgctgctcagattttcaagtgttgttctttccaccagcaggaagtagccgcatttgattttcatttcgacaacagaaaaaggacctcggactgcagggagccagtcttctaggcatatcctggaagaggcttgtgacccaagaatgtgtctgtgtcttctcccagtgttgacctgatcctctttttcattcatttaaaaagcatttatcatgccccctgctgcgggtctcaccatgggtttagaacaaagacgttcaagaaatggccccatcctcaaagaagtagcagtacctggggagctgacacttctgtaaaactagaagataaaccaggcaatgtaagtgttcgaggtgttgaagatgggaaggatttgcagggctgagtctatccaaggaggctttgtttaggacgcgggtccccaagccaagccttaagttgtggaattcgggatcgatagaaaggaagactaaacggttaccttgcttttggagagtactggagcctgcaaatgcattgtgtttgctctggttggaagtgggcatggggtcctgttctgaaatgtctaagggttcacaccggggttctggttttagaaggttgcgtgttcttcgaggtgggctaaagtagagttcgtcgtgctgtttctgactcctaatgagagttccttccagaacgttacgtgtctcctgggcaagccccaggaaggaac

SEQ ID NO: 94330 - DNA, 1249 bp, Homo Sapiens
  misc_feature (73)..(107): n is a, c, g, or t
atatatgaccttcattggcgctaccgtcgagcgaacgacgagcgcagcgagtagtgagcgaggaagcggccgnnnnnnnnnnnnnnnnnnnnnnnnnnnnnnnnnnncagtcgacggtaccggacatatgcccgggaattcggccattacggccggggattggccaagcatttgacctggcatacaggaaatttctagaatcaggaggaaaagatgttgaaacaagaaaacagatcgcagggttacaaaaaagaatccaagacttggaaacagaaaatatggaacttaaaaataaagtacaagatttggaaaaccaactgagaataactcaagtatcagcacctccagcaggcagtatgacacctaagtcgccctccactgacatctttgatatgattccattttctccaatatcacaccagtcttcgatgcctactcgcaatggcacacagccacctccagtacctagtagatctactgagattaaacgggacctgtttggagcagaaccttttgacccatttaactgtggagcagcagatttccctccagatattcaatcaaaattagatgagatgcaggaggggttcaaaatgggactaactcttgaaggcacagtattttgtctcgacccgttagacagtaggtgctgacatcaagaacaagaaatcctgattcatgttaaatgtgttcgtataacacatgtcatttattattattactttaagataggtattattcatgtgtcaatgtttttgaatattttaatattttgaaaattttctcagttaaatttcctcaccttcactattgatctgtaatttttattttaaaaacagcttactgtaaagtagatcatacttttatgttcctttctgtttctactgtagatgaatttgtaattgaaagacatattatacaaatacctgccttgtgtctgagttctatttagttagcatcttgaaatttgtattccttttccagagggctagtttattaatgatttcccaaaagccataccttaaagataacttttttaaatccgaagagacatgcccatgtcaaacttaaacaggtttctggtttttaaaccaaccaacatgtttactatttcactgggacagaatatcaattttttaggaaaaaaatactggtcccccatcactgggcgaagaatgccaaaccttttaacacataattggcccacaaggggccaccttaaattttcctcaaccgagggaaaaaaata

SEQ ID NO: 94331 - DNA, 844 bp, Homo Sapiens
  misc_feature (69)..(103): n is a, c, g, or t
ccatatagggcgctagctctgccgagcgaacgacgagcgcagcgaagtagtgagcgaggaaccggccgnnnnnnnnnnnnnnnnnnnnnnnnnnnnnnnnnnncagtcgacggtaccggacatatgcccgggaattcggccattacggccggggctgcctctacggcgaggcctaccctgcctgcagccctggcaacacctccacggccgaggaggagctctgtcgccttaagctgctggccaagcacccctgccacatcaagaagttcgaccgctacaagtttgagattaccgtgggcatgccattcagcagcggcgctgacggctcgcgcagccgcgaggaggacgacgtcaccaaggacatcgtgctgcgggccagcagcgagttcaaaagcgtgctgctcagcctgcgccagggcagcctcatcgagttcagcaccatcctggagggccgcctgggcagcaagtggcctgtcttcgagctcaaggccatcagctgcctcaactgcatggcccagctctcgcccaccaggcggcacgtgaagatcgagcacgactggcgcagcaccgtgcatggcgccgtgaagttcgccttcgacttctttttcttcccattcctggtcggcggccctgaggatggtccgccacgaggagcttccagtgcatgttgccatgaggccctttccccagtgtggccccagcccgacaggcatgcacccaatgccgttctgtgccccacgtgtgcaaaactgtgggctgcagaagactttgcgacccaggtgtagattgcatgggaccccggaccaaaaggaaagggctggctgtgtaaccctctggtcaactc

SEQ ID NO: 94332 - DNA, 1558 bp, Homo Sapiens
  misc_feature (307)..(307): n is a, c, g, or t
ttgctttagaaaaaggggaagttcctccacccccccaagcttttaaagcgggagggcccttttctcaggttccagcctcccaccgcaggggtccacccggccggttcccctctgggctgtccggggcccgtgtgtgccgacgtcagagtaagagcccgagcggggacaccctggcagatccttcaccaaaaagctagtgactttgcgaaagccatgcagccccgctctggccggccccccggccatcccgtgctcccaaacagagtctccaaacacggtggactctgccgctgctgattccacaccncagggtgctggctgaggagtttactgcagaaacaaggcaccacagagaggctggacacttgggtggtgggattcggggcacgctgggtaagtccaagggcggaaggaaggagggggaggaggagaaggctgagttttaaataacgtctcaggaggccggagccacgctagatgggctccggtttgagcttctctgctaggaagtcattcacaaaggcctccacgatggcgggggtgatctcctccacgtccatcacgtacttggcccgggctgacatgtccaggatggtgagcaaaggggcagcctcaggcaggttggtgtaatctcgcagggagtcagtcatgtcatcctccccggctacgaagaacagaaggggtgcctcctcctctttggctttgtacttggcaatgattttctcagctatcggctgaatcagctgcttggccgcctcggactctccgtcatcctcagaatctacaaaaaggacgaggcaggggccctcgttaagctgcgcggcgttggagtcggagagctccagcacgggcttggggtgccaggggaactcccggcagtcctcgtcgttcagcacctccacccgcccctgccgcgtgatcacctcgccctgcgggtccagcatgatgagcgtggggatgccttggattccgtacagccggttgaggcgcgaccgccgggcctcatccgtgtaggggacggcgagccagggcatctcactgaagtactgtttgaaggactcctccgacctgtctgcactaacgaagatgatctcgaagttctggcctgcctccttgatcttccggtaggattccaccaggacccgggtgaggcttcggcagggcggacaccaatgtgcggagaaatagacgcccacgtgagacccctccaggctgctgctctccagagactgcccattgtttctaagcaagggccctgcaatgacttccctgaagggtttcggtccccaggggaactccagaccttctgggtcatctcggatcaccagcagcccgttcctgcacacaaccttcccagtggtggcgtcgaggaatattagtgatggaatgttggaaattcggtatttgttccaaagtttgagcttcctgtgcttctccttgtagggcagcgccagccacggcatgtcccgcacgaagtcctgccactgccgctggtcctggtccgaggacacgaagacgatctccaggcgccaccgcggcagcggatcataacaccgga

SEQ ID NO: 94333 - DNA, 776 bp, Homo Sapiens
  misc_feature (82)..(116): n is a, c, g, or t
aaagtgtataatcactatagggcgctagctctttgcagccgaacgacgagcgcagcgaagtattgagcgaggaagcggccgnnnnnnnnnnnnnnnnnnnnnnnnnnnnnnnnnnncagtcgacggtaccggacatatgcccgggaattcggccattacggccgggggggcgagtggctgttgagcggcgccgcgggagttccgcaggtttcccgtgttcgcagcggagccggaggccagctgaacccggccgtgggatcccggataggaggaggaggggacccataggacgcgttaacatggacctggaaaacaaagtgaagaagaaaaatatgtcgtaactgcaagtgtggccaagaagagcatgatgtcctcttgagcaatgaagaggatcgaaaagtgggaaaacttttttgaagacaccaagtataccactctgattgcaaaactaaagtcagatggaattcccatgtataaacgcaatgttatgatattgacgaatccagttgctgccaagaagaatgtctccatcaatacagttacctatgagtgggctcctcctgtccagaatcaagcattggccaggcagtacatgcagatgctacccaaggaaaagcagccagtagcaggctcagcagggggcaccagtaccggaagcaagcagctggcaaaaccagcctcccctgcacatgaccagggacccttcaaagtgccatgagttgtctcccagagaggtgaaggagatggagcagtttgtgaagaaatataagagcgaa

SEQ ID NO: 94334 - DNA, 859 bp, Homo Sapiens
ggggggtccgggccgcaggcccgctgcggcggactgggcggcggaagttcgacggcgccgggcgagtggctgttgagcggcgccgcgggagttccgcaggtttcccgtgttcgcagcggagccggaggccagctgaacccggccgtgggatcccggataggaggaggaggggacccataggacgcgttaacatggacctggaaaacaaagtgaagaagatgggcttaggtcacgagcaaggatttggagccccttgtttaaaatgcaaagaaaaatgtgaaggattcgaactgcacttctggagaaaaatatgtcgtaactgcaagtgtggccaagaagagcatgatgtcctcttgagcaatgaagaggatcgaaaagtgggaaaactttttgaagacaccaagtataccactctgattgcaaaactaaagtcagatggaattcccatgtataaacgcaatgttatgatattgacgaatccagttgctgccaagaagaatgtctccatcaatacagttacctatgagtgggctcctcctgtccagaatcaagcattggccaggcagtacatgcagatgctacccaaggaaaagcagccagtagcaggctcagagggggcacagtaccggaagaagcagctggcaaagcagctccctgcacatgaccaggaccccttcaaagtgccatgagttgtctcccagagaggtgaaggagatggagcagtttgtgaagaaatataagagcgaagctctgggagtaggagatgtcaaacttccctgtgagatggatgcccaaggccccaaaacaaatgaacattcctggaggggatagaagcaccccagcagcagtgggggccatg

SEQ ID NO: 94335 - DNA, 1090 bp, Homo Sapiens
  misc_feature (117)..(126): n is a, c, g, or t
gtggaccggtccggaattcccgggatggaattcgttgagtttgcttttagagccaagtttctttccctgtgtgggtttttgaggaaaacctgaggtcccctaatctgtggccaccannnnnnnnnngccgccacgccttagagcagagcagcccctcctctcatttggtgcagaaacagtcaagaggaaccattggcctagagctcctgtgaccgagagcgccacggaagcctggggatgatgtcgggcagctttattctttgcttggctttggtaactaggtggtcccctcaagcatcctcagttcctcttgctgtttatgaatctaagacaaggaagtcctatagaagccaaagggacagggacggaaaggacaggtcccaagggatggggctgtctttacttgtggaaaccaggaaattgctcctctcagccaaccaaggttgaccacacaccacccttccggagcagctcagtcagccctcggggacgagaaaccacaagcgcagagacgctgaggcccaggcaggtgaagaggaagtggctttgggtttttaaagtaggtgagcgtgagcctctctgactgcttcttccccgggggggactgcaaaccgctcagggttgcggcagagccatggacttccggtccctgcaacgggtgacctaagcgtggtgcacccatcagtcacgcaggaggactgacttgacagacgaaagacaagcccggatgacacaggggtgagaagagtcagggccgcacctctgtccctgcaaaccaacaggtgcatggtggagtgtggcagtccccacagctccacaaggggctcccccgccaacggggacgacagggatcctcaggaacttctgacctccaccaagtcaagtggaccactctccactccacgaggaattgggaaacggttcttttaaatgggattttagagcctcgggaatgcatgtgcgtcccatctttcatattaggggtcaggatagattcattttcttgcacatagtgggaaagatataagctgcagtaatttgctctttgaatgaccgtcacccccagtataagatatggcttgtatccccc

SEQ ID NO: 94336 - DNA, 841 bp, Homo Sapiens
  misc_feature (632)..(632): n is a, c, g, or t
  misc_feature (685)..(685): n is a, c, g, or t
ggggtgggagcccgtggcctttaaagtgccgttcagccttttcctccaggggtgctttgtaaacacggctgtgctcagggctcgcgggtgaccgaaaggatcatgaactagtgacctggaaagggtactagatggaaacttgagaaaggactgcttattgataacagctaaggtattcctggaagcagagtaaataaagctcatggcccaccagctagaaagtattcttgccatgagaaaaagaatgtgataagttattcaacttatgaaattcaagttacatgtgaattctgccaggcaatacaaggacctgtggaatatgagtgatgacaaaccctttctatgtactgcgcctggatgtggccagatcagaccccaacaccaacaagattcttgaaaaactgtgaagaagtgggtttgtttaatgagttggcgagtccatttgagaatgaattcaagaaagcttcagaagatgacattaaaaaaatgcctctagatttatcccctcttgcaacacctatcataagaagcaaaattgaggagccttctgttgtagaaacaactcaccaggatagtcctttacctcacccagagtctactaccagtgatgaggaagaagtaccattggcacnaactgcacagcccacatcagctattggtcgtccagcatcattacaggttcccnatgtgctgctttacaagtctgactcaagtgtaattattcagcaggcagtaccttcaccaccctcaagtactgtaatccacccaggcaacatccctctaacagggctaattggtcctgtaaccaagccccattttcctccttctggtaaatctttcc

SEQ ID NO: 94337 - DNA, 684 bp, Homo Sapiens
  misc_feature (78)..(140): n is a, c, g, or t
cagtcgacggtaccggacatatgcccgggaattcggccattacggccgggctatcagccaggctggagtgcactagtnnnnnnnnnnnnnnnnnnnnnnnnnnnnnnnnnnnnnnnnnnnnnnnnnnnnnnnnnnnnnnncaggaaagaaaacaaaagaaaatttggactattgccaattacaaatattcttagagaagaattcaaaacagtaactgtggatgatggaaacaatagttatgataaaagtctgatgaaacttcccagttcacaaggaaatttaattacttatgtgcagcattttaagacagtaatcagaatcatgactgacagcatcatatcagggccagcagacttttataaatttcatacaatcttcagaaataataactttgttttttattatttggggaatagattctacctttgggtcacccagggcgggcagttgcaggggaatgactctcggctcatgtgaaaccttccgaattccggggtcccaggcagtccctccgtgtcctacagcttcccgagtgggctgagaatatacgggcttggtgccaaccggggcattggcgggacacaaggcgctcaacaggggagcacggggtttcacactcatactaaggcggggtcgggaactccagaccttggggtgatccacgttgccttgggcttcccaaaa

SEQ ID NO: 94338 - DNA, 741 bp, Homo Sapiens
  misc_feature (71)..(105): n is a, c, g, or t
aaatgataaatcatataggtagctcgtcgagcgaagacgagcgcaggagtagtgagcgaggaagcggccgnnnnnnnnnnnnnnnnnnnnnnnnnnnnnnnnnnncagtcgacggtaccggacatatgcccgggaattcggccattacggccgggttacagacatgggacaccactcccggctgttctttctttaaaagtaataacgaagttctatttatttttatttttctgtatctccagagcctcaaaatgtacatttccaattctggtattttcctataccagtgaatggaaatagatgactatagagagtaaactggtttaccaattcagtaaataatattctgaatagtttgggaaaattctatggaaacatttagaaattaccatattttttgtgagagaccaggaccctaacattaggacctacacttgcctgtcggatctgaatttcatcttatagatacctcatactgaggtctaaatctaaatttctcttcattcaaattagtttctttctgaggcttggtatttcatattcctcttagctttttctctcctatttctgggtgctagttaaggtggactggaatactataatatatctggtctctgtcctctttgattcccatgtgttgtcttcctcttccacgtcatcatggggctcatgcctgcactagtggaatattcttttaatggggttgtcttcctgcagtctcttcttttggctgaacaacct

SEQ ID NO: 94339 - DNA, 1614 bp, Homo Sapiens
  misc_feature (83)..(117): n is a, c, g, or t
aaaaacttgctgtagtcatataggggctagctcgcgtagcgaacgacgagcgcagcagagtcagtgagcgaggaagcggccgnnnnnnnnnnnnnnnnnnnnnnnnnnnnnnnnnnncagtcgacggtaccggacatatgcccgggaattcggccattacggccggggactggccgcgcgatggacccgctgcccgcggctgcagtcggggcggcagctgaggcggaggctgacgaggaggcggatcccccggcgtcagatctgccgacaccccaggccatcgagccccaggccatcgtgcagcaggtcccagcccccagtcgaatgcagatgccgcaggggaacccgctgctgctgtcccacaccctgcaggagctgctggccagggacaccgtgcaggtggagctcattccggagaagaagggcctcttcctgaagcatgtggagtatgaggtttccagccagcgcttcaagtcctcggtatacagacggtacaatgacttcgtggtcttccaggagatgctcctgcacaagttcccctaccgtatggtgcctgccctgccacccaagagaatgctgggagctgacagggagttcatcgaggccaggaggagagccctgaagcgcttcgtcaacctggtggcgcgacaccccctgttctccgaggatgtggtcctcaagctcttcctgtccttcagcggctcggatgtgcagaacaagttaaaggagtcagcacagtgcgtcggggacgaattcctgaactgtaagctggctaccagggccaaggacttcctcccagctgacatccaggctcagtttgccatcagccgggagctgatccggaacatctacaatagctttcacaagcttcgcgacagggccgagcggatcgcgtcgcgggccatcgacaatgcggcagatcttctcatattcgggaaggagctaagtgcaataggggctgacacgaccccggctgccctcctgggccgctctgaatagcagcacgtgggggtccctgaaacaggctctgaaaggcctgtctgtggaattcgcgctgctcgccgacaaggctgcacaacagggtaagcaggaagagaacgacgtggtggagaagctgaacctcttcttggatctgctgcagtcctataaggacctgtgcgagcggcatgagaagggcgtgttgcacaagcaccagcgggccctgcacaagtacagcctgatgaagaggcagatgatgagcgccaccgcgcagaaccgcgagccggagtccgtggagcagctggagtcccgcatcgtggagcaggagaacgcgattcagacgatggagctgcggaactacttctccctgtactgcctgcaccaggagacgcagctcatccacgtctacctgcccctcacctcccacatcctccgcgccttcgtcaactctcagatccaagggcacaaggagatgagcaaggtgtggaacgacctgaggcccaagctcagctgcctctttgcgggaccacacagcaccctgaccccaccgtgctccccgccggaggacggcctgtgtcctcactagcgcctgaggctgaggtggtgctccctgcggccgcactaaaacctctttcc

SEQ ID NO: 94340 - DNA, 924 bp, Homo Sapiens
  misc_feature (77)..(111): n is a, c, g, or t
  misc_feature (861)..(862): n is a, c, g, or t
  misc_feature (865)..(865): n is a, c, g, or t
  misc_feature (891)..(893): n is a, c, g, or t
aagatgtatagatcatatagggcgctagctcgtctgagcgaagacgagcgcaggagtagtgagcgaggaagcggcgnnnnnnnnnnnnnnnnnnnnnnnnnnnnnnnnnnncagtcgacggtaccggacatatgcccgggaattcggccattacggcgggggcacctccggttctcccccatcctccgggagtgtctgggcgctcagtccgctctgatcccgccgaaaccacctgcggttggcaggcaggagactaggcgtctgccggggagggcagggacccgctaagctgatctcctgtacagtagtgctacttaaaatatgctggggaccatcaccatcacagttggacagagagactctgaagatgtgagcaaaagagactccgataaagagatggctactaagtcagcggttgttcacgacatcacagatgatgggcaggaggagacacccgaaataatcgaacagattccttcttcagaaagcaatttagaagagctaacacaacccactgagtcccaggctaatgatatgggatttaagaaggtgtttaagttggttggctttaaattcactgtgaaaaaggataagacagagaagcctgacactgtccagctactcactgtgaagaaacgatgaacaggggagggagcagcaggggctggccgaccaccaaggacccccacccttgggggctgggagaagcagcaatcccaaagaaagcggaaccccaaacaattctaccgaagaaaccccgaaagaagacccctgaaagcgtgaaccaaaggcccccccaagaaaatttctcccccccagcccgaaattctgggccacagcaggtggaagaaatggcccacnnccnccctatcctgcaacgtaacataaaannncacaatgttcggggcccgcctccgggcccct

SEQ ID NO: 94341 - DNA, 976 bp, Homo Sapiens
ctacaccccccactctccaccttcgtcgatccttcctctcttcctggcccggctcggtattcccgggatgggctctcccctccccagtgtgaccgcgaccctaccctctgcaaggcgatggcccgcgccccgagcgcacgctagcgtgcctgggtgcccggccatgggctgcatcggctctcggagcccggcgggtcaggcatttctggggaccaacagctggccgaggctcagggatagagacggctgctccagctaaagtgtcctcggaccccgcttgggctgtggagcggatcgaacttcctcggggtctctctctatcctctttgggatctgctcgaaccctccgaggctggaagcaggtcctcccgaccttcctcggtggacagtcaggacttgccacaggtgaatgttggagacacagtcgcgatgctgcccaagtcccggcgagccctaactatccaggagatcgctgcgctggccaggtcctccctgcatggtatttcccaggtggtgaaggaccacgtgaccaagcctaccgccatggcccaggccagagtggatcacctcattgagtggaagggctggacgcaagccgagtgactcacactgactgaccctggaatcagccattaacctcctattcagacctcagcgagggcgaacaagaggctcgacttgcagcaagagtggctgagcagttggccatcgcggaagccaagctccgagcatggtctacggtggatggcgaggactccaactgatgactcctatgatgaggactaagctgggggaatggaacacagacatggctgggcagctgccctgagggcgcacactccaggacctgtacaccgggccaccgggatataccggcctgtgcgccagggtccgaggagccctgaagacgcgactgctcacagacacgcgacccaagacaaccctgtgcactaagactgtgcagcctggaggacgc

SEQ ID NO: 94342 - DNA, 1031 bp, Homo Sapiens
  misc_feature (955)..(989): n is a, c, g, or t
ttcgtataaacccctgaaaatggttcccagatgttggaagggttcccctcttgaggaagatgtcggaaaatagttcaacaaaggaacctgtgccatcagctttggattattagggatggcatgaaatgcactgtagaaagaacgcaacagttgcattctcaattgctgtgcgctgttgagtagtcagtcctgttgtagcagctgaagaaagagaagctgatcttgcactggtctgttgtgcacctaaattatggcttccagaagtggacccagagtgacacaataaaaacagaagtgctgtccatagtggattgacttcagaaccaccaagccaatctttcataatatggctattgccaacttctgtcaaaaacctaagaataggagcaactaggtcggctgtgataggcatcttattacattgttgtgggacatgatggcgcctgagtttgtcctgggaaatatctattgactgggcaatgctttctgagctagaaatgtggctaaagcagaaactagccagactcctcacaagaagagaaggcaaacctgagtctagtaattgtttaatagcttcaggagattgagaagaggaagcaagggtagccaaatgtgattcagttaatgcgagaggtgcttgtgcatttttagagtcatctgttaaagatgaactaagatcctgctttttgctatcatctgtcatggacagtctatgatgacattgcactggaggaggggtaattcccatccagcccatgagcaaagaaaaatagtttgggtgtacgtgacacattgagcaaagtagactgtcaacagctttcttcaaaaccatattgcagggaagagacatggaccaattaaaaagtaactcaaagagctcttggtccaggagtgctggtaagtccccggccgtaatggccgaattcccgggcatatgtccggtaccgtcgactgnnnnnnnnnnnnnnnnnnnnnnnnnnnnnnnnnnncggccgcttcctcgctcataagctctgctgcgctcggtcgtt

SEQ ID NO: 94343 - DNA, 508 bp, Homo Sapiens
  misc_feature (64)..(137): n is a, c, g, or t
  misc_feature (144)..(156): n is a, c, g, or t
tagggcatggtggcgcatgccatggtgctagctacccaggaggctgaggtaggaggattgcttnnnnnnnnnnnnnnnnnnnnnnnnnnnnnnnnnnnnnnnnnnnnnnnnnnnnnnnnnnnnnnnnnnnnnnnnnnctgtttnnnnnnnnnnnnntccccagcaatcctaccatccccagcctccaggagtgatctgtctcctaagcattgagaaagtggagactaggtagcataaactagtgtgcaaagcttcacactcacattagattggcaggatcattttatgggggaggaacaggtacagccagcttaggggcagagtaggggaggagactggtaagaaaaagaggtctacttcctatccatccctttcttcagggtagagtttcacatggtaggctaaggcagaaagctctcacccctgcaggaaaagaagaaattcagggcttgagccaggagtaaaggaaagaagaaagcagttatcctaggggttatctgcatcgtct

SEQ ID NO: 94344 - DNA, 870 bp, Homo Sapiens
  misc_feature (579)..(579): n is a, c, g, or t
cagtcgacggtaccggacatatgcccgggaattcggccattacggccgggctacagaagtaatattacattatcgaccatgtgagagtgatcccacacaactgccaaaaattgcagaaaaagcaattcaagactttcctacgcggccgctatcaagatttataccttggtttccatatgatgggtccaagcttccactcacacctaaaagatcaccacctgtgatttctgaagaggcagctgaagatgtgaaacagtacttaaccatttcagaacatgatgctaagtcacacagttatgattgcacagtagatctattgggagtttcaacctagcttgaaaaagcagcatttaacctggtcacacacactgaaggaacagactaattctggaaatctgggtaaacaatcagaaaagggaaaacagcacaagaggagatcttggagtatttcccttcccagcaataattgtactaaaaacgtttctcctttgtctaaaaaattgcaagatagtttaaaggcactaaatttacactcactttatagagcaagatggacaatagaacacactatttgtaacnagccaaactctggaagacatttgggacaaaactcaatcaaattcattaggcacaatgaacttccatcttgtaatgctacaattcagaggcatttaggccaaatatgggtgttctgtgatattatgtattgtgaatattgtgggaaagtcttcttaaaggacagattaggtcttactggacaaataatttatttgtgcataaatatggcgttatttaagtatgtatgaattccactgattgtccaaaagaatattctgattgacatgcactatgggtggcataggataaaat

SEQ ID NO: 94345 - DNA, 1335 bp, Homo Sapiens
  misc_feature (1176)..(1236): n is a, c, g, or t
  misc_feature (1289)..(1289): n is a, c, g, or t
ggggctttggtcttcaagtagccaaaggcatgaaatatcttgcaagcaaaaagtttgtccacagagacttggctgcaagaaactgtatgctggatgaaaaattcacagtcaaggttgctgattttggtcttgccagagacatgtatgataaagaatactatagtgtacacaacaaaacaggtgcaaagctgccagtgaagtggatggctttggaaagtctgcaaactcaaaagtttaccaccaagtcagatgtgtggtcctttggcgtgctcctctgggagctgatgacaagaggagccccaccttatcctgacgtaaacacctttgatataactgtttacttgttgcaagggagaagactcctacaacccgaatactgcccagaccccttatatgaagtaatgctaaaatgctggcaccctaaagccgaaatgcgcccatccttttctgaactggtgtcccggatatcagcaatcttctctactttcattggggagcactatgtccatgtgaacgctacttatgtgaacgtaaaatgtgtcgctccatatccttctctgttgtcatcagaagataacgctgatgatgaggtggacacacgaccagcctccttctgggagacatcatagtgctagtactatgtcaaagcaacagtccacactttgtccaatggttttttcactgcctgacctttaaaaggccatcgatattctttgctcttgccaaaattgcactattataggacttgtatcgttatttaaattactggattctaaggaatttcttatctgacagagcatcagaaccagaggcttggtcccacaggccacggaccaatggcctgcagccgtgacaaaactcctgtcatatcggagtccaaaacttgaattctgggttgaattttttaaaaatcaggtaccacttgatttcatatgggaaattgaagcaggaaatattgagggcttcttgatcacagaaaactcagaagagatagtaatgctcaggacaggagcggcagccccagaacaggccactcatttagaattctagtgtttcaaaacacttttgtgtgttgtatggtcaataacatttttcattactgatggtgtcattcacccattaggtaaacattcccttttaaatgtttgtttgttttttgagacaggatctcactcnnnnnnnnnnnnnnnnnnnnnnnnnnnnnnnnnnnnnnnnnnnnnnnnnnnnnnnnnnnnngctcaagcctcccgaatagctgggactacaggcgcacaccaccatccccgggntaatttttgtatttttggaaaagacggggtttttgcatggtggcca

SEQ ID NO: 94346 - DNA, 1076 bp, Homo Sapiens
tcccgggatcgaggagcaagcaagtgaaggcacagacgcacgggacaggagagcctgggcaagactggagagcccagacctgggatggcggattcgtgcaggaacctcacctacgtgcggggctcggtggggccggccaccagcaccctgatgttcgtggccggtgtggtgggcaacgggctggccctgggcatcctgagcgcacggcgaccggcgcgcccctcggccttcgcggtgctggtcaccggactggcggccaccgacctgctgggcaccagcttcctgagcccggccgtgttcgtggcctatgcgcgcaacagctccctgctgggcctggcccgaggcggccccgccctgtgcgatgccttcgccttcgccatgaccttcttcggcctggcgtccatgctcatcctctttgccatggccgtggagcgctgcctggcgctgagccacccctacctctacgcgcagctggacgggccccgctgcgcccgcctggcgctgccagccatctacgccttctgcgtcctcttctgcgcgctgcccctgctgggcctgggccaacaccagcagtactgccccggcagctggtgcttcctccgcatgcgctgggcccagccgggcggcgccgccttctcgctggcctacgccggccctggtgggccctgctggtggctgccatccttcctctgcaacggctcggtcaacctcagcctctgctgcatgtaccgccagcagaaacgccaccagggctctctgggtcccacgccgcccacccgtataaggccaagcgcgcacacctggatcctgcttgcccctctggacatgggtcctggcccgcggggattcctggggtcttagacaatccggtgcccccgcccgaggggtgtgcccccggctgcgaaccaaaataaatggcggacaatttcccgttgcactacccgttatcaatcctaccgccccatgtcttgcgaccctgtgggcactccgaccctataacccacaataagctttaaccttattacgccgctaatcatagcaccaattcgacactaaataatcgagcaaagagcaga

SEQ ID NO: 94347 - DNA, 957 bp, Homo Sapiens
  misc_feature (830)..(830): n is a, c, g, or t
  misc_feature (861)..(861): n is a, c, g, or t
  misc_feature (894)..(895): n is a, c, g, or t
  misc_feature (941)..(941): n is a, c, g, or t
cagtcgacggtaccggacatatgcccgggaattcggccattacggccgggggagggaggcggaggaatatgtccgagagggaagtgtcgactgcgccggcgggaacagacatgcctgcggccaagaagcagaagctgagcagtgacgagaacagcaatccagacctctctggagacgagaatgatgacgctgtcagtatagaaagtggtacaaacactgaacgccctgatacacctacaaacacgccaaatgcacctggaaggaaaagttggggaaagggaacaatggaagtcaaagaaatgcaaatattctttcaaatgtgtaaatagtctcaaggaagatcataaccaaccattgtttggagttcagtttaactggcacagtaaagaaggagatccattagtgtttgcaactgtaggaagcaacagagttaccttgtatgaatgtcattcacaaggagaaatccggttgttgcaatcttacgtggatgctgatgctgatgaaaacttttacacttgtgcatggacctatgatagcaatacgagccatcctctgctggctgtagctggatctagaggcataattaggataataaatcctataacaatgcagtgtataaagcactatgttggccatggaaatgctatcaatgagctgaaattccatccaagagatccaaatcttctcttgtcagtaagtaaagatcatgctttacgattatggaatatccagacggacactctggtggcaatatttggaggcgtagaagggcacagagatgaagttctaagtgcttcttgtgaaaatgccattgtgtgctggaaacctgngcaagatggaagatgatatagataaaattanacccagtgaaatctaatggtgactattcttggnngcgatttgattacaagccagtggtgacatttggggtacatgaaggntttttctatgggaatt

SEQ ID NO: 94348 - DNA, 871 bp, Homo Sapiens
  misc_feature (44)..(78): n is a, c, g, or t
gaacgaccgagcgcagcggagtctttgagcgaggaagcggccgnnnnnnnnnnnnnnnnnnnnnnnnnnnnnnnnnnncagtcgacggtaccggacatatgcccgggaattcggccattacggccgggtaatgcttgctttttctctacctttcttccttgtttcagttgggaagcttttggctgcaagtaacagaaactcctaattcaaatggcttaagcaataaggaaatgtatattcccacataactagacgttcaaacaggccaggctccagcacttcagtacgtcaccagggatctgggttcttcccagctctctgctctgccatctttagcgctggcttcattctcagactctggtagcatgatggctgtagctgtttcatgggccccttcaaacctcatagcaaccagaggaagaaaatgagccattttttgagtctccttcatagacttgaataactctttttcagagcttctcacagcaaacctctcctcatgtctcctcatgtcttattgttcagaaatgggtaatgtggccatttcaccagtcactgccaacaacaacgaggttcctataattgtctctgagtaaccctttggaatggagagggtgttggtcagtctacaaactgaacactgcagttctgcgctttttaccagtgaaaaaatgtaattattttcccctcttaaggattaatattcttcaaatgtatgcctgttatggatatagtatctttaaaattttttattttaatagctttaggggtacacactttttgcttacaggggtgaattgtgtagtggtgaagactcggcttttaatgtacttgtcacctgagtgatgtacattgtacccaataggtaatt

SEQ ID NO: 94349 - DNA, 861 bp, Homo Sapiens
cagtcgacggtaccggacatatgcccgggaattcggccattacggccgggggcggagaacgcgccaggctcatcacctggagcatcgtgcctcagtttccccctcggcaaatggggcttcagcggctcgcgacgcacattgatggagcgtatgtccaggcgccggtgcaccgcaaggagcaaaacagacacagttcttggtcctagggctcacgtcccggggcgaagaggatcctccataaacgatcagccatagcagctgtgattggacaagagactgatttcagtgactttctcctgataagagaccaccgaccagctgaccatgccgaccagctgacccgttaatagagagagatgatgcacctgcatgcctttgtgtcctgaaaagacgtttggccataaaggccctaattgtaagatgtgtaacatgttaagtctccaccccaaagtgaacatgggtcatatattacatgctttgctcaataagagggcatgtgtcaggaccaccttcatgaatattcatagctcctcctgttacctgttgacatatgtatgtttagccaatcccttcagcatagcgctcctgccccaacccctcctccttggacgtgcctgtctctggccttggtgggagacagattcccagcctcagacagatggccgcacttgcaggctacgaccgtttacaagaacataaaggccttctcctttgttggcaaaaatccacataaatactacaacacaaacattgtgttgggcggccctaggccctttgaaaaggttttgaacaccatttcgttggggcgcggggaccccataaaggacgggtaaactggggcacagggggtccccagggaac

SEQ ID NO: 94350 - DNA, 924 bp, Homo Sapiens
ggggtaggcgttccgagcggcggcggagattgtccgcagtgactacactcatggcaggtcccctgtggcggaccgcagcatttgtgcagagacacaggacaggcctcttggtgggttcctgtgcaggcctgtttggagttccagtctcgtaccacctcttcccggatcccgtggtccaatggctctaccagtactggcctcagggccagccagctccgctccctccacagctgcagagcctcttccaagaggtgctacaggacataggtgttccttcaggccattgctacaagcccttcaccaccttcaccttccagcctgtgagtgcaggcttcccaagactccctgctggggctgtggtgggcatccctgccagtttcttgggagacctagtgatcaacactaaccatcccgtggtcatacatgggcatacagtggactggcggagcccagcaggcgcccggctgagagcttccctgaccttgtcccgtgaagcccagaagttcgccttggccagggaagtggtgtacctggaaagcagtaccactgccgtgcacgcccctgctggccccagcttgcctggcagggacctgggcactgggcgtgggtgccaagtacacccctgggggctccatgcaggcccccatgaatttacggggcggccttcaaccttggtgggcagcaagtgggcaggcttttggtgggcctaacgcccttcctcccaaggatttcttctcacctccctgcccgtgggagtccctgggcctgggaccgcccgccacgggcccttcccttcttctgccaaccctaattgccttgtgggtgggaatgggaaatttcttattaaaaaaagctttcttgggcgggggcaaaccctgggccccctggggccaagtcccttcttgggggcaaaaaagagggggg

SEQ ID NO: 94351 - DNA, 740 bp, Homo Sapiens
gcggcggcggaggaaagggaacatcacagaaaggtgaagaaatttgccctaaatcataaaactttgtaagtggcagaacaaggatttgaagctggcagtctggttccaggtatcgttcttaaaacactaaatttatactgtcctatttagcctgaaagtttcatggtgcagacttatactgtggactccatagcccttttcctcatgctgggttagaagtagctttttcaggctcactatttttattaggaaaaaatagtcactgagcaaacagccagctaacagctggggcccttgggccacaaggcactgaatcctaccaagaaccgtgtgagcctggaatagaatccttccctactcaagctttcagatgagactgcatgtattaatccattctcatgctgctatgaagaaatacccaaaactgtgtgatttataaagaaaagaggtttaattaactcacagttccacatggctggggaggcctcaggaaacttacaatcatggcagaaagcaccttttcacagggcaacaggagagagaatgagtgtcagcagagaaaatggaagtagaaaactcatcagatctcttgagaactcactcgctatcatgagaacagcatggggaaaccatccccatgattcagttacctcctaccaggtccctcccgtgatacatagggattatgggatcacaattcaagatgagatgtgggtggggacacaaagccaaatcatagc

SEQ ID NO: 94352 - DNA, 1126 bp, Homo Sapiens
cagtcgacggtaccggacatatgcccgggaattcggccattacggccgggctccaactgaattccttgaagagaaaatggcctaccaggaatacccaaatagccagaactggccagaagataccaactttgtgtttccaacctgagcaagtggtcgatcctatccagactgatccctttaagatgtaccatgatgatgacctggcagatttggtctttccctccagtgcgacagctgatacttcaatatttgcaggacaaaatgatcccttgaaagacagttacggtatgtctccctgcaacacagctgttgtacctcaggggtggtctgtggaagccttaaactctccacactcagagtcctttgtttccccagaggctgttgcagaacctcctcagccaacggcagtcccttagagctagccaaggagatagaaatgggcatcagaagagaggccaccagcacaagcattggaaataatgatgggactgaagactactgacatggcaccatctaaagaaacagagatggccctcgccaaggacatggcactagctacaaaaaccgaggtggcattggcgtaaagatatggaatcacccacaaaattagatgtgacactggccaaggacattgcagccatccagtggaactcagatatggccctagtcaaggacatggaactacccacagaaaaagaagtggccctggttaagggatgtcagatggcccacagaaacagatgtatcttcagccaagaatgtggtactgcccacagaaacagaggtagccccagccaaggatgtgacactgttgaaatgaaacagagagggcatctcctataaaaatggacttagccccttccaaggacatgggaccacccaaagaaaacaagaaagagacagagagggcatctcctataaaaatggacttggctccttccaaagacatgggaccacccaaagaaaacaagatagtcccagccaaggatttggtattactctcagaaatagaggtgtgcacaggctaatgacattatatcatacacagaaatatcctctgctgagaaggtggctttgtcctcagaaacagaggtagccctggccaggcacatgacactgcccccgg

SEQ ID NO: 94353 - DNA, 804 bp, Homo Sapiens
tagacaatgttcattgtgtaggcggaatcaagtagctgacgagaccggtagcacagaggcccaggccccgtcggcgtggcaagaggatctcagactcagtgtccagatccaagtcagtgctgcagtagtctttgggtaggttgatctcaccgttcgtctcaagcgatctcctcagcttgtcccatgtggacagaaagactgtgatcctgttgtgaagcagctgcctcaacccatctgagctgtgcttgctgaggaagcctctgatggagctgtattcaacttgctggtacgttctggaactgcttcactagatccctttgcaaggccaaaatctcaggcaggaactttaccagcctcagctctgcttccttctgcaggaaatgccagaggatgggcactctttctttgccatttttctgttccacaatgtgatggaggtactcaactgtaattcttttcctgcagctccaaatcttagagcaatggaccacacttttccggggcaggtggggcaggaaggtcactgggtcaccatatattattttggccacagggttagagctgatacgcttatcttggctgatgagattattcatggtgggaagggttttatctagatgctccagttcaggagaaatcacagctgcgatttccttttcccagttgttcctcatttctttagttgacaattctgtgtcaaaatttaaaagccctgaggtgggagcagattttcttgtcatggggccggacttcttcttgctattattgttattattttaaattaacattgtcctcacaatggtc

SEQ ID NO: 94354 - DNA, 881 bp, Homo Sapiens
gggacaggtagcctcggaggcaggggagggttctcctcctgggaaccatccccgtccagatggtgccccccaaccagctgcgcggcatgatctggcgtctggtccagggcagtggttttgcggatcgtgtagggaagaggggaacaccaagtcgagacctctactccaagtaccgcatcaaagacgtcgagctccgagtcagcatcgtaaaggcccgagccggggtcggagagcacgccgaggtccacgagcgcctggtccatgtcctcgggcaggaagacgaggcccacgttgaggacgatgtactccatgaggaaggcgtagtacaggatcagcaacattgacgaagaacaggcccacgtagaacatagagggcagcagcggcggcggcacgtaggggaccagggggcccagtgcgtccaggtggccgcgacccgggcgccgagcatgcagcgggtggcaagggcggcggcccggcgatcccggcgaactcagccgctgcggcgcccgggcggccggcgagggcacagcgcagccatccaggggtaccctggagcccgacaagaagcagggccgggctccagatgtcccctggcaattgcgccccgacccccgaaatgcgccgggcgggtcaccgcaccccgagatgtgcccccaaggatctctcgaccgcccgggcggcgaggcgggcccccctgaagtggcccgcggctgcccggctccctcgtggcgcctccctggcgctcgcagggcctcgcagagccggtggggatcccaccgcggctcagtgtctaggccgtcccgcagccttctctgccgcccgcccgcaggtcctcgcgaccccgcgccccgcaggcccagcacccatggctcagccgccg

SEQ ID NO: 94355 - DNA, 1214 bp, Homo Sapiens
  misc_feature (68)..(102): n is a, c, g, or t
aatcaattggggcgccatccgtactgccgaacgacgagcgcagcgagtattgagcgaggaagcggcgnnnnnnnnnnnnnnnnnnnnnnnnnnnnnnnnnnncagtcgacggtacggacatatgcccgggaattcggccattacggccaggacctaccgaaagagttttaggttggcagacagatgggtgccttattttctgtgaaactgaagttttaaacactggccagaaaatgtttgattgccatttcaacacatggaaatagttacattgatgcctaaattgccattttctgcaaaaagctgtgcaatgctggtgtcaaagactagacagtcgctattcataatggctgttgcaattccttcatgaatagatcgaggagtcgcttcccaagtcaatcgtcgcctatgaccatttagctcaagtcggtaagcaaaattttcagcttgcttgcgtgttcctatcagctgtacgattgcgaagaactgctggtgaccatcgtatttttcctgtttctctaagactaacatgaagtgaaagccaaaacaggactgcatcatcacccagtcaacagcaccaggaagattaatgtctgtagcaagaaaaactatatcctctccctgtagggttgtaatggacttatgctgatgcatcagatggggcattacagcatccagagagccttgccatttacaggaagcaccagggcacggacaggaataaggcctaaactcacagagctcttcatggtctgctttttctgtgtgtggcagagttatttcacatccagaagacgcatatttacaggggaaaagtactgaattagccactttctccatagccaagttgcgaatggatcccaaagggccccggcaagttggacaacatgtgagctttgggcgacagttgctacaaacaagatggccactctgacattgaagaatgggcggtaacacatagtcaaagcagactggacactcaaaaagactcgccaagtcattgttggatgcagttgtgccagtcagggcaggcaccctctgggatggtggacacttcgaggtaccggtaggtaatgctgtagcagtctgacggctcatttctgaaataaatacataaggaggcaggagaaaaataattataaccatgacttactttataaataatgtttacatgccataagtccttttaaagtttcatacaaaatttactgagc

SEQ ID NO: 94356 - DNA, 895 bp, Homo Sapiens
cagtcgacggtaccggacatatgcccgggaattcggccattacggccggggattggtggcggaggcaatggccggcaaccagctgtaagcgaggcacggaagacatatgcttgtgagacaaaggtgtctctgaaactatggatggtacaagaacttcacttgacattgaagagtactcggatactgaggtacagaaaaaccaagtactaactctggaagaatggcaagacaagtgggtgaacggcaagactgcttttcatcaggaacaaggacatcagctattaaagaagcatttagatactttccttaaaggcaagagtggactgagggtattttttcctctttgcggaaaagcggttgagatgaaatggtttgcagaccggggacacagtgtagttggtgtggaaatcagtgaacttgggatacaagaattttttacagagcagaatctttcttactcagaagaaccaatcaccgaaattcctggaaccaaagtatttaagagttcttcggggaacatttcattgtactgttgcagtatttttgatcttcccaggacaaatattggcaaatttgacatgatttgggatagaggagcattagttgccattaatccaggtgatcgcaaatgctatgcagatacaatgttttccctcctgggaaagaagtttcagtatctcctgtgtgttctttcttatgatccaactaaacatccaggtccacgcaatttaatggttccaatggctgaactggacaggtgggttgggtaaactatgccaaatacggttgtcttgacaagggttgatggcttggaagaacgacatttaaagtcgggcattgagtgggagctttgaaaagttatatttactgaagaaaaggtcacgacacatagatt

SEQ ID NO: 94357 - DNA, 787 bp, Homo Sapiens
gcagtgagcccggctgaaatcggacgagggccggtcttggatgaagcggcggccgtggtgagagcgtggggaagggtggggtgagggggcgaggccgcagctagggcggcgaaactctcctcccctcggccccaccgcgtgggacggcgtgaacgtggtgtcggagggatgtcagccttctctgaggcggcgctggagaagaagctgtcggagttgagcaactcgcagcagagcgtgcagaccttgtccctgtggctcattcaccaccgtaaacactcgcggcccatcgtcaccgtgtgggagcgggagctgcggaaagccaaaccaaacaggaagcttacttttctctacctagccaatgatgtcatacagaacagcaagaggaaggggccagagtttacaaaagattttgcaccagttatagtggaggcttttaagcatgtttcaagtgaaactgatgaaagttgtaagaagcaccttggaagagtgctatctatttgggaagaaaggtctgtttatgaaaatgatgtattagaacaacttaaacaagctctgtatggtgataagaagcctaggaagcgaacttatgaacagataaaggtggatgaaaatgaaaactgttcctctctgggatctccaagtgaaccaccacagactctagatctcgttagagcattacaagatctggaaaatgcagcctcaggtgatgcagcagttcatcagaggatagcttctttacctgttgaagtccaagaagtatctctattagataactaccgataagatc

SEQ ID NO: 94358 - DNA, 745 bp, Homo Sapiens
cagtcgacggtaccggacatatgcccgggaattcggccattacggccgggagccttacttaattcacagataagttgacttaactcagtatttttatttcaattaatgaaaacagtcctcttttcaaccccaggttgcttacattttgctggtctccccaagtgaccattggtggagaccaattaatgaaggaatgaaattcactttattgggactgtggtattcaacagagccacacttaaccactttttccaatgaagaatctccagaatgataatgcccaaatatggatggccaagaagaatttgtatctacggtgtgctttatgtgtattgacactgctgtattctgtgtgatcaagtgatttgcagctggttccaatgtgactgagtgttctcaaagatttctagtaactaagtcaacttaattttcttaagcctggtattactatcagcctcacatttaccacttagattctagttttcttaactgttcataacagggcataccgagggttgggatgagagcctacttcctacctcttaaggcactttcctcattattttgccatataatcttgaactgcatgataagctgtttaaatgtccatgacttctcccagagcaactagcaaagtatatgacattttggatagagattagtggaaaggaaaatgtagagatttaagttcagaggtacaaacctcaataaaacctccttagagcacataccatgactagagtgg

SEQ ID NO: 94359 - DNA, 894 bp, Homo Sapiens
  misc_feature (49)..(89): n is a, c, g, or t
  misc_feature (93)..(127): n is a, c, g, or t
gacacacaacaaaatgtaagactactatagggcgctagcgcggctatannnnnnnnnnnnnnnnnnnnnnnnnnnnnnnnnnnnnnnnnccgnnnnnnnnnnnnnnnnnnnnnnnnnnnnnnnnnnncagtcgacggtaccggacatatgcccgggaattcggccattacggccgggtcctcagctgtacagggctgatgaatggggaggaggcctgcgagcctaccaggagaaccggggagactctctgtctaccgagagcctggatatcctcccgagtggcccctcatgagactatctaccaacgtgtaacagactgtctgtgacaggccatgggcataatatgtattagtatctctaagaaagaggtggcttatcctatacaaaatttgttggtgacagttggtcaacacttatgtacctgataagccatgtgggtacagtcgatcctcagtacaaatggcagtggtatgctgggtagctaatgatgacagttattaccgttactactattattatcaatatcctgtagttgcagaggaggaaaccaaaaccaagaaggattgttccgtttccccaaatcccaagctagcaagatttcccgatcctccctccatggccctttcctaacgtctctgtgattacggaagcttctgagctggagttctgtaaattcccaaggaatgggcagttcagaaaaataccaaaaattctaacattatagacttcaacagaagattgcatcgcattcctttcgggacatgcagccagactggaaacatcctggacctggggcaacgccagtctgtgactgtgaaaccccttccccaagggacaagcacacacggcgctaattcacatgaccacctagtacaccaatctagaacacagacc

SEQ ID NO: 94360 - DNA, 937 bp, Homo Sapiens
cagtcgacggtaccggacatatgcccgggaattcggccattacggccggggggttccatcatggcgtcaatgcagaaacgactacagaaagaactgttggctttgcaaaatgacccacctcctggaatgaccttaaatgagaagagtgttcaaaattcaattacacagtggattgtagacatggaaggtgcaccaggtaccttatatgaaggggaaaaatttcaacttctatttaaatttagtagtcgatatccttttgactctcctcaggtcatgtttactggtgaaaatattcctgttcatcctcatgtttatagcaatggtcatatctgtttatccattctaacagaagactggtccccagcgctctcagtccaatcagtttgtcttagcattattagcatgctttccagctgcaaggaaaagagacgaccaccggataattctttttatgtgcgaacatgtaacaagaatccaaagaaaacaaaatggtggtatcatgatgatacttgttgatgccactgttatcatcctcctagcagaagatagtcctactgagaaaatgagcactttgatcattcagtctttgaactttaacctttgactggaagtgacctataggcaatgaagactacttccttttactgcatttttactcgtgtgcattctgggcgcatgttgatcgctggttcagtccaggcaactgacatgcttttattagtcatacagtattaatgcaggtgtcaggaaaatgtcaaatataattccattttgtatatgtatatttttcaacgctttcggaaaagctccaggtcctcatgtatggtgcaataacaatgacttccttggcggttaaggtaacgttcatcgccgggaatgggcgtagtaacaaggaaaaagttccattaatcctgcaatcactgattactgctggata

SEQ ID NO: 94361 - DNA, 825 bp, Homo Sapiens
gtgaggcctggggttaatcggcacgagggtggcacgcacagctgccgcagccgctcgcgcccggtcccgcggtcgctagctccagccgcctcctccgcgcagccgccgcctcagctgctcgctctgtgggtcggtcctctccggcacttgggctccagtcgcgccctccaagcccttcaggccgccccagtgtcctcctccttctccggccagacccagccccgcgaagatggtggaccgcgagcaactggtgcagaaagcccggatggccgagcaggcggagcgctacgacgacatggccgcggccatgaagaacgtgacagagctgaatgagccactgtcgaatgaggaacgaaaccttctgtctgtggcctacaagaacgttgtgggggcacgccgctcttcctggagggtcatcagtagcattgagcagaagacatctgcagacggcaatgagaagaagattgagatggtccgtgcgtaccgggagaagatagagaaggagttggaggctgtgtgccaggatgtgctgagcctgctggataactacctgatcaagaattgcagcgagacccagtacgagagcaaagtgttctacctgaagatgaaaggggactactaccgctacctggctgaagtggccaccggagagaaaagggcgacggtggtggagtcctccgagaaggcctacagcgaagcccacgagatcagcaaagagcacatgcagcccacccacccatccgattaggcctgctcttaactactccgtcttctactatgagatccagaaagccccaagcaggcgtgcacttggccagacgcgtc

SEQ ID NO: 94362 - DNA, 694 bp, Homo Sapiens
  misc_feature (631)..(648): n is a, c, g, or t
ggcaaaagaagttgaacgagtggttgggcaatgaaaacactgaagaccaatattcactggtggaagatgatgaagatttgccccatcatgatgagaagacatggaatgttggaagcagcaaccgaaacaaagctgaaaacctgttgcgagggaagcgagatggcacttttcttgtccgggagagcagtaaacagggctgctatgcctgctctgtagtggtggacggcgaagtaaagcattgtgtcataaacaaaacagcaactggctatggctttgccgagccctataacttgtacagctctctgaaagaactggtgctacattaccaacacacctcccttgtgcagcacaacgactccctcaatgtcacactagcctacccagtatatgcacagcagaggcgatgaagcgcttactctttgatccttctcctgaagttcagccaccctgaggcctctggaaagcaaagggctcctctccagtctgatctgtgaattgagctgcagaaacgaagccatctttctttggatgggactagagctttctttcacaaaaaagaagtaggggaagacatgcagcctaaggctgtatgatgaccacacgttcctaagctggagtgcttatcccttcnnnnnnnnnnnnnnnnnnggtttaatttaaagccacaaccacatacaacacaaagagaaaaaga

SEQ ID NO: 94363 - DNA, 947 bp, Homo Sapiens
  misc_feature (50)..(84): n is a, c, g, or t
  misc_feature (886)..(899): n is a, c, g, or t
cgtaaaaccggaccgagcgcagcgaagtatatgagcgaggaagcggccgnnnnnnnnnnnnnnnnnnnnnnnnnnnnnnnnnnncagtcgacggtaccggacatatgcccgggaattcggccattacggccgggagtagacaatatgtctacatgtgtttgagtacatcctggatacagtttcccagctcatgagggactgaaaatagtcttattcatcaacccactaggatgtgaagggttaagtctagatttggtcgcattgaaaccccacaatatagaattaataaatggccttcagtaggaaaacctacactaaagcaaatccgaagaagtggggcagggggaaagaggcattactggtctttccttttgttttgcaagcataatttgattttcctttggctcagaaaactcatttggggaaattctcttttgtgttcagtttaacctagaaaggtcctcttgaaaaaccaacattttaggaaagttcttttttcaggatggagtatattaaaattaagccaggctttgacgtgaattatcacttttctttattattttgttttctattttggtttatagctatttctggttcagttctgaacttcagcacttaatcatccttatcaaccaggcttttggtagcctaaaccgctatgctgtagtttttttaatttaaagatgtataagccaaaatttggatgggagtgagacataactgatttatatgaattttaacagagttgtatttgtgtgtgtttaataaaatatatatttattcagtactttcctcagtattttatgggcaaagtaaaaataacaatgcatagtgaaagggcatatattaccagcagtaataattcaaaatcctgaaaatgtttcannnnnnnnnnnnnngttatgcagaataaacaaggcagaaatgctctttgaacaacaaaaaaa

SEQ ID NO: 94364 - DNA, 1219 bp, Homo Sapiens
  misc_feature (77)..(111): n is a, c, g, or t
  misc_feature (1061)..(1061): n is a, c, g, or t
  misc_feature (1097)..(1097): n is a, c, g, or t
ccagtgataactactatagggcctcacttttgcagcgaacgacgagcgcagcgagtttgtgagcgaggaagcggcgnnnnnnnnnnnnnnnnnnnnnnnnnnnnnnnnnnncagtcgacggtaccggacatatgcccgggaattcggccattacggccggggaacaataggaaacgtcaaaattgggatagtcggcagttctggcccctgcagctggaggtaccctgagttctgagggtcgtagtgctgtttctggtattctcatcgcggtcacctctaccggtgtggacaagtaaagtttgaatcagcttctccatggcctgggcaccagttcccggctgagccattttccttttggctaaaagtccccgcccagaggccaattcgtcgcggcggcggtggagatcgcaggtcgctcaggcttgcagatgggtcaagggttgtggagagtggtcagaaaccagcagctgcaacaagaaggctacagtgagcaaggctacctcaccagagagcagagcaggagaatggctgcgagcaacatttctaacaccaatcatcgtaaacaagtccaaggaggcattgacatatatcatcttttgaaggcaaggaaatcgaaagaacaggaaggattcattaatctcggaaatgttgcctcctgagctaagctttaccatcttgtcctacctgaatgcaactgacctttgcttggcttcatgtgtttggcaggaccttgcgaatgatgaacttctctggcaagggttgtgcaaatccacttggggtcactgttccatatacaataagaacccacctttaggattttcttttagaaaattgtatatgcagctggatgaaggcagcctcacctttaatgccaacccagatgagggagtgaactactttatgtccaagggtatcctggatgattcgccaaaggaaatagcaaagtttatcttctgtacaagaacactaaatttggaaaaactgagaatctatcttgatgaaagggagagatgtcttgggatgaaccttgtaaccattgcataaatttttagaaatcagtntcctgcccaaatgcacttgagaggaaattttttcgntcatattccatgccccctgaaaaaaggcgtgggagaaagtaatcttggaaaattccttaataaccaagagtcccttcaaattaaaaaattctggggggctttggcaaaaccccctggaataa

SEQ ID NO: 94365 - DNA, 865 bp, Homo Sapiens
cgacttatgataccgatacatttggatctacttttctcatggcagcatctacgcgttcgctctttagtagcttctttaatctcatcagctctatcagtcgaaaagttgacgtcttcccataatagtagctgtcctctgtgatgactactccagtggtaaataaacacacaagagcatccaaactactcaaccaggaatagctccatttatcttccttatattttctttaactacttccttcttgttaggaggaagtgcctgccaccatttccttatgcccctgcctacaatgattgcaaataacttctgtactggtttaagaatcatcaacaagagaggaaccggagcagcttgaaaccgtggagaagtatggaaattcctaatagctcttatggaagcagggcttagaggatgcaatactgacagactagggactgctgtaacttcttttattagcagctgtcttgaaaaagcatcattccatacagtacatttgctggtaatcctccaaatttccttacttttggtacttgagaggcctcctgttcttttgttgttaaaagtactataaaaatgaaagtttccaggcagaaaactccacctgtcacactgatttactcccagtccctgatacttatttactatatggttaacttgtacttgatgacagccccgtgaggtggatgctaatgtgttacattttctccagttagacagtgaattaaatcggaagaaaacatggtttctagcagcagactgcaatccacagatgaagctcattttttcacttgattactcggaaaagctggggaaaagcgtcaccgcctcgtgccgaattcggcgcgccgtgacttcatactctctc

SEQ ID NO: 94366 - DNA, 1036 bp, Homo Sapiens
  misc_feature (42)..(76): n is a, c, g, or t
taacgacgagcgcacgcgagtttatgagcgaggaagcggcgnnnnnnnnnnnnnnnnnnnnnnnnnnnnnnnnnnncagtcgacggtaccggacatatgcccgggaattcggccattacggccggggtcctaaagaagcttatagtcaggtgttgtttaaaacattatcagaattcttaaacccaaggaatttaattttatttggtatttcttaagcctaaaatgaaccaagagaaagatgattttagaaagtacttgtagtgaaagatgattttagaaagtacttgtagtgcatgtgtggcttctgactttggggatggcaccattttataactagtttcacaaactttacgctttcgaacattctcaacacttttactggtacgaagaccttggaccctcacagtactcaacacttataccgctttactacatcctttcttacaaactctcaccactcataaagtactcgtgaattcacacctctcaggctattgtctgacttgcactctacgctctcataacagcctgtacctgagtggcagtggacaggtggcagtctctaggttaactcagttactgacctctaccctcaccctctttcactctgagcgtaacactcgctgctctccccttccgccatcacagcattctcaaaactgctgacgtctatcgctgacaaacaatctccatgaccttacagactagacattacacactaaactgatgctctgggcattcacgcacagcagagtaccgaccttaaacgaacggcaacaaatctaccacccatcaacttaacgggaataggccaacgaagccaaccaacatgacgaactgaacaggagaaacgacggctcacggccgacctgtccctccagggcgcctgcgctccaaccaaacaaccctcacccagcacggggcacacgaacatcatcacaaacctacgcatccccgcccacccagtcaacccctaacacaggcccacaaacaggaaaaaccgaaccccgcaccaccccaccgccacaccacaccc

SEQ ID NO: 94367 - DNA, 728 bp, Homo Sapiens
gcagtgtgaatataaaccagtgtgtacaaaaaagcaggctggtacggtccggattcccgggatatcgtcgacccacgcgtcgcgttggagctctttggggcccagctttgcggacccgggagctcgggacgcaggcggggcttgtgctccgcgggggcagggcgtagggtgggcctcctacctcccctgatctcgcggtttgttccgtttcattggagcttcccggaccgtgtgctcgacggtgccctaggtgccgtggggccacacgcgagtctgataagcaccctcccccggaatcatgcggtgctgtgaggcctagcgaagatgaagatagaatgcaaggtagaaagtgctggatacctttagaaagctgcaggactggtgcgatgggagttgagacgtaagaacctgcccgtccgtagggctctggatgctgctgaggcccgaggcccctatggcagatttgaaaattcacccttgtagagtcattcctgcctttgagcggactcccttttaagtttacagaagcacttgcagaactcatcagaagccaccccgcttatcagcagatctcaagagagcgttcggtggaggccctgggtctgcacagctcacctccctgggaactgctcgcccgagcgtcggagccggcgctggcccctgcagcggaaggttgcagcgcaggagccccggaggcccaggacacaggacagagtctcgttctgtcg

SEQ ID NO: 94368 - DNA, 989 bp, Homo Sapiens
cagtcgacggtaccggacatatgcccgggaattcggccattacggccgggcacttttggaggtaagcatgctccagggacctgcccaggtgctgctttgtctttctgttgccccatttcccaccaccagcatttgattacttcagactctgcaatccacaatccacagggtgaggaaactggttgaattgtttacttggtgacttacttgatcacttactctatttagcatatttactcatatttcacttggtgtctcttgactcattgttcaatgtgtgtgctatatgtgacagtttcctcattcttgctttcttagggaatgatctgcactgaattctgtacacgtctttgatcaatcataaagatataattctattggttactagaacaacatttcctaattcctatgagagtattcataatacctgttgcctcaaactattttatacactattatttacaggataatgtatttacaattgtctaaagtgttaactattttttaaatcatttttagaactccaaggtatatactcctacccactcactcataggctgatcatattcactcttctctgtctgtgagagaaatatccccaaggaaactcttacatttgagcaatagttgtgataagacatacacgatagaaaatactgctactatagtaatctatgggatgtatattctaataggaatattacatgagtacacatatgatgggatatagtgaatctacatgaatgctaatcggaagacacaattagtgttaaccagagataccattagcgcccattgtgaagagaatactaacaacctatgcgacgatggggacaggagggatcacagcgtagacaaacccagcacatcaaggaggacaagaggacgagaacaaacacagaagccaggcgatcgagacccacacgagatcacaacggcgacaacccggcaccaacaacacgtaaaaacaatagcgggcacacgcagcc

SEQ ID NO: 94369 - DNA, 727 bp, Homo Sapiens
cagtcgacggtaccggacatatgcccgggaattcggccattacggccgggggtcttcaactctttggaactatgaagcagagtttaagtaccactgttccagcttagatggtatgtatatcaggaaaagataaaaaatatgttcgagatactaattcaagtgttttagcattttttgtaaagggcggtataaaattgcctttgtaactgttattttccctttttaggaaaacctatttgattctttgacaggccagccacatcctgaagatgtactactgtttgccattccaatatgtgccccttacaccaccatgacaaactacaaatataaagtgaaacttactcctggagtgcagaaaaagggaaaagctgcaaaaacagccttgaatagtttcatgcattccaaagaagcaacagcaagagaaaaagacttattccgcagcgtaaaggacacagatttatcaagaaacattcctggcaacagtgaaagtgtctgcacccaatcttctgaacgtaaaaacggaaatagctgaaatgaaattctaaaatatttgagaagagccaatgtcatacgccttttggaagttcaaagcatcgaacagcaccactgtatccaggatttccgcattcatacgcacattgaactcaacaatagcgcttgcttatactgcaaccaaaaaggacgtcacatactggaaaaatcacagaaaccaaataagaggaca

SEQ ID NO: 94370 - DNA, 845 bp, Homo Sapiens
gacatgtgctatgatagacacgtgtcgccgtagttctgctgagagttgttcaatgtactttcgtagccattcgaaactggttggctgggtcagtcgttgttcagtgtcattatatttgggccgtagtacaagtttgtgtttagactgatgatcctaaggtttggatttagttgtaactttcggtgaataaaaaccacctttccttaaagtactaatagcttcttcatctagcccatggtttccagaggtttgctactgcatggtacactttactggtgactacaggcagttgatcctgtggccaatagtcatgattacccagcgcagggaaaacctggagatttggaaagagactctggatggtggttgtcatattagtgatcacatttataacagtgtctgttgagagttcaggtacaggaacatgaggtgggctatcccctgtccatatcatgaaagatgcttcttgtccagaatttttaataaaatcaaatgctgacaaaataagttgatatggagaatcacacagaacatctccaaaagggccagggttggaggcatttgcacctttagatgaagcacacacttttgtgtggtcatctgtgatgtggtaagtagggtctaagtgtaagtcagtcacatgccaaaactgtcctatcgccggaggaggattcctgccgcctgcgggcgccacgggcagcccgaggccggagcggcagtgccaggcagtcagcaggcagcagacgagtgcgcgcaccagcgccatggagggccgcggggctgacctggaggttcgggctgtcccgcagctccactcggaccgtcaggcctgagatcccgggaat

SEQ ID NO: 94371 - DNA, 771 bp, Homo Sapiens
gtgtggctagtcactggtccgcgtggttgcgcttgtaattttcgctatgtgcacttgtgcgcctgggcattgatccctgggtccgatcccttcgccccttggttctgtaccatgcctactcggtgaaagaccttgccgaggagtgtggtttgttacatcgacgatcgtacataattatggtgcgattacgttctgtttgtggaccgtagattctgtaagggtctcacgctgtgctctctccctttaattatctgattcttatcatagttaatcttgtgtttgtgctatatctgcgaatagtccgcgtaagtgaatgtggagtcagacgcagccccttcatattggtcttatgcccaatgttcttgcctcaaagaaaatgtaggagttataaagaaagtacagaagtgaaatcagtaggtcagacagcccggcgatgcattccaggcctggtaattaaagatcgacccctcctgactctaaccggttatattatctatagattccagacattgtatggaaaagcattgtgtaaaatccctgtcctgttctgttccgttctgattaccggtgcagccggtaatcagtcacgtaccccctgcttgctcaatcaatcacgaccctctcagcgcggacccccttagagttgtaagctcttaaaagggacaggaattgctcactcggggagctccgtttttgagaagtgagtcagctgacgctcccggcctgtaatggccgaattcccgggcatatgtccgccgctaccgtcgactg

SEQ ID NO: 94372 - DNA, 1001 bp, Homo Sapiens
  misc_feature (469)..(486): n is a, c, g, or t
  misc_feature (495)..(533): n is a, c, g, or t
  misc_feature (580)..(642): n is a, c, g, or t
  misc_feature (655)..(655): n is a, c, g, or t
tggcaaaataggctagtacgaggcctggtgtcgaattcggcaccgagggggcatcactggtctcgcgtgcgcggtgaccaggcccggtttccggtgccaggacctttccgaagcgtcgagtggcctaacggtcacagctgtcgcccatcggagaggcaggactactgcgagcagttttaccgcgacctccggaggccggcgtgacaggctctgtcactaaaataggaaccgaatattgtatctgacgcatcctgtaatactgaagagcaactgaagacagttgatgatgtccttattcattgccaggttatatatgatgctctgcaaaacctggataagaagattgatgtgattcgtagaaaggtttcaaaaatccaacgtttccatgcgagatccctgtggacaaatcataagcgatatggatataaaaagcattcttaccggcttgttaaaaagcttaaactccagnnnnnnnnnnnnnnnnnnctcgaggcnnnnnnnnnnnnnnnnnnnnnnnnnnnnnnnnnnnnnnncatggtcatagctgtttcctgacccagctttcttgtacaaagtggtnnnnnnnnnnnnnnnnnnnnnnnnnnnnnnnnnnnnnnnnnnnnnnnnnnnnnnnnnnnnnnntgaaaccggaaanacccggaataccgctagcgggcgcttaacaagtgtgatccacaagggatccgtcgtgaaaatcctttgtatcctgcgacactatccgcagtggtagccaaaaccaaaaaatcccacccgataccacgcgggagacgtgcaggccggatccacgaagcacccaaactctagtcaccgaagggtaacggcctgcgaagacggcagaaccacagtagaggcacaagtaaccgaataggccacgctccagcaatcggagaccgctgacacgaccgcaaccgtacccggagcgcactcgacacgcacgtcccgggagcacgacagcgaagcgccccgcacagcgcacaaca

SEQ ID NO: 94373 - DNA, 746 bp, Homo Sapiens
cagtcgacggtaccggacatatgcccgggaattcggccattacggccggggaaacatgtccggaggagctcagtgaagaagattgagaagatgaaggagaagcaccaagccaagtacacggagaataagctgaaggccatcaaagcccagaatgagtacttgctggctttggaggcaaccaatgcatctgtcttcaagtactacatccatgacctatctgaccttatggatcagtgatgtgacttaggctaccatgcaagtctgaaccgggctctacgcaccttcctctctgctgagttaaacctggaacagtcgaagcatgagggtctggatgccatcgagaatgcagtagaaaacctggatgccaccagtgacaagcagcgcctcatggagatgtacaacaacgtcttctgcccccctatgaagtttgagtttcagccccacatgggggatatggcttcccagctctgtgcccagcagcctgtccagagtgagctggtacagagatgccaacgaactgcagtctcgcttatccagtctaaagattgaaaacgaagaggtaaagaagacaatggaggacaccctgcaaaccatccaggacatagtgactgtcgaggacttagatgtgtctgactgcttccagtacagcaactccatggagtccgtcaaagtccaaggtctctgcaaaccttcatgagcacgcccagcatggctaagaggagagccaaccagcagagacctgagca

SEQ ID NO: 94374 - DNA, 917 bp, Homo Sapiens
  misc_feature (64)..(103): n is a, c, g, or t
  misc_feature (106)..(140): n is a, c, g, or t
aactggaaaaacggaactccaacctactaagggggcgcctaagccggctggtttcattttagtnnnnnnnnnnnnnnnnnnnnnnnnnnnnnnnnnnnnnnnncgnnnnnnnnnnnnnnnnnnnnnnnnnnnnnnnnnnncagtcgacggtaccggacatatgcccgggaattcggccattacggccgggggcctcattgtcggaaccggcaccaatgcctgctacatggaggagctccggaatgtggcgggcgtgcctggggactcaggccgcatgtgcatcaacatggagtggggcgcctttggggacgatggctctctggccatgctcagcacccgctttgatgcaagtgtggaccaggcgtccatcaaccccggcaagcagaggtttgaaaagatgatcagcggcatgtacctgggggagatcgtccgccacatccttttacatttaaccagccttggcgttctcttccggggccagcagatccagcgccttcagaccagggacatcttcaagaccaagttcctctctgagatcgaaagtgacagcctggccctgcggcaggtccgagccatcctagaggatctggggctacccctgacctcagatgacgccctgatggtgctagaggtgtgccaggctgtgtcccagagggctgcccagctctgtggggcgggtggagcggccgtggtggagaagatccgggagaaccggggcctggaagagctggcagtgtctgtgggggtggatggaacgctctacaagctgcacccgcgcttctccagcctggtggcggccacagtgcgggagctggcccctcgctgtgtggtcacgttcctgcagtcagaggatgggtccggcaaaggtgcggccctggtcaccgctgttgcctgccgccttgcgcagttgattcgtg

SEQ ID NO: 94375 - DNA, 866 bp, Homo Sapiens
  misc_feature (86)..(120): n is a, c, g, or t
ggtatgtatcgatcactatagggcgctagcgtcgtaatatacgaacgaccgagcgcagcgaagtatatgagcgaggaagcggccgnnnnnnnnnnnnnnnnnnnnnnnnnnnnnnnnnnncagtcgacggtaccggacatatgcccgggaattcggccattacggtccgggggcgtacaggaggcggcggcggctcccagtcaccggcccccgccggcgagcgcacgatgcactgcctgggcgccgagtacctggtttctgcagaaggagcccctaggcaaagggagtggcgaccccagatttataggaaatgcacagatacggcatggttattcctgttctttctcttttggactggtttggtgtttatcatgggctactcggtggtggctggagccgcgggaagactcctctttggctatgacagctttggcaacatgtgtggcaagaagaactcccccgtggaaggggcccctctttcagggcaggacatgaccctaaaaaaacacgtgttctttatgaattcctgcaacctggaagtcaaaggtacgcagctcaaccgcatggccctctgtgtatccaactgccctgaagagcagcttgactccctggaagaggtccagttctttgcaaacaccagtgggtccttcctgtgtgtctatagtttgaattccttcaactatacccacagtccaaaagcagactcactgtgtcccaggctaccagttcctccaagcaagtcatttcccttatttaaccgatgtgtccctcaaacacctgaggtgctactccctagttgcatctgtgtgataaatgatgttgacaccctccaccgaattctaagtggaatcatgtcgggaagagag

SEQ ID NO: 94376 - DNA, 801 bp, Homo Sapiens
cagtcgacggtaccggacatatgcccgggaattcggccattacggccggggggtaaccgcgtcgcagtcgccgaagatggcggggcgaagtctgtgtctcacgagaagcagcgttccaggcactccgtatcccgaccacccgttcagcaaccctctacacctggacccgacctcctcgacctggaggaagaatataagtaagaaattcggcggttgaacttttccttctttctttcatctgaatgaggctgcttacaagtacttttttctggagactggctggatcttcgggaccactcactctgcagcattcccttctcgtcatctcgttcacctgccgtttatcctttctttgtctttgatctgagtagttcgcctgcgtattagaagatatttgaagtgggcgaaaatttagcccaagcgtttaaatgcagaattgcaggcaaaaacagctgacgtggttcaacaagctaaggaaataataacgagatcggcaagaagtacgatctaggcctgtttcaacacaaatgaaatcatgtgatgacgaagatgattacagtttaagaggtctgttaccatctgaagggatagttcatcttcattcagaaactaagccaaagaccaaaaacattgatcctgtaaacaaggttcaaaacaaattacactctgcaaataaaggaaggaaaacaaattcaagtgttaaattgaaatactctgatgtccaaactgccgacgatgttgccattccagaggatttctcagacttttcccttgcaaaaacaattagcaaaattgaaaggg

SEQ ID NO: 94377 - DNA, 896 bp, Homo Sapiens
cagtcgacggtaccggacatatgcccgggaattcggccattacggccgggggtaatgaaactcctggggcatctaccaaaggttatcctcctcctgttgcagcaaaacctacctttgggcggtctatactgaagccctccactcccatccctcctcaagagggtgaggaggtgggagagagcagtgaggagcaagataatgctcccaaatcagtcctgggcaaagtcaaaatatttgacgaagatggatcacaaggccaggttacagagaatgcaggagctccaggaagcacagaatgcaaggatcgaaattgcccagaagcatcctgatatctatgcagttccaatcaaaacgcacaagccagaccctggcacgccccagcacacgagtaccagaccccctgagccacagaaagctccttccagaccttatcaaggataccagaggaagtcatggccaggatgccgaggagcgaggaagtaccgccaggcacgactggtcagaaacactcaccaagcgcggttactatggccagtcctgccccgaataacggcgacaccagcacactcacatcagcatgatcctgaggccaacgggacctctacccaggccatggcctgcaatgggcaatcaagacatcagccaactcgtggccacggccagccggggactggagctacataccagtaaaggaccggcaccaatggagcaacgtgagatgggacatccaccaggcatccaacgatggtcccgacatgcggcgcaaagccccaggggggacacgcttggtggacacacaccaaaaaacagaggcgcacaaggtaaggagcagaccgagacacacacgggagcccgggagacgaacagaaccagacactcacagcacaacccaatgc

SEQ ID NO: 94378 - DNA, 999 bp, Homo Sapiens
  misc_feature (64)..(98): n is a, c, g, or t
catatagggccacgctgatagcagaacgacgagcgcagcgagtctgtgagcgaggaagcggcgnnnnnnnnnnnnnnnnnnnnnnnnnnnnnnnnnnncagtcgacggtaccggacatatgcccgggaattcggccattacggtccggggacatcactgattatgtctctggtcagtgaagaatttccagaagaggttcctccccgggcagaagaaatcaccattccagctgatgtcaccccagagagagttccaacacacattgtagattactcagaagcagaacagagtgatgaacaacttcatcaagaaatatctcaggctaatgtcatctgtatagtgtatgccgttaacaacaagcattctattgataaggtaacaagtcgatggattcctctcataaatgaaagaacagacaaagacagcaggctgcctttaatattggttgggaacaaatctgatctgggtggaatatagtagtatggagaccatccttcctattatgaaccagtatacagaaaatagaaacctgtgtggagtgttcagcgaaaaacctgaagaacatatcagagctcttttattacgcacagaaagctgttcttcatcctacagggcccctgtactgcccagaggagaaggagatgaaaccagcttgtataaaagcccttactcgtatatttaaaatatctgatcaagataatgatggtactctcaatgatgctgaactcaacttctttcagaggatttgtttcaaccactccattagctcctcaagctctggaggatgtcaagaatgtagtcagaaaacatataagtgatggtgtggctgacagtgggttgaccctgaaaggttttctctttttacacacactttttatccagagagggagacacgaaactacttggactgtgcttcgacgatttgggtatgatgatgacctgggatttgacacctgaatatttggtcccccctgctgaaaataccctcctgattggcac

SEQ ID NO: 94379 - DNA, 790 bp, Homo Sapiens
  misc_feature (648)..(690): n is a, c, g, or t
gccctttaaccagtgccagaatatactagaatcaccgcatttcagtggactcctgaagttgtacttgtgtataattgcccgcgtcgtgcataggcaaagaaggattaggctgttttctttttaaagtactgtagcctcagtactggtgtagtgtgtcagctctgtttacgaagcaatactgtccagttttcttgctgtttttccggtgttgtactaaacctcgtgcttgtgaactccatacagaaaacggtgccatccctgaacacggctggccactgggtatactgctgacaaccgcaacaacaaaaacacaaatccttggcactggctagtctatgtcctctcaagtgcctttttgtttgtactggttcattgtgttacattaacgacccactctgcttcttgctggtgaaagccctgctctttaatcaaactctggtggcccactgactaagaagaaagtttattttcgtgtgagatgccagcccctccgggcaggcaagggctctgaagattggcaacgtggcttaattgttctgctttttctgtagttcacatttcatgtgttcttgaccctttttgtataaagctgcaatattctctcttattgtccttcctatgtggcactgtctcttccaattgttaaannnnnnnnnnnnnnnnnnnnnnnnnnnnnnnnnnnnnnnnnnntcctagaattggggggatttggcccttgtcccggaaggaacttgcggtttaacctgcctgggattggccccgtttcctcacttctgtttccacttcctcc

SEQ ID NO: 94380 - DNA, 926 bp, Homo Sapiens
cagtcgacggtaccggacatatgcccgggaattcggccattacggccgggtaagaaatgctaagagttgttgaagcagaaggcggctgattgtcaataagtcactacagttgcataagcagtgctgtcagaattggtttggtgcaggcaatagattttgccttcaggggttcctgtggatctgaggaaggcatcagtgttgattaacactcataactagggagtgactggtagttacttaaagcaagtaattgaccaaatggaaaaggggaagtaattaaggaaattggtaagtggaggtagtcaggaagttcttgtggttcttcacatagattttacagctttggctttcactttgtttagctaaagtcatggggacaactcttcaatttagaacttaagttgaattataaaaatgatggatataagtggtagctgtatctagtgaagtgtctgtcagtaagtgaaacattttttggtggtggcttatccacaaacagtttagttgtagaataaaacttatgagtgacatctggaaagtaaccatgctaagatggcaagcacactggaaacaattaggccacttggctttcttttgctgtatcgttttataagcctactttacctcccagtcttggaaacaagttttagttttttatcgctttggagactagagccaatagtataatggtctcaaaggaaacagacttgagttgttggattagaggaactaacccaccttatatgattgtgatcgggcggtaaacggccggcctttggaccttgcctgggtttcacccttttccccctggacgctcgtgttcgacccggggtgccccttttggtcgtccccccgtgttcccctctttctccactggtgcctgtggcggtgtgacccatatctccccggtgggcccagtttgagct

SEQ ID NO: 94381 - DNA, 1054 bp, Homo Sapiens
  misc_feature (79)..(113): n is a, c, g, or t
ctgtataactcactatagggcgctagctctctgcagcgaacgacgagcgcagcgaagtagtgagcgaggaagcggccgnnnnnnnnnnnnnnnnnnnnnnnnnnnnnnnnnnncagtcgacggtaccggacatatgcccgggaattcggccattacggccgggggatggtgtgggattttggccgagggaagcaggacagagaaggagcaggaagctatgctaattttcctgtcagcttaagggatccgtctcagcaagaatcttgtattctgataacggaatgctgtacgtgctgaccacatctaagaaccattaaaaagcaaggaaacaaacaaacaacccttttctcattccgacacacgaatagtcatcgagtattacaccagcccctctggtggcttccttcaaaactgttgatcttagctaaagtgtataaccagttaccagctgcacttcgcacggccatcccgtccacaatgcagcagactcttcccaaggccacctagcaagcaaggttgatcggatcatctaaactggccgcctcctgaatatttcactgaatcctggcgttcatgttgaagcagacaaaatgagaaaggaggagggcattgctcacctctcaatagcttttttcgttcaagttctatgtctttatcagctcttgcctgtgattttaccccaattcaaccttgggagtgggaagaatatgaacagataacccttggcctaacagctccatcaaacctccttgagagcaactacctaggccaggctagtgagtgctttgtgaaggaactggtcagaagggtccctcaactccttccgggcctcctggaccctgcagaaaagacttagggggacccccagcagagggccaattggtcctcccttccttccctggccccaccagggaaagggaaaaccggcccccagaatttgaaccaaaataggtggaagtaaatctcgggggagaaggggtcttagggacacttaagggggggaaaacccttgtaccagaaaaatttttctcccaagtttgggagaagcccccct

SEQ ID NO: 94382 - DNA, 595 bp, Homo Sapiens
  misc_feature (314)..(395): n is a, c, g, or t
cagtcgacggtaccggacatatgcccgggaattcggccattacggccggggattttatacccttgacttaactttttaaccaagtgtgtttattccaaagagtgtggacatttggttggggtggggggagaggagggatgcaactcgccctgtttggcatctaatccttatttttaatttttccgcaccttatcaattgcaaaatgcgtatttgcatttgggtggtgttttatttattatatacgtttatataaatcatatataaattgagcttgcttctttcttgctttgaccatggaaagaaatatgattcnnnnnnnnnnnnnnnnnnnnnnnnnnnnnnnnnnnnnnnnnnnnnnnnnnnnnnnnnnnnnnnnnnnnnnnnnnnnnnnnnngagaaacagctacagctttgggtcatttttaactactgtattcccacaaggaatccccagatatttatgtatcttgatgttcagacatttatgtgttgataattttttaattatttaaatgtacttatattaagacaaaatatcaagtactacatttcctttggttcttgatagtagccaaagttcaaatgtatcacatg

SEQ ID NO: 94383 - DNA, 1072 bp, Homo Sapiens
  misc_feature (443)..(503): n is a, c, g, or t
  misc_feature (953)..(987): n is a, c, g, or t
ggaggggatgagagaggcgcagacagcctttagagcgcggccccccctccttgtattccccccttttttctccctgccccgagtttctgggtcccccctgccccgccttattttttgccatcagtatataatctggagggtcttgctttaaataggtaagcaccagtttacataagcctgccaaaaggagaccttcgggatagatggaagaggcttacccacagcgaagcgtcaatgaagttcacatggctcagatgactttgggccctagatgtaaccagctgtgcgatggaggccaagttttgcctctgtggggtgcagtcaccttcccatctccacaggacgataccccagcatttacgaggcagctctgctgacctggcccaggcaccgtggtccccaacttcaacgcatctgaagcgttgcccagggagcgcattagnnnnnnnnnnnnnnnnnnnnnnnnnnnnnnnnnnnnnnnnnnnnnnnnnnnnnnnnnnnnnggggggcgctgtaggttttgcctaaagacgagtctaaatctggcactgcaggttaaggatgaccattcctaaggcaagcaggtgacactgtcggcaaattgaggtgagactttttctgacccaccccgataccggagggatggctgggctctggtttggatacagacagaatgccagggactacacctgcttctcacttggaacttgggtgaaacctctcaggaagctgtcattcttctcctataccccacctcaccctcttccacccaccactagcagagagattcgggaggggcttgggccagctgaaacccataggaagcacgtccccagagacccggctttcccagcctctcctctcctcccatcacagccccatggttaagaaatgtcctgccgcccggccgtaatggccgaattcccgggcatatgtccggtaccgtcgactgnnnnnnnnnnnnnnnnnnnnnnnnnnnnnnnnnnncggccgcttcctcgctcaactgaccttcgctgcgctcgtcgttcggctactaaggcggtagcgccctatagtgatcgtatcagtt

SEQ ID NO: 94384 - DNA, 828 bp, Homo Sapiens
  misc_feature (78)..(112): n is a, c, g, or t
  misc_feature (601)..(601): n is a, c, g, or t
ccttgttagcaccatatagggctacgcgctgttctgaacgacgagcgcagcgaagtcagtgagcgaggaagcggccgnnnnnnnnnnnnnnnnnnnnnnnnnnnnnnnnnnncagtcgacggtaccggacatatgcccgggaattcggccattacggccgggaagtcactgggtgccttccgagggctgtcactgggcaggccatatacaagtcagtgtgtgcgtgggcactgcagtgtgtgcatgccgtaggtgttgatgggtgctaggaggggtgtcgtgtgcatgcgcgttgaagaggatctgtattgccgtgacctctgttcatggatgagtgcattgtaatttgttctcaggctgtgctgtgagggccgccttaacccttgctcccttcccttctagagctgccttaagttctccagaacttttcttctgtaaaggatatcttgcctggaagggatatcttgccctgtttctcaaggttttgtgagagttctgactggatgtggccctgcatgaccctccttctcctgtacttcctctttcctttccaaatgggaattacgaactgtggggcagcaaacagtctcagagccagtgnaggaggccagcttagagaatgcttcgtgagttagtggggactctgtgtcacaagtaagcaaatgaatatatgaagagaaatttatggagataagttagattcttggtaatacttaaatgtccttgcttttctacgtaaccttttgtgactaaagggtaaagggtataatcaaggctttgtgtgggacattccttttcaaattttttaagaacctggactattaaggt

SEQ ID NO: 94385 - DNA, 1003 bp, Homo Sapiens
aacgaagcgaggcctgggtggcgaattcggcacgaggcagatctggaggtgtgtccatggcggcgcttgacctgcgagcggagctggattcgctggtcctgcagctgcttggggacctggaggagctggaggggaaacgaacggtgttgaacgcccgggtggaggagggctggctctcgctcgccaaggctcgctacgcgatgggcgccaagtcggtagggcccctgcagtatgcttcccacatggagccccaggtctgcctccacgccagcgaggcccaggagggactccagaagttcaaggtggtgagagctggtgtccacgccccagaggaggtggggcctcgcgaagcaggtctgcggaggcgcaagggccccactaagaccccagaaccggagtcctctgaggcccctcaggaccccctgaactggtttggaatcctagttcctcacagtctacgtcaggctcaagcaagcttccgggatggcctgcagctggccgcagacatagccagcctccagaaccgcattgactggggtcgaagccagctccggggactccaagagaaactcaagcagctggagcctggggctgcctgacatgcgcgcaaagaggcagggcagcgagcacagctgttctccgacatggctacgtgatctcaggccttcttccttcacaattagctcttgcccctaccccacgccagctaatgccccttctgtgtccctgctctgcatgtttccattttcccttaggtgtgaagtttgaaagaaggcaaaccagtaatttttgaaagccacctacttttgaaaaccatttctaaggccctgagtttcccatagggacaccacctcacttagggcaaggtacacgtttaggtcaacaattggggaactgccctcctgggatcacctcacgctggggccttccatggcctgggattgatggaaacccctggggccaaaaaagaagaagggggggccacagaaagataaccgcctta

SEQ ID NO: 94386 - DNA, 856 bp, Homo Sapiens
gcttgacctgcgagcggagctggattcgctggtcctgcagctgcttggggacctggaggagctggaggggaaacgaacggtgttgaacgcccgggtggaggagggctggctctcgctcgccaagggctcgctacgcgatgggcgccaagtcggtagggcccctgcagtatgcttcccacatggagccccaggtctgcctccacgccagcgaggcccaggagggactccagaagttcaaggtggtgagagctggtgtccacgccccagaggaggtggggcctcgcgaagcaggtctgcggaggcgcaagggccccactaagaccccagaaccggagtcctctgaggcccctcaggaccccctgaactggtttggaatcctagttcctcacagtctacgtcaggctcaagcaagcttccgggatggtgtcctggaggccaagaagagaaagtgtttcctggagcgagtgatccaatgtgtggtcagccctgctgctgaacaggaggccgaagacgagagctgcccggaggactgggcagcagctgttccagcagagacatcagcaaaagccatctagaggtggatccagagtgtggactaacagagaaacagaagtggagggagagcaggcctgcagctggccgcagacatagccagcctccagaaccgcattgactggggtcgaagccagctccggggtactccaaagagaaactcaagcagctggagcctgggggctgcctgacatgcgcgcaaagaggcagggcagcgagcacagctgttctccgacatggctacgtgatctcaggccttcttccttcacaattagtctggcccctaccccacgcagtaatgccc

SEQ ID NO: 94387 - DNA, 467 bp, Homo Sapiens
aagaggagaggcctcattagaacctaaccctgcaccatgatcatggacttccagccttcagagttaggaaaataaaattctgttgtttatgccaccaaatctgtggtattcgcttatgaaaaccatagaaaattatacaatacccaacaagcaaatagcagaatggaattaaacccataaaggatggcttcaaaggcaatgcttaaccactatactgcctttaaaaattgtcctaacagttcaacttcaattacagaaagtttataataattagatgttaatacttttatgcttaactttatatttctatttcaaatgcttatttccttttcaatagttaatattttctggacagcaattctggactattttctaaattctctgttttctaaattcttatgtcatgccctctgtcataagaatgtttataccctatgatcttctaaaaataaatccttaaaagatga

SEQ ID NO: 94388 - DNA, 885 bp, Homo Sapiens
  misc_feature (43)..(77): n is a, c, g, or t
  misc_feature (127)..(190): n is a, c, g, or t
gcacctgtagcgcagcgcagtttatgagcgaggaagcggccgnnnnnnnnnnnnnnnnnnnnnnnnnnnnnnnnnnncagtcgacggtaccggacatatgcccgggaattcggccattacggccggnnnnnnnnnnnnnnnnnnnnnnnnnnnnnnnnnnnnnnnnnnnnnnnnnnnnnnnnnnnnnnnnctcatttatgaattctatcaggatttctttttttggtggaattcttagcatgttcacatatgagatcatatcttgtcaaacacagataattttatctctttctttccatcttggatgccttttatttctttttcttgcctgattgccctggctaaaacttccagtactatgttgaatagaagcagtgaaagtgggcatccttgccatgttcttgatcttagaagcaaagtctttaagtgtttcaccattgagtatgatatttgctgtggggttttcatatgtggcttttattatggtgaggtattttccttgtatttctagctcgttgagctgttttcattctgaaaggatgttgaattctgtcagatgctttttctgcatcaattgagatgatcatgtgtcctttcgcccttcattctgtctcatgtggtgtattgcatttacccagtttctatgtgttcaaccatccttgcattccaggaataaatcaccaccctggtcatggtgtataatccttttaatatgctgctgaattcaatttcctagttttttattgaggattgttacatcactgttcataagggatatgatattggtctgtagctttgggttttatagtgtctctggctttagtgtcagggagtgctggctcatagaatgagatggtaagtggaggaggtatggtacgagattag

SEQ ID NO: 94389 - DNA, 807 bp, Homo Sapiens
  misc_feature (687)..(721): n is a, c, g, or t
aaggtgcaccagacataagtttgtacggttatatagaaagcgtgttttattttggccacgagggaaccaaacccgggtgtaaaaaacgtgggcaatacggaggcgagggaaccccacaaaatagtttactatataaggaggtcattatcctctaaatgttggacctcataaggcattttgggtttatttggggaaaaaggtagaattactcctaaagtatgcgttaaaatataaattgggaaattttggcttggggaatggatcccattttgaaggatatgaattccaaaaggtggttttttgggttgtaaaattatgggtgctaattaaaaaagaacgtggttgttcctgttaaaggagccagtgaaggagaatgaatacccttccaaggaccagagtggcagctccagtaatagagaaccccttttgaggtgtagtgatgcacggagggacttggagcttgctattggtggagttctccgggcggaacagcaaattaaagataacttgcgagaggtgtgacatgtgcttttctcttatgccatccggactcttgacacagggctgatttgagcatggccaaggacttggtctctccgtgccagcaaaaaatttcaccccatgccttgcgtggtccccggccgtaatggccgaattcccgggcatatgtccggtaccgtcgactgnnnnnnnnnnnnnnnnnnnnnnnnnnnnnnnnnnncgccgcttcctcgctcactgacttcgctgcgctcgtcgttcgctgcgacgagtagcgccctatagtaagtcgattcagtctcctca

SEQ ID NO: 94390 - DNA, 915 bp, Homo Sapiens
ggggttgtcgcgagaactctgcctttgggccgtaggttagtgtggggccgtgtctcagtccacccaaggtctcctcggatcgcctggagaggcactcggacctggagcagtgaggagaatgaataccttccaagaccagagtggcagctccagtaatagagaaccccttttgaggtgtagtgatgcacggagggacttggagcttgctattggtggagttctccgggctgaacagcaaattaaagataacttgcgagaggtcaaagctcagattcacagttgcataagccgtcacctggaatgtcttagaagccgtgaggtatggctgtatgaacaggtggaccttatttatcagcttaaagaggagacacttcaacagcaggctcagcagctctactcgttattgggccagttcaattgtcttactcatcaactggagtgtacccaaaacaaagatctagccaatcaagtctctgtgtgcctggagagactgggcagtttgacccttaagcctgaagattcaactgtcctgctctttgaagctgacacaattactctgcgccagaccatcaccacatttggggtctctcaaaaccatttcaaattcctgagcacttgatgggctcatggctagttcaacaaatattgggccccttccctggaaaagagaggctgtatctccctggccagaacagaagtcaccctcccggtattgtaactgttcccttttcaccgaaatggcttctttgggaaagcaaacctggccaagggggtttatcaaggcttcctttaaattacccaagcaaccgaaccccccagggaattgtgccttaccctcaaaagcaagaacctcttgggagaaacaagttccaaaaattctcttccacagagaccctgggcaatttttctcttcca

SEQ ID NO: 94391 - DNA, 971 bp, Homo Sapiens
cagtcgacggtaccggacatatgcccgggaattcggccattacggccggggacatttaaccttaaaatttattttaaatgtattcttttattattataagggaaatacagatggctgataaataccaaaaagattcaaaagcagcttaatttaaaaagcacaaagagattctggcttacagtgccccaatctcaatgtttttatagttgctgagctaactaatgtgattattgagtttacagatttaaaaattgtcactgttagagtatctactgtttttatgaagtcaaacttatgctgcctcagaaatccctgggtactgaaatggtaacatggaagtgaagaggtcactttgaaatattggtgagtcacaaagattaaagaaaaggatcagtttgcagatactcagaaaaggttattgaacataattactgaacagcacattttctctctaaaaagtagtttcatatgggttgtatttttaagatcagattatcatttctgatatttggtcaaaattttgtaccttaggttacttagagcccagatttaacatcatgaacattatctggctttgtctttactacagatatgtggaactgtaaccaaatatgttgtctctaaaaacttgttgattgcaaaatacagttctataaacaaaacccatatgtatatataaatgttaatttggcggaagtcctggaaattataacttattgcattaagcttgatctgtcttcggaccaatacggcacctgctattcacattgcttcacacaatctttcaatggcctctcatagcggcggggcacacccggtaaccacacactactcgccgggccgcaactctcgctatccctgctcccgggaccccatttacacgcgacaccccgtatcactgaaagcgccgcaaaactgccaaattcgagccacacgagacacccatactcagcacacagtcacaccctact

SEQ ID NO: 94392 - DNA, 978 bp, Homo Sapiens
cagtcgacggtaccggacatatgcccgggaattcggccattacggccgggggctgcctgagctgctggaaaagcactgacaggtgtttgctagaaaagcactcctggagcttgccaccagcttggacttctagggactttcctctcagccaggaaggattttgatattcatcagaaatacctccagaagattcaaggagctgtagaggtgaagtaagcctgtgaaggaccagcatgggaatcctataccctgagcccatctgccaagcagcctatcagaatgactttggacaagtgtggcggtgggtgaaaagaagacagcagctatgccaacgttcaagatggctttaatggagacacgcccctgatctgtgcttgcagggcgagggcatgtgagaatcgtttccttccttttaagaagaaatgctaaatgtcaacctcaaaaaccagaacagagagaacctgcttgcatttatgctgtgacagaacaacacatttaccttcattgattatctactaattatcctcttaatgcctgttctgcttattgggtatttcctcatggtatcaaaagacacaagcagaatgacgctcttgtacgaatgctacttgatgctggcgtcgaacgttaatgctacagattgttatggctgcaccgcattacatttatgcctgtggacatgaaagaaaccagtgttttatccctactgctcttggaaagcccgtgcgacccccacaatagagaattaagctgggggagaggcactggatattgccggacgattaaattttcccacatgggattaggctagaagcattgtatcctgggcacaaccgctggatacgacacgtccacggtctcatccatcacttcggggggcaatcagagtgccctttggatatgtcaccgcagtggaacactattggtgcaaccgcaccttgacgacgtgtccactgaaagcgaccaagaagacaacga

SEQ ID NO: 94393 - DNA, 987 bp, Homo Sapiens
  misc_feature (659)..(684): n is a, c, g, or t
ggctaggtagcgaggcctggtttgaattcggcacgaggtaagtcctctaaacacacttgggcacggaaatgcagtactgtaaggaagagggacctccagcttccacaaacaccatcttcagctgtatgaaagggacggttgtggtgaagtttgtcaggcacagtaagcatgctgagtggcggggatcagaactctcctatctgaacctactgaggagcaaagcagcaattacatgggatcctgtggctctcccgttgcagaggccacaggaagataggatggaacgtgactggtctcctaaccaaggtgcactgagaagcaatcaacgggtcggtcgtggccagtcctggggaggtctgagtggtggtctttgggataacctttggccttatggatttggactcgaaattagaagagcctaccatttcagatgcaatcacttttggacatgcttttgcagacagtccttaatgctgaaaacacagagaatgggtaattcaagaggcctttcttttaaaatagacttttgtgacccactaattgtaaggtattgcaaggtcactttgcgtgtgtcataaagttgacttccttattggttgaaggtcacagaagtagtggtttgctttgatggaaatagctacagctgtgtcccttcctgnnnnnnnnnnnnnnnnnnnnnnnnnnctcggcacgtggtatctccaccatttcttctgcacaaagatgtcttctgttcatcctgaacattttaaaaaatgcagaatttatgtgactgctttttgcctcacaattatgcttgtgaattttacaaacaattgctttcccttttgataattaatgtaccaaaggcgttttatagccatagatgtctgtaccaatatgtgcagtctgccttgacccacggggactcgacctttagatgccgtgcaatctgggtggccatggctcccaagacgggtgaccacgccaaatttcatgttcgactgg

SEQ ID NO: 94394 - DNA, 871 bp, Homo Sapiens
cagtcgacggtaccggacatatgcccgggaattcggccattacggccggggttttttaaagtaatgttttttcttatgagaaaaaggtttagatagaatgggttttattaatattaatttaatgctattagcaatttccatatactatattgtggaaaagactgaagaatacaattctgagaaatacaaaaaaaattttaatggtatactcatgttgaaagataaatgttgctaagtcctggtatgatggtgtgagcttccttggggaagtacttcttgagttatgtaactaacaggatgttttactacagatctgaatggctattcagataacatggcaaaaaatgatagcagaagatcattaaaaacttaaaatatattttattagaaaacatttatctatgaatgaatatttccttgatgctggtctctgcacacatatgcttggttacttgcatgcatttcattggttgttcaataagtgagatgattacagataacttaatacttgtattttccttatatggaaaaccgttatagacccaataacaactaaacctttcaaaagaaaatattttctattatgaatgttgattttcataccaaagaagatggagagtctaaaatttggatatgattcttatgtttttttaatagaagaaccttcttcaagtttattttcctaaataacatcatattgtgtagaaaagataaagaaaaaaattttgggggcggggccaaaaagttttaaaacacagtggggcggggcccagggttgtaagggaaagggccagagaacgggcaaagggtggtttacaaaaagagcggggaggttgaaacaaggaggggaggataaagagaggtaaaagag

SEQ ID NO: 94395 - DNA, 882 bp, Homo Sapiens
  misc_feature (485)..(635): n is a, c, g, or t
cagtcgacggtaccggacatatgcccgggaattcggccattacggccggggcactagggatgatgcagagatggtctttcctgttttgtggacaagcaggcaggcaggcagagttcagggtcatgggctagggcagtcatgcctagtggtctctgagtgtaggattcttgaacctgctgatttgcatttcacctgtagttctacagtaaaaaatgattttatataacttttggtatataagtctcaaaaagtgtgagtcagaagagatgaaacattatatttaaaatttcatatcaaagcttctaatacaacgttgctagagccatggcttggaaataaatcaggaaaaaaccctcaaatacagaatcagttgtgttaatgcactagaacttgccttctgctttaaagccataattaatcatttaaatgctggataaaaaccatgtgttttgtctttagaaaaggtgttgagtggacttcaaggnnnnnnnnnnnnnnnnnnnnnnnnnnnnnnnnnnnnnnnnnnnnnnnnnnnnnnnnnnnnnnnnnnnnnnnnnnnnnnnnnnnnnnnnnnnnnnnnnnnnnnnnnnnnnnnnnnnnnnnnnnnnnnnnnnnnnnnnnnnnnnnnnnnnnnnctccccacactaatcatgtacttcgaccacattttcacaccgaatatgttcgggcctatcgggtttaataaaaacaccatctctacataactttctcaaaacacacttgcacacggctctcgtcagaacctttggacctctctttcatggctcggcagcatggacccgcgaagtggcagcgccgctaatccagacacccccggcgtgaggccgaccactccctcccaaaacaccgctgcgggacgga

SEQ ID NO: 94396 - DNA, 912 bp, Homo Sapiens
attgttatccccccaggaggccattcctcttgaacccccttcaaaagggcccttcctttggacccccctggcttacccccattccacaggtttgggatcccattgcttccccaatgtggccttggggtttccccgtctggggagtccactaaaatataaggaatgtgctggttcatcaccatcccgagtagaaatacgggtccatggaaaaatcgatccaagaaatattgaagattttgattggtgactgggtcaaactgttacaggcatctttatactctatgattccttgtgccattgtagggactacattatggtgtctatttcgaactttgatgagtgtatctacaaagtctgataatgctttctggtcatctgggcttttctcatggaattccaccaaatccatcaggctctgtatataccagcttttaaccaattgcactgaagaggtatttactaattgggtcgggaggatatcaatttccttcagaatgcttggcgagtctcacaggcaattcttgtcgcaaaaatgcaaaagaagttctttcacatgcattttctgaaccaaagtccagtagctgcttcatggacagcggggacgggctgtagcgcgagaaatgctccacctctcggggcaccaggccggcgccgttgagcgagccagcgctgcgcagcacgaagcgggccgccttcatcttgacgcccacccggcctggcggggactgtggctggcttgaggggcgaaggctgctcggagcagagcctggttccgagggggcgcggcgcgtccgggcgaggactgcaggtgcgctggctggctcgtgcgccccggcctgggctggggtttgagggtgccgcggagtgaagagtctgggcagagtcggagatgcagtggttcgagattcaaga

SEQ ID NO: 94397 - DNA, 1026 bp, Homo Sapiens
  misc_feature (134)..(134): n is a, c, g, or t
atcagtcgacggtaccggacatatgcccgggaattcggccattacggccgggggacatatttatattaacaattggttttcattgttcatctgaaattcaaatttatccgggcatcctgtatttgtatctgtanagagtcataaagagacaagcacatatacaaaaagataaaagaaacatcatcaatcccaacaaaaaaaataggaaagtaattttttgagttttagagaaccttaaaattaatgctaagaccctaggaaatttcttatgtgctcatatgtttggtgaaataataggaaggcagcacagcaaagtgtttcagattgcaggttttcagtctgatggtcccaagttgaaatttcaagctctttgacctaggtcaagttacagatccccagactgcagataaactgatactgacaaaataaaaagaatacacatgcttcatacctcatactataattgtaatgaaattagataaaataaagatgctaaacatagagctagaacatagaataaaaagcccaatatatgccaccacgtcgttacaatagtaacatataaaaaatgtggataatgaaacagattaaaagacaaccaaataagagaaatcatccttcgaaacccttcatgtttactgggtttactttttacttaactactcacttcataattctgtccatctactactacttaccacgcctggcacaccccctcgtcaccgtagtgcaatcacatttcggtggtcactgtcaccaggtctaacacgaggttccagaaatgcccggtgaagcgcatccagtttgacaaccgtacgacatattagcattcaggcacgtcaagagataaagagaaacaagaagaacaagaaggaataagtagcaacacacaaaaagacacacaccagaatacagggacagaacgagacgacaacgagagagcaagacacacagccacactcacactactcgacaacagacaatagagagagacacaagatagaagagaaagacagagtgatacga

SEQ ID NO: 94398 - DNA, 1015 bp, Homo Sapiens
cagtcgacggtaccggacatatgcccgggaattcggccattacggccggggaaaccttcccaattcctaaagctttgttggaaatcagctgcctttcatcggatttacctactatagagaaaatttattattaagtgactctccatcttgtagagaaactgattccatacaatcaaggaaaaatgaagaaagtcaagagattcagaaaaaactgtatacattagaagaacatcttagcaatgagatgcaagccaaagaggaactggaacagaagtgcaaatctgttaatactcgcctagaaaaaacagcaaaggagctagaagaggagattaccttacggaaaagtgtggaatcagcattaagacagttagaaagagaaaaggcgcttcttcagcacaaaaatgcagaatatcagaggaaagctgatcatgaaagcagacaaaaaacgcaatttggaaaatgatgttaacagcttaaaagatcaacttgaagatttgaaaaaaagaaatcaaaactctcaaatatccactgagaaagtgaatcaactccagagacaactggatgaaaccaatgctttactgcgaacagagtctgatactgcagcccggttaaggaaaacccaggcagaaagttcaaaacagattcagcagctggaatctaacaatagagatctacaagataaaaactgcctgctggagactgccaagttaaaacttgaaaaggaatttatcaatcttcagtcagctctagaatctgaaaggagggatcgaacccatggatcagagataattaatgatttacaaggtagaatatgtggcctagaagaagatttaaagaacggcaaaatcttactagcgaaagtagaactggagaagagacaacttcaggagagatttactgatttggaaaaggaaaaaagcaacatggaaatagatatgacataccaactaaaagttatacagcagagcctagaacaagaagaagctgaacataaggccacaaaggcacgactagc

SEQ ID NO: 94399 - DNA, 879 bp, Homo Sapiens
cagtcgacggtaccggacatatgcccgggaattcggccattacggccggggattcgaatcggcggcggcttctagtttgcggttcaggtttggccgctgccggccagcgtcctctggccatggacaccccggaaaatgtccttcagatgcttgaagcccacatgcagagctacaagggcaatgaccctcttggtgaatgggaaagatacatacagtgggtagaagagaattttcctgagaataaagaatacttgataactttactagaacatttaatgaaggaatttttagataagaagaaataccacaatgacccaagattcatcagttattgtttaaaatttgctgagtacaacagtgacctccatcaattttttgagtttctgtacaaccatgggattggaaccctgtcatcccctctgtacattgcctgggcggggcatctggaagcccaaggagagctgcagcatgccagtgctgtccttcagagaggaattcaaaaccaggctgaacccagagagttcctgcaacaacaatacaggttatttcagacacgcctcactgaaacccatttgccagctcaagctagaacctcagaacctctgcataatgttcaggttttaaatcaaatgataacatcaaaatcaaatccaggaaataacatggcctgcatttctaagaatcaggcttcagagctttctggagtgatatcttcagcttgtgataaagagtcaacatatggaacgaaggagtgatcacgattcctaaatcagaatattctgtgcactcatctttggcatccaaagttgatgttgagcaggttgtcctgtattgcacgcagcagcttaccgtgccgacatcaaaatttcctttgacgaa

SEQ ID NO: 94400 - DNA, 1013 bp, Homo Sapiens
  misc_feature (84)..(118): n is a, c, g, or t
  misc_feature (382)..(678): n is a, c, g, or t
aaaaactgtcatcactatagggcgctagcgcgttatatccgaacgaccgagcgcagcgagtatgttgagcgaggaagcggccgnnnnnnnnnnnnnnnnnnnnnnnnnnnnnnnnnnncagtcgacggtaccggacatatgcccgggaattcggccattacggccgggggcgatgggctgatttcaggcagtgggagccacggaacaagcttcaggacgctgaaaggggtggacaggactgggggcatctggggtccatgggtttttaaggctgcagtgtttgatggcacactcagcggggaggccttggggcctggggctatgagaccctttggtgaccgattttcaggggcagtgacataattagattatttgtggccannnnnnnnnnnnnnnnnnnnnnnnnnnnnnnnnnnnnnnnnnnnnnnnnnnnnnnnnnnnnnnnnnnnnnnnnnnnnnnnnnnnnnnnnnnnnnnnnnnnnnnnnnnnnnnnnnnnnnnnnnnnnnnnnnnnnnnnnnnnnnnnnnnnnnnnnnnnnnnnnnnnnnnnnnnnnnnnnnnnnnnnnnnnnnnnnnnnnnnnnnnnnnnnnnnnnnnnnnnnnnnnnnnnnnnnnnnnnnnnnnnnnnnnnnnnnnnnnnnnnnnnnnnnnnnnnnnnnnnnnnnnnnnnnnnnnnnnngcaaaacaaacagacaacacaaaccacgtttaggggcgcgcactcacagggccctcagaaagactcttctcgaaaaaccatcacgggaggggacaccggcgggccccaaagacatacgcagacacgggccacatacgggacccactaaggaacaaccggggaaacaaaacaaagacgcaggggcagaacccacgatgatacaaaccggcgcggaaggcaaacgcgacagcgtacgtgaacatacccccgaagcgaccacgcaacacacaacaggcgacacaaatacaagagagtacaaagagaagacacaaataagagaagccccggagcgcgag

SEQ ID NO: 94401 - DNA, 777 bp, Homo Sapiens
  misc_feature (271)..(320): n is a, c, g, or t
  misc_feature (331)..(507): n is a, c, g, or t
cagtcgacggtaccggacatatgcccgggaattcggccattacggccggggcccacaaaccccatgtgactggttcgaaggacccagagcataaaggtctctcaggaaaccaatgtccaaaaccctagctggcggtacagtcatgctgtgctccaatcccttatccccaggatttacggcgtgcgtttcatggcgcatacgatgcgaggtctctagagtgagttgcttgtatgtgacgatctagagttatcacattcttgttgcaccaccnnnnnnnnnnnnnnnnnnnnnnnnnnnnnnnnnnnnnnnnnnnnnnnnnntggttcaagcnnnnnnnnnnnnnnnnnnnnnnnnnnnnnnnnnnnnnnnnnnnnnnnnnnnnnnnnnnnnnnnnnnnnnnnnnnnnnnnnnnnnnnnnnnnnnnnnnnnnnnnnnnnnnnnnnnnnnnnnnnnnnnnnnnnnnnnnnnnnnnnnnnnnnnnnnnnnnnnnnnnnnnnnnnnnnnnnntgagccaccgcaccggcccacttgctttgctttttaagaaaatgtatgtatcttcaatgggttagggactaatatctgcttccccaacccttcaccgcgtacctctttagtgccagcaccttatacatccaggccaaatgatatcacccttttgtgccttatccctcgagctgtgacacacaaatgtcatcttttcagatagtttgggccaccaccaacaagatcggttgtgctgtgaacacactgccggaagatgactctctggggaga

SEQ ID NO: 94402 - DNA, 898 bp, Homo Sapiens
  misc_feature (668)..(678): n is a, c, g, or t
  misc_feature (746)..(800): n is a, c, g, or t
cagtcgacggtaccggacatatgcccgggaattcggccattacggccggggggggttgggcctgcagaatcccctgcagcattttcctgtaatctggatgagcgatcttcaaacgtgtgctttcaaactacttaaataccatattcttcctatcttgcctttcatttttatattaccacagatactttcctcatagtcttgccagtgcttgtagaatgcttagaaaaagcttgataaaccactgggctaagtacacagagggagaggctagcagtatttttaaattggtttctaaattttttatagcttgatggtagataacacatttgcttcattgaagtaatctgaaaaaccaatcctcaaaagacctctcaattagaattcttaaatgacaatgttttctttatcatatatttgagagattgatttaaagaaaaataatgcttgactatctgaaataatattttaaccctatcataaaatctctgcctggtagaacagctgactgtggaagggtaaaatgcagagaaccagtcattggatctcccttctctactttgttactgaaatcttgaacctgtagaacatttacttatcactgtgttcctttctaatgggaaaataataataaacacttgcagagtattttttaaaagtttttagctttnnnnnnnnnnnccctgtgccttacacaatgtgtatattgagttgatactgattatgataattagatggtattatacaannnnnnnnnnnnnnnnnnnnnnnnnnnnnnnnnnnnnnnnnnnnnnnnnnnnnnnattgttaaaaggtgattgagacacagcctctgtcctgagcttagtctagtaggaggtgacagatttgtaaataatagatttgaagttgctgagcaaaa

SEQ ID NO: 94403 - DNA, 885 bp, Homo Sapiens
cagtcgacggtaccggacatatgcccgggaattcggccattacggccggggtggtgcacagggaagaaacggctttagacagcagtctgcgggccccacctgggtggcaggatgccgagaaatcttgcagaggtagctccgaaaccatctggcccaactagcctcaacatgacagctgaggaaaggcaattaggcccagagaggcagagacactcgcttaagatcacaggcttagtgtgaggacagagcttgaaatcccagtctcctggacccccaggccagggtcttgtccaacatagaatgtcttcctctactggggtcgtactggctttctgttagaaaccttggtctgagatgtttcttccctgataccattacacattcgatgttcttttattcagagcaagtgtttctgtgtattctgaaacgtggaaactgaaccagttggtttctcctagtcacgcaagcatactctcctggctccccaagtacttaaatgtacatcatctgtccgcacccctggtatttggcctcaacccttgcatggatcggaaatcattcgtttcaggtcaagaaacagcctgggggatctgtgggtaaaaatcagcacatttctcccaggcctgtgcacacaccccgctcagaatccctatgcaattttccttgaacgcaaagacacaggaccatcatgatacgcccgagtgggggaggtccttaccacccacgtggaagggtggaagggcagcaaagttcccaagaaatcccatccagacatcacatggcgaacaaaatcgccgatacaaacaacacacgggggcacaaacacacggtaaccaaagacgaaaataaaaggacgaaatagggacaaaaaggacacaacgggaa

SEQ ID NO: 94404 - DNA, 253 bp, Homo Sapiens
gggccaaccattgccaatgtcaatcaatcacagtattagcctctgttaatctatttactgttgcttccatatacattcttcaatgcatatgttgctcaaaggtggcaagttgtcctgggttctgtgagtcctgagatggatttaattcttgatgctggtgctagaagtaggtcttcaaatatgggattgttgtcccaaccctgtactgtactcccagtggccaaacttatttatgctgctaaatgaaagaaag

SEQ ID NO: 94405 - DNA, 842 bp, Homo Sapiens
  misc_feature (337)..(395): n is a, c, g, or t
cagtcgacggtagcggacatatgcccgggaattcggccattacggccggggatcctccttattgacaaacagagcggtcgcggcggcgactctcggcgtgcggtgatagccaagccatgggagacaagaagagccccaccaggccgaagcggcagccgaagccgtcctcggatgagggttactgggactgtagcgtctgcaccttccggaacagcgccgaggccttcaagtgcatgatgtgcgatgtgcggaagggcacctccacccggaaacctcgacctgtctcccagttggttgcacagcaggtgactcagcagttggtgcctcctacacagtnnnnnnnnnnnnnnnnnnnnnnnnnnnnnnnnnnnnnnnnnnnnnnnnnnnnnnnnnnntagcaaaaagaatagccataagaaaaccaggccaagattgaaaaatgtggatcggagtagtgctcagcatttggaagttactgttggagatctgacagtcattattacagactttaaggagaaaacaaagtcaccgcctgcatctagtgctgcctctgcagatcaacacagtcaaaagcggtctagctctgataacaccagagagaggaatgtccaggtcatcttcacccagaggagaagcctcatcatttgaatggagaatctcattaaagtttattttctccaattttcttagtcacttctgtcctaccatgcaaaatacacagattatgccaagaggtaccacattttcatgacagatacattcatgcacaatccataatttgagtttacataaaattagaacttgtgtagcaattgtcggattttattgcaatgatgctacaa

SEQ ID NO: 94406 - DNA, 1196 bp, Homo Sapiens
  misc_feature (43)..(81): n is a, c, g, or t
  misc_feature (84)..(118): n is a, c, g, or t
  misc_feature (1051)..(1051): n is a, c, g, or t
  misc_feature (1068)..(1068): n is a, c, g, or t
aaagactgtatagatcatatagggcgctagctcttcgtcagtnnnnnnnnnnnnnnnnnnnnnnnnnnnnnnnnnnnnnnncgnnnnnnnnnnnnnnnnnnnnnnnnnnnnnnnnnnncagtcgacggtaccggacatatgcccgggaattcggccattacggccgggggcaggcggtggcgagtggatatctccggagcatttggataatgtgacagttggaatgcagtgatgtcgactctttgcccaccgccatctccagctgttgccaagacagagatcgctttaagtggcaaatcacctttattagcagctacttttgcttactgggacaatattcttggtcctagagtaaggcacatttgggctccaaagacagaacaggtacttctcagtgatggagaaataacttttcttgccaaccacactctaaatggacgaaatccttcgaaatgcagagagtggtgctatagatgtaaagttttttgtcttgtctgaaaagggagtgattattgtttcattaatctttgatggaaactggaatggggatcgcagcacatatggactatcaattatacttccacagacagaacttagtttctacctcccacttcatagagtgtgtgtcgatagattaacacatataatccggaaaggaagaatatggatgcataaaggaaagacaagaaaatgtccagaagattatcttagaaggcacagagagaatggaagatcagggtcagagtattattccaatgcttactggagaagtgattcctgtaatggaactgctttcatctatgaaatcacacagtgttcctgaagaaatagatatagctgatacaggtaatcaatgatgaatgatattggtgacagctggcatgaaggctttcttctcaatgccatcagctcacacttgcaaacctgtggctgttccgttgtagtaggtagcagtgcagagaaagtaaataagatagtcagaacattatgcctttttctgactccagcagagagaaaatgctccaggttatgtgaagcagaatcatcattntaatatggagtcagggnctctttgtacaaagccctgctaaagggattcaactgggaaagcctttgtggctggccttttccgggcaagatcatggtatggctcccattattcccacccacaccaccattaaaattgtgggaattgc

SEQ ID NO: 94407 - DNA, 701 bp, Homo Sapiens
cagtcgacggtaccggacatatgcccgggaattcggccattacggccgggctgcctttcaaatctatagatcaaaagtttatggaaaagtcgaagaatcaattaaataagtttttacagaatctgctttcagatgaaagactgtgggcagagtgaagcactttatgccttcttgagcccttctcctgactacctcaaggctcatcgacgtgcaggggaaaaaaaattctttttcattatcctcgtttttggaaagacttcctcgcgacttcttctcccaccaggaggaggagacagaggaggacagtgacctgtcagattatggtgatgatgtggatgggaggaaagacgccttggctgaaccatgtttcatgttgattggggagatttttgaacttcgaggaatgtttaaatgggtgagaagaacattaattgccctcgttcaggtcacttttggaagaaccatcaaaaaacaaatccgggacacagtcagctggattttcagtgagcaaatgtggtttactacatcaatattttccgggatgctttttggccaaatgggaagttggcaccaccgaccacaaatcagaagcaaagagcaaagtcaggaaacaaaacagagagcacagcaaaagctgcttgaaaacattcagatatgcttcagagccttgttggacagcaaatgccgccacggtataataa

SEQ ID NO: 94408 - DNA, 991 bp, Homo Sapiens
cagtcgacggtaccggacatatgcccgggaattcggccattacggccgggggccccagcaacggctcattctgctcccccgggtcggagccccccggagctgcgcgcgggcttgcagcgcctcgcccgcgctgtcctcccggtgtcccgcttctccgcgccccagccgccggctgccagcttttcggggccccgagtcgcacccagcgaagagagcgggcccgggacaagctcgaactccggccgcctcgcccttccccggctccgctccctctgccccctcggggtcgcgcgcccacgatgctgcagggccctggctcgctgctgctgctcttcctcgcctcgcactgctgcctgggctcggcgcgcgggctcttcctctttggccagcccgacttctcctacaagcgcagcaattgcaagcccatcccggccaacctgcagctgtgccacggcatcgaataccagaacatgcggctgcccaacctgctgggccacgagaccatgaaggaggtgctggagcaggccggcgcttggatcccgctggtcatgaagcagtgccacccggacaccaagaagttcctgtgctcgctcttcgcccccgtctgcctcgatgacctagacgagaccatccagccatgccactcgctctgcgtgcaggtgaaggaccgctgcgccccggtcatgtccgccttcggcttcccctggcccgacatgcttgagtgcgaccgtttcccccaggacaacgacctttgcatccccctcgctagcagcgaccagctccgtgccagccaccgaggaagctccaaaggtattgtgaagcctgcaaacaataaaagctgatggatgacaacgacataatggaaacgctttgtacacaatgatttgccctgaaaataaaagtgaaggagataacctacatcaacgagataccaaaatcatcctggagaccaggagcagaccattacagctgacgggtgtccgaaaggacc

SEQ ID NO: 94409 - DNA, 1057 bp, Homo Sapiens
cagtcgacggtaccggacatatgcccgggaattcggccattacggacgggggtaactgaaaatccacaagacagaatagccagatctcagaggagcctggctaagcaaaaccctgtcagaacggctgcctaatttacagcaaccatgagtacaaatggtgatgatcatcaggtcaaggatagtctggagcaattgagatgtcactttacactgggagttatccattgatgaccgatgaacatgcctgatttagaaaaacagagtctctggatcagatctgacattcctagacaccaaatacagtgtgggacataacacaagctacatagccctattgtgaacacaccttgcacaagggccagcaatgagggcaaacgcctgaaagaggctttacacaagaaaggctagcaaaaacactctaactggccacggacacgcaacccaatgaccaaaaccgaagcccaaactggttgacaccgacgatcctgggagtggaaccctgggcgagccaacacactctatgcacctggcgacactgtcatcagaaacaccaacactcgagacccacgccacactcgcgacagccaagtaccccaagcagacttcaccctcggcgaaccaaagcgtcagggacagagaaaaacactactcgcacacaagcgaacaggccgtagaagccagacacttcccccctttcccgcgcctaataccgacaatgcaggacgatagatccccacaaccaactccccgacccatgggcgaaacgagaccagcggcatcgagaagcccacatgggatgacaaatgcccgtgcgaaccgcgaacaccagcaattcagtccaaaccagagcgccacacacgggcaccacgatgcgcgagaccaacgggcggagaagacagcggacccccacagaggacccatgagaacacaccaagcgcaccaccgcactcgccaaacgacctaagaccaccaccgcagacccggaaccgcggccccaacaacccaaagcacccacagaaaaaccaaccaagcgcaccccaatcgagcctgcgccaca

SEQ ID NO: 94410 - DNA, 912 bp, Homo Sapiens
agctcatctgaattgccttacagtgaatccagagatctggtactttcctgcaggatttgccaataaatgaaaatggacatttgaaaataatatggggaatatacagagttgcttgaatgcttatcactttattactgcaatcataatgatagtaatgtaaattagtccttcacattgatatgtgtttaaacttagtccttaggtatgccttttctgccttttgttctgttgctcacccttttaagaaatgccatgataaatagcacatggttgtgttgtatggagtatcttgtactaccttcctgagtgtatgtacatttgttcatttattgggcctctgcccaacaaatgaaaatgaattttttattcagcttttctgttggacagcactgaaaagcttttgctgattttcaaggcagtctttcagcttatcctctgtcaaagtcagtcgctgctccaagattgaaacagtctgtgtcaaaacattgagttgttccataatatgctctaaagcatcagtcacagcgagaggtatgctcctttgactttcacaggggaggtcactcatgtcttctgttttctttttcgtggttgttggcaaacattctggtgacattaaggaagggttcaagaaatatccacaggcctcttcacccttgtctggcagagtcctaccactggtttctgttgtcatgcttgatgggtatggctgtagttttagaaacagtaaaatcattttataattatccagccagtgtgttaaaggggagatataactgcaatgctatagtaaagaaggaataaagctgtgcatggtaaggatgaggggcaatcagctcagctagccaaaaccgttatctcttcctggctgtcccataaagcagaaatcaaacacagcctcctgccattaac

SEQ ID NO: 94411 - DNA, 725 bp, Homo Sapiens
ctccgccagtcaccggaggcagaccgcgggaggagagctgaggacagccgcgtgcgcttcgccagcagcggggtgggaggaaggacattaaaatactgcagaagtcaagacccccccaggtcgaacccagaccacgatgcgcgccccgggctgcgggcggctggtgctgccgctgctgctcctggccgctggcagccctggccgaaggcgacgccaaggtggctcaaggagggctgatgacccccggcaatttcatggaggacgagcaatggctgtcgtccatctcgcagtacagcggcaagatcaagcactggaaccgcttccgagacgaagtggaggatgactatatcaagagctgggaggacaatcagcaaggagatgaagccctggataccaccaaggacccctgccagaaggtgaagtgcagccgccacaaggtgtgcattgcccagggctaccagcgggccatgtgcaatcagtcgcaagaagctggagcacaggatcaagcagccgaccgtgaaactccatggaaacaaagactccatctgcaagccctgacacatggcccaggcttgcctctgtctgcggctcagatggccacacttacagctctgtgtgtaagctggagcaacaggcgtgcctgagcagcaagcagctggcggtgcgatgcgagggccccgtgcccctgacccacgggagcaggctgccacctccaacgccgatgg

SEQ ID NO: 94412 - DNA, 990 bp, Homo Sapiens
  misc_feature (43)..(77): n is a, c, g, or t
gaccgagcgcagcgcagtggagtatgagcgaggaagcggccgnnnnnnnnnnnnnnnnnnnnnnnnnnnnnnnnnnncagtcgacggtaccggacatatgcccgggaattcggccattacggccgggggccggcggcggcaaaattagtttatagcaattcctcctctggtcctactgctactctgcagaaaattcccaacacccatttgtcatctgttacaacctctgacctctctccagggccttgccaccattcttctttatctcaaattccttcagctatccccagcatgcctcaccagccaacaattttactgaacacagtctctgccagtgcttctccctgcctacatcccggggcacagaacatcccaagccctactggcctgccacgctgtcgatcaggaagtcacaccattggtcccttttcttccttccaaagtgctgcacacatctatagccagaaactgtctcgtccctcttcagcaaaggcagcaggatcgtgctacctaaacaagcatcattcaggaatagccaaaacacaaaaagagggagaagacgcttctttatatagcaaacgggacaaccaaagtatggctacagctgaacttcagcggctagctgagaagcaggcagcgagacagtattctccatccagccacatcaacctcctcacccaacaggtaacaaacctgaatttggcaactggcatcataaacagaagcagtgcttcagctcccccaaccctccgacccatcatcagtcctagtggcccgacatggtctacacagtcagacccccaagctcccgagaatcactccagctctcctggaagcaggtatgtgaagggccctgcaactagcatttgggttactcagggatggcctgtgtcccaagcaagccattcccaccttgagttctgtatggagatagcactaaggcatatgccctttctccaccagccacgatcctaactctgggtccgagct

SEQ ID NO: 94413 - DNA, 622 bp, Homo Sapiens
aaacacacacataaatctaaagcaaagggtatgccaagattcaggctggggccagggtctggacccccacttctgagcatctcattagcttcccatcagtggaatacaatggagacatattccacttggtctggcaatgtcctcctggggtgatgaaaaggggggcatgttggtgtagacagcaaagtcgtcctccttctggggagccaggttgatcacgttggaatatatggcatcagcatggcaggaaagatccgaggacttgtggggaaagttggtctgatgcctcagttgtttcttaaatagtcctgctgagtcctgcagtgttagtctctggcttcagggtggtgatgttctcaagtttcagatgtccggactccaagtgccagttccttcccggtgttcagccactgtgttaatcctccacagggaactgctacacgctgctctggtgaggcattccaccggggcaatttcctacccgggagtgctctttggatcgcgtcactcgggctggccggagtccgcctcagggatgctccacaggggaggcctaagccgcctaaggggctgcctcggctgtccatcagttacctcgtttcctggtcagggaaccaagaaa

SEQ ID NO: 94414 - DNA, 1508 bp, Homo Sapiens
  misc_feature (26)..(26): n is a, c, g, or t
  misc_feature (84)..(118): n is a, c, g, or t
  misc_feature (300)..(300): n is a, c, g, or t
  misc_feature (1024)..(1065): n is a, c, g, or t
aaagaactgtatagactatatagggncctacgcgtgatagcgaacgacgagcgcagcgaagtagttgagcgaggaagcggccgnnnnnnnnnnnnnnnnnnnnnnnnnnnnnnnnnnncagtcgacggtaccggacatatgcccgggaattcggccattacggccggggagttctgtcttcctgaggctgctgtttctgggcatggccaggggatcttcagactttacaaaccagttgtgcagagccaggcatttcaataaggaacaaaatgctgagtaacaacatgaagtcagagtgtngcttgccaagagctgggaggcctgggtggtttcccaatcttaaagaagcagaaggatattaaagtgagcctcccaaaggaaaacgtggatctacttaccaacgcagaaaatgatacacacggattcgatttaggcacgctacattcaaatgacttggaagagcaggttctctgagccaggatactaaagtccctgtttaggaaagagccacgttgtatgtttaccctaccacaaagatacagaattctggaggaaagtggctctgggaattgaacagtggctcagtgatgttggggccaccaagtctgcaattctccctacctgttcttcatggttgtaagatgactgctgcaattctcggcatcatgtgcatgttaatgtcaggaggaagaaaggaagagggagcactgggatgttacattcattttgtcaggaaaagcaaagcctttccagacagctccgaaacttgcttacctctcattgggccagcaccatcacttgaccacttgtccactcctagctgcaaggaaagtggcaaagtagaaggtatttgagaatgtctgctgggttagccaaaacaatagtgacttctacacccaattttctgggcactgcagaagtatccttgagtcctatgtgatcagagggagagcaaacctcaataatgaaacagattcaatttccatcacccagtgagacaccatgggattagaataaatttttnnnnnnnnnnnnnnnnnnnnnnnnnnnnnnnnnnnnnnnnnntcagaaaggatgaaaggtgatatttctagcatatcagtttgtggtggtaaattaattaccttatacaaaggcctcagtgactttcttctccttacctaacgaatcatctttaaaataagtaaaataaagaaacaagagcagcagcagatgcttcctaaaaagaagttaccaaatctgttcaccacaaacctgagaattcaactgtggacatttggacaccagcaatgaacatgaaactcagcttatgaggcatatttggctaaaggtcaaggtgacttaaagttcatcataggacatctacaatttgcaaagcaggtgactggatatggactccttccaagtctcatttaattggataatgcctacgttttaagtatcagaagtgagtctttctctattaaatgaagtcagttccactaaaacctaaatcttgtttgacgggc

SEQ ID NO: 94415 - DNA, 773 bp, Homo Sapiens
cagtcgacggtaccggacatatgcccgggaattcggccattacggccgggcagctgttgggggagaagagggcacccctcatcttggaaactgctcttattgtgccaatatgccctccaaaccctcccaggattcaaagctaggtttggctgtctgtgacttacgggaccgtcctgctgagaaattgcactgaagagatgcccccacctctggttgggcctgggggtgcctggccttccgaaactaaaagagtgggtgggaagactagtgaaacccagttcacggatggggaaacaggcctgaggtcacatttcacttagtggttgtgttgggaccaaaacctgggtgtcctcactgctgccctgagtccagccatggttttcaagggggacagtggacagggactcagaaatgtggtgggagggcctccctggcttgggagaccgctctctgcaagggagggggagagaagcagagggagagagaaggtgacacggatggaagagtgggaaaggagctggcctggctcagccctaggctgtccctgcagccagggtgtccgggggctggccagtcagagaaagggggccatggactgctgtggcaaatagggagacaaggagacagaccctgcagtccttactacagtctggagtgggggtcctaagaagaagggtcccactcaaccctgtcagtgtccactgtggggtggggggctgaccctgcctttgatcgtcattctcctggggaagccagtttcaggtccctcccca

SEQ ID NO: 94416 - DNA, 2334 bp, Homo Sapiens
  misc_feature (1552)..(1552): n is a, c, g, or t
  misc_feature (1708)..(1718): n is a, c, g, or t
  misc_feature (1898)..(1913): n is a, c, g, or t
  misc_feature (1937)..(1951): n is a, c, g, or t
  misc_feature (1961)..(1961): n is a, c, g, or t
  misc_feature (2080)..(2091): n is a, c, g, or t
  misc_feature (2149)..(2149): n is a, c, g, or t
ccctatccggtcctaagtagcgaggcctgggtggcgaattcggcacgagggcggcccgcacggaaattgctttccttcggcttccgttcttggtccatgtgagagaagctggctgctgaaatgactgcgaaccggcttgcagagagccttctggctttgagccaacaggaagaactagcggatttgccaaaagactacctcttgagtgagagtgaagatgagggggacaatgatggagagagaaagcatcaaaagcttctggaagcaatcagttcccttgatggaaagaataggcggaaattggctgagaggtctgaggctagtctgaaggtgtcagagttcaatgtcagttctgaaggatcaggagaaaagctggtccttgcagatctgcttgagcctgttaaaacttcatcttctttggccactgtgaaaaagcaactgagtagagtcaaatcaaagaagacagtggagttacctctgaacaaagaagagattgaacggatccacagagaagtagcattcaataaaaccgcacaagtcctctccaaatgggaccctgtcgtcctgaagaaccggcaggcagagcagctggtttttcccctggagaaagaggagccagccattgctcccattgaacatgtgctcagtggctggaaggcaagaactcccctggagcaggaaattttcaacctcctccataagaacaagcagccagtgacagaccctttactgacccctgtggaaaaggcctctctccgagccatgagcctagaagaggcaaagatgcgacgagcagagcttcagagggctcgggctctgcagtcctactatgaggccaaggctcgaagagagaagaaaatcaaaagtaaaaagtatcacaaagtcgtgaagaaaggaaaggccaagaaaagccctaaaagagtttgagcagctgcggaaggttaatccagctgcagcactagaagaactggaaaaaaattgaaaaggccagaatgatggaaagaatgagccttaagcaccaaaacagtgggaaatgggccaagtcaaaggcaattatggccaaatatgacctggaggctcgccaagctatgcaggaacagttgtctaagaacaaagaactgacacagaaactccacgcagcctctgagagtgaggaagacgagggaggcacagaagatgtggaagaactccttgtccctgatgtactgaatgaagtgcagatgaatgcagatgggccgaatccctggatgctcaggagctgcaccacgtgacaccaaagaaggctggggcccaggcaggaccctggagcaactggccagagcttggcggcccctgggagtttctcgaaagggcgggggagaaaaaaaagaaccagtgggcaaaaagcacaaaaatttttggggcgaacccaaaattttgaggggaagacggcgcgaccgccctttaacaaccgaaagaaggtttgaaggcctccacacgccgcggagaatggcgcctggagagccgcccagcccggggggtgggaggcccgcgaggcggaggcctccgatanatagccaaggttcgtgcgggggcgccgaaagctgcccacgccggacaagcgggggggccccttcctgtataccctttgggggaaatattttctggcggaaacaaaacaacgcgtttgggggcctttccaaattccttcctccccttggccggcggnnnnnnnnnnncattttttcgtccgagcgaataaacccggggtgaaatataagaacccgcccgccgccgctcgttcgtgcccgggggccgtttccccccccaagcgcggggggggaaaaaagacggttctacagcggcgcgatgaaagggcgccgcccagcaaggtggcccttcctccgcgcggactaaannnnnnnnnnnnnnnnaaaaagccacacacaccgctgttnnnnnnnnnnnnnnnaaatggcatntcctcccccccttggtgccgcagacgaatgcaaaaaggggggaggaccaacgccccggtggtgtgcggcctccccggccccgggaggacaacgtcaacaagctcctaaccgggctgcgnnnnnnnnnnnntgtttagggtgtttcttgggcgtgtgctcccgcgctagtggtgtcacccccgtcactnacttcaacgaggatggagtctgcccggatcacagctccctgtttctggtgtggcaggacgccacgccctcgtgggtgaacgagaaagccttgtggggtgtagacagaatggggtgacctcccagcgggggggttctcctcccgccgatcgacgcagccgacgctccgcgcgcgctctgggcgctg

SEQ ID NO: 94417 - DNA, 1039 bp, Homo Sapiens
  misc_feature (80)..(114): n is a, c, g, or t
actgatatagctccatgggcgcagccggctcagccgaacgacgagcgcagcgaaagtcagtgaagcgaggaagcggccgnnnnnnnnnnnnnnnnnnnnnnnnnnnnnnnnnnncagtcgacggtaccggacatatgcccgggaattcggccattacggccggggcaagcccaacatgaattacgacaagctgagccgggccctccgttattactatgataaaaacattatgaccaaagtgcacggcaaaagatatgcttacaaatttgacttccacggcattgcccaggctctgcagccacatccgaccgagtcgtccatgtacaagtacccttctgacatctccagcttctttggagccgcatcacaatactggacctcccccacggggggaatctaccccaaccccaacgtcccccgccatcctaacacccacgtgccttcacacttaggcagctactactagaagcttactcatcagtggccttctagctgaagcccatcctgcacacttactggatgctttggactcaacaggacatatgtggccttgaagggaagacaaaactggatgttctttcttgttggatagaacctttgtatttgttctttaaaaacattttttttaatgttggtaacttttgcttcctctacctgaacaaagagatgaataattccatgggccagtatgccagtttgaattctcagtctcctagcatcttgtgagtgccatataaagattactggaatgggtaagctcatggttctgagaaaagaagcggaccgttccttaaatgtgcattgaaccaaagcaggtccttggcaaacacacgggctcaacagaaacagaaatcggaagtaaccccgcaaggccggttgcaatagcgacagaacaggggacgccaacaaattggaggcccagccgggggccgcgcctggtgtagccagaattccacgggtgggacagggcgtaccacgggaacccgagagagacccacgcaaaagcagagaacgggacgacgccacacaggaacgacaa

SEQ ID NO: 94418 - DNA, 1051 bp, Homo Sapiens
  misc_feature (76)..(110): n is a, c, g, or t
atgacagacatattagggggtacgcggttctagccgaacgacgagcgcagcgagcagtgagcgaggaagcggccgnnnnnnnnnnnnnnnnnnnnnnnnnnnnnnnnnnncagtcgacggtaccggacatatgcccgggaattcggccattacggccgggggttaatttcttttataaacattccatatttctctaataaaaagacataagtgatactgtactatgcatacattgtatcttaatgctgtttcagatcagcattttaaattttggtttgcatttttaatattggcaaaacgtaaccactgttaattaaaataaaaccttgttgtatatgtaacaacataattttccctctatcccttcccacccttgttctctatttctccctatcagtgccaacttcatacatttgtagcatggcaataaaatataacttttacactgaggccgagtgtggcttttggaggaagtggggatgggacgattgccctctagttgtcctttgcatatgactgttttttgccatataagccatgtcatcaggcatgaaaagttttctcatatatgatgtaaacttgcttttaaggacaagtgtgaatgtgctttttaagcttaattttttgtcatgacaactaatttgttttatctttggagaagtcagagttctttacaatcaaacgtttattaactggagtacttagaataagctagtaattgaatttagttcaaggggctaagccaacacatttttaaaatccttatttatggtagaggtattagtataactgttcctaaaacaattatggtaaaatgatgggttgaatagtagatggacgtttggatttggcaatgcccttgacatggtggtattcaggcttaactatccattgtgggaggatcaagttgagaatggaaagctggggtatacaaacggaccgaggcttcaggacagggggttgggaagcagcgagagagggttaaagagcactcccttgtggggaatgtgaaacccaaaggggggggttttacaacaaaaaaagtgtgcgg

SEQ ID NO: 94419 - DNA, 965 bp, Homo Sapiens
  misc_feature (78)..(112): n is a, c, g, or t
acgataatcactatagggcgctagctctttgagccgaacgacgagcgcagcgaagtcagtgagcgaggaagcggccgnnnnnnnnnnnnnnnnnnnnnnnnnnnnnnnnnnncagtcgacggtaccggacatatgcccgggaattcggccattacggccgggggcagaaggtcgcgcttggaggaagtggcggctttgagtccggtggcccaatcgctgttactacttctctgaagctcctctcggctgcttgccgagacaccctgccgccaagatgcctcgaattatgatcaaggggggcgtatggaggaataccgaggatgaaattctgaaagcagcggtaatgaaatatgggaaaaatcagtggtctaggattgcctcattgctgcatagaaaatcagcaaagcagtgcaaagccagatggtatgaatggctggatccaagcattaagaagacagaatggtccagagaagaagaggaaaaactcttgcacttggccaagttgatgccaactcagtggaggaccattgctccaatcattggaagaacagcagcccagtgcttagaacactatgaattttcttctggataaagctgcccaaagagacaatgaagaggaaaacaacagatgatccacgaaaacttaaacctggagaaaatagatccaaatccagaaaacaaaaacagcgcggcctgatccaattgatatggatgaggatgaacttggagatgctttcctgaaggcacagaggccggttggctaactactcagggaagaaggccaggaggaaagccagagagaacaattgggagagcacgagtgggcatttatgtgttttttgtcccgaacgtttatacaaagtggatcataggacgggtttatgaaaaggcaggggaaattaatggaattcttaaggttgtggcgtccaaaaggagagattggggtggttaagttggagaaaagg

SEQ ID NO: 94420 - DNA, 704 bp, Homo Sapiens
  misc_feature (82)..(117): n is a, c, g, or t
  misc_feature (610)..(627): n is a, c, g, or t
gtgtatagaatcactatagggcgctactcggcgcagcgaacgaacgagcgcagcgaagctcagtgagcgaggaagcgggcgnnnnnnnnnnnnnnnnnnnnnnnnnnnnnnnnnnnncagtcgacggtaccggacatatgcccgggaattcggccattacggccggggtcctctgcagggcccaggcgcccttggccttaggacccaacttctcttaccgccatggagttcgacctgggagcagccctggagcccacctcccagaagcccggtgtgggggcgggccacgggggagatcccaagctcagtccccacaaagttcagggccggtcggaggcaggggcaggtccgggtccaaagcaaggacaccacagctcttccgactccagcagcagctccagcgattcggacacggatgtgaagtcccacgctgctggctccaagcagcacgagagcatcccgggcaaggcccaagaagcccaaagtgaagaagacggagaagggcacgaaacggacgaaaggggcaagaaagaaagggagggcctcccccactgaaaagggccccctgggaacaggggcctcatttaaaaccctttcctccttcttgccnnnnnnnnnnnnnnnnnncacacaacccacaccaaacactttgtgggcccggccggccccagcaaaaactcttacaaaacacacactcccctttg

SEQ ID NO: 94421 - DNA, 1151 bp, Homo Sapiens
aaactttaaaaaaatggcagccctttgtgaattacacaactaaaaaaaagtagccccagaataagaagcagctctgaaaagaggaaaaaatataacttaaaatatcttggaaaccaatgtgaatacaggttcaaaagatagttaagagattcattttcataagactacctaagattaaggcttataatatatgctagtatttcaagtttatcactaattactaaacatcaatttacaaataacatgttcaatttttgttcttttatccaaagggaaaattctaggctaaattctatccagtgtgggggagggggactagaaaataaaaaagtttcaaacagttccatgcaaacatcacatttttcaaatggaaaaacttccaactggaccagaagttcatactgctaatgtacttttcattgaaacaatttttagtaagtacaaatacatggcattaaggttcagaacctaatataggcctgacaatcaagtccttattttctggaggaaggcctcaagtccaataaatttccagtaacaatgtttttacaaatcaatttaataataaggggttttaatttccttcatgtttttgtttttagcattctagtcttaagactagattagaagttagctcaattccccaaaggcaaatggtttttctttgcagtatgaaagaatccacaaaaaaacctcttccccaaactaattcctaataaccaatctgtgcttaagatgtatctttttctatacaatgtaaacggtaacttaggtaaaatgtacccatgaacattaaaactagtcattagaaagacttaactagctttataatttaagttttaaaacataaatatttgcagcttgatcttctgttgacaatgattgtcggagcctagaattcaacatttacaatgtccattcatgcacacaaaacacataccattatcacacaacttactcctcatgtcttaagagaagaatcttccgcttctttaaatctttggcctcccagtcaatgccatgttcaaacaacttttaactcaaacttcactctcagatttttaacaagctttccacgccacacgttattaatgcttttcctagatctttcatgttgtactgccaaatctgaaacctgcctcaaagatatc

SEQ ID NO: 94422 - DNA, 1027 bp, Homo Sapiens
  misc_feature (76)..(116): n is a, c, g, or t
  misc_feature (120)..(154): n is a, c, g, or t
  misc_feature (205)..(314): n is a, c, g, or t
tgaggcacacacacccacgggccgacggggcagcacagtcgtatcgatcactatagggcgctagcgcgttatagannnnnnnnnnnnnnnnnnnnnnnnnnnnnnnnnnnnnnnnnccgnnnnnnnnnnnnnnnnnnnnnnnnnnnnnnnnnnncagtcgacggtaccggacatatgcccgggaattcggccattacggccgggnnnnnnnnnnnnnnnnnnnnnnnnnnnnnnnnnnnnnnnnnnnnnnnnnnnnnnnnnnnnnnnnnnnnnnnnnnnnnnnnnnnnnnnnnnnnnnnnnnnnnnnnnnnnnntaaataagtaaatagaacctcctgagctaccctggcttataaggattcagattactttaggaaattaggcattagcactaggaggggggaagatggctggcaaaacttctagctagcaacctatgtctagcacatgggtaactaaccatagcgagatcctgaacacatatcctctaggtgcaggtggagggaacgatgtccaatacctgaagcagaatctcacatggacggaacgtctgtatttccctcatcctgcacgaatcactcatcattcttggagggcttctctgcattccaccatttacttctctccccatccccatgactataagatctttactaaagagtctgaactccgatttccatgctctcctgctacattaataagcaaaacctgctagtgtgtacggttctttactggaaacatgactataagtttctgtataggtattaatgtcatccagttaaactagtttaatatctagcaaaactaaatctgaatgtactcgctattgccgttaagtatgccaagcacctcggttgaaaggcttgactcaaaccagaacgtctcgcctggaattcgactctgaacacttgaaaaacagaaaccctgagccgcaacaaacatgcctctgtgtgtcgggattgcctttgtctctgcttccatgtggcttttccttttgtagctatgcttagtgacataatcttccctc

SEQ ID NO: 94423 - DNA, 867 bp, Homo Sapiens
ctgtggtgtgaggcgcgtgttcgggctcttgccgtccccgcacccgcaccgcggttactggcttgcggtccgccgttcgacaaccagcccttgggtccccgcccgccacggacatgccgcgcgtctacataggacgcctgagctacaacgtccgggagaaggacatccagcgctttttcagtggctatggccgcctcctcgaagtagacctcaaaaatgggtacggcttcgtggagttcgaggactcccgcgacgccgacgacgccgtttacgagctgaacggcaaggagctctgcggcgagcgcgtgatcgtagagcacgcccggggcccgcgtcgcgatcgcgacggctacagctacggaagccgcagtggtggaggtggatacagcagtcggagaacatctggcagaaacaaatacggaccacctgttcgtacagaatacaggcttattgtagaaaatctttctagtcggtgcagttggcaagatttaaaggattttatgcgacaagcaggtgaagtaacctatgcggatgcccacaaggaacgaacaaatgagggtgtaacttgagtttcgctcctactctgacatgaagcgtgctttggacaaactggatggcacagaaataaatggcagaacatattaggcttattgacagataagccacgcacaagccataggcgatcttactctggaagcagatccagggtctcgatctagaagacggtcacgaagtaggagtcgcaggagcagccgcagtagatctcgaagtatctcaaaaagtcgctcccgttccaggtcgcggagcaaaggtcgatcacgttctcgatcaaaaggcaggaaatctagatcaaagagcatatctaag

SEQ ID NO: 94424 - DNA, 946 bp, Homo Sapiens
  misc_feature (830)..(864): n is a, c, g, or t
ccttaggggcgcccaggtcttcgatttccctggcttaagtatagaacatgacctgcgccgaaaagagaggagaacctttctgattttagagccacatttatgattagagtcaatttaccgtatgttgactagactcgtttactatttagagttctaagtgtactgcgcgacatccgttctgtttcgtcaaaccttaaatgccctttttatggcctgtgagctggccgtcacccccagaacttacattttctatttcctggcaggtgtctggggcatttgcagggctgggatcctctaggtgctctctaaaatgcatccgcatgcttggcatgaggcgcagccagacttatggcttagaaggcggggccatatcagctgggtcagcagcattccaagtaactgaaaaccctttaatgaagggaagcaagacaggcaacttaatttaacagagagacaaacctaatatgagagggcagtggctgccacagctgctgaaagcgaggtatattattttgccattctggaagctttagcaacttggaaatctgacatcctgagcctgaacataccttaggttccacgatagactatcctagatttacatgtgcatttgaatagtttggataagatggctgtccaaactgttcatttggtgaaatttagtaggaaaaaccagatctctttggcaaattaaacgtgacataattgtacccaaccctacgtttcagatccctctattcatatctagttttccactcttacatcctattccagagccccccggccgtaatggccgaattcccgggcatatgtccggtaccgtcgactgnnnnnnnnnnnnnnnnnnnnnnnnnnnnnnnnnnncggccgcttcctcgctcactactcgctgcgctcgggtcgttcggctgcaaagagcgagcgccctataggatcctatcagatt

SEQ ID NO: 94425 - DNA, 1193 bp, Homo Sapiens
  misc_feature (45)..(88): n is a, c, g, or t
  misc_feature (92)..(126): n is a, c, g, or t
aaggcccgatgtatagactcactatagggcgctagcgtcgttgtnnnnnnnnnnnnnnnnnnnnnnnnnnnnnnnnnnnnnnnnnnnnccgnnnnnnnnnnnnnnnnnnnnnnnnnnnnnnnnnnncagtcgacggtaccggacatatgcccgggaattcggccattacggccggggagattgtggcagcagctaaggtgtgtggagctgccagtgagtcaccgtcagtgaagagcctccgcttgcttggtggctgatcaagacttttcctttaaagctggccagtgggttgatttctttattccaggagtctctgtggttggtgggttttcaatatgctccagtcccagactgctagaacaagagagagtgatagaattggcagtgaaatatacgaaccaccctcctgccctctgggttcacaatacgtgtacacttgactgtgaagtggctgtgagagtgggtggagagttcttctttgaccctcagcctgcggatgcctctagaaacctcgtgttgattgcaggaggagtcggaattaaccctctgctttccatcctgcggcacgcagcagatctcctcagagagcaggcaaacaaaagaaatggatatgagataggaacaataaaactattctacagtgcaaaaaataccagcgaactcctgtttaagaaaaatatccttgatttaagtaaatgaattctcctgagaagattgcatgcagttgtgcatgttacaaaacagactacacaaatcaatgcggaactcaagccatacatccacggaaggaacgaataaccggagaaggagataacgagatcatatttcaaaagagacttgtcctatatttgtggcccacctccaaatgacagacttgggtctccaagcaactggaaaacaagcatgtacccaaagaacacatttgcttttgagaagtggtggtaggaggcagacaaaggcggacacaggatcagagggttacagaccaagtgttactggttctcctttaaacaggtagactggaccagattggtccacctgggactagctggcatacagttcttctggggcctctgagggggccttctcttcatcgaggtcgggcagacccctgggttcccgggtcttgggcccccttgtcccggtgtcccgcgccacgtgttgccccctgcttgcccctctggcgtgtcccg

SEQ ID NO: 94426 - DNA, 782 bp, Homo Sapiens
gcagtaactctaacggttctaaggtagcgaggcctgggtggcgaatcggcacgaggcaaacccttgttctgggttagaggtcctggtaccttcagttaacagtcgggtttcgtttgatttgttacggcgcccctgggccttcgattaataaggttcggtcaacggacaagtgagcggttccactgctcgtcagtcgatagggggagtcggtagtctgtccgaccgtaccattaggcgcctgggccggaggaggggttttcagggtcgtaggacgccgttgggcaccacgctcggagaaggacaggacaatggcggccttagggtccccgtcgcacacttttcgaggacttctgcgggagttgcgctacctgagcgcggccaccggccgaccctatcgcgacaccgcggcctatcggtaccttgtgaaggctttccgtgcacatcgggtcaccagtgaaaagttgtgcagagcccaacatgagcttcatttccaagctgccacctatctctgcctcctgcgtagcatccggaaacatgtggccctacatcaggaatttcatggcaagggtgagcgctcggtggaggagtctgctggcttggtgggtctcaagttgccccatcagcctggagggaagggctgggagccatgaacatggagaatatccttggatgctgcattcataggagaattgaataatttctatcaatatgtatttatcattaaattttttttaagtttaaaacaaaacgaaaacgcacaacaaaaaattggcggccggcct

SEQ ID NO: 94427 - DNA, 467 bp, Homo Sapiens
ggggcaggcaagcgcgtacgcagaagcgtgcgcgcgcccgttcaacgtccggagcatcggtgcagtttcgagggtaaagcctttggcgcggtgatgtggacttttgttctctaactacaactcccagcatacgtcacccctcacgtgggcgctaggtgtggtttcgtgggatagggtcaccagtgaaaagttgtgcagagcccaacatgagcttcatttccaagctgccacctatctctgcctcctgcgtagcatccggaaacatgtggccctacatcaggaatttcatggcaagggtgagcgctcggtggaggagtctgctggcttggtgggtctcaagttgccccatcagcctggagggaagggctgggagccatgaacatggagaatatccttggatgctgcattcataggagaattgaataatttctatcaatatgtatttatcattaaattttttttaagaa

SEQ ID NO: 94428 - DNA, 1579 bp, Homo Sapiens
ctaagtgaattctcttgccccgtttcatatctgtttgtcgccttgtttcccgttgcctctacatcacttgtgcctctgatccaaattacaccgccttttgtgatcccacccctatattataccccaggttagcttcccaccatctttaaatcccaatatctccctcaaaattttcaatgggaacgacctacttcatcgacgttcagacccagtcccgggttccacacacgggcttcactggttttaaaaggtgacgcgaaatacccggctttagtgcaattcccctgatccgaacaccacagaagggactgcactggaaagtgcaatcctgggaaatctttcgcacgtattgtggaccataaagccctccgtgtctgcaaagtggctgcttatttctggaaatctgttgccttttgatgtaaacctaactggcacatgacttcccttggatatacagggtgttccttctgctttcttagaagacaggcaaatgacagatcccaagagcccagatcaccttgttctagtagccccggccctaggccagcattgagcctttcttcagcgatgacaaccgtatagccatgttgagtcagaaatgtgctggtgtagctgaagctctgttttgctgtagaaaggaggcctgtagagtatggcccttcggccatggctgccaaagtgtgtctccattgattctatgacctttctggtttcctgggcattaccagagagaaggaagcactgttagtcctgagagaatcctttcttgcatctgcttgcctgggtttcagtggatgtgtgtgggacagccccaggggcaagcggctgtgagcttcctcgaccctcggaggctcagagtctggtagaagagacagattgccaccactaagcccaccaagaaggtccggggcaaaatcggccgacgacaagggaacactgggcgacagaccatgaccaagttcagcttcacttggcccctgtccacgttgcgggaaaagtcatagcagctattttttgtcagcatgaaaaatactaatctgtcttctttttccccagctccgatcaagtttgcttcatccctgcttaagaattttccaaaaggttgtgccaaagaatcataggtcccgaaagtctgaggcttttaataagagctcttccatggatgacagtcaaaagtggatgacctgagtttaaaaaaagacatcaaataataatagttgtaacgaataacctgagtgtaccccaggctgccaaactgttgcttccagcaatgccttattctcacatctttcaactcacagtaaaggagtccgactctgcctcagctttgcaggaagagagaaaacaataccaaagtatatctggagtctgaaaacagcattgaagaacgcaaaagattaaaacccaaagtgcctgttgcacagctgaactcaggccaggttgccttagcagttcctcattttcctccggttttaaagcagtcttgctttcagccttttgtatgcttcccttcatttagttttaaattcccactgtcctgtaagtattcacggcttttaacataaaaagggcatacgca

SEQ ID NO: 94429 - DNA, 1023 bp, Homo Sapiens
  misc_feature (87)..(121): n is a, c, g, or t
agggaaagaaagaaaaaactgatgatatatggggctaccgtaagcgaacgacgagcgcagcgagtctagtgagcgaggaagcggcgnnnnnnnnnnnnnnnnnnnnnnnnnnnnnnnnnnncagtcgacggtaccggacatatgcccgggaattcggccattacggccggggcagggtagaggagggttggtcccaggctatggacaaactgctaattgtttgaagtttgaattatttttcatgggaaagggaagtgataggaaatgaccaagaccatccacttttgacttgagtatggatcgagtataagtaatagtttcctagcctcactgattgtaccatgaactgacagacctaccagtcaaattcatgtacccagataatggtctctcacatggcaacaaagtacacagcagtttgcagtatgtgtctcttttaaagccagttcagtgttttcaccttgacgaccactcctgcaaacagttctcatagagctcttctctgctccccaaatcaatatattttgaagctatgtcaaatatttacatagaaaggaaataaacgttgtatgtgctttgaaaccagcaaaatcctttgtacaacacctctcttctccttctatgtttatgaatagagttcgtggaatattgccatagtgcaaataatgacttccgtgtatcacttataccctgtaggggtaagctttcaccttaggtgtggttatattcctagcagtgtatcaagcccactcaaataatggtctatatttcaaaagtatgtgtctagttttacttattgcatgtcatttaacatccataaatgtcctctctcagtgcatatccagattgcatcgaaatctggtgcaaatttttaagacattctccgggcagaaacaggtactatttagtggctaagcactgacctgggaatgaaaggaggcgaatagcctgtcaccatgtggacctatgggcaatgggggggcaccaacaaaagttgatgtataaaaaaattgtgtatcggtg

SEQ ID NO: 94430 - DNA, 1072 bp, Homo Sapiens
  misc_feature (79)..(114): n is a, c, g, or t
agactgcctgatcactatagggcgctgcgccgttcttgcgaacgacgagcgcagcgaagtcattgagcgaggaagcggnnnnnnnnnnnnnnnnnnnnnnnnnnnnnnnnnnnncagtcgacggtaccggacatatgcccgggaattcggccattacggccgggggggtttcaaagatacctcttgtggcctacacattctctctatgatgagcagcagaatgcttttatgccatttataagtgctccaaagtcgtcgcagctccatttctgaagctactaaaatgatatttacacaagcaattctcaattggtttcaaccaatcgtgcaggtattttgaccaatcaaaaatagaggccattttaaggtttttatttaaaatatttggtatatacagtttcttagttcttgcctaaatgattcaatagaaagtaaaatacttaaatgtattacgtatgccacaaatgaccactcttgtaaataagtttgttataagattcattcataatctgaatcatttaatgagacagattcaaaagatacaattgtttgcatgtacgcatttctaagcttttcattctcaatgcttacaggcgacaagaaaaatcctaagacgctcttatttttataattaccctgcataaatgttggagatttatgaaggaaacagaccacgacctcacgtatggccaattgaccagtcatccctgtattccatgcaactttattggcaggatacttttaagtgaaggggattgtttgcatacattgaaatttttcatggattatacgcagcaataaatatttaacacttcacgtggttgcattacgacctatttcacacttcaaacattggaactttaattgacaccaggattttcgtgatcatatacagagtttctggaaaaccggtcggttcagctgcgtcatagtaatagggcacagaacaggaaggtaacaacaacgccgcacataaaacacaaagagatacgacacagagcaaacaggatcggctagtccacggagggacgaggagtgagcagaagaaaacaaaaaggagaaagatggaaga

SEQ ID NO: 94431 - DNA, 939 bp, Homo Sapiens
aaggcgccgcctggtctccccattgttctccagttacccgcttctttcttctcccatcccatgggtgttattcccacaaacagcccaacctgaaatttagggaaaccgactgttgccaatgccaggaagtgggaattcaacgtccggaatcggcctcttaggaaccacaagtttcgtcgaacttaggataaaacccaataaagactattttaattaaggcaaaagaatagcatttgctaagaactatcagccctgagcttttcctgaaacgtcttaactaccgggaagacaaggtggccaaatatgcagagctacaaacaaagcaatgataagctacagcagaagagggaatgcattctgtaatccacaggatcagataaatggctctaagcagttaccagtaagtattttagtgttctttctattatattaatttaaaaatttaaaccgagttaacagcagttttacaagttaagagttgacacaagcaaattagaagaactctaaaattagccttccttaattgggtaagatttaccatatccatctgaacaaacccattttcccatcctgagatctaaaagaatgtgaatattgacccattttaatacttttcaagttcagatggaagtcatactgtacaccagtctctgattttaggtaacagcacaaagcaaactcctaaaatcaacaactcacttagaaaagaaaggagggagagggttctgggaattaatccagccacaagtcattccaatcttcctgttaatgcaaaatccatttgtaaaaatggccaaatagtaacttccaaaaacctcaaaaattaatgtttcaatttcaaattaaagaacttcaagaattttcaaagaatatagtatcaagatcaacccccggccgtaatggccgaattcccgggcatatgtccggtaccgtcgactg

SEQ ID NO: 94432 - DNA, 592 bp, Homo Sapiens
cagtcgacggtaccggacatatgcccgggaattcggccattacggccggggcgtgcgcagatcagggatcgcgattgcgaatcctccgctgaggtgatttggatatccctagaacgttgagggcacgagtcgggtcctgagaccaggtcctcagccagcagagccacgttccttatgagcaccgtgggtttatttcattttcctacaccactgacccgaatatgcccggcgccatggggactccggctttgggagaagctgacgttgttatccccaggaatagctgtcactccggtccagatggcaggcaagaaggactaccctgcactgctttccttggatgagaatgaactcgaagagcagtttgtgaaaggacacggtccagggggccaggcaaccaacaaaaccagcaactgcgtggtgctgaagcacatcccctcaggcatcgttgtaaagtgccatcagacaagatcagttgatcagaacagaaagctagctcggaaaatcctacaagagaaagtagatgttttctacaatggtgaaaacagtcctgttcacaaagaaaaacgagaagcggcgaagaaaaaacaaa

SEQ ID NO: 94433 - DNA, 865 bp, Homo Sapiens
cagtcgacggtaccggacatatgcccgggaattcggccattacggccggggacacatgtggctgcaactgagacactggagcagcccagcaagcccagagggtcttaaaaataaatatgaatttagattccatacatcgattaattgaggaaacacagatcttccagatgcaacaatcatcaattaagtcacgcggcgacatggtggcccctgcctcaccccccagggatacctgtaatacctgcttcccacttcatgggctacaatctcatgctgctcacaatttctgtgctcactcatataacaccaacaaatgggatatttgtgaagaacttcgcctgcgggagcttgaagaagtcaaggccagagctgctcagatggaaaagaccatgcggtggtggtcggactgcactgccaactggagagaaaaactggagtaaagttcgagctgaacaggaacagtgccagagcaggaacgcgaagacaactcagaataaaactagagatggcgatgaacagaacttgagtacactgaaacaagaaacagagtttgccacctcagaaggaggcattagaagctaatgttacccaggatctgaagcttcctggcttcgtagaaagaatcctgtgaacatacagaccaatttcaattgagttcacaaatgccatgagctctatcagaccagtattcggtacacaagacaattttctacaaaggaggaccccaaataataaggaaccaaggctgtggttcactcgattctctaaaatttaagtgagggagatgacgcccaatctaaatggcgtgaactcaattcaccacggtggctgtctggaagggtgacaccaaccccggccccgacaa

SEQ ID NO: 94434 - DNA, 1195 bp, Homo Sapiens
  misc_feature (51)..(114): n is a, c, g, or t
  misc_feature (116)..(246): n is a, c, g, or t
  misc_feature (935)..(948): n is a, c, g, or t
  misc_feature (972)..(1075): n is a, c, g, or t
cagtcgacggtaccggacatatgcccgggaattcggccattacggccgggnnnnnnnnnnnnnnnnnnnnnnnnnnnnnnnnnnnnnnnnnnnnnnnnnnnnnnnnnnnnnnnnannnnnnnnnnnnnnnnnnnnnnnnnnnnnnnnnnnnnnnnnnnnnnnnnnnnnnnnnnnnnnnnnnnnnnnnnnnnnnnnnnnnnnnnnnnnnnnnnnnnnnnnnnnnnnnnnnnnnnnnnnnnnnnnnnnagctattttttaaaaattcagttttaagatctctggtttaggggagagattttattttactgaaccagttctatagaaatttattttattaggaaatttgtctttggaacaaagtggcagctataaaattatttttgttaagcctcagaaatatgaggaagcctgtaaaactctagtggggagatattaacttggagacctaatgctctgtaaatagtcatttaaagctgttggtttaagtggttttgtttctaaaatgttttcttttaccgtgatgcaccagtatgagatggtgctgacactttctatgaagtggttatgagcaggtttaataaatcctcttatacaagtgttctgaactcaattgtaacaacataaaaagtggaaatttcctttttgcgtagacagtaggaacaaggcaattatatggcatttttactaagtagtaattttacactgaattgtaaatgtttttacagtgagttttattaatagaatgcttcaccttaaattggaaaacaataatagtcttggactaagtctttgtactaaagcatttgctataattatttttaaaaaaacaaacagatgaaaacctcagagaaggcatgtggattataagatttgtctagtaaaaattgtaattgaatatgtttaaactatttaatttctcatttcggggggttaannnnnnnnnnnnnnagatggtgtctcacgctatcgcannnnnnnnnnnnnnnnnnnnnnnnnnnnnnnnnnnnnnnnnnnnnnnnnnnnnnnnnnnnnnnnnnnnnnnnnnnnnnnnnnnnnnnnnnnnnnnnnnnnnnnnggctggcaccaacatgcccagctaattttgtattttagtagcacattggattttgccctttttggccggctggtcttgaactcctgaacctccagggtgaccacccgcctcgggtcccag

SEQ ID NO: 94435 - DNA, 1234 bp, Homo Sapiens
  misc_feature (77)..(111): n is a, c, g, or t
tatcgatcactatagggcgtagcggctgtatagccgaacgacgagcgcagcgagtcattgagcgaggaagcggccgnnnnnnnnnnnnnnnnnnnnnnnnnnnnnnnnnnncagtcgacggtaccggacatatgcccgggaattcggccattacggccgggctatcttgtaaagagtttagcatcactgtgagagtgtgtgtctaaaattaaattaaactagaagcagcaggtgagtatttggtaagtacttctgtgactcgcctcaattcccactggccagggccatctcaactgcacggtgaatcaagatgctggtgtcatcctccttggaaaaaggaaatgttaactcatggttaaaactaagtacaatgattcccaagggatcactttcttatttttttaaatgacattaaggagaatcttaagaaagcatcagagaaagacatgtgcatgtgaagcaccctgattctgatgttaggaaaacttaagcgaacaggacctgctgcacacagccccattgtcttctatccatttctctttatcattcaaatcaagcaacatgtgccctcctcatcaacacacattcttcccctttgtcagtatgcatctcccagcttagtgtcaggatactttcgattcataattatgtatgatccaaagtgtgcataatttcatttaacgttaaagaaatagatccaattcctttcttgcaaccaaaaataaataaaatacgttgcctccaatataaggtttgggctattctgtgttctatagaagcaatctgtttttggtaaaatgtacttttaaggatccagtcatctgaagtattttatgtagagttagagatttcacaatattgactatacatatatttaaaatataaattatccagctgatgtttgaatttgtcttactttcctggccacctcgttgtcctattttataagctggggagttaactagcttaacaaaagatgcttagcttttgtaaaagaacaagtgtttcattttacaaagacactccaaatgatagttacttgattttctcgagacctttaactatggtgatgaataacaggacttgctttcaagccttaataaatgtaaaatgccttttaatgaagatacagctgagtgttttcctcatgaatctgaaccaattaccaatttgtgttccagtcttgattggtattgactgattcaaataaagttggtttattttcaccccttca

SEQ ID NO: 94436 - DNA, 821 bp, Homo Sapiens
cagtcgacggtaccggacatatgcccgggaattcggccattacggccggggagacagactcggagagatggcaggcggaagacaccggcgcgtcgtgggcaccctccacctgctgctgctggtggccgccctgccctgggcatccaggggggtcagtccgagtgcctcagcctggccagaggagaagaattaccaccagccagccattttgaattcatcggctcttcggcaaattgcagaaggcaccagtatctctgaaatgtggcaaaatgacttacagccattgctgatagagcgatacccgggatcccctggaagctatgctgctcgtcagcacatcatgcagcgaattcagaggcttcaggctgactgggtcttggaaatagacaccttcttgagtcagacaccctatgggtaccggtctttctcaaatatcatcagcaccctcaatcccactgctaaacgacatttggtcctcgcctgccactatgactccaagtatttttcccactggaacaacagagtgtttgtaggagccactgattcagccgtgccatgtgcaatgatgttggaacttgctcgtgccttagacaagaaactcctttccttaaagactgtttcagactccaagccagatttgtcactccagctgatcttctttgatggtgaagaggcttttcttcactggtctcctcaagattctctctatggggtctcgacacttagctgcaaaggatggcatcgaccccgcacccacccggagcgagaggcaccagcaactgcatggctgggcatcactggctatggatcgacgggagtca

SEQ ID NO: 94437 - DNA, 1055 bp, Homo Sapiens
cctccctgcctctctttttctctctcatgttactttctctttctgtcttcctttttaatgccatggagtactatattcttcaaagttccaacaaagatgcactacatttggacaatgtggaaatggccctcagccttctcttcctgatgtgccaattccactgatcctgtgaaggctgcccaatttgagccacctggacgtcaaatgattgccatcagaaagagacaacttgaagaaaccaacaatgactatgaaacagctgacggcggctacatgactctgaaccccagggcacctactgacgatgataaaaacatctacctgactcttcctcccaacgaccatgtcaacagtaataactaaagagtaacgttatgccatgtggtcatactctcagcttgctgagtggatgacaaaaagaggggaattgttaaaggaaaacttaaatggagactggaaaaatcctgagcaaacaaaaccacctggcccttagaaatagctttaactttgcttaaactacaaacacaagcaaaacttcacggggtcatactacatacaagcataagcaaaacttaacttggatcatttctggtaaatgcttatgttagaaataagacaaccccagccaatcacaagcagcctactaacatataattaggtgactagggactttctacagaagatacctacccccaaaaaacacatactgtacttgaaaaccaagcgattgcttcattagcttccacatattttcccaataaattactgggcctggtgacattatgcccactgggaaacactaaatactttcacgaaaactagcggcccgtcagcaacttcgcgcacttgtaagcagtctgtgcgaaaacaaggagagaagagataccaacaaggtggtgaaccccaagcatggacatgtgcaacaggagagggcaagacatggggcgagcactgagcacaaaccggaccacccaaaggatagagagacgaaagcacccagaggagcagagaaccgccaggacgaaagggaaagacgagcacgtggaccagacaac

SEQ ID NO: 94438 - DNA, 382 bp, Homo Sapiens
aagtttagctagtgtattgtagtttaagcagagttacaatgctatctctgaggggccaggtggcccggtgtgcgcaggaatacagccagtacacatatacatagaccttgaacaattcccctctttgtgtcatccactcagcaagctgagagtgtgaccacatggcataacgttactctttacttattactgttgacatggtcgttgggaggaagagtcaggtagatgtatttatcatcgtcagtaggtgccctggggtacagagtcatgtagccgccgtcagctgtctcatagtcatagtaggttacttcaagttgtctctttctgatgacaatcatttgacgtccaggtggctcaaattgggcagccttcagataaaatg

SEQ ID NO: 94439 - DNA, 1038 bp, Homo Sapiens
  misc_feature (80)..(114): n is a, c, g, or t
aaaaatgtatcatcatataggggctcacgcttatagcgaacgaccgagcgcagcgacgtattgagcgaggaagcggccgnnnnnnnnnnnnnnnnnnnnnnnnnnnnnnnnnnncagtcgacggtaccggacatatgcccgggaattcggccattacggccgggctaatatttattatggtggcaaagtaaacatgcacagcaagatcagtaatgggaaagataagtggagtctggagaaattcatttgcacggttcctaggatctctctcctgtgataagtcacgtcgagttcgccttccttccagcagtgaaaatgcaactatgcctatgtgatgtttctgcccagatgagccagtttgaggctcagagtttaaggatatttcgagggctggtcacataggcattttctacctagcaaccaccaaaattccagatgccagagggaaagcaggtgttcaccatagatcacattgtataaacagcctaagcccagcaaaatgaccttatcagttagtaatggagcacacattccgaaagccatgttcccggacaccagccaagaactaaccctgcaagcaggccctttgaaagatagcagcctcaagcctgctgttaactctttttttacacgagtctaactaacaaaccattgtcgaaacataaaaaaatcaaatgggaaataatggtccattaaataaactcattgcaattctttgctgatctctctcctctggtgtctaaacaatttgtctcacggtataaaaggcaagcacaaatttgcatggctcttgctgacacatcatgtcaacagaatgaacactgcttcaatgtcatttcttacagaacataccatttacaccgacgcaatattgaacggctgccttgcctaactcgccacaggtctgccataaggcataggtacggcatagcataaactccttacgacaacagaagacattccaaaactcactacctgcacaatccctatatccacacgaagtggacaaacaagcgggcagtagcatcaagacctcag

SEQ ID NO: 94440 - DNA, 1059 bp, Homo Sapiens
cagtcgacgggaccggacatatgcccgggaattcggccattacggccggggggagtctggaccacgcagactcagaacagcactactcacagcagggcctcttgctcgctctagctgctgggaggaaaacggcttgctaatctccacgcccagaaattcagacaagagcattctccttatctcatctgcacaggaagcaggtctaagtgtaatttcacaagcccctgactctgtgtagacacccagctctccagaaaaatgctttgaagacaaaggatacagcatacagtcccgtgtctcggctgagtcatcgcattccttaatagtgtcttctccccgggtttggtggcctgcttctggagtggtcagttctgctgccgacatgcccacccagctcgagatggccatggacaccatgattagaatcttccaccgctattctggcaaggaaaggaagagattcaagctcagcaagggggaactgaaactgctcctgcagcgagagctcacggaattcctctcgtgccaaaaggaaacccagttggttgataagatagtgcaggacctggatgccaataaggacaacgaagtggattttaatgaattcgtggtcatggtggcagctctgacagttgcttgtaatgattactttgtagaacaattgaagaagaaaggaaaataaaggaagttcgtgaatgctaatcaagggctaaataaagtggaaagcagcatccttgaaaatcatcgctctcaggacggggtctgcctggaatagcactgaatgtgttagtagtgccttggcttgggggcttggagaaagctgcttgagcccttcccatgctcataaaattaggtaaaggagcagtgaggaagtgtctacagcaaccttcaaccaatgtgatgtgcctctacagctgtatgaagtagattctcttgattttatcttgaaatccacaatttccacaaaaaaaggaaaaatctttttaccattttctcattaaaacagtaatatacagttattgtaaggggggaataatccaaaggtatctcattacccga

SEQ ID NO: 94441 - DNA, 955 bp, Homo Sapiens
  misc_feature (41)..(75): n is a, c, g, or t
acgaccgagcgcagcgagtcatttgagcgaggaagcggcgnnnnnnnnnnnnnnnnnnnnnnnnnnnnnnnnnnncagtcgacggtaccggacatatgcccgggaattcggccattacggccggggacagaaggacgtctgcctctgactcagtatgtcacatttaacaagaggccagagcttgtccaaaatggctgtccaaaaacgaccccacacttgcgttagaagatgatacctttttcagggacagttttctctcttggctcctgtcccgctggccctctgtctgcctgtgtccctgaccatggctccctgcagtaccctttaacgatttatcagcaagactgttgaacgcataactgcccaagatgcctgtccctccccctccagcatcccccgacgcccccgacgtaagcactggccaatacagagaagcctaccttgaataagacagagcaggctgggcagaaatgctctcctttctgatatcacgcaaagggaagaaactaaagaagacggtcaccaattgacagaagtgcaccaatactggacaaacctaaaggagctggtgctggaggcggtggtggtggctttggtggaggcggcggatttggcggaggaggtggtggcggaggcggctggaagttctgcgacggcccgcggacctccaggtctgggaggcattgttccaggctggactgccgaagctgagatccacggtcaacagggataatgattctggaggaacgccgaccaccattgttgccaccgggaggaagatccacatcttgcgaaacccttttcaaccccaagtggcccagcgcaggtttcctgtgccttctaccaaggcacagaagtggtaccccagagcctcagaggaacctgagtgccagcccatggcccgaccgtgggctcaaaagcctgatagcatccatactccagtactagtattcca

SEQ ID NO: 94442 - DNA, 794 bp, Homo Sapiens
cagtcgacggtaccggacatatgcccgggaattcggccattacggccgggggaagtcgcgctgctgtggcggccgctgtagcagcggcggtccagtcgtagcccggccgcccgcgcctgtccggtccggtccggccacggaggcagcgcagcggcgggactccgagcctaccccgccgagtgagctgcgccgcaccgtgccgtcccacccggcacccaccagtccgatggggccgcagcggcggctgtcccctgccggggccgccctactctggggcttcctgctccagctgacagccgctcaggaagcaatcttgcatgcgtctggaaatggcacaaccaaggactactgcatgctttataacccttattggacagctcttccaagtaccctagaaaatgcaacttccattagtttgatgaatctgacttccacaccactatgcaacctttctgatattcctcctgttggcataaagagcaaagcagttgtggttccatggggaagctgccattttcttgaaaaagccagaattgcacagaacaggaggtgctgaagcaatgttagttgtcaataacagtgtcctatttcctccctcaggtaacagatctgaatttcctgatgtgaaaatactgattgcatttataagctacaaagactttagagatatgaaccagactctaggagataacattactgtgaaaactgtattctccatcgtggcctaactttgattatactatggtggttattttttgtaattgcggtgttcactgtggcattagggtggatcg

SEQ ID NO: 94443 - DNA, 861 bp, Homo Sapiens
  misc_feature (41)..(75): n is a, c, g, or t
ccgacagagcgcagcgagtcagtgattcgaggaagcggcgnnnnnnnnnnnnnnnnnnnnnnnnnnnnnnnnnnncagtcgacggtaccggacatatgcccgggaattcggccattacggccggggagagccttcgtttgccaagtcgcctccagaccgcagacatgaaacttgtcttcctcgtcctgctgttcctcggggccctcggactgtgtctggctggccgtaggagaaggagtgtccagtggtgcaccgtatcccaacccgaggccaccaaaatgcttccaatggcaaaggaatatgagaaaagtgcgtggccctcctgtcagctgcataaagagagactcccccatccagtgtatccaggccattgcggaaaacagggccgatgctgtgacccttgatggtggtttcatatacgaggcaggcctggccccctacaaactgcgacctgtagcggcggaagtctacgggaccgaaagacagccacgaactcactattatgccgtggctgtggtgaagaagggcggcagctttcagctgaacgaactgcaaggtctgaagtcctgccacacaggccttcgcaggaccgctggatggaatgtccctatagggacacttcgtccattcttgaattggacgggtccacctgagcccattgaggcagctgtggccaggttcttctcagccagctgtgttcccggtgcagataaaggacagttccccaacctgtgtcgcctgtgtgcggggacagggcgaaaacaaaatgtgccttctcctcccaggaaccgtacttcagctactctggtgccttcaagtgtctgggagacggggctggagacgtggcttttatcacgagag

SEQ ID NO: 94444 - DNA, 978 bp, Homo Sapiens
tggcagttaggagcccacgttcagtccaaggccgtccactgagccccgtgtgactctgacagagccgggggtgtccatgtcctctctggacctcagttcctgtaaaaaggcccgttggccagatcggccgccgggctgctcacaggtgcacgggctgcacgtaactccgtgggaagaagccaacgcgcccgcaggtaccggccccagccaccagtgggggtctgggcgctccaggacctcaatgatgtcgccacggcggaagctgagctgcgaggggtcctggcctgagaagtcaaactgggcctgggcaaagcaggccccaggtgacttgagcaagggctcctcgtcgcgcaggaagatctgccgcttcttggcgatggtggtggtgcggtagaagtcgaccagctcgttgagggagttgaacttctcctcccacaggaagtacttccccgaggcctcacgcagcaccttgaagtgctgcacctggtctccatagttcacagacacagagaactcccctggggagctctcactctcccggatcaggaaggctcccagatggttccgcttcatcagaatctcttcggccagctgccgggaaatcctgcccgagtaccacggatggggcttgacgcggatgtagttcttgggaataaatccctcgacaccccggagctcggccttgtaccagttctggtcatcctccatgttcaggatcttgagtgtgtctcccttgttgaaggccagctcgtcgctctctgtagcctgaaagctgtacagggccacggactccatgccgctgctcggggctccagcagctgggctcagagctgggccgacagcttcctgcttcctctgcagtcgaggacggtcttcctttgttttgagtgcgcgtttgttcttttgaagttgagactgaaactgctcctgatgggggagaaacaggaaacagacattcacagagctcccgggaagcgc

SEQ ID NO: 94445 - DNA, 718 bp, Homo Sapiens
  misc_feature (45)..(79): n is a, c, g, or t
  misc_feature (542)..(542): n is a, c, g, or t
aacccggacgagcgcagcgaagtcaggttagcgaggaagcggcgnnnnnnnnnnnnnnnnnnnnnnnnnnnnnnnnnnncagtcgacggtaccggacatatgcccgggaattcggccattacggccggggtccctgtgctgctggtatttcattctctgtaacttcagttctggtgttttccttgagtatctacttggcttctcgtggtttttcccaccccagctgccccagcacgcgggacccatagcacaccccttagcgcttgcctaggttgctgaaaacagggaggcacctggtatctcgagtgcctgcagttgcaagtatgtttacacctggtgtccaattttgtattttaaaatgtaatccatttttacttcagctcatccaaaagcagccagcagaccggttgactgagaccggtctgtggctgtgggccccttggtgacccgctgctcttttggaaatgggtgacctgaagtgacactttttccacaattaacccaagttgtgttaatacttcaggtctgtttcccagacccangaaagctttacagaaaatcattgtaagacaatttattaatttgagaaagtcaccttgacagttctttgcacacaagttttacaactctctggattcgaagtttgtattgtattcatagttaaagggaatcgggtactttgcttgttgaataaatgcactttaaaacaaggaaccgt

SEQ ID NO: 94446 - DNA, 931 bp, Homo Sapiens
gcggctaaagatatactctgttatttatgatataatgccctgggcaccacgcatgtttttctatattgttttttccctctacccgttactggtccacgttcggggccaaatgcgtactcgtgttaatgtctattctatttgtggcccacgtattatgccttaacagtgtttgacaagttcctcgcattatggtaatgttatagtccaggctactggtaccaggaatggtttttattcagacacagtcgttctgctagccactggattgggaccaaattatgtgagtgcataccgcctcaagggctcaaaatggcacgcatgttgcccaagtcagccttctgggtatcgagtggtcagggtatgaaacccagtgaataaggactccagagatctaaagccagtggcttgaggctacagggagtgtagtaaagccgttgtttacttaaagatttatcaaatcagtcagtgcaaatgtcagatacaatgtatttatttaaaagattcatttttaatcatgaaattacttatcatccacattgttttaaaaagaaacaagatgctggatgtctgccaatttttgccttcattaccttttttgataaagtttctcagatccttgtttcaaacacaaatgcagggattgctgccactttttaactattaagaggcagaaaattgcacaatattgaacttttttccactgaagtagtgtgcagttctagtttgcattcctgatatgatttaaaacatgtaatataaagatgttaaaaaaagataaccaaaactgtgcagagtctagaagttgtttgtcatcttcagcttatgcacaattctgttttaggttaaaaaaaggcattgtttgagctgtcccatctccactgctatccctttggggttttttaatataaattattaattacaggatttgtat

SEQ ID NO: 94447 - DNA, 1029 bp, Homo Sapiens
  misc_feature (79)..(113): n is a, c, g, or t
gaaatgatagatcctatagggcgtagcgcttattagcgaacgacgagcgcagcgagtctgtgagcgaggaagcggccgnnnnnnnnnnnnnnnnnnnnnnnnnnnnnnnnnnncagtcgacggtaccggacatatgcccgggaattcggccattacggccgggggaagccgcagtctcgagagcgtcaacgaggtgtttcggtagtctctggccatcctttctgcgcacccggtgtcgctgggctgcaccccgggcggggacgtccgccgggcacgggagggggccaagatgccgatcaataaatcagagaagccagaaagctgcgataatgtgaaggttgtgttaggtgccggaccctcaatgagagagagaaatcaatgtgctacaaacaggctgtcagtgtggatgagatgaggggaactatcactgtacataagactgattcttccaatgaacctccaaagacatttactttggatactggttatgggaccagagagtaaacaacttgatgttgataacttaactgcaagacctattattgattctgtacttgaaggctacaatgggactatttatggcatatggacaaaccggaaacaggcaaaacttttaccatggcaaggtgttcgagctattcctgaacttagaggaataattcccaattcatttgctcacatatttggtcatattgcaaaagcggagggtgatacaagatttgggttcgagtgtcttattgggaaatatataatgaagaaggccgtgaacctttgggcaaggatcagaaaaaaaggttagaggttaaagaaaagacctgatgtgggagtttatatcaaagatctatcagcttatgtggtaaataaatgctgatgatatgcgatcgaattatgacgcttgggcaccaaaaatcgttctgtggtgcaactaatatgaacgaacatagttcccgtccccatgcatcctttaccattactatagaattgcgtgaacacggctggatggtacatgcctgtcaggatgggaagtcc

SEQ ID NO: 94448 - DNA, 1534 bp, Homo Sapiens
  misc_feature (1255)..(1412): n is a, c, g, or t
ccaacggggctggttcaggtctgaaacagagtttgggggttgtttgggattagtgaagctactgcctttgccgccagcgcagcctcagagtttgattatttgcaatgtcaggctttgaaaacttaaacacggatttctaccagacaagttacagcatcgatgatcagtcacagcagtcctatgattatggaggaagtggaggaccctatagcaaacagtatgctggctatgactattcgcagcaaggcagatttgtccctccagacatgatgcagccacaacagccatacaccgggcagatttaccagccaactcaggcatatactccagctttcacctcagcctttctatggaaacaactttgaggatgagccacctttattagaagagttaggtatcaattttgaccacatctggcaaaaaacactaacagtattacatccgttaaaagtagcagatggcagcatcatgaatgaaactgatttggcaggtccaatggttttttgccttgcttttggagccacattgctactggctggcaaaatccagtttggctatgtatacgggatcagtgcaattggatgtctaggaatgttttgtttattaaacttaatgagtatgacaggtgtttcatttggttgtgtggcaagtgtccttggatattgtcttctgcccatgatcctactttccagctttgcagtgatattttctttgcaaggaatggtaggaatcattctcactgctgggattattggatggtgtagtttttctgcttccaaaatatttatttctgcattagccatggaaggacagcaacttttagtagcatatccttgcgctttgttatatggagtctttgccctgatttccgtcttttgaaaatttatctgggatgtggacatcagtgggccagatgtacaaaaaggaccttgaactcttaaattggaccagcaaactgctgcagcgcaactctcatgcagatttacatttgactgttggagcaatgaaagtaaacgtgtatctcttgttcatttttatagaacttttgcatactatattggatttacctgcggtgtgactagctttaaatgtttgtgtttatacagataagaaatgctatttctttctggttcctgcagccattgaaaaacctttttccttgcaaattataatgtttttgatagatttttatcaactgtgggaaaccaaacacaaagctgataacctttcttaaaaaacgacccagtcacagtannnnnnnnnnnnnnnnnnnnnnnnnnnnnnnnnnnnnnnnnnnnnnnnnnnnnnnnnnnnnnnnnnnnnnnnnnnnnnnnnnnnnnnnnnnnnnnnnnnnnnnnnnnnnnnnnnnnnnnnnnnnnnnnnnnnnnnnnnnnnnnnnnnnnnnnnnnnnntggggcttggtgggcgggccgccctggtaattcccaagcttacttcagggagggcttgaaggccagggaaaaaatggtggaaaccccagggaagggggggaaacctttgccaaaattggaag

SEQ ID NO: 94449 - DNA, 1008 bp, Homo Sapiens
  misc_feature (83)..(117): n is a, c, g, or t
  misc_feature (418)..(475): n is a, c, g, or t
  misc_feature (524)..(603): n is a, c, g, or t
aatgtatagactcactatagggcgctacgtcgctctgtgtcgaacgacgagcgcagcgaagtagtgagcgaggaagcggccgnnnnnnnnnnnnnnnnnnnnnnnnnnnnnnnnnnncagtcgacggtaccggacatatgcccgggaattcggccattacggccgggggatttttgacgattccttccctgagaagagggcgaggagaagaagaaagaaaaaggagaactgaattgaattagattagcatgaaggaccttttcacgcggagactaaaagtactgcgcataacttcctgctcagaaatatatgcaaataagaagacagatcctgaaagagcaagcttatgacatccctttcccttctcaagtggacactgctatgctctcacccctcactcagaactaagagtctccannnnnnnnnnnnnnnnnnnnnnnnnnnnnnnnnnnnnnnnnnnnnnnnnnnnnnnnnncttcgaccacagactgaaggctgcactgtcggcttccctatttttgagnnnnnnnnnnnnnnnnnnnnnnnnnnnnnnnnnnnnnnnnnnnnnnnnnnnnnnnnnnnnnnnnnnnnnnnnnnnnnnnnagtacaggtcgtgctgcagttagttccattgaaaactcatttgctcttggagcagtcaggcagtgactgccttcggctttttttctgctgactaagaatctcctatagagagctacaacaatgcccaaaagaaaggctgcaggtcaaggtgatatgaggcaggagccaaagagaagatctgccaggttgtctgctatgcttgtgcagttacaccagaggtgaagcctaaaagaacatcagttcacggaaaatgacgacaaaaagtgatatgatgggaagaaacatagatacaagtgcccaagcagttgcttgaaacaagcaagaagcagtgttgagaagatacatgaaatgtaaaatgggaagccaaattaagagcacagtttgaaagaatgtgcagtaagagaa

SEQ ID NO: 94450 - DNA, 939 bp, Homo Sapiens
cagtcgacggtaccggacatatgcccgggaattcggccattacggccggggcaacaacctagggtcagttttgcaggtggtaaagccatttaccaagatagttgtaggtaaagaagggcagatttattagagaaattgtgaaaatatgttgcagtgggcagctcagcagagaaggggctacctgcaaagaggcaagggctggaggaaagttttatagggtcctgctgaagggtgctacgtgtggaatgaggtcattgtgcccgcaggttgtttgtgagtagctgtctctaacaattgttcatacaataattgttcattattgttctcaacttggggctctccccaacctggggacccttccttattgttgcttacttatcaggtctccacataaaggtgtggaaacttcattcattcatatcttcaacacaaattgtagatagcctgttttttaaaacatttattcaacaaatatttagtccaagccactattacttactaccttctctactattgtatggacttttaactatctctgacactattcactattcttccacattctctattatttatacctatggtaaaatttgccagtttgaccatacaataatactcacagggaatatatagagtctagaagaaaatatacagatccttaaaggctgccctgcaacaaaaaccataacgcaggaacaaacatcacaactaatgccaaataattcaatccttacaaatgtccacaaattctactttaaaaacttgcaattaccagaacttcctttctgcatttaacccagctttaaactaaggaccggtaaccgagaatattcctacctttatggcggtgaaatagtggtaagagggggggcggtaaataattaatcactcacttacagacaaaggttcgctccagcctgtcacagggcgaaactcggc

SEQ ID NO: 94451 - DNA, 830 bp, Homo Sapiens
  misc_feature (518)..(526): n is a, c, g, or t
  misc_feature (582)..(633): n is a, c, g, or t
cacattctgaggggaagagacatataataagtctgcataatttttaattaaggaaaataaagaaaagaaaccaatcatttcatgccaactgaacccaccttctaatattcaactatttcagaaatttaaatcaattcttaacaccaattctaacttcacagaaatcaatgttactcatgggagtaggaatagaaaccaaaaggttaaaagataccatgaaaagaaaagacataaggtaaatggaaattctgatgtatatgctgtaattcaggaactctgctatcaaacctgtactttaccaatagttctatgacaagagatcctaatgccagaaaaagaggccaatcacaggatttctccattaaagctgccactagccattattactatccccaaatgaaacatgactcaagtacatttatagcaatatctgaatgttattaatttcttatgaatttcattattctcttgtcataaataaggataatagagcatttgccccagaatgattttgatcnnnnnnnnnccaagcaatacaatgtcctacagaatgccacagaaaatctaggaagtctagggctnnnnnnnnnnnnnnnnnnnnnnnnnnnnnnnnnnnnnnnnnnnnnnnnnnnncaattcacagtatttggtggatagaaggaaaccaaagttttaaaaatcatatataaatagaacctctaatacagcatttattcagaaaaagaaaaagcatttggtgaagagatcaatatactgcagtaatgagtcctcacccaaaaccccggccgtaatggccgaattcccgggcatatgtccggtaccgtcgactg

SEQ ID NO: 94452 - DNA, 1079 bp, Homo Sapiens
  misc_feature (78)..(112): n is a, c, g, or t
  misc_feature (815)..(815): n is a, c, g, or t
aatgtataaccactatagggcgctacgtcgtaataccgaacgacgagcgcagcgagcatatgagcgaggaagcggcgnnnnnnnnnnnnnnnnnnnnnnnnnnnnnnnnnnncagtcgacggtaccggacatatgcccgggaattcggccattacggccgggtacctcaggatgattcatataaggattaaatatgataatgtatattgcctagctcagtgtttgttccagagtaaaaactcattaaatggtatcattatagaaaacctcccattgagaagtaatactggttttgctctatttttaggagtatatgcaggaaaaatccaaagaaagcggcaaatgttgcgacaatttaagaagacaacattcattaggataaaatggggggaaggattattattcatgttattttccctgcccaagactttatttaaccctggactccgtttacacagacaaagtgacatcagaaggctgagcacttatctggatcatttggtcagtttggtaattcctgctccacacccctattttcctcttaataatacgtttgggtgaagacaaattagtgtttagtaattgcatcatctctgtgcttacctatacaaacataagtttattttatatgcccagatgtctacagagaccctttttgtaaatgtcaaggacatttggatttacttttacagaatattgaaaagataagacaaattataaataagttctaaaacataaatttaattcatctctgcatagtgatttttgaacttggattcaaacgggaaattattgcagaagaatgcccttccctncattttataacctttaaaaacttggattaacactcaatgtccactttctttgacttacagtataaccatgtagccgacttgtggccacttaaaattctacagaagttaatggtgggtccccattttggtcagaaagcatcattcctgtcagacgaatagttgtctggccagacactgttagggctactgtacgttaaccccattactgtaaaccctctgtaccaggttataagaactttcggaacggtacaatttggggaacac

SEQ ID NO: 94453 - DNA, 556 bp, Homo Sapiens
  misc_feature (136)..(391): n is a, c, g, or t
actttgttgccattagtcaagctagtgagatagtatatctatctatctccccagaagaaagtaagataattgatggggtgtggattcagaagagggattacttttctttgagcctcagacttctagacagtatacnnnnnnnnnnnnnnnnnnnnnnnnnnnnnnnnnnnnnnnnnnnnnnnnnnnnnnnnnnnnnnnnnnnnnnnnnnnnnnnnnnnnnnnnnnnnnnnnnnnnnnnnnnnnnnnnnnnnnnnnnnnnnnnnnnnnnnnnnnnnnnnnnnnnnnnnnnnnnnnnnnnnnnnnnnnnnnnnnnnnnnnnnnnnnnnnnnnnnnnnnnnnnnnnnnnnnnnnnnnnnnnnnnnnnnnnnnnnnnnnnnnnnnnnnnnnnnnnaatttacgtgaaatttatacattctttatctttcctgtttttggtttattgatggtgaggaaaattactcgtttcagctttttcatttttttactccccaaatgattttcacctttttcttaaaatgtacaataaatgcactgaaaactttgatcactgtcaaaa

SEQ ID NO: 94454 - DNA, 733 bp, Homo Sapiens
cagtcgacggtaccggacatatgcccgggaattcggccattacggccggggctgcggcgctgcggccgacgccgggtccgcaccaactgtctccccctcccagcttcttacctcggcttcctactccttcccccgcccgcccagcaccgccagcccgggagagctgccgggagttccccgggagcctcaggtggtgactatcctgttgagaagcaaaagatactttgcaagtaaaaaatatgcctcccaagtttaagcgccacctcaatgatgatgatgtcacaggttctgtgaaaagtgaaaggagaaatcttttggaagatgattcagatgaagaagaggacttttttctaaggggaccatctggaccaagatttggacctagaaatgataaaattaagcatgttcagaatcaagtggatgaagttattgatgtcatgcaagaaaatattacaaaggtaattgagagaggggagagactagatgaactacaggacaaatcagaaagcttatcggataatgcaacagcttttagcaacagatccaaacaacttcgaaggcaaatgtggtggcgtggatgcaaaataaaagccatcatggctttgggtgctgctatccttttgctagtgattatcattcttatagtcatgaaataccgtacttgatttgatgacagagatcttcattaagcaagatctgggacagtaataaaagattgctgcataatcaaaaa

SEQ ID NO: 94455 - DNA, 1027 bp, Homo Sapiens
  misc_feature (78)..(112): n is a, c, g, or t
gtcgtatagatcactataggcgctagctcttgagccgaacgacgagcgcagcgaagtagtgagcgaggaagcggccgnnnnnnnnnnnnnnnnnnnnnnnnnnnnnnnnnnncagtcgacggtaccggacatatgcccgggaattcggccattacggccggggcattccaagtcgctgctgtgcagagcagcaagtgctccgtgcagggtctgttgctattcacttggtaggtgaacagtcctctttgtgccggtattcagtgaagaaagcaagtctaaatatgcagtttctctcactggagtgaaacgatgttatgttcatttctaatcaactatgctagacagctgcaagctgaaaagtgcctgcaatttgccagtttatttgtaataagaaaataataagacaactgctggaaccaagtaatgcagaaggtccccttggctgatcccggaatgtaccagctggacattacattaagaaggggtcaaagtttagctgctcgagatcgaggagggacgagtgatccatatgtgaagtttaaaatcggaggaaaataagtttttagaagtaatataatacacaagaacctcaaccctgtgtgggaagaaaaagcttgtattctggttgatccatcttagggagccatttgcataataaaggcatttggacctatgatttttggactacaggatgactttatggggctcagccttttctggatctggacacaattggaagttaaacagggcccccagatgtgaacccttacctctgaaaaaatccctcatttatccctgacccatgatcctttggaatccattcttggctctcaggccatcccttacccccttaagaaatgtagagtcccggggaatggggacaaatggcttaaggaaggaacaagttcggcaaacaaaccaacgccacgggaaccctctcattacaactttaacctgggctggaacccttattttccccccgggggaaaaaccctccccctttctggaaccgccaccctttttgtcc

SEQ ID NO: 94456 - DNA, 1054 bp, Homo Sapiens
ggctggtaccggtccggaattcccgggatagttgcagcttcaccctcgcagactcggcttagcgagcgagtcggtgcttccgcggatcaaaattattagccgttttattagagcccattaaacgttgcataaacatggttcagagctgcctgggagaagaaaagccaaaggatgccaccctctcgatttatcccaccctcgggagtctgaaagccgacgccaggagaaatcccgcgaaggccgcccgggatcctggtagaggcgacgctgtgtgcgtttatggagcgcttgcggtgcgtggcactaggctgggtgtggtgggtgctgccgaaaaaagggttcctcccatccatttgcacgtcacccttcccacctcctgcccagatggacagaagtgaggacattcatcggccgcattttactaatggcaaggagatagcgactgaagggcaagaacctagggtttcctgtctttgatatttctcatctttgaggtaagtacacctggacagtcccttccttcctcctcagggctcatgctttcttgcctatccgtgtaattaatatgatctggctatctttgtctttgttccgaaacttcagctgcaaatgaaagtgtaagttaggtctgagtctgcactatagacctagctatcctagggtaaagggggataaaataggaatcaagaaagcctggcccgcttggggctcccagctcaagtgcattctgccaaaccagtttatattaggccttccatgtggggtggctatccttttatcaagatcccccccaaggggggaaggaggattatttaagtcccctttattaaaactcccccttcaaacccccttttctctggcttaaaaggggaatgtggaaatgttggtagttaaaaaagaaccggaatccccccaccccaaaagggccctttacgggctaactcatgggtttttttaaacccttccggggtccttttaacccctaacttccccctaataaagggacccggccattcatttttaatcctaactggccttaaagggggatacctag

SEQ ID NO: 94457 - DNA, 891 bp, Homo Sapiens
  misc_feature (794)..(823): n is a, c, g, or t
aggtcccggcaaccgcaggctcgcggcgggcgctgggcgcgggatccgactctagtcgtaatggaggcgggcggctttctggactcgctcatttacggagcatgcgtggtcttcacccttggcatgttctccgccggcctctcggacctcaggcacatgcgaatgacccggagtgtggacaacgtccagttcctgccctttctcaccacggaagtcaacgtgttgtgctcctacagactgcaaccctgctaggggtccttctcctgggttatggctacttttggctcctggtacccaaccctgaggcccggcttcagcagttgggcctcttctgcagtgtcttcaccatcagcatgtacctctcaccactggctgacttggctaaggtgattcaaactaaatcaacccaatgtctctcctacccactcaccattgctacccttctcacctctgcctcctggtgcctctatgggtttcgactcagagatccctatatcatggtgtccaactttccaggaatcgtcaccagctttatccgcttctggctttttctggaagtacccccaggagcaagacaggaactactggctcctgcaaacctgaggctgctcatctgaccactgggcaccttagtgccaacctgaaccaaagagacctccttgtttcagctgggcctgctgtccagcttcccaggtgcagtgggttgtgggaacaagagatgactttgaggataaaaggaccaaagaaaaagctttacttagatgattgattggggcctaggagatgaaatcacnnnnnnnnnnnnnnnnnnnnnnnnnnnnnnaaatttgggagggtgggggtggcaaatcctttagaatatgggccttaaaaaggccccggccgccgggg

SEQ ID NO: 94458 - DNA, 792 bp, Homo Sapiens
gggagagccgcaggtctgggctgcagtaggtcccggcaaccgcaggctcgcggcgggcgctgggcgcgggatccgactctagatcgtaatggaggcgggcggctattctggactcgctcatttacggagcatgcgtggtctatcaccctatgcgcatgtatctaccgcacggcctctcgagacctacaggcacatgcgaatgacccggagtgtggacaacgtccagttcctgccctttctcaccacggaacgtcaacgtgttgtgctcctacagactgcaaccctagctaggggtccttctcctggcgttataggctacatatattggctacctggtacccaaccctgaggcccggcttcagcagttgggcctcttctgcagtgtcttcaccatcagcatgtacctctcaccactggctgacttggctaaggtgattcaaactaaatcaacccaatgtctctcctacccactcaccattgctacccttctcacctctgcctcctggtgcctctatgggtttcgactcaaagatccctatatcatgccgttcttgtgatttcaggggtccaactttccaggaatcgtcaccagctttatccgcttctggcttttctggaactacccccaggagccagaccgggaactactggccccttgcaaacctggagctggctcatcgtgaccactggggcacccttagtgcccaccttaaaccaaagaaaaccctcctttgtttcaccttgggccctggctggccaaccttcccccagggggcctggtggttctgtggg

SEQ ID NO: 94459 - DNA, 788 bp, Homo Sapiens
  misc_feature (501)..(535): n is a, c, g, or t
  misc_feature (575)..(635): n is a, c, g, or t
ggacacagctcggacctcaggcacatgcgaatgacccggagtgtggacaacgtccagttcctgccctttctcaccacggaagtcaagctaaggtgattcaaactaaatcaacccaatgtctctcctacccactcaccattgctacccttctcacctctgcctcctggtgcctctatgggtttcgactcagagatccctatatcatggtgtccaactttccaggaatcgtcaccagctttatccgcttctggcttttctggaagtacccccaggagcaagacaggaactactggctcctgcaaacctgaggctgctcatctgaccactgggcaccttagtgccaacctgaaccaaagagacctccttgtttcagcagggcctgctgtccagcttcccaggtgcagtgggttgtgggaacaagagatgactttgaggataaaaggacccaaagaaaaagctttacttagatgattgattggggcctaagagatgaaaatcacnnnnnnnnnnnnnnnnnnnnnnnnnnnnnnnnnnnggaggttggggtgcaatctttaaaatatgcccttaaaaannnnnnnnnnnnnnnnnnnnnnnnnnnnnnnnnnnnnnnnnnnnnnnnnnnnnnnnnnnnnggcggaatcccccctggagggtccagggaatttccaaggaacccaccctgggacctaaaccatggggggaaaaccccccaattcctcctatcttaaaaaaatttacccaaaatttacagccccccggggcctagtgggaatggggccacacat

SEQ ID NO: 94460 - DNA, 945 bp, Homo Sapiens
ctaagtcctaaaatgacattttgctaacattcccattttttctaattttaggattctataagcgccaataattttgtgttcctggtgaccatcccgaccattagagttcttgacatgctaaaatgttctatgttatcttatttcggtattcggctctttcttttcataaatctgaactaatacaatcaaaccagtcaaaattaccaaaatctgttgtctttgctaaacacaacacttctattaaactatctggaataactttcaatgactttatgagcagcactcatccagaaccatgcttcctacagaaacagcctatcctgaatctgccatttgtctccaatgccactcttaaatatttgccaactcctattactaagtctcttcaaaggattaccagcagtcttaatttcactttctgtcaagccactttgtacttttcttcactaaaacatggaaatatattttgaacataagcaacaagacaaattttacagaacagtttgaaacaactataggacttccagtgattaggacatagaaaaatatttaaagaattcacacttttttcccttttatattctaggtatgacagaatggtttcatcattttataattttgtagacagaaatacacatactactcatacatacacttaaaaatgtatatgtatttctttgaaaagatgagcatcacttatgaggaagcaaaataatagaaaattttcccaacaaagaactacaaattcctttaaaagcaatattcttgaactgctgtgaagacatacaaccacaatgctacataactttaaaatcacagcagaccttagaaaccatctaatctagatggtccattttttcatgtgaagaaattgaggattcaagttgaaaatctttgaaattaaggaaatggcagtagtccagacctgtaaaccaaagtgcaaag

SEQ ID NO: 94461 - DNA, 846 bp, Homo Sapiens
  misc_feature (501)..(509): n is a, c, g, or t
cagacattcatggatgccagggttacatagatcgatatgtccacaacgcaatacaatccacacacactgccttcgaggctggggaagactaaaatgtatggcccacacacagcaggccttctgtggactcacccacattgctcccaggagaaattgggctcacttccttctctctggtctctgcccttcacacagaccaagaccctacaacacgtcgttaaatccgacttttaaaagcaagaggcatctgtctgaggatgagggtaagcaaagtaggaaagagggtggagataagaacaccgaacacttttagctggagttatttatccactgcaaggggctagggaccccagggcagaatcctacacggtccaaggggagggacggtgttctggcatggcttagagttcctaataacaagggttaatacagtaacaggaattgatcatttctgggtgaggacagggcaatacgaaaaaatatacatttggaattttagcnnnnnnnnngcctctctactgtgtcactaaatatatctctgcactctcacacatccttgtccagtaaagcttcaggccaccagaatacacattttcttcactcgcatacacaacccctcacatcagcattggtgcactagactctgtaaaaatttttcagtcacactttttgtttttaaacttgagtcaatataaaccttgttcaaaatgttatgaaaaaatgtacatgtttatacaaggcaggttgtggcaggacactaggggttctccccacttgggtggccccaggaggagagcccggccgtaatggccgaattcccgggcatatgtccggtaccgtcgactg

SEQ ID NO: 94462 - DNA, 934 bp, Homo Sapiens
cagtcgacggtaccggacatatgcccgggaattcggccattacggccgggggaggaggaaatgttcctcgtctgataagacaacagtggagaaaggacgcatgctgtttcttagggacacggctgacttccagatatgaccatgtatttgtggcttaaactcttggcatttggctttgcctttctggacacagaagtatttgtgacagggcaaagcccaacaccttcccccactggtaagaattaatatttatatttttactaattttattttcttgttgcaaagtttatatatttaactacaattttctattattaacactgaaattatttttaaggataaattttataatcatgagtgattcttgacattcacttgttcttaaactttctgcttatacgttatagagtttaataactacctaaacatgttattaaatttgtatatatattttgtgtataaatagtaacttttcccaaacttgacagtaaatcacacaacaggtttctactctcttttaatattttaagactataaaaaaatgcatttaaattagataacaaaattttatagtctgaaagcaggttaacagctgtctatgtatgtcatagatatgtagataacagatttgcatatgtctatatttctttaagagtatgttgcttctttcaatggtatgcaaaaactttgagactatcgagatatttttaacataataaatttcaaattctaatgaaacacttcaatagtccttataaaatgtcttaaccatgagaataaatttaaaaccacagagattgcctgcaataaatttcatacttagtacataccaaattagaggaacacacttaactggcgatggttcactttccacttcatttaatgatgttactgaacaggtctttcccggctaatcatttgggtgaccaggtgc

SEQ ID NO: 94463 - DNA, 1001 bp, Homo Sapiens
  misc_feature (47)..(88): n is a, c, g, or t
  misc_feature (92)..(126): n is a, c, g, or t
  misc_feature (953)..(953): n is a, c, g, or t
  misc_feature (969)..(970): n is a, c, g, or t
tgcgaacttcaactaaatcagtgggggggctaagctcccggccgtannnnnnnnnnnnnnnnnnnnnnnnnnnnnnnnnnnnnnnnnnccgnnnnnnnnnnnnnnnnnnnnnnnnnnnnnnnnnnncagtcgacggtaccggacatatgcccgggaattcggccattacggccggggagaggcgtgcgggcttcggaggcgtgcgggcttcgggtgccatggggactcctcccggcctgcagaccgactgcgaggcgctgctcagccgcttccaggagacggacagtgtacgcttcgaggacttcacggagctctggagaaacatgaagttcgggactatcttctgtggcagaatgagaaatttagaaaagaacatgtttacaaaagaagctttagctttggcttggcgatattttttacctccatacaccttccagatcagagttggtgctttgtatctgctatatggattatataatacccaactgtgtcaaccaaaacaaaagatcagagttgccctgaaggattgggatgaagttttaaaatttcagcaagatttagtaaatgcacagcattttgatgcagcttatatttttaggaagctacgactagacagagcatttcactttacagcaatgcccaaattgctgtcatataggatgaagaaaaaaattcaccgagctgaagttacagaagaatttaaggacccaagtgatcgtgtgatgaaacttatcacttctgatgtattagaggaaatgctgaatgttcatgatcattatcagaacatgaaacatgtaatttcagttgataagtccaagccagataaagccctcagcttgataaaggatgatttttttgacaatattaagaacataagttctgggagcatccagcagtggcacaaagacagaaagaatccatcccttaaagtcaaaaactaatggatggagaangaaaaaatgggaaggnnaattccaccagaaaccgggagaaagtgtgaa

SEQ ID NO: 94464 - DNA, 1238 bp, Homo Sapiens
  misc_feature (80)..(114): n is a, c, g, or t
gaatgtatagatcactatagggcgtagtcggttttatgcgaagcacgagcgcagcgagtcagtgagcgaggcagcggcgnnnnnnnnnnnnnnnnnnnnnnnnnnnnnnnnnnncagtcgacggtaccggacatatgcccgggaattcggccattacggccggggcgtgacacccgttttctatggggtcttcacttcccagtggcacaggggaactacagaaggctctgccgtctgtgtcttcacaatgaaggatgtgcagagagtcttcagcggcctctacaaggaggtgaaccgtgagacacagcagtggtacaaccgtgaaccacccggtgcccacaccccggcctggagcgtgcatcaccaaccagtgcccgggaaaggaagatcaactcatccctgcagctcccagaccgcgtgctgaactttctcaaggaccacttcctgatggacgggcaggtccgaagccgcatgctgctgctgcagccccaggctcgctaccagcgcgtggctgtacaccgcgtccctggcctgcaccacacctacgatgtcctcttcctgggcactggtgacggccggctccacaaggcagtgagcgtgggcccccgggtgcacatcattgaggagctgcagatcttctcatcgggacagcccgtgcagaatctgctcctggacacccacagggggctgctgtatgcggcctcacactcgggcgtagtccaggtgcccatggccaactgcagcctgtacaggagctgtggggactgcctcctcgcccgggacccctactgtgcttggagcggctccagctgcaagcacgtcagcctctaccagcctcagctggccaccaggccgtggatccaggacatcgagggagccagcgccaaggacctttgcagcgcgtcttcggttgtgtccccgtcttttgtaccaacaggggagaagccatgtgagcaagtccagttccagcccaacacagtgaacactttggcctgcccgctcctctccaacctggcgacccgactctggctacgcaacggggcccccgtcaatgcctcggcctcctgccacgtgctacccactggggacctgctgctggtgggcacccaacagctggggggagttccagtgctggtcactagaaggagggcttccagcagctggtagccagctactgccccaaaagtggtgggaagaacggggtggcagaaccaaacagaatgaggggtggcaagtgt

SEQ ID NO: 94465 - DNA, 811 bp, Homo Sapiens
  misc_feature (706)..(740): n is a, c, g, or t
ccgtataagactttaacctgtctgaccgccgtccactcagacagatgatgcggataatgtcgtgaaagtatctggggtactccacgggacattacgacatgctgccgatgatcttagagaatgatgattcgttaaacataatgcatgatattctaccacaccatgcaccatcgacattcctttaacccatgtccccaatggttcatttaggacattggccaattttgtgagtatgagataatattgtgatgaatactgtcatgccataagttttatgcaaggctgattatgtgcttctgaatgtgctgtctgaatgtcacaaagaagtggcttactggttcaaacagcgcacatacatggttttaaggcttttagtatactttaccaaataatctccagaatagctcaaacaactcctaccaacagttatgttattgtgcccacagggtggacttcataacaacacagcaaattcaaccacagatctattagattctcacccatctcaaaactatcacatcaaagaagcaaggagacatattactggtgaggaagccaaattcaaattcttttaaaaaatcactcagctttagatcagtaaaattatcaacaaaaatgctccccacaaaaagtctaccgggtttttcaaaaaataaagttaaaaagagagaaagagaaactcaggctgggtgcggtggctcacatnnnnnnnnnnnnnnnnnnnnnnnnnnnnnnnnnnncaatcacgaggtcaggagttccccggccgtaatggccgaattcccgggcatatgtccggtaccgtcgactg

SEQ ID NO: 94466 - DNA, 1021 bp, Homo Sapiens
cagtcgacggtaccggacatatgcccgggaattcggccattacggccggggcgacgtgttgagagacacgctcagcgaggaagaggaggacgactttcggctggaagtggccctgcctcctgagaagactgacgggctgggcagcggagatgagaagaagatggagagagtgagcgaaccctgcccaggctccaagaagcagctgaagtttgaagagctccagtgcgacgtgtccatggaggaggacagccggcaggagtggaccttcaccctgtatgactttgacaacaacggcaaggtcacccgagaggacatcaccagcttgctgcacaccatctatgaggtggtggactcctctgtcaaccagtccccaacatccagcaagatgctgcgggtaaagctcaccgtggcccccgatggcagccagagcaagaggagcgtccttgtcaatcaggcctgacctgcagagcgcaaggccccgagcagagaccaagcccactgaggacctgcggagctgggagaagaagcagcgagccccgctcaggttccagggtgacagccgcctggagcagtctggctgctaccaccattgcgtagatgagaacatcgagaggagaaaccactacttagatctcgccgggatagaaaactacacgtcccaatttgggcctggctccccttccgtggcccagaagtcagaactgcccccccgcacctccaatcccactcgatctcgctcccatgagccggaagccatccacatcccacaccgaaagccccaaggcgtggacccggcctccttccacttccttgacaccccaatcgccaaggtctcagagctccagcaacggctccggggcacccaggacgggagcaagcactttgtgaggtcccccaaggcccagggcaagagtgtgggtgtgggccacgtggccagaggggcaagaaacaagccccctctgggacccgccatcccctgcggtgtcccctcgaacacgggtgaccagggcggggaccactg

SEQ ID NO: 94467 - DNA, 1134 bp, Homo Sapiens
agaggttatcagtcgacggtaccggacatatgcccgggaattcggccattacggccgggggcaggcgcgccgagatggccgcgctcctggccgcctagagccggagcggcccgcggagctgcggaggcagccatggtcggggcgctgtgcggctgctggttccgcctgggcggggcccgcccgctcatcccgttgggcccgactgtggtacagacctccatgagccggtcccaggtagccctgctgggcctgagtctgctgctcatgctcctactgtatgtggggctgccaggcccccctgagcagacttcctgcctctggggagaccccaatgtcacagtcctggctggtctcacccctggcaactcgcccatcttttaccgcgaggtgctcccactcaaccaggcacacagggtggaggtggtgctgcttcatggaaaggcctttaactctcacacgtgggagcagctgggcacactgcagctactgtcacagaggggctaccgggccgtggcccttgaccttccaggttttgggaactcggcaccttcaaaggaggcaagcacagaggcagggcgggcagcgctgctggagcgggcgctgcgggacctggaggtacagaatgccgtgttggtgagcccctcgctgagtggccactatgccctgcccttcctgatgcgaggccaccaccagctacatggatttgtgcccatcgcacccacctccacccagaactacaccccaggagcaattctgggctgtgaagactccaacccttatcctgtatggagagctggaccacatcctggctcgagagtcactgcggcagctccgccacctgcccaaccactctgtggtgaagctacgcaatgcaggccatgcctgttacctccacaagccgcaagacttccaccttgtcctgcttgccttccttgaccatctaccttgaactaacccactcccagctcccagcctggcatgagcttggacagtctggaccgccaccctccctgaaccagggagacagcctctggggattggaggccagaggccagggtcagacccagccaggactcctcatttcatctcacagacacaataaaaaagcatatttgtcctgcctgggaagtgaaa

SEQ ID NO: 94468 - DNA, 782 bp, Homo Sapiens
  misc_feature (47)..(81): n is a, c, g, or t
tccgaacgaccgagcgcagcgagtcagtgatgcgaggaagcggccgnnnnnnnnnnnnnnnnnnnnnnnnnnnnnnnnnnncagtcgacggtaccggacatatgcccgggaattcggccattacggccgggatcatcatcatcagaagaaggatatttagagcggatagatggcttggacttctgcagagatagcaatgtctccttgaagttcaacaagaaaaccaaagggctcattgatggccttaccaaattttttaccccttcccctgatgggcggaaagctcggggggaagtggtggactactctgagcaatatcgaatcagaaagaggggcaacaggaaatcaagcacttcagattggcccacagacaatcaggatggctgggatggcaaacaagaaaatgaggagcgactttatgggagccaggaaatcatgactgagaaagatatggaattatttcgtgatatccaagaacaagcactgcaggtaaagttggatattcaggttagacaatcaagcaacttgttcatggctgagaaacagcagattaattacatagtgggttaagcagtaaccagcagttttgcctaaatctcagaatagttgtaggttatgagtgtatatgtagttctgctgtgtataatattcatttcaaacccatgataactggctgtggttttgcagataagcacatggcttttgactatcaactacttaaataagatttggtaaatataaagtcttactgtatgaagaagaattgggattgaccaaaaacg

SEQ ID NO: 94469 - DNA, 1154 bp, Homo Sapiens
  misc_feature (78)..(112): n is a, c, g, or t
  misc_feature (732)..(799): n is a, c, g, or t
cgcgtatctgacctcttatggcgcctccgcgtttagcgaacgacgagcgcagcgagctagttagcgaggaagcggcgnnnnnnnnnnnnnnnnnnnnnnnnnnnnnnnnnnncagtcgacggtaccggacatatgcccgggaattcggccattacggccgggatttcccagcagtccatcactggccaccgtgtagccagattctgttccgtccacactggggtgaagagtacttggaatgtctgccatcctgtatgatcaccccaccccctgtccatccatcagatacataataagggttggttacaagttcataagagaatagttaaaacacttctcctctcatgcctaccatggtgctgtatcaaggggatttgttcacatatgggctcagcaacgcacaagtgaggtcagccatggcactaggtcattcccattttagccaaggtgcctctataggggtcagacatcatgtgcccagacctaaggtcaggaatgtcatatttttctgttaaaatcattgtatttctgtgtatcttacctttaaatcattgtggtttactctgagattctgtagtcctaatattgtatcattgtgctgtctgcaaaacaacttgaatctatgttgtttgcatcttatgtcacatgtaacgcagctgtactttatgttctttgcaactgtttccattatgaggaacgctgtgctatattacaagggttacatatgtcttnnnnnnnnnnnnnnnnnnnnnnnnnnnnnnnnnnnnnnnnnnnnnnnnnnnnnnnnnnnnnnnnnnnntgacggtaaaagaagttgaagaaccaagacagggactagccatgggcgaacacaccaggtctctacgtaaacaatgacaaacacaataagccggggtgaaacgttagaccgagccgtggatggcagtcaagcatggataactcaccagatacatacggggaagcgtgcaggacgggcaagaatcacgcatcgacgcatccgggagggaagcaggatggcaggaggaagcccagaaaagcgagcaaaggagtcagcctaggggggcccagaagcgaaacgtcgagctccacaacgacagaaccacaggaaagggaggacggaggagacgcaggaaggccggggcgacaaaaagaaa

SEQ ID NO: 94470 - DNA, 907 bp, Homo Sapiens
  misc_feature (161)..(469): n is a, c, g, or t
ggacaatccctaatatgattaaagaaacaagtggaaagaagacaaagaccaagcttccttagcaccaaccacttaagatatagaacataagacctgtataggaacctacctgaccgtagttcttaaccggaaacccatgctttttatatatttaattttannnnnnnnnnnnnnnnnnnnnnnnnnnnnnnnnnnnnnnnnnnnnnnnnnnnnnnnnnnnnnnnnnnnnnnnnnnnnnnnnnnnnnnnnnnnnnnnnnnnnnnnnnnnnnnnnnnnnnnnnnnnnnnnnnnnnnnnnnnnnnnnnnnnnnnnnnnnnnnnnnnnnnnnnnnnnnnnnnnnnnnnnnnnnnnnnnnnnnnnnnnnnnnnnnnnnnnnnnnnnnnnnnnnnnnnnnnnnnnnnnnnnnnnnnnnnnnnnnnnnnnnnnnnnnnnnnnnnnnnnnnnnnnnnnnnnnnnnnnnnnnnnnnnnaaatacagatttattatatgtctaaggacattatcgataaagtgaaaacactacccacagaatgggagaaaatatttgcaaaccatgtatctgataagggtctagaatccagaatatataaagaactcttacaactcagtaataaaaagacaaacgcctaattaaaaagtgggccaaggctcagcacagacacttctccagggaacatacacatatggccaacagcaccagcaaaggtgcttgatagcatcactcatcagagaaatgcaaatccaaatgacaccagaggctacttcacactcattagaatgattataaccagaaagtcagataataactagtgttggcaagaatgcgcagaaattggaaccctcttacttactggtgggaatgtgaaatggtgcatggacgtgggaaaatagtttggcaggtcgacgc

SEQ ID NO: 94471 - DNA, 1022 bp, Homo Sapiens
  misc_feature (79)..(113): n is a, c, g, or t
gaagtatcgacctcatatggcgcccgcgtttatgtcgaacgaccgagcgcagcgagttagtagagcgaggaagcggcgnnnnnnnnnnnnnnnnnnnnnnnnnnnnnnnnnnncagtcgacggtaccggacatatgcccgggaattcggccattacggccgggggccacaggatcgatttacggccgcagagaaaaaccaagatttcactttcaagatggaaagtccgtcaggctcagctgtggttttacctagcactcctcaggcctctgcgaatccatcatctccctatacaaatagttcccgaaaacaacctatgagtgcaacacttagagaaagattaaggaaaacaagattttcatttaattcctcttacaatgtggtgaaacgtcttaaagtagagagtgaagaaaatgatcagaccttttcagagaaaaccagcatcttccacagaggaaaactgtttggaatttcaagaaagttttaaacatatagacagtgaatctgaagaaaatacaaatttgacaaaatactttgaagaatctcaatgtctgtgaatctcagtcacttgattctggatcatgcagagcatctccaaaactgagtctgtgagtgagaagcttccctaaacaaagattaaacgcgtgaaaaagccaaaatggttgaagcaggttacagggagaaagaagaccttcttcggaggctaaaaactagtcaaaatgtatagatcagaagacatgatctgtctcaattacaggtgctaataaagaagcggagaagctgtacccagctcttgctttatgaagttgtagtccgctgcgtttgaagaaaaccaccaaactaagccttcctccaatggataagacccacaatggggttagaatgatcaacttactacccccataaccccagggggaccacacaattttatagaatggtccaaatccctggaatttctgcctcccccaattatcctttttgaaaaatggcaccactttaaccttaaaaacaatatcctcatgc

SEQ ID NO: 94472 - DNA, 847 bp, Homo Sapiens
  misc_feature (431)..(600): n is a, c, g, or t
acattatcaacgcgcgccaggtgttcagtgaggtcgggcaggttcgctgtggcgggcgcctgggccgccggctgtttaacttcgcttccgctggcccatagtgatctttgcagtgacccagcatcactgtttcttggcgtgtgaagataacccaaggaattgaggaagttgctgagaagagtgtgctggagatgctctaggaaaaaattgaatagtgagacgagttccagcgcaagggtttctggtttgccaagaagaaagtgaacatcatggatcagaacaacagcctgccaccttacgctcagggcttggcctcccctcagaggtgccatgactcccggaatccctatctttagtccaatgatgccttatggcactggactgaccccacagcctattcagaacaccaatagtctgtctattttggaagnnnnnnnnnnnnnnnnnnnnnnnnnnnnnnnnnnnnnnnnnnnnnnnnnnnnnnnnnnnnnnnnnnnnnnnnnnnnnnnnnnnnnnnnnnnnnnnnnnnnnnnnnnnnnnnnnnnnnnnnnnnnnnnnnnnnnnnnnnnnnnnnnnnnnnnnnnnnnnnnnnnnnnnnnngcaacacagggaacctcaggccaggcaccacagctcttccactcacagactctcacaactgcacccttgccgggcaccactccactgtatcccctccccatgactcccatgacccccatcactcctgccacgcccagcttccgaggagttctggggattgtaccgccagctgccaaataattgtatccacagtgaaatcttgggttggaaaccttgacctaaagaccattggcacttcgtgcccgaa

SEQ ID NO: 94473 - DNA, 1033 bp, Homo Sapiens
  misc_feature (66)..(105): n is a, c, g, or t
  misc_feature (109)..(143): n is a, c, g, or t
gaagactgtaatactgaacctcctcaaataaaggagacggccaatgccggccgggttttttgttgnnnnnnnnnnnnnnnnnnnnnnnnnnnnnnnnnnnnnnnnccgnnnnnnnnnnnnnnnnnnnnnnnnnnnnnnnnnnncagtcgacggtaccggacatatgcccgggaattcggccattacggccggggggaagcgccggcgcgcggagccaggtgggaggaagaagaaattgtcgagacgaataacatgaggtcatatagaatcccacttttggtgatttcaagtcaagaaagtaaaagtaaaccattgctatctttcaccttaaatatcctgtgttttattgctcagaacatccaggtttttcctaattacctcattgattgtcagaagggaaacctccgtgacaaaaaagagggccctcgtagaacgcttatcaatcagcaagaataagaaacaaagcatctaattctattatttcgtgttttaacaatgcaccacctgctaaacttgcctgccccgtttgcagtaaaatggtgcctagatatgacttaaaccggcaccttgatgaaactgtgtgctaacaatgacttcgttcaagtggatccagggcaggttggcttaataaattcaaatgtgtctatggtagatttaaccagtgttaccttagaacgatgtaacaccctaagaagtcaccaacaccaaagacaaatttaacccctggccaaagtgattcagcaaaaagggaagtacaagcagcaagatcagtccctactttaacaagtacatgatgtggctgtgcaaaaaatcaagatgagctgagaaaatcgtagtgtgaaagtcatctgtacagggaagcctagcatctaaattgtccagacaactacgtcacaggctatacatatccactagataacggatgcacgaacttgccggttctactcacaacgaattccaaatcaacagcctgtcaaagagcctgattgataattctccagaaattcgaggacaggactcaacttcgggacac

SEQ ID NO: 94474 - DNA, 1112 bp, Homo Sapiens
  misc_feature (81)..(115): n is a, c, g, or t
  misc_feature (192)..(432): n is a, c, g, or t
  misc_feature (806)..(806): n is a, c, g, or t
cgactatctacctcatatggcgcatcctatatagtcgaacgaaccgagcgcagcgaagctgttagcgaggaagcggccggnnnnnnnnnnnnnnnnnnnnnnnnnnnnnnnnnnncagtcgacggtaccggacatatgcccgggaattcggccattacggccggggttttgagacagactttcactctcgtnnnnnnnnnnnnnnnnnnnnnnnnnnnnnnnnnnnnnnnnnnnnnnnnnnnnnnnnnnnnnnnnnnnnnnnnnnnnnnnnnnnnnnnnnnnnnnnnnnnnnnnnnnnnnnnnnnnnnnnnnnnnnnnnnnnnnnnnnnnnnnnnnnnnnnnnnnnnnnnnnnnnnnnnnnnnnnnnnnnnnnnnnnnnnnnnnnnnnnnnnnnnnnnnnnnnnnnnnnnnnnnnnnnnnnnnnnnnnnnnnatgagccaccatgcccagccaaaatgccctccttttaaagctgaaatctgccttcttacaactcctgcccccattctactctctgtattccaaaagagcaaatctacctccaatcttcttcttttcccatgactgcccttagggtgtttctctcccttgacttttctccggacgatgccttcccgttgcctttcccctttgccatgatcttgaggttcctcaccaccactctgatcatcctccactgggaactctaatttttaaggtcagctttgcaatgtgatactctgagaagagctgcttctcactgaaaatacatgcataaggggcaaggtccttattctattttgttttacctctggcatggtaccaantaactagttaatagtgggctgttcacacaccaccaaaggggtggctcacacaaattggtttgttttgaatcccaaggtttgctccccataatcttgcaagcaatatccaataagtatatttttaacattgaacccctaggaaagtttaaagcatttttccctctccaattttatagaatggggaaaggaaacccggttaaaaagggagtgattaattgggtaaacaaatctttcagccccaatccttgggaactggaccaatggtttccaaagttgggttggttttcaagaaaaaccctttttttt

SEQ ID NO: 94475 - DNA, 735 bp, Homo Sapiens
gatggccatgggctctagccctctgggggctcccaagttttggatcttgcaaatgcgttcgccagagatagatacggagctgggtatgttgccaaaatgtgtcctgttgcattttctcccacgatcagcagttttccaccaagcaaaggacataagtccatcatagtaaatgccaaagacgttgcagcccccacaaaggctcccaagaactgggctcccacataaaatggcaatttgaaccatttcatccgtccaaagagacacattgctaaagacacagctgggttgatgtgaccaccagagacaccgccagccacataaatggccattgcaactgccattgaaaatccaacattgatagtgatgacccctccaaaacgtcctcgactgagaatagcttgggcaacacagccacatccaaggacaatcaagatgaacgtgcccaagaactcagagagggtttctttcgctaagctgctcttcaagaccagtctctgcttgaagctttttcccttttctgctccctcaggctgcatcttggggcttctctgaggactcctgtttctaccaatacctacctgttgtggtcctcactttcacagccagatgaaaatggacgttttgacaatggctcacagattcctggagatgtctggtaagagtctctgactgtacaaatgccgttccaattagaggctgtggcttaatcgtcttgctggtaggaaggaccgagcc

SEQ ID NO: 94476 - DNA, 761 bp, Homo Sapiens
cttcggtccgcgacgatcctctagagcactgtgtgtctccccggacgcgagcccgcgcccctgaaatctgcaaaatggctgataatttggatgaatttattgaagagcaaaaagccagattggccgaagacaaagcagagttggaaacgtgatccaccttacatggaaatgaagggaaagttgtcagcgaagctttctgaaaacagtaagatactgatctctatggctaaggaaaacataccaccaaatagtcaacagaccaggggttccttaggaattgattatggattaagtttaccacttggagaagactatgaacggaagaaacataaattaaaagaagaattgcggcaagattacagacgttatcttactcagggcattacacaagggaaaagaaagaaaaattttctatctacgagtgaaacagatccatctactttgggagtttctcttcctattggtgagaggttatctgctaaggaaaggttgaaacttgaacgtaacaaagaatacaatcagtttctcaggggtaaggacagaatccagtgaaaagttcaggcaggtggaaaagagtactgagcccaagagtcagagaaataaaaaacctattggtcaagttaagcctgatctaacttcacaaatacagacatcttgtgaaaaattcagagggtcctaggaaaagatgtcttaacctccttcagaggcatattgacgaaacttctgaacccaaaagacgactagaggaggcacagatagcg

SEQ ID NO: 94477 - DNA, 934 bp, Homo Sapiens
  misc_feature (703)..(774): n is a, c, g, or t
ctagggcagtggcagaaggggaggcaaggccaaggcagggaatcccccacagccggctctccaatccctctacccatggcccccaataatattttgcagggatgccaagggcttgtggccgtggcgggggtgggtaatgcgccaaccctatttcaggcagcgctcaaagtaggtggagccgatgtagccaccccgcatggagcgctgcacgttctgctcaaacagccgccggttgttctgcaggacctctgcggcctccttgttcagtgggtcctcggggttgggctccaagaagagatactgcaggccataaattatggagtttatcgtaaggactggcttccagtcctctctgaggatgttgaggcagacgttgccctcgaggtcaatgttggggtgatagaccattgtctcacacttcaccttggggggatcatgcgggtaaccctggcccaccttaaaactgaacacaaacttcccactcttgtagaagccctcatcaggacagatgaccagcttgaagttgaggaggtcgtctggatctgagaagctgatatcacacgtcttgggcaggttcagctcgtttatgtccttctggatccgcagctgcgccgccgacgccttcttgctgctgcccttggtgccgcccgccgactcctcctccttcttctgctgcttcagcgagaacagcttgatcatcctnnnnnnnnnnnnnnnnnnnnnnnnnnnnnnnnnnnnnnnnnnnnnnnnnnnnnnnnnnnnnnnnnnnnnnnngtcgcctccgctcctcggacccgcagctgcggcctcctccgctgctgccgccacccgcccggcctgccgcgccgctccgctcctctccgcgcccaccgcgcggcccgcctcgcggacgcgtgggtcgacgatatcccgagaattccggaccggtaccagc

SEQ ID NO: 94478 - DNA, 906 bp, Homo Sapiens
gggacttttgtaacgtactgtcatccctaaggaacgtgtggcggttaggggcgtttgtatgtctgttaataacgcaagctacttcgagctcccattttccctagtttttatcatggctgccacagctagccaagccctttcgcctccattacgtctttagcggctgcgtggtctcttccgggagcagaggcccggatgacgcgtggatccccgcgatctttgggctgggaattctaaacgactgggacttgccggaagccattctgcactaatagcggcaaaaagccttctggttcctggggcgacgcgcccggcggccgtactattcacttccccagaacgccacagcccaggctttcttcttagtgggcttcccagaccaagaagggaaacctttcatccgaaggtactgaggggaggaaggtggcctgaagttatctcagtgccgctttgtttcccaccccagtcggtcagcccttcctcagcgccctttaacccttgcagatcggatggagaaagctgccagcacgttctagggatgggggcagattgaggagcgggagggagtagtctttgtctaactttataccagtaccaaactatgttaatttaatgtagttttataataaatctttaagtcctgtaacttattctcccaagatgtttggcttattctacggcctttgtatttctaggtgaatctgtggaattagcttgttacaaaggggggggattttttatggggctcgcatggaatctatagatctgtttgggaaaacctagtatcttaaacaacaagtcctttcaatccatgaatatcattcttcccccaccatttatttaacgcggtctttaatttctcctggcaatatttgtagatgcacatatatctatatttaatgcagt

SEQ ID NO: 94479 - DNA, 508 bp, Homo Sapiens
  misc_feature (42)..(76): n is a, c, g, or t
aactgacgagcgcagcgagtctgtgagcgaggaagcggccgnnnnnnnnnnnnnnnnnnnnnnnnnnnnnnnnnnncagtcggacggtaccggacatatgcccgggaattcggccattacggccgggaaaaatcttcaccctttcctcaacttatttagctttttgtgtccttgtcttcaacactataaaatagttttaatacaggtggtacagatcctctgatatgtataatatgagctgtattatatggtgacatgagaaaacctgcatggtggcaattcagagccagtactatggtttttagaataagtgaatatatcaaagtttttcatttaatgggagaatctaagagtttgtgtctactggattttccctaattttcggatgtgaatgaagaaagaatgaaatctctatatttttgataaattgtatctgcattaaactaggcctgtccttattcgtccttgtgattagttaaattcaaatcttcggttcttttatgtaagt

SEQ ID NO: 94480 - DNA, 1050 bp, Homo Sapiens
  misc_feature (78)..(112): n is a, c, g, or t
gaatgtatagatcactataggggtagtcgcgaagcgaacgacgagcgcaagcgagtcagtgagcgaggaagcggccgnnnnnnnnnnnnnnnnnnnnnnnnnnnnnnnnnnncagtcgacggtaccggacatatgcccgggaattcggccattacggccgggctgcattgtttttcttataccatacaggtttttcattggccttgactttctgtgttaactcattcttatttgggtttattttcatttgtttctagctgaatattatttgtttcaaactaaaaataacattccacattttaattagatgtgcggactcttaatctacttaaaatgtgggctgaagttccatgattccagctagtctggaataggtcatttaactggatgttaattcacctacattgttccctaagtgacatgtgggtcccattctgctgacatatttgtgggtcctggtaacaaccatttgggtagatttgctgattcctcttttctccttagtggaagagaaagccaatacccacctcctcttgggcatgtgcttagacgcctgtgctcgctaccttctgttctccaagcagccgtcacaggcacaaaggatgtatgacaaaagctctgcagatttctgaagaaatacaaggagaaagacacccacagaccattgtgctgatgagtgacctggctactaccctggatgcacagggccgcctttgatgaggcctatatttatatgcaaacgggcatcagatctggcaagacagataaatcatcctgagctaaacatggtactcagtaatctagctgcagttttgatgcacagagaacgatatacaaagcaaaaggagatctaccaggaagcaatgaagcaagcaaagctggcaaaacgcattgcactctcggtgtccacacatccaggcaagaatttggtgaagcggtcaacgaccagtgaaccttggacaactccggtccacgtcctaaattcactttgggcaggccgacatcatgctaatcacggtcgcacacataccattcattccggacactagc

SEQ ID NO: 94481 - DNA, 730 bp, Homo Sapiens
gagagactacacgttggtctccagtcctagcaagcgtcccattctctccacattcttatcaattgtagcttgacatgttatctccttggcacattccataggaaaccagcctctttctccatctcgtagtcgttccccctcataccagccatcgctgacacgttgatagatgaggacgacgtcagccacctgcagggagagttcatctggcggcttagcagtgaaaggacctaacgatgtccacctgggtcagtgaggttcggtctgcaagcggcttcccgctgctgtggtcccaggccagttatccagcgggctcgctcgctctgcgtctcagctcctagtagcatctccacgttctcattcgcgtggttactaaggactgttcagagtaaagaggtgactggcagagctctgtcttgaatagagcattgtggagctggtcttccctggagaagaattaagctcttcattgtcacaagagtccaccaatagctgatctcttaaggaataatcattgacgttgtaactttcttcactcttcttcttggtgataatgagcacatcgttaaagagaaagaagtagacttgctgtttggatgtccttcttgagaaaagcacagtgtcttcaacataggctgtccattcacctctttttacccaccaccgggaagaggagactaaaggaaaaggctgaattttaaattccagcttgtgaacaactatgtacata

SEQ ID NO: 94482 - DNA, 730 bp, Homo Sapiens
cagtcgacggtaccggacatatgcccgggaattcggccattacggccggggggcgggagcgcgcggcgtcggaggccgcccctctgcggaacgccgagagccccgggagagtgaagggccggggaggacaaggcgccccgggcccaaagcgcgccggctcccgctcgggcggccgcggacatgtgcaggatgtccttcaagaaggaaactccacttgccaatgctgcattctgggcagccaggagaggaaacctggcgctgctgaagctgctgttgaacagcggccgggtggacgtggactgcagagacagcgtacggtggttcggtagatgcatgcccagcatgcaccattgccctctgtgggcacaggagcacctcaggaatacattcccctttacaatgcttatttactttttcatgtgtttgcttgctttatcctttttaaaacatccaaggtactgtggtgaacttaaaaacatgctgggggaagtcagaaagaaaaggaaacaatgaaatgcataaaacagaaggcaaccacaatagggaaagaggcacttcactgggaatcagaattggcagattacaagaagaaaagcctgtttagtgaaagaattcaagccaaccacttccatgaaaagatggagataatttagagcacaagtgggctgccatggatgtgggcgttatgtttcttctacaaggatgagaaaacaaaaattgaagcctcccc

SEQ ID NO: 94483 - DNA, 973 bp, Homo Sapiens
gtacgcgcggattcccgggagtatgtcgacccacgcgtcgatttctaatcagcgagaatatctacctatgttctcaaccaaattagccagttagtattacgggagcctgtagtcttattggaaatctattttatcagtgtgctttattgagtgtggattggcatacattcaaaacattaaccacaaaatacagcaagtgcacctatattcaccatgtaacttatatcccaagtccattttttcctgtacactacaaacaaaagatatattagagactttttgaaaaatgctgaaatactttgcttcagaattggaatgtttatattatgttagaaatcttcaaaggtagcattattaaatagcaacagaataattagaacccacatatctttttttgtgtggatggggaaaatgttttaaaatccagttatttaatatgagtttgagagagaaaattgttttttaaaaatatatgtgcattgaaatgatggcaatgcttatagtatgatcaagtatgaaaggaactttaaattcttatatttacttttctctcagtaaattgttaaattttcactcagcaaaagattggcatttgttaagtgttctatatttagtactaaaatcacagtcatgaaatcatagtcataaaatggtcttcacacagcagtcatccgtgtcatttatcattttgtaatattaaattatggcaattttatttcaaactaaagtttgaacaccggaaagtcattactcagtgatttgtaatttgggacttggattatttatctagagatgtttgtatattttgtcagtaactaatactgcgctgccatcatggtgactgtcatggttctacagaaatgccctccatgtgtccctctaatgttgcatgtttcagtgggttggaagttttgtatatttattgtattaacacagagtgtcataaaataaaatgctgtttacaggaaaaaaa

SEQ ID NO: 94484 - DNA, 996 bp, Homo Sapiens
ggagtcgtctaatgttggggaatagcgcagtcgccgagtctgtgacttggtgatgttggtcgctgggaaggtcgccggaatggtcttacctgtgcaagatatgacttgggccctgggtgagatgccagaaggcagacgtctgttacaagagccttcaagtggtcggcagggggaactttcccgaggagcctgcttgaccttgggaccgaactctctgatgtactgcagccagtgtaatcccgtttagacttcttccttctatagaggacagccagaatcatgctgatgagcagagtgagacctaggaccacagcagtaactatgcccaccactacccaaactggaaacacaggcaaattctctttttctacgacatagagcctaatgtgtccaggctggacaacgatgtcaggagggtttttgacatcacagatataggtgccattgtgtataaactgcatattttctatgttgattgatgcatctttcttgtcaaggtctccagcccagctgattctgtctttaaatggtggataattcccaaggtacacttgcccttgggagtagtggaaaaacgacacagtagtgtcggccccctctggctggaagctccaggagactgaggtcaacccgccagtcgtactagtagacttgaacttgcaggtcagcttcccttgtgtaccatttgccacgaagatttcttttggcgtatatacttccaaggctgatactccagctgtcaagagcccaagcgccgccgccagcaccgaccacagccagcgccggctgtctggggctgcaatcaccgccccggctccggcggacgctgccatcgtccagccactgcagtcgccgccgccgccgccgcgtacctgagcccgggtccccgctgaggttggctcggcttggggaagaggcttctgatctctccgccacccgcgccgggtggcacctccacgccgcgctccccactccggtccaagccgcaggctctca

SEQ ID NO: 94485 - DNA, 684 bp, Homo Sapiens
cagtcgacggtaccggacatatgcccgggaattcggccattacggccggggtgtttgaagtttgtaagttctgctgctttcaaccccacagatgtctcttactgcccacttgggccctggtgattaagcaactagatttggagccagtcaggcttttgtttagacattttaactttttcttgctttccttgcaaactcctcagccttcagactggttggaaagtaaatgtacaatcttacataaattttcaggtaatagcatttcagctttttccccaagattttttgcttgggaggagacagattagactggattcggagtcttgatttggcaaaggtaacaaaagacatgtttttttataagacttttcatcataagtttattttattcaacagaagcaaaatctaatataatggaaaaaataaagatctgtgataaatctgatctgtgtggataaacacaattagaaagatttaaagattaagtattgaaagcaaactaccaaaatattttaatactgattggtaaaaatttcagtacatttttcttcttggcttaattctactgggtcctgtttttcatcaaaagcattctatcatgttagtatacaataagccaaagaagaaaaaagcaaaacaacacaaaaaccgggcaaaggggagaacacacccaaaggcagggag

SEQ ID NO: 94486 - DNA, 633 bp, Homo Sapiens
  misc_feature (500)..(508): n is a, c, g, or t
ctgagtgcaagtgttaataaccttgttatgtacttaagcaatgtgcttatgtctcaaagaaaaccctgtctttgaaactctgcctctggaaagatgcaagctatgtttttgccaataacacatgaataataatagtgaggatatgctgtctcttgcaggggtgaggacctgctaaatataactgtcctcattgaagtgtgtttggactactttggcaagatgggcaagtagcaattgcttataattcagtgggtcaggatatgaagactttggttcaagctcgctgaagacacacagattgctcacagggaacttctaaactctttcttttattgtttctatcctatttactagctgttttttcgtgattctgaaaccactgtaagggacagccacagaattgaattggagggtatgcctttctacgaattgagccatctataaatagcacaggagggaatacttgctatttgtctttgaaccagtgtttacttttattnnnnnnnnnttactgagaaagggaccatgaaccctaactcgaacattacttttgaacatcaagcccactttgccatctaataaaaagtgttaaatcatataaatactctatacatctaaaacaacccacttaat

SEQ ID NO: 94487 - DNA, 1045 bp, Homo Sapiens
  misc_feature (43)..(77): n is a, c, g, or t
  misc_feature (899)..(899): n is a, c, g, or t
taaaaacgacgacgcagcgagtcgtttagcgaggaagcggcgnnnnnnnnnnnnnnnnnnnnnnnnnnnnnnnnnnncagtcgacggtaccggacatatgcccgggaattcggccattacggccggggggcttggcagtggcgggtttagccgtgtgaggatgaaaacccccacagtgcgtggggtccttgacctggatcggcctggggagcccgctggggaagaaagtcctgggcccctccaggaacggtcccctttgctgccacttccggaagatggtcctccccaggtccccgatggtcccccagacctgctgcttgagtcccagtggcaccactattcaggtgaggcttcgagctctgaggaagagcctccatccccagatgataaagagaaccaggccccaaaacggactggcccacatctgcgcttcgagatcagcagtgaggatgggttccagcgttgaggcagagagcttggagggggcgtggagaactctgatcgagaaagtgcaagaggcccgagggcatgcccgactcagacatctctcctttagtggaatgagtggggcgagactcctgggcatccaccatgatgctgtcatcttcctggccgagcagctccccggagcccagcgttgccagcactataagttccgttaccaccagcagggagagggccaggaggagccgcccctgaatccccatggggctgctcgggcagaggtctatctccggaagtgcacctttgacatgttcaacttcctggcctcccagcaccgggtgctccctgagggggccacctgtgatgaggaagaggatgaggtgcagctcaggtcaaccagacgtgccaccagcctgggagctgcccatgtgccatgcgttttcgtcaccttaagnaagacgtccaaagaagctgtgggtgtctacagatcagccatccacgggcgaggcctgttctgtaagcgcatcatcgacgcgggggagatggtcattgagactctggcattgtcatccgttcggtgttgactgacaagcgggagaag

SEQ ID NO: 94488 - DNA, 1313 bp, Homo Sapiens
  misc_feature (41)..(75): n is a, c, g, or t
ccgacaggcggaaggaatcagtatgagcgaggaagcggcgnnnnnnnnnnnnnnnnnnnnnnnnnnnnnnnnnnncagtcgacggtaccggacatatgcccgggaattcggccattacggccggggatagggtttctggctgcgtaggagggacgggggcgcggagctgtgggaaactgcgccaggcgcccgaaaggtgaacacgggagtcgcgcgtctcccccgcagcagcggtaaagcggaagttatgctgcagccggagcccgggcttcctcccggagccgcgtcccggggcccggctgccccgagctgagcggagcatcctttccgggtgaggggaggagaggacttgtgctgcgttcccctcgactgccccgggagccgcagcctgcggtgttcatgccgcggagcagccaggctcctccgacgaaaacctgcatttatttgctggcgggacgtctgccttgaaaatggacaaagacgccgccctccggggtattcctgtatgcctgaccctgagagcgccttttagcttcaagacgtgttggatgctcctgttctccgaattctgatacgcttctgggcataatactgaaacacaaaactgcttttgctctctctgatggtaggccgaaaataggatccttatacgtgcaggtgtcagtcgatatagtcggctttactaacatattgaaatggctctacccaaagacgccatcccctcgctgtacgagtgccagtgcgggatctgcatggaaatcctcgtggagcccgtcaccctcccgatgtaaacaaacgctagtgtaaaacgtgcttccagtcgaccgtcgaaaagggcgagtttatgctgtaccttcatgtcagcagccgggtaatcgtcagtggacctcggtaacatacccgcaggacattctcttcggtcaacgttggacctggtggccaatagtcaaaaccactatcccaggacgtgacgcgcttcgagcgcatggcccaacatccgagaagctggttgcgcgaaagaggaccccgagaaccaacacaacgcccagtaaaaatcataaaaaccatgcatacccaaccgtgttaacaaatgcaacacaagtcacggcacacacacccgacaacacatacacaaaccttacaaccataaagcaacacttaccacaacaagacctactacaacactcatacaacattacgacacactcaatacgacaaatatcaacaccactctgtcaacatctacaacacacatagtaacactcccaattgatgtactatctaatacagaacataataaatacacatacacc

SEQ ID NO: 94489 - DNA, 619 bp, Homo Sapiens
  misc_feature (24)..(24): n is a, c, g, or t
  misc_feature (59)..(59): n is a, c, g, or t
ggacaacttgcaggaagatacagntgattcacagaaagaaaagaatatcagattttctntgtgatgctcccactggaatgacttaatatgccaatctttgaaacaataattgtgctagggaaggggctaaagtgattaacattcccaactaccccaaagtaaggaaagaaatgcaaaacaggcaaaattaacaggtgtgtatgccgggcacggtggctcatgcctgtaatctgttatagcagccctagcctgactaatacattccctctccactgggagccatggtttgttcaaagaaatgataccaggccctcaccccacatgccatggaggtgggttcccctgcatactcttagacacccacatttgctgggagacattttacccatcaataacgaagctgcaaagccctccatcaatcccgtcaagagctcttacctcaatcagatgtgcccagcatcatgaaagcagagaggccttatcctgaattgtcagatggcagtcaaggttgcaaaagcagagacagactaacgatcttacatattacccatgaccacaaatccaggatgacagactggaagaactgaactgaacgtagagagaaaaaagaggacgggtt

SEQ ID NO: 94490 - DNA, 285 bp, Homo Sapiens
gcgggcgcctactactactactatacggctgcgagaagacgacagaagggcgaatgactgaaattacagggcacctaataaaaatgagattgggggatctggaccgagtcaagtcaaaggaagcaaaagaaggaaaaaggagaagccaaagaagggcactagacaaccaaaaaagcaggtatcttcaccctgtgcccagaggaaagaaaaggcattggagaagtcagcttctagagatgtgtctcctttcgttatgagtatgcagaagaataagtgggatgccac

SEQ ID NO: 94491 - DNA, 975 bp, Homo Sapiens
  misc_feature (53)..(53): n is a, c, g, or t
ccagggcgaagacatccactgtgagagagagttactatgcgctaagactgtcntgtccagcatgaccgactcgtgacaggacctttaagctcgtgattatcgaagtgcacggacagcacggcaaagactgaaacgacagagaactgagcacccaccggcattgtgctcagatacagaacttgaatgcagctgagctcatgacttcccttatccatccacgggtctctgctctccagatttggtgaatcgaatcatcaagcaagaacccgttcttgagaactgcagccaagacctccttcagcatcatgcagacctaacctgtacaacaactctcgatctcacggatggcaccatcaccttcaacaacaacctcggaactgggactgaggccaaccaagcctatagtgtccccacaaaaatgggatccaaactggaagacatcctgatggacgacaccctttctcccgtcggtgtcactgatccactcctttcctcagtgtcccccggagcttccaaaacaagcagccggaggagcagtatgagcatggaagagacggagcacacttgttagcgaatcctccctgcactgcattcgcacaaactgcttcctttcttgatccgtagatttaataacttacctgaaggggttttcttgataattttcctttaatatgaaattttgttccatgctttatcaatagcccaggatatatttgattgaggagaatatttgtgaaacagacttgtatattctatttaacaactacagaatgcctccaaagtattgtacaaagtaagtgtgcagtatctgtgaactgaattcaacacagactttagctttcctgagcaagaggattttgcgtcagagaaatgtctgtccatttttattcaggggaaacttgatttgagatttttatgcctgtgacttccttggaaatcaaatgtaaagtttaattgaaagaatgtaaagcaacc

SEQ ID NO: 94492 - DNA, 724 bp, Homo Sapiens
cagtcgacggtaccggacatatgcccgggaattcggccattacggccggggggtttgcctagtatacaactgtaggtattcttaaatagcacacttccaaatgaagacataataatgaattacacaatttacaatgaatttactttgcctaagagcattaaacactgagacacacaagagtggggacttttcacttttgtttaagttaattacagttacagcagatgctctacacaggttaaatgtctaaccaaacaggagagaggagaaaaggccaatgaatccgtcagatttcagcaacactcccaagtcaaggataaaagtaagatcaatattgccatgcaacttatagcccagttcagtccacacttctaagtacttactgctactggacgctcagccaaagatgtaatgctgggaactgaggggacttcaggctcttggagaacagtttgcttttttaaaaaataaatgagatagtacagatagaacacacaaataggagatgaggcaaagagagagttgtaggaagagctaaatgttcctgaaataactaattattcaaaatgggtgcatttaccttgccttcatcgagtaccctggtaggggaagagcctcttgagctgctgttcatcatggtagctgtaccagatcctggatctgttaaagaccagagaactgactgtagacttattctgacttggtgtactctgtgaagaggatt

SEQ ID NO: 94493 - DNA, 974 bp, Homo Sapiens
  misc_feature (21)..(21): n is a, c, g, or t
  misc_feature (27)..(27): n is a, c, g, or t
  misc_feature (48)..(48): n is a, c, g, or t
  misc_feature (57)..(57): n is a, c, g, or t
  misc_feature (88)..(88): n is a, c, g, or t
  misc_feature (164)..(164): n is a, c, g, or t
ccagggccaaagggtggaggnaagtgnccgagccccaaaagtccgcangagctgagntgtgggtccatatcgaatggggtggtggtancagggcctcccatgggggtgctcatgagagggactcctgggaaaggagggggcccctttgggagccatattaaccnttgccttcatcgagtacctgggtaggggaagagcctcttgagctgctgttcatcatggtagctgtaccagatcctggatcagaaggagagggtttcccagatgcctcagctgaccatcgaggatgaggtagaggcccgtccactgatccaaattcacttctaggcatatctcttcgattgagagtagcagagagaggtctcacgggtggctccactgtcaatggaggggagcattctccaccactcacaggggatgggccaaaagagccattctggctcagaggacctctccgtggagggttttgtgtatttggttttcctggcattggttttacaatcacaggttcttcttgcagcattgccatcttttgtgttaattctaataatttgtgtctcaaattggcagcttcccttttctcttcagctatagctctttctgcagcacgagctttgagccagttttcatgagctttcttctcatgggtagcgatctggtttttaaatgaccgctctgtcttctgtaattcatcctccatttcttcaattctccgcttgtaagtttttacttcctctgcagccgaaactgccttttcatctgcagctgacagcctgtgctctctttcttgccgttcatactcttcttgactcagtttcttttgcaaagccatctccttctgctgatagagctcattcagaatctccactttctgcctcaaggttttgcattcatcttccagtccagctttggcagcttgtagtgagttgcggcctcgtgccgaaaacgccacccaggcctcgctacctagaccg

SEQ ID NO: 94494 - DNA, 1075 bp, Homo Sapiens
  misc_feature (80)..(114): n is a, c, g, or t
  misc_feature (1031)..(1031): n is a, c, g, or t
aagactttgaattattatgggcgctagctcgccttagccgaacgacgagcgcagcgagtagtgagcgaggaagcggccgnnnnnnnnnnnnnnnnnnnnnnnnnnnnnnnnnnncagtcgacggtaccggacatatgcccgggaattcggccattacggccgggggccttctttcgaaatgacctggagcagcacgacgagcagtggctactgcagccaagaggactcggactcggagctcgagcagtacttcaccgcgcgaacctcgctagctcgcaggccgcgccgggaccaggacgagcctgtggagtgggagacacctgacctttctcaagctgagattgagcagaagatcaaggagtacaatgcccagatcaacagcaacctcttcatgagcttgaacaaggacggttcttacacaggcttcatcaaggttcagctgaagctggtgcgccctgtctctgtgccctccagcaagaagccaccctccttgcaggatgcccggcggggcccaggacggggcacaagtgtcaggcgccgcacttccttttacctgcccaaggatgctgtcaagcacctgcatgtgctgtcacgcacaagggcacgtgaagtcattgaggccctgctgcgaaaggtcttgggtggtggatgacccccgcaagtttgcactctttgagcgcgctgagcgtcacggccaagtgtacttgcggaagctggtggatgatgagcagcccctgcggctgcgggctcctggcagggcccagtgacaaggccctgagctttgtcctgaaggaaaatgactctggggaggtgaactgggacgccttcagcatgcctgaactacataacttcctacgtatcctgcagcgggaaggaggaggagcacctccgccagatcctgcagaagtactcctattgccgccagaaaagatccaagaaggccctgcacgcctgcccccttgggtgacctcttgtacccccaggtggaaggcagacagcaggcagcgccaagtgcgtgccgtgtgagtttnacagggccagtggggcctgtggaatgagtgtgcatggaggccct

SEQ ID NO: 94495 - DNA, 1153 bp, Homo Sapiens
  misc_feature (41)..(81): n is a, c, g, or t
  misc_feature (85)..(119): n is a, c, g, or t
aagaacttggtattatactataggcgctcctccggtcaatnnnnnnnnnnnnnnnnnnnnnnnnnnnnnnnnnnnnnnnnnccgnnnnnnnnnnnnnnnnnnnnnnnnnnnnnnnnnnncagtcgacggtaccggacatatgcccgggaattcggccattacggccggggagggccgcggagcctgggctgcggctgtcatggacgcctgggtccgcttcagtgctcagagccaagcccgggagcggctgtgtagggccgcccagtatgcttgctctcttcttggccatgcgctgcagaggcatggagccagtcctgagttacagaaacagattcgacaactggagagccacctgagccttggaagaaagcttctacgcctgggtaactcagcagatgcccttgagtcagccaaaagagctgttcacctatcagatgttgtcctgagattctgcatcactgttagtcacctcaatcgagccttgtacttcgcctgtgacaatgtcctgtgggctggaaagtctggactggctccccgtgtggatcaggagaagtgggcccagcgttcattcaggtactatttgttttccctcatcatgaatttgagccgtgatgcttatgagattcgcctactgatggagcaagagtcttctgcttgtagccggcgactgaaaggttctggaggaggagtcccaggaggaacgtgaaactgggggacttggggaaccaggactccaggaggaggtctgccccaacttggctctgaaacttcggctgcaagtcctgctcctggctcgagtcctttagaggtcatcccccacttctgctagacgtggtcagaaatgcctgtgatctcttcattcctctggacaaactagcctctggcgctgtggcctgggatgtggggcttgtggctcgtgttctcatcctgtctattctcaccttaatctatcctggtagaatcaagcctgaccttctgttccgataggggggacctgatgggaatggatttaatcgccagtgcaggctttcgattaaccttggtagggcacatccaattgggggggaaaattcggactagtgaaaaacgaagagtcaaaagggggtcctgggcaaaaaggccagggggacccttcccggaaatgaggtgcgtc

SEQ ID NO: 94496 - DNA, 1046 bp, Homo Sapiens
  misc_feature (81)..(115): n is a, c, g, or t
actttgaattattctatgggcgctagctcgcgcggagccgaacaacgagcgcagcgaagtcagtgagcgaggaagcggcgnnnnnnnnnnnnnnnnnnnnnnnnnnnnnnnnnnncagtcgacggtaccggacatatgcccgggaattcggccattacggccggggccgcccgcggcctggcttcgggcttcagggagctctggtgcagtctccgcctgtcagtgccggcagtcgtccgcggcgcccgccccggtcccgcactggtgcagccatgtcctcttccccgtgggagcctgcgaccctgcgccgggtgttcgtggtgggggttggcatgaccaagtttgtgaagcctggagctgagaattcaagagactaccctgacttggcagaagaagcaggcaagaaggctttagctgatgcacagatcccttattcagcagtggaccaggcatgtgttggctatgttttggtgactctacctgtgggcagagggctatctatcacagtttgggaatgactggaattcctataatcaatgtcaacaataactgtgctactggttctactggctttgtttatggcccgccagctgattcagggtggtgtggcagaatgtgtcttggctcttgggtttgagaagatgagtaagggaagccttggaactaaaattttcagatagaaccattcccactgataagcatgttgacctcctgatcaataagtatggattgtctgctcacccagttgctcctcagatgttgggtatgctggaaaagaacatatggcaaaatatggaaccaaaaaattgaacactttgcaaaaatggctggaaaaatcataaacattcagttaataacccgtattccccagttccaagatgagtacagtttagatgaagtgatgggcatctaaagaagttttgatttttgactatcttacccatgtttgttccactttcagatggtgctgccgcagcaatttggccagtgaagccttgtgcgaagtttggccggaaccaagcctggggcattttgggccggaatgg

SEQ ID NO: 94497 - DNA, 903 bp, Homo Sapiens
  misc_feature (162)..(180): n is a, c, g, or t
  misc_feature (205)..(253): n is a, c, g, or t
cagtcgacggtaccggacatatgcccgggaattcggccattacggccggggtcaaatataaaatatgttatatgagtagaaatcacttaaatttttttgtgttgtgaatttgaaacagtgtaagaaatcacttttaagaaaacatttttagaattcctttgnnnnnnnnnnnnnnnnnnnggaaacaggggtctcactctgttgnnnnnnnnnnnnnnnnnnnnnnnnnnnnnnnnnnnnnnnnnnnnnnnnntggcctaccgagttcaagcgattctggtggcttcagcctcctgagtagctggggactataggcctgtaccgtcatgcctgggctaattttggtattttggtagagacagggtttcaccatgttgcccagtctgttctcaaactcgtgagctaaagctactcgcccaccgggatgtcccaaagtgctagaatcccaggggtgagtcaccagtgctgggccacatttttagtattctaataaaccagtgggtcatcagaactttaaaatggtagcctacagaaacatacaatttggaatttaatcagagtttcagtaaatatttccagaattaatgaagcatgttagcttaaatttttccaaatgtgagagaagtacactttataaaaatcaagaggtcaacgaggttatagttataagggaaaaaacttctgttatcgattaaatcctaaaaatatcagtaccacgcatggaatttatagcaccacctgtgtggttaacatgccagttattttacctttgtgttaaaaccaagtgatttcccatcaaaacaggataatatttttccccttttgaaaaattcaattttaaaaagaaacatttttgaagttttcttatggaagatagaaaaaaagttaagtctctttctaccc

SEQ ID NO: 94498 - DNA, 1345 bp, Homo Sapiens
cagtcgacggtaccggacatatgcccgggaattcggccattacggccggggacagcctcttggaaaggaatctcactaggggcttgactgcgtgggtctgtagcgctttcactgtaagaaagcaagatgcattttagaaactttaactacagttttagctccctgattgcctgtgtggcaaacagtgatatcttcagcgaaagtgaaaccagggccaaatttgagtccctctttaggacgtatgacaaggacatcacctttcagtattttaagagcttcaaacgagtcagaataaacttcagcaaccccttctccgcagcagatgccaggctccagctgcataagactgagtttctgggaaaggaaatgaagttatattttgctcagaccttacacataggaagctcacacctggctccgccaaatccagacaagcagtttctgatctcccctcccgcctctccgccagtgggatggaaacaagtggaagatgcgaccccagtcataaactatgatctcttatatgccatctccaagctggggccaggggaaaagtatgaattgcacgcagcgactgacaccactcccagcgtggtggtccatgtatgtgagagtgatcaagagaaggaggaagaagaggaaatggaaagaatgaggagacctaagccaaaaattatccagaccaggaggccggagtacacgccgatccacctcagctgaactggcacgcgacgaggacgcattccaaatcatactcacgggaggaatcttttactgtggaggtggctggtcacgacttcttcggaggtggcagccgagatcggggtggcagaaatcccagttcatgttgctcagaagagaatcaaggctgtgtccccttgttctaatgctgcacaccagttactgttcatggcacccgggaatgacttgggccaatcactgagtttgtggtgatcgcacaaggacatttgggactgtcttgagaaaacagataatgatagtgttttgaccttgttcttttctggtaagttctgtctgtgccaagggcaggttgatcagtgagctcaggagagagcttcctgtttctaagtggcctgcagggggccactctctactggtaggaagaggtaccaccaggaagccgcctaatgcaaagaagttgtgaaaacagcagcaatgcaatgtggaaattgtagcgtttccctttcttccctcatggtccccaggtttgggcatggaatattacgtgatttacaagactacccttttgtccgattataagttaccccggttggtggttttaacttcttttgggaaagccaggaaaaggctttgggaaaacgta

SEQ ID NO: 94499 - DNA, 1218 bp, Homo Sapiens
cagtcgacggtaccggacatatgcccgggaattcggccattacggccgggggagggacggccgcgcgcgccagctgccaggcggggatcgggcggcgccgagctgaggtggtgagggactagctcccggatgtggagaagctggggagaaggcgtgggaggaagatggactcggtggagaagggggccgccacctccgtctccaacccgcgggggcgaccgtcccggggccggccgccgaagctgcagcgcaactctcgcggcggccagggccgaggtgtggagaagcccccgcacctggcagccctaattctggcccggggaggcagcaaaggcatccccctgaagaacattaagcacctggcgggggtcccgctcattggctgggtcctgcgtgcggccctggattcaggggccttccagagtgtatgggtttcgacagaccatgatgaaattgagaatgtggccaaacaatttggtgcacaagttcatcgaagaagttctgaagtttcaaaagacagctctacctcactagatgccatcatagaatttcttaattatcataatgaggttgacattgtaggaaatattcaagctacttctccatgtttacatcctactgatcttcaaaaagttgcagaaatgattcgagaagaaggatatgattctgttttctctgttgtgagacgccatcagtttcgatggagtgaaattcagaaaggagttcgtgaagtgaccgaacctctgaattaaatccagctaaacggcctcgtcgacaagactgggatggagaattatatgaaaatggctcatttattttggctaaagacattggatagagatggggtacttgcaggggggaaaaatggcatactacgaaatgcgagctgaacataatgtgggaattaaatggggataattgatttgccctattgccgaaccaaagagtattaaagaatattggctatttttggcaaagaaaaacttaagggaaataaaacttttttgggttgccaaaatataatgggaagtcctcccaccaattgccccccctttttttgtcttccgggggaaccccaaaagagaaatcaatttcctttatgggtgggaagaaaaagtgccttattggggcaatagggcttttatttaaaacaaaaacctggctacattcgagggtaggggggtttatttcttgcaacaagggccctgtgtatacaaa

SEQ ID NO: 94500 - DNA, 972 bp, Homo Sapiens
  misc_feature (77)..(107): n is a, c, g, or t
  misc_feature (225)..(267): n is a, c, g, or t
agaccgtttttaatctctatgggctactcttaatcgacgacgagcgcagcgagtagtgagcgaggaagcggcgcatnnnnnnnnnnnnnnnnnnnnnnnnnnnnnnncagtcgacggtaccggacatatgcccgggaattcggccattacggccggggtgcagaagagatggtcaaaaacaaattggaaggaaaggataaactgaccccttgggaacaatttttnnnnnnnnnnnnnnnnnnnnnnnnnnnnnnnnnnnnnnnnnnngctcttgctgaagaggccagtgaagaggaacttccctctgatgttgatttgaatgacccatactttgctgaagaagttaaacaaataggtataataaaaaatcggtaaaatctgcaaaagatggcacatctccagaagaagaaattgaaatagaaagacaaaaggctgaaatggctttgcttatgatggatgaggacgaggacagtaagaaacacttcaattacaacaagattgtggagcaccagaatctgagcaaaaagaagaaaaagcagctcatgaaaaagaaggaattaatagaggatgactttgaggtaaatgttaacgatgcacggtttcaggcaatgtacacttcccacttgttcaatttggacccctcagatcccaatttcaagaaaacaaaagctatggaaaaaatccttgaggagaaggcccggcaaagagaacgaaaagaacaagaacttactcaggcaataaaagaaaaaagagagtgagattcgaaaaggaatcacaaaggaagtccatttgatcctgctttgtcaatgtttgattaaatctattaaaaaccaaaaacagagcagtttcaagcaagaaaaaaagcaaaaagtcaaataactggattgttacttatttttgaactgaatacttctttccaaaatgtcaacatagtgggagggcattttattgggacaagtatcttcagaactg

SEQ ID NO: 94501 - DNA, 971 bp, Homo Sapiens
  misc_feature (27)..(27): n is a, c, g, or t
  misc_feature (72)..(103): n is a, c, g, or t
  misc_feature (107)..(141): n is a, c, g, or t
tttgcaaaaaaacatacactataggcnggcggctaagccgtccgttttttttatgtcccgaaaaactgtaannnnnnnnnnnnnnnnnnnnnnnnnnnnnnnnccgnnnnnnnnnnnnnnnnnnnnnnnnnnnnnnnnnnncagtcgacggtaccggacatatgcccgggaattcggccattacggccgggcttactgggcttggatattgaggaccagacgctgccaaatctaggacaagacagaccatcaaagcagacttttgtgggctcctctttggggtgaccactgctttcaaagccatctgccaaggctctccagggcaggacctgactggtggggaatgagtgttcagaagccttgggagaggccaaagagccattctagcatgatctgagaaaaccttcctgcagaggccagaaaccttgagcttaggtgcctggggaccagcttcgacattctctccagtttctgattctaatttttgccacgtgtcacaacttttccagtctctgagaaggtcccagcctttctcaaatattctgattttgaaaatatgtatccaaagtgggaggcccctgtgacattttgccaacttaaatgagaaaaagaccccgcggagccgggacactccccgctttcgtccagacacccagcattcaggccacatgcgtccagatggctgcccagtaaagccctgtgccgttatagagcgcacctgaatactgaccaaagatcccctttcccatcgtgcctctcaggagataggaggactatgacctaaaggaagcattctgtcgacacgatgttccctttactgggggaacaacgtcggagccacgttatggcagggaagctcacaattaggtatgcccctgactcgattgctagaactctgcagcaaggggcaagttacacggttccctggacgtcctcacttcccattaagagtagattcaagccaacacctc

SEQ ID NO: 94502 - DNA, 571 bp, Homo Sapiens
ctcctgttccagtgcttccaggggatccacgttcagaagctgactctgcaggcaagaccgacgttattttcctggtggctgtgttcaaaaccacccaaagagactggtgaactagagaatgctgagtctggaggagacggaggcaggagaggagggaagcaggataacgttgcctggtggaggcggatgcagaaggggggacttcccctgggatgacgaggatttccgcagtctggcccttttgggggcaggcgttgccatgggatttttctacctctattttcgagatcctggaagagaaatcacgtggaagcactttgtacagtattacctggccagaggtctggtggaccggctggaagtcgtgaacaaacaatctgtgcgtgttattcctgcccctgggacctcttctgaagtgaggggtgaatttaaggctgagtattgcagacataagtttatttcgtgtaaaaatgtagttttctatttttttcagtaaaatactcccttagtatccatcagctactcgtaatgtgtttttctcattgggcttgtttcaataacaaggcttcag

SEQ ID NO: 94503 - DNA, 941 bp, Homo Sapiens
  misc_feature (82)..(116): n is a, c, g, or t
agacctttgatatctatgggcgctagctcgttgtagccgaacgacgagcgcagcgaagtcatgtgagcgaggaagcggccgnnnnnnnnnnnnnnnnnnnnnnnnnnnnnnnnnnncagtcgacggtaccggacatatgcccgggaattcggccattacggccgggggactacagaggctggacgtaagcttagcggtggcgcgcgtgcgcagcgccggcccgagttgccaaaacaaaggggatttggtgatggaggctttgttagaaggaatacaaaatcgagggcatggtgggggatttttgacatcttgtgaagcagaactacaggagctcatgaaacagattgacataatggtggctcataaaaaatctgaatgggaaggacgtacacatgctctagaaacttgcttgaaaatccgtgaacaggaacttaagagtcttaggagtcagttggatgtgacacataaggaggttggaatgttgcatcagcaggtagaagaacatgaaaaaatcaagcaagagatgaccatggaatataagcaggagttgaagaaactacatgaagaattatgcatactgaagagaagctatgaaaagcttcagaaaaagcaaatgagggaattcagaggaaataccaaaaatcacagggaagatcggtctgaaattgagaggttaactgcaaaaatagaggaattccgtcagaaatcgctggactgggagaagcaacgcttgatttatcagcaaacaggtatcttcactggaggcacaaaggaaggctctggctgaacaaatcagagataattcaggctcagcttgtcaatccggaacagaaattagagtctgtggacttttctagccaatcagaaattcaaacacttaagcagtaaactggagcgggctatgacactatctgtgccatgagttggaaatagagcgctca

SEQ ID NO: 94504 - DNA, 319 bp, Homo Sapiens
cctaaagactcttaagtccctggttcacgggattttcaagcaaagttcctagagcatgtgtacgtcccttccccattcagattttttatgagccaccattatgtcaatctgtttcatgagctcctgtagttctgcttcacaagatgtcaaaaatcccctataaagaagaacagatcattaaaaaaacagaagatatgttcaagtggcttttcatctttttcatgtaaaaatatagcagatgtaaatctacctgaagtaaataattaaatgacattaatgtaaattaataaattaccagaagcaaagaataggattgctg

SEQ ID NO: 94505 - DNA, 1192 bp, Homo Sapiens
  misc_feature (918)..(918): n is a, c, g, or t
  misc_feature (927)..(927): n is a, c, g, or t
  misc_feature (985)..(985): n is a, c, g, or t
  misc_feature (1030)..(1031): n is a, c, g, or t
  misc_feature (1038)..(1038): n is a, c, g, or t
  misc_feature (1044)..(1044): n is a, c, g, or t
cgtgggtgccatggcaacggagagagacggcaacctgggttccggaagccggagagctggagctttgaagccaccccggtcaaaggatgctgagtccggagcgcctagccctaccggactacgagtatctggctcagcgacatgtcctcacctacatggaggatgcagtgtgccagctgctagaaaacagggaagatattagccaatatggaattgccaggttcttcactgaatattttaacagtgtatgccagggaacacacattctctttcgagaattcagcttcgtccaagccaccccccacaatagggtatcatttttacgggccttctggagatgcttccgaactgtgggcaaaaatggcgatttgctgaccatgaaagaatatcactgtttgctgcaattactgtgtcctgatttcccgctggagctcactcagaaagcagccaggattgtgctcatggacgatgccatggactgcttgatgtctttttcagatttcctctttgccttccagatccagttttactactcagaattcctggacagtgtggctgccatctatgaggacctgctgtcaggcaagaaccccaacacagtgattgtgccgacgtcgtccagtgggcagcaccgccaacgacctgccttgggcggggccggcacgctggagggcgtggaggcgtcgctgttctaccagtgtctggaaaacctgtgtgatcggcacaagtacagctgcccacccccagcacttgtcaaagaggccctcagcaatgttcagagactgaccttctatggattcctcatggctctctcaaagcaccgtggaatcaaccaagccctcggagctttgccctgacaagggggatctgatgcacgacccagcaatggatgaagagctggaacggctgctggcccangtcccaggncctggtcaactcggtcacagccaagtcagaggccagttgcctgccttccccgaccccntccccggggttggctctcccctggagacctctccatccattcccnnaaaatgnatgganaaaagtgatggctccacctgaaaagacagaccagtcggagacttgaaggagcccaaggggtcctggccacaggcgccctggacctgctcccaaccaagcccctgggggtggcccaccaaacctccttttccagaaaccttgctgtgga

SEQ ID NO: 94506 - DNA, 1586 bp, Homo Sapiens
cagtcgacggtaccggacatatgcccgggaattcggccattacggccgggggaggagagccgggaatggaggtcgtggcgtgaggggcgccgagcgaggggaggcgcgggccacgggagttccggcgttgcccggcaggtccgctagtcctcggcgggaaggctgtcccggcgcctcaggcagctctgcgtgggccggggtgacttcctcgcgatcccctgcgcgaggtgaagggcagggacctttgccgcgccttccacgcgccgtgtccccagcggcgatgtggctccatcttcctcagacttatcgctcgcggacaggccgccgtgagtctcccgggcctccgtaccgtcctccttcccagcggctccgggaagcggttccctgtcttcggacgcatttcacccgcgcggggagagcttcccgggaaggttccacggctggccgagggtttccggcgcccgggacgcgtttcggctgaggccgtgggtccagtccacgggttctggcccgcacggtccaatggccggggaggcggacgacatgcacctgcgagatccccaatgtgtacccagaaggaggatgatgaacagtcgtggatgccatgctggatgaactgtgcactcgtgtagcgcaggcggaggacttgcaaccttcgagatcccctgtggtttacccagctggaggagtgatgaacagtcgtgggtgcccagctaggtggatgtgactccagtcagcagagcagaagccaggagaggttttggtcttgatggtttgtgtagagtggaggatgagagagcccatcctgagcatctaaagagctacagagtcatccagcaccaggacactcatagtgaggggaaaccaagaaggcacactgagcatggggcagccttcccacctggttccagttgtgggcaacagcaagaagtccatgtggcagagaagctgttcaaatgcagtgactgtgggaaggtgttcttaaaggcctttgccctccttgaccatctgataacgcattctgaagagagacccttcagatgcccaacaggcagaagtgctttcaagaagtcagctcatattaacccccgaaaaattcacactggagaaacagcccatgtgtgtaatgaatgtgggaaggccctcagttacccgtctaagctgaggaaacaccagaaggttcacacaggcataaaaccttttaagtgtagtgactgtggtaaaacccttcaaccgcaaagacgcacttgttctacaccaaaggattcacacttggagaaagggccttacgagtgcaccaaatgtgggaaaaaccttcaggggtctgtctaccctcctttcggaaccgggaaagtgcaccattggagaaaggcccctatgagtgtggcagaagggggggaaattctttaaataaaataattagctttattccttccccagaagagtttctcccttggagaaagggcctttttaatggcaaaccaatgggggggaaagggtttcggggcccccgttccgggccttcctttcaccacctgggaaagtcccccccgggggggaaacggcccctttttaattggtttccc

SEQ ID NO: 94507 - DNA, 1042 bp, Homo Sapiens
  misc_feature (84)..(114): n is a, c, g, or t
aaaacggtgttaatattctatggcgctgctgcttctcgaccgacgagcgcagcgagtagttgattgcgaaggaagcggcgcatnnnnnnnnnnnnnnnnnnnnnnnnnnnnnnncagtcgacggtacggacatatgcccgggaattcggccattacggccggggtgaattggatgcattggcaagcctggaaaaccatgtgaaaactgaacctgcagatatgaatgaaagctgcaaacagtcagggctcagcagccttgttaatggaaagtccccaattcgaagcctcatgcacaggtcggcaaggattggaggagatggcaacaataaagatgatgacccaaatgaagactggtgtgctgtctgccaaaacggaggagatctcttgtgctgcgaaaaatgtccaaaggtctttcatctaacttgtcatgttccaacactacttagctttccaaggtaccagtgaaataattgatttttggtgttgattttcataagctaaaaataaataacagaagaatgttcagggcagatggccttctaaccagtgcatagtatttctataaaacagggagcctgttattcttttggtatttagcttccagagaaactaacaataaaatatctaagatctaagtagtacattaatgttaaagagtagatttcatctcctggcctttagtttatattcagtataaggaaaatagataaaactctaaattaataggggggctaaggttacaaaacctgcagtctggttctaattctgtaggtaagctggagcaattcactaattatcagggatcaagtgttttgcatctacaagtggtaggttttggtttagcagagctgtagttcttcccttccatttattattttatgttcatgcaacctcttgtctcttgatttcagagaccataaaatagtagagtcatacttgtttttttcagtcttctccttcctctcttgtcccccaatttctttttggtgaaagtaagtcagtattcttggggtaaacccagcttttttcttgctataaattg

SEQ ID NO: 94508 - DNA, 809 bp, Homo Sapiens
  misc_feature (713)..(747): n is a, c, g, or t
tcacatcagcacttaattaatagtcaatccacaaacaagagacaaaaatatacaagagattaagaactgactgatacatcctttatctttttttaactaatgcataagtgcagaataagatactctagtttaaatatcttggtttacaatgtacatttttgttctagttacgcaacagtaaatcccatgcttcacatagaaaagcaatccacaacattaagaaaaaatgtacaatttatgaaacaaagtaaataaatattagtattacagaatcagagctgtacataaaagctgttcagttttaatcatataaaaatatgttttagtgcaacctcacatatatattgatgctgttttgctttacatcatttagatccaagtgtccaaaaaaggaaagaaattacatttattacaaagcagatacacaaattctaaaatatgtacaaattactgctaaaaaatgcttataagaatataagcaaagtaaagaaaaggcacaaacatctgtacattttaaaagtaccagacccataggttaatttcaaattttgttttggtcaggctcatgatgacttgttaatttacctaattcttttgatataacaaagtatatataatagcaaactactgtaacttaggacaggcatgctataaactggattcccggccgtaatggccgaattcccgggcatatgtccggtaccgtcgactgnnnnnnnnnnnnnnnnnnnnnnnnnnnnnnnnnnncgccgcttcctcgctcactactcgctgcgctcgtcgttcgaagagcgcgcagccccatgatg

SEQ ID NO: 94509 - DNA, 616 bp, Homo Sapiens
cagtcgacggtaccggacatatgcccgggaattcggccattacggccggggcaactggtattaagtgttaataatggactatgtagaaattttatctacatttaaatcctaggatctacacctcataaagttattgaattattacccccactttacagatggaaaactgaatattaatggcagcgattcaaatctacacaatctagatgaaaagttctagaacaacattgccactgactgattaaaaagtcaactgaaggaaaagccagtgagaaacaaggcaatcaattactgtacagtatttagctttggatatgttaattctgagatccctattagacctccaagatattaaaagggagaaatttgggagagatatggggactggagatacaaatgggagagtcaggtacttaaagccactggacttaacagaggagaatacacagggagtggctactaataaagacgtcgtaggactgactgagccctgggagccttccaacatttagaggtagggacgacaaggaagaatgggggttgaggggaatagccagtgaaggaaaagagacaagaaaatagtatgaagaaaactaatgggtccaggcacagtgca

SEQ ID NO: 94510 - DNA, 727 bp, Homo Sapiens
gggaaaagacaggaggatttacaaagagtgggtgtttaattggggatggaattaggtagttattctgatttttagatttttcatatcttttatttggtccaatgaagcagaaaatttaaatgaagttattacctttgcctgatttttgacacacctcaaactataacttgaggttgctaactatgaaacactggcatttaatgatttaaagtaaagaattctgtaatttgtagacttctgagaagttccagaaaataaatcagatggtatgtaacagcgaccgtgtgctcaaaagaagtgctgaaggaagcaaccctcctaaaccactgaaaaaactacgctttgatattgaaggatcagatgaagcagatggaagtaaacatctcccaggagagtccaagatttcagcagaaactggcagaaatgacttctactcgaacacgaatgcaaaagcacgaaaatgaatgatagcatggatacctcaaagcaaggaagagaaatgaggatctcaggaccttggtggacactgtgtacacctctggattcattgtctctcacagatgtgactgtataactttcccaggttctgtttatggccacatttaatatcttcagctcttttgtggatataaaatgtgcagatgcaattgttagggtgattcctaagccacttgaaatgttagtcattgttatttatacaagattgaaaaatcttgtgtaaatcctg

SEQ ID NO: 94511 - DNA, 427 bp, Homo Sapiens
cagtcgacggtaccggacatatgcccgggaattcggccattacggccggggagccgccgccgccatggctacaaaagaccccacagctgtagagagagcaaacttgttaaacatggctaaactgagtatcaaaggactcattgaatctgctctgagctttggccgcaccttggattctgactatccccccttgcagcaattctttgttgttatggaacattgcctgaaacacggtcttaaagtaagaaaatcatttttgagttacaacaaaaccatctggggccctttggaactgatgggagaagctgtacccccgaagcagaaggaaataggagctagtgtccggggatctacctgggtctgaaagaacccccctctggggtccgaagcaaagaagcgtgggctttccaattaaccccctcatggc

SEQ ID NO: 94512 - DNA, 628 bp, Homo Sapiens
cagtcgacggtaccggacatatgcccgggaattcggccattacggccggggaagcaaatttgaaattatacacacacatcagacaaaaaggaaaatcgggttctacatcagcaatctgtcttaacttcagcatcacacaactacctatgaagaagacagaacaagaattcagttcttctggtctgtacttctcagaaatgtataaacaatttttatcaacattaaaactgtcctagcaaaaccaaacaatcactatcttttcacacagctgacactttcccaccatttgccatctcatcgctggagggcacagaaaaacgacactcaaaatgcttgtgcttttgaggctctgctatatacactaagtgaactactggcttccagttgggaatggagggctgaggacaccctaattcagtgcttccgcagctagcactcttcagccttccctgcgttccccttacctgagctgggggatgaagagcagggtgacagtgggagtaagtacagaattcctcaagccttggtagccttagagaaatgctctgggcttatactgaggctcatctaccctaaaggccatctctcaggaaaacagagctgttgtatcataaagcttttcaggggg

SEQ ID NO: 94513 - DNA, 878 bp, Homo Sapiens
cagtcgacggtaccggacatatgcccgggaattcggccattacggccgggctgagagtgtgacttttcaaggcgaatgatggggaagggttccccagtccccacagtggccccacctctgggccctgcaccagagcccttctgtgtcacggcgggctgtgcacccatgcacacacctacgcacacacaacactccgcactgcagtatattcttgccaaagatttcctttaaaagcaagcacttttactaattattattttgtaaatgtttatcttcttctgtcttctccctccctgaatctattttactgttgtttattgttgaatctgtgtgtcagccaggagagcgctgtctggccttgaacatgggctgggatgggaaagggtctgggagaagatgggcaacaaagagccagggagtcatggacatcgcagcgacgcagaccccagcaggttcagtcccgtggctgccaccagctgtccagctgggtgtctggagggaagagggcagaggagggtcatgtcccttcagctgggggaggggcccagtgagctccacgtggctttttcccaaagggagcaagagggaaggattgggcgagaaaacaatggagaggggacctgcgaaggaaaacagggaggaacgtgagcggtttgatcagcctgctatcacggtgttctggctctcttatttagccaggcgcttaagggaccagatacatcacatcctaagtttgggaaaggcctttgacccatgtcatcctgagcgtctcctccaagtagctctgaaaaggctgtggaaaccaattgggcaggattccttctcccctggtttggaggatcccgggtcttctgaaactggccggaaagggaatggga

SEQ ID NO: 94514 - DNA, 830 bp, Homo Sapiens
cagtcgacggtaccggacatatgcccgggaattcggccattacggccggggacattcagaaatatattccatgctatcagctttttagcttttataattcttcaggcgaagtaaatgagcaagcactgaagaaaatattatcaaatgtcaaaaagaatgtggtaggttggtacaaattccgtcgtcattcagatcagatcatgacgtttagagagaggctgcttcacaaaaacttgcaggagcatttttcaaaccaagaccttgtttttctgctattaacaccaagtataataacagaaagctgctctactcatcgactggaacattccttatataaacctcaaaaaggactttttcacagggtacctttagtggttgccaatctgggcatgtctgaacaactgggttataaaactgtatcaggttcctgtatgtccactggttttagccgagcagtacaaacacacagctctaaattttttgaagaagatggatccttaaaggaggtacataagataaatgaaatgtatgcttcattacaagaggaacttaaagagtatatgcaaaaaagtggaagacagtgaacaagcagtagataaactagtaaaggatgtaaacagattaaaacgagaaattgcgaacaggagaggagcacagattcaggcagcaagagagaagaacatccaaaaaagaccctcaggagaacatttttctcttgtcaggcattaacggacccttttttccaaattctggaatttcttcattcatgtggttatgtcctttacaaaaatagaccatgtctctaaaaggtagctgtaacttcaaacaaa

SEQ ID NO: 94515 - DNA, 804 bp, Homo Sapiens
cagtcgacggtaccggacatatgcccgggaattcggccattacggccgggggcatatgagtctttaattttgatggagtctaatttatctattgttttcttttgtcacatatttttggtggtatagctgagaaatcattgcccaacccaaggtcaaactatttattctgttttatagtttagctcttacatttaggtctttgatccattttgagatcattttttatatggtgtgaagtaacgttctaatttcattcttttgcattcattcatttgtcccagcaccagttgctgaaaaaactattcattctcctgtttctttgtcttggaacccttttcaaaaatcaatttaatataagaatgtatttatggacgttcctttctggttcaatgtgatttatgtgtgtatcttatgccagtatcacacttgtgttggatggctacaattttatagtaacttttgaaattaggaagtggtgagttttccaactttattttacttttcaagactattttggctcttctggggtccttgcaattaaaaaataaattttagaatcaatttatcagcttctgggattttgatagagattacattaaatctaaaggtcaatctggggaatattgccatcttcacaatataaaatctttggttccatgcggtctcttcatttttcaatatcttctttaatttttttgaacaatgatttacagttttcagtgtagaagtcttacactttccttgttaaatttattcctaactatggtagtttgggatgcaattttaaataaaattgttaatatt

SEQ ID NO: 94516 - DNA, 911 bp, Homo Sapiens
cagtcgacggtaccggacatatgcccgggaattcggccattacggccgggggtgtatgatgcctgttactagcattcacatggaacaaattgctgccgtgggaggatgacaaagaagcatgagtcaccctgctggataaacttagacttcaggctttatcatttttcaatctgttaatcataatctggtcactgggatgttcaaccttaaactaagttttgaaagtaaggttatttaaaagatttatcagtagtatcctaaatgcaaacattttcatttaaatgtcaagcccatgtttgtttttatcattaacagaaaatatattcatgtcattcttaattgcaggttttggcttgttcattataatgttcataaacacctttgattcaactgttagaaatgtgggctaaacacaaatttctataatatttttgtagttaaaaattagaaggactactaacctccagttatatcatggattgtctggcaacgttttttaaaagatttagaaactggtactttcccccaggtaacgattttctgttcaggcaacttcagtttaaaattaatacttttatttgactcttaaagggaaactgaaaggctatgaagctgaatttttttaatgaaatatttcttaacagttagcaggggtaaataacatctgacagcttaatgagatatttttttccatacacagataaaaagatttaatcaaacaaatttcatatcttgaaatgaaagtcccaaagtctaagttcaagttcaatagctttagccacataataacggtggtgcgagcagagaatctacctttcccacttcctaggcctgtttctcctccataaaatggggactatactttacacaggtgtgggaaggctaatgagaatagagattttcgctagatt

SEQ ID NO: 94517 - DNA, 942 bp, Homo Sapiens
  misc_feature (179)..(213): n is a, c, g, or t
  misc_feature (237)..(277): n is a, c, g, or t
  misc_feature (368)..(505): n is a, c, g, or t
ggtccggaattcccgggatatcgtcgacccacgcgtccggtttttccactaattttcttctgttctaggatataatccaagatacaacattgcatttagctgggcatcatttttatgccattctttatctcctgtctctacatggccaccaagttctggcatttctacatcctaaatcnnnnnnnnnnnnnnnnnnnnnnnnnnnnnnnnnnncagagacagggtcttgctccgtcnnnnnnnnnnnnnnnnnnnnnnnnnnnnnnnnnnnnnnnnngtaagttcacttgaactcctgggctcgagtgaacctcttaccccagcctcccaactagctgggactggaggggtgcaccactgcacccagnnnnnnnnnnnnnnnnnnnnnnnnnnnnnnnnnnnnnnnnnnnnnnnnnnnnnnnnnnnnnnnnnnnnnnnnnnnnnnnnnnnnnnnnnnnnnnnnnnnnnnnnnnnnnnnnnnnnnnnnnnnnnnnnnnnnnnnnnncctaatctttataaatctccatccccattactctggttcaccccctatcgtttcttagactatttaacagcctcctaacttcactctacttttaatctcttccctctccaggtctttctccatattttaaaaaactagtttcaccatccattcctctctgcccttaaaactttctgggggttttccatggcttaagagaataaagcccaattctttgatttgacatgctaggcattccataaatcctctccgaacctaactcccccacttccttttccctcctttacaccctcataaagcctgtggttcccacctaacagcagcagcgcatagccgctgtcagtgcgagagcgacgttgtcgagaatggaagccatgctcctgcaagtcgctatatcacccccacaccctgtaagcgggcgggggcggtcctcatat

SEQ ID NO: 94518 - DNA, 1143 bp, Homo Sapiens
  misc_feature (716)..(739): n is a, c, g, or t
  misc_feature (950)..(966): n is a, c, g, or t
cagtcgacggtaccggacatatgcccgggaattcggccattacggccggggagtccctttggaaacttctgcaggggaaaagagctaggaaagagctgcaaagcagtgtgggctttttcccttttttgctccttttcattacccctcctccgttttcacccttctccggacttcgcgtagaacctgcgaatttcgaagaggaggtggcaaagtgggagaaaagaggtgttagggtttgggggtttatgtgtgttagtgtgttgggtaaatttcttgatttcaacattttctcccaccctctcggctgcagccaacgcctcttacctgttctgcggcgccgcgcaccgctggcagctgagggttagaaagcggggtgtattttagattttaagcaaaaattttaaagataaatccatttttctctcccacccccaacgccatctccactgcatccgatctcattatttcggtggttgcttgggggtgaacaattttgtggctttttttcccctataattctgacccgctcaggcttgagggtttctccggcctccgctcactgcgtgcacctggcgctgccctgcttcccccaacctgttgcaaggctttaattcttgcaactgggacctgctcgcaggcaccccagccctccacctctctctacatttttgcaagtgtctgggggagggcacctgctctacctgccagaaattttnnnnnnnnnnnnnnnnnnnnnnnntctccgggggccctcttggcccctttatccctgcactctcgctctcctgccccacccccgaggtaaaggggggcgactaagagaagatggtgttgctcaccgcgggtcctcctgctgctggccgcctatgcgggggccgggccaaagccctgggctcccttcctgcactggcgagcccctgcgaaccaaaaaagcccctcctccatggtgnnnnnnnnnnnnnnnnntggggcttgccgaccttggtccaaagaaaccccgggcctgccggcttggctgccatgtgacctgcgcccccttggccccgagggggcacatttccgtggcggggggtctctaacacccggaagggcttgtgcccccccagggggggctgtggcgccttccccttctccccccgcggg

SEQ ID NO: 94519 - DNA, 903 bp, Homo Sapiens
  misc_feature (423)..(434): n is a, c, g, or t
gatcagttcttatgatagctagatgcatgatcactagagattatgtaataaaatgggttaaatttcgagccacatcttgcaggtccagcctggtcaaagatctgcccaatacgagattttggttggtaccaattcctagatagcgtaatattttagcttggatattgtgactatagtaatggaaatacatttggaactacattatgcatattactcaatgtgagaaaaatatgtttgtatgttaaatcagataatgtttctacctaaaatttaaagtaggtaggtatgataattagcattataaatatgaaacaaccacctttaggcagattagtgtagtgtagagaggcaaagaaaccctaattttaacacaccatttagtatgcataacaaatgtggcaggttgtaaagttttatcctttnnnnnnnnnnnntctatcattcagttatctgttccaagaactctgacattgggaccaccaatcttttaagaaaaatgtaactcttcacatgctatttgacaaaaaccctcaaaagttatccaaatcaatgcatgttcggttccgtgttttagcgcacacctttgccaactagattacatttttatggttggtatttctgaacacctcaatccacacaaagtgcaaaataaaaatgctaaaattctacagtattttagtactattctgatttgtatagtttttttaaccaaatattggagttaccataatattacctcagttcatgtagaatgaaaactactccctaaatccctgaaactccaacttaaattttgtttcagagtaataccacaaaaattttcaaaaattttgctaaaaagagcctgtcacatttgctacagcataaaaataaccccagtcaataacaagtatttaagggctc

SEQ ID NO: 94520 - DNA, 512 bp, Homo Sapiens
aaccttaaaacacctttaatgaacagtgactgggcatgtgacacttaataaaactgggctcagttcagtttctgcttgacaggctaccagccgagaatgtgccttacgagtaaatgattaagaggcggagatctttcctgggctctactattaaacacttcaaaggtttccaaagtcagataaaatgaaaagcaaatgtgtttcactgcctctcaaatgcctcaaatgttatagcaggtgcaagcaatgaaaccttctatggtgacagcattttagggtttgcaaagtgcacccgactgaattctgggaattctgggctggcttcataaaaattcatgatttccaacgaggggcgatgatcgtcttcagagcccatctacatatgtggcacagaaggaaaatatcacagggtcctttaggtcatgagtcggcttaaccctttttgttctggaagagaccccagccggcatggtcagccttgtgcggcaaaaagcgggcaaatctcgagtcag

SEQ ID NO: 94521 - DNA, 432 bp, Homo Sapiens
aaagcccatgcgggctgctgagaggcggacagggactccttcaacatggcacatgagcaggcacccatgtggcttcaaccctgacagacccatctgtgtagccaagaaactgctctcagccctgtccccaaatgaccttactttcagaaagaatgtgtaaaaccctgcccagagctcccctagggctaagctataagggattgtccttctccctaaaatgctcatttggcccaggctgaggtctgtgactccagttggctacacagtgccagaaaggaatctgtcatctcaggaaagcccctcaaagatggcgaggcatatttgatgactgtggttacagggcaagaggccaccctgcagcccccacccctgacttgctggaacttgtgactgtcaaagctccattaataaattacatgcacctggaaaaaa

SEQ ID NO: 94522 - DNA, 437 bp, Homo Sapiens
  misc_feature (129)..(207): n is a, c, g, or t
cctattctcctgcctcaatagcatattacatttacttagtttctattgtatataatcatccactgccctcagccccatctgccagttcttgctctgcaaaagccacactgttgaggccgtgaaagtatnnnnnnnnnnnnnnnnnnnnnnnnnnnnnnnnnnnnnnnnnnnnnnnnnnnnnnnnnnnnnnnnnnnnnnnnnnnnnnnagttttctgagatttgcaacaatttgaaaaaatctgcagatgaactgtatggcctaaaaatatttcctgcctccccttccacctcttctgcttctgccactcctgagacagcaagaccagcccttcctcttccttctcctcctcagcctattcaacatgaagataatgaggataaagacctttataattaccacttttgcttaataaatagtaaatatatttctcttaaa

SEQ ID NO: 94523 - DNA, 539 bp, Homo Sapiens
tgggagagactccctaggatgcaccgagggtccctccctggccccacccacagaaacacaggcctgaccactgctagtgcccccacccctctaacaccctgatgagcaggaaccatgcaggaggggctgggtgtggctgggccctgttctctcccccgacaccttctcagagaggagctggagccccagaccctgggagcctcacagatattcccaacacaggacctggttttccatttcccaaaatgatgcttcctccaaagatggccagtgactctctgtgccaagcatctgagaaactctccaggtcctagggctgccaggcagtcagctgtgcacatgttggagcccaaatcccatcaatagtgaggccctgggtaaaacacatccccacttttaattatgaggagatgcctggcctcagcattgagaacaccaacttccctcaagtgaaaacttatttaatctcttagaaatgatggagcacaccagcctgaacaacatggtgaaaccctgtctgtaataaaaacacaaaaatt

SEQ ID NO: 94524 - DNA, 526 bp, Homo Sapiens
  misc_feature (260)..(260): n is a, c, g, or t
  misc_feature (331)..(331): n is a, c, g, or t
cgcagtggtactgaggattgagttacagtacgcagcacaaggggctcagtaaaccccacacctctcccctttgatagtataggccatgagtgggaaaaagtcattcgcggaacatcctttatatcaactgcctcaatacgaacgtggttttgcaccccgacagcacatctgcctcttcataggactccttctgcttggtgttcacattgcctccttgctttgccttgccatagtgcaaactcctaggggccccagccacnctgccttccttactacttatagatctggaagggagaaaacgtctttgcttcagctgctcactgcttaacgntaaggtatgtgccagatctcagggctgggcagagacccggaaggtgagaagacaaggcttctgagcccagcaggggctcacaggctgcctagggaggctgcctcaagagactacaatacacgaaggaaatgctgtaggaacccagaaggacggttggtccagggctacgtgggcaaggctttggtctgaattttg

SEQ ID NO: 94525 - DNA, 463 bp, Homo Sapiens
gtcaggccttgggagctgggcctggcgggaagcagggtccatgcacggccgagcaggtggcggctcccaagggaggccagagggcggcgagctggcagagctatggccctgctctcctggcggcagccccacagcgaggcagaggcagaggggtggagggaagctggttacctttccaccatgcggtctcgctgccgctttttctgcttgtcctgactcttcttgcctgcctgcaacttgcgcttggtctggccattttcatcctgggtggttagggcccctgtgggagcagatgggcactgtcaccaatttggctctgccaggacagggcaggccctgcggcctctggctgaatcacccactgtccactccagagggtccatcgagaatagctgtccaagcaaggcctctggccatgagcagggctgggtattcctggctgtgcagggagtgggttggccta

SEQ ID NO: 94526 - DNA, 865 bp, Homo Sapiens
  misc_feature (787)..(805): n is a, c, g, or t
tggccccctttgggaattgacaagtactattcagtggtggctctgaaatggcctctggttttcttgtggagtcgggcagggaactgctggatgctttcccagcaggtgcacagaacgaagcgctgagcccaatgtgtgcagagggtgtgtgcccagggcactgccacggcccccaccagcattggcctctgctctgcagggtggggtgcccatcctgggggctgtgtgtcatgctcacctgacccaggtgtgtgtcccggtgtgaaatcgaggaggggactggaagcccttccctgccttgaaacatgaaagctgattttctgagcagcagatacggtcagtggcaaagctgcatctgaagggcggcctgggaaggggccctgtgctggccccgggtccgccccagaggagtccacacagcaccacctccagaaggggctgggcccggggtcctgcaggcggcaccttttggtagagtttgtttccctggaaaatggggaaaatgtttcaagccaggtgaggggggaagttaacactgaaatatgtattgtttttaaaaatcaaatgcacacgcatggaagctgcttgtccatgcactggttttgtcactggcgtcctggaatccgaccgtgttggggtgcaggcgctgtcagactccggctgatcctggctcgagcacacacatctaagggccaggctggttccgcatggtgatctccgtcttgtatgtctgaatgttggcctaaaataaagattactgttgtaaaataaatgttttcactgcggnnnnnnnnnnnnnnnnnnngaccgcgtatgcggccgcaagcttattccctttagttgagggttaattttagcttggcac

SEQ ID NO: 94527 - DNA, 368 bp, Homo Sapiens
ggccaagaacagcccagagtgtgcaagggcatctgtatctaaggatgagacctggggttggaaagataggtagaggccagatcaccaggggcctatgtgttctgcaaaaatgtagatattctcttgggagtcctgctaaagtgtaatcctctgaccagcagtatcagcatcacctgggagctggttagacgcatagagtctctgccttcccccacccccaagtctgtgttgcaacaggatcctccaggagattcgtgtgcacatccaactgtaagaagctctgatccagaccactgttccccaccatttggaagaatggggatgtcttcttaacatcaaaatatttctcagccagtatcccaaaaaaa

SEQ ID NO: 94528 - DNA, 824 bp, Homo Sapiens
gcacagagcctgcctgttggtctctacccacaggggatcccctgctgctccaccatcagatttgggacaccaccccccccggccccaccagagggcatcagctatgcctagcaattacgcccccgtggctaaattaaactcccattggctaaattaggctcgaagagaggggcacctgctgctaagctgtgtatgttgtcccctaggactcccaccgtttgctgagctccacatgacaacagcagacgacaggccgcactgatcccacctggcttacaggtgctgtcacacagactagaacattggagaatttctggaagatataaagcggaggagatcagattcgtggtgaaacgcaatagagccaatggcctgcagggtaaagtctgagtgcagcattcagactgaagacaaagatgcaccaggagcctccagagccaacactggcccaaagagagaagcaggggcccgcccaggtgactgccaggcactgtcagccacaatgacagggagagcggcccagatgagaggcccaggaaggcactctgcctttgcaacgtcctggcctgtctccatgaccacaggtgcccagtggtgccagggttgccagacagtggtggtttagttgtgtgcaagaactactctgcacagcaagaatgattggttgagactgacagatcgcaaacacactgcattcaggaacccttcaccctctcttagaaatggctgagggtctcagcgggctttcattcatatgagtttatctatcaatatttacggtagtagaagttcaagtgaaaaataaataaatattcatttatctt

SEQ ID NO: 94529 - DNA, 870 bp, Homo Sapiens
ggcacataatttcatggaaggaaaggtagcttgatatttagattgtaagatataatctgaaaggaaactaattatgttctctacacttactgtaatactgattattcttacatatcaaattattgaactttaaaaatttcattgtatagtcattaaactgagttgggttttttcttaaagggtttagcatcactcatttgatttacacattcacattataatatttaattatcatgggtgtatgctttacataaaaaaggtttataaaagttatttatgctatattgaaagtcatcttaagaatctccaggttatttaaagtagttataggagcagagaacaagcacctttatcaaaatctggtcctatgtgccttgctttaccaaatacctgatttttctggagggtgttcctgtaattcacaactgtagacacatgggcaaaattaggatttttaagaataaatacatttctatttttttggttgtttcaacattaactcttcaaattcattaacaaaattaaaataggtatattacaaaagcataaacatttgtgaacagtacttaaataaattgtgatactattgctccatcattgaacttttttgaaactttaacaattgtataaaactgtcagtttgttgtttcatttgtaattacaaaataatttaaaaacttttaaaaaaaatttggatcctgactttgtctatatctgtatttcatttgtttagaaagattcttttgggtttgataatgtaatttgtatatttaaattttttatggacataattcaaaggaatgtataaattcgtcttttgttaaatggctttttaattgataaacttctcttgtcattttttggtaaaaa

SEQ ID NO: 94530 - DNA, 707 bp, Homo Sapiens
  misc_feature (249)..(325): n is a, c, g, or t
atctccaaaatagagcctccttagcctgtgcaggtgggctgtcttccaaagtcaccacaccagtgacttgtgctgtgcggagccttcctcaccaggaccactggctgctcctgtggctagaagtcacaattataggcttcattgcaagagccagcatttgagtttcttctgggcacctgccactgtgcatgtgtgacctcaactgctttgtgcaccctgactggggggtaggtgctagcgttccaacannnnnnnnnnnnnnnnnnnnnnnnnnnnnnnnnnnnnnnnnnnnnnnnnnnnnnnnnnnnnnnnnnnnnnnnnnnnngttattgtcagtctgacttcaggtgcataaaacctgaagctgagcctccccatgagaggaaaaatgtgtttgtggtgtgacctcagttgccagggaacttgtgcaggaagccgggagagatggcacagacccacctgtgctcacagtacatgttaagaattcccaagtctcaggcaaaccatctccaagggtgttcacagaagacacaccttaaaggcaaacgggttcatgatgtaatcttctattgactagctgtgaacctcatttttcttatctgtgaagtgggaacagtaataatccaagtctttttatggagttatcaagatcaaaaaaggaatggatatacaaagtgttttgtgaaataaaagctccctaaaatggt

SEQ ID NO: 94531 - DNA, 373 bp, Homo Sapiens
tgggggctgtatccccgagccccactcctcagaatgcagctctgtacgacgaaggaactgggtaatccgcatttcagccaatttagcagatgactaaccaccttaaaacggtccacacaattatcttgtttatcaggcaaaaaaattgactcctaggtaccgaattggcatggatttgacaattagcgattcacggttaagcagactttatctatcttaatccaatcaaaggagaatttctgcctgctgtgtttggagagacaacgcgtggatgtgagttaaactttgttaaacccaggacaagctttaagataaaacgactgatatttaaaatggcaatttaaataaaaatgttctctgatcagccttaaaa

SEQ ID NO: 94532 - DNA, 494 bp, Homo Sapiens
agaagttgcagtggtcctagtgagcccccctgcccaggcaaagcagaattattatgcaaagagagacatgccagaatcacgtgctacacattacagattgacagccctggtgaataaagagatggcacagcgatccctctgcccttaacagacacctctgggaaggaacctccagcagggcaatcctggtcatcatcaaaactccagtacgaatgcagtcactgccatttgctgtcctgactactcccaagaggtggatcatgttctgcctcagatttatgttcctgaaatccatgtatattgagttgagatgagcaaactggagttcaaagaagtgaaacagcttgccaatgtttactcaacccatttgtggtgagtccagtctccaaacacaggaccgattccaaagcctcaactctagttccacactgtactgctctcctggcacagagttcggacttgttgaataaatccctgatatgcaccaagtcaaa

SEQ ID NO: 94533 - DNA, 387 bp, Homo Sapiens
tgagtgccaggcagacgggccagtgcaggctacacagctgcagctcaaacagcacagctgcaggtgaaacaggccagtctctctgcgcacgggaacagtctgggcaagcatgagacggggaaaacgggcactgtcctcgtgagaacaaaggacccacaacaggaaccctagactcaccttctgccaaagacaccaacagcccacgacgcagcctcctcacaaaagggagaggcattcaagaacttagaaaatcacctcttcctggaaaatgctcactttaaaactttgcatgtaactttaaattttaattacaaagttgttaacatccattttctcatgtattcttaattaactctgtgaaagtaaacacagcttttattcttaaaa

SEQ ID NO: 94534 - DNA, 365 bp, Homo Sapiens
  misc_feature (55)..(55): n is a, c, g, or t
ccgacagttagaatgcgcctcggggcgactagtcccaagtcacggaaacctcggngcatccccgcccgcccttcccccggggtcgcccccgccgcctcctggcgcttcctcgctgcggcgactcctgcttggccgcccgagccttccttccagaagcccgcaagtctcccaaggtcactcgggacccttgtgtgcctggcctagcccagaggctgctcacctattcattttcatccgtactccaggaaataccaaaaagaaggggtcctggaggagagagatgggctgccgtgggtaggagaaaggagagggctaggagaccccgtaacacaataaaaagagactctccagcggaatcttaaaaa

SEQ ID NO: 94535 - DNA, 810 bp, Homo Sapiens
  misc_feature (231)..(250): n is a, c, g, or t
cattgtacatatttccctcaaatcaactccctctgaatcaccctatttggagggagacactattctccatttccgctcggccacttccagcctcacccgctctttataatcttcagtgaggaaatgcctctcacagtcactcttccttccctaccatggcaccgaaccacagattcccagcattgaacaatggccatggaagatgtatctggttgagtttgttgtttgtgnnnnnnnnnnnnnnnnnnnncttaatagaattccttcaattacacgtatgttttcagcagccgggccaatcctcctcctcacaggggtgaggtcagcaaacccaggaagctctcagagccaagaaagcctcagatccaggaggaagtagttatggatgcccatagctgaagtgctctgtgtccactggaagtaaaaggagcaggttcctgccaaagaatgtacagaggacgtgaaatcatgtgtggctacactgaagctaaaggctgccagccaaccatagccagttggggatataaacctctaaaaaccaaaactggggaaaaatggctccccattttctgaggtactcttggagcacaagctgaatgaaaaccaatcatcattgccctgcctagcatgaagcagaatgaaaagaaggcagataatatttcctccccggaaccactcatccatatctgctctattcagatatttgtgcctaggcaactgcacccacccctgtcagcatttacccacagatcctcaaaaccaagccctagcacaatcgactccagtgaaaattaaaaaagctatcccaaa

SEQ ID NO: 94536 - DNA, 560 bp, Homo Sapiens
tcaacctcattggtgacagcctgtctttcgacttcaaagatactgacatgaagctgctttccatggagatagagaaagaaaaagtggaatacatggaaaagagcaagcatctgcaggagcagctcaatgaactcaagacagaaatcgaggccttgaaactgaaagagagggagacagctctggatattctgcacaatgagaactccgacaggggtggcagcagcaagcacaataccattaaaaagctcaccttgcagagcgccaagtcccgagtggccttctttgaagagctctagcaggtgacccagccaccccaggacctgccacttctcctgctaccgggaccgcgggatggaccagatatcaagagagccatccatagggagctggctgggggtttccgtgggagctccagaactttccccagctgagtgaagagcccagcccctcttatgtgcaattgccttgaactacgaccctgtagagatttctctcatggcgttctagttctctgacctgagtctttgttttaagaagtatttgtcttcctttgtctaaaa

SEQ ID NO: 94537 - DNA, 580 bp, Homo Sapiens
cttagttactagaatgtttttctcaactatgaatctgacttcactccctttcttgaaaacctcctgtagttcctgttgtgtacgggataaaggtgcttaccatggggctgcgcaggtggaaagcagcccagtcttactatgaggatgtccgtttgccatctgggaacaaggaggaagaagcagagacctgggcaagacctcagagaataaattatctcaatggctacttacatggtccagcatagcagaaaaaaaagccacactgagcaagcagtggtcctttccatgctacacaagcaagaaatgcctataaagacagacttgagtgcagtctaaagaatcttttgctttgccttaacactctacttctggatatccttgctcaaaaagaagtctactcaagacagggaggttcctgtggacagaaacatctgcttcctgcttatcctgtatctcagcatctgaatggtcatgactggaacacaggcagacttcagaaataaatacataaatatctcatactcctcgaatcttttagaaaaagagtgtgggtaacaataaacatatctgctgagaaatg

SEQ ID NO: 94538 - DNA, 311 bp, Homo Sapiens
ttgttctgtacaagctgcccaacttgaaatttctggatgcccagaaagtaaccagacaagaacgagaggaggcgttggtcagaggagtcttcatgaaggtggtgaagcccaaggcttctagtgaggacgttgccagctccccggagcgccactacacgcccttgccttctgcttccagggaactcaccagtcaccaaggtgtcctggggaagtgtcgctacgtttactatgggaaaaactcagagggcaacaggtttatccgagatgaccagctctgaagccaacttctgtataccttcacccatttcatg

SEQ ID NO: 94539 - DNA, 791 bp, Homo Sapiens
ctcctatagggaatttggccctcgaggccagaattcggcacgaggcggcacgaggcactcttttgtaagagtcttggattgatatttttgttatactttgcaatcaaataaaggaggctgtttgcacatatcctgaaaacgatttgataactatatagtgattatttctcggtaatttttgaaggtctactaaccaaaaaattctaataaaattcactcttatgaaattaaagattaagtcacaaaaatacaactgtttagataaatattcaagcactgacaggcatatagcacctcagttctgtttgtttgctggccattatgtttttaccagcttttgtcttaaaagtctcatctttctccttgattaaattaaatgaacatcctttcctgttactccaaaggattccttataatttttttatagcacctttgattttagactgagggcttttagatagacttaaatagattcttctactgtatgtttctgaaatattggcccctgtactttaccaacatacatttcactttataaagttaatgtaagggcttttcagtgactccaggcaaacctcaaacaatctctgatttgcaaaaagatcaagatgcctctggaaataacacacaacccagtgttgttattattatttttttgcaagacctaactagagaagtgatcattatactgtatattctttaatcttgatgtttttaaagaagtttaagtgttgtatcctttaagcaattaagttcagttcaaaagacagaataaatacaaagctctttaa

SEQ ID NO: 94540 - DNA, 357 bp, Homo Sapiens
ctaacttatagagaagtagagagtagaatggtgataaccagaggctgggaggggaggggtgagtatagaaaaaagggatacattggtcaacaggtagaaacttatagttagataggaggagtagttctggtgttctattgcagagcatgttgactgtagttaataataatgtattatgtatttcgaaatagctaaagagagaactttaaatgttctcaccacaaagaaattataaatatttaaagtaatggatatactaattgctatactctggtgtgatcattccacaatgtgtacgtatattgaaacatcactttataccccataaatatgtaaaattattgttggtccaattac

SEQ ID NO: 94541 - DNA, 616 bp, Homo Sapiens
aagattgtaagtcccagtgagtttgagatacaaataaagagatacaaaaacgccggttatagtagaaaaaggcacttgccaaatgtacccaaggggaaaaacaaaatacagtaaatatttttgctgtgtactgattacgcacagatttgcattttgggtaagaaagcagtatttaagaacaatggtccaatcccttgttcctgcctcacaaatagaaaatcttacctacttctgactgccactccaactcacctgcctaaaaatggctttgatctttgtgatcatgccctcaatgactgaaagtgcaggatattaagatgccctcttttcttgagcctcagattcttttaggaatcacatgaaaatattaaaccgcatccctagaaaatgcatatacagacacaatattttgcacacaatttcaggaggtttggagatctcctagagtccatctacgacccaggtaaggaagttccaagcttgggaagggccacgcatggtggctcatgcctataatactagcatttgggaggttaaggtgggaggattacttgagcacaagagtttgagaacagtctggacaacaaagtgagatcccatatctaaaacagagaaa

SEQ ID NO: 94542 - DNA, 364 bp, Homo Sapiens
caaagtcagtatttctatattgtttcaatgaataattggaaaataacatttaaaaatatataccctttataatagtgtcaaaaatataaaaatgtataagtttaagaaaaggtataaaggatctccactttgaaaaccacgaaacagaaaaaaagaaattaagaagcttaataaatgtatgtatatgtcatgcacttggttggttgcaagactcaatattgtaaagctgttcttctcccctaagtgatcggtaagattgacgtacttctaactcagaatgggttcttggtggaaattaataatctaacatgaaatgttatgttatatgcaaatgcaaggacctaagatagtcaaaatcttgaaa

SEQ ID NO: 94543 - DNA, 466 bp, Homo Sapiens
ctaggtattgtaatttaattgactcctagctaacagcataattaaaatatacactcacagagaagtcctttttatcaactgaagacaattccacagggtacaagttaatgtccttcttcatttctgattgcctgtgatgatatgcctgtctctagagtgtgatcagggccaacaaccccattcaggcatcctcaatggattcctaaattcccctgctctcactcacgttctttcggtccttagtgttccagaagcctgggacacaaatgttgtgccctgtggtttccatggtgacccttgacacacttttggaacatatgttttctgatgcctagtcctgtgtagaaactcctaaaatatatgtattttaggtaaaatatttctcttcatacctatgttttatttccataatatcaaatatacattttctttatatttgtgtattcattcattcagtaaaaattta

SEQ ID NO: 94544 - DNA, 791 bp, Homo Sapiens
  misc_feature (99)..(137): n is a, c, g, or t
  misc_feature (255)..(272): n is a, c, g, or t
  misc_feature (304)..(649): n is a, c, g, or t
tcaatattaaaagagcttttttatttgttaatgtcacataagaaatttaagcaagttacactatcttaaaaaacacaacgaatgcattttaatagagannnnnnnnnnnnnnnnnnnnnnnnnnnnnnnnnnnnnnnatgaattaagaatctaagagaagaagtaaccataaaaccaagttttgtggaatccatcatccagagtgcttacatggtgattaggttaatattgccttcttacaaaatttctattttnnnnnnnnnnnnnnnnnngaccgcgtatgcggcctcgtgccgaattcttnnnnnnnnnnnnnnnnnnnnnnnnnnnnnnnnnnnnnnnnnnnnnnnnnnnnnnnnnnnnnnnnnnnnnnnnnnnnnnnnnnnnnnnnnnnnnnnnnnnnnnnnnnnnnnnnnnnnnnnnnnnnnnnnnnnnnnnnnnnnnnnnnnnnnnnnnnnnnnnnnnnnnnnnnnnnnnnnnnnnnnnnnnnnnnnnnnnnnnnnnnnnnnnnnnnnnnnnnnnnnnnnnnnnnnnnnnnnnnnnnnnnnnnnnnnnnnnnnnnnnnnnnnnnnnnnnnnnnnnnnnnnnnnnnnnnnnnnnnnnnnnnnnnnnnnnnnnnnnnnnnnnnnnnnnnnnnnnnnnnnnnnnnggggaaaaccggtaaccacacaatcaggggaatacccaagaaagaacatggtggcaaaagggaactaaagggcaggacccgtaaaaaggcgggttgggggggttttccaagggcccccccctgaaaagaacacaaatacgcg

SEQ ID NO: 94545 - DNA, 492 bp, Homo Sapiens
agcaggagaaaagtctcacagccagggagcagcatgcggcactgtcactaagtgcctccttcaagagttcacaatttgctctcagccaagcttcattccaagaatgagagtttgctcaagctggaaggggtctgaacagcatcgagtcccttactcatcctctccatcagctgggagggaagctgaggtcctgagagggaagagggctgctcgcagtcagtctaatgtgccattaggattttagtctagtctagtgggtaagcattcagggcccggagtcagacagacctgagtacaagtcctagtgacaccatttactagctgtgtgacattctgcaaaccagctgacctcgtaaactctttctgtaagatgaggatctcactaatgtcagcctcagagggtggtgagaactcagtgaactaatgcatgagaagcacttacacagtgtctaacctgcaatgagcttgcaataaattgcgtgttattctttc

SEQ ID NO: 94546 - DNA, 514 bp, Homo Sapiens
ttgataattgaagaaaagcctttaattaataatcaaggagatggtggcaactgtaatcatttcctttaaaccttttgcatttatattcagttgaccagaatgcagccaattgaccactcctaattttaaaggaggccggaagctatagctcatattgccaagcagtagcattcttggctatactctacctctggtcaccaaatatgtttcactctacctgcatatagaagacattcactcttctccaagagaaacagtcaaagtcccatctgatcaccgtatacagctctaagttcaggatctctgaataaaaggatattctctgtcaggtctgaatgtggttccttgtagccctcggaactaagaatctgcctacagtctccctatacacatccaacatacaatggtagaaatcatggggggcacaagttacttgtcagtataaattctgaaatccccatgtccataaagaggcagatgaaggcctcttaacctggagagtaggaaaattgtt

SEQ ID NO: 94547 - DNA, 781 bp, Homo Sapiens
tttaattaattcaagaaaataacattttattaggcataactgatataaaaggctacaattaatttgatttaaattcacagtaagactccttaccctcgacttattttcccaagtagagaaaccaattagaaacactctctaaatagatgctgaatctaattagtataacatagtccatatgcatagcatatttgcattgtacattgtgttgcaaaatatgtattgtaaagtaatttctagaagaacagacctgacagagtaggtactgcttatgtcaatttcatgaagataaagaagccaatcaactcatctatggtcctggggccatggttaactgagatctgccttcaaacacttgatgaggaaaacaagtattattacttcaactagaagaaactctaggcctaatgagtcttctcaaaaataaatttcaactggagtgaaaacacaactaaatctgacttcttcaagtggatcttattggatcccatattttgatagtattgctgtaaaaacactatggggagaggaaagagaatgcgtttgggagcctggcaggcttggagttaaattatggtttaaccactttttttaactgtaggatcctgggccaattaatctctctgaaccatagttttgtgattagtaaaaacaagaaaatgacagcatggcaaccttgcagagtcattataattatgcagagaagatatgctcagcacataatatggtgtctaacccagagtaaaacactgaataaatattagttccatctctcccaact

SEQ ID NO: 94548 - DNA, 1881 bp, Homo Sapiens
tagcgaggcctgggtggcgaattcggcacgagggcgctgcccagtgtcccggagccgtcggccccctgcgctcccgagccgtggcccgcgggcgaagagccagtgcgctgcgacgcgtgccccgagggcgcggccctgcccgccgcgctgtcctgcctctcctgcctcgcctccttttgccccgcgcacctgggcccgcacgagcgcagccccgccctccgcggacaccgcctggtgccgccgctgcgccggctagaggagagcctgtgcccgcgccacctacggccgctcgagcgctactgccgcgcggagcgcgtgtgtctgtgcgaggcctgcgccgcacaggagcaccgcggccacgagctggtgccgctggagcaggagcgcgcgcttcaggaggctgagcagtccaaagtcctgagcgccgtggaggaccgcatggacgagctgggtgctggcattgcacagtccaggcgcacagtggccctcatcaagagtgcagccgtagcagagcgggagagggtgagccggctgtttgcagatgctgcggccgccctgcagggcttccagacccaggtgctgggcttcatcgaggagggggaagctgccatgctaggccgctcccagggtgacctgcggcgacaggaggaacagcgcagccgcctgagccgagcccgccagaatctcagccaggtccctgaagctgactcagtcagcttcctgcaggagctgctggcactaaggctggccctggaggatgggtgtggccctgggcctggacccccgagggagctcagcttcaccaaatcatcccaagctgtccgtgcagtgagagacatgctggccgtggcctgcgtcaaccagtgggagcagctgagggggccgggtggcaacgaggatgggccacagaagctggactcggaagctgatgctgagccccaagacctcgagagtacgaacctcttggagagtgaagctcccagggactatttcctcaagtttgcctatattgtggatttggacagcgacacagcagacaagttcctgcagctgtttggaaccaaaggtgtcaagagggtgctgtgtcctatcaactacccccgtatgtcgctccacccgtcttcacccattgtgagcaggtgctgggcgagggtgccctggaccgaggcacctactactgggaggtggagattatcgagggctgggatcagcaatgggggtcatggccgaagacgttctcccacacaaggagccctacgaccgcgaccggctgggccgcaacgacccgactcctgcatgccatgctaggtggtaagtggacgcagattcgtccgtctggtttcatgggctggaggctcccctgccccaccccgttctcgcccacgggtggggtctgcctggaatacgctgaccgtgccttggccttctatgctgtacgggacggcaagatgagcctcctgcggaggctgaaggcctcccgagcgcgccggaggtgcgcatcaccggactgtcccattgaagcacattcgagaggccgcctgggaaagtcgagtctagaggggctctttagaccagaggactcaagggctgccttgcttcctgtgagagtgatggaagcgcaattgggagaatcgggggccaatcacgaaaagtcaggcaatataccggtgctgaggaggcagggaatccccaggggcacggggcagggacgaggtaggagcggactctggctccagcgaagggtcgcaccaatgggggccattcacatacggaggagaagggagcaacactggagaccgaacaaccaggacacaaagtagtaaagggcaccgcctgagaaagggacagactccccgtacaggaagggaggaccccgagaac

SEQ ID NO: 94549 - DNA, 489 bp, Homo Sapiens
aaacttttgaacattttaattttctaaacttacattgttctgaaataacaatgaacaactgtataacattcattaaatgccacaaatcattaaaataaaccatatgtatataattcagagaaataagttatgatagtattgaaatttgagtatgatcgtgagaaaactgagcatgatagcttttgatggaatagaataaaattttaagctagtataagaaaaaacccaacttaaatatttgtatttaataataaaataacgacttttgatcatgatttgaatgacttattgaacagtaagatctaataaatataaatactgacgtattcagaaagaatttcatctttatttagcttaattgttaaattgggattttgacttgtgagggtgatgcttcaatatagcttgaaaattatccattttcccaatcccccttttgagtttacctttgtgggctctaaatttttcacctggtagatcaataaatac

SEQ ID NO: 94550 - DNA, 462 bp, Homo Sapiens
cagacagtcacactggtttggtcagttacaaagtaatttctttgatctggacagaacatttatatcagtttcatgaaatgattggaatattacaataccgttaagatacagtgtaggcatttaactcctcattggcgtggtccatgctgatgattttgcaaaatgagttgtgatgaatcaatgaaaaatgtaatttagaaactgatttcttcagaattagatggcttattttttaaaatatttgaatgaaaacattttatttttaaaatattacacaggaggcttcggagtttcttagtcattactgtccttttcccctacagaattttccctcttggtgtgattgcacagaatttgtatgtattttcagttacaagattgtaagtaaattgcctgatttgttttcattatagacaacgatgaatttcttctaattatttaaataaaatcaccaaaaacata

SEQ ID NO: 94551 - DNA, 621 bp, Homo Sapiens
tacttgtcctaaaataaactcctttcagagactcctgcctacaatataactaggctcagggaagaggccagtgatcatcccattcattatcttaaatttgaatcctagatctctagcttcagtgcactgtcgtaggcttagggctcctcttgatccacagcccacagccaccagtatttcatccaggaaagcattatttccaccctcatctgcctcattgactcactgcatgctccagtctctgagctcaggatttcttggcatctgactcaattcggggtgggaggacctgtaagctaataaagatcttttggaaggcttatgacaactgaagcaacagccaaaattccatccctaggaatgcaccctaggaagcaacagagcagcgttatctgggataatactaaattgaaaacaacctaagtgcccaacaatgaagcaggacttaacatccacaggttaactttccagaactgtttccttagaaatcttgtcgaatgtcagctatattacaggcaacactgcttatgacctgtgattagtacaacacatctggactgcgacattcttgaaactggatgtgttcctgggggaatggggctcctaggccaggggcttcca

SEQ ID NO: 94552 - DNA, 456 bp, Homo Sapiens
tatattctcctactattgattcctttacaactatttcaatttaagaagaaacatgtcagatagtgtgatatgaatcatgtttgagaaatatttccttgagagtttgactagtgcaacaaaacatatctgtaagggacaatgaatgttaaaaatggttttattcctgtgctcgagcaaaacctactctttttatgtattctcaattttcagccctagaatgtgttattaacttgaaagaaaaactctcccaaagatctaaaagttatgctgattttttagaaataactaaaggttttcaagactaccaaaatttcaagctacatgggacaattaccaatgtatggtgtgtgaggggaagactgttagtaagtttagatgtcactgaatatttttcactaagggatttaaagcattttatactatacaaaacaataaaatgtctattttattttcaaa

SEQ ID NO: 94553 - DNA, 602 bp, Homo Sapiens
  misc_feature (20)..(20): n is a, c, g, or t
  misc_feature (193)..(225): n is a, c, g, or t
taaaattggaaaacacaagnctgaaaacagcaagctcatgcaaacaatagagaaaggcatctaagtggaaaacagagactgaaggaaaattagaattaatttaaatgtaatttgtttaagatcttcagttaatcatctgcatgctgtttttcatccaaacacagacacatttttgagatgagaattattgttnnnnnnnnnnnnnnnnnnnnnnnnnnnnnnnnnctgctaagtgtctcttagactgtcccagcactagctcctcttcctccaattcttaatgatgaaactgaaagtttgtggttagcataatgtctgtatgcagtctttcatcagcaaaggagaactcaaatttcttgattatcctgacttgattttccttgacactgagtagcagtgtcaagcacctcgacaagattttcagtaacaacaagagcttccaggtaaccagtgctttctcaccttgggaattcagggcattagggttttgtttcgttgtcctgagtcttcagagctaaggagacaaagcaggatgtagagactttttaccaagtgtagttatatttggtccccataattaaacaataaacaaaatcaacaaa

SEQ ID NO: 94554 - DNA, 528 bp, Homo Sapiens
cacgtccctcagcgcccccgcgtgcgtccccacgtcactcaggggccctgcgtgcgtccgctcagtggccgggtatatgtcccctcagcggtccagcatgtaggttgtgtggtgttgcttttcgaggtggtttgtgatgcttggaggaccctgcaggttacctgggccccaccaggtcatcaggagcatctcccatctcaagattcatcaccgagttccctatgcagagtccctggtgcggtgtaagcaagcaatccacaggttccagcgggtggggtgtggacatcaggcatgcgtgttcttccaagcttgcaaaagttacacaaatgtatgccatgagggttagaggtgaggacataactccaaagcagactccaggtcttcccaggccacacattctcttcccatcattaattggaattggaattcgtttttgtgccatagcgtatgtttcaaagtcacgttcaggtgaatcattaaatgctaccaaccatagacaataaaataataaaatctaaaagatcaaaa

SEQ ID NO: 94555 - DNA, 906 bp, Homo Sapiens
  misc_feature (28)..(28): n is a, c, g, or t
aatcctatgtaccttagcgttcccaagnaaactaaagagtctggtgaaaggacaaacagttcccaaaatacttgcaaatgtagagtagtaaataatggttacaaaagttacatgttgcaaaaattttcaacaatgtcttgtaattattaactgtaatttgggccaactgaccaaatccacagaagacctgcagttccctgtgagctgggacagtttggcaagtcccataacatggctgcacatagaaggagtgtctgcaagaccaggatcaaactccagaaatcggcagcctggtccccgcagacttgatcttcctccttccagaggaggacgatctgactttcctacactggtgtctgtgagggaagtaggtgcctgcctcaagaaagacaggaagccaccacttagtaagtgccctttctagccatgagcctaacaagtgaacaaatctcagattcaccagaaaggacaactgggcattggcagcaggtgagttgaagaggacgaagcagttgctaattccagctcaaatcctgctgctcttttaagatgatagcaggtccttgccctgcctgtagccctcagactgaaatcacttgacttccaactatttccaacagccagtatttgcatttctttgcctatggcttccccaacttcacaagccattctgctaagacacatggcatatgcatgtgaggaatgaatgctgtcccatggcatcctacaaccagtgatgggagttggtgttttgtaaacttccaaaactcctttaccccttcaaatgaaataaactctccctagaatttcccaggctactttttgagctgtttcccttctctttctcactcttttgttcccctattggtttcctgaagttttcaaataaatgatttgcacttaaaa

SEQ ID NO: 94556 - DNA, 810 bp, Homo Sapiens
  misc_feature (712)..(712): n is a, c, g, or t
aactaatcagctgaatttaagattcaagcatcaatatggtgaaacagattctctaggagcctttagtgctgtagccaaggtaagaaccactgggttagatgctacctcaggtcctgccagctttaacgtcccataatagcaagttccagctccatcccttgctccacatttgtccctcatggcctgggtgctgcctcctagctctgcagagaggggccggggcggcggcacggcatcctggctccagggctccctctccagtgctccgtgctgcctcctgggtaaccaaaggagaggaaaaaagctctcccagggtcctgacatctcgggaaattaaactttcctttgttccacattgaagtctagcctttgtccacacaacacaaattcagtttggtgttttgctttttcatccggcccatcatgcttttcccagtctctacgatttggttccttgttagcggctgccccatattacacctggttataggccatgtcctcccatggcaccagctctttgggctgtggaggaaggcccttttttcagccctcgttggcatgtggaagggtgctgcccttggcccaactcctagcacagctcccctgaaaccactggccctaccaacgggctcgccacacggcctggtgcctagcttctcccagccagtcaccaggcaccagcagacctggtcaccctgctgatggttgtggngtcagcaatccctgaccagtgagggggatcctttagtggacaaggaagagacccacctatgtgagcattttctttgacacaatgcaaacacctgtctc

SEQ ID NO: 94557 - DNA, 597 bp, Homo Sapiens
cacggatgcatctgcagactggtgtgaggtagactcatttcatgttcataatatgaaatccagatctttggatacttctcctctgaagaagatcctattgcttcccagttggatgaagaaaatttggttttctttgtgtctagaaaaaggcgaattttaatttcaggtagtagaagacgagatgtgattaagagcattgtcaagatacctcacctggatttactaataacagctactcagaaaggattaataacagtttttaataaccagttcttcagtaatctccagctcaggaaatctttcagaagttgaagtcacagacagccagattctgtcagaggagggggctgtgtgggccctggaggtggtgcagtgagggatgcagagtgtgggcgtggagtctgggctccagcctcgcactaacacttacagctgtgcgtgttatttaatatctgcatgccctggttcctcatcccgaatcatagaccttctttcttgctgtttaagtgagttaatactcatgaagtgcttagcatcattagagttcctcagcaaatattggccattgcaataataaacaaataatgtgaaaacaaa

SEQ ID NO: 94558 - DNA, 611 bp, Homo Sapiens
aggtggccatccttacctgacaggcttggcagtggccggtggagcatactacctaggcctggaaggagcaatcatcggtcctattcttctctgcatacttgtggttgcttccaatatctatagtgccatgctagtgagtcccacgaattcagttcccacgccaaaccagaccccatggcctgctcagcctcagcggactttccgtgacatttctgaagatctgaaatcttcagtaggttgatgtggtttcctctgcagtgatttttctaggaagttcaaatttgacagcgagttcagctcagctgtggccctctgcccttccagctgtgcctagcaagcaaaacccaggaaagaagcagaagcctcctggccttacatacagaatgcctggacaagagagaacttgctgcgggctgctttgtattttaaaacacagcttgagagttcagcgttggtggtttgctcacttaactgttgttaagatggcttgaaaagtttcattttatacactggtaccctggcttgaaatttttccactttggttatctatgttactatattatatatttataaagttattttaagaactctaaactacctgctgttaaaag

SEQ ID NO: 94559 - DNA, 976 bp, Homo Sapiens
tggtggccatcctgccctactacatcacgctgctggtggacggcgccgccgcgggccgtcgcaagcccggcgcgggcaacagctacctggacaaggtggggctggtgctgcgcgtgctgcgggcgctgcgcatcctgtacgtgatgcgcctggcgcgccactccctggggctgcagacgctggggctcacggcccgccgctgcacccgcgagttcgggctcctgctgctcttcctctgcgtggccatcgccctcttcgcgcccctgctctacgtcatcgagaacgagatggccgacagccccgagttcaccagcatccctgcctgctactggtgggctgtcatcaccatgacgacggtgggctatggcgacatggtccccaggagcaccccgggccaggtagtggccctgagcagcatactgagcggcatcctgctcatggccttcccagtcacctccatcttccacaccttctcccgctcctacctggagctcaagcaggagcaagagagggtgatgttccggagggcgcagttcctcatcaaaaccaagtcgcagctgagcgtgtcccaggacagtgacatcttgttcggaagtgcctcctcggacaccagagacaataactgagcgcggaggacacgcctgccctgcctgccatctgtggcccgaagccattgccatccactgcagacgcctggagagggacaggccgcttccgagtgcagtcctggcgcagcaccgactcccacgcacccggggaaaggacaccctcactcccacaaccccgggaagaacactagaacatcagcgagaggccctgcccctccgcctgcagccgtgaaaggaagctgggtcatcagcccagccccgcccaccccagcccctatgtgtgtttccctcaataaggagatgccttgttcttttcaccatgcaaataacatgcccagcaaaaacttgctttatgggtctgcctggag

SEQ ID NO: 94560 - DNA, 403 bp, Homo Sapiens
gaatgctctgaatagtcttgagctgccagttaagtgtttggagtgcaagtgatttgcttcattttgcatacaactcactggctagaaccaatcacatggccccactcactcacaaatcagtaagccaggaagtgtccacagcagcagagagctggaaacatttggtgatctgctgtggtgtgtactatggcaggaagtcttctccacttgaagatgggggacctgaggctaagagagtttaaataacgatcaagaacattcagcttgcaggtgactgggctcaaactcaggcctatctgggtctaggacccaggtgtttaactgctaagctataggtttttcatctcttaattaattgtaaaatcagtttcttcccttcagtgaaaactctcagcttagaaag

SEQ ID NO: 94561 - DNA, 378 bp, Homo Sapiens
gaagaaattaccataaatgtaaaacaggacatgtagcttgagaacattttcttcctagtaatgtaaaatacacactctctagaacactcttctactcgccagagaaatggttacaaaatgaatttgataatcatttttgacaaaagtaaccactggacactgtgccggatcagggtaagaatcaggatatctgtgggaggcacccctacactggtttatgattacatctttcagatattatttcaggcataaaatgctatctgccccaagccattaaaaagaacacaagagatgcagttgtaaaaatagatacatttataataataatagatatgagaagggatacacttgataggtaagatattatgactttgatta

SEQ ID NO: 94562 - DNA, 512 bp, Homo Sapiens
tttttatgttacaaatattttattgcaattttttccctttaacaatgtctggatattttggaattaatatctcggacttctttctaatccacattggttcatcttgttcattatgaacagaggattctactttacaatgtactaaaatgttgttatgtatttcaggaccattgaacattcaagttgtttatcattttctttgaccaccaacattgctgtaatgaatagggatttaagagcaaaagtaacgagaatacttgcttaaccacttatgaaaacatatcataaaagtagaacaatcaaaatggtggatgccatagagaaagcaaggtaacaaaataggaagcctagggaccaataaagtatatatacaaggatttcctatatcacaaaagtaacacttcaggtacatggaaaaagaatttcagtaccaaaaggcacctcagtctcacatccacacattcaaaaataattaaaattttacatgaaaagttggaaacacaaaatgaact

SEQ ID NO: 94563 - DNA, 604 bp, Homo Sapiens
gaacactcaaaacatgacaggttgtgcacattacccgtgaatgcatctcctcctgctctccagctcttaccttaatctgcttcagaggatgctctggcgtctcccttggctcagccatgtcatccacaaagagcatgcaacaacgatacaattcctccaaccccggggaagagagcagcagtacctttgaactataagcggggtcactgtctgcagtgatgggctcagcaccagcgtctggagctgcctccttttcagaagagacctggatccggcttggatgatggagggaaaagggctggctcagggggaaggctgatagccaactcagatgcacggacagaaaatctgaggggaccaggaggctgcggtaacggcgctggagttctaggaagtcacagatggggctacaggaagacagcaagggaatccagactgagcaaagactaaaacattcgaaatgaaaccatcaaagatttgaaaaaatgggcgaattttttttcagtctgagaacttttgaagtaaggcacctctcaaggaagctagatcagatctgaccacttaatttacaaactctagatggcaaaagtcaaactgggaaagg

SEQ ID NO: 94564 - DNA, 225 bp, Homo Sapiens
tgcaaaacaacatagccacataacatattttcccaacatttagcaccttagaacaacaaacatttgttatctcctagttctgtgagtcaggaatctgcacatggcttaactgggtcctctggttcagggtcccttgcaaggctgcagtcaattagttaattagttttctgggattgccataacaaagcaccacagactgggtagcttaaataacaaaaatgtatt

SEQ ID NO: 94565 - DNA, 657 bp, Homo Sapiens
agtgacagagtccagctgacaccagcttcagccttgaagagacaggtgtgggctctgaagcaaagtgcagcagatgaagctgggctccaggccaactgcccagggtccctcgccctgctgtgaagtgggtcccaccccggccccttctccacacagccgtaacggtggccagcatcctccaggccatctgtcaccgactctaacacaggcaggggcccaagaggactgcatctccctgcaggtagccagggagggcttccctggaaagcagacccttgagagtggacaagggccggtcacaggtgggagaagaggatggcaccgtaggcacgctgaccatggaagcatcctggagggagcaggaggcagaacccatgggatttggaagtcaaatgagtggggagagagacgggtggactaaggcatgtggtccggtattgatcacagtgagcccgagacaccctggaacacccaggagggctcctgcacgtgccgtctccagattctggagctgtggagggtgttggagcagccgaaggaccaggaggactcacggaggacgcgctgccccacccgctcccactgcccacttctcttaagcccttcaactgatacagatgctggccctttaacacgctttgcaaaaccttcaaaaaa

SEQ ID NO: 94566 - DNA, 449 bp, Homo Sapiens
gcagtattcgcttcattgtggtggtctggaaccaaacccacaatatcttcaaggtatggctgtaccttaaattgaataaggccacagagaataatccccattattttatgccctttagtaatgatatagcacctgcccatgcgttcccaccactctcctcatggtgacagttcatgccaaaataatctgagtaacatgtccctgcagagacagccgtggcatgagtggcagcaagccagggcttttcatgtgctcttttgacctcagcctctttattccattctgggcagacccaactagccgagagtaaagagacagaaagaaagcagagagcctctccatcggcccgtggtggtggactgggtgagggaaggagcctcctcctcaactcaaagaaacttctttcaaaagataagaacttcagcaccataggaaagttaaaaaagaaa

SEQ ID NO: 94567 - DNA, 427 bp, Homo Sapiens
agtgtgtgtcacaacaccagggttgggcggttttaataaggggagaggagaaagagactgagcacattccccagcccttcaggaggcagggggtttccggagggtcccgggacccgcctcaacttccacccaaagtgggaagggagaaatggccccgtccttaaccgagggaccagcccacatccttgccgccagtcatgatggggtgggtgccgccccattgaacttcacggatgccctaccctcttccccaccctgcccttctcactccaggtttggagaagggagggggtgctgtccggaaggagggtaacgcgaggaaggggtgcgcggctgagactccgtgggacgccagcccgggagggcagtctagaggtagtgggcagctcaaggcgatgggcgctgggaggaggctgtgagcggctga

SEQ ID NO: 94568 - DNA, 392 bp, Homo Sapiens
  misc_feature (165)..(174): n is a, c, g, or t
aaaatagagcatttattgatggaataacaaaagtgcttttcttaaatattcttcaaaatacatttgtacaacttacaataatatatccaaaataactgtatatacaaaacattacctagttttaatgtatgtgcttttttccccaaaaattacaaagtaacttcnnnnnnnnnnggcaaagttcaaccttaacagaggtgacaattttaaaggttggtttaagaaaatagaacctgagggaaattgacacgcaagagtcaatgacaagcaagagatttggaggaatatttttagtttgttaaattaaaaatgttttttagagtgatacttttcacattacaaaaataaaccaaaatgaagaaaaggtcactgtaaaatgatggaaaaaggat

SEQ ID NO: 94569 - DNA, 614 bp, Homo Sapiens
atttttggcttgaccagaagcaggaagagtaggaaatgttattttaaaaagtcccgtttttcacactgctgatgtctggagagtcgagataagctttgagcctacttccaaatctctgggtgctcctccaagcgtgctggaaatgggggtgtgaaacatagcttgctgaggtgggattggacagggatcaagacgcaacagaattggcactgtcaagaggcaagataaggcatttgcaattggcagtgtttcaaaggactccagatttctccaaagaacctagatttcccaggtactgaacatgtgcaaaatagaaacaaacattcaagatgagtgagtgatgagttctgcctgtggtcagaagaaaacaacactcccaactctgcaacctgatcacttccctacttagtcctgtttgtggagccgccttattaacgacattagaacaaagatatgaaggtgatgtacaatcattactagtttttaaccaaagattttggtcacaataaggaccaatagctgtttctttggacctctgagcccatctctgctggaaagatatttgatacattttagcatgcaggaaacaataaacatttacatttattttaaaa

SEQ ID NO: 94570 - DNA, 445 bp, Homo Sapiens
ttcttggggaaaagcgacctctggaggagcctctcatccacacagagtcaggaactaaaggactggttctgagacaaagcaccctttcctcaccctactcccattccacccgcttggaaaagttatccagagacttttaacctccggactccactcttcgcttatgtttgctttttttccaacctgtaccaacgcttcaaaatccctgctccagtcctgcctcttccagaaagaagccttctggccagcccagttcctcttcccctcttcctgttctgagctcattctcaggccacactgcacagccaacctgcttcctgcctgctcttctccaaaaagactgtgaatccactccacccacgccttgtgttgcatgctgggcatgccgttccctgccccaacccaccccaccccccagtgaataaagactgaagttattcattcc

SEQ ID NO: 94571 - DNA, 460 bp, Homo Sapiens
tcttcagggaagcactccttaataaattgcttgcagatgaagcctcatctcaaagtctgcatctggaagaactcaactaagaaagctgcactttcgaaagagcagaatcgtgggtagaattgtattaatagatctctcgagctggctggagtcctacaggtactccttccaggatgaggaggacatgttcatggtggtggacctgctcctgggaggcgacctgcgctaccatctgcagcagaatgtgcatttcacagaggggactgtgaaactctacatctgtgagctggcactggccctggagtatcttcagaggtaccacatcatccacagcattttcatgaatttaaagcagatgcttcaaactctgtctttaaattcctcgttcctgttcccatggaccacttaattttaaaatgttaactcactaaaaggcaaataaacgatacactaaaagcac

SEQ ID NO: 94572 - DNA, 528 bp, Homo Sapiens
tccgattctggaagcagggggagcggaacttagggtacctctctcccacaactagaatggacaggccagaggacagtcatagcggtttccttaaggctcaccaaaggcagccgctccggatccggatctccacctccgccccgcccctcaatactcccaggtgattgacagtgcggagaccaatgggaggcactcttggccgacctacccagcggcgccggggcgtctgtgattgggaaggtgaggaaagcgctgcaggaagagttctctgcaggatgctgggtgagatcaaagggagagcttctgccaccacctcctacttggtgtgtgcgggggccggcacaaagaccatctctgcctctgccttcccctgctcctagccagggtcagctcttctctctgacgcggaatacagagctgaccctggctaggagcaggggtcagctcttctctctgacgcggaatacagagctggacaacctctgcctcggccctctccatccgtaaataaagactagaaccaccccc

SEQ ID NO: 94573 - DNA, 525 bp, Homo Sapiens
gggagggaattgtcaacaaagggacgagagacgcgcaactccgctccgcactgtgcgccagcatccccggggcacggagggcgctgcggcccgcccggagacccccccacccaggctggatccgggccctggggcccagggagcgggtgtggacaaatcctccaagatttaacttccaagaaaaccggcggcggagcgggtggaggaggcgaggatgtgtggccaatgcacgcggagtgcaaggccgcctagttgggagccgcaagagcctgcctggtgtggcaggcacacggaacccaatccctgtctgtccgctgcggcctgggaggggagcgccggcctcaccagaggaaggagcacgaggggaggagttccgagaggaaataattagtgaaatatttgcagaagatgctgggatgtggatttaattccggatggacagtggtgcttctgattccctcagtctgtttccccacccacgatctcctctttccttggcctagacacaccaaaaataattcaata

SEQ ID NO: 94574 - DNA, 447 bp, Homo Sapiens
tgcggccgctcaaatctcccgctagcccagcccgccccgcgtgcgggggctgtggcggttacacggccgggcgcgccggagcgttcaggcttcccgtttttaaggtggagacgtccaggacttctttattagatgtttaggaatttgagtttttccgtagggcggttgtcatcgtgagcctctgtggggtcaggctgggctaactggggttttgatgtcagtttggtgtggccgagggcatgtctgacggggaagaaagtccttggcgttgcttcttagctgttgggagctgtgcggtgggagcgagctgggcggcgtgcgctccccgaggactggcctgagtggccttagactagttactcacgggacttggtttcccagccaaggtgggcagcaagtctgtttactatttaaaaccgtctttcacaagggaaaagcaaaatctcc

SEQ ID NO: 94575 - DNA, 2318 bp, Homo Sapiens
aggagcggacccggccgggcgcaggggctggactggcggagcaggtggggtccgcggccgccggagcgttccggtcggcgtctgggcatctcggcctcggcagaaagcgcgaccgccctgctgcgcggggcccgcggcgatgccgttcctgcacggcttccggaggatcatcttcgagtaccagccgctggtggatgcgattctgggctccctggggatccaggaccccgagcggcaggagtctctggaccggcccagttatgtcgccagcgaggagagccgaatccttgttctcactgagctgctggagaggaaagcccactctcccttttaccaggaaggcgtcagcaacgccctgctcaagatggctgagctggggctgacgcgggcggccgacgttctcttgcggcatggggccaatctcaactttgaagacccagtcacctactacacggccttgcacatcgccgtcctgcggaaccagccggacatggtggagctgctggtgcatcacggggccgacgttaatcggagggaccggatccacgagagtagccccttggacctggccagcgaggagcctgagcgcctgccctgcctgcagcgcctcctggaccttggagctgatgtcaatgccgctgacaagcatggaaaaactgctctgctccatgctctggccagcagcgacggggtgcagatccacaatactgagaacattcgtctcttactggaaggaggggcagacgtcaaggccaccaccaaagatggggacacagtgttcacctgcatcatcttcctgcttggtgagaccgtgggaggggacaaagaggaggcccagatgatcaaccgcttctgcttccaagtcacacggctgctgctggcacacggggccgaccccagcgagtgcccagcccacgagtccctcacccacatctgcctgaagagctttaaactgcacttccctctcctgcgcttcctcctggagtccggagccgcctacaactgctccctgcacggtgcgtcctgctggtctggctttcacatcatctttgagaggctctgttcccacccaggctgcacggaagacgagagccatgcggacctcctgcgcaaagctgagactgtcctggatctcatggtgaccaactctcagaaactccagctgcccgaaaacttcgatatccaccctgtgggcagcctggcggaaaagatccaggccctccacttctccttgaggcagctggagagctatcccccgcccctcaagcacctgtgccgtgtggccatccggctctaccttcagccgtggcctgtggatgtgaaggtcaaagccctgcctctgcccgacaggctgaagtggtacctccttagcgagcacagtggctccgtggaagatgacatctgataggtctcaggctacaggaacgggggacacggggcagctcaggtcagcctgttgggtagatgctgggacagcattagaagaaggtctttttgatctgggagatgagacgggatccttcatgagaaaagccagccaggtagagcctgaagctgtgatcactccagtggtgaagggtgcagctctggttcttccagagagactgaccccttccctccagcggcactccaaggtcccccccattgttggaaagaggaacaggggcttggattgatgttataccctctgaattggagggcagtgccagggcattttgcagaagctgggaaggaccaagcctcaggaacccagggctgcggggctcttgtaggccgacgtggcagtgcagctggagaggaagcctggggcaactgtcctagtgcggtgccaccaaaggcccaaccctgaccccttatacctatccaggtttctatatactcagagaagtggtgcctggtgggctctgcgtggagaaagacactaagggccccaactaggcttgaaatcaaggtagtaagcacagccagggctggcccctgacctagtacgctatagctctggagtgccaggtcaacccgtggccccacatagcagaactgttgcactgatggcaaacttgtgctcatatggccaaactcagggacctcagagaccattaacagctcgtgcttaacgaattggcaagtccatgagtttgcagttgccatggaggacacagacctactcttgcagtaggtctcctgttgagtcgggggtacagctatgtgacgcccacttgatggagcccgacttgtgtgcaagccaaagatggcgagtgcgttaagccctaccacatgcatagtatggttcgcatgagaagtggttgtactcaccgtag

SEQ ID NO: 94576 - DNA, 697 bp, Homo Sapiens
tttggagttcaaaacattaaactttaattgactacaacatttgtgtcatagacacagtgaattacaacctggagggaaaatccaccctactctgccctgcctaggccattcgcagacaggtttgcctcccagtactcaagggagaagcccctacacacagaaatctcagaacactcctcatacctcactcagttaacttggtggaaaagtctggctgtgtgcacgggcagacggcaaggcagccagcagcagaacactcccctctctagaatggccttctctgcacgagtgccccggagcccgactgatccagtgctgcgtgagtgggacagacccacctttgacttctgatctcacgaacatttctcaaatgctttctctactacagggaattgctaaccaaactattcaaacatggcagtgggaaagaatctctgcttttcagcagagcccccaggggaactctggggaccttcattttgtattcaggataaagctctgtaactccttgtgttgaccaggcagaccatccacacccgctcctcctggggtgctgtctggctcctggggatagctcagcccaggctgctccctgaaaactcaaggagcatcctggctccccagaaggcatcaccagaggcctggctatcagaacactgcaccggctggagggcagggccggctcagctccaggcag

SEQ ID NO: 94577 - DNA, 476 bp, Homo Sapiens
ccaggagaggtggtggccttcacacatgcacatggagttgaggaccagggagctgcagggaaagcaacagctataggtgccttgctcttctgtcggaggctgctgggggcaagagcagctgcacaaggccagggcaagtgctagggcccctcccccatcacatggtcacactgggacaggcgtgcagctcactgaactccaagcgagccagccctctcttggactagaaggcctactgtcagcccttcgcttacaaactgcaggctcaatccgaaggggacggccggcgggggctctcctagtgcccagagacaggcccagaggtttacaagttttctaagcttttgataatgtgaagctccaggccgagaggatgctgttgagcacattgcagctatgtaatttttggtgtatgtatgtaatatttaaggttggaaaaaaaactcaaaagcaaagatattaactcttattagaaa

SEQ ID NO: 94578 - DNA, 362 bp, Homo Sapiens
atgaaccaccgcacctggcctcaaaaactttttttaaagccatttttatataaaggctacagtatattttcctccaaagttaaaaagcacttttctcatggctaggaatgaatatttaaatgcattgtttttccagactgatgatttttaggacaaacctgaagctagaaatagtactaatactcaacaccaagtatatgtatgtgcagaggcttggggaggcatataggatttaaatttgaaatttgttgctaaactcaccaaaacagaatgaatcatgagacctgcagaaggaatcctactcgagaaatggtgaaccatccaagagtcaattaaaaataccctagaataaaactaagttg

SEQ ID NO: 94579 - DNA, 469 bp, Homo Sapiens
tttatcaattgatagtttaataggtatgattttttggtatgtcattttagcagctgctttagggtttacagcacatatctgtaacttatcacactctatcttcaaatggtagcacgtcaccttgtgtatgagaactttacaatagcatgattctcctctcctaatcttcaagctattgtggtcatccattttactcttacatatattataaatcctacactatgacttttatttaaataactgtcttttaaagaggtttaaataataaatgctacatttacccatgttgttactatttccagtgcttatttccttcagaaggcaggcattttccttctgcccaaaggacatcctttaacttttcttgcagtgcagacctgtgggtgacagtctttcagcttttgcaaatttgaaaagatcttaatttcttcatatccattattctattttcagtggcgtctagtctgct

SEQ ID NO: 94580 - DNA, 472 bp, Homo Sapiens
  misc_feature (315)..(358): n is a, c, g, or t
tttgactatttacagaactctattcgtgaaacagacattagagacaatccaatccgatctctgttacattcagtaagtccagcaaaagcccctggatagtgatgtttgttttctctcaccagctcacttgtagttgaggctgacaagtttagaaaacttgtctagaagtctgccacccatttggtggacagagcaattcttagaagggtattctaagtcctaattctgctctcttgagcaacacaggatacaatatgttgctcctcttcatctgcaggaaatagtatggtggtcagacctgggtcagagagacannnnnnnnnnnnnnnnnnnnnnnnnnnnnnnnnnnnnnnnnnnncgtgggatggatgggctgtctacgcccgctgttggtatcactgcgccctttattccacacatccctctggatgagaattagatttcagcaggtatgaagatggtgcttgttttt

SEQ ID NO: 94581 - DNA, 1025 bp, Homo Sapiens
  misc_feature (877)..(877): n is a, c, g, or t
  misc_feature (995)..(995): n is a, c, g, or t
tccggaattcccgggatatcgtcgacccacgcgtccgctagagacctcacccacctgtttgcgagtcacccaccttgggctacttcttttctactatttaatcttctgggaaaacagaggtcttctatttggagataaaaatgacaaaggagaacctcctgaacagaatccagtttgcttttagctttagccatctctctgacctcagtgctgctggactcagttccaagatctaactgtcaaatgctttaggggaaacgggaagagaagtccctggagtaacccatgtgcgcagcctggcactgttttcacttgcctttggaaatgaaggtgcagaaaccatgggaggaacctgatgaaatgcctggtctaacaggaggatgcagagaaagttatgaagagaggtaggatcctgaggaatttgctcctgggccatgaagatgggaagctgagtcagagtgcagttcttcacccaatcccacagccacacgtgcctgcttgctcacgggatcttcccactctcctcgggaaggcttccgagctgcttcctcaggatgtcctgtgatagcagcctgacctgtcaaagccatgcgaataccatctgttcagttatataacttgagatctgggaagaattctcaatgtaggatttgctgcccaaatcaaatcattttcagaaaggagattaagcattctttgctgggaaaaggagaaattaccagaaaaattatcatttcactgagtataaacaaacctttgtccaaaatacacaaatgaaaatgacaaatttgcttcattaatatttgcttgcattaaaaaatatacacagggctaggtatggttcaatatcttaagtgcaaagtaaaatcttaattangaacaatgggaattgttaatttaatgaattcttaattttgtttagatcattagcctgcagtataatgtccccagcagaattgggggttggggaaccttgctggctgggaagaagaaantgctcaatctctaacgacatggacagatta

SEQ ID NO: 94582 - DNA, 760 bp, Homo Sapiens
tttacaagatgatcagattatttattaatgacagaaaagtatgtttattctacttaagtctctccaataagacaatactcttttttgtttaagggcaaaaattacactaactctaatagacagggaatattgggttcttcttcattttgcattaaaatcatactttccccacattcttggaaaaagtcgtattcggaaggactgtgaagaagagttagaatagatgaacatttgggtaaagaagaagaatataaattatattggagaaggtgatggaaatgggaaggatttggtcaaccacactgaaaaaatgatgtgctcatttgtagttggtagctatataaaaataaaaccatctagaaaagcaacagtatacttttataccactgaagaatcccagaatatatacacaattaactacaaaaagaaatctcaaaatctctcgaatgctgtattggcagtatttttggtggttcctcctgccacaaagcctggctctgatatcagcattcaccctccccaacctcaggtgaatcttggcctaagtcattcccaatgccaatgtttggtttaggaaggggcctatggcacagtcctgggcaatgaggcgccagagagagtctactgggaagtttgtcttgctcttacaaaagaaaacggatgtgtgaggaggagccatttcattttcctgtctctgtattcatgaagatgttgcactcagagcttctgaagtcatcacacaataaaagacacctacaag

SEQ ID NO: 94583 - DNA, 499 bp, Homo Sapiens
agcgtgctgctgcagaaaggcatcttctggaatttttttgtcagctgtggcaaagccagcatttttgctgggaaaaaacatgtctgtgttggaatacgcgacagagctgggcgagaacgcagcggcccgggccggcggagagtgtgacccgtctgcaccttgctctgtcccacctgcctctgggtgcccggcagctccactagatttttggattcattcctttgaagggagtcgggttcacccttccatcgtattctcccaactacacattgtaaagcctgagaaacttctagaacctcaggaagctgcagctggagggcgtgcacctgcccccctgctccccacacatcatatcctccccatactcctgcagggcccacggctcctgagcaacagctgggacacccgggccttggcggctgcaccccctgctaggctctgcccaccggccaccaacactcctgtaattccaataaagcagtttattttctgagaaaaa

SEQ ID NO: 94584 - DNA, 444 bp, Homo Sapiens
gctctcacatataaatactgttgggcacaaatatactttgtcttcagaaaaaagcattcttagttaccatgaattatatttattcatatctggtagttggaagtatttctctattagatctgtttagaaaaatgtgtaatttttttattagaaaagttttagtgttcagaagtctttgggggataagtaattgcagtaacacaatctccgtcttactctccccccatatagatcaaatcataggaaattttattaatttcagccagcttacttccccccttaatttccttttatgaatcatggcattaaaatagacaaatccctttttgctctcctgtgttttagtacaacaacagagaaccatctttagtcctctaaaaggcaatgtgagataggattttataaagtacattgaattaaaatatttttcagaataaaaaatag

SEQ ID NO: 94585 - DNA, 483 bp, Homo Sapiens
gcggccgcgttggcgtcctcgcccttgatgcgcaggcacttgccgcgcagcagctgcagctcgggcagcgtggcacccagctccgactcgcccgccttggccaggaacaccagcgcctggttcagcgccgcctcgtccaccgccagcagctcctgcaccagcgtccacgcccatatagtagtagacctggccgatgtccaggtacgccttgaagcctgggcacaccctgaccacttcctcaaggtcagccttggcacaggccaggtggttcctgtcaggcatgcacccgagacccatcttggcccgcttgaggtcatgcaggtaggctctgatgtggatcttggcccttgtgcagtacgcctgccagttgagctctggatctcgtaggacatccagggccatgttgcaggttccaatggccatatcctgctttcccaggaagtagaagatttttgccaggcgattcaggatgggaagttggtt

SEQ ID NO: 94586 - DNA, 418 bp, Homo Sapiens
tggggaaaccagctgctacatcaccatcagccttgtgaccatgccacatggtaaggagctgaaatctcagcagccacacgagtgagctcggcagcggatcctttaggccccgtcatgcaatcctggattgcagccctggacatccacttaactagcaagactgagccagaaccacccagatgagctgctcctggattcccaactctcaaaaactgtgagagatgttcaacggtggttgtttgaaactgctgagtctcagtataatttgttacacagcactagctaactcatacacgtcacgtttctgcagcagaataccttggacctggggagagctggagataattactcagtaccacccagtacatgggaaagtgattactgacaggctcagaaatgttaagaagatgcttaaaag

SEQ ID NO: 94587 - DNA, 444 bp, Homo Sapiens
tgagatggcccagcagggagtggcagggacgggaggcttcaggaatattcctcctggcatccaggccccctgggacagaggagggtgcagtcaggcgacaggcttatctggactccctgcctcaatccctggggattgtccaggcaaaacctggagggcagcgggcaagctgttggatggaacagagagaccctcgcagctgactagggcccaaggggacggacactcaagaagatgtaaaattgggaggggtggtattggccattggggcaggcagggccgggaagggaagtagcaccggccgcagccccaagccagtggcttttccacaagggcctaccctgcagccggcccgctccggcttcctccactgctgaagaccctgctgtagagctgaagctgaacatgtgtttgctaaataaagattcccattcctagcgcaaa

SEQ ID NO: 94588 - DNA, 468 bp, Homo Sapiens
  misc_feature (48)..(86): n is a, c, g, or t
gttctctgtaaacatgagttgattttttgctccccatcttttttgttnnnnnnnnnnnnnnnnnnnnnnnnnnnnnnnnnnnnnnnaacgtgttatacaatgactcttgggcttgcttaaaaagacagatatagccacagatgcagggagtttgggcacaaaacacgtgcagtttaaagttggtgtgcgttaaaccaaaaataaaaggggggacataaacaacaaaataacccatatcaaagacacaaaattatgtaaatggaaatatatgtactaagtttcgaaaattttttgatgtcattataaacctatgtaaataatgtaagaaagtagacaccctttcagattaatcacaaaagtgccaagctcatgattttggttttcggttttgacaattttctttccctgtctttaatgtgaaaggaggataaacttaaagccttaaataaaaaaatttttttaaatgtt

SEQ ID NO: 94589 - DNA, 550 bp, Homo Sapiens
cggcggcttccgacaggtgactgcccgccgccaccagtggccgggtcaggcgttcggacagactgggcagcagcaaggtcagcccgaatagcgcaacaaacagcaacgcgagccagcgaccgtactgattgacttgcaccacccaaccgccgcccaccgccgcgagcgaggcgaccagggcgaacgtcatcgccatccccagcagcagcggcaagccactgcgcaaaaacggctgcccggtgcgagcgaagacaaaaggcagaaccggcaggatgcacgggctgacaatcgtcagcacgccgcccagatacgcgagaaccaaaagccacatggggtattcccttataagaagacatcgaattaagccgcggtgaacgtcatggctgcgccgttcatgcaatagcgcaggccggtgggtgccgggccgtcatcgaacacatggccctgatgaccgccgcagcgccggcaatggatttccctgcgttccacaccgaaagaagtgtcaacgtggctggcccacggcgttttccaagggttgccagaaactcgc

SEQ ID NO: 94590 - DNA, 333 bp, Homo Sapiens
tgcagccgtcagcgctgccggcggctcccgttacgtgaattagtgagaggttcaaacttcttccccaggcttcagtgtcacatcttttcacacgggcaccccgagggcccggactggaaaggttcccaggaaacgatgccagcgctttgagtagcgaagaggtggagaaatagcccgggccgtttgcaagctttgaaggtccaggctctctttcacactcctcagtgtcatctcaaactgtcaaacgcagccacatccgttatacaatacatgttttgtagtaaaagtgttttgttgtgccgtaagatacagaaagtgtttttaaaaattaaa

SEQ ID NO: 94591 - DNA, 360 bp, Homo Sapiens
accacacttttttaaagctacattctagtctttcttcatacactacacataagaaagaaatgcaggttcaaaaataaatcacccaaaagtcttttccatgtccactgagacttagccttcagttcaacacaaacaagagataagtgtactccaaaatgccttctgaatctcaagaatctgtttccaaactagaacattttctaaagataagcaataagttccttaaaaacatgtctaccccacccaaaacaaatcaaacccaaaataggctttacaccctgtcaagtactaatcaataaagtgtggcaactataaactatcatcaaagaattaaagacacaaaccacccccagctatgca

SEQ ID NO: 94592 - DNA, 1469 bp, Homo Sapiens
  misc_feature (544)..(605): n is a, c, g, or t
  misc_feature (650)..(700): n is a, c, g, or t
  misc_feature (1211)..(1262): n is a, c, g, or t
gcgggtgtggtcgtcggggttgtcgttggtgtcctgtcggtggtttgtcggtggttttcgttggtagtcgcgtgtgctgtgcgttgctcctcgtgctggtgggcgtgcgtgtggctcgtgtggttggttgtccctgttgtcgttgtagtcggcggtgctcgttcgctgcgcggtgctggtcggtacgcgtggtgccgtcctcgctctgcccgctcgcgctcgcgatagccgacaccgcgcgctcgctcgtgctacgggatgggatggctcgacgaccgcgagcggttttcggacccggtcaccgtgatcggttccgtgcggtggggacgtacgcgggtgttgctcgttgtggtcggtgcgcgtgctcggtgtcgtgcggtccgtccgcgcgtgtgcgggccgcggcgttcgcgtccgtctgtgctcgtccccgtcgtccgcccggtccgtccgcgccgacccgaccgtccacgttcgcgtcggttgtcccaccctccccacgtgcgccgtcgcgcgtccgtcgccgtggtccccgcgtggtgcnnnnnnnnnnnnnnnnnnnnnnnnnnnnnnnnnnnnnnnnnnnnnnnnnnnnnnnnnnnnnncgtgtgtgctcttgggcggtctccctgcgtgggtgggtagatgannnnnnnnnnnnnnnnnnnnnnnnnnnnnnnnnnnnnnnnnnnnnnnnnnngggtcgcgcgaggcagcggtgttttgtgtagggcgcgcgcgtgcgggtcgggtacatggtgggagcggggtggtggggtgttccgcacgggcgtgtttcgccgtcgctggtgggacgggtgggggtagaggtggtgtcgcctccgtgaggggcggccgtttgataagtgtgtctctcggtggggggggtggcgttgttcgcggctcggcgtgggtgtgtgtgtcgctgcgctctccggagagggtagaagcgggggtcctccgtcttgtcctcgcaaagtgattctgctccagtggtcgtcccggctgttgttctccgctagggcggtgcagtgttgttgttagagtggcgtgggcccgcgggtggtgtcgtggggtctgattaaatgtgtcgctcgcttctatattgggggtgccgctccttttgtgcacacgaaaatcgtgtggggtgtagcgtcgcgaaatggtggggcccctggtgggagatatttttgagggggccggcccccccnnnnnnnnnnnnnnnnnnnnnnnnnnnnnnnnnnnnnnnnnnnnnnnnnnnnacctgcagtatatgaaatgtgtttcctttattttgatttcttgggccgactgaagggtaaaatgtccaagctgaaatatcactgccaagcaagttcactaaacccagctacaacggatgcaaagggttttgactgacgtgcattcctctgatatcttccaccttgaagtctctgatgaggtagcaaggcaaaaaagttaaatctctc

SEQ ID NO: 94593 - DNA, 542 bp, Homo Sapiens
attgcttgtaggattgtaaaacggtctgtccactatgcacaaaagtttggcagcttcttatactattaaccatacatttatcatatgactcagcaactccacacttaggtatttaccctagatgaaagaaaaattctgtttacatgaaaacctatactcagatgttcacagcaattgtataattgcccaaattaggaagtaacacaaatgtacatcagtggatgagtgattaaacaaattgtgtacaccaatactatggagggctgctcagacataaagaaatgatttattgacacttactacaacatggatgaatctcaaaagtgctgttgtattttaggtaaaccatgtgataacttgaattacatttgataaaagatttataagtgtaaaaactagatttatatattttaattttatatgtgcctgtcattacatactatagaaaattgtgtctacagtatgttatatagcatattgtaatatttattactgtatattccttgtgacaataaaatagtttgtattttatataataaaaa

SEQ ID NO: 94594 - DNA, 329 bp, Homo Sapiens
  misc_feature (66)..(74): n is a, c, g, or t
gcacgaggggccactgagattttcagacacaaaccaagaggattgaaaagatctcattttaggggnnnnnnnnnctaaagaggggatttcaaaggcatataccctgttctttattacagtgggaagtcccatggaccgaattcaattgtcctatgaagcggaactttcgtcctaaaaatcagaagtagctggtgttggactcaacatgatcccaaactcacctaatagctgcctctgagaatgcaattttcagtcaggagcacaagagaagtgctcattaaaagtgctcatggaacttcattaaaagttccatgtttggccaaaacccc

SEQ ID NO: 94595 - DNA, 589 bp, Homo Sapiens
  misc_feature (345)..(456): n is a, c, g, or t
ttattaagaaaagaagtttaattgggttatggttctgcaggaggtactggaagcataacactggcatttgctctggggagcctctggaggcttacatttgtggtggaaggcacaggagcaggcatctgtgttttaggagaagttacccaggaatcaatgtgaagggcagattagaagagatccggtttggaggcaaggagaccctagggaggagtcttctaaagtgggttggtcagttacttctgtttggggcagatgaaaagaagaaggtggaatattccacaggttagaggcagacatcctacctcctctccacaacaactaccttcactcatagataagtcnnnnnnnnnnnnnnnnnnnnnnnnnnnnnnnnnnnnnnnnnnnnnnnnnnnnnnnnnnnnnnnnnnnnnnnnnnnnnnnnnnnnnnnnnnnnnnnnnnnnnnnnnnnnnnnngagatgctatcggatcccattccaatgtggttcactgatgttgctggcaaatttgggaaaagcctcaggttctctttacatggaactgtcctaggcctgctttattattcttaaaacaggttgtttggctttt

SEQ ID NO: 94596 - DNA, 659 bp, Homo Sapiens
catatatgtggtaaagtacttgtttctaaaatatgtaaagagctctcatgactcaattatttttgtaaaaactatccaattaaaaataagcaaaagctttgaacagacttcaccaaagaagatacatggatagcaaataagcaggtgaaaagacgctcaacatcattaatccttagggaaatataacttaaagccagaatgagatagcactacacacctatgagaatgactaaaaccaacaatactgagcataccaaatctcagcaaggatgtggaaaaactggtaaatttgtacgctgctggttttgaatggaaagtggtgcagccactttagaaaacaattcagcaagttcttcaaaattagacatgtacctagtgtacaatccagcaaattttactcctatttatttacttaagaaaaccgaaagcctttgcccatagcaaagcttgtacacagatgtttttagcattcttagtgagggctaaaaaactggaagcaacctaaatgcccatcacaggtaaacaggtaaacaaatggtggtagatacatacactggaatgctactcggctctcaatccaaaggagtgaattattgataacgtgcaacaacagtgatgattctcaaaataattacatgaagtgaaagaagtgagacaaa

SEQ ID NO: 94597 - DNA, 483 bp, Homo Sapiens
  misc_feature (135)..(153): n is a, c, g, or t
cccaatgacatccactgatctactcttggcgttttgtgaaacaagcatgcgccagggaccacaacagcagaacgctagagaaaaagatagtgtcagaagtggtggtgacttgggggaaaaaaagtggagggagtnnnnnnnnnnnnnnnnnnnaacagattcattttattttcaccatggggcgcaccctgttggtgagttctctgggtcagacctccggtggctcctaggtctccgggctgggcctgaagttactcgctgctcagggagagaatggagttggttgcagtcccctcactcagtgggtccggctgtgtcccctcactcagtgggtccggctgtgtcccctcactcagtgggtctggctgtgtcccctcactctgttcctccgcctgcgtcccctcactcagtgggtcgggctgggtcccctcattcacttgctcttccagctaggtccccttactcagttttcctctggctggg

SEQ ID NO: 94598 - DNA, 923 bp, Homo Sapiens
  misc_feature (245)..(245): n is a, c, g, or t
ttttttaaggtaactgtgcaactaccagcaggtacttttaaaatagtgcttactaatggctggagttgcttacttctttagacaaccttggaggggagtatcagtgccttgcaagtctaattacatttctaatgggcttataaaagcagtgatgacccaacatcttgtagcattgattttagtctgaggaaatatagtttgtttttctctggcatgaccttgcattcttcaaaacattatttgancttctatctctgggtgctcatttcttacctagtaattcatcgtctctattacaaagaagctaagggttttggttggctttggaaaatgttgagaaatttgaggtgcatttgaacatctttcattggtgtaacgcttgacagttgaccaagcacttttgtgcatgttgtctccttccatcctgaggtactgcagagagctagtggtatttctcagctaaggaatattatttaaggccacactgctctcagctggcagagcaaggtcataatctttgagactccttagcaacttaaaagtatcaaggtgtcatcatcagtttaggacgctgcccgaaagcatctgaagtttacaaaaatgttcatatttttttctccagtgggctagtaaaagtcctaaatatattttaaactaaccattgcttaaagtacttacttggtctggatttgccaccttaacagtttagtatcgtaatttagtgaagaaaatctgtgttttcttaacttttgtgtaatttttagaggcggaacataggacagcaattcatgtccttcgttttaccgagttgagggattccagactgataaaagggatttactctgacgtcccattctcttgttcttccatatttactctacccccttgaaaaccctcatctcctttaattcacttcagattgg

SEQ ID NO: 94599 - DNA, 544 bp, Homo Sapiens
cttagtttttgttaatactgcaccataagcggaaaatagactcgggaactgattgaggttactttgaacgcaccaagatttttttccggtctctggtttgtgtcttaatttccatactgttaatgttttagggaaacgtaataatggtgcattattgtcctcgttttgtttgaaaatcagatcttcacataattttgggttgggtagttggggttcagaggaaattggcaagagggctggggtttttcggggacgtcagcgttgccattccaagcatgctgcccagaactgctgtagatgggaagagaaagctgctctaatgtgtccgcagccctctcaagtgctaccatataattcgcgtcttgtttggcctcaagacagttggcctcacaatagatataagatgtggtttagtagacacctcgtccagtggataggaggatgctctcatggactggacacatcaagtttttagcctgtttaattaaacctagaaaaattgttacattttagaaagtttttattgatgataaaatgttctctg

SEQ ID NO: 94600 - DNA, 343 bp, Homo Sapiens
agaaggtttctggaactagatcttcctccctcagatattctttatgttaatgaattgtcttctgtagaaatgcaaagatcttttggaagggctgtacacaggtctaagattgtagctaagatattgctacccagagagattttggaagacaagtgttgaaaaagcggccatcagcctgagtccaggatgactgtgcacagaagggttgcccatcaacttagaacattcacttcaaattgtcacgtgcgcgagacatacactttttattctgcaagctgtctggaaacgtcatttgttacagtgactcagtatatccttcactaataaaacatctcatgcaaaa

SEQ ID NO: 94601 - DNA, 470 bp, Homo Sapiens
tttagacaaaaaggcatctctacttcacaagtagtgatttccatgggcctacacaaataggcctgattctgagatctgggggtctagagatcttcctaatggtgaagatcttctcacaggtaaaggagtagctgggccaggacaatatcctgagaaaaacaaacttgagagaaacccagaagcctggacaagccttggacagacgactccaggcatattgaagatgcaactaagaaaattacatcaggagctaccatcaccccaacatatagcccaacatctacaaagtctcccaccagctacatttattttcttgaattttctcgctcttctagccccataaactggtgaactccttgagggcaaagactgtgggaaattctgtccagtgttttaaagtcctaatccatgtccttttcccatcaggaaccaccctaataaatgaacttcagcccatcatcagggtaatg

SEQ ID NO: 94602 - DNA, 737 bp, Homo Sapiens
  misc_feature (134)..(304): n is a, c, g, or t
agctcatgagctatcattagtatattttatatgtggccccagacagttcttccactgtgggcccagggaagccaaaagattggatacccccatctcagagaaaagggacgaacctgcagtgccgagtggtttcnnnnnnnnnnnnnnnnnnnnnnnnnnnnnnnnnnnnnnnnnnnnnnnnnnnnnnnnnnnnnnnnnnnnnnnnnnnnnnnnnnnnnnnnnnnnnnnnnnnnnnnnnnnnnnnnnnnnnnnnnnnnnnnnnnnnnnnnnnnnnnnnnnnnnnnnnnnnnnnnnnnnnnnnnnnagttcgagtagtacaaggtgaacacaaagtaaatgcttcataacacaagtgttgtcacgattttcatttagcgtttgccaaggctgccattgcaagacacaggagcgaaggggttgatctctaatagccaaagtgtgtgacaaatgagaattgaactgtgtcccagaacatcctcccgccctacacatagaaacctggggtcacctccctgtcctcgactcactgtgtgacttcaggcagaggtcaccaccctctctgggccctttcattctctgctatggactgagtgggaccagcttggatcaaaatcctcaaacctcatacaacactgtcagcagcttttcctgtatctgcctgttacctgaactattaacagttttctttaaattggctccttttaaagtaaaatgttttgaaaagagaaacttttgtg

SEQ ID NO: 94603 - DNA, 510 bp, Homo Sapiens
ctgcacttcagcctgggtgacagagcaagaccctgtcttaaataaataaataagtctcttagttgaattgattcatagtattctattttttgttctctgaaatgataggtttattacagaggtcagctgggaagagctaccactttaagtgtaactcctgaaatggaaagagtgaagaagaatcaagaaaatattagctcggtaaaatatacccaggaccataaacagatgaaaggtagaccaagtctgattttagatacacctgctatgagacatgttaaagaagcacaaaatcatatttcaatggtagggtccaaccagatcattcttaaaacatgctaaggaatgggcggatccagtgcacggatggcattacttcactattaatccgataactaacaaagcatggaaatgtggttggcttgtcttttgagggaggggcatttctaatcacactgaaatgcagtggaaacatttagtctaataaaatgatttttctcagtgaaaaaa

SEQ ID NO: 94604 - DNA, 760 bp, Homo Sapiens
ttgtttctcataccgtagagaatgctttcccgaagaccctctataggaaaatactgatgaactggcctctgatgtgctggtgttcccaagatgaagaagagagatcacaggaagaaggaacaccacctagtattgctaccatggcagtaccaactagcatatatcagactagcacggggcaatacagtatgtatgctgcaattcgatatgatacagtgctagctttaagtcttctctagttatattgaagcaactcaggttttggcattaaattgttccattttaaaatgcatcattaatacctaaactgtatcatagaatgaaagtatatgttaaaaagtgagatctttgtattgacagctgtcatataattttgaaaagtaaaaattttgactgccgaatatagaagaaaattttggggtaaaaaggagaatttttcctatttacatgtttatattaatctctagtaaaacattgtttttgttgtctttatgatgcatgcgaacataaatgtctgtatttcattcttgttggcttttgttacccacaattacatactattcttactaatctgagagttttctaaagtatgttttcaatgtttcactactctctactctgttaatttgtgctacagtttttcctaaaagagaatggaaaaatgatttaattttttaaactgtagcaattggatagataattttatttgaaattttacacactgaaagctctaaataaacagatacattcacattcaaaa

SEQ ID NO: 94605 - DNA, 1048 bp, Homo Sapiens
  misc_feature (104)..(145): n is a, c, g, or t
  misc_feature (972)..(996): n is a, c, g, or t
gctggtaccggtccggaattcccgggatatcgtcgacccacgcgtccgcccacgcgtccgtgcattactattgtgcggctgcaggaggtgtcgagcggcgttannnnnnnnnnnnnnnnnnnnnnnnnnnnnnnnnnnnnnnnnnggaaccgcggttgtttaaaagcctgagggaacctggaggggggctcccactctctaccttctttcctccgagtttgtgactccgagatggacaaagtgtgtgctgtttttggaggctcccgaggcattggcagagctgtggcccagttaatggcccggaaaggctaccgactggcggtcattgccagaaacctggaaggggccaaagccgccgccggtgacctcggcggagatcatttggcatttagctgtgatgttgctaaagaacatgatgttcaaaatacatttgaagagatggagaaacatttaggtcgagtaaatttcttggtaaatgcagctggtattaacagggatggtcttttagtaagaacaaaaactgaagatatggtatctcagcttcatactaacctcttgggttccatgctgacctgtaaagctgccatgaggactatgattcaacaacagggagggtctattgttaatgtaggaagcattgttggcttaaaaggcaactctggccagtccgtttacagtgccagtaaaggaggattagttggattttcacgtgctcttgctaaagaggtagcaagaaagaaaattagagtgaatgtagttgcaccagaactcatcccaagaacagtatccataaggaagatggaaaagggggacagaataaatgttaccctaagaagtccagagcaacatggtacctgattagctgtttcctcttctggctcctgaatattaaagacagtggcactgtcagcacctagcagtcgacgagccattctttcttcgtatgttaacctctaaacaacgtaagtcacnnnnnnnnnnnnnnnnnnnnnnnnncacaaatatgtactgccctatgaaaaagagtaaaaaacaacacactttcaaa

SEQ ID NO: 94606 - DNA, 416 bp, Homo Sapiens
  misc_feature (32)..(32): n is a, c, g, or t
  misc_feature (37)..(37): n is a, c, g, or t
  misc_feature (45)..(45): n is a, c, g, or t
  misc_feature (366)..(366): n is a, c, g, or t
  misc_feature (369)..(369): n is a, c, g, or t
  misc_feature (371)..(371): n is a, c, g, or t
aacaacctggatacaaccaacaggagaccttnctaanctggtacnctattccactgatgaagcctctgttcacaagctggaagactttgtattcctgattagctgtttcctcttctggctcctgaatattaaaagaagtgcactgtcagcacctaagcagtcgacgagccattctttcttcgtatgttaacctcggctggccattgttcaggaggtcctccttgaagcgaagttttcgttccaggtcttgaataacagcatcctttgtgccttgaatttcctcatcggaggctattctagcagttctactggccttctttggaaatcctgcgggggtgacacccttgggcagccccagggcgttgnacngncccggcggcggctgcgagggcagcagagcgctgaggaaggccgcg

SEQ ID NO: 94607 - DNA, 935 bp, Homo Sapiens
taaaaactaaagggcaagtcttcaatttaatctagttccatattgaataattccagtgggggaggcagctggtgatgaaaggaattgggggacagtataggaatgttcgggtgactactgattaatgtagtgaagatgatctgtcacttgccagaccaacaggagttggaaagagaaacctagccatggtgtctgccacagagggaccctctaaagtgctaggaggagggtggggggcagtcgcacctgtgggatgccatgaacagcctctgcaactggccagcaccaggaaggggggcctcctggtggtggagttggagtcctttctggctgaatgaggagcaatgtggctggggtgtgcgcggttgcgtggtgaggtccgggtgggaagccgtctctccgcattgctcctgaaagctctgcttgtagtttgaaggtcggtagagcctgggcttaatttacgcctactgtggacacccttttgaaatgttgatcttccaattgacttggatctcctctggatttttgtacccgtctttccccgcgtcggactcttaaaagtaaaatagtagagcaagtccaaagcgtggatccggaggagcgtggacaaggtaacctgtgaaggatgtaccgggagaagggagtaccaggccgaaagggcccagcccctacgaggcagctccaaactggggcagcgcggcaggcccaagagggaggcagggaggtctacacgggtaagggcacggagaaagcacggaactccaaggccgagaggaaagggcaggacgggaccaagcaacagagggaccagcagcgaatcacaacgcccagggcacaaaagcccaggggatctagcacctgacgcacagaagcggatgatgaagagcacactgaggaaccaagcgagcactgaaccaaaaaggagaacagacacc

SEQ ID NO: 94608 - DNA, 328 bp, Homo Sapiens
tttgagagcccctctcctgcaccaaaacaaagtttcgtgggccgtggtttctgtttctgcatctaacggaggcatctaacctgggtagaccacagttgttggccacgggcttcctcagccgctgccgcagatgtgcttatctgactccctctcccatcccagacgccacgtggaaaccacagccgcgctcacaggccatcccctcaccacacggcaactccaaggactctctttttgcgggggtcgtaggtggggaaggctgctgaggtcctcccacccctctcccaccagggccgctgtggctgagaggattctcgttggcgctggt

SEQ ID NO: 94609 - DNA, 355 bp, Homo Sapiens
acatgatgctggtttctgcagcagcctctctgcaacctgagggcagcaatgccgaacaggcagcaagctgcaggcacacttgacagatgtgaagatctgggttctggggatgctgttgagctgctcgatgagcccactttggacctgccctaccgccagactttttgtgatccaagtgcaaggaaattacagggctatcaactctatctctttccaagaccagaaagtcggcagatggagaacggtttctagatggggagggaatctgcctttggaacttttagcgacctggtatggttcaacattccatcactatgcaaaaataaataaataaattgcagaccaacgtacaaaa

SEQ ID NO: 94610 - DNA, 616 bp, Homo Sapiens
tttgtagtgcaggagaaactccactctttattcccaggttactgacagaaacattacacaataagttcttatgaaagtagatgcaaccatgactttaaaacaggaaaggtagaccttcttacttaagtgtcctggcctctattgtctgtcaccaaccctctgctttatcttgacaaaacattagtcaggcatctctctttcacacaggcccttgaactttagcttgctcctcttgtcagcttatcttgtgtgcttgcttaggcaagttgacatcacaaactccgtttcactatatcacttgaattttgtctgaattcaactgaatttcagatatgtaagcccatagagttgtgtagagaagagagcttctgcctctcaccactgtcagaatgttgttgaatcaaattgctgctgtctaggacttcgcacaccatcactacatgatctgtatcagcaaagaggcttcctcatatagccaagtaactcagctctgaatctaagtcttgaagatacagacacaactctgagctttaaagtaagtatcaagtatcctttctgcaaaaaagggtatcagaaatgtagtatgtagttttcttgcctcttcaattcaaaaggt

SEQ ID NO: 94611 - DNA, 438 bp, Homo Sapiens
ggttagtgctttctgtaacataggggaatgcctttgcaatgttgggacaggtaaagatttcctaggttacagaaagcactaaccattaaaaaaataataaattaaacttcattaacattaaacatttctgttcatcagaagacactgttgggggctcagaaagtgatgcccccaagtgaaggcttcagaagcagcctcaaaagcaaagttcctctggctctctcctgctttcgtctttcacctctcattcttcttcaagacaagccacagaaactagaatttctcttctgcaaagtggttcataaaaaccagaacccaaaaatccccaaagccagccataaaacagaaaatactactctaaccttcccctgcctttttgagtaagaactggacataaagaaattctcttacctactttgtttgattgtaggtcatgga

SEQ ID NO: 94612 - DNA, 367 bp, Homo Sapiens
tgacatctcaggtgaacaaattcttcccactcttctgagcaaccatctcaaaatataataaagatgctgccaagaaatgaagtgccacaaaaagaagaaaagacataagaagatactgccaccagaaaacactgggaacagaaaaagacacaaagtaaatagattgctggagatgcagtctggcatgtgctatgaaaacaatcaccaatttctgcacttgattagtctgcccgtcgcctcagccattgtcagccacattgcgttattcgaaaatgcattgcaatgtatttagagttatgaagtcttagagtttgtacttgattctgtaaataaattattattatggctattaaaactttttaaaagc

SEQ ID NO: 94613 - DNA, 432 bp, Homo Sapiens
agaagtagttattgcttaatgagtaggaaatttcagtttgggaagacgaaaaatgttctgaagatggatggtggtgatggtcgtgcaacaatgtgaatgtacttgatgccacataaaaagtggctaacatgaccacatggaaggagagaaaacacctgaacagctccaactgtggcagccataccagcccagatgccagacagtgaatgaagacgggcatcccattcccagtagaaatgacgtgaagaaccgaaaaaaactcacagacagccctagatatacacctccaggtgaccaacccagacaccaccaacagttagcactactccagctgaatactccccaacaaaaatctatccttgctatgtgttgcctgaattcatgaccaacaacggtatgaacataataaaatgattgttattttatgccaaa

SEQ ID NO: 94614 - DNA, 586 bp, Homo Sapiens
aatgttagtcagggtcactaaaaagtattgcacatttatataaatacagtccttttaaaatttgacttttaaaaaacaaaagactttgtacgatattgtgtttttattgcgtttgcaatatttttatagtagcctttatgaactcagtataagtgcaagttgtttgaaaaggtgtttttattagtgcacaatagaattgtgaggttttcaatagatgtcatgagattttgtatatctacataaaatatcagtacatttttttctaatgctactggaaattttacttttcctttgcaacacataaatgatatgatgtacaaaataacagctctggttccaccagtacctaatgttgaaaacatttttaaagtaatttttaatactaactatttagtatactgtcagtactgtacatctgcacactggtgttaatagggtatatattaaattatataaagaaataagatattttgctgttattctttctacatatattattggtcagtacatcaaataatatttggctttgatatgggaaaaaacaaactttgcctatgtaatggaaataaaatattttcttttatga

SEQ ID NO: 94615 - DNA, 1151 bp, Homo Sapiens
cgagcccaaactctaaatgtgcttgtagaaaaagggccaagtcattgactgcaccactccttcagccagaggtagaaaggatttactcttcagccatctggtagagccccaagaacaagttacatgtggacaaagggagggagaggtatcatggtgattaataaattcaaacaaagctgaatgataagaccccaggatggaatacagtctgagaaaggcctgggcaaagggaggcagagggactgaaggaagcaggtcaaggaagatacacccatggtagcctaggaaattggcagtagtgttggtgggtggggaaaaggagggtttggctgtatgcctagctttcacaaggtaggggatgaggaagatgatcatgatattgcacagaggacccaacactgaattgtgggagctagaggttgcttgaggcaaagtaaaaaggcttcggacactttcaaaaggaggctggccaaaggcgtgattagggactccagtaatggacatactagaggccctcgggcacctcaagccctgaatgggtcagcagctccccattcccagagagcaaagggcaggcaccactggaaccccggaaatctgtctgtagcgtgggaaccacagagacttggctcacatccaccagggtcagcttctgggcctcatactccagcaacagccccaccttctctggctgcccaataccctcaactggggctttctcgttggccaacatggtgtaccacttgcgctgggcataggtgaacacccaggaacgatcatcaacaccaatgcagctatcccgggacatgtccacatctgccactcctatccggaactgctgggagcgcttcactgtcacttcccagtagtgtctgccactggtgaccgctgtgtctgccagcaccactgcccactcccggaagcgctccacattcaaggccaccttggtgggctccaatcccaccaagccatatttgacacccgtatcatctctgaagagtgccaggctgctgtgggcggttttttcttccagtttgaaactgacgcctctctgggcctctgtggaggcaactcccaatcgtttggctccccagcggcacaagcgcaaagaacgtgcaaaaagcagcgccatcttgcgccttggatgaccc

SEQ ID NO: 94616 - DNA, 517 bp, Homo Sapiens
gtggcccccttccagacatgtgtgggacaggaccccacttcacacacaggcaactgaggcagacagcagctcaggcacacttcttccggggcctatatattattgtgtgttatttaaaatgagtgttttccacccgttgggaattgggaaagactttgcctcctacaacttgaaccaagggttcagagactcagggccccagcactaaagcagtggacaccaggagtccctggtaataagtactgtgtacagaattctgctacctcactggggtcctggggcctcggacctcatccgaggcagggtcaggagaggggcagaacagccgctcctgtctgccagccagcagccagctctcagccaacgagtaatttattgtttttccttgtatttaaatataaaatatgttagcaaagagttaatatatagaaggctaccttgaacactgggggaggggacattgaacaagttgtttcattgactatcaaactgaacccagaaataaagttggtgacag

SEQ ID NO: 94617 - DNA, 439 bp, Homo Sapiens
tccaccctgaaaagcatagatgttcaggaatttataaagcaaagactggcagaagcagacctagaccctagcgttcccccttatgactctcttcagacttatgcctatgaggtccagagatcagaagctgggtctatcagctcgctggatccagcaacgacacaatcagaccaggattatcactacctgggagactggggacccgagtttaaaaagttagctgaactctatggagaaatagaatctgaaagaacaacttagggggtcagttcttgcaaccttgtggaatttgcttcctgagtaagtggatatacaacctcagcaatgacaaggaagaagtgtggaaacagtacttggaactgaggaagctggacacagctcctgtagaaacaagtgcccttttcatgatcgaaactgggttatttaattggaagaaagt

SEQ ID NO: 94618 - DNA, 902 bp, Homo Sapiens
ggtgagtgtactgtgggcttcggagatcacgccactgctgccgcccgctgcccgccaccatcttcctcggcgctcggggacctcgtgtgacaggtgagcaccttacggcccctccctaccctgcccagatgcctgaaaggcctccatggctttcctgcccttcctggttccggacagctggggaaaggccacagcagctcctctgctgccctgcagtctttgggggcggggagggctggacatgtggaaccctgatgcagccgcagcgtcaaggacgaggaaggggtgggaagggatggtacgtggaggggaatgggtggtgggaccagggacccaatgctaataaagactggactgtgaaaaaaccccaaatcggctgaggggcgtaaaaattgttggcccgcctcgggccctcgaaaagctttctaaaccattccgtttggacgcggcgggcccactaaggaaaagtggaacatgggccttagcctgtttccctaaggaaatccctgggacttgacataagggcttggaatttctccccattaaaaacaaccgcccgggcgggcaaacccgacggtttttggaacaaaatcccacaaaggggagttccccggagggcaattaacgggaacccacgcaagaacgggacgacccacagttgagccgccaccatatacaaatgaacagcccccgagtaatgataactactcccccgagggtacttgtgaccgaactacccccctggaaaggccgcggcgaaacaaggtggtcagcagggaacttaccgggccattatgtgacccttagatattcacttccgcggttgctgcctagaccccctggtgagtcacctcgagacacctcctagtctatcccaacgtggacgcgactatggttgcccc

SEQ ID NO: 94619 - DNA, 437 bp, Homo Sapiens
tttactgggtactagagtcagagtcactttaatgaaaaaatgaaagaagcaggtatgaggagttaatatcataaacaaacaagtatgatttcacatggtttaatactctaactcaagctaggttttcctctgctccccctttttacttccatttttagaaaggaaataaatgataacttggaaacttctagtggtaaagaatctttctactggcaagagaggaaaacatgatttgagagtaagagatacctggtgtgggacaaacctgatgaagtgcttagggcaatctaaaggtaaaagatggtgataaaaaggtaatacaagagaccaaagtaggaagaactggtagaaaacactgcttatttaattatttttcctaaggctatggaagcagctggtatgctactgaaattcaactgcattgataccattctgtt

SEQ ID NO: 94620 - DNA, 391 bp, Homo Sapiens
agtgaccacaagctggatgagaagctgtgccagaggctcacacagcgctatgtgagcgtcatgaacaggctgcagagtctgggctacaacgggcgggtgcaccctgcgctgaccgagcagctggtgaacgcttatggcatcctgcgagagcgcccggagctggcggcgtctgagggcggcccctacaccgtggacttcctgcagcgtgtggtggtggagaccgtgcaccccggcatgctcgccgacgcgctgctgctgctctcctgcctcagccagctggcgcacgatgacggcaagcccatgttcatctggtgacgctggagctgggaggtccaggctcgctcagccccacagccctgtgcacggccattaaagcttccaacagacactg

SEQ ID NO: 94621 - DNA, 537 bp, Homo Sapiens
tttatttcaacaaacatttattgagcacctgctaagtgccaggcactgtggcaggcctgcaggaatacagtggtgaatgaaagcagaccatgtccctacccctcacggagcttacagtctagcggggcagagagtcatccagcaaccccctaataaagatataactacaaactgcgatcagtgcctttagaaaaggaaagaatgccctagaataagggtccctggcccaatctacagggtcaggcagggcttacttaaggatgctgaaaagcaaaacaagcaagtggggaggtaggggagtgagaggctgcttgggaacactgtgggagaggtgatgaatgcagtccccgacaaggtgagtttgaggaattagttgggccatcagtcaagtggagatgccgagtttggatacatgaagctaagggaagagccaggagaaagagaagggccagagagttaagaggaaaaccagcagagtgtggtctcaaggcaagggaagacaaagtgttttaagtaggagtggtcaaccacttcaag

SEQ ID NO: 94622 - DNA, 509 bp, Homo Sapiens
gtaaatgaggaagggttaagctttaacaggaaaaatggggaaaaaagtgagtaatatttcaaaatattacctttctatacaagggaaaggatccaaattataccactgtgtcgtaaaaattattatgacctgaagacatttgagaatcaacagatgcagaaagaggctttgtctgaatactcccttatctgactaaaagcagaaacttctgggagtgagactgccactagccccctctctggaggagtttcacggctgtgaagaagatgaagaagaccacaaacaaacatgatgaagaaccatcttgtctcctggtttgttctcctaaaaatacatttgtctttcctaaataaacccatttgttcttccagtagaagccttttcctccctgctcctttacccttattaaggtaggcttgtaaatccctgtctttagttatggataaagtcattttctttgtgggttcctagtatgtgaataaactttatcttttcttttgttaaaaaaa

SEQ ID NO: 94623 - DNA, 362 bp, Homo Sapiens
gggccgccctcaccgcatcccccgccgcatccctcgccacatcccccactgcagcctctgactgggtcggcgggcagcttctgcaccccaatgccagcccccactgacggtcagggcccacccgctcacagcctgcaggtggcccctgctgcagcacccaggccccccacagccctttggcctccctccccaggcctcccaaggccaggccactctggggacctccccagcagcagcgtaccctcacacctccctgcagctgccagcctctcagtaagcgctgcagtcccaacagcctccacgggagcagccactgccaccagcgccattggcataccccacagtaagccccgccgtccaaa

SEQ ID NO: 94624 - DNA, 561 bp, Homo Sapiens
ggaaaacagtttctcacattcgtggtaaaaactgaagagcatctccactctaacgataaaaatcaaaaggcctttcatgtttttgcacattcaggttaatataatgagaaatgacgctgggaatgactgatgagcagctgtaagcccatatgtctggggtgttgcctttttctctgaatagcatacgtgtttctgcctaccaagatctcagcgtggctgagtgactgagccttcaggcttggtatttccctgcctcctctgtgtatttccaattctttgacgtcacgaattttctgttttggacagctttgccttttccaggaggtgaatggtacggggatgactcacagaagtcttcagataagaggaggacaaaagagacccttgttcagtggcagaagtacctgtaaagccttagctttgcctgagatatgacctataactgctctgatttttggaccccagaaaacccttgaaagctcagcttccttattgctgcgtggtcaccttatcacagcactgcagagcctaggaaataaaggcacagactctctttagaaa

SEQ ID NO: 94625 - DNA, 382 bp, Homo Sapiens
gcagaatgaagtttgagatcatccaaaaagatgtatgtctgcaccacatttttcttgacaggagaaaaagtgacaagagctaattaaaggaaaacagaatgttcttttttgatggcccaacagacaattcttttcagtcacactttattattattagtttatcactaccctatttcttttaggtgtactcaaggtaacattctccctacttcctggtctactagttcaagaaaaacgtttgttttgagtgccacacggcgaacccattttagaagtgtttctattactaataaaacatttgcatatttggatagtaatatgtatcattcatagtttactttagttatttcacgatcacatttataaaagctttccagttaaa

SEQ ID NO: 94626 - DNA, 427 bp, Homo Sapiens
gtgtgatcttagggatcatgactgcttcccagaccttagtctcaggatgccacaccggaagagctggaccccacatttgaagacagatgtccctcgcggtgcccgcctgctctgtaaagagctagtcccaggctcccattgtgacctagcacctcaacctctcctgacccttttgcctaggccagatcctgagatcggagagtacatacatctccctggggcttgctttcctctcccataaaatttaggagttggggatgatcttatccctctacctagactgtagactcctgggagcgggaggcaaggcactcacaagcaagggcatcagagtgacatcaagacacaaacagccatggaatcttgggaacagatcaaggagtccacctcttaaaatattgtaaaaaataaaatctgagtacgaaaa

SEQ ID NO: 94627 - DNA, 457 bp, Homo Sapiens
aactcactttctcttttgcatgttgatctgtgggaaggactaacagctgtagctataggttgcctgttatccactaccacctatagttgagaaacagaaaccagattttggggagtattaccaactttaggaggagatgtcagattgcttggcactttactgttaaacagatacttcgcatccttgagtagcaaataaaacaacaggactcagtaaaaggttgtaatgacgtaccaggatgcagtgcagtgggacaattgtgtaaactgccaccaccctaaccactgcttcccaaaggaccccatggatgttctcctctgagtccaagttacacaagcttgacaagcagaaagcatgtggcctctattttgcatttcatcttgctcataatagaaggtcttctttaacgggaaaagaaaatgtatggcaataaatctttaaaagtattgtaacattc

SEQ ID NO: 94628 - DNA, 502 bp, Homo Sapiens
aaatatactaataacctcacaacaagttgctgaaattaataaatatatatgtatcaaagattataatgcataatgttaaaagctgcagtaattttcaaagaaagtagtacctagatacaagagtcctccagtaaggaaggtgagtaactacccatttgccatgaatcagcagttagcctattagtggtgcttcacaaatacttttttgtcatctttgaggggtagaagcactgctattccatagctcctagagagatgtagcggccaggatgaaactcagaagcccagggagctccagccgtaggatcccagagctcagtctctctgctcccctggaatgtgtttttccaaactgcggtgtgaggctgaagggccagcacactggacccaggcttatgaaatggacaagactaatgtgaaagggactggttctttgcgggtgctcattaaatgtggtttccccttctcttattcaataaatagctatttggtttgtgtcaaa

SEQ ID NO: 94629 - DNA, 338 bp, Homo Sapiens
aaaatagatcatgtacatgttaataaactgtgatttctaaacaatgcactcacttgaacatgaaataagaatgccctgaatactggaagggacgcttgagttgaaccactccatgtggaaaatacacagtaagtgctgtaaatgttgactgaatgccttctaagaatgcaggttatgaatgaaaatataatttacaaatggttcaaagggaccttttaaaaaacagtactccagggactggcttcatatgagtatttcataaaaccaaagaactgttaataaatgtacacagaaaatcatgcccttggcttacttgtggaaaaccaggtactatgtga

SEQ ID NO: 94630 - DNA, 384 bp, Homo Sapiens
gatctcatctctttgactcctatctagtcctttgcctcatctacgaaccactcccaacccctttaccctgctaatatcccagctcactcttctctcaccttaaactgggccccaaactttctcagttcttccagttggaatcgtttctgttcattctgaagaccagggactatgagaaaacagtcaaaaagaagaaaatacaaaacattctttctctaaggtggctacacagtgccaaaagaacagaggacaagaaagcaaagaaaaaagagaaactcttgaggatcacagaagtgaaattataatccaaggactgatagacattgtttgcctctgaattccaacaaacttcctaactgaaatactctcccccagacaaaggag

SEQ ID NO: 94631 - DNA, 2067 bp, Homo Sapiens
  misc_feature (47)..(47): n is a, c, g, or t
  misc_feature (62)..(62): n is a, c, g, or t
  misc_feature (64)..(64): n is a, c, g, or t
  misc_feature (275)..(285): n is a, c, g, or t
tccctggctgccctcccggtttaaacaaaaggggataaagattaccnccatgttccccactntnttcatttccctccagccttaagaaaattcatcaagagaggaggagtttaaagaggagctgcttctggcagagcaatcactactctttctcttcataaacaccatggctcttctgagggaactctacgaataggcatcttgtcaacacttctggagttctgatctgaaaatggcttgaaattgtgtgctgtgtgctttttccttttttcagnnnnnnnnnnngaagaagaaagctgggaggtggttaaacacccttatcccccaaaaacctttacagagattacaggagtattcttccaggagtcagagagaaagaactaaggtagggataatgtgccagcgtagtctggtcctggaggaaatttaagagtccggttcctagtcaaagacgaggggaaagaaagctgccaagtccagcaatcccatttccagcatgaagaatgggggtctgaaaaaaattcaatagtggaggcaaagggttggccagttgaaaatccgtaccacccaactctggagtggaggggatggctgcggtcctcaactctctgaggcactaaggcccattcatgaggaagaggaaggagagaaggttcttcttcaggaagaagatggaggagcagctcccctcacttctattacactccttttttgatgaccaagtagaagaaaattcagcattgctggggcaagggctgacatcttgggatcacagagatggcagaatcttgttccaggtcttctgaggctttgcgcttaatgggtgaactctgactctgcaacttcaagcttttccaaggttgtacttgtagttagcatttgcaaagtctctccaactagaggtgagaaactggggtcaggaataggcgagccctcactgatttcctccaaaggtggagtctgaggtaaaacatcaggacgaccaaggtgaacgcctggctccacttctgcctttgttgtcacttgtgccttgtgttccccagagaccgatggctggtaagtaatgcaggagttgccactggagcctgctcgccgagagaaagatgagccagaccgaaactttttggaaggagaaggcttcaagggaatcttcttaaatactgtgttgcacatgaagcgctggaaccgttcagcgtagaagcctgggcgatgcactgagacagtgtctccgtcatgtaccagggctttccaagagtgctccaacttcttaacaaacctgtaagactgtagaatgtcaatgatgccaatataaagcagaagcctttcccctttactattccgggcagggatgcaacccatatggtcatcagtctccatggtaccaccccgtcgagcctctccctggatggattccatggctgtggaatacagagccttttggggggccggtcttcgagtatcaactgagtactgtgtttcactgcttaagggctctcgttgtgcatgatctatattatggattggacatcaagaggctgtaatccattatcttgaagctctgcagcaccaaacagtcacgctgcagggtcttacagagagcgttgtacatgtcagcatccagaaaaaagaccatcagggatgtcttgtaagaagtctaggtctttaaatgtgggaagaggcttctctcgctctttctgggaagcccgccgtttgtaggttgagcctttgaggtcatatttgatatgcatttttaccgatctttggtaaaagattgttcatcaccacaatccgaatgttcttgccacctgcctgcacacagtacagtccatagaatttaggcagcaaagtccgagggttctggttgaggttcatgtagtatcctggaagcagcttctgcagaaattccgcctctttatgttggactgtcttaataatggactcatcgtcgctggacacatagaatagggaaccactagctccagagctacagagttcaatcagcggctcaccctcgtgccgaattcgccacccaggcctcgctaccttagagaccgttatggttactgc

SEQ ID NO: 94632 - DNA, 411 bp, Homo Sapiens
tgaagttgctaatgttcacgcttcaaggattgtcagctacaccgctgtagaatcaccaaacaatgcctccaaatccctcaaggagtcagccatacagccttctaactttaggagcatctcatgttgactttgtcaaatatctcaggatccatcacgaaccacagatgaactagggccccgagcttcaacatcagagagggagatgtttccctgcatttggttctcaaacacacacctctacagacgtggctgaatcccctcttccatccctctagggaagagatggcctgatacggagtctggctagagtactgaaaatttatcataatgtttatacttcatcgtcttctattcttgtgccttctagccttaaaatgtaaccatgatatatacagaagttatccctcaaaa

SEQ ID NO: 94633 - DNA, 444 bp, Homo Sapiens
  misc_feature (359)..(368): n is a, c, g, or t
atgctggatctaggtgcccgagaagaaagccaacattcctgagggtccatagacagatggatgttgagaacactgttcaagcacctagatccagcataacaaaagaaaaaagccaaaactactcctgggctttacaattatgtgagccaatccatgatttttgtccatgtaaggtatctgaatggatttaacaccatggatgtaaccaaagaaattctggagaacattcagaagtaaaactaaatatattcctaatatcccaaggcagaatgataaatgcattttccatagaaacatagttacaatgagagttgcagaaatggatattagaattaaatcaatttttgtggaccagagtnnnnnnnnnntctctgaagaccataaaatctcatctatggaaaaatgtgttctgaatacaaaacaaacataagtttttcacaatta

SEQ ID NO: 94634 - DNA, 1042 bp, Homo Sapiens
  misc_feature (30)..(30): n is a, c, g, or t
ctatagggaatttggccctcgaggccaagnaattcggcacgaggcggcacgaggtacaactacgagaagcacatacaaagataaagctttggacattgacttgtttcagtggatctcctgtaaccctacgtcttaaaaggcaaatgtgtgacctgaagatgttcaataaaactcccattctttagcacagaggatactgattttcctggagaagtaacgattttgtgactgcataaactttaagctgacactgagtgtttgcccagcacacaatggatccgaagaaaatgaggccgagtgaaaagccagaacagtgaacagtgagattggtggtgacactggaccttcatttcaacttagctgaagcagtatgggtagcgtactccaggagcactgcaagtccctctacggtgttctccaggactgtaggaatctcatctgcaggtgcaggtcaagcccctccttgagcctacagacacagagacagcaaccaaaattgagcaccaagacactgcagctctgcatgccggcttgtcttacctgaaacctgaagaggagctctttcatcccatgcaaaggaatcaaccacttcctgatcatctgctccaggctgctcctgggctgtagcctcatcagcaattgcctggagtcgctccgcccgagcctgcagggccaccaggagaatggcagcaaggagggcaaggctccttatggctggggtcacctggaggagagagagcaggagcggatgtgtggggagggaggagtctgcctagatttatagctgggagaaggctcagagacaaaccttcttgaaccttctcagtgagaggaggtggagattcgttggagagggtgtggatatccattggcttcaatgttcctcctttccttctctgctctcccagctttcattctagcatgcatctctatgttgagtgtcttggctgggttggagctgatggtgatgatgaggaccctgccatgatgatgtgctttcattcagtgaattcagggaataaaggcctcttactttctgaaa

SEQ ID NO: 94635 - DNA, 328 bp, Homo Sapiens
ctcatcaccccctggcacctggggctgccttgcttgcctaaagccaagtacattacctgtgctgaatacactcacttttatggtggcaagaagccaggtaaggcatgcagtctttctgttccccgttgggggagtggtattaaggaactgtgtcttcaggatacagtgagctgtaaaaatagacaacaagaacacggaaactatggtagacgaatgggctgaggacacagttcatgaaagagaaatatactcaagatagaagaacctgcttcatcttagtggtgatttttgtaaaatgtaatttaaaatattccccgatgctgggagc

SEQ ID NO: 94636 - DNA, 379 bp, Homo Sapiens
ttttccctaaatgctttattagacttttctcataagttttgactggtactgttttcattgttatttaattttgtgttttttaacttctttcatgatttccttttaactgaaggttttcttagatatttagtttgctggtatattcttttaaaattgtatcattgctttctttctatattggattattgtcagagaacatgatttgcatgatattaactttttggagtatattgttgcatctttgtggcctagtacatagttaatttagtgaatgcttccagttgtacttgaaaagaatgtatattttctgattattgagggtaaatttctctatatatgttttcctgtttaataaatatgtagctatgtgcttatgaaa

SEQ ID NO: 94637 - DNA, 922 bp, Homo Sapiens
ttttaatggacataaagcaaatatttattgagtcaaaatgtcattttctcttatagtttatattgtcacacatatgcattacaaaggtaagcaggaagccttgtcaatttcaggaactgtcatgccataaaatgataagccacagggaaaaacaaataccagaatcaagttgctaaagcaaaggcaaaaataaaaatttaaaccaaaacatacattgatttgactgtcatggttggtcaggtttggcatgatccctggcaggatctgttttatattgagaaatgatgaacatttgctttctctgccgacatgttttcagtgaggtgtaggacataggaaacgctaaggaacatttaattattgctccagcattataataaactgaaagagatctggggaaaatacaaataagcagcacattacaaatctcctgtggcaccctggaaaccctacaaaggaaatgttaacatgtttaccattcactcagcctagagcataattctccagtttgctggatatactaatttcataaagaataatttagctgttatatagaacacgcacaatcaaaaggaaaagaagggctagggctaacaaaatctttcttccttttaattgtttattcattctgattgggattggaaggcctttaaaagacaaatatctggcagctataaataattaaaatactagcaaagagcaataataattacaagaaagaaagagtccatcttgattatacacatttccaatgaaaagaatgagagacaccactgaatactaaacttagaaaagaaaaaaacaattgataatctttataagaacatgttataagacaattaaaagtcaacatgttcataggaagttcttataattacacacatcattcttataaaaacatactcctcttacagaataaaat

SEQ ID NO: 94638 - DNA, 971 bp, Homo Sapiens
  misc_feature (760)..(768): n is a, c, g, or t
gctaggcaatatgacctctattatcagctgaggtgagagcatccaaatttttgtaagacagaataactgggttgagggcttctttacccagttaagttaatgacattaggacatcacacttgccttttcaactgccatgacccaactgcagcccctctaaattcaagctccttaacttaccactctattgaaaccagaaaacttcattcttctacagttacagggaaagtagccagagagaaagacagagaactctccagaaacggctaaaactggtctggtctaagctgacctagccttctctgggggagaatacaaaaaggtgtgggagagaaatgatgatgatgaagaagaagaaggcggcaaattaatttggccagttttaggggagaaccttggtctgtgttaccctcagccaggtcctgagggtagcagagaacggacaacatgcctgggctctggatctcttaaccaaacccagcagctccactcaccaaggccaactaaatatgctttcatggaacaaaccacatccataactctcctcatccttgtagtagtttcgtgagaggtgagaaaacaagtagacacaaagaactgtttcctccagaggccacaatgtgattaaagaaaacatattagatatatgcatacaccttcctatgtttagagtccttaatgaccttgttttaagacaattattttcataaaattactaaaaataatttgatgttacattataaatggataaaatcactgnnnnnnnnntcaaatctagtttcatcttgatttcctactttgtccatccatgaagacatataaaatgagtccaataggaacaagcaaacaacttctttcttggactctaatttgaggcattgttaacacagtgatgttcatttattctatacatggaaaaggtgatgtctaaaaaattcacatgtccatattttactactgacttgtacatt

SEQ ID NO: 94639 - DNA, 590 bp, Homo Sapiens
tttgaaatttgaaacaaacaaaaacatttattgctcttaggttggttggtcctacaaatcttgatcaatgtttaatgcaatctaaaagcaaaacaaaaagtaaatatgccttaatacaattagaactgtgaaaaggcacaagccaaagaaataaactttaggtaacttctatgtgactacatgaatgaaactttttgggagtttcagatgatttcaaatgatactcaaattgaatataaccataaattatgttctcaaagtagttattgttccatcctttcttctacttctcttactatgcattctcatccttcttgtaggctcctcttcctgtggccatcccttcaatgttagaattgctaatggttcctccctgagcccccaggccttcacacactgcactctctcctaggtaccttactcaatccccttgcttcattcagcacatatgcccatgactgctgaatttatatctccggcctgggccccttcctaacatcaactgttcttggctgttttcacctgcatatctcagagccacctgagagtcaacatctctgcaactgaagccatcattttttaaaaacctg

SEQ ID NO: 94640 - DNA, 927 bp, Homo Sapiens
  misc_feature (25)..(26): n is a, c, g, or t
  misc_feature (57)..(57): n is a, c, g, or t
  misc_feature (200)..(318): n is a, c, g, or t
attcagcaaattgtagtagccaatnncaagggtaaattaccacagggcccagggtgncggtgggctcaccaccttgtaatttcccagcactttgggagggccaaaggtgaaatggatcacttggaggtcaaagagttcaaagacccagcctggccaacggtggtgaaacccccgtttctgctaaaaatataaaaaattannnnnnnnnnnnnnnnnnnnnnnnnnnnnnnnnnnnnnnnnnnnnnnnnnnnnnnnnnnnnnnnnnnnnnnnnnnnnnnnnnnnnnnnnnnnnnnnnnnnnnnnnnnnnnnnnnnnnnncacagagtgagactgcaggccactgcgtgctgactctctcaccaagcaggagcgggcccctccctcacgcggagccgctggcacggacagccccgggaaggtcaggctgagcgtcctttcctctgtgcacccccggagggtgctcccattggctttctcagatagcaccatctcagggtccagctggccatggcctggattaagtttaaaatgctgggccagtccccacttccctatatatgactttttacaagtctgacacttgaagcttttgggcctcagggagcagcttgataagtcaaagagcgcctgcctctccctctgatcttcttccacactgacttctgaatcatcatcagaatctggcagatgaccgtcggccaaatcatccctttttatgaactcagctttagctttatacttggcaggtcgagatacctgtctcaacgtgtcttcacttttaacgatggttttagtttctcagtatgttttgtatgcaagttggaaataaataaacgtcctgaactggatgaaacatgttacagtcggccggacgcgtgggcggacgcgtgggtcgacgatatcccgggaattccggaccggtccagc

SEQ ID NO: 94641 - DNA, 230 bp, Homo Sapiens
acaagctaactgttagaggtatacatttatttatctgttgtacagatttgattatgattttaatgtttgaaagattgcacttgtttgcttttactatatgtggggtaaaatatattttctgttcacagtatatgaaaatatggagtaatttaaacagtaaataaacattctgtggatgcttatttttgtattggcaaagtatcaattaaactatatgtgttctttttcaa

SEQ ID NO: 94642 - DNA, 698 bp, Homo Sapiens
gggtcaggagactgagttccagtgctggttataccatttaccaactgaacccctgagacaagtggctttagttctctggcttcaattttgcctgctgtgaaatgaggatgggaaagcacctgagtagtgggtggggtagtgagagcatcagtgcctcagaacagcaggcaggacttccttccaattcctgttctgacattcgccctctctacaagcctgagtaagacactgccttatctgtgccttcatttctctctgatacttggtggtactgggttgacttctccctgggggacccgaaaaaagaagtcatctgaaagaattttggtgacagaaaaaaaagtgagactttcatttcatattcactaaaagaaaggaccgtcttcaacatgtgaaaattaaaacagactacatctccaacgctttctatgcccacttcctgggttgcaactttataatctaatagaccttggaaaaggaattattttgcctttcgagggccaggttttctcaaatggatagagacacgtagctgacttcactgaccccaggacccgagtgcctcaagggcacagctacagaacagaaggctccagatcgcccaagtcagggagacgctgaacagccgtgtaccaaaaggtggccagttctcattatttttctcaattaaaataaaccatttattggaaatggaaaaa

SEQ ID NO: 94643 - DNA, 545 bp, Homo Sapiens
ccacaacccttatgtacgcccaagggtgcctggcatgcaagattctaagagcaatgggttgcaagtccctttgacaaagtttgcctggggaccaggaaatttaaatctacatccgaggaccaaagatatttaaattaaaaacttcctaccaaatccaacagcagctaagagagtggcgaatgcgatattacagaaattggtctgcagcctccaaatgccaaagtggcagcttgttatttatgataagataaggagcagctcgttactaaagatatccatgtcaaccccacgcattgagcagaacaaaggatcgttaatgattcctgggcttgtcatgttagaatggggtggcgatgataaaagagcatctatatatgctttccttgtgacatttcttatttttaaactccaatataaaaatatgtgttaattgttatgatttgtgtcacatgctatgctccagggctggacaggaaacagtgtccccattctagtatttttataataagcaataaacaaacaataaacaatgacaacaagaagag

SEQ ID NO: 94644 - DNA, 565 bp, Homo Sapiens
agggacacagaagacaagctacgtgagcgagatgaaagactctctagttctttagaaaggaacaaattttactcttttgcattggataagacaatcacaccagacactaaagctttgcttgaaagagctaaatccctctcttcatctcgtgaagaaaattggtcttttcttgattgggactcccgatttgcaaattttcgaaacaacaaagataaagaaaaggttgactctgctccaagacctattccatcctggtacatgaaaaagaagaaaattaggactgattcagaagggaaaatggatgataagaaagaggaccataaagaagaagagcaagagaggcaggaattgtttgcttctcgttttttacacagctcaatctttgaacaagattccaagcgattgcagcatctagagagaaaagaggaagattctgacttcatttctggtaggatctatgggaagcagacatctgagggagcaaacagcacaactgattccattcaagaaccagtagttctgttccatagcagatttatggagctcacacggatgcaacagaaag

SEQ ID NO: 94645 - DNA, 626 bp, Homo Sapiens
tttggcgctctactttttaatataaaccatacatagagagacaggagccccaagaacagggaggctggccaagctggaaaaataatcaaagcattctctgtccctggagccccagccgtaagtggacaaacttcagttgccggaagccaagaccactggagagaagaaaattgctagtaccagtgtgggagttgtactgtcgtcttctcttttataagcatggtcacgaatgacatgtgatttgaaaccacaatttactaccgtaataaagtttctaaaattactgcagtcggactccaatcgtattgaacagtcaattgattctgggttaaaacatgcttacatcacaaaataatgaccggtttgagaaaaataaggttgtcttcaggagccaatatctcagtgcaagacggacactattaaaattctttaggggaaaataaattgctgatttgctaagtgtgcttgaagcaatatcaccttacatctgcctaatgttctttcctcacagcctcccagtgaaataggtaaagcaggaatttcgactttatagagaaggatctagggatatgagaatccatcatgtgagaacattttagataagtagcggaacccaattcataaaa

SEQ ID NO: 94646 - DNA, 747 bp, Homo Sapiens
gccctttcccccccaccaggatttgggcctgatgagcccagctgggtgcctgcctcatacttggagaaagtggtgacactgtacccatacaccagccagaaggacaatgagctctccttctctgagggcactgtcatctgtgtcactcgccgctactccgatggctggtgcgagggcgtcagctcagaggggactggattcttccctgggaactatgtggagcccagctgctgacagcccagggctctctgggcagctgatgtctgcactgagtgggtttcatgagccccaagccaaaaccagctccagtcacagctggactgggtctgcccacctcttgggctgtgagctgtgttctgtccttcctcccatcggagggagaaggggtcctggggagagagaatttatccagaggcctgctgcagatggggaagagctggaaaccaagaagtttgtcaacagaggacccctactccatgcaggacagggtctcctgctgcaagtcccaactttgaataaaacagatgatgtcctgtgactgccccacagagataaggggccaggagggattgaaaggcatcccagttctaaggctgctgctaattacagcccccaacctccaacccaccagctgacctagaagcagcatcttcccatttcctcagtacccacaaagtgcagcccacattggaccccagacacccctctgcagccattgactgcaacttgttcttttgcccattaaaa

SEQ ID NO: 94647 - DNA, 424 bp, Homo Sapiens
  misc_feature (409)..(409): n is a, c, g, or t
tttacagatctttatctttcattaataatcgatatagaaaatataaacataaggtgccatggaagaatatcttcaatcaaatccagcaaaatacctgttctctacgctaggtgcacaggtgtcttgactcattgctgccacacattggccactctcatcgaattcagaggactcatggaaaccacacacccactagctgttccctcagaagcccctgaattaccaacaaaaagctggttcgtctcggctactgagaaataatttgtcatgtttcatcccctaaatgaaagatgccagactgaatgcccgtctgagaaagggacagagcatgagatctaacaaagaaccccagcactcaaaaagtttaccactaaaatggagtgacaaggaaagcaggggaagaaaaatncactactgaagtact

SEQ ID NO: 94648 - DNA, 708 bp, Homo Sapiens
  misc_feature (546)..(639): n is a, c, g, or t
tttgctcttgaactctagttttattctataatatttatacatagccacacaacattaaatttgacatataaaaagtatacgtaactgcagggaataaaggaagatagaaaaataaagaaatgagaatactattaatataaacttgtaggaagtttacctggaggattttatttttgatcattattcaacatggcattaatcactgctaactgtattgttatttacgttgtgttttcctgttttctatttctacagagaacccaatattaacctaacgacttgtttaaataagagcccttcaacatgattttagatatgtcagagatgtcaatttcatccctctaaagaaaatggaaaacagcagtggtgactttaaaatatgttctgaagttatttgacattactcttttcataggtggagccttattccacgccccttgaatatggaccacttagtgacttgcttctaatgaacagaaagtagtggaagtgtaacctcccagctaggtaataaaaataatcgcttctgcctgcctgcctgcctgnnnnnnnnnnnnnnnnnnnnnnnnnnnnnnnnnnnnnnnnnnnnnnnnnnnnnnnnnnnnnnnnnnnnnnnnnnnnnnnnnnnnnnnnnnnnnnatcatctggtctgagggaagccagtcaccaagtgtgaggacacttaagcagccagttgagaagtccatg

SEQ ID NO: 94649 - DNA, 304 bp, Homo Sapiens
cccagaagcacagctgcctagttgacaggctcagctgagaccagaagaatggccccaccaagcccagcctaaatggctgaccatcgcaattatgagctaagaagttttggatggtttgttatgctgtaagagctaactaatacgtgcacccagtgcagataggatgccaaaaattaatggcaagttgattactaattacgttctaacagtgggcaccctaaaagtgctgacttttttcccctgatttaaagttagatgttttgtaatactgagaaatgaataaatacatgtagacatgaaaaaa

SEQ ID NO: 94650 - DNA, 352 bp, Homo Sapiens
tttaagtctccatcctttaacaagaaatcacaaagccttgtacacataccggtctactgaaaatgtgaaagtgaccacagtaaggctcaatggccaggcatgcatgaagtgtgagatattccacatacaaggctttggcagacaactaatttaccctagtatgcattaaatattttagtttttatgcatttttgtgtaagtcttgccaaaatatactaactgattctctactttctgaatcatattatggacagcaattatattctggactacatagtacagcgatgtcctctcagggagtataaaagtgggtttgaatatgtgctacctcacaagagatcccagaaaacta

SEQ ID NO: 94651 - DNA, 637 bp, Homo Sapiens
  misc_feature (268)..(322): n is a, c, g, or t
cagtgggctctgcccagtttgaaatttcaggccgctttctttatactgtgaggggaaaaccgtctactcaagcctcagtaatggtggatgcccttctctgcaccaagctcgagcatcccaggatgacttccgactgctgtgctggcagcgagaatttcaagccagtggatcttagcttgctgggctccatggagatgggatccactgagctagaccacttggctccctggcatcagccccatttccagaccaggtctcactctgtcannnnnnnnnnnnnnnnnnnnnnnnnnnnnnnnnnnnnnnnnnnnnnnnnnnnnnngctcaagtaatcctcccaactcaacctcccaagtagctgggacaacagtgaggaccagatgctggttgaagagctccccagagtcttgttgggataactgcagtctctgctttctgtagaggatgtgacaagggtgaacaccagtgtggagccaggagaagccgttcacctgtgaatgataacagggccagcaccaactcctactgactgagcatttctgtgtcagaccaaggggtctgtgctttacacactcacttcatacctcaagatgactgtgtgagctttattgaggcataatgaacaaataaaaattat

SEQ ID NO: 94652 - DNA, 280 bp, Homo Sapiens
tcctattgaaagccttttttgaattttattccagaaaactatccccctaaggtcgttttttcttcaattcctgggttcccatagcaaccttttgataaacatgttattggtattatcagaaaatactactgaaattgttgggtttcttatctgtctctcccactaagacagtataagcacctttcagtttccggtctctaattcagttgactttctgtgtgtgcaaaagtggcaaacagtgttctaagtactttacatacattaaaattctgtttatcct

SEQ ID NO: 94653 - DNA, 296 bp, Homo Sapiens
atgggcacaagccaccacacctggccattatcagcttttgaaaagccagtaattctccaaagttttcaccagtcctctggcctattctacaaaatcacttgctggctggctttcataaatttctatagcgagtttggcaaatttacataaaggaggagctcaaattttagagatttattttggaaacttgtatatatgggtcagatttttataagttcttccaacatccaaaattctaattactttctttgctctctgaaagattaagaatccctaattccacaaagcctgaggtt

SEQ ID NO: 94654 - DNA, 276 bp, Homo Sapiens
  misc_feature (206)..(222): n is a, c, g, or t
aaccagtctctactgcctgaagacgccccatagatgtgacaaacagaacaactgatgcagaagcaaagaaaaaggtctgggctcagaattaggaatcctgtgttctagtcctacttacttctggtgctgattcaccacgtgacattgattaagtcacctaatctctctctcagtctgaggtttgaccagttcatctttagttctgnnnnnnnnnnnnnnnnnctgagtttgtgactccatagcattggacaaaataaactaaaaagacctttaaaa

SEQ ID NO: 94655 - DNA, 896 bp, Homo Sapiens
  misc_feature (114)..(177): n is a, c, g, or t
cgggcgcagccaagcggctccgctgcgccggttaaaacattctcccagggggcatctctctgtccttggccagatggtctcgacacgtgcgggcacctctaacccaggctctcnnnnnnnnnnnnnnnnnnnnnnnnnnnnnnnnnnnnnnnnnnnnnnnnnnnnnnnnnnnnnnnngctcaagcaatcctccacctcagccttgcaagcagatgggactataggacagtggcatactatcacatctatcaaagaaaatgtgaaaagtgcctgaaatgtgctactgatcaaccaatagcagtgaaaactcacatatggtacacattccatttggatcacaaaagcaaagccaaacatctcggtaagtgggaggaagtaactgatgaactgactaaaggaaaaacagagactctgggcttggtcatgtgacttacttcagtcaatgggacattagcaagaataataaagcaggagtttgataagaatttgtacattttggcttatcatcttaaaatattcttggaagccagatgcaataagaagtccagccaccctaagaccactatatgtgaggaaacccaagctagtcatgtggaaaaaacatgtaaacagagggatgcctggctagtctccagcttagtcatgggagtgaagaagccactttggatgttccagccttggaagatacttcctggaaccgaagaaacaccttgctgagcccagcacagactgcagaatcatgagaaataatagttggtttaagccactacattttggagtggtttgttatataactaaaacaagcaatgatagaaaagtctagcaaaccaattagttatttgtaagaagtaaaaatgttatagaaacctaatatttatactctttgaactgttaaa

SEQ ID NO: 94656 - DNA, 722 bp, Homo Sapiens
  misc_feature (65)..(65): n is a, c, g, or t
  misc_feature (626)..(641): n is a, c, g, or t
agaagatgtaatctaatattgccatccaatttagcatacataaaatgttgccactcaccttcccntgtttgagcttcttttcctgacctgagttttgtatcagcaatgttgatgatgttagcatgggtatgggattagaaaatgtccttaccttaaatctcttggcttttactgggtgcaaggtaaataatggctatggattttgttatgctttctgttttgcttttgtacaaagagacctgcttaaacaagtactgctgagataagtgtctgatcaagctacagtgtactttaagtagaaatggcaaagttgctttgttggggtgctgatactgatgattttaggataaattcatttctttaaacttgtaatacatggttttattgcttgtttctctccaggatagtagagatttctctatttcacctcaacctaataaaagtggtcagatttataatgttaatgacttaatattatccttttctaatagtctcatgtaaaatatgccgctattacaacttacaactaattgaatgagatgttaacttagtaaaatagtttgatttttacctgacagtgtttgtcaaatttaaaatcatgaatattcaattttatacaaacattnnnnnnnnnnnnnnnngatttgtgtatgttatttgccaaagacagatataaattacctggtttaatattagtgaagaataaataagtacacacattt

SEQ ID NO: 94657 - DNA, 347 bp, Homo Sapiens
tcttccagtttactggttctgtcttcagctgtatctattttattgtttaacctatttattttctatttcaatgattacattttttgagattttattagcaaaatggttaaaagcatggtttcagaggattgtctggatttacattttgcctccattatttactagctctccagttttggttaaattaattaaccttttgtgcttcttggtgtgtaaaattgaagtaacaattgtatataaatatagtgttttttggtaattaattaaaattatttgcataaaatgcttaagacagggcctgaaatgacattgagtcctcaaaaaataaattattattatcattcctt

SEQ ID NO: 94658 - DNA, 119 bp, Homo Sapiens
  misc_feature (119)..(119): n is a, c, g, or t
aatctacaaattattgggctaatttacccttgtttcttatattttgtatacttaggaggtgacctctaggaaaaaattgctgaagaggtagtagagcagggtgaagataccgtatactn

SEQ ID NO: 94659 - DNA, 569 bp, Homo Sapiens
gtaccagcagaggttcagccttccaggaatctcatcatgatccatactgctgacacaggcctttgtcacctgaagcattcttaaaataaggagactgacattaaacaggacaattgtgaactccactttgtaagcatcatacatatcttacaactcattctgaagactcctttattcttgctcttcccagagagctactgtgtttagtcatgctcactgcactcacaagagaaaaagagtaagtggcatatttgcaggtgttgatggttacaagagcatttttactttttcctccatgtttgttctgcagcatttccattgatgcatgctattgtagacttcttaggttgaccttggccttgacctccaccactagctcatgacccaaaactgaagatgtgcatcagaaagggacagatttggtctttctgctgtaaaagatattctgccttagtgcctgctaatttgttgtgcatagtcctgtgctgccaatcttccccaccaattgttaaggttaatgtgtgttttatatgtgtattcacaaacattaaaatgtaatcagtggattc

SEQ ID NO: 94660 - DNA, 446 bp, Homo Sapiens
ggaccttattggaacttcctatgattacacctaatgcctgtgtgagaattttccagaagcctcaatcctgctgtcatcctcattaaagaatcacctggagagaagatgcctttggagaactttaatccccttctttcttcacttaccacctcatataaagctaggattgacagtcaattttactctatttctgaggcctcgtaatatgtgaagtgaaggatattgggaaaggggaactgtcactgttctttctcatctgtccccaacactaggccctggaatgtggctaccccattctttgggggaaggtagcaatttccagtaattgggagtatctcagaggaatctaaaagaattgtggtaaagctagaagagttgacaagctaatataaaccactagccagttcagaacataattaaaatacctatgtatttgtttaaaaaaa

SEQ ID NO: 94661 - DNA, 933 bp, Homo Sapiens
  misc_feature (703)..(746): n is a, c, g, or t
ctgcggcagactgaacggctgcaccagtgagggcacactggctccccctattctggagctgcgggagaagctgaagccagagctcatgggcctgatccgccagcagcgcttgctccgcctctgtgaggggacgctcttccgcaagatcagcagaccgtgcggcgccagggtctctgaatgggcatgggcagggggcatgagggcaggcagagtggcaggcgagagggcggctggcttgtgtgtcacggacctctcatgcactctggccctcttccctttctccacgcagataagctgtggttctgctgtcctgtcccccaaaccatcaatgctgctgcagtacggagacatggaggagggcgccagccctgctctaccctggatgagtctgcccgagcaactccctgtggccgacatgagggcactcctgacaggcaaggactgcccccatgtccgggagaagggctccgggaagcagaacaaggacctctatgagttggccttctcaatcagctatgaccgtggggaggaggaagtcgtacctcaacttcattgccccctccaagcgggagttctaccttgtggacagatgggctcagtgccttgctgggcagtcccatgggcagcgagcagacacggctggacctggagcagctgctgaccatggagaccaagctgcgtctgctggagctggagaacgtgnnnnnnnnnnnnnnnnnnnnnnnnnnnnnnnnnnnnnnnnnnnncttcaacttctgctatgactgcagcatcgctgaaccttgacagtgtggcctgccatgggccacagctgcggccactgcagcagccatgaagggcagtgggtagaggagtgcaggcaccctgaccagcagagattgctgcagaaataaagtctgcttggctcttgggatatgttgagccagctctgtg

SEQ ID NO: 94662 - DNA, 554 bp, Homo Sapiens
ctagtgcctaaaaaaaggttcctagcacacagtaggtgcttgatatttgtatagttacaaatgaatgggtggtaagaagtaagaaccaaacaaaaggtttattctctttcccataaaacacccagtgcttggatgggttacacttcaatatgagttcaaaacagtttctctgacggttttaggattgcaagaaagaaagaagaagaaaaagatgattcagaagttagaaacatcagtgagttaggacttactgtaattttatgtattacagatacataattatgtattatgtattacagatacataattgtatctgtaaaatgaatggtagactcttccatgtcacttcttcagccacggaatgaaaagaagtcctcatttatccacttgttcatctgtggtggtgaagagcccagatctgaagcccaaagcctggagaaaaagttctgcccctcactagttagtcttagatcatatttgaccttagatcaaagtaaggttgctttctctcggttattgtaaaatgggggtaataaaagtacttttcttctaaa

SEQ ID NO: 94663 - DNA, 427 bp, Homo Sapiens
  misc_feature (131)..(131): n is a, c, g, or t
gacctggcgacttttactgcccctcaggcgcggggcggcggtcgtcaactacagttcccatcatgccacgatccgcctggagtaattctccacgcctagtgagaacgaggagaatgccgggacccctctcncatcgcgctcctctcgcgccgcgctcatgttgctgggcacaaacgtccgcccccacacagtgccctctgggcggggaagagcgggggagcgtccctggcaccttgcgccctatcaggaggaagagggcgggccttcctgggagcgcacctcgctgcctgtagctagaagatcagaaaaggaacaaccgcgagtgctttgcagtctcgcttttttgggggtcttctcaaatagccaccttcattcgctcttcccactgctctgcttcagttttataaatagcatttctacctgaaaa

SEQ ID NO: 94664 - DNA, 198 bp, Homo Sapiens
ctgagccactgcatctgcccagattattatttcttaggcatgttcactacgtaattgattcctagatgttgaaaatagaaataatgtgattaggctagtgcgtaagggtagcactgaaaagatagaaatagaccttcaagtagagcatgcatgatcttgaataaaataataattagtaagtatatagcggaatggcag

SEQ ID NO: 94665 - DNA, 1180 bp, Homo Sapiens
gggcattgtgacctatagaacagctgtgttcaaaaaagcaggctggtaccggtccggaatttccgggatatcgtcgacccacgcgtccgcggacatgtagaaattggcaagctgctactacagcatgggggcccagtgcttttacaacagaggaatgctaagggagaactgcccttggattatgtggtttcacctcaaatcaaagaagaactgtttgctattacaaaaatagaagatacagtggagaactttcatgcacaagcagagaaacattttcattaccagcaacttgaatttggctcctttttacttagtaggatgttgctaaatttttgttcaattttcgatttatcttcagagttcattttagcttccaaagggttaactcatctaaatgaactgcttatggcttgtaaaagtcataaagaaaccaccagtgttcatactgactggttactggatctttatgctggacacatataaagacattgcagaaactcccacacattcttaaggaactgcctgagaatttgaaagtgtgtcctggggtacacactgaggccttgatgataacattggaaatgatgtgtcggtcagtcatggagttttcatgatgatgctagaaagtatggattcgactttctaaatctgttcagcttgcacttggtacttactggggacttccataggcttactgaccagatagtaactttgagattcatttattgacagactttgcagcctggctaaattttaaagccacttttcaacagaaacttctacacaaaacttctagataagtgggcttctggaaatctttccccacgggcgtcgcaatctggactccaaagtgcacaacaatctgagatcaagatatataccaactttcgatcaaggttctatggtcctggacacggacatatattggctcagtctcaactacttacattatccccaacgaacacagcgagggccgcgactagaagaagaaacgggccaaacaccgaggccgcccatcacacaggcgcacattaacgcgcgcgacctcgggggacctgagaaaagcacaaccaacagccccggcactccccgagcgaagcaatacgcagaccaacatgcccacaccagagagtaacggagacagcaacccataaccacaagcaacgagcaagacgagcca

SEQ ID NO: 94666 - DNA, 470 bp, Homo Sapiens
tttcattctgcctattctggcatcagctcacttgaggagtccctcagccttcttgtatttaaggcatcgtcttagactttgtggctctaaagtacctgtctgttgagatttcaagtctcttgtcaccatcctcacacatgacaacaaaacccataatgcataagtggcctttttgaaccaagactttgcaaactgatctctcccccgtgaaggagttgagcacattagcaacaatgtacattaattttggattttcattttcatgttttattttgtaaatattatctgatgtttggagcttgagtatacagactgtaaatatagttcttgtatttgtactaattctgattcttttgctgtatagccttagatgtgcaatgcagacactatctaactgtgtgtggtaaccttgcgtcacggagctgttagtgaacgaggtaaaaataataaaggtacagccagtgcaaaaa

SEQ ID NO: 94667 - DNA, 496 bp, Homo Sapiens
tttgcaaaatttgggtttgtagtgcagcctccttcatctgactaggacaaggagaagagagaactgtgcagctagctgtgcctcctccccactgctgcagttgtccctctccctgtgcccgtggccctggggaccagctgagaagaaaaatggaatccttctccctgcagacaggcagtcacgcttcaatgatgttcactgagggcttgtttggaaactgggaggaaaaaaatgagagaagcagccaggcctaattgtgaatagccttcttgcaaggctggaaacaggacagaagaaggaagggagcagcagcagggctgtagcctaaataagccaagctcttgtcccttgtggaaagaaaagagaagccctgcctggatgtcttgtctttttgccttttcaaacccagccttcagcctcactcaactgaatggccaagactgggtcctgggcccatggcccctggcacccagtctacccccagcagtcatccctc

SEQ ID NO: 94668 - DNA, 519 bp, Homo Sapiens
catctacattcttcctcttcactgaagaagggactctctttttcctccttctccatggccacaagagctgagaagaagaactgagacgttctactgcctccagcgccttgagggctctggactggcaggccccagcccacaaagctgctctccagggcgtggcgggccaaggcggagcagctgcggggaggcttgggtggaggctccatttccgggtcaggggtaaggttaaccggaggacaacagcgggcgctccgggctggagaggcggatctgccgacgggtgggctggctgggatctggaacaggaccggccccctcctgcgaggctgtgggagttgagaggcctggtggcatgctattctcacttggtgtggggagctcctggaaaagacaccatgtggttctgtcagtgacctgcccagggtggagtgaggtcggcgggtgaggccaacccttcggagcaaaggtgagccttggcattcattcacttaaaaccatttacaaacagaaaaaaaa

SEQ ID NO: 94669 - DNA, 466 bp, Homo Sapiens
  misc_feature (19)..(19): n is a, c, g, or t
caagcatttttctacaagnctcctgtggccagcagcttctccaccagcctcgtccattcctcccaccccaatggaagtgacaaaacttcagatgcaaaaagatctccagggacaccatctcctgaccatgggaagcagtggtgtccagactaagccagaaaggaggcgctgggcagaaacccttcaagggccaagttatgtaactgccaaagaaccttttaaaactctagttgctacagggacagggaacgggtagggggaatcgggggatccactgccacagactcttggggggcacactctgcagaggctgagatgcacccatctagttggagcccaggtattatcatgcaggagacctgggttcaagtaggtgtttgacccttggagagctttctggaatatttataccacacacagggatacttggcttgggaaaactaaataaacgtgaagtctttcaaaa

SEQ ID NO: 94670 - DNA, 571 bp, Homo Sapiens
atgtgtgttgctccttgtggcaggtatactgttccaatgccctgggatctctgtagtggtcggtactgtattgattataaatggtgaagtcctagtatcttgctagagtgagctggccaggatggtggagctctaccaccatttcacaggttatagacaggggccaccaggtttcaggaaagcagcaatgacccctcagtaatagttggaaagtgtgatatgacactgagcttcactgtgttggtgaagaagagctgcagtttgcctccacctctgaagaagcacaatacacctttctgggttaccaatgggatacttcccaacagctttgtcatcacatacaatattctcaaacaagatcttaatggcatctactttctccaggaacacagcccctgacctgtgcgtgtttgcgtagagaaggcatgctatgtaccccctaggatatagctttagcctgcatctcacacgctccagtttgaagcacgtgtcctgtcctctctcggtgtgcctggcttcattaaggaatcctcatttttgtagcactcattaaaactgacaacttaaaaaa

SEQ ID NO: 94671 - DNA, 437 bp, Homo Sapiens
caaaatggacatgtagctacatttctaagaaggaattaagaaaataattcctgactttgctggtttctgatatgctaagctgcctgtgccatctcctaatgctgtgcttggttcccaatctcccaatttgacccaaactcacgtccctgcatccaccctgtcctgttctcgtgattttgccttgtgcagatgaaacctgttcaaggcaaatcccttctgactggctggtggtgattaaaccatcttctgatcagtcagaactcccctggtccttaattactgtgctcttccaggaagagtcccataatgcatgtgtttgtagatgatttgtaaaggtgggttctgaaaacaaagaaacagagactaagtgccttttaaagacaaatacttcttttgttgatactttcaataaatatctgagtggctaccacaaaaaa

SEQ ID NO: 94672 - DNA, 454 bp, Homo Sapiens
gcggccgcgttgatccacagggcgctggtcagaaagcccaggaaagcaaagagccagtgaagcctggggggctggctgtcagatgtggcaaaaaaggtcactgaagccaaggctgtgcctgcgatcaccaccacgacccagacgggaacgaggccgcctatctcatagacaccataggtccccgactgcagggtcaggaccacaaccagggggctgataaccagatgcagacagttgaggggccgtttccagttctggtcatccttgtccgggtccacgacggggactgtgaggagcagcaggaactccacaggcagcttgaacaccttgagggctttccagtatgctgatttccttctccacttcatgtaatccaggggattgagggcccggaccaggatctgagccgtggtctcctggtagaagaacagcggccggtactcatcaccgtagt

SEQ ID NO: 94673 - DNA, 1006 bp, Homo Sapiens
  misc_feature (691)..(706): n is a, c, g, or t
agaaagtgcaatatggctagcactgaaggccagtcagtttaactctcagtgtaccccttaaggagaagctctcatttgttttcttaattaatattttaagggaagtgagaatcacaaaacacattactcaatcacttaagaagttccttggcttagaattaaagatgctccaggaaagactttttatacctgaaaactgtgaatctctacctagaaaaaagtcttaaagccggtgaataaagtggcttaggaagatgagtgtaaggccattatcatggactttttccccagctgcagaggtcaaagtttggagtgcaactagagaggttagcagttcacttttcccagaccgcctggcttctcatagcttaatctctgggcacagctgctgtgagcacacagtccctgggactcatatcttgccctgctcctggcctgatgacaagactgggaggaactgtgggcagggttatctacaactccgggtggaagtcaaagattggaagaggatgacctctgatcctggaactgcattgcttggtggtcaggaggggttcttagtaagcaaactcagtttaatcccagagtcggaagtgggtgtcaacaagccaaagcaacatcctttcagctctgctgcttttttgtcttggtggaggaatagccaatggaagaagatggagagtccggaccnnnnnnnnnnnnnnnngatgagactaatcttatgctcaatatggaagataatcataactcatcactctggattataactgcttacatatgtctttcttatgagataatgcaccttgaaggcgcagaaggaacacaaagacaaagacaaatggttcttgggtcctgccctcaaggcacttacagtccagtttcagttttagaagttcaaccaagaacatggctaatggctggtagagattgtactgactattataccacttctcctaaaatattattttggttgaaataataaaatgtagattctaaacaaaataaa

SEQ ID NO: 94674 - DNA, 276 bp, Homo Sapiens
actctacacctggccgcctggctctagagactgggctgttggcctctttcctagaatgccttgacagaaggaatctgagaaagcatttcatctggttttcaagctgtgctcttagagtcttcatcaagtcctcaggggcccagggatgagggctctggtgggacccagtgtgggggtggtacacaggcacaaccagagaagcaccaactctgtctgctttatgtgctggcttttaagggcagctcctctcaaagaaaggattccatggctttaaaa

SEQ ID NO: 94675 - DNA, 482 bp, Homo Sapiens
cccgggagcgtttgtccacacaatttctgctccgactctgcggactactgcagtggagcttgactcttaatggtgagcaaggcaaatgaggcagacaggtggaggggcgaccactgattctgcttcaccagtgttaaataatgtaatcaagagccagtcatattttacagcgaagcgggtcggtttgggaaataactcataccttggggtgggtcggccctcttctcagcaatggctttccttacctggaccaggcggacaggtaggagtcccaaaccagtttctgcaaacgggagatggtcaaagctgtcacacggtatcctgatctcgaatgttgctaagcttgaaaattggtcccaacctagtaactttcagtagtgatagacgttcccactaaattttcttattgcaacttggcggaaatgttttagtacttctccagcagttaattaaaagctaatgcaatttactctgctttgaaa

SEQ ID NO: 94676 - DNA, 441 bp, Homo Sapiens
ctttccaggactctggatattaaagatttgcagtaatccagacagtacttatgcaagaaaaagacaaaaattttggtaacagtaagcttggtggcattttaatttgccctatttccagtctgttttctaccctagccttgaaaaacaacagtctacaatcacagcaaaaaccagcagcttggaagccattagaggggtcaaagaggggctggagctccttcaaagccccattcccaaagaactgtcattatctgacctatctggtggttccctggaagaccttgcaatgtagtctttatttgacctgactcagaattttcctattgcaaacaccttcttggaaggggaaagggggctggtcaaaaacaatcacaggcaattgttgaatgcagcactgcccaaggggatggctaaccaaacacgcagtgttttggggggacc

SEQ ID NO: 94677 - DNA, 860 bp, Homo Sapiens
gggccgctctgatagtaatccaaagctctatgtctggggctcatctcagaatttaaccaaaggatatatgaaggacatgttggcactgtactgaatcccttctctgaggttccggcatactgggtgctgaatgtcccaaacctggccattactaatggttcctgaggtattctccttttaatgacataaggaccttataaggtccttccctcaggctccttggtgggctttttgctaagaatgcagtgttttagacacaagatgtcttaaggctcttgtatgtcccagggataaaaactatgacgtactcataaccaaacttaattaaaatgtcctcgaatttaattttgtagcgaacagtccagttcattcatagtcctctaaccctaactgctcaaaagggatattgtggaaactctaaggggaaagaaaacaaaaacaaaaatctagctcagtcaagagctcggattgtctaaaggccaagtttcgcaagatttgtgaaaggagcttgccagaggtgcctctgaggaaaccaggggcttctgtgtggccacagcagggtgaggggagcgcatcttcccagcatgagtagggatgctgggggctctaaggcgtgaggcctcagtacccattgggagaatgcactccaaggtcctcagacaggcaggaccatcttggtcgaaggcactgggcattggactgcccaccctgggcacagatggaaaccagacaagaccaaactgggaacttgagtttggataagtctttaaaagtcactcggtccaaactcatcatttacagagggggaaaaaaggccaaacaggttaactctcatgtgtaaagttagaaacagaacaaga

SEQ ID NO: 94678 - DNA, 262 bp, Homo Sapiens
catctgttctctctcagggctgctacctgtgaggtttcatctgtagaacaaggccacctttgctagccaggcctcctctgctctcccccctgtaaccggtcttgccactgtcacctgattttccaccataaactgtggccatactttgagcccatgttctttctgtaacctcaagatggtgtataagcttccgaaccccattgggaggttggggtcatcactctggttctccctgtgtgcatgaataaatctgtatgccttt

SEQ ID NO: 94679 - DNA, 483 bp, Homo Sapiens
aagtgtcatcattgacggcgtggtggtggcctgtgacggtggctgtcaggccatcctggacaccggcacctccctgctggtggggcctggcggcaacatcctcaacatccagcaggccattggacccactgcgggccagtacaatgagtttgacatcgactgcgggcgcctgagcagcattcccacggctgtcttcgagatccacggcaagaagtaccccctgccaccctccgcctataccagccaggaccagggcttctgcaccagtggtttccagggtgactatagttcccagcagtggatcctggggaatgtcttcatctgggagtattacagtgtctttgacaggaccaataaccgtgtggggctggcgaaggctgtctgattgcatcactggccacggacctcaatgtgaccaaacacacacgcgcacatagatgagatgtgcaggcagatggttcccaataaacaccgcatttctgc

SEQ ID NO: 94680 - DNA, 770 bp, Homo Sapiens
  misc_feature (158)..(176): n is a, c, g, or t
  misc_feature (396)..(441): n is a, c, g, or t
gccgggattccagtgagatgggtgctgttcttgagcagcttgaccaccccaacagggatctgggcagagagtctgtggatgcagaggaagttgtgagagaaattgataagcttttgcaagactgccggggaaacgaccctgtggctgtgagaaagtgnnnnnnnnnnnnnnnnnnnggcattggcattttcttgtctcttctgttgatttaaaaatgatccctcctggtgataacccattttacagggatgaagaaagaccaatgctgctttaaggcttttagtgaacatctgaagtgcccacaagtatgttctttccactgctgatttctttttcagagataacaatggtttcgttttgaccaaacttgtattaggacagaattaatgatgcttnnnnnnnnnnnnnnnnnnnnnnnnnnnnnnnnnnnnnnnnnnnnnngaggatgaggagaagaattaccttttgacaatctgttaggaaggtatgcagtgtgagaactgaagtatttctgatcactctcagactgtcctccgtgatttatgctgacttaactgtttacctataaaccccatacaaagcagggtcataatttgtgatctgtggtggatttctagcagtcatcacaggcttctactgaaagtcctgaaaagaccttgcagtagtccaagctacaccaaacattaacacatatttgtggtaaacatttctgtataaagttacctgacacacatataaacacaaggaacattccatatcattagtcgaaa

SEQ ID NO: 94681 - DNA, 631 bp, Homo Sapiens
gagcaggccggcaggccggggtgtcgacaaaggctgcgagcagagctgcctgcgcgcccagtactcggcccagatcgatgacctgcaggtgcagctgcagcacgcgtaggcggaccgggagcagctgcggtccgacttgctgcgggagcgcgaggcccgggagcacctggagaaggtggtgaagcagctgcaggaacagctgtgccgcgggcccgccccgatgctgcgggcagcgagggcgctgcggagctggagccgtagattccgtgcctgccgccgcagcgccgccgacaacgcgggtgcaggggggcgcggctgggcggtgcaagtccgccacgtccgcccctgcagcccacacagcacaacgtcttaccgtgcctattaccaagcgagtgtttgtaaccatgtagttttggaacccactgcaaaattttctactggccaagttcaagtgagtaagccgcgtcccccaactacagctggagacggggccagctcggcggcctgctggtcctctgcttgctggaacattctaacatttacacttttgttataagctatttaaaaccagtaaggagacttgaaattcagaaaatcaacacatttttaaatgactaacttctaaaagccc

SEQ ID NO: 94682 - DNA, 281 bp, Homo Sapiens
ccattttctttcagccccaaatggtaaagaaatgaccctcctcctgcacaaattggagttcctgcagctggaaagaaatcggctcatgccatgttttatgatgcctcgcctgggccaggcggggccagtacagcctgatgtgctcacagctggcctggctgcccccgaaaccacagtgactgtcctgcttgcccggccctgggccccgggcctccacgtccaggctggagaaacttggctcccctgcagctttcaaaataaagtggtttttatttcataaa

SEQ ID NO: 94683 - DNA, 401 bp, Homo Sapiens
gagtgtaagaatagaagccccccagtttagttaaattatattagtagtctagacaatttgttcatttcacaataagagtgatagaaattgtgataagtacttggattcatgatgtattttgaagttacagttagtagccctttgctgatggatatggaagcgtgagggaaatgaatcaaagatgactcctaaactttgagccagagaaactgagtgagtggtgtcatttactgatatgaaggaagctgggtgggacatattcttcaggataaaatatttggtgtcagggttcatcagtttcagcatgtgatttattaatatttacatagtctttgggtgctttggatatttggattccagtcctttatgtgaatttctgtttgaaggtggaaacagcttct

SEQ ID NO: 94684 - DNA, 533 bp, Homo Sapiens
  misc_feature (57)..(57): n is a, c, g, or t
  misc_feature (170)..(170): n is a, c, g, or t
agaatagggaagcccaaggaaaggaagagtagatgagccagtcagtggagcagtcanaacacacacaagtattgattaagtttaccatcttatatggacgtggtttgtgtcaccccaaaacaattacaatagcaacatcaaaggtcactgatcacaggtcacagtatcanatataatagtgaaaaagtgtgaactattgtgagaattaccaaaatgtgacacagatacaaagagagcatatggttttggaaaaatggtactgatagaccctcaatgcagggttgccacaaaccatgaacctgtaaaaaacacgtatctgtgaagtgcaataaaatgaagtatgcctgtatgaaatatttagtattactcaaagttcgtctactacatggcattctctctaatagtctctcatagtctaatttcccactgtggatatggataaaaaaatacttcatactgtaaaaaagtaagtaaacaagtcagtgaaatgatagtaataaagatggccttccatatgagacttatttctaaaa

SEQ ID NO: 94685 - DNA, 440 bp, Homo Sapiens
cagagaatgcaggcttagctgtctcagacgtgatggcagaaatgagtggagtgcaccaaggtggaacctcctaatgggtgtgggaactgaagggataataaatgtggcccaggaagggtgtgggacaccctaatagtcaaagcccaaggatttcgagcagtggctgaggtggtgctacagctcgtgactgtagatgaaatcgtagtggccaagaaaagtcccacacatcaggagatctggaatcctgactctaagaagacaaagaaacacccacctcctgtggaaacaaaaaaaatccttggattgaataactagtgataccctcaataaaacagggattgccaagaagggaacaatcaccccaaaaatgaatgtttgcctttattccgtgtttggtacttgattcactttctttaaataaaaacatgaaggaacataaa

SEQ ID NO: 94686 - DNA, 750 bp, Homo Sapiens
ctgtgtcaagcccgcggtgttctggagtggtgatgaagggcctctccctcaaactggacaccttaaatcctgcttcccgccaccaagggaagactccagaggggcctgcccgggttgagaaactgcccagtgacagccatttggctcccttcccgtactcatatagacacagcctggcccaggcggtgactgcttcctacctgcacagacaccacctgacccacacacgagagaccagcagagcagcccacaccattgtccccagatcttggcaccctgaagaagctgagctgagcacacacaattaaaatctcccctctgcagccagaggaaggacctgggctttggggagggcaccaggagcgggcggctgggggcagggccatgctccctttttgtctctagctgccttttgttcaaagataaacatgcctcggcctccttcccctacctgaaagccgcttctgccggcgagagaaatcgtacacaatctctgctctggatgtacaaaaagtctgaaattgcttggagaccaggcgggagggagcggggtgaggctgggggatccgggcgggtaattgcgggtcatccatctgccttgtcggaggcaccagccccacagcatttgcagagaggactccgtgaatttgctttttccccacatcttgcattacttactcttgcctcagcagccataaaaccttttcctaaaactgccctcaagcataataaacaggagacattcggaaa

SEQ ID NO: 94687 - DNA, 477 bp, Homo Sapiens
atctgaagcccctgattttatttttccagcatcactctaaggaagagtgtggattagtgccattattcagggctggtattaataaaagttagcttttatctgcagggctaggttaaggctggcattcttacttttacattaaaaaaactggctacagcgtgcgcagctgaggtacttcagtcatgtgccttctctaaaggattcttagatccttaaaatatatagtatgttttaagtttgtatctaaatagcacttactgtaatgtattatacctaaatgtttattaaaagttagaagaaatgagtaccaacaggaaggaatggaagagaggagaggggctaagacattgctgatctgagggacagacctctatcaaatagaagagggctgggagaaggggtgattagaagcagagtgagggaactaaatggagccctgactgcaccaaataaagttctcattttgctgcttgttcc

SEQ ID NO: 94688 - DNA, 1039 bp, Homo Sapiens
  misc_feature (667)..(709): n is a, c, g, or t
tggatgcacatttgattttactgggggtaggggacagggctgggcgttcaggagttctccgctatggtgtcctcgatccacttcacataagacagcactctgacggcgacagaaggcttattgggggtgccacaagggacgtagccccatgatgtgacaccttggagcacaccatcacacatcagcgggccccctgaatcacccacacaggtgtctttgccaccttccaggtgtccgacacacagcatgaagtctgtcaccttctggacgtgggctttttcgcactcatcattaggcaggattttgaggtccacacactggagatcatctggaaatgagaaattctctggttcgatgctgccccagccggaagccaaacaggtgctccccacttcgggttcctcggtgggcaactacacgaccttcacagcatctgtgatggtatcagcaggctctgtcaggcggcaggcagcatgaggtcgtggctgtagtcctcgtctgcttggcgggtgtggttctccaggaggctcatgttgaagccagggtgtgggaagctctcactgacatgaacaaactgggctgtgttttcgtcgtcaaacaagttgtggcgacccagccagagctggtaattgctggggaaagatgggaatggagggatgagaagacnnnnnnnnnnnnnnnnnnnnnnnnnnnnnnnnnnnnnnnnnnntccccaaagagagaaagggaaagagaaaaatgtgggtgggcggagacagaggaagaaagatatagttatggagaaatacagacagcgaatgggaagatgaaagagtttgagagtgcaaaaggcaaatgaagagacagagcaaaaaagagctcaaaaggacagaggggtgagaaaggcggaggggagggcagtgagaaacagggtgagcaaaaaagaggcagatgagaaggataaaagacagggacagcgagaaacaggcccagggaagagggaggaagagggaacagaacacggaagggagcgagaagcagacaaatgaaaaaggacccc

SEQ ID NO: 94689 - DNA, 399 bp, Homo Sapiens
aaaggaagacaaaggctagggatccccaaaaagtgggatgtcatgagaattggaaccaagtggcaccccaagagaactagctttcagtggcatgtttctgatggtgacaggcctggtttgtaaaacctctaacatggtcctggactttccctaatctgttaacccagaaacagcatttttctcctagcataaggcagattctttcctgagctgcagcaagacctctacaatttcaaactacagccacgagataatcaacttgttggtgtcactctgtaagagtctgagcagtagtttttattttgtgagtcagttccagagacaggttttggtaagttgaggaggcaataattatgccagctattctctatagtggcacctgagatgctcaaactcagg

SEQ ID NO: 94690 - DNA, 560 bp, Homo Sapiens
tctcagttcatgttctcttccataattggaaaggacctttgtctgtttttcctcttgggtgccttccagaacgcatctcatgtccctggtgagggaattggtgagggcctgctgtgagctgctgtggctgcgatggtcacccagctgggcaaatcactggagtgacaatttgacctgtcacctgagaaggatggtccctcagactgctgggtagagggcctggggcaggctggagagagaaagtgggcagagggtgaagggatcacaggggtcttggaaggtggcagtagtttggacgggggtggggagtatgtgggagaaaaaaacagactgaaggtagaatccttgggaacctttgaggagcggcacattctggcaggcacgttttctgtgagcctgaagttaggaagagacattctggaggtcaatttcctacatcctcttacaggcggagaccttgaagtggggccaggaaggaaggttggcaaaacctttgaccagaactgtccttcatttacagaaactgacccagaccacaacacaaaaggccagtaaaagta

SEQ ID NO: 94691 - DNA, 628 bp, Homo Sapiens
tcttctttccttcaagtccagttctttgaaagtccaaatttgctctgaactgacttcaagcaagtgcccactcttgaacaaattactgaggctggaggataaagacacaaattggccaaacttggattacctgccttctgcatcttaaaggagtcagtcccaactacaaatttaagaggatcacagaaacacccacaaacttacgaggatcacagaaaacacccctacaccaacttatagccaatctattcaacctgcattgttagcaggtcacctctcctggatctctgcctgtagtgcccaattaagaatggaaggaggagatttttcagcttttgaagtctgcataccttcaaggaaattcttcaaaaacagccaagacattttaagatgaggagctacagaacagggtacatgccccacagtcttcaatactttttattattgtttcaagaaaactggataaattcattctgaacatcacagacttgaaagtcattgttaccatgcctttgagaatgcctatagttatcattgccatcatctcaaaggagaagaattctttaactcttattgtatatgcaattttgaataaaaaaatcaagttgcattgttattgaaattaaaa

SEQ ID NO: 94692 - DNA, 476 bp, Homo Sapiens
gcggccgcctcgggaggggcccaacaaaggagccaccacgcgcccatgagacccgggagcagcggcggcggggggcagccgctcgccccgacccctcagccatccagtccaatggatcagatgggcaagatgagacctcagccatatggcgggactaacccatactcgcagcaacagggacctccgtcaggaccgcagcaaggacatgggtacccagggcagccatacgggtcccagaccccgcagcggtacccgatgaccatgcagggccgggcgcagagtgccatgggcggcctctcttatacacagcagattcctccttatggacaacaaggccccagcgggtatggtcaacagggccagactccatattacaaccagcaaagtcctcaccctcagcagcagcagccacactactcccagcaaccaccgtcccagacccctcatgcccaaccttcgtatcagcagcagccaca

SEQ ID NO: 94693 - DNA, 872 bp, Homo Sapiens
  misc_feature (672)..(672): n is a, c, g, or t
  misc_feature (764)..(764): n is a, c, g, or t
tgcggccgcggcgcgaggcgctgttcttcccgtctcaggtgacctgtaccgaggccctgctgcgggctccgggcgcggagctggccgagctccccgagggctgcccgtgcggcctgccccacggcgagagcgcgctaagccgcctgctgcgtgccctgctggccgcccgcgccagcctggatctctgcctgttcgccttctccagcccgcagctgggccgcgccgtgcagttgctgcaccagcgtggggtgcgagtgcgggtcgtcaccgactgcgactacatggccctcaacggctcgcaaatcggtctgctgcgcaaggcagggatccaggtccggcacgatcaagacccaggctacatgcatcacaagtttgccatcgtggacaagagggtgctcatcactggctcgctcaactggaccacgcaagccatccagaacaacagggagaatgttctcatcacggaggacgacgagtacgtgcggttttttttggaagaatttgagcgcatctgggaacagtttaaccctacaaagtatacctttttcccaccaaagaaaagtcacggaagctgtgccccacctgtctccagagctggagggagattgctttcatggcacagaacttgcggcacctccagcgaaagccaaacctaaccaagaatggggctgnaagccctacctgcgggctgctgtgcgttctgagggagggagacctcggcactagaaaaaaatcgttaaactaaagtctcgtctattagaatnctaaattgaactaaagaaggttaggaaagggaaatttctgttacttcgggtcagttatttcgggccagacctttttcttgctcctttgccaaaataacttcagtcccg

SEQ ID NO: 94694 - DNA, 342 bp, Homo Sapiens
gggagggccaactccagggattccttccacgacagaaaaacatacaagactccttcagccaacatgatggtactgaaagtagaggaactggtcactggaaagaagaatggcaatggggaggcaggggaattccttcctgaggatttcagagatggagagtatgaagctgctgttactttagagaagcaggaggatctgaagacacttctagcccaccctgtgaccctgggggagcaacagtggaaaagcgagaaacaacgagaggcagagctcaaaaagaaaaaactagaacaaagatcaaagcttgaaaatttagaagaccttgaaataatcattcaactg

SEQ ID NO: 94695 - DNA, 796 bp, Homo Sapiens
  misc_feature (310)..(326): n is a, c, g, or t
gggggaggaaacagcatcctccattcagctgctgacagcgtgaccagcgcagtgcagaaggcaagccaggccttgaatgagcgtggagagcgattaggccgagcagaggagaagacagaagacctgaagaacagcgcccagcagtttgcagaaactgcgcacaagcttgccatgaagcacaaatgttgagaaactgcctatcctggtgactcttcttaagagaaactgaagagtttgttcagcagtttttacaagaattcaggacctccgcttgcttctttttttccaatatttggacacttagagtggnnnnnnnnnnnnnnnnncagatgttaatgtgaaagaaagggtgttgcatttttacatttccctaatgatcttgctaataaatgctacaatagcatcagcttcattttgggttcttgcctcctcccactgtgtgtatgtgtgtatatgtatgttttgaatatgttttctttattaaaaaatattttttgtagtttgaatatgaaatttggaccaaatgataaactgcgctgagtctaaactggcaacatgtatttttttctctgatattaagcaggaaggcattttaatgtggtgacatcagatgttatttttcctagatgaaaataaaagtcaagcagtgattagtttcactcactgtcctagctacacttaatttgaagattaaaattctacattgtggaaaacaattgaatttattgggaaaaacagcagtcttagattttgctccttgcatagtaatcttttgcatgaaccatcaccagcgttc

SEQ ID NO: 94696 - DNA, 457 bp, Homo Sapiens
gagacttctgaagtacacttagttgctagtgtctcccttttggtgtcactggaaagtttagaaagcatggttttgtttttgctcaggtttctctttctgtgatgcagagactctcagctgttcctcctctatgtctacattatgtctgaaggaaagaatttaacaaaacttgaaatactgctgtttttctacaatgtttgtaaatatttatcttgctgcttttctaggtttgtcttctggatttaaaatttggggcggctggggtggaattgcatggtttgggaatgggtaattgagctgctgctcattatggtatgtaacagtgatttgtctgtttaatatgtacaagaactggaaggtcaataaaatgaaagtggttgtcttgactgggtaatagtgttacatattttgttaaaagttatacatcttttcaataaaaacactgcatacttcaaaa

SEQ ID NO: 94697 - DNA, 526 bp, Homo Sapiens
caagattgatgatccctgcagaagttaaaagtctaggaataagaaatttgttctgcaggctgtacaagagacacggcaccaacatctgcatctggggaggacttcaggctacttcattcacagcacaaaatgaaggggagcagtgtgtgctgagatcacgtggtggtgagagaggaaacaagagagagagaatggactcaatgggctcctgaacaaaattcttacaatggcagggatggagaccacacatctactcaacacaaagactttgcctcaggaggctgacctggataagaccatgctgtgtacccaaatggccagcagaagcccacactgagccccatacatagcaccatgctccaggcatattagcctcaatctgaggacagactgagtatattggaccccttgcagcatggagaggtcagtgatgtttttcttcctggaatacttagtgtgagtacccactttccttcccaaaaataccatctgtgggacttaataaattgcccatttaaaactaaaa

SEQ ID NO: 94698 - DNA, 522 bp, Homo Sapiens
  misc_feature (122)..(130): n is a, c, g, or t
ttctgcgaagtgactggcagcgctggcccagtgttatgtaagatgttatttggggaactgggtatacacactgtcctatttttggaactttttggaagtctgaaattattttgaaatgaggnnnnnnnnntatgctttgtatgaaactatagtggaatagattgagtcgattctcgtttcaaaataacttcaaagagtttcagtttccaataggcatgatgccggcatgaatggtttcagcaggtcacaggcagagaagccggaatcccaaaatagcgccattgtgtggacaacctgactccttacaaacgtgcagtggcttcccaacgctgcctttgagtttctgggtctggctgctgaatgtgttgtgcttaagaatccagacaccctgctgttcctgccagagcttctcacgagatatttcgggtagttcatcatctgtcatgtgcagaatgcattttatttctcatagacgcttgtcatgataagctggccacattattaaaaggctcccaaagacaa

SEQ ID NO: 94699 - DNA, 625 bp, Homo Sapiens
  misc_feature (583)..(583): n is a, c, g, or t
tttcagggtggacacggcctctctttaatggaaggcatgaggtgctttgacacaaggaaccagcttagtcaaggaggtacagcctcagcagcaggtcaggatgtcgtcctcctcctctgccttggccccgggggaagacaagcgtgctggccaaaaggctcagaagatgtccgggaccatataatcagtgtaggcacaatcgatgaatccaagccccattgttgtgaatgaaccagcaggacacctcggccccatgccacgggtccttgctgtagtctttttgcaaacccctggtgaccgtgaacccgcggttccccaacaccatcgtggcatctggctttgtggggtcagagcctgggtggatgtcagacacttcaaaaccgatggggtggaaaaattgccccagcagcccgtgcgtccgggctgacatcccatgactgtccagaacatagaagcccaggaagtcctggtggaccgagctccccttcaaaactgcgtgcaaaacaaccctccaaagtgccaacgctggtcaaagacacaaccaggtttcccttcttgttgatggtcacaccaccccgtctgncggaaaaaacttggtccctccagaaaacacaggcccacaaag

SEQ ID NO: 94700 - DNA, 591 bp, Homo Sapiens
  misc_feature (82)..(213): n is a, c, g, or t
tttggagatggctatctacttactgtatccttgtatattggatagtagccagggagcaagctctcatttctgttatacgggnnnnnnnnnnnnnnnnnnnnnnnnnnnnnnnnnnnnnnnnnnnnnnnnnnnnnnnnnnnnnnnnnnnnnnnnnnnnnnnnnnnnnnnnnnnnnnnnnnnnnnnnnnnnnnnnnnnnnnnnnnnnnnnnnnnntaacagactatataacaaaaatgcttttttatgtatatgaagtatagttgttataaccaaacaccagaaaacctattctgtatctgagacctgttttgcaataggctatttggtgttaggtaatgatcttctgacttgtaatcactcttggtattgggaaagtctaaaatattatagagatacttgctttcagtgtgtcatgaaattctctttcagtcactttctgaataaagaaactgttctgcaacagacatttgtgaaaggatttgtgaagacttacacaggattttggttgatcaaatgcaatctcaaaaataattatacttgttaagcagtttagactcttctcatgatatatgcattaaactgaagattata

SEQ ID NO: 94701 - DNA, 388 bp, Homo Sapiens
ctggggctaggctctttgatctgctcctgccccgaggggagcctaaaagccaaagccacgtcttccaccggtggcacaagcaccttcctcgtgtcctccttggttgctgcgcagccctgggcctcctgctcctgttcgtttccaggggcctctgcccttcccgcggtgtgcacagccccaggttctgccttgagacctctcccctctgcagtggaaagagtgccggctctaagtcacagacctagcttcagttcctggctctgctctttcctgccaatgtgactcaacctctcagcattagtcccacactgtaaatgggcttgagtgttcttccaatatgggagtatgggattcaataaaatctccctacagcacacccagtaaaaaa

SEQ ID NO: 94702 - DNA, 760 bp, Homo Sapiens
cctcccagcagaggatcccagtgccctcctggcctgaaggccctgcaggcctggccttcccaacttcctctctgcccttgtcccccgtcgtccctctagttggcctggccctcccaacttcctctctgcccttgtcccccgtcgtccccctagttggcctggccctcccaacctcctctctgcccttgtcccccgtcgtccccctagctggagggtgccccagcctggctgacctcagttcttgtccccagcacacacaactcttcccagcctcaaggccttcacctggctgtgccgctgcctgcaatgttcctccccagtcttgtcagggctggctcctggggagaagatctctgctcagatgtcacttccccggaagggccttccacggccacccacgtcgtgtctccccacgcctgcccccacactcgctagcccgccgtcccctcttcctgcttccgtcctccacagcagtcatcaccatctgatattcctgtgtatgcatcggtttgcctttctggctcctggttttgctctgcctccccgctggaaggtaagctctgtgggagtagagcagggacttgtttgcattgtttattccgtgacccagccccggttctgtgtctggcacatagaagtgtcgctgaatgaatgaatgaatgaatgtccattgtgtgaatgaaagagtgacaggtttggaggtcactggagcagatggccaagtctgtgacagctgtgataataaacagtgattacaaaa

SEQ ID NO: 94703 - DNA, 412 bp, Homo Sapiens
ctcaagaaaaaagcatggtgagtccagacagcagcaaaagcttttgtgaaaaccaattgtgttcatctagatagtaagtaactcctatttttactgttaattttttaaaagagaatttttccctgtggaaactccctgttagtacgtcctaggggagaaagcctgtggaatatggtggttattgtatggcgttgcctttgtttcatctttgagtttgccctttgtgggatctagtgggataatgagcactgacagaactcttaacagcgtgctgtatttttgacattgaaaatgttaatgacttgatttgtacataactctgtaactaggtgaaagtagatcacagctgacatttacaaaatgtttttgtaccttagaatttctgcattaaataaaatgttttgttttaaaa

SEQ ID NO: 94704 - DNA, 332 bp, Homo Sapiens
tagtctcaagtttgttcaaagctggactcctcgacttggaaccaggagcagctggagatttgtcaatttagagctcatttgccacgggagacgctcttggtgtccccagcaccgaagggtaggtcaactctacagttttcctgaacatgataaggtgtgtgaagacgctgtgcaaattgtactaccgtctgcttaaggagaacctcgatcttcatctcgcccccagaacttccctcccttgaaaataaaactcccacctgaatgtaaagcccaggagggggttttgttaaccgcacttattcccaaagcataaaggaatgtctaataaaaaa

SEQ ID NO: 94705 - DNA, 289 bp, Homo Sapiens
gcggccgctgtcgcttcacaatgagcgtgtgaggcgcagggggaggagccgaaggcgccagaggaagggccggcctctccgcccacgccgtcgctgcgtcgcgatgcctccgcgggagtgtgaggcggcacgtcgtgcgtgaggctcttccgccacttggccgcccgtgggcacgagcctaaagtgccaagaaagtctccgggactggaccacccgagccactgcgcttttaggcaggtggtaggtttcgcaaggagctaccctccaccttgtttgctttaagtaaaag

SEQ ID NO: 94706 - DNA, 412 bp, Homo Sapiens; identical to SEQ ID NO: 33172

SEQ ID NO: 94707 - DNA, 660 bp, Homo Sapiens
gcacagctggactggggtctgagaagcctgtaggcagacccagggatcatgcgccgtcagcgtgtctggcattcgacaaggtccctacctttctgggcttcagaagatatgcttttgctctgcagggtgcctctaatacctgcctatgcctttggggagacggacctctatgatcagcacattttcactcctggtggctttgtcaaccgcttccagaagtggttccagagcatggtacacatctacccttgtgctttctatggacgtggcttcaccaagaactcctggggccttctgccctatagtcggcctgtaaccaccatcgtcggggagcctctaccaatgcccaagattgagaatccaagccaggagatcgtggctaaatatcacacactctatattgatgccctacgtaaactgtttgaccagcataagaccaagtttggtatctcagagacccaggagctggagataatttgacagacatccccagtagccttcaccctggctggaagctcttttctgccctttctttgcagctactggtgagatagtcccaagaaacagggaagagcctaggggagacgggccctgacggcactttggtgccagcattgaggaaaacaatggacaaaataaaaagcccatcttctgataaaa

SEQ ID NO: 94708 - DNA, 458 bp, Homo Sapiens
tttgatgcttattcttatttatttaacaataaatatttttagtgagtcattataaaatgctggattctgtgccagctgccaaccatagggaagtgcagacaggagcccaatcctcaacagaccctcaggctggccgagaaacaaatgtgccctaagatgtgtcaggctctgtgatccaggtttatgtcagcttcaacggaggcccatgggacggtgtaggtggccaggccgtgaagatcatggagggctccctaaaggaagtgacgcttgagctgaatctttaaatatgagtagtgctagtcagatgaagacaacaaggaaggcattcaggagaggaagcaaccacaccccacactgatgccaagtgctctttctgtcttaacatgtctgatcacatcattctactttatgtccaatctcggcttcccaagaagataaaggcgaggctttccagcaga

SEQ ID NO: 94709 - DNA, 1245 bp, Homo Sapiens
  misc_feature (532)..(579): n is a, c, g, or t
  misc_feature (1089)..(1149): n is a, c, g, or t
tagccactctttgtcagaatactcccatggtcagtcccctaggagccccattagcccggaactgcactcagcacccctcacccctgtggctcgggacactctgcgacacttagccagtgaggatacccgttgttccacaccagagctggggctggatgaacagtctgtccagccctgggagcggcggaccttccccctggcgcacagtccccaggcggagtgtgaggaccagctggatgcacaggagcgagcagcccgctgcactcgacgcacctcaggcagcaagactggccgggagacagagcagcgcccacctcgcctcccattgtccccctcaagagtcggcatctggtggcagcagccacagctcagcgcccgactcacagatgagcgggagacagccatctaaacagactcactaactattggcattaaagcttcagaaatctctgcgtttgatattcaaacatcatatgccggaaattttcacagtttttagtgaacttaaggaatttagatcctactttggtannnnnnnnnnnnnnnnnnnnnnnnnnnnnnnnnnnnnnnnnnnnnnnncttgtcacacacctgagcacttcctcccgttggcaaacagaagttcaggatgagaccctgctggcctggtcctggcacatcctctgcactgttgaatcactggacttactgatcttagatgaccaccccctccctcacacctgtgggcagggcagaacagcctggcgggctacagtttagcatggccttcttgagctagggtggaatggggcagggtgctctggactcttaccccctcccctcccatctgtggcttgggctctgctgtggcccctcctgggctgggtccccttgggtttttcgtgctgggaacatccccaacaggagccttctctgccataaactgccagcttggctctccccgagtggctcagctgggcagaacaccttttccttttcccaccccgaaactttaagagacgtgatttttgggctcatccggcatttgggccttccccgggtttgacatccttccccggcaggaaaccctggcctggtggcggctccagnnnnnnnnnnnnnnnnnnnnnnnnnnnnnnnnnnnnnnnnnnnnnnnnnnnnnnnnnnnnnggcagggtcacaaaccccacaaacccgggtcccttccccttttgggaatatttttttacccccccatacccgggaacttttgaaaggcgaggggtt

SEQ ID NO: 94710 - DNA, 686 bp, Homo Sapiens
tttaagagcatagtatgtttcagataccatgcaggattgtaggattctgggattcagataccatggaggattcatcattaaatcacgatacccaagctcaaggcgtttataatctattagagaagacagatccctaaatagatgtttcaataatgtgattgcgttgtcataggagagctaagctctggcactacatgagcttctggataagaaacctaactcatgaccagaagacttcagggagagctatttaggagcagtggcaaatgcctggacatacacataaaactaagtaagaacaaaatagccagttggtgtttttatttatctgaatgtaagaacatagattatcgatcaatgaacaattgctcagatttaaaaagaaatgaggaaaactaaaatgttagtcctcaaattcctgtcacttcccacatgtgccctgcagtcatttcctgcaaatggaaacttccaacaaaatctctgggctggagacctggggttccagtttctttcaaggtcttgtggtagggaactaagtgggtgagtaacctgcctttggcttccagggtgcaaacagaatcattgctaaccccctttgtgtctcacaatgggtaatgaaattcatactatggcaccaaagcactttgagctctttagaaaaagtaatcataccaacttagagcatt

SEQ ID NO: 94711 - DNA, 433 bp, Homo Sapiens
caatctagtttcaacatacaatgaggatttctgtctgatacagagaaagatacccagtgtctggagggtctgtcttaagaagtgctcttgaagtctgctgggatttcctttcgggactcacagagggaagcctgctccctgagggctttttctcaggcccaatagatcagggtaatcattaccaaatgaggaggaaaggacgatgtcatcgaggctctgcagcgaggcatccttcttccccatgcagtgttaaacactcccctacgcgagaaacgctgacctacgctcaagctcaaaggatggtagagatagaaattgaagggcgcttgcacaggatcagtatttttgatcccctggagatcatattggaagatgacctcactgctcaagagatgagtgagtgcaacagcaacaaggaaaacagcgagcggcc

SEQ ID NO: 94712 - DNA, 425 bp, Homo Sapiens
  misc_feature (234)..(246): n is a, c, g, or t
ttttttatcaaagacatgaagcattggcagatacaaatgcttctttccttgactaactgaacatatgtatttattagggtgaggaataaactaataatgctgcaattatcttgcttatgacaatacattctgccttgaggcacagcacaaagaacaagaaaacttgagaacaatccctgaaacctaaccaagaattgaattacaataaagaaaacagcagaggtggatgggacnnnnnnnnnnnnnggatagaactatggaaatatatacatatataaaaccacttctgtttccaagtttcatgtgggggtaaatgataggtgacatcctgtcaatgagctgctaaatccacattacagtacatatcttgcagcaaaagggaaatcagagaaatacgactatcctaactttgaagctgtatcttg

SEQ ID NO: 94713 - DNA, 369 bp, Homo Sapiens
cgcaggagggaaagccgaaaacagcgcagccttggggaagcccacagcaggcaccactgatgcaggagaggctgcgaagatcttggctgaaaagagaagacaggcccggctgcagaaggaacaggaggagcaagaacgactggagaaggaagaacaagatagaatgtgaagctttgcatagtgccacgtgggaggtgaggagtgaggaaggaaagtaccagacaacctggggctggaacacagcggccacctcttggaataagatcatcctcacatctgttttatgtttacagttaatagttaaagccacagaaatgttgccagataaaataatttagagaaaaataaagttacctgagtcaaaccgtg

SEQ ID NO: 94714 - DNA, 190 bp, Homo Sapiens
cactttctacctcagatcagaggtcaatgagcaggcatttattaagatcctgcatgctcatctttcttacctcccttcttagaatctaagctctatgagtctacatctcacaaatcctagctaactgcagaccctgaaatattcacacattatcttgatagttttaaaaatgtatctattacattagacc

SEQ ID NO: 94715 - DNA, 459 bp, Homo Sapiens
ttttaaagtgtaaaatgtaatctttaaaatgtcacacaactttacatgcatgctagatttagaataccatctgtatttacgattttctcttattgactgtctccacgcgcacccactctgcagacgccctaaagagtgtctatcggatcaccctcaagttgggtcaaacggctcctcttctcggcttttcgggagcaaccctatctcaacattcaccatcttaagatgagcagactgcaagtttgcctctcccaccagtatgggagctgccgaagcggcaagaacagcgtttccgtccatcgagcgccaggtcaccagtcagctccagtcctattttgagttgaagtaaaagctcctccctagatggccagtgcacgtctttaaaaagcgactcctttcccacaaaggaaatacgactggttcgcatctatcaagggttggcgttgggataagagggtg

SEQ ID NO: 94716 - DNA, 754 bp, Homo Sapiens
tgcggccgccacacccagcaccacaggcaccaagtccaacacgcccacatcctccgtgccctcggccgccgtcacacccctcaacgagagcctgcagcccctgggggactatggcgtgggctccaagaacagcaagcgtgcccgggagaagcgcgacagccgcaacatggaagtacaggtcacccaggagatgcgcaacgtcagtataggcatgggcagcagtgacgagtggtctgatgttcaagacattattgactccacgccagagctggacatgtgtccagagacccgcctggaccgcacaggaagcagcccaacccagggcatcgtgaacaaagctttcggcatcaacaccgactccctgtaccatgagctgtcgacggcagggtctgaggtcatcggggatgtggacgaaggggccgacctcctaggggagttctcaggaatgggcaaagaagtggggaatctgctactggaaaactcacagcttctggaaaccaaaaacgcctggaatgtggtgaagaatgacctgattgccaaggtcgaccagctgtccggagagcatgaggtgctgaggggcgagctggaggctgctaagcaggccaaagtcaagctggaaaaccgatcaggagctggaagagaactgaaaggaggaagtgcgatgccatcatcgcacgccgtgaaccccaagaagaggcggagatgaagcagctatctctgtacagaatcggaccaaatccccatgggccagcgc

SEQ ID NO: 94717 - DNA, 375 bp, Homo Sapiens
tggagatcgggaattccagccaaagagaaatggggtccctgggagaaaattcccactctagcagtcctggagttgtgctcatggagacttgcttacgcgagtacaaggacagcgttgtattgacaaaatttcagccctcagtctagtcttgtaaacgatagatcaggagtgtacttaaccgtcgttactttgatccagccctaggtttcccttttctcatttgtaaaattgttatagtaatacctttttcatccatttgtggtaacatttaaatgaggtaatttgtgtgaagcccttagaaaacacagcgcttcttagtcgtgggttccgcgtggggtggattcaaccaacctcaaatcaaaaatattcttcaaa

SEQ ID NO: 94718 - DNA, 411 bp, Homo Sapiens
gttaaaaactcacctgcatgcagcacatgacaggctaaaatctcttgtggacaaaacagtaacaaaggcacccaccagggttgagcatccgtgttgctgacaacgaccaccaagggtcaacgtcctcttcacaatcctgtgtcagagcatcactggaatgatttcattagcaacttcccaggagaatcagcttaaaaaatacttgtcccattttccatgcagatataacccatcccttttcctgaagaaacagagctcaatactaaatacactgaatgttgtttttgctggttttgtaagtttgtgactttatcactttctaatttctgagttaggtggaccactctacatatttctctcatgggtgtgaccagccttctggatgtcaaatataactgactttgttcgtgt

SEQ ID NO: 94719 - DNA, 397 bp, Homo Sapiens
tgctgtatcgtgcctgctcaatccttaaagttaacttctaatgatagtaaaagaccttcctgctgcctttaaaatgcagcttgtgctagtaacatgcatgtgtcaaattgaagaattagacatagatgactagatagaaagtaattttgtaggtaattttagagttcaactccacccagctttcagtgaaggaacctttcaaataatagatttttgcttaccatagagaaaagatcaaatgacaaagcaaatattgaccattaagctggaatatggtgataattgaacagttgtataaatgaagtaattgaattgtacacatacaatgggtgaattttatggcatgtcaaagtatacctcaataaagctatttttttaaattgcccatgaaaaaaaa

SEQ ID NO: 94720 - DNA, 230 bp, Homo Sapiens
cagaccaatatcccttatgaatatagatgcaaaaaaacttcaaaatactagcaggccaaatccagcagcttattaaaatgatcacacaacatgaccaagtgagatttatcaaagaaatgcaaggatggttctacatacaaatgtcaagcgatgtaataatataccatattaatagaatgaaggggaaaaaacagcatgatcacctcaattgataagaaaaagcatttgac

SEQ ID NO: 94721 - DNA, 724 bp, Homo Sapiens
gcgaccgcggcgaggtgggtgaggctcaggacgagggacggggcggcaaattgtcacagaggtcgccgtagaccggtgtgcaaccgaagtgaagagcgggaaggcgaggaccgaatcgcctctggtgtgcgttgtccgacagaagtcccgaatggactgtgagccgccggtggaggtgcccgggcaggtgcagagccacagcctgcgccccgtgagccgaggcgagtgatttatttggcataaaagtattctttcaaggatggcagaagctgttttgattgatctttttggtttgaaattgaactctcaaaaaaactgccatcagacattactgaagactttgaatgctgtccaataccaccatgctgccaaggccaagtttctctgtataatgtgttgcagtaacatcagctatgaaagggatggagaacaagataattgtgaaatagaaacaagcaatggattatcagctctcttggaagaatttgagattgttagctgtcccagcatggctgccactttgtataccattaaacagaaaattgatgaaaaaaatctgagcagcattaaggtaattgtacccaggcacaggaagacattaatgaaagcttttattgatcaactcttcactgatgtttacaattttgaatttgaagatttgcaagtgacttttaggggagggctttttaaacagtccattgaaaataacgtaatcacagctcaa

SEQ ID NO: 94722 - DNA, 301 bp, Homo Sapiens
ctccctggttgggagggtgttaagtatcgagtgtttttccaaaccattcctcctctgctcacctacccctaggtgattaaaggagataacttttaaaaagaaagaattggctcaaaggtactgtaattctaggattatatacctttatataggttcattccctgatccctgtattatcaaggcacagataataataatccccaaccacccccacgccacatcaaaaattgtccctcttgagtctttttcccatttacatcacccattgatctgatttcagccaaatcaaaatgttttgaaa

SEQ ID NO: 94723 - DNA, 386 bp, Homo Sapiens
ggcccgcggagaagccgcggctggccaggacgcaggtgctgtagtcgaagcgctcaggctggctggctcgccgctgggccagaagcccgcactgcacaaccgtgttgcccttggagagctccaggagtgggtgggcagtggcagggtccaacttgagaggctccggggctggcaaaaatttccggaagagccttttccacacggtcagcttgatgtcagcctggtggaggcctggcttgaaggagatggggctgaatgcgccttctaagggccggggctgcggaatctctgctctggagggcatggagtggaacttccggatgaacttgttgtggtcctcattgccgaactgttccagcacacactcggcttgggcagccgctccc

SEQ ID NO: 94724 - DNA, 486 bp, Homo Sapiens
aatttgaacagggaaaatttattataaataattgttaactataacgtaggcctaactaggaaggtgaaaacaatgctctaaacaatatcctagggctgaggatgaaaatcgggaggaaccactttgaaggaggtccttttccccacgacggattcagacagtgagggaaaagagattctcagctccattgaatggtggagctctcctggctgcctgagacagaactggtgcatggttgcagggaaaagggggaacatatgtctgcagggcaggtcctcagagacagccagggcacaaagagtcatcttgttggcaggacagatagaggcccggggtgagtggtgtctctgttgggggtcaccggctggggctctctgagaacttgcagagaaactgcatgctctgggtgtgtggcaggggcagaggcttctggcagtggtgcgctaggagcaagtagaaaaacaacggccgtccgacggacgtccg

SEQ ID NO: 94725 - DNA, 424 bp, Homo Sapiens
ggagatttacttaaacgtactttcaggagtgagcaagtcctacttataaacctatattaactttatttttgagatacctgttttgaatttaaaggagataagaggcgtaaagtaggatgctcactacaaccataggtggggtttcagctcatatcttaaagataaaaggtactattatataacctatacacaagatacaggagaaaatatgcttgatttttatttggcaggggggctaggttgtatgggagtaaaaaaaacattgaaaatttttaaattgtccaaagaaacattttaagactctttaacaaaaaaggccatgagtaaatctctatattaacattactatttattttgttttggaactgggacatgattctatttgttataaaataaaattgatgtgattgtcaccttaaaaaaa

SEQ ID NO: 94726 - DNA, 400 bp, Homo Sapiens
ggtggttgtcatttgagtatccaaactgtagctaacgaggagaagcagatttaaatttatatcgggggaacctctttgtggagcatttcatcagatgacttcctgtcaacctcatatcttgaaaagagggattaatgaaacagcatctgaagaagcagtggactcttgtggaataaaccctgacatcttccacagtgttttgtgggataatttcaagttcttcagatacagattacataaagaagattgtagggcacgtgacagactctggtttcttgtattttagatagtagaaaaattgctacctctaagaatggatcctggagagatctagttacagttataacttcttcatttatggttttatctcacagctttatttatttttatttacatgttt

SEQ ID NO: 94727 - DNA, 659 bp, Homo Sapiens
tcccaaacacctccaacaggtactcctccctcccgccctcctccaaggccttctgtctagagcccaaagttcctgctctgggctctctcagaaacttcaggagatgttagaacaagtctttccagttagagaagaggagtggtgataaagcccactgaccttcacacattctaaaaattggttggcaatgccagtataccaacaatcatgatcagctgaaagaaaccgatattttaaatatgccagaaaacaaatgatgaggcaactacagtcagatttatagccagccatctatcacctctagaaggttccagagacagtgaaactgcaagatgctctcaacaggattatgtctcatggagaccagtaagaaaatcatttatctgaaggtgaaatgcagagttggataagaaatacattgctgggtttctaaaatgctgccttcctgcctctactccaactccatccctggactttggacccttggcctaggagcctaaggaccttcaaccctgtgcaccacccaagaaagaggaaaactttgcctacaactttggaaatgctggggtccctggtgtggtaagaaactcaacatcagacgggtatgcagaaggatgttcttctgggatttgcaggtacataaaaaatgtatggcatct

SEQ ID NO: 94728 - DNA, 486 bp, Homo Sapiens
  misc_feature (62)..(75): n is a, c, g, or t
aaacatcaaagaattatttaatctaatatctctaaccaaaaaagaagatagttgccttcaannnnnnnnnnnnnngtaatatacaaatcactattactgaacagttttacctctacctgcctaataagacataatcattattgccaaaacaatcttaagtactggtccagcacatctctcttcataaaaaaagccaccaaagatccaaacccagaccagatgtccagacttcaacataatagcaatccctcccaaggacaaagccaaaaatagatcctgagctaaatgggaattcctagcactaagatccatccttataagccctttccagggatatgcattttaaatgggttgcagaagtatgttacctgaacaggttaacataggatattcatcaaatgaaccaattatcaacaggtagagagcagggcccaacaaaaataggtcataccagtggcaactttggacagaaaacagggaaactac

SEQ ID NO: 94729 - DNA, 450 bp, Homo Sapiens
gggcggattggccactgggccaggatccaggaatcctctctcctggtctgacccagttcaggaatgcagaggccgcccgccccggcaaatgcgttgcagcaagaaggagagttagacgtagagaaacaccgagtttcagaggtgccgggaagtctgagccttcgccctcctgctctccctccatgtccacctaggaggctgcctacacctgggcaagggcacccgggctcggctggatttccaggaagacccaccctatgacgactgcccccactcccagaccctccccccagcctgggattgagccctggggatgacccggggttggcaagggaagagctgaaatcgccctgtccttggggaccccaccctttgtgccatctgccgtttccctagtgctgggcatccagtcagccctcaataaatgcttatgaatggatcaacaacaaa

SEQ ID NO: 94730 - DNA, 538 bp, Homo Sapiens
aaagagtatttcctttatcttttagcccttctaaatagttgtctactgttactttttatttgtaagtactcttttctattctttttcttccttaatagcaccttgaatgtaataccatttcttatctctctgagaagacaaaagataatcttcctcaagagtctaaagcattcttctcactgcataccttctgcttcctgatggttcctttttttcctatttgttttggtcactttcaagttaaaagtctttcttggtgggagtcaggtatgaacaggaactgggatttaagggccacacttcagaggtatcccaggactcctttttgccagaattatgggaagataatgttgtgggatgtgagtagtgaaatttagaaaaagcagagagtcctacaaaacatatccacaggaagacaattaaagagcaacttacaccaagtaggtgaaactctaatgcttctgaaacagataaggaagaacacggcaaatttttaccaaagctaagtattgaacaggagaaaaagtaaactagttct

SEQ ID NO: 94731 - DNA, 753 bp, Homo Sapiens
  misc_feature (89)..(268): n is a, c, g, or t
actatctgactccatgactccagcaaattgcttcaactgtctggcctgcagtttttttcttgcgttaaataacagacttagtctagatnnnnnnnnnnnnnnnnnnnnnnnnnnnnnnnnnnnnnnnnnnnnnnnnnnnnnnnnnnnnnnnnnnnnnnnnnnnnnnnnnnnnnnnnnnnnnnnnnnnnnnnnnnnnnnnnnnnnnnnnnnnnnnnnnnnnnnnnnnnnnnnnnnnnnnnnnnnnnnnnnnnnnnnnnnnnnnnnnnnngtctagataagtagctcttagccttggttgcacattaaaatcatctgggcaacttttataacctaccaatcctggcctcttcctccaaagattctgacttaaatggtttcagatggggaccattgttatgcggttatagccgacgtctaggtgctacctgaggtcttcaaagctaaaggtcagtgtttcccagccgtaaatgcatacctctagacctggccttctcaagccactaggtgttgctataatagagaagaaaaggcattttcagaaccgtctttggatatggatgaggaggaggaaaatgtatttcttagcttctgataagagattattttgttattttaatctgagtgcaatttgctaaatattcatttgcaacttgttaaatttattcaaagaaattaaatgcccataaatgacagaaagaataaagaattgtgatatatatttacaataaaatactctttagcaataaaaagaaa

SEQ ID NO: 94732 - DNA, 518 bp, Homo Sapiens
  misc_feature (52)..(60): n is a, c, g, or t
tttttttccagcctagatgttattctttatgccaatgcagtcgtaaaataannnnnnnnnaaaatgaagtgacggccaacctagccatgagaattctaatgcagtcctgaatgagtgaggcttctgtgtaagtgcccagttgggtacagggtagatcgtagacaagatccatttcttcccatctgtgctttagaagtagaagtgcagagcaggccatctgtgacaccacatgtacccagtggctccttcctttcatgtccacggcctctcctttgcgccagggatgattggaccagcatgcaaccctgaccagggacagccaataggagctgctcaggggcatagagccgggcaggaaatgctgtgcccaagaggtgccacaatcagcagtgccaatccagaaggactgaagctagtgaccacaagatggctgccacagctccagtatcacatctcactgggtaaaccaatgggaaaaaatatttgcctttttcccagcacccactgtgaaaacctca

SEQ ID NO: 94733 - DNA, 420 bp, Homo Sapiens
tttacgcaaacgctccccaggattaccaaatttcttcgggggaaggccaccaccacctcttgctccaaatcctccacggtcacgatcccggtcccggtccccaaagcctcctccgcgcatggtcccaaaaggatagagatctgggagcggggcacggatggccgggctcgggagggcctgcggctccggtctggtgacgaccgatggcggcggcgcctccgctgttggggcggcggcaggcgcagcgctctctcgctccgacgcgctgtctcccgtcgcagacgccaccgtcgccgcctctctcgtcggagacgggagcaaaacacagagaatcggggctacaaagccggtgggcaggtttgctacgctcaaaccggcagtgccgcggtttaggcgtctccttccttcccagcgactgca

SEQ ID NO: 94734 - DNA, 439 bp, Homo Sapiens
ggggacctcgtggaaacatgttgttttctttgattggagagggacacaaagataaattatttttatatacttcaattgctttaaagtattacaaagacagggggcagatcagagataataaaattggaataaaactctataaagattctttgccaccttcaccattgctatttcctggcaaagtaacagtagaccaagttactgatagattggtaatagcagacactggacatcatagaattttggtcgtttggaagaatggacaaattcaatatagcattggaggtaaaacttgcttctgattacgatagataacgtgttttacagtaaaaaaatagttcaaggtaaatataaaagttgaaatgtctaaatgaaaactaattatagaaaagtgatatacattgacttaatttcctaataaaaattttttgttaattaa

SEQ ID NO: 94735 - DNA, 580 bp, Homo Sapiens
gatgcttccattcctgttacatttggtatcaccagaagaccttagattttgtgaatgtcaagtcttttcacaaactttcagcagaattgtcagcctaaggaaaagaaagaagacagctagaggacctcaaatgctaagatgccatttaaagggcaaacagcatctcaagtgaagaaatgtcatgcaggtgaaatattttgagggactcaaggtagaggacagtgaagaggagaagcagtgagtactgcttgacaatatagtgttttatgactttttttcttccttgtgcagcccttagcaaagtgatcaaaccagagcttcatgccccctgatgggtgactgacgggtggttaactgcagcaagttggatgacagttgagttagtgttttccaaaagctggtccaggtctggccaaaccctgtgtgtgttgtagttagtgccagggctccttggggaggtgtgcgtccgttccttctttctgatataggcccttcctgaaatttgtgtcttgttgccttcagtgaagcagatcttttaacagtttctgttactttgttcttgttcttcaagatcatagct

SEQ ID NO: 94736 - DNA, 514 bp, Homo Sapiens
atgctgacatcttcttcaacatagtatctataaaatggctcttcaggttcatcttctaattcatcattgtcagtggattcattacagtctttatcagtaactttaataatgttaaagtctttcagttcatctgtaggaatatcttctggctccatcttaatatatatatccttttcctactcagcagctctgcttttctctatcgcttgctatttcagacgccactgtgctactttttctgcttccagtggttgaagctgaatcatcagcagcctggcttgtgtctcctctgtatttgtccgtctgtgcagaaaatgttttggaagaatctttttcaccaaattcagctttgatgttactgtcttttccatctctaatatctactattctatggtaagatcttgtgtttaggtataaatatctgttagtacaggttagcacatgctcatctaataatttttcacagctaaagccaaatccacagctatcacaggtaaaactccgcccaaagcgt

SEQ ID NO: 94737 - DNA, 389 bp, Homo Sapiens
ccatggacaaaatgggccctcagtgactatccgatgcagggccaggcactgaatgcagatgcatatactggagctcagaggatttcagtgagttaccccggccacagccagtgagcagcgatgtcaagatgtcttgaatcctgggcctcagctgcaaagccgtaaccagtcctctgtgttcccatgggccagtgctttacaaaggtccttgcagagaatcatgccaggttaggctggtggtcccagaggaggataagaggcttatggagcagagttgcctaatcaggcccagccaagatcagcagaccctcaaccaatacatagacacacgaaccagataaatggttttgttatttgccacagtgaaataaagcatcccattctgcaaa

SEQ ID NO: 94738 - DNA, 538 bp, Homo Sapiens
tgcggccgcggcgcggagcagccgacgcacgctagtgggtccgcccgccaccgccccttccccggcgtccgctcccgcccttgccgtcccccgcgcggctccgcgcctcgggccccgggcgcagccagccctccagacgcccgcggtcccggcggcgtgtgctgctcttcctccgcccgcggtttccagcgccgctccttcccccgcttgggcagggagggggcattgatcttcgatcgcgaagatggctgctggctgcctgctggccttgactctgacacttttccaatctttgctcatcggcccctcgtcggaggagccgttcccttcggccgtcactatcaaatcatgggtggataagatgcaagaagaccttgtcacactggcaaaaacagcaagtggagtcaatcagcttgttgatatttatgagaaatatcaagatttgtatactgtggaaccaaataatgcacgccagctggtagaaattgcagccagggatattgagaaacttctgagcaacagatctaaagccctggtg

SEQ ID NO: 94739 - DNA, 435 bp, Homo Sapiens
agtcattgacctcttgggagaggagacattggaggtggtgatgatttgctgaagcagccacacacgttcagcttgtgaggacagcagttgttaggcaggggatgagggaggaagctggcagatctgtgcaggtgagaggtacctgtggccttgggctcatggaagtgggaggtgatgggattctaatgtgcttgggtacagtttacaaatacaacctctcttagtttgcccaatacctccaaattcctggggtggcacacctgaggttcaggtggcatgactgagccacagtcacacatccccactgtaggataccaccacggttgggttaggttccagcacatggcggtcccggcctggcctcttggtcccacctcacctggtgactagtgcagaccactctgttcttgcctgtttcaggcagcgaagcaggag

SEQ ID NO: 94740 - DNA, 426 bp, Homo Sapiens
ccccagcagcggcctgatctgggttccgctgattcctttcgtaaccgcaccacacccgaggagctctgatttgaggtgacaatgattttgaaccttaaattctttggaaagactcagaatgaagtccattgtggaggctcagaaaaacaatttcctgggaaatgaagcagtatttttatagagagaactgtatacatgtgaaagcttattcatcgttggtcaggcaagagaccctccaatgactaaataaacctgaatttaagtcagaggaaagaaattacacagatctctatttactgggtggccttcaaatatatcatgtcctcataaacaagatcaagggagggaacactatcccagaagaggttctgtctgtaatcttctcagtttgaaaaatactaaataaagaggtattccactgttaaa

SEQ ID NO: 94741 - DNA, 562 bp, Homo Sapiens
cggccgcagccgggggcgcgtttccccgctgttgccgttggcgtcgcagcgcgccgggcgaggacgaggagtgcggccgggtccgggacttcgtcgccaagctggccaacaacacgcaccagcatgtgtttgatgatctcagaggctcagtatccttgtcctgggttggagatagcactggggtcattctagtcttgactaccttccatgtaccactggtaattatgacttttggacagtccaagctatatcgaagtgaggattatgggaagaactttaaggatattacagatctcatcaataacacctttattcggactgaatttggcatggctattggtcatgagaactctggaaaggtggtgttaacagcagaggtgtctggaggaagtcgtgggaggaagaatcttcagaacatcaggatttggcgaagaatttggtgcaaacagatctccatttacatcctctcactcagatgatggatagccctgagaattctgattatctgtaagctctcagcactgatcatggcctgtgggtgtgcaacaagtttggggataaa

SEQ ID NO: 94742 - DNA, 183 bp, Homo Sapiens
tttttagatatcttgcgtttatttgaagaggagagagatcaggaaaccagaaatatcacaagccccactgctaaatatgactagcttaaagaaagaaatatcacaagctcatagattagtgctggacacagggcaggcaggctccagggattacttctaggaagacaaagggtattatggtct

SEQ ID NO: 94743 - DNA, 899 bp, Homo Sapiens
  misc_feature (308)..(346): n is a, c, g, or t
cggtcagcggggcgttctcccacctgtagcgactcaggttactgaaaaggcgggaaaacgctgcgatggcggcagctgggggaggaggaagataagcgcgtgaggctggggtcctggcgcgtggttggcagaggcagagacataagacgtgcacgactcgccccacagggccctcagaccccttccttccaaaggagcctccaagctcatggcctccttaggagcgaacccaaggaggacaccgcagggaccgagacctggggcggcctcctccggcttccccagcccggccccagtgccgggccccnnnnnnnnnnnnnnnnnnnnnnnnnnnnnnnnnnnnnnnctggccgagatccatctgtgtgtgctgtggaattcaggatacttgggcattgcctactatgatactagtgactccactatccacttcatgccagatgccccagaccacgagagcctcaagcttctccagagagttctggatgagatcaatccccagtctgtgttacgagtgccaaacaggatgagaatatgactcgatttctgggaaagcttgcctcccaggagcacagagagcctaaaagacctgaaatcatatttttgccaagtgtggattttggtctggagataagcaaacaacgcctcctttctggaaactactccttcatcccagacgccatgactgcaactgagaaaatcctcttcctctcttccattattccctttgactgcctcctcacagttcgagcactgggaggggctgctgaagttcctggggtcgaagaagaatcggggttgaactggaagcactataatgtcagcgtccccttctgggctttagcaaattatgttgacctcatctggtgaactagatccacgacccttacgggaacctc

SEQ ID NO: 94744 - DNA, 1035 bp, Homo Sapiens
aagccctttgagtgcctcgagtgtgggaaggctttcaaccaccgatcctacctcaaaaggcaccagcggattcacactggggagaagccatatgtgtgtagtgaatgcggaaaggccttcacccactgctctactttcatcttgcataaaagggcccacactggagaaaaacctttcgagtgcaaagagtgtgggaaagcctttagcaatagggcagacctcattcgccacttcagcatccacactggagagaagccctatgagtgcatggagtgtggaaaggccttcaaccgcaggtcaggcctcacaaggcaccagcggattcatagtggagagaagccctatgaatgcatcgagtgtgggaaaacattttgctggagcacaaacctcattcgacactctatcatccacactggagagaagccgtataaatgcagtgaatgtggaaaggccttcagtcgcagctcgtccctcactcagcatcaaaggatgcatactgggaaaaatcccatcagtgtaacagatgtgggaagaccttttacaagtggacaaacctcagttacccttcgagaacttcttttagggaaggactttttgaatgtaaccactgaggcaaatattttgccagaggaaacatcttcctctgcatctgatcaaccataccaaagagaaaccccacaagtgtcttcactgtgagaaaaccttctgttgctgaatattacttgtcatctgaagagtcatattagaaattcgttcagtctagagccttattctccatctgataatttatcctggagagagacccagtggttattgtgcacataggagaaccttcagctgcatctttctccttagtttacagtgcaattttatctcaggaattatttttaaaaggaggaggggacatagaaaaaatgaaatgcaagcacacatcttttcaggcttctctgccaagcctatggcgctttgtcatggatttcttagtgtatttgggggaagggaaatgtttcaaggtaaagaacctagacccttaaa

SEQ ID NO: 94745 - DNA, 727 bp, Homo Sapiens
caacctcattcatctctctgttttttcttaaataacacatgatgttgggatccttctggagtctgtggaatttgctttttaaagaggaaaggaacagaagaaggttcctgaccaggcatttttcatcctcacctatcacagtccaagaggaaatgagtttaaattgaagtcaatgaaatttgcagaaattcacgaaggtggcatttttaaatgtaaaattggtctttttggggaaagtaatggaattgtctttttaacaaagaggctttcaaccttttaaatgtactcaagatcccatgaggccactgctcattgcagtgcctgtccccagaggctctggttctcctgggagccagtgcttcctggcatgtgccaggactctgaaggctttggttgatcttggagtcacacgctgaaccttgcctccctggagatgagagtgacacgcagtcagctggggcacaggtcactaaggtgcccaacaaaccgtggtgtgcaagcgcaggtcaggttcctgaggcttcacgtccccatttgcttatctttttcccttagcaggtcccggctggttgcataagagcatgatcgttcagtgtctgggtagcgccaggccctggcaagcacaccatgagcagcagctattattatattatcaatatttatctgccgggccaactgggatatttgtcttcagatccttaaagaagccatgtggattagttatcca

SEQ ID NO: 94746 - DNA, 514 bp, Homo Sapiens
atgcctgcctcctcactcctccgtcgctgcccttcacaccttttggtgctacccctccccagagttaagcactggatgtctcctgatcccaggctgggacccctacccccaccccctttgatcctttctacttccacggtgaaaggactgaggtcggactacagagggaagagggacttcccttgactgggttgtgtttcttttcctgcctcagcccagctctgcaaatcccctccccctgcccctcacctccccaggctcaccttgccatgccaggtggtttggggaccaagatgttgggggggtgaatcaggatcctaatggtgctgccctatttatacctgggtctgtattaaaagggaaagtcccccctgttgtagatttcatctgcttcctccttagggaaggctgggatatgatgagagattccagcccaagcctggccccccaccgccaggccatagggcataatttgcatctcaaatctgagaataaactgatgaactgtgaaaaa

SEQ ID NO: 94747 - DNA, 536 bp, Homo Sapiens
  misc_feature (511)..(511): n is a, c, g, or t
tacaaagaacgctccagcaaacgtactctgagttaaaactttatgtacgcttttgataccatccttaaattctcagaatttctggacaaaagcatacatgtgctttgattagatgaggctctaatcgtttcattcccataactgcacttaagagtcccagatcctcaaactcttgattttaggagtgtaaaaatggtctatttttacatgtttttttatataaaacaacagggtctcacaattttaattcacttcatttcagttgttagtaagcctgcatttttttcaagatttttagccatttaaatcacattgattgataaaacactttatatattaaatgttgcaaatattctctccccatttaacagtcatctcttagattttctttacagcattttctaatctataagaagttatttttataaagctaaacctattggtttttcctttctatttctgtttagaaagttctctttcctcatttcaaggttaatattcatctacattntttttctatatttcctagggtacat

SEQ ID NO: 94748 - DNA, 817 bp, Homo Sapiens
tgaaggccctttggggatgtctctggcctgcacagccctgcctctctgtccttactgcaatggtccttggggtatttgtgaagcagcaggaaatcccctcagttaaagccagtacatgggctttcagctgcaccctgctgaaagtctggcctccgtcacactgtgcttcctctgctctgccctatgcattggccacccccacacagctacgtggtgactccaacaaatagcatttggagttgtgtttactatggctatttctatcattctgaccaaaaccatcactgtagttctggctctgaaggccagaatgccagggagaataagatggtgattggtatcaggatctcctaattttgccctttttatattctccctaatccaagtggaatctgtctcctgatctgtcagctcgggctgagaaactttcctcccttcattgacacagacacactctctaagcttggatctgtagttctacacacgcagtgaggttccagcactgtcttctaccatgtcctaggataccggggctccttgaccctggggagcttaaccttggctttcctggccatgggtttgcctgacaccttcaataagtcaagttcttgatgttcagcatgctggtgttctgcagtcacctccctccttgccgaccacagcatcaaggggaaggtcctggaagccatggggttcttcttcatcttagctttcagtgctgagctacttggctgcatctttgcccccatatattacattactcttatgagatatgaataccttccaaggtctgaagattaaaataggttctggaagc

SEQ ID NO: 94749 - DNA, 337 bp, Homo Sapiens
agtctgtcaacttgggcgtgcaaacaaccatcctaagagcctttcttgctctgatagggagaaaaaaaggcttcgggggctaccagaggagaagaggccatcacctcggaccagcagcaacacactctgaagtaggtctcagaagacaaaaagctgaaatcaactcatgcttcctgctacacagaatccactgagaggaaaaggaaacttcaccgaaacttcagaaagctacagaaatgacatccattttcacaatcccagaaggaaagatgcatctgaagggaataaaaacagagcaatggaagagtatttgttaaaataaatggctttgacaggg

SEQ ID NO: 94750 - DNA, 891 bp, Homo Sapiens
agctaaggtacgaggcttggtgggaattcggcacgaggagaacacacagtgacacatctccagtacgtcgcatggcctgaccacggtgtgcccgatgactcctccgactttctggaatttgtaaactatgtgaggtctctgagagtggacagcgagcccgtcctagttcactgcagtgctggaataggtcgaacccgtgtgttggtcactatggaaacagccatgtgcctaacggagaggacacctgcccatttaccccactgaatattgccagaaaaataagagaacagcgccaatatgatcgtgaagacatcaagccagtacaagtttgtgtgtgaagcgattcttcgtgtgtatgaagaaggtttaccccaaatgctggatcctagttaagacaactgtgaaaaagttcattcctcttccccaagggcatcctccttgaaagaggaggacagacctctctggaagcagcaagaggaaccagtagctgtgggaaaggaatgggcacctctgaacccaggcactttaaacttctatagaaaagatatcgtgtacataggaactggtgtagataagcatgcaattatggcatcatttaggcctgtatttctatggaaagatacaaaaaggatctcagtttggggcctgtcctaatgccttcttccctaacatcaccaacacacccctgtcggcatcctggagcaattgagaccggacacccacagagctgttgtcctcccagcaacaagatggtgtggtatatcttggggtcattggatgtttggttgttctgtgtgtcagactgtaagggctgagcttcctgtgcttctaagtggagtggcaacaatcaaattcacccggccgatgtaagggaaccctgagttgttctaa

SEQ ID NO: 94751 - DNA, 367 bp, Homo Sapiens
aataaggttctttaacactcccagaagatcacactagctcaccagcaatgaatccaaacccataagaaatccctgaattgccagaaaaagaattcagaacatcaattattaagctaatcaaagaggcactagagagaggtgaagtccagtttaatgaaataaaaaaaggatacaagatatgatgggaaaaatcttaattgaaatagatagcataaataaaaaataatgctttctggaaatgaaggacacacttagagaaatgcaaaatgcactggaaagtctcagcaatagagtagaacaagcagaagagagaatttcagagctctaagacaaggttttcgaatgaacacaatccaacaaagacaaa

SEQ ID NO: 94752 - DNA, 486 bp, Homo Sapiens
tataccagtaaaacaggcaaatgctacaaatcagaaccttttccccctccagagagccagtttattgtcactacctgtaggccccttgaagaactttgtcttttactgagtgagatcagaagctactgaataagtctccttctgcctgatgtcatcattcccactgctgaattacgaccagagcgacagtccctggaaaccatccaatttattagtgtttcccttgctgcctcagcatttctggttaatgcactacagcaaatcatttggagggacaacctgaatgaagctctgccctgtgtactctgcaaaaatgttcaaaccattatcaagagtgttggaaatgaaagacaacagcatgaaattgagaagataaaattttatcagagattgtctttttaaaacaatgacttcaaagtaagaatatacattgactaatatgtacagaattattattaaaacaaatatttatttcacaccaacaaa

SEQ ID NO: 94753 - DNA, 535 bp, Homo Sapiens
tggaggcaaccactcaaggtcactctgagaagggttgaacgtgctttattaaaaggactgaggatcatgtgtgttggtgtgtcccggagtctgctctaagcttctgaatctgaggggaccaccagcaccacatcacccctttgtaagccagattacaagcagacactcttacaagcactctccaagctggatgaaaagaggaagatatttgccatatcccaaggaggaagaaggcctctaaagccagaagggaagtcctattctctgatatgaggccattcatatgtatatttattaatagtaatgcaatgccctctacaacagggaaaagcactatattaatcaaattttaattcatcttatttttgttagagatttgcattttattatcgctgatgctttattactgtttgttgtttaactggaaccaaaaatgtctaaagctcctctaaccccagcttctgtcaaataataataaggaaaaccaccacttgcaggttatacagtaattactactaaataaaactctgtgacc

SEQ ID NO: 94754 - DNA, 536 bp, Homo Sapiens
  misc_feature (463)..(491): n is a, c, g, or t
actagatttttacttgagacacagattcacagtcttcaacttcaaagctaacccaacaactctatgcttagatagtcagtttcctaacaggagatacgcttctttagtgaagggcctaccccttattcacctttaaatcccacctcccccaatcccccccaatgcttatacagaaaaaatcattcacttaatacaaatctgtggaaggggaagggaggtcagatgaaccttaagggcagggactgaactgataataaaagctttcgtggcactgaaaaatatctgagaagcagcagcacaataactaatgatttttttaaaaatgttacaacacgtcaaaggtgatttcaataaattttatacatctgcaaattaacttatctagttatttggaactaataagaaaatgtcagtcttctattttgctctcatatataatagcaattaaaaggccaattacctnnnnnnnnnnnnnnnnnnnnnnnnnnnnnctatagactagttgaagtccaaactaatagtgatatagtatccta

SEQ ID NO: 94755 - DNA, 665 bp, Homo Sapiens
tggtagtagccagtgtctgtcgtgtccaggtcctggattcgcagtcgtgaaccatattctgtcttccggatgatgatccgccgcggctcctgcaccaccggggcatcattctttagccaccgcacgttagggggtgggtttcctgccaccttgcagtgcagaattgccgtctggccttggacaatggtgatattgtttactggctccagaaaattcagaaagtaacctttcagagttggaatcgggccgtcctgcccatcaaggggtcctaaagggtcgttcggatccagaacctccacttcaccttggaagacgagatccagaaagcttcacaggaactggggatgaagttcaatctcttcaacagggtgggagtcactcaacttgttcatttcatcactcttcatgtttcccactcacattttcttcaaaggaaggccgttttcaggatggcatggctatccgatgagtcagtatctttttgatctgagagattccaagctccctgagttccttggtggtcccagagatggaggaatgcaggtgtcgttcttcaggtggcagaagtgttgggtcaactgtcctgtgtggctccttgggccggcctagggcggcaggccaggatacctggagcgcgcagctcccagcaggacgcaggaaaagca

SEQ ID NO: 94756 - DNA, 788 bp, Homo Sapiens
ggctgtacgcgtcggtatcccgggatatcgtcgaccacgcgtcgtgaacagcagatgctgtccaggaagggctagggacatcggaggggacctgcccccgaccctctgctcagcccctggactcagccttgcctgtcttttcctgctgctcccagggggaggtgtcagacctcgggaggcagacgggaccagagccaggctgttcactgtgggcccacttgccccactgtgctagggcgcgggaggagagagcactgtggtcgccctctgcagccactctggctcccaagtacttccctgtactcccccactccccttccttgccagggtgcacacccggaccccacatcggcacgcccctctcttgtggcaggggccttcggcacatgatgaaattccaaccctgctgcccggtcagcggtaccgtttcctgccctctctctgagaggccctttctggagtcctgggaaggtgtctgcctggccgcgctgccagatcagtacatcttttgtaaaaaccctgaaatgcgcagggaagaaacacaggatttcccctctctagatccctgccaggtccctctccaggaggcccctctgctctcctgaagggtggtccctgcagggtctgaccagccttggcacgagaggttggttccagcccctggcagggcttccttccaagggccctgcagctacaaactgggcctcgggcgactcaagataagtgctcttgggggtggtctacccattacctccccagccacaatcttgccttcgagtcccggctgg

SEQ ID NO: 94757 - DNA, 1112 bp, Homo Sapiens
gggtcaggtagcgaggcctgggtggttgaattcggcacgagggccagattccccgtaatggaaaagggcagcaagttggagacagagcattccgctgtggctacaagggctgtgggcgtctctacaccaccgctcatcacttaaaggtgcatgaacgagctcatacaggtgaccgtccatacagatgtgacttccccagctgtggaaaggcctttgccacaggctatggactgaagagccacgttcgtacccacactggtgagaaaccatacaagtgcccagaggagctgtgcagcaaggccttcaagacctcaggagacctgcagaagcatgtccgtacccacactggtgaacgcccgttccagtgcccttttgagggctgtggccgctccttcaccacatctaacatccgcaaggtacatgtgcgcacccacacaggcgagaggccctacacctgcccggagccccactgtggccgcggcttcaccagcgccaccaactataagaatcacgtgcgcatccacacaggggagaagccatacgtttgcacggtgccaggctgcgggaaacgcttcaccgagtactcgagcttgtataagcaccacgtggtgcacacacactgcaagccctacacctgcagcacctgcggcaagacctaccggcagacctccaccttggccatgcacaagcgcagtgcccatggcgagctggaggccacggaggagagtgagcaggccctctatgagcagcagcaacttgaggccgcctctgcagccggagagagtccgccacccaaacgacccccgatagctttacctttcggaggtgaaggaaagagagagatgacatcccagcccaggtgggcgatggtgactggaaaaaaatggggccccccaggggggttctgatcacctcagatggtgccccagaggtcagcctgtccccggaaaaactgcaggcccctgggaagggccatccgtatgggtcaccacgccgggaggaacaacccttaccattcccagttccggatggccaacttgggcacaatctggcaccacctacaggttacccagggtccccccccaatgggaacccagaaggcagccgcttaa

SEQ ID NO: 94758 - DNA, 806 bp, Homo Sapiens
ctgggcgggctatggcgcaggcgggttgtggggccggcgctggtgtgcggggcccggtgcatggcggtctgtcgtgctgtgagtctgccctcgtggggctgtcagatttgtgacccagaaggaaatctctgacctcagctgtgtgctcttgtgtgctggccagaagccaacttcatgtctgagtgcacgagcagcagtttgccatggagagcttgggtgctgcacacggtgacccttagtgatgggacaacagcctacgtccatgcaagctgtcaaaggagagaagcttcttgaagtggcaggtgatccagctcgaggatgggaccaccgcatacattcaccaggtgacggtacagaaagaagctctctcctttgaggatggtcagcctgtgcagctggaagatggcagcatggcttacatacaccgcacacccagagaaggctatgaccccagcaccctggaagccgtccaactggaagatggctccactgcctacattcaccaccctgtggctgtgccatcggagagcaccatcctggccgtacagacagaggtgggcttggaggacctggcagcagaggatgatgagggcttcagtgcagacgcagtggtggccctggagcagtatgccagcaaggttcttcatgacagccagattccccgtaatggacaagggcagcaagttggagacagagcattccgctgtggctacaagggctgtgggcgtctctacaccaccgctcatcacttacaggtgcatgaacgagctcatacaggtgaccgtccatacagatgtgaccttccc

SEQ ID NO: 94759 - DNA, 529 bp, Homo Sapiens
  misc_feature (108)..(108): n is a, c, g, or t
cccaaggctcccctattcttgggatcccaatagattacacttcttaatccctgtgcaccagggtgggctgtaagactagtttccatcagagtggatgtgcctcacctnagagaagtggtgccttttccacgtgtgctctttgccttacactggccaaatggagaagatttcaaaaactcagaagaggatagagccataagaaggaatgagcctggattcctaaatgactgcatggaatagaactttgcagtagctctgtaagggaatgtgaccagaatgaaagataaactttgctgtgttaagtcactggaatttgggacttgttaagcagttagtccgctctaacacaaccaccaaaggtattacagagacaggatgtgtattgatgtacctgtgagctaaggaaaggtcagataggcaaggagcatggaaattacaagtttcatgattcccaggtgtaagcgttttatgttgctcattaatcatgtggcaaatatgtttaaataaacataggcaattcctgttcaaa

SEQ ID NO: 94760 - DNA, 708 bp, Homo Sapiens
tatagccctttatgccccactcggtggccctaaaatggagaatacagagcatttctagtgtactcaacccatgaagcaatatgttataataaactcagagaacagaagtgacatgtgatgggaggaacatgcaaatatctgctccttacagagtagtaggggaaatgtgacctattttatcagtgtatatccactcagattatgtgtatttttgatgtacactgttctctaaattctgaatctttgggaaaaaatgtaaagcatttatgatctcagaggttaacttatttaagggggatgtacatatattctctgaaactaggatgcatgcaattgtgttggaagtgtccttggtgccttgtgtgatgtagacaatgttacaaggtctgcatgtaaatgggttgccttattatggagaaaaaaatcactccctgagtttagtatggctgtatatttctgcctattaatatttggaattttttttagaaagtatatttttgtatgctttgttttgtgacttaaaagtgttacctttgtagtcaaatttcagataagaatgtacataatgttaccggagctgatttgtttggtcattagctcttaatagttgtgaaaaaataaatctattctaacgcaaaaccactaactgaagttcagataatggatggtttgtgactatagtgtaaataaatacttttcaacaataaa

SEQ ID NO: 94761 - DNA, 1189 bp, Homo Sapiens
  misc_feature (162)..(214): n is a, c, g, or t
agccctgggctttctacacccttcacgtcagcagtcggcactgagtccctggcaccaggctctggcgctctgctgggtgggagggtgggccatggagggcatctgaatacaggagtagggggggtgtgggtgtgtaaccagagaccgagagcatgagtgggnnnnnnnnnnnnnnnnnnnnnnnnnnnnnnnnnnnnnnnnnnnnnnnnnnnnncgcagagtgcatcattttcagactctactatttccgtcaagtttctgtttgatttggatcatctcaggatcggattctgttttagagtgtttctgggccaggatccgggcccctgccctcctctgcacctgaccacactccctactcagggctagtctgttcttcccggacatcttctggtagccgtgcaggagagggctgggtggggcagaggccaggaggggacctggtgtgtcacctgcccaccacctggctcatccctcaggcccaccctgaccctacattacataggttacgtcagcctactgtggctgttgagcaaagcatttctcctttctgggcctcatttgcactagatgggcctgtggtcccaaagtaggtcagtaggttgggggttgctgacaccccttgggtgcagctttgggacagatgaatggctctgtcctgtcactgccctctccctgcctggggggctatgtgcactccagacccctgcccaggctcaggcccatgaggtatggaaacaccctggcccccaggagactggaggcaccgcccactcccctggcattccagctttgcaggtgaccctcctctacccaaagctctgtccccctgctccaactccagaagaactgcggcacgcgcttcgggcagcctacccacaggctttgagcgcctgcattcctgggggctggagggtggggtgccaaaggccctgagcaaaagccagagctcctctcatcaaagcctttacaaggtgctgggcccagaggctttgccttgacagagtggcccagggtttcaagggaggaggaacctccccctacctaggacccttcctgtggggggtctacagagtcagggacagaagggaagggacccacaggaagtcacagtggtgcccagggatgtgtcagcccccagccacggggacgcgggattcaagaatgaagtaaatacagtcacagcccc

SEQ ID NO: 94762 - DNA, 147 bp, Homo Sapiens
gcggccgcctactactactatacggctgcgagaagacgacagaagggaagggacccacaggaagtcacagtggtgcccagggatgtgtcagcccccagccacggggacgcgggattcaagaatgaagtaaatacagtcacagcccct

SEQ ID NO: 94763 - DNA, 440 bp, Homo Sapiens
agccctccgcgtctaacatttcagcttgagggtgaccgggagctctggggtggccctagacctgggaatggactcccaggcgcagtggcaggcatttctcttgctttttctctatgattgacctgggctggccatgtccccgtcaatgcagctggttctcaaaggccccactcttccccgcggctccgtttaccaccaacgcgcttgtcccgtggcacttagagggagacctgctcctcctgagaatccaggaaggaactgaagagacgacgttgctttctgatctttctcaggccagaggaagtttgtgggccaagtgatattcctaattcaaactttattatgtaattatagtacaaaacatattatttttctctttatttttcctctctcagttaatggtaaattgtattgcataaataaattacacatgctgtaaa

SEQ ID NO: 94764 - DNA, 440 bp, Homo Sapiens
gagtgatccctagtgtcatacacaactgtgaagttaagggagatgaggactagagatgatctactgcagtgcttctcaaagtggggtccccagaccagcagcagcagcaccaggagcttgttgcaattgcagtttcttgagatctactccagacctggtgactctgggagctctgagggaagggcctagcaatctatgttttaacaaggtttcccagtgatcctgatgcatgctaatgtttgagcaccacagctctattgtgttaattgataagtcactggtgatgcagcaacttggtgaaagtaacttcataaaatttacaccctgtttgggcaaattttaaaaatgtttcgtgggactgttaaagttttattctatttgtttagaaatttcaaatgttttattttcttttgcaataaaaatgttgttatttaaaaaaa

SEQ ID NO: 94765 - DNA, 122 bp, Homo Sapiens
ccatcctaaggcattttcccatgttgtttattgtggctgatttctaactgaaagttacaatattttcaatctcaggcactggggtggttttggtgaaaacacatgaggaacccttggggatt

SEQ ID NO: 94766 - DNA, 990 bp, Homo Sapiens
  misc_feature (773)..(773): n is a, c, g, or t
  misc_feature (878)..(878): n is a, c, g, or t
  misc_feature (881)..(881): n is a, c, g, or t
  misc_feature (888)..(888): n is a, c, g, or t
ctcagtactcgtcctggtcttcttgttgatgctcttcaatctcatcgtcctcagggggtgcgaatccttcctctgtggcatagaggatgccaatgatgcctgagataacagggctgttttcactttcatgctcctggcagatgagctcgatgtcacgaagtttgctgaagtagaagtcacgttccttctccagcccatccactgtcagcttcaagtccaccagctgttggttgagttcaagaatttgggcatcagtctcatggccgccatttcgggctgatggaggattcttccggagaatgcaggggggggccacattgctcagccggccagaggtctgcatgttttttgggcctgtgggggacgtcctctgtggaactgctgtgccaatgagtttcttggatttgttgaagatctgatcacctgggttaggaggtggcgctacgtcctggccctgccgcgccagcagagggttgtaatcctttccatcatagtttgcgtcaaagaatttcttaaaccactgaataaactcaaaattatcttggaattttcctttcactaatttctctacaggaatgattttgtcaacacccatcttcttgaaagctgcttgcagcaccttgaagttgtggatgtattcatgctctagtttggcctggaacttcactttcctcaagtgcacacagccggggaagagcatgtccatgaactggcagtaggctgcccctgaacaaagctgttctatcttggtatagttgaagggcagggagtcnttgacccatgcaagcatatcatggcgactccgattttcactggtcacagatgtggagtacacatgggacggccatacccccaaagtgcacgaagcgggctccggncgnaagccgnaaggggaaagggaaacgggggccgggggcccctgccgccaaaagctgccggcgggacccctggggtcaaacaaatatccccgggaattcccgggaccgtaac

SEQ ID NO: 94767 - DNA, 1116 bp, Homo Sapiens
  misc_feature (854)..(854): n is a, c, g, or t
ggtccggaattcccgggatgtgcgttgaagccggagaccgcggcggcctcagcgaggaccctccgccccggagccgccggccggagccgcagcctctgccgcagcgcccccgccacctgtcccctccccctccgcctccgccggagccgcctcgtgcactctggggtatggccgtcaatgtgtactccacatctgtgaccagtgaaaatctgagtcgccatgatatgcttgcatgggtcaacgactccctgcacctcaactataccaagatagaacagctttgttcaggggcagcctactgccagttcatggacatgctcttccccggctgtgtgcacttgaggaaagtgaagttccaggccaaactagagcatgaatacatccacaacttcaaggtgctgcaagcagctttcaagaagatgggtgttgacaaagtaggtgcctgcgctctggggggccctgaggagcagtgtgaccctggggaagaagaggacccaccagcccaggcaactggggctgctggggtcattccggtgctcgtgcctccctccacctcccgactctccagagggaattttccccctgctcaaggcacaatggaaaagcccacaacacttgccatgccatcatgacaacattcctttcccttcctcctctctggaccctgcccaccccaacactgagctctgtgcaccgctcctgtgaagttccacctctctctgtctctgtagggcccaagaaagtgtctctgctcactctactgcctcggtggctgcagacccccagcccacacgcaggcagtagagcccaagggacgccctccccacacagttcctccacacggtgccctgtanaagaaggggatgcctccgggatctgaacactaggggcctaacaggcctacctggtctgctctgggggcccctgggaaaggggggcaaatggaaaaaaggggaaggaaccctgcaaccccaaggggcttggcttttcctgagaagaatgggccctcaaccaaaagaaagggggctcttaagaacgcagggggcttaaggaacctccgcctttagggggggctatttccaaaacatttcctgtggaaagaaaaattagtggaaa

SEQ ID NO: 94768 - DNA, 1022 bp, Homo Sapiens
tttccaggatcggagaccgcggcggcctcagcgaggaccctccgccccggagccgccggccggagccgcagcctctgccacagcgcccccgccacctgtcccctccccctccgcctccgccggagccgcctcgtgcactctggggtatggccgtcaatgtgtactccacatctgtgaccagtgaaaatctgagtcgccatgatatgcttgcatgggtcaacgactccctgcacctcaactataccaagatagaacagctttgttcaggggcagcctactgccagttcatggacatgctcttccccggctgtgtgcacttgaggaaagtgaagttccaggccaaactagagcatgaatacatccacaacttcaaggtgctgcaagcagctttcaagaagatgggtgttgacaaaatcattcctgtagagaaattagtgaaaggaaaattccaagataattttgagtttattcagtggtttaagaaattctttgacgcaaactatgatggaaaggattacaaccctctgctggcgcggcagggccaggacgtagcgccacctcctaacccagttccacagaggacgtcccccacaggcccaaaaaacatgcagacctctggccggctgagcaatgtggcccccccctgcattctccggaagaatcctccatcagcccgaaatggcggccatgagactgatgcccaaattcttgaactcaaccaacagctggtggacttgaagctgacagtggatgggctggagaaggaacgtgacttctacttcagcaaacttcgtgacatcgagctcatctgccaggagcatgaaagtgaaaacagccctgttatctcaggcatcattggcatcctctatgccacagaggaaggattcgcaccccctgaggacgatgagattgaaaaagcatcaacaagaagaccagacgagtactgagggcgggcgctctaaaatatccctcaaggggcccaagtttcgcgtacccagcttttcttggaacaaaggggccct

SEQ ID NO: 94769 - DNA, 787 bp, Homo Sapiens
tttgattatctatgtacaatagtttatttagtaagacgaaaatggttataattgcagtgatttagttggagtatattgtgtttggaaaattgtttgttttagaatatcttagagaaaattggcctctcagaaataattttaccttataatgaactttgcaaattgcttctgcaaaatcactaggttcaggtttctgctttcagttaggttgtagaaggtggtaatgggacattgtggcttctggaacaactaaaaaaaataataataagttacaaaaatcaacgttgtaataatatgttactacctaataaaatgccccaatattcagtggtgtgaaacagcaagtctcatttagctcatcattctatgggttgaaaattcaggcaggtcccagcttggtgatttttggttgcatgtttcgttgactgagatcactgggtggtattctgctggtggatggaattctctggaggattcaagatacatatatacagggtgcctgggcagaggtggaaggctaagtctacatgacctttctagcatggtagtcttagcatagtcagacttattattgtggcttccggcttctagagagaattttcgtggagatagaaagtggacgctgccagcgtcttaaagcctaaaactgaaaaatggtaccatatcacttccactatattctgttggtcaaaggagtcacagagttcttccagttttagtgagagaagacataggcatgaccttccagggaagaagtatcaaaacatttgtggccatctttaatcca

SEQ ID NO: 94770 - DNA, 402 bp, Homo Sapiens
ggtaaactggtggtgcccaaggccctccatcgggtccctgagagtctcccaactgccggtccttagcgccagcctgcaagcccagacccgcctcgccaggctgcctgtgagcctatttttcatgtagctcttgccaaaagccctgatgtggtttgaagtagtggaggcttctttcactttgtgcctctcgtaccttaaccaacccttataacctcctctctgagtagctcatggagcctctaaaagagaagtccatgttctcatagacattgtgttttctcactcttaaaactcctcattgtcatagctactcccccaatccccccatgctgtcctaacttcgaagtcagttgacttccagaagtccacgaaagcctataaattaaacttggttaaaagaga

SEQ ID NO: 94771 - DNA, 500 bp, Homo Sapiens
  misc_feature (326)..(349): n is a, c, g, or t
caatgccttcaatatttgcccaatataccttttcaactttaatttcccacttcctcgggcacaaaatcttccatctcagtcatttcaggtgaagtccacagcctgagacatcataaccgccgaattcctttattcatgtggaaaagccatcccttggcttttacattcttttctccctgcccatctgaatgctgtcaccttccaagccccagcccatttctccagcccatattaattatgctttttctgaaggtctaaagcacttaactgacagtactatttatcttgtcacttagttaaattcagtaagtgctactactgctcannnnnnnnnnnnnnnnnnnnnnnncaaggagcatttctacattcctggcattgtgtttggtgctcaaaatgttttctcacttaattcatgcaataactgtatgcaaattttaaaatcaagcatcaggatgtagttatttgcccaagttttaacagctaataaattctatctgtcc

SEQ ID NO: 94772 - DNA, 614 bp, Homo Sapiens
  misc_feature (344)..(344): n is a, c, g, or t
  misc_feature (423)..(423): n is a, c, g, or t
  misc_feature (435)..(435): n is a, c, g, or t
  misc_feature (539)..(539): n is a, c, g, or t
catcctggtgccaggaatataaaaaagagtggatatatttaaccataacatactgtgattcatcaaacagcacaaactttcatttcatggagtttatctgttgacattgatttaaactgtcacttgttttatcatgtgggaacataagttatgtggtcaaaaatataaggattttgaattaatgttgattcaagttgtattgtcttattgtattgtcttttcaaagtgctgccagttgaaaagggaagcattatgtttacaaatctgttttgaaatgtttgccaaaattttggtagtgtctttaataaagatgtttgtctccagcatccagaaaaataaatgantaactttgttgtgtatcactgtaaaccagaaaaatgttggttatctagaaaacttgagagagcatgtagattaactttnctctttggagtnctaaaacattaactggaaagattagataatatactaaatgtatacagaagtatacagactatacaaagactgaaacaagtcccttttgcactacaactctatancataccgcagaaattttggttctatgtaggcatgggcctcctaaggaattctgtttcttttaggcattgagatcc

SEQ ID NO: 94773 - DNA, 331 bp, Homo Sapiens
tctcatcctgactcttccacctcttggctttgacttcaggcagaccctggaatttttctgaaattttgcttactctgttaaatgggaatcacaatgccatccgtgcataagaaggcaccccacagacctctatttacagaaagcagaattgactatgggctcccagctgtgacactgaaatccatcatcatgtttatgctgaaaccagattccttgaggctccttctagctagttcctgggtatggaagggatacttaaggcaggcccatttctgggagacatgctagacgtcgccttggcaaaacatttgtaattacttttcctggaaga

SEQ ID NO: 94774 - DNA, 197 bp, Homo Sapiens
tgaattccgggctaccacacccagcttgttactgtatttttgaatgtctgaagtgaagaatgaatctaagtggggactgcttggctcggtcattcagttacatccacagcacagagaaactgaggattctttgttgatgaggtatggcaagggtaaccaccctcaaaatgtttttatctgacagaagaatgtacatt

SEQ ID NO: 94775 - DNA, 519 bp, Homo Sapiens
  misc_feature (308)..(333): n is a, c, g, or t
cttctttctcagcaccgagcgagcgacgttcgtgaagctttcgttttgagcggccagactctgctgttctcaagcctgggaggcacagagaagcaagacttccgcatcgggggaggatagggcttgagggccgccagcccagactcgcttcacaaatgtgagaactatgacagtccagcgagtaaaggccaagagtaaactccaggtttccccagagtaacgctctcacattttaaaagttcctcacgttcccaccgctcttgtccctctttctgagagatacaggccaaaaggtgggctctccctgnnnnnnnnnnnnnnnnnnnnnnnnnncaacttgaagtcactgttaggtttcgttgaggaccctaccaacttttaatatttgaaaatggggttggaatatatttgtgtctcatcaaatcagcaacagtactgtgtgtggaaatgccaccattacgggatccgcaacctgtgatttaatttttaaagtaaatcaatggattttggcaatacaaa

SEQ ID NO: 94776 - DNA, 415 bp, Homo Sapiens
gacctgtcctctggcgtgcggttcacgggctgtgtttatccccctggttccttcacagccaccttgggaaatacgttgcctctgaatcacgccaggcaggctctcactgtgtgtgctgcggggctggaaatcagggtgacactccgctaccgaacagcctgactaggaagccagaaagacgctgccggctttagtttgtcctttgactttccttgatatgaatgaagatagagcacttccacactgcacaacaggaaaagcccagaacgcttcctggagatagcgagggggtgatgcagcggacagctatggctgatgaccccctcacctctgactccccctccctccctgctttctgaacgcacatccatcaccaaccataggttcctgtttggggtttgctggctggaaaaaa

SEQ ID NO: 94777 - DNA, 500 bp, Homo Sapiens
gccgacgacctcctcaaaactcttgctccttacagcagtcagcctgtcaccccaagtcagcctttcaaaatggacctcacagagctggaccacatcatggaggtgcttgttgggtcctaagacccagggacccagcgactatgcccacccagaccccagagcgttcccataaccctgacagttctccacactgtgcatgcacccttgcttgcctttttcagagaaaaagaaaattttacaacaggatcacactagtttttgctttgagcagagttggagtgccttcatccaagtatgaccacttttaatacacttttttgagtggttcctcagagacctactaccctggtataggaaagaatccatttgaagacaatgttgcaatgttgaatgacaaaaataaacagttcaagtgaagcacaaggattaagttggaaaagctgtaaattgcatgtgcatatttgtctattttttctataagttttattgcaagaggtaaa

SEQ ID NO: 94778 - DNA, 387 bp, Homo Sapiens
gcacacacttaatcagttgatggctatggaattttccaacatcagctaaagagaagggatagagtggtgacttccaagcttcatgcagaaccggacaacagaaattgagagggaaatttctatgacagaagagagaaagaagaaaattgctggaataatgaccttgaatagaggaaatgggatatcatctggttctggagacagcctgtatttcttggatcttggcttccttccatcttcaaagccaacgatgaccagtgtagactttctatgctgcttcaatctgacatggagtccctgccttccacatctaaagtacccttgcaattacattggccaagataacccagaataatcttaaattaaactcagctgaatagcaaaaaa

SEQ ID NO: 94779 - DNA, 806 bp, Homo Sapiens
ggaaatgtgctttttgaggaaattttattttagtaccaaatgttgccagtgacaatcttcagttaagaagtaagttattctgacctaaaattcttatctctgccactttggtttaaaaacaaaaacccttatatacatggaatagttatattttaattaagcatttattttagttgttttcatccattcaagcaaaatgaataagcagcatttttcattgcacttaaaaatgtaaaatacctgcatgccactaatctgtaacattttaccagttcagatgcctgtaatgtgtgactttatgtgtgtctgtgttgttttgaagagaataaaggaaataatactttgcaaactgtttaaacaagtgtttaaacttctattggcaacatttattgggctaagcagttattgaaaactccgcatagttttattttccatttgaaacttcaatcaaatcaagactattatattcattagggaattaaagactaatttgctttttaaatgtgaagttgaacactgtgtggaaagtaaatgtgtgatgaagcaaaatgtataaagtatgaaatattatacttttaccctggataattattcaggaccccagttggcccaaataggtgcaatttttaatcctttgaaattagccagccagacctaatgctaaggtaaatgtaaactgttttaattaattaagatctttctgctttcgaaggtataatgtatctatttctgtcaggaatgatatttccaaatgaaaatgtaaagaacattgggaaataataaactttcctttcaaagtaaaaaaa

SEQ ID NO: 94780 - DNA, 712 bp, Homo Sapiens
  misc_feature (115)..(210): n is a, c, g, or t
  misc_feature (321)..(432): n is a, c, g, or t
cgcccggatgaaggtattgtcggggtgatagtccttgcttccggaaaggcgagctgagcattatgggttaggtgaggaacctcgccctcttctattacgggtctcactttgtcannnnnnnnnnnnnnnnnnnnnnnnnnnnnnnnnnnnnnnnnnnnnnnnnnnnnnnnnnnnnnnnnnnnnnnnnnnnnnnnnnnnnnnnnnnnnnnngtacaccaccacattggcaatatagtgagatgccatttctattttaaaaaatattttaaaaataaaatatttttctattcacctttcatcaatacaaacccagaagaggcnnnnnnnnnnnnnnnnnnnnnnnnnnnnnnnnnnnnnnnnnnnnnnnnnnnnnnnnnnnnnnnnnnnnnnnnnnnnnnnnnnnnnnnnnnnnnnnnnnnnnnnnnnnnnnnnacagactaccttaatagccttgtatctattttaaaagttaaaaatgtagttaaacaccatcccatagaaaattctacgtccaaatagcttaactgctaaattctaccagacttttaaggaagacataataccaatttgacacaaacttccaactcattctgtgcagcctgggtgacaaagcaagatcctgtctaataaaaagtagtaaaaatagaactatcatttgacctagcaatcccattacagggtatatacccaaaggaaaataaatcattctacc

SEQ ID NO: 94781 - DNA, 315 bp, Homo Sapiens
agaggaagcagctgtgttcgccaagtacctggcccatgggcttcctgccggcgccccactgcgccttgtcttcctgctgaacgtgctgctgctgggcctctggaacttcttgctgctctgtaccgtcatctatttccaccagtacactcacaaggtggtgggcgccgcagtgggcacctttgcctggtacctcacctatggcagctggtatcatcagccctggtctccagggagcccaggccatgggctcttcccccgtccccactccagccgcaagcataactgaaagaaataaaaaccatcgggcctggcaaa

SEQ ID NO: 94782 - DNA, 781 bp, Homo Sapiens
cccactgccaaccacccagacagagacaaagcatccctatgtttcccaggctgatctcaaactcctggcctgaactgacctcctgcctcaaccgacctcctgcctcaacctccaaagcactgggattaacagcataagccactgtgcccagcctaatttttacttttcaactttgtacgttgcggtgtttttaatacccctgccaagaccacagttttaggtaaaccgccatcctgcctatacccatgtccctgttccctttcctagctgtgtgaccttgggaagttcccttgcctcacgaggcatcaacttgctcttctgttaaacggggacaacagaaccccgtgagacactctgacaatcacatgaagctatgtgaataaaacatgggcctagtacatagcgagtgtacagcagctgctcactagtctttcaacaagtagcgactgagagtctattacatgcaggcacaggcataggtgctggggatacaagaatgagcaaaacactggtaatgggacagactgatggtaacgggacagactgctggcatattggaaattcagaaaactccctgccctcccagtggcaggaggtacagcaagccggcaagtaagtaaaatacactggatgtcagtgggtggtgctcagtgttgtgtgagcatcaaagcaaagaaaagaagaaggatgctaagcagggcttagacatttaaataaagccatcaaggaaaacgttgcagagaagataatatttgaataaaaactcaaagaaggtaagagt

SEQ ID NO: 94783 - DNA, 442 bp, Homo Sapiens
tttcctgcagaaaccaacgggataggattcaaaactaggtgacaaactcatgagaaatccaacctggctgaatgtctgagaggctgctactgtatcaacatcacaagataaagcactctggtatcacctgcccatatcctccttagtgtcacccaagacatttgactctgatgtggttaattgataacttttcttgctccactttacaatgttttgtttcctacatcttattaccttgggacacaaaagtggcagagttgttgagagctgatgacaataaaaaggagaacactagaggaaatgagacaggaaagaaagccaaagctgattttccaactctatgctgactccaacctgcagaaaaagctgaatatagaaatcttcttccatatatgatgaagtcactccacttacgacataacacacaaaggaatcacctggc

SEQ ID NO: 94784 - DNA, 297 bp, Homo Sapiens
  misc_feature (22)..(22): n is a, c, g, or t
agacaattaacgttgaggctgngggaaaagacaccagaagaagaaggcaacaacaggaagaggagaagcagcaattcagaaagacacactttcttcttcgcttgccctgaatcggatagtgcttgaagcctggatttgtcagcagccacacaagccagccaacgcagcagagaacagggctgaggacagagaaaaactgatggccatgcttaggccatggatcaaggcatgcccaaaccagccccaatcttgtgcttctccgttatgccagtcaataaattgcctttgttgttcaaa

SEQ ID NO: 94785 - DNA, 389 bp, Homo Sapiens
cccccctgacgtgggagagccagctctccggccaggacttcaccacctttctggacccctccaccggcggcaggcagctgcaggttttccagccggccgtctacaagtgcttcgtgcagcaggagctcgtggcccagttcaaacccgccgccagtctggagacgctggaggctcagtggagagagaacgatgcccagtggcgggaggcaaggaaggcctgcggggcagggcggactccgtgctcaaggggctgaagctggtgctgctcgtggtcaccgtcctggccctgctgggggcgctgctcaagtgcatccacccttccccgggcaggagaagcacacaggtgctggtggtgaaataaagcgagcccccggtgcacaagcggaaaa

SEQ ID NO: 94786 - DNA, 426 bp, Homo Sapiens
acctggcagcatattagaaaatagcttatgttacaacaaaaaccctataaaaacattcatcccagcaaaagcctccagggctggagggtgaggggaaaagtttcaaagcacgtggatagtccagatctgggatgccctgtcctcatccggctcccatagcaccacgtggtcccggtcgtagccccggcctcccttcacgtccaggatctggccttcgaacatctggctgcagatgtggcccgattcactgatgctccacgtctggcgcggcaggcggctctcggcccacagcaccaccttggagcctgggctagggggtccaatcacctgtaggctcatggtgggggccatctggttcttcagcagcccatcctcgtagtaccagatgcagctacctccagcttgggggtcggcgaccaccacacg

SEQ ID NO: 94787 - DNA, 387 bp, Homo Sapiens
gagctcccatcagcaacatggttgagactatgtgcccttgacatttgcctttcagaatgttgagccaccaagcatgctgttggataattattgctttgtgatgatattcagcaactctcacaatgtggaccaccagttctggtttgggtttcttctttttattaggaccatctgagaatgtctgtggtagagactttggtgaatttcatccgtccttcaggtcacataggaatcacgaggatccagttcttaagaatcttagttgacaccaaagatcatcattacccagggtctctccttggaggggacttggtgcacatgtgccaagcagtattctaagtacttctcacatgttatttccaggacagcctgtgacgtaggtattac

SEQ ID NO: 94788 - DNA, 305 bp, Homo Sapiens
ttttggacagtccataggttttatttacattgctttgagaaacagacgaaagacatgtttttttacaattgtcttacagcaatctgttctgagagtaacatgtaacacaaatttttatatgcaatatatgaaaacataaatatttatatatacaataacataaccagacaaataaatgaagttactattaagtctctttaagtataaatttacaaactgaccaccagccacagaacttagccctgtaatggagaaaaattattactggcttaaaaaaatattaaaatatcactgtcactaacatg

SEQ ID NO: 94789 - DNA, 816 bp, Homo Sapiens
  misc_feature (661)..(661): n is a, c, g, or t
gggagcggtgggaactgaggctgcccaggacccccttcctaggatgccccggcttcagtcaccccactttaactttctaccaggaccccctccccctacctcaccttgctatttattgctgtaatttattgacctcaaaaatgctgcataacagacctcactggggcagggaggatccccagggctcccaccctccacttggcgggccccgtggggccaggtgctgaggggagcctctctaccccacccatcactagcttccctctgccctctcccaccccgggggggacccaggttgggcactggctcatttctcgcaaatacctcgaaggggaggggggagggatggggttatagctgttttgtttaattggaactggaagagggatcatgttttgttttatgcccttcccagaaggggggagggacaccgggatcgcactcctgtactggccaccgccgctgtcacttgtcacattgagttcatgtcccttgagagtttgtataaattcaggtcagagctgcagctacacagctgcccagtgtcatagaaaagcaattcaccaacgactgatctctccattcagaagtgtgcagtcttaaatgtacagcgataagaaactgttattttatgatcttttcattaaaagcttgactaatncccacaacacccaccacacaatcccccttggtgggccgcccccggccctccagaaatctttctaaaaccttctgttttggcccggcgggcccccgcaggcaagatggaacctggggcataagcctggtttcctaaggggaaccctgggcaatgac

SEQ ID NO: 94790 - DNA, 383 bp, Homo Sapiens
tttgaggattacacaaggtttaaatgagataccacatgtcaaacacttagtatatagcacataattccaaatagtatttaccataattagccattaatggccgaggaaacacaaggaatacacgattaagctgaaatagtaatacaaacccaggtccatttttttggccctaaagacttcccctttttgtatctgtttcaatgcacatctgattagtgaactgaagcctcatggccagcccagcttcaggtgggtatagacactgagcccccacataataataagctgagcctaacaccttccccagggatgttcttttgatctcaaggtttcctgacaatttcagatcgaagattaatgcctagtttacttgatccatggtc

SEQ ID NO: 94791 - DNA, 511 bp, Homo Sapiens
caaaacaagtaaagtttctccttaagtctctggatacgtttgcaatagttggaaagacagagcttgtaaatagggaaattataactggggaatagtggcctagatatcttctgcataatgacaaaggggacagtagaaacatataaggtggctactgtcatgtactaatagctgattcgttgtgctcaagtgacttgcctgtggtcacagttttacggtagccaaagcagggttagaacctggggatgtggccagccactctgggattttattcctattccacactcctatgtataggtagatacttcttcttgtctgcttggagagtacagaaaagcagaaagaagggtaaacatcacagccccaggtctcagaggtctcagtagagttttgggttactcagtctttttttctatgcattacatttgcacaattgagatcaagctgaatatattaaatgttaaatattgtttattctaattataaaataaaacaagggatttattgtaaa

SEQ ID NO: 94792 - DNA, 348 bp, Homo Sapiens
tatttgcccaaggtctgagtcactgaagtatgataatgtgtgaagtgaacagtataataataatgactgaagcacagtaagaatccagtcatgctttctccttccctgatctcactaagccacacttttaggggcttacaaaccagttcttattgccaagccctctactctaccctatcctttcatgaatcggagcctagcctctgataacataaataatttacttctcttgatgtagaaagaaatgacgttgttaccctgagtgacagtcacgacagaacaaaaccacaagaccagaccacatttgtggataaatatattagcaaataaatatatttcttaacatag

SEQ ID NO: 94793 - DNA, 457 bp, Homo Sapiens
ctggctgcctttaaagacatgaaggcgtcgccggagatcatcagtggccgcatgacaacagcgctcatctggtactcggcgatcttcagtgcgcttcgcctaccgcgtacagcctcgaaacctgctgctgatggcgtgccactgtaccaacgtgatggcgcagagtgtgcaggccagtcgctacctactctactactacggcggcggcggcgccgaggctaaagcccgcgatcccttcggctaccgccgccgctgccaccagcccgggttcccagcccccgaaacaagcttcttaagaactgagagggcctgatctcatctctgcaggtcacaagcactgaactgccattcctcctgaaaaaagaccaatgaagacctcggttttgactctaaaacagtgcgaatctgacttaaacctgcagtttgaataataaagaaatacaaagtaacattgaaa

SEQ ID NO: 94794 - DNA, 871 bp, Homo Sapiens
  misc_feature (19)..(19): n is a, c, g, or t
ctttccggttgccgtaagnagaacaaggagaatgaagctaccagcagtctaacagtattggattaattgaaatgaaggtggacagagttttttggctttccatcaaattgagtaaagaaaaggtaaccgcttatctaatttcacacacatacaattatggattaattaaaagattacacaacccatatattatgggtttctcatttaagtgtatatatacatgggcaaactcacagtgtgccagtatgtgtctatatccaaatatatacaaatccatgtccaacagttagcaagtgagaaattctcttccatttcaccattccctttcctagaattttttcataaatataatttttccatatatttgaagcctactctctggaggcatgtaatgcatgcatgcagtaaacctgtgcgatatcacaatgttggtgtcagagaaaactataacaccgatgttataaaagattaattgtgaggagaaagttatgcttcgcattactacaaatacacaagtatgatttcatccaaagctgaaatcagtcaatataatttgtttttaatgttttatttaaaatccttaatttcaacaggattactcaagaaaaataacgttattggtattaaataatggttgatgtattccctttaattgttgattatttaaaatgtcagtaaaaatagtaaatggcactgtacaatgtagtttcatgaagcattctttatagttttcataaaattgatagtctccatggaatattttaagactgaggaagttccatatatcatttgattgtactttcactttattacttgcttgcatgtcataactgatggaaataaaactatgtatatttacaaatatgaaaaa

SEQ ID NO: 94795 - DNA, 484 bp, Homo Sapiens
ccaccagaccacggcacctcgaaggctgcggtgaaggcttaggtctcactcaaggggtgatgacgggaggttgtctgagatgaaccccccaactgaatgaatggaccttcttctggccaaggggatcccaaagaaaccctgaacccgagtcctcagccatgacggggtaaggggtcagcccctccttctggcccgagaagagatcagagattggttctgggcagtccatggagaatttgctcagctggaccagtacacgcttctcctttcatgaatattcatgactcctcctgaagcttattgaacatctctatttggccatctccttcagcgtaaattcctgtcccctctgtccctcccctccaagtgtctgttccaggcttctggcctgaggctacgcttcctagcctgtcagaagggctgccctgctggctgcaatctcttatgagaaataaagctctcctgtgtgcaaaaaagtaaaaaa

SEQ ID NO: 94796 - DNA, 498 bp, Homo Sapiens
ggttactatcaattgaaagttcaagccatgctttaggcaagagcaggcagcctcacatctttatttttgttacatccaaggtgaagagggcaacacatctgtgtaagctgctttttagtgtgtttatctgaaggccgttttccattttgcttaatgtaactacagacattatccagaaaatgcaaaattttctatcaaatggagccacattcggggaattcgtggtatttttaagaattgagttgttcctgctgttttttatttgatccaaacaatgttttgttttgttcttctctgtatgctgttgacctaatgatttatgcaatctctgtaatttcttatgcagtaaaattactacacaaactagcatgaaaatgtcatattgccttcttaatcaattattttcaagtagtgaactttgtatcctcctttaccttaaaatgaaatcaaactgaccaactcaaacaacaataaaaaacaagacgaaaaacaccttgt

SEQ ID NO: 94797 - DNA, 310 bp, Homo Sapiens
gggaatcaggtcacaatgtgaaaagtccttggaattccatgagaaaacacaactttatttcagaaataagctttgaactttgaaaacaagagcaggtacactgttttccagaactagtttctggaaccagatcacagtgttgtcttttttaaaaaataggtagtaagtggttaagagacaattgaatagtacgtgacaggagtgactatttctttctaactggagtcagccctccatatccttgggatccacatccaaggattcaaccaacctcagatgggaaatattcaaaagaacaaacaaacaattt

SEQ ID NO: 94798 - DNA, 474 bp, Homo Sapiens
gtctgagtttcaagtgactgacaaaagctcatatatacacaaatgtaaacatacatatgtattctctcttttcagagtaacattataattatgagatactagacacaaattggcaggccccaagtattcttgaaagacactgcatgtatgtagctatgtaacaaatgatcttacaaaaagtctatcctatttattttgaaattcatcatgctcacaaatagaaagataatggtaggtttctggaactacattattgagctgcttcttgtctaagttctgcacttgcttatcaactggtgattcatgcagttaatcctatttaatgacttgctctgcggaagaatgttaagaattaataaatttaaaaggtgtgtaaatgagtgaaaatgtgcaaattcttttaattacagttacaaatgttatggaaataagcaagcataacataagaacacagatttaggaatactaccaccc

SEQ ID NO: 94799 - DNA, 467 bp, Homo Sapiens
gagccctgatgacccttgggctgttcagctctgctagaacctcccagatgacccgctaggagtctagtgcttcacaggaccaccccgagcagaactgggacccaagagcctgcaccccaaggaccagagtccatgccaagaccacccttcagcttccaaggccctccaactgacccgtgtcgccagtcaccacggcctcagacagggcttgtgctcagctgacacctgtgacacagctcttctgcctcatgagctgttgtccagctacacctccccgactctgtcctcgtgctgctggcggttctgaggtctgcagattttagctgagttccgggctgttgaaagcctctgacgcttggttctgttatcagtggaatgaggtgactttcccggagttgtgcaatcctcaggtccggcagtgtcttcttccagttactggtttcaaacaagccaaaagtctgaaaaaa

SEQ ID NO: 94800 - DNA, 556 bp, Homo Sapiens
ctctgaggtcagtttctaactgcttttagtgtgaaactatcagcaaagagaaacagattttattacctcaagtttggtaaagacccaacaagatgtttgtgacaaattaagaatgtttcctctgatcccaactgagaagatgacatcagtagagagcttggatgagctgcttatataatttggtgaagataaagttaaaggtctttgtttcttccgcaatggaaagtgtgagtcattttaattacatgttcttagactggtgggacatacctggtttctttattcttgtctgtgtagtgctctagccaccaacacagtatgtctgcagaagatttaagaaagtatctaagcatttcctctcaaatgtatttgtgtcctagcaagcctacacatctctactaatgtgtgagaaatgaaactcatgcgcatagataaatctaatcttgatttttaggaagaagggagtagaaagcagtaccttaaagaatgcaggaacatgaaaaagatgcacagaagtgatatggaaagatcactaaaatataatgttaaatgaaaa

SEQ ID NO: 94801 - DNA, 536 bp, Homo Sapiens
ttacaataagaggtggtggagaccaaggttttaggcaggcgaagcctccacgtagcaggcttcagagagaatagagtgttaatgtttcttgtcagacttgagagtctgttctgtcaatcttaaggcctctgtgttgatgttcatgctggtcagctgtgccagaattccaacagggagaagggtataatgaggcacacctgattcccccttctcatcatggcctgaactggttttgcaggagtggagacttcaggactcaggcctagcaggggaaggttgtggctcatgaaccccatgcttacagcctggcaccctcctactgcaaccgtgctctacggacaggttttcatcattcatcctcatgttccacaaggtgttccagaaatcctctgccccattccacacacccaccgcagtagcctggtcaagtgatttcaagtgggtcctcaccactaaaaagaggaagatggacaaacttttactcgcgtccttgtgaagagcccaccaaacaggctttatgtgagcaataaagcttt

SEQ ID NO: 94802 - DNA, 641 bp, Homo Sapiens
  misc_feature (71)..(71): n is a, c, g, or t
  misc_feature (81)..(81): n is a, c, g, or t
tccctctttaataaagaatgggatagagagattcttcttaatatccttaccctatttgagaatataaatgncaacataaanaatgaagggctcgcatcatccaggaaagaattcagcagaagttcactttttttcttattcaaagagtctggagtttgtgttaagaaaatcaaagcactagcaaatcacaatgatctggtggtgaaagtaaaagtcctgaaagtattaaccaaactctaatttggagtctgtcccaaacaatattgagatatttgcagttggtacgatgtgatttgtaaattctttgtttttcattgtgcgtatatggtaaagagatcttttcagctgctattttggaataatgactatcatatatcataacagtgactgatgttggttgtaatggttgggtttaggatgaaccattttaaggatgccaaatgaaatattagtatttgtacacagaaagaatttattgatttgatcttattacctagattgagattttttaatctttcctctacctaaactgacaatgaattggttatacatcatgcataagctacacttttatattagtttatatttgttattctaagacttgtgtttcatcaataaagttgtgttttaagcagcagaaa

SEQ ID NO: 94803 - DNA, 495 bp, Homo Sapiens
cacagagcatacatttttatataaagcacaacaacagacaaaaataatctgtatttagaagtcagcgtagtggctcccttggtgggggtagtgataggtggcatggcagcttccaggatgctgacgatgtctggaccagggcgattctgtctgtgagaatgtgctgagctgtactctgacgatctttttgtcaaaaacaggctgcttctactgagactcttcaaaacgttatagggaaacagaatatcctcctgggaaatggggacattcctcctcgaggttcctgttaccctcagaataggagcaggcagtatgatcaatgagaaaaaagggccaggtcctagaggactgaggaactctttagtgaatctggatttcattctgaggaccgccaagacaggggcgggacgttggtgctcgcggtgcgttcctccgcctactccagcccaaacgacctgggagacgagtcacacgcgccctcccaggtgctgcggg

SEQ ID NO: 94804 - DNA, 492 bp, Homo Sapiens
  misc_feature (63)..(152): n is a, c, g, or t
gggcccttttccctttctgccctctgccatgtgaggtcacagtgttcctccctcctgaggatnnnnnnnnnnnnnnnnnnnnnnnnnnnnnnnnnnnnnnnnnnnnnnnnnnnnnnnnnnnnnnnnnnnnnnnnnnnnnnnnnnnnnnnnnngagcccgcactctccagttcatcaccaccccagcatccctactcttgcatctaacagtttccgctattttgcaccacctgcctggcccttatgggcaactcaaggaagaaaggaaagaagagatagaggaaaaatggattcaacaaatgaaagtgttctttctgactactgctgtgtttacaaacattttaatcatcaaaacatgctttatttgatagaaagatcaaatctgcctttgtaaaacaagagactattttaatcattaagacaacacacatgtttgatttggaggcgtgttctcattcaaaaccttgcaaaatataatttcttcttgtctggg

SEQ ID NO: 94805 - DNA, 590 bp, Homo Sapiens
  misc_feature (298)..(333): n is a, c, g, or t
gttagaatcttaaagccttctgcaagttggtgagatccacctgctgagtaaattctcatttttctctgttgttatcagctccctggctacctttctcttctgtatagttcagttcaccttcatgggtgtctttaacatgacatgaaaatagggccattcactctgctgtctgcagtaggcaaggagctttgaaagacaagcacactaatgaaagtagaagacattgaccctactctcaaaaaaatgtgaaagttagttgagaagattaaacacacactgtccctccttcctccgcctnnnnnnnnnnnnnnnnnnnnnnnnnnnnnnnnnnnncctgacacaatgggaaggcacttctgaagtttcagatgaattccattcaacaagcaccctcagagtttgtgcttatgccaagcattgtgcctggttttggagatgtgaaagttaacaaagacaggtttcttaccttggaaggctactgtgtaggtgggaacacacctaaagttgatcattgtggcagtggactactgaaagtgatctgatgaagatggcttagggtgcttgtgtatcagagaggtatcagagagtct

SEQ ID NO: 94806 - DNA, 326 bp, Homo Sapiens
tgtaatttcattgatcagcatctgtttttgaggtgaaatgggttaatataaattatatctgttttctcattgggcgtaaatgcagaacttccacctcaagcagccaccccctgattttacagtttttgggggttcattttgtttggggctcttttctgatggctgttctgttcaaaaccaatctattctggccactgttaaaggtttatactctctgtgaataaagtaggaatatgctagcagtacgaaagagattttgtaaaactgttaatgctaattacaaatggtgcttctagtaaataaagctggcctccttaaaactcaaa

SEQ ID NO: 94807 - DNA, 221 bp, Homo Sapiens
  misc_feature (155)..(168): n is a, c, g, or t
gaatttcgatttttttccatctttattgaggtatatttgacaaataaaaattatatatatttagggtgtactacatgttttgatatacatatacattccaaaatgattaccacaatccagctaattaacatatccatcacctcacgtagttatcnnnnnnnnnnnnnngtagtgagaacatttaagaacatttaacaattctttgcattttcaaattaaac

SEQ ID NO: 94808 - DNA, 650 bp, Homo Sapiens
  misc_feature (264)..(277): n is a, c, g, or t
tccagcacggccaacaacgtcagaccctcagaagtacccaaggggcttccagaggtggccgcttctctattttttcctgattgtggctgagagagatgattactgctttgacacttcctttctctaaaagaaaaatagtttgatagtatattttgaatatagatgctcttatagtcagattgggaattgaacttgaatattgggtcatatgtttgtgttgttgctgtagtctatcatgacttttttctttctgcattttccttnnnnnnnnnnnnnngatggccttcaaaagtgtgttctcaatgttgtatgaacctccttcacatgagttcggttgttgtctctcttcaaagactcttcaacccacaaagaagcaactaaatgtttctctaagtttaattttctagcgtgttgttgtcttacctttttaaccttaccataatatttctgttaactgttacatttaatataccaatgtgtgtaagtatacagagaaaaatctgtttgtaaagtaaaatttatatataatatatgtaatcaaagatacatatgttatatatacatatgtggatgtatgacttatttttccttatccacagatttcagctaccatgtatatataaataaacttattttattagccagagaaa

SEQ ID NO: 94809 - DNA, 614 bp, Homo Sapiens
  misc_feature (240)..(398): n is a, c, g, or t
  misc_feature (591)..(591): n is a, c, g, or t
gaatctcgtgtgcattagcaaagtggatgtcttttaagatcagaatgctgcaatggacagtcaaaatgccacttaaggagaaacaaaaattactcaagatgagttacttgccgtcagaccacaacaggatagttttagatgagactggtctcttgactaagaattaaaccatctacaggtttacaggaaaggtatcagtaagtggtgttaaaataccaaattcagagcagcagatacgcnnnnnnnnnnnnnnnnnnnnnnnnnnnnnnnnnnnnnnnnnnnnnnnnnnnnnnnnnnnnnnnnnnnnnnnnnnnnnnnnnnnnnnnnnnnnnnnnnnnnnnnnnnnnnnnnnnnnnnnnnnnnnnnnnnnnnnnnnnnnnnnnnnnnnnnnnnnnnnntcactgcattcatctttaaaattaaaaaaccccctgaaggggaggaaagtaacaaagacagaaattaccacaactccaaagcccaactttcctaacactttttatactatcctgggggaagatagttaatatgaagacccagagcacaaaataggaaaggatgtgtgtgtcatgggaaaaaaaccagaagccncctctgcccgaaattcgcacgag

SEQ ID NO: 94810 - DNA, 681 bp, Homo Sapiens
tttagtctagagccaacttgataatgctatttaaataaattaactaactaaactgcaaagtataagctcttatgcccataaaataagagaagaactgggaagttcaccaacaaggatgaaataggagaggcatttaataaaatttggtgacagagtcagggtaaggtaactctctcaggtgacacatttatgtaatgctagtcttctctgcatgggagacattactttttgggggcaatgcccttttcctcaccactgcttttctccaatctcttctttgacttccttttgggatccctgggtatcctgctgtgttgttccagccccggtgttttgcctgctatctcttttcaatgtctgaagatcaattatcccttcgtgctagcatagggaggacagaaattctggggaccacaacttttccattatacttgaaggaaaaaagcagctctctcctgtaagatggagaattcggaggtttcctcacaggcttctggtgatgcttaaagcagagaatcaacctacagggttttagcacagtgcctggcacatgcggagtactcaaaggatgtgagctaatcttcttcttactattattatgtaagtcccgtaattctctatgacccactatgtgttccagatgatgccgaagacctagaaaagggctttcatcaccatcag

SEQ ID NO: 94811 - DNA, 826 bp, Homo Sapiens
ctccactatgggattctgaaatcagcagataaatgctgcagcccccagacttgtgaagaaatttttgagattcatcttctctggttcttcagcacatcaccaaggcatggacctgcagttggctccagctataactagctcaatgatgcatccttcactgtttttctttctttccccatttttctctgtatgtttccttactttagcttcctgggatcaactcccaaataagctacctgaagccaactgtttgcccaatacactttcttcaggaaacccagtctgagacataagaaaacaaatcaaatgctaattcagtggttcagttggtaaaaataacagagactcagcctagttggcactagtggagataaagaaaagaggacaactttgttatgcattttatagacagtcatgaggcatgcaaattggtgtaatgtatgcagaaaaagaaagggaaattttcagtgtgatactacagttagtccactgtatacctagaattgtctttttcagagaaagatggtggcctttggaaaaggtacagatttgggaggaagatcgttaattcaatttgggcatgttatgtccaaactacattaaatacttgagaactatttctttaataatggatgagtgaagtcagttcatttccaagcttcttatttgtcttatctgtgaaagaaaaattgggatgtctagtacccagatatgtaaaaagtaaatgtaatctaccacattaaagctcaaaatgctcgatgtttttgcaaatataaaataatgtgacttactttaaagataataaattaaatattaaacatgaaaa

SEQ ID NO: 94812 - DNA, 599 bp, Homo Sapiens
  misc_feature (20)..(20): n is a, c, g, or t
cagatgagtttggtggagcntgatgtgtccaggcttggctggggagtggtcaagtttgcaggcctattgcaggacatgcaggtgactggcgtggaggacgacagccgtgccctgaacatcaccatccacaagcctgcgtccagcccccattccaagcccttccccatcctccaggccaccttcatcttctcagaccacatccgctgcatcatcgccaagcagcgcctggccaaaggccgcatccaggcaaggcgcatgaagatgcagagaatagctgccctcctggacctcccaatccagcccaccactgaagtcctggggtttggactcggctcctccacctccactcagcacctgcctttccgcttctacgaccaggggcgccggggcagcagcgaccccacagtgcagcgctccgtgtttgcatcggtggacaaggtgccaggttttcaaggatagtgtttaaaatctgagaggatttatccatggataaagagctataggctaaaagactctgcaagttcccagctatttttgtatgttggacatgttatccgttgaaaagcaatcagaaataaaaagtatttaagcgttaaaaa

SEQ ID NO: 94813 - DNA, 551 bp, Homo Sapiens
cgctcaggcagttctcttaagaaatgatgaactgctctattggcagccgccacaggagttcacaaagaagaggcattaggctggcaagcagagctggtgggatttacctttgacgtagtgagctccttgaagctacaacaatgccatatgcatcctgtcacagtgtctggtagaagctgcaaagccttctgggagcctcatatcatctcccgtgggcagctgtcttgtgtccctgggcagaatcactcttcaagaaagcatcagcaagcatcacaggaggctgaagcacgagaatcacttatctgtataagaaatagtgtcaagatgaattgttgtgtcctcaagggtagcaagctctccctcattccttctcagatatcttgcattaccctattttactaacgaaaaaatattctctaatttaagcacaatggcatattttattttcctaatgaactactttctgtgattttggactatcccattgctgaaatgttttatctgatttttgatgctctaatgatcccaataaattataaacattttgcaaa

SEQ ID NO: 94814 - DNA, 553 bp, Homo Sapiens
gcggccgccactgaaccgagaagtgatggtcatctgctccggaaggaaagagaacgggccaagactgggactattccccacccccggtcccccattgaggcccgccacccccataactttgggagcgagggcccagccgagggtggatttatcttctcaaagacctaagagtgagcgcggggtgggggagggatgtgaagttatccagcctctgctaggcttcaagaaaccgtcatgcccgcttgagggtcaggacccacggggcattatcttgtctgtgattccgggttgctgtgacagccggtagagcctctgccctcccgaaactaagcgggggggcgtgggtcaaatcatagccaagtgacttgtttacatgtgagtgaaactgcacaaaggaacacaaaacaaaacttgcactttaacggtagttccggtgtcaacatggacacgaacaaaaccttacccaggtgtttatactgtgtgtgtgtgaggtctttaaagttattgctttatttggttttttaatatacaataaaataatttaaaatggaaa

SEQ ID NO: 94815 - DNA, 475 bp, Homo Sapiens
tcctgggctaatcctgtccctccctaagtcacagcgaggtgtctgtcccagggctggagatgcttcccaaggaggagtctgttttgttgagagtgggcgtgggcttcttcacataagcctggggaaggaagaaaaaacggctttcattaccaaataatgtaaaacctcaaaagcaagggcttcaacagccttaaccaaatattattccccatagccagtggaaaatggatgtgacaaccccagtgcgcaggccagagtgagtgagcccagcacggcgctccgactggcttcctctctcaggtgctggattgtggggttagtggcatttccagctggattcctcctgttgtagttgccataaggaaatgagatgcagaatcagaaggatctatttctacagaatcatttcaccagttaagcacatgagtagagaaagagataaaaatataaatttaataaataaatgcatggcaaa

SEQ ID NO: 94816 - DNA, 344 bp, Homo Sapiens
  misc_feature (85)..(85): n is a, c, g, or t
  misc_feature (90)..(91): n is a, c, g, or t
  misc_feature (95)..(95): n is a, c, g, or t
  misc_feature (98)..(122): n is a, c, g, or t
cgcccttcctcttgctctctgtcgcttttcttccctccaccaccctcagcggtctccgccggcgccacgtgatggaagctcggcntgccnncaantannnnnnnnnnnnnnnnnnnnnnnnnagtgcaactatggacatcctcagtcatgtgctctttgagtctatatgagaatttatttcggacacagacccaggcaagaaccgttggatctttaggcctgcgtacacattaagagactattctccaaaatggtcacaccagtggtgtgagggttgctgtattacctcctcttctcccatcgcattgccaccaataaatacagtttaatttctgccattaaaa

SEQ ID NO: 94817 - DNA, 628 bp, Homo Sapiens
gagttcaggccctctttagaagcctggacggattcagccaggctgggagagcatcaatcgttggacctatctaaagtaccacattaacatctcatatatagttctgggaataatgttgttctgtctctgtttcctgctcatagcctgtaaaatcagatggattgccaatcagaaaataaagctgcccaacctggccttacattcattcaattaatgcaaaaacagaaagggagagatgttgggatccagaagcctgaggattgtgaccaacacagcattccactggaagctatatgatcaaagagcaaactgtttatcatgaatgcagaatgtgggcaaactcacatctgcacctgacactggaaggtatgctaaggggagccacttcctggtgctgtgctccttgagattatctactgggacatctggagcctactgtttaaagaatgctgtcatacaggcctacactaagtcaagcagctgactgacaatcagccccttctccctatctcctttactcaatatatataaagggctctagaactcagggcccttgttcactagaagcaaggagccccctgaccccttcttccaaataaacttttttgtctttgtctttattcccaaa

SEQ ID NO: 94818 - DNA, 788 bp, Homo Sapiens
  misc_feature (97)..(156): n is a, c, g, or t
gggccgccttgtcctgctgcttcaggctcagctgctcggccgtgcgacgcacagcaaagacgccctcggggaagtcgagcttgcccttgccgtcggnnnnnnnnnnnnnnnnnnnnnnnnnnnnnnnnnnnnnnnnnnnnnnnnnnnnnnnnnnnnacccacggcgtgcatcttcatgtggctgatgaggttgcgttgctgtgcgaacttgccgccgcacacctggcactcgtagggcttctcgcccgagtggatgcgcatgtgctccgtgagacggtactggcgcgtgaaccgcatgccgcacgcgtcgcacgcgaagggcttgaggcccaggtggctgcgcatgtggcgcgtcatggtcccacgctgcgtgaacttcttcccgcagatggtgcatgggtagggccgggtcagccagtgcgtcttctcgtgctgccgcagcgtggccgggtccttgtagctcttgtcgcacgacgcgcagcggtagggccgcagcagctctcccaggccacccggagccccggcgaccttgtccccgccgcctccaaaaagggggccctaggccggcggccccagcggccacttcggccgcctcggccctgccgtacagcgcttcctcctcctccacgtgagcctccacgtgcgcgttcagctgctcagagctggggaagcccttgccgcacggaatgcacacgtacaggttgtcaccgaagctctcgggctcgccataggccaggtgcgggcatgggtagccctcgaggtggccgccaggcgggctggggtcctcg

SEQ ID NO: 94819 - DNA, 576 bp, Homo Sapiens
ccacaccctccctgcgcctcttacggcttccaggactcccaccattcaggactcatttttttggctctttagcacaattgttttgaactgaaggaatcagagacttagggcaacttctggaagtttctacccagttggcaaagaaaccttctcaatcccctacttaccctaaactaagaggaccagaaagtctgcaggccccatgatatgctacatctgctgacaccagggaaactccactacaagggagttgcagtctgtcactcaacttgctgaggaccaactcttgggggcacagtccctacctgcaagctgcttggatctctttgacagaattgtcacagccggacaattgttggagcaaagaggattcacgtctcatgataatttccatggctgcagtgttatgctgagaaggatgttgagggcccgtcttgtcttggcaggaagagcgttgtctggggagaatgtgataaagaggagtaactgaagataattggagactaacgtgatttcctcactgccataattagtggcagaggtgggactggaacacaggcaagaaacatcccaaaa

SEQ ID NO: 94820 - DNA, 481 bp, Homo Sapiens
atccctttgctctcaaactccccgatgcaatgccttctgatttcaacagaaaagcaagaggctccaggcaccccattcagggactgccaccaaagtacccgcaaatccttcatgaaaggggagacattgacacattctttttttattctctggcatggagatgaacatacttggtatcatccactctcctgcactgctggctcagtcaccagccttttcaggcacggggtctgcaacctctctcatggtttgtgccatctcttgagtcaggagccacagacctcatccaggacttacagcctgacagattaaggagtccgataaatccacacattctgagttgttatgctggcaaaagccatgcccatccacaagccagactcttggcctccactggaagctttggaactttattcccatcaaacactgacctaatccttgcactgagactgctatttacattaaaattggtcacataatg

SEQ ID NO: 94821 - DNA, 192 bp, Homo Sapiens
aagaagaatttgttactatgtaaaccctgacattaaatgttttatctctaccagcatcaggaggaatcactgctttaagggtattatgtaatgcctagtgccttctatttacagtgaaaaagaggttttgcgaaggcatttatggtcattaccaaaaactaaattaaaggccttggattttaaagcaaaaaa

SEQ ID NO: 94822 - DNA, 785 bp, Homo Sapiens
ggtcttaatctgaataaaccagaatgatactctcagcatagaagaataaagggagcgagtcattaacgttttctttttaaacctttatgatgacttccttatgaattactgaacgaacactggaatgggactcaggtatcctgaggacatctctcaactctggccttagttccccctctgtaaaattagggtgccaactaaatgatctacaaggtcccttccagcgccgccattctgtaattacatcatgtgtaactgtattaaacatacacaagtgactgccaggcatgggaatgtaacttccgagtaaatgctttggtttgttcagaatacactatgaacttctttccaaagacgggttgtggtaaatagtggatattttgattataagaaatagagtttccttgaagctttagctggagatacagcaatagtgtggtgttcctacaaatatcacagtgtattcaaacatatttttctatcaaaaatcatttttgtaaaagctgtgtgtttttatccaacttgtgataataaatgttctttattttagaataaaaactggcctttttgtatgtattgaatacagttaatagaatttataattttaattaacaatttgctctttcatgtgtgaatatgtgatagtctagtcctttcaaaagattgagacggactggctttcattgtttgaaggctggtgagagaaggggttacctgctgcacaccagttgggagtgacatactcctaacacatggccagaaacaaaaagtttgggtcataaaac

SEQ ID NO: 94823 - DNA, 426 bp, Homo Sapiens
gacacctcgtgaacaaggaggtaacaaggaggattggaaggcacaaagtaaagaaaatgaaaattagaaacttgtgaaaaggagcattacccattgcagttcttcaaacttcagacttccttctgtcttggaattacttgaaaactatcatgatttccactttgctctttgatgtttgtgttttcatattctccctttttaaagcaaattcccaaaatataaaagcatcatttgccagtttcctcctcgactattttagaacaggtaaatttcatgtgttagaagtgcagaaatgaaaatgaaagaagaaaagagagacactttcaatgtttctagcacacaacacctgcctctcacatatctttgggtttctgtctatcatgaacctgcagaatcagaacctcataaaaagtctgaccaagcaaa

SEQ ID NO: 94824 - DNA, 224 bp, Homo Sapiens
gagggaggcttaactgatacaagaatacaagaataaatggaagtgggctgggcgcagtggcacttcctgtgcagcagtttaattgaaggctactgatcgatgtggacgggaagggctgcggagaaaagtgtggatgtggagggtaggaggggaaggagggctagagcagcacctccagccttcatttcccatgcctcagtaactgtggatttccctccaaacac

SEQ ID NO: 94825 - DNA, 639 bp, Homo Sapiens
tttattttggtaatcttacttgaaaagagatttgtcaaacccagtgggctgtgtctggcttacgccactattatacatttccacctactatatccctttaattagaagctaatcacatctatctatttattatatacctcggagtagcaaataatacattgagactgaatcaccaccattcaatgtaaaatcatgggaaagataatgtatagtccagaaaacagaatagtcataaagagaaatagaacaatcttcaagtatctgaaagcatgttgacaaataattcattttccctgcatatgctacaaggaggtagattttaatgcaacataaaaaagaatttgtttattcagaactgaaatgggcttgtttctggaaaatactttgccaaactgaaagaacactaaaaatccctgaatctttcgatccagcgaactttagaaatttattccaaagaaatcattgcagatgtgctgaaagatatatataaaagaatgctgacacggtttatagaaggagaaaaggctcatggcaacctaggcattatttagccatgaataattttcaattaataatttaagacaacgagaaaatgcttagggtaaaatataagttacaaaaaaactacacaatgaatag

SEQ ID NO: 94826 - DNA, 275 bp, Homo Sapiens
  misc_feature (143)..(155): n is a, c, g, or t
gcacgaggctgaatcccctctgactccaacttctctttcaccctctatgagtcccattttacttctacacctgcaagtcctggtttatattggacccctccctccgagctgcagttcacctttgaccttgcctcacctttcannnnnnnnnnnnnacagcgtcagctcctacctctgaccccagcttctctctggttcccacaggccccatgcatcctccctgcctcactcccctcagcccctgtcgggctagtcgggggggtaccggagctcga

SEQ ID NO: 94827 - DNA, 442 bp, Homo Sapiens
tttggcttataacaatgaacatttattatctcacacagactctgggggtccagaattcaggagtgggttggctgagtgattctagcttggcagctctcatagggttacagtggagttgtcagctggggttccactcatcttaaggcttgaccggggcaagaaggtctgctaccaagcttgcttaattatgtgatgggcagttgacgctggctctcagtttctcatcatgtgggccattccactgagctacttgagtgtcttttttacattgcaacaggctctccattagcatccattcatagcccatgctcttaactacagcgctaaatgcattatacaaacttgacaaacttcagctctacaaattatcacaaaaaataataacagcaatataaatttgaaatgtcaaggatcatagtaaatttagggtaaacatttatgg

SEQ ID NO: 94828 - DNA, 459 bp, Homo Sapiens
attccatgtttattagtctattcaaaagctttagagaatctgcacagccaagttgcactgaatccagaagcatgaaaggagctgcacaacttttcctcgtaagatttacacaagcagcacgggaaatctgaggcccagacatttccttatcaacagaatactccggtggattttcaagcaggctgttcagcagaggtttcgagcaggagcccaggtgtgggaagagcggagtgtgggagtcctcgtgtgaacctctgggggtggtgatggaactgactgtatggtctgcaaaacctaaaatatttactgtcaggtgcttatgtgtcctgtcctgagcccgtttcctctcttgtaaaatggagcaatgctgcttgatgaaaccagtcaagttgtggttggattcttatatgtaataaacctccacattgtgcacatataccctaaaacttaaagtatgat

SEQ ID NO: 94829 - DNA, 460 bp, Homo Sapiens
tttgaggtctataatttacttggaaatgcataaaaaataaaagggatcaaagcagggaggattaactagatgtgacaaagtccagtaacatgtgaatggcacactcaggtggtgggtgtatatccagacgcgcaatgtaaaattccccatcgctgctgagagccggcaaatgtccgtcgccaggtgttgggggcgaagggaggtctaggcctctgctcctctgcttcagatgccggcagcccgggagagcgcccgcgacccctcggaggctctccaggtgggcggctggggtaaaacacagtatcctgagggagaagtggccaagccttacgggggatggatcaagttgtggaaagaaggggcagagagcagaatgtggcactgggcgaggggagacacggagcgtcctcaaaacagggggtgcctggcccgggacttcctcacccacccccgcccccca

SEQ ID NO: 94830 - DNA, 1059 bp, Homo Sapiens
gcaggctggtacggtccggaattcccgggatatcgtcgacccacgcgttcgccgggagcagtgaggggccacccggggcacaggaaagggccgctaggggagggccgggtgcactcggggtgtctgggccgcgggtctgagggatgaggaggggccatggccagcgacggggccaggaagcaattctggaagcgcagcaacagcaagctcccgggcagcatccagcacgtgtatggtgcccagcaccccccctttgatccactgttacatggcactttgctcaggtccacggccaagatgccgaccacaccagtgaaggccaagagggtcagcaccttccaggagtttgagagcaataccagcgatgcctgggacgctggggaggacgacgatgagctcctggccatggcggcggagagcctgaactccgaggtggtcatggagacggccaaccgtgtgctgcgtaaccacagccagcggcaggggcggcccacgctgcaggaggggccagggcttcagcagaagcccaggcccgaggcagagccgccctcaccccccagcggcgacctccggctggtgaagtcggtcagtgagagccacacgtcctgtcctgcagaaagtgccagcgatgccgcccctctgcagaggtcccagtctctcccacactcggccaccgtcacgctgggtggcacatctgaccccagcactctcagcagctcagcgctgagcgaaagagaggcctcccggctcgacaagttcaagcagctgcttgccggccccaacacggaccttgaggaattacggaggttgagctggtccggaatccctaagccagtgcgtccaatgacgtggaagctcctctcaggttaccttcccgccaatgtagaccggagaccagccactctccagagaaaaccacaacgaatatctcgcactcttattgagcactattacgattctaggaacgacgaagtacaccaggacacataacagggcagatccacatagacatccctcgccatgaggccctgaagcgtggatcctgcaggcccaaggtga

SEQ ID NO: 94831 - DNA, 656 bp, Homo Sapiens
  misc_feature (262)..(262): n is a, c, g, or t
  misc_feature (273)..(274): n is a, c, g, or t
ggaggcggaagagcttctcggctctaggctctggagtcccgggagcagtgaggggccacccggggcacaggaaagggccgctaggggagggccgggtgcactcggggtgtctgggccgcgggtctgagggatgaggaggggccatggccagcgacggggccaggaagcaattctggaagcgcagcaacagcaagctcccgggcagcatccagcacgtgtatggtgcccagcaccccccctttgatccactgttacatggacnactttgctcannggtccacggccaagatgccgaccacaccagtgaaggccaagagggtcagcaccttccaggagtttgagagcaataccagcgatgcctgggacgctggggaggacgacgatgagctcctggccatggcggcggagagcctgaactccgaggtggtcatggagacggccaaccgtgtgctgcgtaaccacagccagcggcaggggcggaccacgctgcaggaggggccagggcttcagcagaagcccaggcccgaggcagagccgccctcaccccccagcggcgacctccggctggtgaagtcggtcagtgagagccacacgtcctgtcctgcagaggaattacggaggttgagctggtccggaatccctaagccagtgcgtcc

SEQ ID NO: 94832 - DNA, 734 bp, Homo Sapiens
  misc_feature (60)..(93): n is a, c, g, or t
gggttaccttgctggtagatagagacttagtcagattttactatggtttgcatgcactcnnnnnnnnnnnnnnnnnnnnnnnnnnnnnnnnnngttatatcaaacttttacgacttttacatttgagtaaccatcaacacgattagtttacagaactgaaaaggaatctgagatctgtactgtatcaggattacaaaggatttagcctcaagtagttccctttttgtattaataaccacacgctttctgcaaccctatcccttgcatccacttgactatgaagtttttttaaagcacagataaattgaataatcagggcaatagcattaagcacatctgcgaattatccctgaagttcaaaagacttatatatgtataagtggtatgtgatataaatcgtgtgtttcatatgcataatggaatttaacgtaattgtgaataggaagtaggtatcctagtttagtagtggttacatcatcaggcccatcccagatgtttgtcatgtcctgaaacaatttaaaaagagacccacagagctaatgtttatccatttaaaaggtataaatcaaaataacaaattatctgaaaaaaaatctatcctgtacgtgtgaagatctaggcctgcctccatgttactccctttctcttactacctgtggctcatcccatgccatgaactgcctggggtacatatgtgaacactccagcctggacaacaagagcaaaactgtctc

SEQ ID NO: 94833 - DNA, 499 bp, Homo Sapiens
  misc_feature (137)..(162): n is a, c, g, or t
tcatcaacctgccaccactggtatattcccataataatgtccactggtcccagtcgagaggcacccactccttttcctcttgtctaacacaggagtctcgagctgcctaaagaaacccatttttgggaagaggattnnnnnnnnnnnnnnnnnnnnnnnnnntgtgctccaaatgtatataaccctgtagattaatgaaacatttgggccaaagttctgtattctcataggcaaagactctcatagtattaatatattcactgattttaaattatttttaacttaaaggttttgttttaatctgctgtgatgaaatcttggatcactatagctgtaaatgagtagatttatctagatatgttaaatgaacaaatgtaaaatgttcgatacagcacaggtgcttaataagttggcttcagagccgtgtttttccaacatgttctgatgatccaagtttgatacttaagacaattaaaaacaagaaatttaacttaaaaaa

SEQ ID NO: 94834 - DNA, 555 bp, Homo Sapiens
taaaagcctccaaggaacaaacgaggctgaaagatgtggctgaaggtagggaaggaagaaaaagggaggaagagaggaagaaataaaaccaaggaagcaagaataaagctaggctgcgtgggaagaggggaggaaggaaggagagagaaattcaactaggctcagtggccaaaatgctgaagtgtgtcctgccgggagggagtggaggaatatgtttactcactatttagaaatgcatgacaaactccatccgctgagggagatttttacaatgtataaacagagaaacaactgtctaaaaatgagccccaaatgaggagcctttgctccagtgaatgagatttggcagttctgcaaaatgaggaaattcttccttgtgcggcatcttgaagggttgagtcatgaaacccacagcaaatattagtgggctggattcctgaaaggcatgccagatggacgcattctggttagttttactgtgtgatgttcccttctgtacttctgtcaattttagaagaaaagagtgtgaataaagatttgagaagtgaacttaaa

SEQ ID NO: 94835 - DNA, 557 bp, Homo Sapiens
ttttgcccccgtttctgataattctgggtacttccaactaacaggtaaatacattttaaagagtatattcttcttctgtctggaactactcaatgagcacaaagaaaacattttctgtcttccttaacagatttaggtattggtgggtgtggggcacagaacatgagcaaacagcttctgtttatcctctcagccacaaattcgcttttaggtatattttcctatacccttttgcaaattacaaaatcaccttcagaggaactatgggtagatgggattccaatatgcatatctggcaacaatcagcttcaaatcaaaccctttctggggtggctaagatccagctaatgtgtcatcagcaaaggcctctaatatgtgtttgcgtagtaatggaacagtttttaattgggcctgtttatagttgactgacagtaagttctatatggtatataacactaattctctagtcttctgggcatatctacgaacaaatacaatccaaatattatgagtaactgggttgtgaccactgcatgcattacactgaaagaaacacc

SEQ ID NO: 94836 - DNA, 387 bp, Homo Sapiens
gtgatggagggtggtgctcaaaccaatgttaatttacaaaggatgggagctcagagtgattctcccaagacaagactgccagagggtggggtcctgctcatctgagagatggtgatctgcactggcagaaagcaaaaggacaaaattaagtccattctgaagacacccagcattgtggtgtcttggctgcccaacctccactggtgagacgtaaagttcttatgtatatagaaaagcaataaagctccccctgtgcaaatggaactcctaagccagtgggtatgttgagttagaaagtcacagcctattacagacagaatttacaccaggggcaaggcctgaccatcacaccctcatgagagctaccagtcacccagggcttggatg

SEQ ID NO: 94837 - DNA, 607 bp, Homo Sapiens
tatcttaattagagatttactttaaaaacctttggtaaagatactctgaggttatgttataagaatgcataataaagattgtaagcaagcagtattctgctgacgatgccacagggatgggtctgtgacagcattttcttacagcttttcctcttgacatgtaaacattcagttacacaaggatttaaatgtaataagcaagtagaatgttactgcattttatagtataaatattcaataaattcttcttcttttggcaaaattaataataatatgaccactttaagagatacaatctatccctcaataaattggactctctgctttgtcctaaagagaatttctccgaaagtattacataaaaagttactaagtcaaaattcaagccgattacattatcagccctattgtcaaatagtcagtgctacttgaggtcatcagcatggtctggcttcaatttggaagacaggaattcagagacacagttgacattgcctcccaaaactaacatgctgcccctaagtgaatctcatcatatttcacattatgagaaatatacgatcaaagataagagaagtagggtaagaaaaagacagtggtcaaagga

SEQ ID NO: 94838 - DNA, 597 bp, Homo Sapiens
tttaaggaggaaattagaagggaagcagtcatttaatgattacaacttagtttgtctagttttctttacctgaattcatctttctactccaaaacttaaaagcgctataaagagaccatcccaaataaagttaatcaagaagtagggctttccagggtatatgcaaattttgctctttagttgccttctctctctactatgcactagaaagaagatttaaaaacaaatttatctcaacagtgtgtccccaacctccctaccctcctctgcattgctttgaggctaagaaaaacaccttgtttaaaccagagatttgtccaagcagaataaaaagcatgaatcagtatttactccttgaaatttgcccaattatctctatcacacctactctagtttggaatagcatactcagccccactggacagctccaattctgtgtaaagacaccagctggagaaacaactgcctggatctctgttttcctataatgacaaacatttgaaaactaaaacttgacagtatttgaaaaattaggtttcctatttttcatcacttgaatggataaatcacaaatttctaattcaatcataagattct

SEQ ID NO: 94839 - DNA, 454 bp, Homo Sapiens
gggagagaactgaaggcagaagctagtctaatggaccagatgagtagttgtgatagttcatcagattccaaaagttcatcatcttcaagtagtgaggatagttctagtgactcagaagatgaagattgcaaatcctctacttctgatacagggaattgtgtctcaggacatcctaccatgacacagtacaggattcctgatatagatgccagtcataatagatttcgagacaacagtggccttctgatgaatactttaagaaatgatttgcagctgagtgaatcaggaagtgacagtgatgactgaagaaatatttagctataaataaaaatttatacagcatgtataatttattttgtattaacaataaaaattcctaagactgagggaaatatgtcttaacttttgatgataaaagaaattaaatttgattcagaaattccaaaacccccac

SEQ ID NO: 94840 - DNA, 453 bp, Homo Sapiens
ggagtgattttgctagtttgacttctccaaagcctctgtgtaggtggtagggagtgagtcaaagcactaatagaccaggcaacttaccacttggagtggatttgccttacttttgccctctcccattttctgttttgagttatttatcttgtaaagtctgttttcctttcccaaggaataattccttttgtctacctaacattgacttatgtcttagactgacactgttttaggcttttcactaggcacattccgaaggtaccaacaagttaataacatcacctactctccactaatagatgctatgctaagagaagtgaataatctttctttggtagaaaataggctgagatataaggtgatattgctattgacctgaaaatgtgatagaacttctggttgcctattgattattcctccatgtctgataaatgaatctgcttcctaccaaaa

SEQ ID NO: 94841 - DNA, 727 bp, Homo Sapiens
  misc_feature (66)..(109): n is a, c, g, or t
aggcagtcagtgggttgagctccccattaaagtccccctgccaagtctggaatagtcctagtcccnnnnnnnnnnnnnnnnnnnnnnnnnnnnnnnnnnnnnnnnnnnnacccgcgtgcatatgcgcgcatgcagtgcagggtctgcatacctaaagcagatgaaattctgcagaatggctgcctcactagacaaagtcaagaagacagaccgaggagagagaggttgatgtgtctccactaccaagagataggcttctctaagccagcgagacatcccatccaacaatatgaaactggccacatttccttgagatgtcaacgttgaaagtgtagctgcatctttattcttcactgttatgaagttgggtgcaacacagcttgagtggaatacaaaaacaccgcttggaaacacatgatctggatttgaatcgcagctgtatcattcacctgctatagactttgagcaagacctctctgaggttatttcttcacagtaggtagagacaagacttacttcaaaggttcttaaagttgaacctgagtcaatgaatgcaaaagtgttcacatttaaactgtaattttaaagcacaatacaagtaaatagcattaatatcattagagagattaacttagcactgtgcgtcacatgattcatcacgggccatctgtgagatatcaaatagagaggggaagcctgcagtaataaaaaatactgccatagctat

SEQ ID NO: 94842 - DNA, 570 bp, Homo Sapiens
ctcggacattggtgtgtcatttctataccatctggctactagaggagccgactgaaagtcacactgccggaggaggggagaggtgctcttccgtttctggtgtctgtagccatctccagtggtagctgcagtgataataatgctgcagtgccgacagttctggaaggagcaacaacagtgatttcagcagcagcagtattgcgggatccccacgatggagcaagggaaataattctggaagcaatgacaatatcagctgtggctatagcagctgagatgtgagttctcacggtggcagcttcaaggacagtagtgatggtccaatggcgcccagacctagaaatgcacatttcctcagcaccggctccagatgctgagcttggacagctgacgccttggatcatctgccactgatctctggtcaacatttttatcacccaacacaaaagaagcagagatttatcaagttacttaaacaacctgaccctttcatcttttgctacacatactcttgtaattgatctctccatgaattgttttctgtttaaaatatctagaatgttaaaaaaa

SEQ ID NO: 94843 - DNA, 391 bp, Homo Sapiens
tttttttccgagccagcagatcttttatttaggaggcaaatgaagattgaaagaagaccaagctgaaagtggataactagttgtgtgacccaagaaagttctccagtcagggtctccatttctcacctgtgaaatccagtgttaagttctcatcatctctaagtttccttctggttctaaaattatgttctcgcattctctcctgaagcatgcctgggaagtctgttgttaaacatgttgtcatttcacattaaaatgtaggttattgatttttcttgtttcttcccacactgtcattgacccatatcctttctggaaatcactattttgttccagatgggtggactatggaactttctgagagaacagggttacaaaactgttgtgtgat

SEQ ID NO: 94844 - DNA, 428 bp, Homo Sapiens
  misc_feature (37)..(37): n is a, c, g, or t
tggaggctggtataagccggtctgagctctggctctncacatgcacggcaagcagcggcccctgtggagctcaagggacagttctctggccactgggatattattccaaggagaagcatagctgtttctactgtacagaagagttcgcacaaggagtaagagtagcaggtggcagtaagtcccacccagctctcattaacatgacaagacagatctgacactcccagtaatctactagcagcagcaagctaaggtccaggccatcttgctcagaactaaaaattgcccaggccataagccttccctgcagagatactatgtgaggtactgcatatgttaattagcttgatataaccattctagaaggtatgtatatatttcaaaacatcatattgtacacaataaatacgtacaatttcatgtcaaaa

SEQ ID NO: 94845 - DNA, 500 bp, Homo Sapiens
tttagctggggccacttaggacacagagagatttactgtgccagggaggggcagtcagggcacctgtggctgtgacagggaggaaaggaaaagcaggctcagaggaggggactttcctggagagggtcaagggtagcaaaaggcaggcaggagccctctcccacaggaagccccaggaagtccattgctctccagcctctccgcagctgcttcaggctgatacccacatttgtctctgttatgctatgtctgcactgtctggagctgagtctctggcactttctcggggtgtatctggcactgcgtctctgtcagtttttctggctgtgtgtctggctgtttctctggcagtctttataacggtgtctctggcagtgtgtctgactgtgtgtctgacagtgtctctggcagtgtttggagtggtgtggatacttcctgactgagcatctggctgtggctctggctcttctctcaagctgtttttctgggtgtacgcctgt

SEQ ID NO: 94846 - DNA, 588 bp, Homo Sapiens
  misc_feature (53)..(53): n is a, c, g, or t
cataatgcaccatattggggcacaggatgtgtatatttcatataccaattgtntacagatatgtaataacacctacctaaagcacatattttaagaaggtaactggtgacccaaagacatactgggacagaacattacagagataactgtgttatccatcctcttaaaatcaatcaaagtgaggatcatgaagccaagttgataaagcttcataaaacagtactaaaaaggaactatccagaattatagcactaattatccatgtattgtaggcaaagagcttatctgtcagcacatcctaaatgtgggtggatcactgcagcagtactgcagctagaacagctgagttaattacgccatgtatttactttctatgcacaaccacatacagatgatgtctgtgaacatttccccatcctgcactagttacccgttctatgaagctgagagattctcctgatttaaagtgccccttcatgtatagcaatgaagtgtcagtcaagcaattctaacttcagccaactggggaaaaacaaacacaaaagccttatagatacaccaaacattctggtgatttttctcaaccag

SEQ ID NO: 94847 - DNA, 456 bp, Homo Sapiens
gcacctattcaagtaatgtgttctttgcagcttgagaagcatcatacatattcacaccagtccttgagaaggaggtacgtccagcacacctccctctgtgaagggaaaggctcagagcatggtttgctattaagaaaattagcacgagcagtgaaaaaaaccctagaaaactgggcaacagacaaaatcctaattgtatttaccatatacatggccacaccctactatgctactgcaagatggtggccctcggcaattcttctggctgccagcacagaccagagccctgggcctaggctctgtccctacctgcctccttggcagttaaaccttggttctccatttgaaaactacaaactttagagcccaaaggaatgttagaaaccatttgcctcaatcccttcaatttatagcggaggtcaactggagatcataagcatgtaaggcaggggaaaa

SEQ ID NO: 94848 - DNA, 343 bp, Homo Sapiens
tcgcagtgaaagaaacacaaacactaaggattcagcatctgttctccagttgcactgaggaatgcactgtctcgcagcaccagctctgcagagcccttgccccagactctttgcggttttatttatatgtatttccatatttcattcctgtgtgtcactgctgcattggtgtggcagcaagtgaccaaatgctacaggtcttactatggacaccaggtcaggtgcaaccacacaaaacaaagccagttccatgagctgcctatgatatgcattgcggaaggaacattttacccagggtgtgccattgcagtgatataaatatatttttttcttagactaaaaa

SEQ ID NO: 94849 - DNA, 871 bp, Homo Sapiens
ggtggtgttgggtagaggagaaagcagggtggggctgagatgggcaggtctatacctggtcctcctaatggccagtacaagtgccagccctgatgggggttggaggacagttctcaggccactggagcaatagttcagggagaagtggagcaactctttctgttccaactaaccagcatggggaaagtggggtggctcgggttccatagcctagcaggtggtagtgagacctgccttgctctcatgctctcaacctagcgggataccatcctacggcctgccactggcatcgagctgaggcagccagccaaatcacaagcagtttgtctttggactgcaatataaccccaggccataaaactgtggctcccaggtgaaacccctcccagcccaattccaggatggggaggttcccgaatcccataaccttggctggagccaatgccacacttgcttatcagttctggcctcgttcctgggactgtgcatagtctgctaaaagcagatgagaatttcacaaaatgccacgttatcacaaatttctgaagaggctgacaggttattaatcaggataaaccacattgaataaagtattcctgttaagtggttctgcagcctctgaatcggctgggaagttgttggacatgagaattcttaggctcctgcccagatctaacaaatcacaacctcaggaggtggggcccagcaccttgtatgttcgtaagttctccggctgactggatgctgacacttgctctcaggaatctacactggtcccccattgatgtcagggggtgcaatgggcatcctacttctaatgtcttgatcatgtttcttcatttagaataaacttcttttcttgctaatcaaa

SEQ ID NO: 94850 - DNA, 511 bp, Homo Sapiens
aagttgacttcttcatcccttgttgtctcactgtcctctaccctgaaggggcaggatcaccttgggcctgggctgcttagacaaagcttttcttctcttccatagcccatcatgggcatcactagtgccttccagggaccaaatagaaatatttacccgtggtcaaagggacacatagtgaccagctattttctgccctggtttgacaacaaggtaaatgttataatctctctcacacagttaatgagagacactgattcaaaatttccttgctactttaaagaacttgatcaaacatagcattgatattgtctttaatcacacttactggaccacgaaatcctggagggccaatgtcccctttctgtccctacagtgaaagacatttacaaattgtgaatatggtcacccaaagtatttacatataaaaagcaagatgtacagttaaaatgaacaatatattgatatgtagatgtcatgtacaaaccaaattaaagttaaagagacactg

SEQ ID NO: 94851 - DNA, 351 bp, Homo Sapiens
  misc_feature (274)..(274): n is a, c, g, or t
aaatgttaagggctagtctaattgtcatttacttgcatttgcctttttgctaaaaggtttgaagggaataagacaaagagacatctctactacattataaactctcagaaggaaaaactgagcctctttcccttatctctaaagcaccgagcacagagacatccaatcagtatctgctgaatcaattaaatcactccaacttcccttgatatacccagcagtaataacccagccctgccactggcatgtcaccggttgacggcgctgctccaangaacataagagacctgggcattaatttataaactggggttggaattggctttttccagaaagaacaaatgtgtgtat

SEQ ID NO: 94852 - DNA, 404 bp, Homo Sapiens
cgcctccattgcgctctcctcttcacttaggtaggtcctgccgcgttgaccactggcgtctcgctggtggtcttcgagaccggcgttggttgaaaatttgcccccgctttggccgtggccgcgggtgagattcggcgcccagatgccccgggggcctcagctcaccgcgcgctgccccatgtgcggcggtgaaacccaggccccgaacaggctgccgcctcccccccgggtgcggtcgctcgcgaggtctggcccctgactcctgaccccgactgcagacccctaaccttgttctttctccgcaggacactggtcctcccacgcctgacaccgacgtcgccaggaccgcggggttgggggaacttggctgtcccacgtctttcaaataaagctgttttgtctaa

SEQ ID NO: 94853 - DNA, 243 bp, Homo Sapiens
gggagccgcggcccgggaatctacgtcacccgaaaagcgactataaacgccggcgcctccgtccccagccgcggctcgggaatccacccgaagagtggctataaacgtccgcgcctccattgcgctctcctcttcacttaggacactggtcctcccacgcctgacaccgacgtcgccaggaccgcggggttgggggaacttggctgtcccacgtctttcaaataaagctgttttgtctaacgt

SEQ ID NO: 94854 - DNA, 962 bp, Homo Sapiens
gttgtatagctttaatcaatgagcccattttacattcaattgtttttctactaaacttgacaacaacatcttgcccttgaagagcagagagcatttaacgaatgctgttgtacttactctcaaaatggtttctgttcagggaaaatgatatatagagagtgtcccagggcaacctagaaataaaaaacacagctaggaatacaacagatatcttggctgcccatgcagaatcctatccaagaccctgtgtattcatgagatgaaactgaatcagcaacgagaagggtgtctctggagatggaggtttaaatttagaaattcatctatggcctttccctttataaagaaagccaaaacatgtgagttttgagtttctcccactgttgtcaacatttttatcagctgaagactgagtgaagatgccttgatttttgtttttattgataacaacatcaatcttctagagggccctttgcatctccatagcattctgttgatccatcagtggcaggagagtgtcttggggaaggggtcacacttctagccattcctttattgaaagacaagacccagaggtgctggatgaccctggccagaggctggtctgttttcatgctgattttcttttggcttcagtaagaatctcgacacagtaaagctcatttagttgacatcactaggcaatcattgactttttcagataattgaagcttctccctttagatgtcagtcttctaaaaatgcagtattttacatggaaacctctgtataatgaagattatatgcttccttctcttcatagacagatgatactttttaaaccataggtctccagttaaacggctgctgggatcaattattcagttgttcttcctgtaagttgcattgttaaggcttcttctcttctgaatgtattaatactttgacacaacctgggattttgctggatagggtgaaatttc

SEQ ID NO: 94855 - DNA, 473 bp, Homo Sapiens
cccgagcaagaccaacaattgctgaataaacacaaacccccttgagaatcacgccgacaggtgctatctcttcacctggggattgcaaaggaagtgagaacatccccgagcaagaccaaaaattgctgaataaacacaaacccccttgagaatcacgccaagaggtgctgcctcttcacctggggattgcaaaggtattacagcactgtacagtttactaaacacaagtcttcacatcagtcctcttctctgcagccacatgactcaagcaggcacaggacccatcaggaacaccagagtcctgagcaggaagaatgtctcctgtcgcagccttggggggagtcaggcatgatgtgcccgatggtgcagcaggacacgatgatgtcagagctgcctgggacatattgaacttcctgattttttcttcttgtgatggaataaatgattttggattaagatgcttttaaaaacaa

SEQ ID NO: 94856 - DNA, 826 bp, Homo Sapiens
aggacggaggcgcctcggagcgggagcgaggtggccggccctacagcggtgtcctggacagtcctcacgcccgccccgaggtgggcattcccgacggcccgcccctcaaggacaacctcggcctgagacaccggaggaccggcgcccggcagaatggcgggaaggtgaggcacaagcggcaggccctgcaagacatggcgcgacccctcaagcagtggctttacaagcaccgtgacaacacgtaccccaccaagaccgagaagatactcttggccctcggctcgcagatgacgctagtgcaggtgtcaaattggtttgctaatgcaagacgtcggcttaagaataccgttcgacagccagatttaagctgggctttgagaataaagttatacaacaagtatgttcaaggcaatgctgaacggcttagcgtaagcagtgatgactcatgttctgaagatggagaaaatcctccaagaacccacatgaacgaagggggctataataccccagttcaccatcctgtgattaaaagtgagaattcggtcatcaaagcgggagtgaggccagagtcacgggccagtgaggactacgtggcaccccccaaatacaagagcagcttgtttgaaccgttaccttaatgactctttgagacatgtcatggccacgaacactaccatgatgggaaaaacaaggcaaagaaaccactcgggatcttttagctccaatgaatttgaggaagaattagtgtctccatcgtcatcagaaactgaaggcaactttgtctatcgcacagtggaaaacttaggttctttgagtgaggactccg

SEQ ID NO: 94857 - DNA, 434 bp, Homo Sapiens
ctgccagcccagcccaggctggcccagcttagccacacatgcgccatgaagtaccctttgatgccgctggtgaacgacctcacattttctttcctggttttctggttctgcctccctgtgggtttgctgttgttattgatcatctgcctacgcttcttacttagccaagatattctgcaagtcagaagatacagatatgatgcaaacattttaacagcttcatgacaagccatcagacggagggtccgggtctccatgtggtgtgactctcccacagcttagtcacccagatctctcgtgatctgtggacgtggacacagtttccaggtgttttattgttcgtgtgtgcgtgtttcatcacaaaacagggctacagtggagatcattgtgcctttgtactcagatgtttgttaatgaatgaactagtggaaaaa

SEQ ID NO: 94858 - DNA, 484 bp, Homo Sapiens
gacctcagtgaggatcagccctggggaggaagcagctggacaggatgtgctggctgtgcgtgtcctggtcaccagcgaagacagcagctctgacacagagtctgactatggtggcagcgaggcctcccacacagagccctgtgaagagaaaccctggcggccaggatccccgcatctaccgcacacgtccctaggggaggccctgagcagggcggtctctccacagtgccctgaggagcccagagctgtgcacgcagctctgcaacgggccaatagcttccagtctccaaccccaagcaaataccagaactggaggagagaattctggtggagtgagtcactagctctctgggggtgggaggctggggctgggcagaagatctctggttaattctcaggggcagctgttctcattccttacatggtatctctctggcatggcctcctggttgtcagaggcaagaaataaaatataagcttgaaa

SEQ ID NO: 94859 - DNA, 509 bp, Homo Sapiens
ttttgccttaaagcacagaactttattttctcacaattctagaggcaaaatatgcaaggtcatgatttcagcaggattagttcatcccaaggcttctctctttggcttgtagatggctgccttttgctggtatcttcatacagtcttctccctgtgtgtgtacacagccagccctccacatctgtgagatctatatccacacattcaatcaactgcagatcaaaatgttcaaaaaagataacaaataacaataaaataatacaataagttttacaaagaaatagcaacgcaacaaaacactatacaacaatataatacaaataaaaaactacagtataacaactatcacatttacattgtattaggtattataagtaatctagaaatgtacaagaagatgtggataggttatatgcaaatactatgccatttcataaaaggaacttgagcatctgtggatttctcagagggtcctgaaaccacagcctcatggataccaagaaatgact

SEQ ID NO: 94860 - DNA, 635 bp, Homo Sapiens
agaaaaatggactgtgtttaataaatgcattcctagaactgtgtttctagaaggctttgagtggctagcccaggtggaaccatatggtaatcctcttttgctgtgggcttcggcagtgacaatccccatgcttctccctgtgactatcccgcttccccaggggaggtttcgggcccaggacgtgaatcagagaggggctaaatgcaggagtgagaccctctgtgccaaagccacacatgcacgtgtttgctatgtgccactcgtggaaggacaggggccctgagccgcatcacaagcccagatctccaggaataggacccaggtgtgttcaagtggacagtagagttcagccgtcacctgtgagctcctactgtatgttagaccatttgtatactaagagcactaaggtcatgccatctgccagctgtcatataacctgtctgagtttcagtatttccatcatgaattcataaggctacttgaaagatggtagagaaattacgtgaagggtgtggccagtatgcttaatgctcaggccacgtggctgttggcatctaacagtgtatggcacccatcacttcaatgagacttgcacaggaactgacagatcacctctttggtgaatccacaaatat

SEQ ID NO: 94861 - DNA, 1567 bp, Homo Sapiens
  misc_feature (218)..(218): n is a, c, g, or t
  misc_feature (328)..(328): n is a, c, g, or t
  misc_feature (335)..(335): n is a, c, g, or t
attatgatacttttattgtatatgactagttttctagaaaactattccagaagatacagtcttccttccagaaaatacagctttactgtccttaagtgcctaatcattttcaagaggaggagcaaacagtttgccctcaagtatctggtctatcaacaggggtctggctaaggaaaaaacgggccttagagccgtgatgaacctacttaacactaccntggtacctcaactcatgctaaacattctaatttgagcaaagctaaatcatgggtcttagtctgtttagcaaaatctccacaaggatgaaatttagcttactaccccaaanctgttcnaatgttttgggtccaatttagacacaaaaaaatgttttataatcctagacattagattaatgaactttttaaaaacaaagtcatgtttgggcttagaagtttgcataatgttacacagaatgattatgatatcttccgaaacagcttggggttggggggaagttacacataggtgcatttgcataactatccaaactattttactgttttcacaagtacaacataaataacaaaggtgctaatttcaaagacaggtttcaaacaatgagaataagaatatattatttcatatcaggcaataataaccttagcccaaatacttttaacatctaaagtgcattaattgacttccttaggaattttcctaaggaccaaaggtagatacaaatggcctattttaaatattactccatgttcacagacacttaaaggcaatcactattcaacatacaattgtggaaattactgatttctagttctcagaattagagttcccttggtttttcctcccaggcaaaggaaagcttgatttgctctggggttgagaaagtttacaggctaataaagtgaatggttcaatcagagttttccgatctgtaacagtcacctcccacagtcttactttctcactttttgcccactgctgtgccacttcagcgtccacttgtctctgctcagaaaggtcgattttgtttcctaataccacaattgctacctcttttttgtctttgaacttatcgatttctttcttcagaagctccactctttgaaaggattcaaggttattcacactgtacacaagaacgaagccatcagcaaatgaaaaataatgctttggcagctccacgccttcctgtagacctctggtgtcataaagatgtaactgttcttttactcctcggtctgtttctactgaagccatgtatacatcttccattgtttcgcaatcttccattccaatagtatgatttccataaaggagctgctccaaaattgcagttttccccacagataacaatccacaaccacaaccttgcagccctttcccatcttctctcaggatatcactgttctctcctcagacctcaaagacagcggctccaccgcggtacgcggccaccggctttggagcctggaccccaacttgcctcctctcgcggagagacagtcgccgacgctcgcttagccgccgagacctcgccgccaactctctcacctctcgagacgcccag

SEQ ID NO: 94862 - DNA, 405 bp, Homo Sapiens
caggtgtgagccccacacccggtctaatgtttattttgtctggaattatcttcctaggatttttactgggtctaccagactggatggaaatgcaataggtatgtatttgacttacctgtgaaaactgcagaagcctcacgctgtgaccgtctgactgttcctaacgaggctttgcttgtgttgttgggtctggcctgtagttgactttgtccgctggctgtgtgctgtgtccatggatgaactggcttccccccaccatcctcgcatgttcagcttgcagaagattgtggagatatcatactacaacatgaatcggatccgactacagtggtctcgaatatggcatgtgattggagatcacttcaataaggtaactcttcaaatttaaaaaccattcctgttaaa

SEQ ID NO: 94863 - DNA, 942 bp, Homo Sapiens
  misc_feature (503)..(548): n is a, c, g, or t
  misc_feature (778)..(835): n is a, c, g, or t
ggagaaggagtttaataggcaaaagaaaagaacagctctccatcacagagaggggtcccgagcgggttgccaagtggtagtaaaattgtcagggtttttataaatgggctactgaggagggggctcatgagcagaggaggtcttatcctcctagggtccagtggtttggttgggaccaggtgtgccttctatatagagcagagtttttttaaatcagctcttatcccattctctgaccacatagatggactcttattctgtgtttctttgtcttgcttatctgggagggagagtttctgtgtctgttcccacacatcttcttgcagctgcagacatccacccaagtctgtttttagctcctcaatcttactgcgctgctgctaggggaaactgggtgacgatttcttctggctacttcctgctggagagtggcgttgtgtggggaacagcagctagggctcctcctggggttgatttaagggtccctcgtaggagggcagttnnnnnnnnnnnnnnnnnnnnnnnnnnnnnnnnnnnnnnnnnnnnnntttaattccaggggctccgaggaaaacagatttttcctaaaatgggatttgtggtgcattttctgtttccccaaggagtcccaggccaccggaagccattctgttcacaatcatgtttaggttctccagttttctctgggagaaagtggctgggctcaggcaagggcaggttttcagctggactgcagatccctttagcagcaaagcattctgatgaagtcaccttcaannnnnnnnnnnnnnnnnnnnnnnnnnnnnnnnnnnnnnnnnnnnnnnnnnnnnnnnnncttggtcacacgaccagatattgaggtcaaggacatgcacacacacatcgagtgagtttggagcaggagtttaataggcaaaagaacagaacagctcacagtcacag

SEQ ID NO: 94864 - DNA, 378 bp, Homo Sapiens
aaaggaaaagggactttaaaaaaagcgactctttataaaggtgtgggcaggtttagagaaaccaaggaggagagtgcagtcccttgggactagcaacagtgggggcccttcccatccctagtcccaaagaggcaaggaaagggagctgtttccctgagcctagaaaaggtagttttccatggagaggacaccgtctggctggagctgtggcctttggtgaagggatggagccaacctagggcaacgtggagagagaaaactgaaaataaataccagtatccctctactcctgccgtctgatttcttgcctttctgatggctcccaagggccaaagcctaccagaagctagtggatgggagtcagtaatgaggtccaca

SEQ ID NO: 94865 - DNA, 410 bp, Homo Sapiens
tctagctgacatatccttggatactcacaagtgtgtgctagtctatattcctcagtaccacctgatccaggcttctctattaccaaattctgttcctgcatcagaataccttcattctacactgcactgaggccatgaggatttaatctgtttttgttgttgttgttgttgaacttatccagtatgctggagtgattttctgcccagtccttagttcttgagtcttgttcctttcgtagttggtcactccattatatcttgatctcagcatttcccagttggccaggttcaacttcctggttacctcttaagataaggttagaggacttgtacaccacctttactgctggaaaaaaagagtttgtaactagtttcatagtgtaaagctttctccgtttttggaaaaaaaa

SEQ ID NO: 94866 - DNA, 545 bp, Homo Sapiens
cagcatgccaatcctgttttggcattttagtaacacaaattgtaatgttaactttttaaattatgaaagcatctaaaatataaaattatttgtaaccccactgtccttttgggcttctataaatgaatatacatctaaaatgtgggggtttagcttaattgattgttttccatagaaactaggttttatgggaagatggttggatagacttgtttcacttaaaggtctgatttgtgtaggacaaacccacatatgtaatcgtgccagtctgttctctgcatgacataattttccagcaatagctgtgtggtttttgtaatcctatcatctagtcagttcaagatcttgcaacactgtgtgattctttgctccgtagttcagtcttgttgaacatgacacaggtatttactttcctgttcttgcatctagtttcattctaataatgttctctgttgaaaaagctggcttcaatttattgagcaagatgctggtgttatcatctaacataaaacctatcttataataaagtgttgacacatgtaatg

SEQ ID NO: 94867 - DNA, 437 bp, Homo Sapiens
gaaagcctccttcatgaggtcatcgtctgtgtgggctacttcactgtcaaccacccagataaccaggtgatcgtgcagtccggccgccaccccacagtgctgcagaagctctgccagttgcccttccagtatttcagtgacccacggctgatcaaagtactgttcccctcactttatcgcagcttgttacaacaaccatcagaacaagatcattctggagcaagagatgagctgtgttttactggccactttcattcaggatttggcacagactccaggtcaagcggaaaaccagccttaccaacccaaagggaaatgccttggttcccaagactatcttgagctggctaacagatttcctcagcaggcctgggaagaagctcgacagtttttcttgaaaaaagagaaaaaataaatgttttggttgattctgtaaa

SEQ ID NO: 94868 - DNA, 748 bp, Homo Sapiens
ctaatggaatattaaacgtggctgcacacatattcagagcaagatgctgaaatctctaaagtttgatcacctatttttaatggcatccttttgctttttgttgttacctatggctgagtgcccttcttatgcatgaggctgctgccctcttgtggcaattttaaaaagggctgggaagacgaggagggtgaagggaaaggaaaaaaaatggattgttgagaagcagtaaagagaggaaagcagggatgttaaatcactttagattgcaatgatcataagggctgaaaccctatatttttaagatcctggtgataaatacctaaatcgtcatgcactggggaaaaagtggtatctattctatagtcccagtcttgattattaaacattactgaggtgccgttgtgagccaagaccatattataccacctctccttgccctaatgcacaaactccaagtgcatatctggttttcatctagggggttttacatttgccccagctgctgaagataaggaccttctctctgttcctgaactatttgcaatatcatagaattgttttaggttatcttttttctggctatagagtaatacattccttataaaagctcaaacaatgtcaaaatgtaaatcttagaaagcaaaagtctcctctaattccaccttgcagaggtaatcaatgctaacagtttagtgtatattttggcattttcccatatgcatatactaataaataaatatttaaatac

SEQ ID NO: 94869 - DNA, 453 bp, Homo Sapiens
tctttagttcagaattcaaaagacaggtaggagcttgggaagctcatgaggcctctcctaaggtcccgggatgctgcctccagctcctgtcatcctggggaattgctctggggtcctctccccttttagccttttccaactctcagccaaactggaaagccctcttcccagcagtgcagtgttgaaggtgcccgtagaatgggtgttataatcagagtgagcagcctggtcctaggcctctgtacaggaccagacccctgaggctggggtctcctgacccacacctgaccagcccccatcttccctctctgcttctccctccgctcttctctgcctcttggtcttgatgaaaatcaaagccattttaaaaagtgcatagcacagtgcctggcctggttcgggccctcaataaacatttcttaaatggatgaaagaacaaagcaaaatgcaaaa

SEQ ID NO: 94870 - DNA, 432 bp, Homo Sapiens
tttgagaaatagcacatctgtatttagacattatccctggatgcttctttgcatgttaggaaaggctcactacaatctagtcatgtttagccctttaggagccctgggatagtgagtccagagccagcactgggggcttttctcccagccccttttcaaagtcatgttgacctttgagcatctcctgccccaggagagcgctgcagccgctgcagacagcatgagatgcttctctatgtgggctcagcttcacccttctgtgctcctgaggatggaggacagaaagtggttcttcctccctggcaagcatttccagtctctgaagactctcttgtgtggcatcgtcctggggcgctccttctgggggggacaccagtccctcctgcccttccagccagaatcctcctgtctcctgggtgaaaactggagccc

SEQ ID NO: 94871 - DNA, 909 bp, Homo Sapiens
  misc_feature (733)..(760): n is a, c, g, or t
ggatcgtttacagctgtgctcaagtcttaggccgctgacctggcaggacagggttttctcagtccttaatgagctgagtccgactgagctgagaacttagaaacagcagttcctctccttagcgcagaaactgaaaaccagtttttagagactctttaacatcactcgctcttttagaagtggctccgaacagaggggtctcctcacccttgttgttgaggtactgagctgagggtggcattgagcccctccaggacttgagttctcattggccccactaaagtcatccagccgccaggcacgagcagatcgtggtgcctatttgcccacattcctgccctgtgtgacacaaggagaacttgctggagccctttcatacatgtagctaaataattcttagtgcttaagtgactccctgtaatcttaagtatgaaatgcccactcccagagctgtgtgacttagaatgtgatgttttgtttctagtcactttttgcttagcctgagccagtggtctgaagggatgggccagtctaagtctcagccacccggagcccatgccaggcccttagcaagactgagcatggcccaaagatgaggctgcacccctgggccacaggaagctttgttcagcacttcccacaatcaacttctgtgaacaaatgtagctaagattgtatattccttccataaggaataaaatgacctttaaagctatttcagagaagttttaannnnnnnnnnnnnnnnnnnnnnnnnnnnaatcttgccagcattgtatgagagcataaccagtgggaaccagcagggagcactctttgttggtccaaaatcctgtattcacagtgtagcaagctgtttgtgttcctcctgtggaaattgtagccaaaataaagcctttgtttttgtga

SEQ ID NO: 94872 - DNA, 773 bp, Homo Sapiens
  misc_feature (68)..(68): n is a, c, g, or t
agggtgcagtatatcatctcccaggatggtgtccagcacctgctcccccaggaatatgttgtggtccntgaaggccatcacatccaggtacaggagggccagatcacacacatccagtatgaacaaggagccccgttccttcaggagtcccagatccagtatgtgcctgtgtccccaggccagcagcttgtcacacaggctcaacttgaggctgcagcacactcagctgtcacagcagtggctgatgctgccatggcccaagcccagggcctgtttggtacagacgagacagtgcccgaacacattcaacagctgcagcaccagggcatcgagtacgacgtcatcaccctggccgatgactgagccccgagggcccaacacagatcatggatttgcggccagctctcctgggggtagggggccaccaggactcacctccctcttcatttaggatctccagatactggatagccagcatcctctcattcccagggagccagacctgtgctgttggggttaggggcagccatgggccccagccaggtacatgctgggtgccccaacctgcaggcaggctttgggagagaaatttatttttgtttgggtggacccactggcctgtcagtctcaataaagggaccggagtccagtcctgaacagcttactttgtctgcttgctgctgtagcctgtaccaggccaggtcttgtgaggtggaggctgcctggctccacagcgtgccctgtcctgccctgcccctgttaagtccggtgat

SEQ ID NO: 94873 - DNA, 856 bp, Homo Sapiens
tagtatcaagtgcttgattttaataactactttagtcacttgagaaactatggcactttaagtattttgctgttagagccatgaaatttcacgtaacttcaataatctatgttaagagtattagcttaaaaatgtattttgaaaagatttgttacatacagatttaaaagatagtacctttgaaatggtttacagttaagcaacatgaaatatcacaaatacaagcagagctttgagatctgagttttgtaaatgctagaactttgtttcctaattgttctagttcttcaaagaattaagaggctgcattatataattcattttagtatgtttacctcaagtacttttagaactagactgtatttttcactgccacagatgtatcatgcagggagtatcctggtttaaattctgaagtgctttcactcctacttggttcaccttgaaatcgtctaaaaagaagttggcacattattttgcgaatgttactggacatcaggaaatacatgactggatctaagcaactattgaaagatgagagaaccagcatgatctcattggttttgtgaacaatttctttccagtagcaagatgatacatttagctgtgaagaaatgtagatgaatcgaaaggcatgatagggaacaaacatatagtaaaaatgataagtacaataaaggagttacgagctgtagtggcatatttaccagaattaggaaattttgacctccttttagaaatcctcaatagattcttcccaatcttaatatatgaaaggattattagtaagaaaattagccagaacattaccacaagaatgaagttaaaaatggcttctccttttgcgttatgcata

SEQ ID NO: 94874 - DNA, 497 bp, Homo Sapiens
  misc_feature (199)..(212): n is a, c, g, or t
gagagcaagtgaaagagaaagaccaagaggcattatacaagcacagggtgaaatcgtgtgccttaggttatagctggctgaacagaataaaagagtagtaacaataaaagccaacatttgttggatactcatcatatgcgtggtggaatgttaagtgctgattatgtgattatgtaacatttcatttaatcctctttgnnnnnnnnnnnnnntatgcagtttccctacaactactaaaatttgatacctagatgagattttttcagattttcttcctgcaactaaatgtctagagataacttttaatatacatggcattctttttcagtacctaccatggtgccaattcattgaccaaataaacatgctagacatttttaaaggagaagctgaaacattctaaaaaactagaatactatagaacaaaatggccaggtaactgcagattcttcaaacctcttttccctttaagtgagttatgcaatctaaaaattaaa

SEQ ID NO: 94875 - DNA, 363 bp, Homo Sapiens
cccaccacctccttagcctggtgtgagaaacagtttttagaaaatgagagaagggatccccaagaggccaaggcccagagaaacttttgttcttctctccttagcccacatagacttaacagaatcgtctgagaaaggagagctttttcacccctggctttctagaattttctttgtctgcatttgtgaatataccacacatgatggtgtctctgagccgaccagattatggaaactcaattgtcagaggacccaaaacaaaacttagagtgatttggatattgcctctctgtcaatgctgaaccttaagacattttaagtaaacatcctcctcctctctacacccccaggatttgtgcgttc

SEQ ID NO: 94876 - DNA, 331 bp, Homo Sapiens
ccagccccttctccacactcttgtcacccagggccccatccttcagtgcattgcacactttgcatgctgggtcagggaagattgtggagagaggacagtgcacctggtttcccccacatagactgcgtgggggtatgtcctccttccgccacttccaactgtggcactagggcacgcccctctcagggcaccttccctttttgtctccgcaaaatgaggttgtaatagtgcctgccgcactgtctggcacacagtaagctctcaagaaatgttagctgttgttgccgttagaacaccatagctagaataccatacctggcattcacttaag

SEQ ID NO: 94877 - DNA, 1182 bp, Homo Sapiens
  misc_feature (362)..(371): n is a, c, g, or t
  misc_feature (424)..(486): n is a, c, g, or t
  misc_feature (541)..(570): n is a, c, g, or t
  misc_feature (694)..(743): n is a, c, g, or t
  misc_feature (745)..(745): n is a, c, g, or t
  misc_feature (839)..(839): n is a, c, g, or t
  misc_feature (896)..(896): n is a, c, g, or t
  misc_feature (929)..(929): n is a, c, g, or t
  misc_feature (953)..(953): n is a, c, g, or t
  misc_feature (1092)..(1092): n is a, c, g, or t
  misc_feature (1133)..(1133): n is a, c, g, or t
acttcaccacgcacgcagattcaggattctctgatttccccaactttcctttattcttcttttagtgggagaaggggcaaaagtagaaacctaaaaaatcctgggaaaaggagccttttctgaggaaacttcagcagatgaaatatttaagacttgaactgggatctctagggggaacgttggaacatctattgattgatgtgtcaaagtccggaatttcactgtaattagtgaacgattataacttgtaactttgtctgttatgtaagaaattacattttggtctcttagatccaagagttcttgtctgttacgatttgtaactgcttgttaaaattaaacatttacatatttcattctcnnnnnnnnnnggggaaccacaaactcaccaaacaacccacacccatacacattgaccaaaccnnnnnnnnnnnnnnnnnnnnnnnnnnnnnnnnnnnnnnnnnnnnnnnnnnnnnnnnnnnnnnntataaactaacaaaacgcgccccaacaaatataatccttatttaaccacacctgnnnnnnnnnnnnnnnnnnnnnnnnnnnnnnggagcaggtgaagaggcaaataacaaggcattttctcctacaccacacacgcccaccgggtgcggcgacaggaacggaaggagggagatcactgatatatttcggttaggtcactctcataggnnnnnnnnnnnnnnnnnnnnnnnnnnnnnnnnnnnnnnnnnnnnnnnnnncncctcgataaaacaactctcttctttccctccccacaatattctgtttcccctcccctctccccacatacgcactaatatatatctcaccccccntgcgcgcggtcctagcacaaccaccgggagcccgaccccgggtgccggggagacacnactccctccacatattgcacagcgccccgagcntcgcgcgcctccgccgacgacccnatatctaacgccacccccgtccctcactacctcttcccaatattcttcacacctcgcccgtttacatcccacgtgatccagaatggtgcgtcctggcgaagagcgactatcaccggtcatacagggcgcatcacaaatnctgcccacccaaggtatagtggagagaggtccgcccgtttntatccacgcgccgccccccggcacgagcacaccacgcccaatcaccgtg

SEQ ID NO: 94878 - DNA, 484 bp, Homo Sapiens
tgatgaacttctacaagcagtatccaaggggccggtgatgttcagggatgtttccatagacttctctcaagaggaatgggaatgcctggacgctgatcagatgaatttatacaaagaagtgatgttggagaatttcagcaacctggtttcagtgggactttccaattctaagccagctgtgatctccttattggaacaaggaaaagagccctggatggttgatagagagctgactagaggcctgtgttcagatctggaatcaatgtgtgagaccaaaatattatctctaaagaagagacatttcagtcaagtaataattacccgtgaagacatgtctacttttattcagcccacatttcttattccacctcaaaaaactatgagtgaagagaaaccatgggaatgtaagatatgtggaaagacctttaatcaaaactcacaatttatccaacatcagagaattcattttggtgaaaaacaaaaa

SEQ ID NO: 94879 - DNA, 468 bp, Homo Sapiens
  misc_feature (300)..(397): n is a, c, g, or t
atctccagcagtgtgtctgtgcctgcaaagcctgaaaggagaccttctcttccaccttctaaacaagctaacaagaatctgatttagaaggctatatcgtgaagctcaagaatccgtacacaaaaacaactaactactctacagttccacagaaacagacacttccagttgctcacagaactcgaacttctcaagaagaattgctagcagaagtggtccagggacaaagtaggacccccagaataagtccccccattaaagaagaggaaacaaaaggagattctgtagaaaaaaatcaannnnnnnnnnnnnnnnnnnnnnnnnnnnnnnnnnnnnnnnnnnnnnnnnnnnnnnnnnnnnnnnnnnnnnnnnnnnnnnnnnnnnnnnnnnnnnnnnntatttttcctgtttggtataatgtatggaagcatcccatatatttgaaataaaatgcattatgaaataaaa

SEQ ID NO: 94880 - DNA, 655 bp, Homo Sapiens
ttttttcaattacctgaagggctttatttacataacaaaacaaccctttgctagccaagccaaactgaaatagcaatagtggttgccccatgctgtagttcagtagctaaggttctgccctttttccaccatggcagcctgggtttggttcctaaataaagtctttactggtttgatatttgtgttacatttgaaatattagaagtttgtcccacctaaaacatggtaatgtaaccaaaatgcaggttagtcgcttgttgcttgcagagtccaattaacaaaagtgaagtctggtataaagaaagtaatttatttccaaaactagcttaggggaagaaatgcaggtgtcctccatatggcttcacttttaaaaagcaggggaggaagtgagcaagggtggtggcggggggtccatgctagctcttgtgccttatctactgggcaatcagcttgtgactgctggcaccttcatgggcaggctgttatctcttgagacaacctcctaaagagtgagagttccacagtgggcatgattggtttataaatcaactgttaattctcaagttgactttccagtttgagcgtgtagttagatgaacttgcactgtagggagagtccggtaatggggaggtaaaaggctatatttgcattcct

SEQ ID NO: 94881 - DNA, 410 bp, Homo Sapiens
gaaggtattaccttattggggagtttagaaggagccaggccattatgtgttctccctctttctcggttcattctccaacagtcctgaaaaagtgtctctacagactgaaatcttcccttagaggttcattttgcatcctaggcttggacaaaaggcattaggaaaaaattggccacacacttaagcttccctggaaggatattgttcataggtctacttttttcaattgactccagactcaaaggttagagaaagaagataaattactgcccacagaagctcacagcattgcttttgtcttccggacacctctcatgaacaccaatagtaaaaaccatctttactgtcactatctcactccaagcctgcatcacggctcaataacattattaaaatggctagactgcaaa

SEQ ID NO: 94882 - DNA, 507 bp, Homo Sapiens
gttgaattaccttcccaattctaaaattataaagttggcagagatttgagtcagcgttttttacctcctttcttatggttcataaatccccctttcaatgtgtgtatgtgtagatttgaaactgtgtatctgaacacaaccatgtgtaaggatgtatggaaatgctgtgcaatgttttccatcaattcaagagctgaatttatgaatcctccactgcttatgtaccagacactttcaatgccgtatttataccctcagatgagtgttgcttctttcaaagtagccacactcggaagtggaggaattatcccacaaatgcaagcctgggttggattgccaaggatatttatcttccatctcattgggcttaggtgggctactaaactctgctcaactttttggacctcgattttctaatctgaaaaatgctcctgattaaacctacttcttgggctgttatgcaaattttatgagaaaatgttcataaagaatttatctgtgcctggc

SEQ ID NO: 94883 - DNA, 667 bp, Homo Sapiens
gggcccacgtggagaacgccagggagctgtgagagtgtgcagtcgcgttcctgctgtccggacacttttttcctctactgagactcatctggtagatccgcaggccagtcctcccaggggctgaagttgtgaaatatgggttttctaagaagattaatctatcggcgtagaccaatgatctatgtagaatcttctgaggagtccagtgatgagcaacctgacgaagtggaatcaccaactcaaagtcaggattctacacctgctgaagagagagaggatgagggagcatctgcagctcaagggcaggagcctgaagctgatagccaggaactggttcagccaaagactgggtgtgagcttggagatggtcctgataccaagagggtgtgcctgcgaaatgaagagcagatgaaactgcccgcagaagggccagagcctgaagcggatagccaggaacaggttcacccgaagactgggtgtgagcgcggagatggtcctgatgtccaggagttgggcctgccaaatccagaggaggtgaaaacacctgaaggaaaatgaagggcaatcacagccttaaaagaagacacgctgaaatggttcaggctgctcctggggtggaaattttgaccattaaaattctcccaataaagctttacagccttctgcc

SEQ ID NO: 94884 - DNA, 537 bp, Homo Sapiens
aaaaatcataatagatttatttgtgcacaaatgaaggtgtgcaaaggtggctctgggaagaggctggtatagcctttaactctcttgaagcatcgctatttccctgagacctcctctgactccccaagctgctttggctccatgggtacgttgatattttaagttgattagtacttcagtggagaggtttgtctagcacgatttaagagttaaccagtcatgtgttctactcaagctcccattcacaagaagctgatcacatggccacaacaagcttcaagggagactgggaaatgtggcctctagctgattagccatgatgcctgaaagcacctatggagtaggggagaattttcttacactcaacctcaatgcctactcagttgctgccctctttagaaaaagaagaaacatggaattgtgtaatatttgcagcatttcatgaaccaaagaaattttgcccaagaggatgggtaggttactctctgattgctagttgatttctgttgcttgaaaggacaggaaagtgaaaagttc

SEQ ID NO: 94885 - DNA, 460 bp, Homo Sapiens
ggcacagggccgaactgccacaattcccgcattgaggcagtggagagcttggctggacaatgctactccagaagcagagcccctgactgggtgccccagcagcctaggcccctgatgctgtgtgggctgttaccacgggttctaccggtaccctctgaggcagtggggaaggaggccagctcccagcctgatatctgcatcctcaccctcgccatgatgatcgctggcatccccaccgtgcccgtcccaggagttcgggaagaggacctgatctgggccgctcaagctttcatgatggcccatccggagccagagggtgctgtggagggggcgcggtgggagcaggcacatgcccacacagcctctgggaagatgcccctagtgagatctaaaaggggccagcctcctggctcctgcttgtagatggatgaaatagcaccagatatgtagggtggaaaaa

SEQ ID NO: 94886 - DNA, 602 bp, Homo Sapiens
ggcgggatgtcagttcacatccttggtgtgtgtaagtaccgatgcacgccaccaccatgcctgtgttacagcagctccatgatggttgttgcccgaggttaatgtagttgtttgttagacctgtgtcttacacatttctcagagtaggatattagtattataatttaaagctacgacagtcacaaagtcacaataacttagaaacattgcgcatattcttctgaaatagcacttaaaaatgattagtgtcagtattttttcacttgggtcaatcaaatctgtaacactgaatccaagctattaaacaaaaagtatgcaatgaatgaattttgtaaatgaatagagagtatcagtttacaataatgttcttaaaacagtatcctctggatagttgagtatgggttagaaatcattgaaatggattggtcagaaattgctatctgtgtaaaatgtctaccagtagccagatgcttccagagttcttaatgcctctctggcatttcagagccagcatcccccaactcccacccctctgccatcacccagcccaaacacatcagctttcaaatgagatgatagtaaatgcggcaatgttaagacaa

SEQ ID NO: 94887 - DNA, 427 bp, Homo Sapiens
aacttcgggggtgtggaggaggtgcggctctagggacaggtaatgtcggcttccaagtgatgccctcctgccactcccctgcgatttataagggaattttaatttttatagtgaatctcaagggatcatcccatccttgaccacagggacaagaggggccccctcgccccagccccaccccacatggagctcagggggaagcagggaggggttcccaaaagagtcctgcggaggctaggagtggttcttgatgctcacctgaagcccctagacgctgctatggtatgcggctcctgggcccccaatacccctccgcttgccgctgtagcgcacccctgcagtccagcgtgcatccaccccacgcacgccccgtgctgtgttcctggccctgcccatggcctcaataaactctctgcttggtgtgaaa

SEQ ID NO: 94888 - DNA, 195 bp, Homo Sapiens
acaatggtggaaaattagaagtcattgtgaaaatgatgtctacctgccttgctgatgagtaggatgtgatttggctctttaggaaactgaatttgcagaacttaagaatattgatttataaagggcatggccattgacccagtccatcttatgcaaatctggatgccataaataatatttaaaaatgaaagtatt

SEQ ID NO: 94889 - DNA, 512 bp, Homo Sapiens
ctctaattaaggaacacttcccaaaatttaaagtgctcatcaacacctcccaaggatttttcaccatgttcctttagctgtttagccattttaaaggcctggctaaatttcacattaaaaggttttaaaaatttgtttagtgtattttatcagtaaagtgttttttttctctcagtcccagaacgaaacctcaggaagccaagtcccctgaagcatatgtagccctgaatgacgtggcctttgttttgtcttttgcatctaggtctccagtcatgttccataccctgtagcgttacatgtaaatatagtcaatgtccctcagccagctgccgcagccattcaggtaagatcattgatcattcactgttcaaagcaccacttttaagaaatgcttatttctttcatctaaacacatatttttacctgagcaactaaagtaaaaaggaaagggaacatggagaggagagcagagtcttggccagcaatctattaatcttgtcttctagaatgag

SEQ ID NO: 94890 - DNA, 428 bp, Homo Sapiens
cagcctacattgcagtgagagtaccagcaaactgaagaatatggttctgaaagacttggtcaatgacaaaaagaacggcaatgtctgtactaataacatcagcatgtatgagttactgaagggcaatgaaaccatagcccgcttgcaggctctggccaagcgtactggtgtggctgtggaaaaaatggacctctctgcttctctgggtgaaaaagacaaggatttaaaactgcattgtgaagaggcagaactaagggactaccagctcaatgtacagctccgagaggtctttgctaaccgttttacacagatgtttgcagattacgaagcatttgtcattcagactgcccaggacatggaatcctggctgaccaaccgggaacagatgcagaactttgacaaagtaaaaagaaccatagttttccaaa

SEQ ID NO: 94891 - DNA, 1027 bp, Homo Sapiens
  misc_feature (771)..(798): n is a, c, g, or t
gcggccgcccgcccgccctccaggaagcctcatcccggtctccaccattcccccaagcgtggtgtgcctcctgggcaccaccccctggggtgaaccccggctcagtctcgggccagggagtgagcgagggtggagaggcgggatagacgggcagaggggaccgcggccgagccaaagacgtttccaactccgggagctcccgccggtgcgggttcccaggatggcgtctggcaggcggggtggctgggcttatagacaactggctgggcggcgcggcttggactttgccaagcgtttcactgagccttccttttagcgatgccgcttcccgggggccgaacgctctgccttgtgaagcgccgggcttgcagccggcctgagaacgagcgcccactcagctctcccgggctttggcaagaagaggtgcaggctccttggcccccatttcctcagagctgccaggccaagtctgtgcggcttctatcgcgtcccagcacctgggcaccggctgaagcagtttgctttttggcaatggtgattcgtatcagctgcaactcttcctagtgtgtgtggttttttaagcccctttcctccgctctgctcagaggtcgcggctctgagtcagaggaactctatgttccctgtgcctggtattccgtttttctttaaggggagtcaaacattgaacggggggaacaacgggggtgagatttatttccccattgttgaaagaagggaacgtattgacatgccaggaagtaaaacctgtannnnnnnnnnnnnnnnnnnnnnnnnnnnaacagaaaaacgacgactttcacctttcactatgttgctcttgaaccaggaccaggaatgaaagttactgggagatcacttcgaaggatttggcacaaattcgagctgtccgactctgagaatggcaagtaaacagctaacagtcgccactatgttgaccaggctatttgaccctgattcccagaaagttctacaaggggtatagactgaaaaatgtgacatggaacag

SEQ ID NO: 94892 - DNA, 959 bp, Homo Sapiens
aggagcgagcctgggtggcgaattcggcacgagggcggtgtccagagcgtggccagttctcgtctatctggctgcctttagggagcggtgcctagcgttggccaatagttggctgtcgaaagtgccggcccccgcgccggcgcctgcagcagccgggtgggaaggctcaagatggcgtgcttgttggagaccccaatccgcatgagcgtcctttcggaccaggaatgaaagttactgggagataacttcgaaggattttgcaacaaattcgagctgtccgactctgagaatggaagtaacagctagcagtcgccactatgttgacaggctatttgaccctgatccccagaaagttctacaaggtgtcatagacatgaaaaatgctgtaattggaaacaacaagcagaaagccaatctcattgttttaggagctgttccaagattgttgtacttgcttcagcaagaaacctcaagcacagagctgaaaactgaatgtgcagtggtgttgggaagtcttgctatgggtactgaaaacaatgtcaagtctctactggactgccatattatccctgccttattgcaaggactactgtccccagacctgaagtttattgaagctggcctccgatgcctgcgtaccatcttcaccagtcctgtcactccagaggagctactgtatacagatgccacagtgataccacacctcatggcactgcttagcaggtcccgctatacccaggagtacatctgtcagatcttctcacactgctgtaaagggccagatcatcaaaccattttatttaaccccggttgcagttcagaatattgctcacctactaacctcactgtcctacaaagtttcaatgcaagcactgaaatggttcctcagttttacctttttgaaacccccaggtatccatgaccctgggaaaagggtttgggtggagggaaaattgttc

SEQ ID NO: 94893 - DNA, 766 bp, Homo Sapiens
  misc_feature (184)..(195): n is a, c, g, or t
aaaatcaacacattacaaaatatttctgtacagttttatgcatattatgatctataacaaaatagttatttttaaaaactatatcaccacatgtctttgaaaacaatgaaggggacggtaataacttagagtgaggcctctaaaacaaatacccaaacaaatgctattgacaacataatatttnnnnnnnnnnnnggcaaaaggactacaaagacaattgcgcacaattccagtgaatttcctatgaaaaccctggggttgtctttggcctccatcagcactggagcaatggaagggtaaagaatagagtctgaaggtagggaaagggtgattcctttgagaacactacccatctgctgggaatatttagtgctatcactttccaggcaggaaggacgaagagataaatggagaacgtctcctgatttacccttgaatgaagtacatataaagtcacccagtcttgggggcaggggaggtctgcaaagccttttcaagcactctgccgataattaagccagcccattacagcagcagtatgctctgagagagtgcttcaggagttggctgagctttagatgagcacccaagccttcattttgcccataggaaaaatataagaacatttttcttaaagacgacatttgtaagcaattcctatagcatctgccaactacagattggcagccccttccttaggaggctgccacagaagcttcacgatgctgtcttctctgatgttggtggagaagggagggaaaagttg

SEQ ID NO: 94894 - DNA, 418 bp, Homo Sapiens
tctgaacccgagctggagctatccgactacacatggttccacgggacactgtcccgggtcaaggctgctcaactggttctggcaggggggccccggaaccacggcctcttcgtgatccgccaaagtgagactcggcctggggagtacgtgctgaccttcaacttccagggcaaggccaagcacctgcgcctgtccctgaacggccacggccagtgtcacgtacagcatctgtggttccagtctgtgcttgacattgccgccacttccacacacaccccatcccactggagtcagggggctcggccgacatcacccttcgcagctatgtgcgggcccaggaccccccaccagagccggccccacgccccctgccgcgcccgcgtccccggcctgctggagcgactcgcccggccagcac

SEQ ID NO: 94895 - DNA, 463 bp, Homo Sapiens
tgaccagcacgtccctgactgcatgtgagaaggctttctccgactccagcaaaagagccttagggaggagagtgagggctcccaatcacacttctcagtcgatagaggtggaagtgtttagaaaagagacagagaaaggaaaactcaacaatgcatggagaaaagccctgaatgactcctgaggcggctgtacaggcccccactcaggacgccgaggccgcttgcacggggttccactgccggtgtgtcctgtccgcaacctgtgtgattcaggcccccttggctgggctgctaggtccctcagaggcccctctgtccttagcacagatgcctgtcttcccaaggaattcgagggaggccagcagcatgtgaatgcccacaccatgctttaggacgcggaagatgcttagagccaaatgggaattctatgaatataatgttaataaaaattgatttttgaaaa

SEQ ID NO: 94896 - DNA, 771 bp, Homo Sapiens
  misc_feature (388)..(388): n is a, c, g, or t
  misc_feature (396)..(396): n is a, c, g, or t
  misc_feature (424)..(424): n is a, c, g, or t
  misc_feature (572)..(648): n is a, c, g, or t
caggcagagctggattcattcgtaaaggagcgatggctggtttacttattcaggaggaaacatcctacctgaaaggagcttaaaggctggtttgtcaccctggacacacgtggtagacatcgggacctgctctgcagctgaatgcaatttagtccaaggtttgtttactgtgtctggactctgccatcttccactctgcatttcaattctgttgactggatactggatctgcaaaggacagtttctgaaagtgaagaatcacagttcattatttctaactatttcatctaagatttgaaaggaaaaaatcccttctatgaattacagttggccctccgtatccatgagttctgcacccacaaattcaactgacctcagatcaaattantttgaaanagcgtatttgaaaaaaatacaacaatanaaaccctacaaatgtaaaaaaagtacaatataacaactatttacataacatttatatatattactatgtattataattaatctacagatgatttgaagtatgcaggggatgctaggttatatacaaattctacactgttttagatcannnnnnnnnnnnnnnnnnnnnnnnnnnnnnnnnnnnnnnnnnnnnnnnnnnnnnnnnnnnnnnnnnnnnnnnnnnnngacatccattctgcatgctatatattttccttttaattattattgctgtttcggtttccctgaaaaatacaacatgttttaaacttctctatattataaatctcatttaaaaagtgttgaatc

SEQ ID NO: 94897 - DNA, 371 bp, Homo Sapiens
gaattctttctggcaactagattgtcctgagatcagaacaatctaatccatacatgtcctaactttgccttctgctgtatcagtatctgcaactaggaaggacagagaggagacctggcctcccctggatgtttatgagctgcagatcttcagggaacaaaggctgtggacatgccattgatttgggaccagtgtttttgagtatccttaatttttggtatcatctgtggcagataggctgctctccttaagtcatggcttcccggttgaaacaagacatgagattaacccacttttttcatttctaaccaaagagaaggaaactttgtaaagtcttaatagattaataaaaacaaaagcttctgtggaaa

SEQ ID NO: 94898 - DNA, 609 bp, Homo Sapiens
tttgtgtgtggttttaccttgaggacagccaaagttgcagcattaataccaggcagctaaaatgcaaattaaaaaatctgccatctttcaagccagaagaacaaggaaaaggagactgggagcaacaagaacagtcagagagtgaggggatggggaaaacctggagacagctagagaaaggtaacccatgattccgtgtttaaactcagtccaagtctctggctgacccctgtaccatatgggcaagagaaactgaaagcagtttgcagctgaggcttaaactaaagaaaataattgagataagatccactgccctcctgtaggtgtgacagtcttcaatttggatccaaacaagtgaattgcctgttaaaaaaggaacaccaactcttttctaagcaatataacagaatctagaatccaacataccactcgcaatgtcctgaatataatcttaaattacttgacttacaaagagccaggaaaacgaataattctcaagggaaaataaatcaatggaagccaatcccaagataatccagatattgatttatcagataaggttgtaaaggatacataaccatgttaaatgagttaaaaaaacgtacactt

SEQ ID NO: 94899 - DNA, 447 bp, Homo Sapiens
cagtaattagcagaattcaagggtatcttgaattttccctctaagtttgattttcttgtggttttattaaacagatacagatggaggcagtagcatggtaacacctcaaaatcaagcatccagcagctgaatccgaaaaacacaaggaacaaggtggtctcaaaaatttggagtgaagccagaggtgaagtgagactttctgaagctgcaacaatacctctactctacttaaagcaatttctggtgtcatcaccatgagaaggacataccaccccagaataaggagaggcaaatggattagacttgaaatgaacccagagcctggattcaagcacagccaaacccagcttggatctcataattcccagtcctgtgcagaagaaccgtgagacctacaatatatttccataccttctttcaagaaataaatgctcaattttgtaagac

SEQ ID NO: 94900 - DNA, 402 bp, Homo Sapiens
ccactgcaactccaagccatcctggttcaccaactgctagaaacacccagattttaactttccaactcacttcttccaagaagctcccccgggtatatggccacctcctctgagaccacttcatcccactgtccattgtcaagagcatgtctttcactcagagaatcaaaacttttgttgaagacagaccttacaccatctggcctaatgatttgcaacttgtttttcagagccctttctgcaagtaaaaacatatgtgaaaccccaacatgatggataaaatgaataaaatgtagaatgggatggggcagaggagccccaagtcacttcagaacatagttagaaaagataatatcttgccctcattttatgaataaagacattgctgcccaaagatagaaa

SEQ ID NO: 94901 - DNA, 286 bp, Homo Sapiens
tacttcattgataactgaaaattccaggaggacatcctggattttgttctataccaactcttcaaaacagttcctggcacacaggagccattagaggaatatttgttacttagatgaataactgaatgaatggaaatggaaggccagaagaataaaatgatcttcccaaaggcatcactaagaggcagaactggactgtgtgatgccaggttcccagtccaaactttttccatcactttattgtttttaggtgagtttcattaaaccagaaataagcaatctaaaa

SEQ ID NO: 94902 - DNA, 957 bp, Homo Sapiens
cacgactgcgaaggcaagggggcaccagctcaggactgcatctgcctgccatttcccttccactcctcctttctggagtctgacattagaaagccagcgagaaggaagattcaaacaaccaaccctgatttcctgcttctccttttcatgagtgttcctgtggtctctgcacctcctttctgtcccccggcagagggcagtagagatggccggcccaaggcctcggtggcgcgaccagctgctgttcatgagcatcatagtcctcgtgattgtggtcatctgcctgatgttatacgctcttctctgggaggctggcaacctcactgacctgcccaacctgagaatcggcttctataacttctgcctgtggaatgaggacaccagcaccctacagtgtcaccagttccctgagctggaagccctgggggtgcctcgggttggcctgggcctggccaggcttggcgtgtacgggtccctggtcctcaccctctttgccccccagcctctcctcctagcccagtgcaacagtgatgagagagcgtggcggctggcagtgggcttcctggctgtgtcctctgtgctgctggcaggcggcctgggcctcttcctctcctatgtgtggaagtgggtcaggctctccctcccggggcctgggtttctagctctgggcagcgcccaggccttactcatcctcttgcttatagccatggctgtgttccctctgagggctgagagggctgagagcaagcttgagagctgctaaaggcttacgtgattgcaagggttcagttccaaccatggtcagaggtggcacatctgctcagccatctcattttacagctaacgctgatctccagctccagcaatggaacccaatacagaggacgtggggccctgtgtcaaagaagccgagggccaccaaagggcagccaggccacagtgacttcttagtacaag

SEQ ID NO: 94903 - DNA, 401 bp, Homo Sapiens
tgctggcccctggtctcatccaactgcttgatagatgaggacattaatgctgagtgaactgacttggccaaggtcctggttcttaaagacaaggcttctcgacatgtggaactcactgccaccatactgcctcatgttccacgtaagagccaatgattgaacatggtggcgttcctgcaggacctgggtctcctcaaccaggagatgctgcctcaagaactccccagaagcctggctgaaactttcttggaataaggctacagtctgagactcttcctacttaatcctccttcacaggggtcagacctacatcatggtctgatggttttcccagcgttgttggcttcttccttcttctccttcacaggcagtgccctcaataaatgctttgctcatctaaa

SEQ ID NO: 94904 - DNA, 918 bp, Homo Sapiens
  misc_feature (793)..(867): n is a, c, g, or t
gggagctgaactgagctgaaatcctaaaggccgcggagtcggcggtgttgtaggtagcggtaccttgagtggcaacagaattcgattaaattacaatgggaaacatttttgaaaagctctttaaaagtctacttgggaaaaaaaagatgcggattcttatattgagtttggatacagctggaaaaaccaccatcttgtataaattgaagctgggggagactgtgcctgccgtccctacagtaggtttctgtgtggagacagtagaatataaaaataacaccttcgctgtctgggatgttggcagccacttcaaaatcagacctctgtggcagcattttttccagaacacaaaaggtgccagaagcccaggaagcacacatcaaggctcacttgccagcggggtgctgccaataaaatgtagtcacgtggaatttggaatgtggaaaggaggtagaagtcatcctttcctcccccatagcagcaggtgtgcaggctctggtggtcagctggactccatactcccccaccagtcaccagcctggggaccgtggggctgcaaggacctcagcagcggtttcccaagtttcctgacttcttccatcctctggaaatcagctgtggtaaagtagcctgaaagccagtggtgcaaccccatccccacaaccttcaccaacctctagcacctccagtgataagcactaattgcctatatacaaccccttttttgtttgaaatatctagaataaatttctgttttccctatctggggtagtgtaacataagaagaaatatnnnnnnnnnnnnnnnnnnnnnnnnnnnnnnnnnnnnnnnnnnnnnnnnnnnnnnnnnnnnnnnnnnnnnnnnnnnaagagcattgtccttttgttaatttatcatttttcttttctcctaggtgaa

SEQ ID NO: 94905 - DNA, 1261 bp, Homo Sapiens
tttaaaatgagataatacattcaaggaagaaactttttcttcttctctgtgtaactgatgttaatataaccccaatttcctttatgacaaaaagtattacccttgctgagttctttgacttccaacgaggggaagagaagatagcgaatattaacagagtattcagccaaacgtgatccatgatgagggacactataaaaaattattcctctggtattgttgataacagtactcatttctggcttcgtagaggcttccaacagcatctttttgacaagaagacctcccatgctatgtgatatccaaaccactggcctatccccaacaccagcagctctgagcttcctaagaagttcgttgcttctgaatgcaatggactttctgttccatagggcaccttgctctccagtcgctgaggctggtgtcatactccacagatataattcggagagcaggacagtcttttgctaaccatgtcttgggccagcacgtcgtatatctgtcttcatcctccataggtctcttcaattacagcctgctcactgtcctgctggcgccatgttttgaatgctgctcccataaggccatgaataaaaaaggacatctgctttaatgggctgacttgttcgatattgggggatgcagcacatatacgccatcctgatatttcttcttgcacagtttctcggtctagatttgccaggattctggcagcgtgtgaggactccataatgtggggagatttcattgcttctgccatgatggaaacccagcctgagcgaactatagaagaatgaagatgttcattcaaagccatatttccaatgacacgcattatatttctctgtactttagggcagtccttgtgaagtcggtacagcctctgaagtagctgcaggcctccatttgcgttcgattttatcacaatgtgtggatatctcagaatgttttactatagcttctaaacagaacatttccactgttgctgaaggaacttctccaaaactttcagcataaggaagtccatttcctccaaaacaccataaaccacccttctgagcagctagactctgactgctttcactaagagccaaagatgtaaaatactggatacactcatctagctctgtttgaggtaaggaagccagcaactgtctgagctcttcttcagtggaagaatcttcttttaaagatggcaaaggcctcgtgccgaattcgccacccaggcctcgctaccttaaaccgttaggttactgcccgt

SEQ ID NO: 94906 - DNA, 501 bp, Homo Sapiens
ggcgtgtgtcctaaaataaagcatttgagctgctgctacagaggaacaatcaccagatattgtgaccctttcaaatgcccagtagtcctgggaggcaggcagggcaggtgttattatcccttctttataaatgaggacacagaatgaggcagtacaagtgactctaaacacccccttagtgccacatcagtctcgccacctcccaggactaggtgtcacctgtattgacctcttcccctctgattataaaagtaatatatgttcattgtggaaagtttggaaaatgcagaaaataaaattaataatttaccccaaatcccaccatcctgagatcatcactgttaatgttttagtgtatttccttcctgtattttttctatgcatatataatttattttactacaagattgggatcatgctgtatttacagatttgtatcctgctttctttaacatattgtgagcattttcccatgtcaataaatattcttcaaaaagtaaa

SEQ ID NO: 94907 - DNA, 853 bp, Homo Sapiens
  misc_feature (102)..(141): n is a, c, g, or t
  misc_feature (543)..(686): n is a, c, g, or t
tttggaagtcttaaaacccatgtttaatacttgcataatagtccatccagtagtgaagcaaaatttcctaaacctaacccttattactggacatttaggttnnnnnnnnnnnnnnnnnnnnnnnnnnnnnnnnnnnnnnnngtcaacctaattccttgaaaagaatccttaggggcaatgcctgcctcagccagcatggaagtgtttccatgtttgataagcattgctgcatgctggcctatgcaggctgagccatggtcatgccactggtaattcactgtaccagcttccccatgaccttggcagcactggaagttattttaaaacacaaactacagtgaggtgggaggaactggtttaataagcataaaatagtgtttgtttttcttgaactgtttacttctctattattactttccccaacttattttgaaaatttttaagcttacagagaaattgagtctcatatcctcttcaccgagatgcagttgttaatattttgccatatgtgatttctttctcttaatacacacacacactttnnnnnnnnnnnnnnnnnnnnnnnnnnnnnnnnnnnnnnnnnnnnnnnnnnnnnnnnnnnnnnnnnnnnnnnnnnnnnnnnnnnnnnnnnnnnnnnnnnnnnnnnnnnnnnnnnnnnnnnnnnnnnnnnnnnnnnnnnnnnnnnngtacatatgcagatttccctaataatcccaaaatgtcttatacagctgttttttaaaatctaggattcaatcaagattcacacattgtatttgtttatcacatctctttactgtcttttagcctagaaaagtgtcctgatgtatgtatttatttatttttgagacag

SEQ ID NO: 94908 - DNA, 537 bp, Homo Sapiens
  misc_feature (19)..(19): n is a, c, g, or t
ccttcttctgacatcaagnaatgtaacatttaaagactacaagataaacactctgccttgggattaaactttatttataaagggtcattgctccataaagtggcccagccaaattcccctgatgccaggttgccagcccaatttcagtggtggtagactcccaactaccactattccttattcccagttgaaaaagggggaaaaaaatcaaattaccttcccccaacagattaaaaaggaaataccaaacagccacaaagaagctcgaaaccttttctatcgccttttaaaaagtacacctggcatccctcgctctatccagttatcatttatttctattgcttgctgaaggcgctgatctggatttgtgatcctatggcagagatttctagtccagaagccactagtgcctctcttccagggactatgcctacatcggaatgtattaccggtgttccttgggtttgaaattaattacatcctgtttatgaagaactgaaagcaattaaaggattcgctttcatgtttcagtaaaaa

SEQ ID NO: 94909 - DNA, 341 bp, Homo Sapiens
gaatgtatgaagagggcttggctcagtgcttggcacttgtgggtactcaataaattgtaggtatattgttactaattatgagtaagactaattttatcatgaataatttaatcatcattgccttattctggagatattgatgacataaatatcttttcattgaggcactgtgtattagagacaataaacaatgattcacccttcaaaagcacttttcttatacgtaatctcataggaagagcattatttcttgggatgtggtgtgaatgaatcaacatgtacaagactgacacgttgtctggaatttaggtgcccaataaatattatttaaatgaacgaaa

SEQ ID NO: 94910 - DNA, 704 bp, Homo Sapiens
atgtgaggtttaggtattgtcacccccgagtttaaaacaggcttgaatcccaactcctttggtccaccttaagcccagtcttaagcccaaggaacactggatctagcaatcacaatgatcccggggactccactgcaccatggggcactcgcggctaccacccaacgcctgtgcggcattggagattcccccatgatgaggcccagatagatctgtaccaccagtgctaccatccccacccctacaccacttccacacaggggcctcatggcatggtcagggtcccagctgtgggtgagagcagggcactgtccagctgtccactggggaagtcaagatgtcctaaggcccaggccagggcatctggagtctgaaggaccctagttcctagaggcatctggcagcaagaaggtgaggcatcagggaacgggaatcaggctgggactgatcagaggtgaagggacagagagaggagaggaggaagattgagctgggggcaacagccaagctcacctgggcaggtctctgccacctccttgctctgtgagctgtcagtctaggttattctctttttttgtggctatttttaattgctttggatttgttaaatgttttctgtcttctgttaagtgtgttttctctggagatagaatgtaaaccatattaaaaggaaaaagtttcagacaagcaattacccagttaaa

SEQ ID NO: 94911 - DNA, 543 bp, Homo Sapiens
tcgcctttcctcttctccctcccttgttgcccggagggagtctccaccctgcttctctttctctacccgctcctgcccatctcgggacggggacccctccatggcgaaggcggccggggcccgctagactgaagcaactcgccggagcgacgaggctggtggcgacggcgctgtcggctgtcgtgaagggctgacgggtgggatgcgactttgggcgtccgaacggctgtgggtcgctgttgcccccggcccggggtcctggagagcggaggtcccctcaatgaagggaagacgggggaaaccggcgcacctggtgaacctgaagttccggctcctccgccccgcggcggcgaacccaacgccgaggaaattggttgaaattgctttccgctgctggtgctggtaagaaggcattgtcacagcagcagcaacatgtcgactcgggacagttttgagactcgatttgaaaaaatggacaacctgcttgcggatcccaaattcgaatgaaatccgaatgttttgctggatgaatggaatgctttg

SEQ ID NO: 94912 - DNA, 319 bp, Homo Sapiens
ccttgggaagacacaaaaccatcaccactagaaaatgcctttgaccaagccttggacagatgaagacaaagcggagcacacatcacgaaaagtgtctgtctcatccgcagcctggcctacccttcccccatcaaggtggagaaaatcaactttccataaattatgcagccttaaagcaagtgcttcactatgctgggagttaacaacctcatttgtaaaatcagtggatgagactatcctagaaaatgacctttaagaccttttccgggtctaacttacactttactaagagtgccgattaaataaacttgtgatgaaa

SEQ ID NO: 94913 - DNA, 435 bp, Homo Sapiens
tgtcaccctgagaataggttggttgatgctggatgaatattttagcttatgatgtttaagatattctaatattttattaaaagctttcttttctctctgtaactaagagttaacagattaaagcattattggaattgttcaagtcttgtgaaagtatgactaatttctggcattgacagctgttaacggtagaatttgagaaaacttttaacatacaatcttgcattaccagctcaatgtcatatattaaattttatgtcatatattaaattttagagtccatataaaagcataatgcagaaataaagctaaaaaccccaaatttgttaggatattaagttttaatacatagaaaaatgaaatttctgccaacctgtagttctagttcaaggattggtaattagaagttaacttggttttttaatagaacacaac

SEQ ID NO: 94914 - DNA, 619 bp, Homo Sapiens
  misc_feature (16)..(16): n is a, c, g, or t
tgcagggttgcctagnaagccgatgatcactgtaaagttccccaatgaattaagtttgggccaggagatactaaaggatacaaaaatggcagactcactgctgttctggaggttgtgaaaaatctttttaaaaattatcatgaagaaaattcaggtctccaaatgtacctctactcgattaactaaggaaaagctgtttgtaatctagggaccgcaatagctgtcacaattaatactgagtatgtgctgttctatcatttttggcaaggattggtgtttcatcatttagacacatcaggtacttacattgcagtgtcatataatttaaattggcattgtttaaaatgatgaaaaaataacaaagtaccaatcagaaactaaattttagtacagtgggaaggattcatccattgaattggattgatagaagatgagacagcaatttaatagagttttgttcatcttttcctttcttggttgactaacactgacatttttgaggtcttttatttctacagaacgttctctgcagtctcctcttcaaatacggctcttggctatgcttgtgaattttgtgaatatacaattatttcaaattaaatactaactgaatgtgaaa

SEQ ID NO: 94915 - DNA, 306 bp, Homo Sapiens
atcctctctatctggtggacgcattttcagcctggcatcaggaggagcccaatgtgcacctggtgattgtgggtcctgaaaacattgaaagaaaaacttctagtttgatgctaaaattctggctaatcaagagagaaggcctcagactgggagccatgagcaggcaacaacagtatctagaaggcatttaataatgtggttttctttttcattgttttcattctgatgatcacatctcaggtacagtgcttgataccagctttccaattatgaaaattgcctttcaaaataaattgacttcacaaa

SEQ ID NO: 94916 - DNA, 713 bp, Homo Sapiens
gcatcctgtgactgaagaaccagattggcctgagcttttgatgcccgctcaggtgttcagaatccccagggctgtgtccttgagtgcgcacatcatgtacgggctggtgaaatgccagcccaaaacagatttttgctaagacttacctcaattagatatacttcctaggagggccatgccattgacccattgcccagggaacttgcagactactggagccaaccccgcaccaggtctcatggccagtaagactgtcatcagtcctaatcatgctccctttggtttggatctcttgtagcaccaaggggtggagggtaccttcagaggtcaagaaaatggactggcatggcaggcacatgcccgccagaggactttgtcaaatggccaaggcattcccatcaatgccaggtgtcagcatactgcagggatgcaccgagatacacggctgccagtgaaaagaagatgccctctgacttgccaccatgagcagtcaaaacgaaacttgtcttggattaggctgttttcgtgtcaggagaaacacagtgtagctgctgacttcattgtgccccctcaccatcctaaggcaattcaaaaagagttttcgggttgtatgcaaataattttatttctaaatgaatactgttttagggtaggatttgggagaacttaagccacagtatattttccccaaaataaaagttataggctacaaa

SEQ ID NO: 94917 - DNA, 471 bp, Homo Sapiens
  misc_feature (17)..(17): n is a, c, g, or t
ctcatgctgtatttatntataccttgtttaaaattatttattgattatttattggtgtcatatcgcccctaaactgggacaggatctctaacggactcatctttgtgccacaacatgtaagcccaataggcaggtgctcacatatttgctgaaggaacagagaaagaactgcggagaaagacaaaagctcctctgaagttttagactatagaagcaaaaattatagtagcaaaagatgaatgagaaattctgttctagtcccagtgaagcaggaaggaaagggttgcaaacttgaggctggtaaggaagaaataattactgtgaatgcatttagccactcccctctactcaaaaatactggtaaactctgatttttatatttgtttagaatttaaattagaattctgtatctttattttttggaattctgttgtcctgccttagtttcttaataaaaagttaaacattaaa

SEQ ID NO: 94918 - DNA, 503 bp, Homo Sapiens
  misc_feature (27)..(27): n is a, c, g, or t
cactgctcttgtttttggttctcaagnacaggatgttgtctcttttactgtgttcctgtcagccctcttctgtcttcacttcttttctcacctccttactctccacagtgcatggggcatccctcctcactcccttcagtcatactcattagaccaaacccaactggaatcagtgcagccatccaccttctccccccaccttgacccactgtgtgctggtggagacaatcacacctccagagtttgctgcttggagctcacaaggctactgctatttcagacacagctgatgatctcacctcctgcattagagtgaggatgagccctctgagaggaactcctcaacttctaggctcccacctgagattccattctgtcgcactagtgtgttaaatccagttcttactggcttgcaagagtggattgttaaatgttcaggaattttatgagccagttgttaaacacggttattactaaaaattaaatgaagactgggtgcagtg

SEQ ID NO: 94919 - DNA, 475 bp, Homo Sapiens
cacagttaataatcttgtcattttatcacaaattgatatcactttacagaagcagaagtggggagtgctaaaagcaataccgaaagtcctggggctaaaaagagtgtcttgacagatttcagtgtaaaatttcaaatcttccaaaggatggagtaattctgggaggatgagtgaggatgaacaacagagggtggcccaaaagaccacaccagaaaccctgtattctcctggagtagagctgaacaaggttagagagaaagccccaacaggtaggacagttgctattaggctttttaacagatgggcaacatcctttccatctcaacatgtcagaacaaaggccagctagtcagcaacatgttctaagaaccaaagcaagaaaccaaaattcaacatcattgtaacaaaatcccccaacctaaaaagcgaccaaccctgaaaagatcaagactctaaggtgattaaaaagttgaaa

SEQ ID NO: 94920 - DNA, 500 bp, Homo Sapiens
tcaatcctttcccatggtaccgtggcagactgtgctgttgttggcaaggaagatcccttaaaaggtcatgtccccttagcactctgtgtattgagaaaagatataaatgcaacagaggagcaagttttggaagaaattgtgaaacacgttagacagaacattggccctgtggctgcttttcgaaatgcagtgtttgtcaaacagctacccaaaaccagatctggcaagatcccccgatcagctttatctgccattgtcaatggcaagccatacaagataacttctacaattgaagaccccagcatttttggccacgtagaagaaatgctgaagcaagcataatgagtttgtcttattcctattttgagttgatttaatttcttaattgaaattaaattatttgagttgtttctcagaaataaatatttcagtagaaattacttgcaaaatgaaatgtgaattgtaaaacttggcctaaacaaatctaatgaaaacatgtg

SEQ ID NO: 94921 - DNA, 521 bp, Homo Sapiens
ttcacattctatctgaagtgcctccaagcctgccctcttcttattcacatagtgctaaatgtagtcacgtaatttttatgaagccaactatgctttgaaaggcccctgtaaagagactgccagactgtagataaggaccttacaagccttgctatcactttcattttatcttgttctccactactcttttttataccaggttttgatcttttctttctcattctttccataaacataagtcaaactccacacagcccaagtgaactgcatctgaattggtaaaactgttttaaaaagtataatttacccaatctcttttctctatctcattaatattgtctatgactacatgaaccaccatatatttaaacattttatctgagcttattataaaataccttgtacaaaccaaatatgttcatgggtgtactgattttgaggatgatgatatgattgccgaatcgacttgaaacagtgttctgcataaagacacctaagggactaatctgacaagtgtctca

SEQ ID NO: 94922 - DNA, 1395 bp, Homo Sapiens
gatgacaaccaaaagctgggactccacacactgaatgcaggactttaggcggggggcagagagagaaggtgcaggggcacaagaggcaagggtatgaagtccctccaaataggagtggagtgccaactgccctgcctcgctccaaacacctgactcctgggccatggcaagagtccagtccattaagtgcagcgtgcaatactagcgcttggagtctcctgtcctcatcaatgaagcggtgtggacgggatagcagtcacctggcaggaggccttgacccctggcaggctagttgtatcggcccttgatcattgtgttcaacaagggccccacctcttgtgggttccccaaggcctctccaagcatcttctcaatgtttctcattatggccactttctgatgagctttgagaggatattcaattctcttaggggtgggagcccccttataccagaagttcacagtgatggtaatccccccatttagtaatgactctatgtgatgccaccagtacattgggatgtaaagaacatcaccagggcaaaccactgtttcgtaccaaccacattttggaaattaggaacctctcgtagtcgggattgtcaaagtccaccctggctctgtctgtcacatgggttgatgaacagggtatgcggtagaggcactcgaactgatccggagggaataagatgcatcgtttgtaaccttttatctgagcaaaaaagttctgctgctcatcatagtgagcaggtgtcacatttccttccatgccaatgagcagcagggtagaggtaagctgcccccagccacgctttccctgttgcttattaatccagttccagtgtaaaacctaagaaggccatgacaatcgtccgtgcccacagtgtcattgagcgtttgctgcagatacaacctgcgtctgtcccctcctcgctgctgtatatcctgcagtttctcaacgaactcatgaaaatttcatttcttccctgttggacctcggcttaaagttctggaaattggccatcttcttctcatcatagtacaagaacttgtgggtgctggcactgtacacagagaagtctccattgccaatattctcttgcaggtattcaaggtcccatttcagggcaggatacacaagatttgtatcggtcagcaccacaggctcctcattctcaataagctcctctgcccgggggtcgctctgactcagacgcggaatggccctagtcgggaagctataactgcgcaactgggattcatcccaggcggggccgagggctccagcctcctcccggggctctccagagccagaggccacagcctccgccgctgtcgccgccatctccaccgacgcgtggtctacgatatcccgtgtataaccggaccgtacta

SEQ ID NO: 94923 - DNA, 378 bp, Homo Sapiens
cgggaagtagggtcttaatcccatcctctggctccaaaaccaatgctgatttaataattaaatctgttactaggtaacaagtctgccaagtatttacactttaaccttttggggttaatgtctacaagggcaaccaagctctctcatatatcaccaaagatatcaaagatatcatggagtgctgggctgaaagaatcactgatagagtcaagtaagagatctcaagttctaggccccaaacctttcccaagtgacagtctgttcacctagatgactagaggaaagacatgagctcggtacagatattgaaagcagaagtcaagaaaattcaaggctgccaaactcctcagttactgagactgaaacacaaaggaaaaa

SEQ ID NO: 94924 - DNA, 371 bp, Homo Sapiens
gatcataaatgccatattcttgtaactaaagtccaaagggtctatagtacacagaggccaacatgaagagaaggcagagagccaaatatgtagtcaaccaggagcagcccagcaggaggtagcagggagacttgtgcaggatcagttggattggctcaccccaggctgagtagtctccattggctgctttcctggaccttgcctgccttctttttcctttcctttctctacacgagccccttcactcaaaaggtagaactgcaagggattgggccacaattcttcgttgattatctccacaatcttgtcagactcaatggagctgtggtttgaaaaccacccaaagaaactacggttgttttctgggtttc

SEQ ID NO: 94925 - DNA, 438 bp, Homo Sapiens
tgcagctgttctcttagttacattgccagattgtgtgttgtaaatgttgactattgcttagggacccacagtatatcagtgcatgccctctgcctggccctttcgcacaattgtaactgtagcagtctgcaaagatatgaaaggaacatctgtgagatagatactgaagactgcaaatctgcgtcctgcaaaaatggaacaactagtacacatttaaggggatatttcttccgcaagtgtgtcccaggatttaaagaatttgtcagtgtggccatctcgtcttgtgttttctttttggggaggttttgactacgaattcaatcactttacctatggatcaacaggtacccagagtatgctcttctcatgacaaatggcaaaatcccaatgagtgaaaatatttgatgtctaataaagcctcagcttacaactggtaaa

SEQ ID NO: 94926 - DNA, 648 bp, Homo Sapiens
ctcccagtactccaccagctagatgactctgctatgtgttctggggtaaaaagcccaactcaggagtcaaagcaaaaataaagatcccaaggcctggtgccctaaaacttggcatcaccagggatgaggtttggggccagacactctgatccaagctgcatgggcacagtcagtgggcgtgcacaacctctgcagggcagtcaagggcttttcttgggattttatggcttacagtggaaatccattaaattattagtgtgatgaagagaatgggaaaggttgcagcaaggttggctagcaggactgaaggtgaaaagactcactacagagaaagttcaggcagcatcagaggatgaggccaggtaagacagagaattgaaggcttcccctggctgcatatcttaaaagatgtctgagttaggcttaggcaaaatctcctccttaagagcaagttcccccttcctcctctttcttcttctttttttaatggtttgctggtttgaggaagattctgtggacctgcagacgtgccagggaagaagccagaaagtctacctttgactctaaaacaagaatggtcgataatcactcggacctcacttcattttagtttccaaattaaaaataataaaaaggtgcaactttaaa

SEQ ID NO: 94927 - DNA, 550 bp, Homo Sapiens
  misc_feature (74)..(74): n is a, c, g, or t
ctcagtgttattttatttatgacttacgctcccgtctgcccatgcaccggcatgcagtggtaattattttaganatattgttccttggtgtcagcgtagctgtctgtcttaggagctgggtcggcgttccgacagcacttcctgtccgcccttctcctctgccatccagaaccgtccaagaactgttgcctgagaccccccctctctcacacagccctgccatgctgactcggtttcccctcagagccattgttgtctgggctcgagtttctgccccaggttgtgtgctggaatcggggggtggctctcctgccacccatggggagcgccaggagaggagggtcatggaggatgttggggctctgaccccaggagtggggtggagggcggagcctgctggaggccctgccttcacagagatgccgcgtgctgggaaggctcttggggtcccctgagcgtcttccagggtggctggagagcacagacgcgccagggagccccctctgtgctcctcagagttcaataaatgtcgtggcccctcctcaaaaaa

SEQ ID NO: 94928 - DNA, 728 bp, Homo Sapiens
ggcatttgaatgcatactttaatagagtggggatagcaataaaagccagcaaatggtaaaaggttatcaatgggctggcagaacaaccaggatggtacagtgtaatcaaagccaacaatggagacagtgtcacagtgaggaggaatcacagctcaaaacttgtagggtctacgcaacactaaaaaatgattccaaccaccatttaccaaaaatttaacaaacccaagatgctttatttatattgttggtaattcttacaacactgtacaattttcattcccattaaaaaccccaagaagtctgaggcaaggatctgaacccaaatccatcagatactaaagcttataatcttaaaacgtgcatgtaacacagtcaaaaaaaatagtactctgtttatctataaggcatatgtatgcatacagtacatatgcaatgcttctgtcgcattaaaatttcatgacgagggagcatttagaaaaagaatttctgaaaagattccttaaggaggcaataatgaaaaaaaggttgagaaatactgtcttaaaactacagtctgcatcttagtagaacttggagttctaaaagcacattactggtgcagcacttttatcggtgtggttctgtaatcaaaaattcaccttgagcctgcatgcgagttctcaccaaagccaatgggtagctggccagctgaccacaggtgctggataaggcaccgcatcccagcaaca

SEQ ID NO: 94929 - DNA, 380 bp, Homo Sapiens
  misc_feature (196)..(204): n is a, c, g, or t
gtaggcttgttttcagttgggcagagttctgacaacgtttcttctgaaagtccagcccacgcatgtcaagagttgttacagttgcttcacatgtattaattcatttaatcttcacaataacctgtcaagtgagcttgaattctaaacaaaataaggcgtctgatgaggacagcagttcatccctgaaagaagacannnnnnnnnctggacaggtcttgagcctgaagtttgatgcagaagcagataggagcagtctctttcacctcttctcggggagatgtagggctctgtcctgaatgttctctcgggagatattcttccaaaattctgcccacaaatctcatcctttttgtgccaggctgtacctcaaaagacttata

SEQ ID NO: 94930 - DNA, 509 bp, Homo Sapiens
ctgagaagcctttcctacttctgtaaaaagaaactctcattccaaaggaaagaatgggaggctgaagttattgaaaatgagatgggaaatgggaagatagtcactttgcaactccaaattccaggtctgatgcttagggtgttagtcattaagcaaattcttcctgataaccaattacagagaggaaaaaagagactaagttttttactgcccactacctcctcctcccccgtgccccgctccttacccccaaccaccagtgaaggtgttttagttctccccagcacctgagctagggagaacctcccttccaataagttccttggtgaaaggtgcttttcatccactggatgctttcccagggcagttttgttgatcctccaagaacatcaagtcactgtgtatgaatagctcccacagaagtgccgagtgtaaaagaacccttcctcatgacctgatgggatgggcggcagtgtgtccacacttgggcctgacgttatacttgggga

SEQ ID NO: 94931 - DNA, 433 bp, Homo Sapiens
cgaaaagtttttcttgtggcttctaaatgcaaaatgaggcagaacttagcttgtcacataggtatattcttcctggaaccgatgcggggtcagaaaactgatggcttttaagcaagctggacgggtcctctcagcgcattcccccacccgcctggcgccaatggagctggcctggcccgcccagcccctccccgccccgtccgcgctcggaccggactttcaggactgcaggggaaagggtggacacccagcctcccgccaggtcagagcagaggctaaaaatggcccaggggagactgctggagttgcatggagttcgggagcctaggaggggtctgaaaataactgtcaaaaagtttgaagggtgtgtgttggcttggggaaaaaagagggtggagtgcattacataaaacttttgcagcttgtaaaaaaa

SEQ ID NO: 94932 - DNA, 319 bp, Homo Sapiens
agcctgcttccatatcgtaaactgccttggaaccaattaccactaccagggagacaaactattgcttagaggatgctgacaggagcagcatgccaaaattggaagaaaatcaagcccaagttttccctatggatgatgcaaattcaactactgactgaccactaggaacccaatccaacaacctggtcagttccctcggcgcaggcccagcgcctcccaggcccaccttcctcacttccgtcaagcctcatggcagcatctgcccacagaggaaagagacaaaaccattaccaataaaattgtgaagttttccaaaaaa

SEQ ID NO: 94933 - DNA, 349 bp, Homo Sapiens
gggcagggccgagcggggtggggccgggcgagctggggcggagctccgcctcctgccggtcaggtggttccagggccgccatgttgcggagactctcagagatcctagcccgctgctctccctggtctccgcctccaattccatcaccatgacacccaaggtggactttttggtttgccgttcctcacaggttgattgccacttccagtaaatgatggttcagttacattatttataaaaagcaggcaggggttgatcagatggtgactcccaactggttcaccttccaacatttctgtttattaagcagacggcataaattaataaagaatatattcattcacaaaaa

SEQ ID NO: 94934 - DNA, 831 bp, Homo Sapiens
  misc_feature (239)..(300): n is a, c, g, or t
ctcctcttccggcccctgggactggtgtcctgaagtgtcgggagtccttacgcaaccttgacatgtgcgggctactggggtccatcggcagcgggaagagacccggagagatgcatcttctgggcccttctctcctttaggccagcttacccccaaacctggctcctggggacggatgaggaaggagctctttgcagtgcaccaggcacgttgagagtggaggcacaatggaaatcctnnnnnnnnnnnnnnnnnnnnnnnnnnnnnnnnnnnnnnnnnnnnnnnnnnnnnnnnnnnnnnaaggagttggaccaatgccccctccccttcagctgtgacatcgtgcctgggaaggcgaaatatacccccagccccttccaacacacacactccagcgagaggagggcaagactggaaccgctgcccgagaggttaaggtggcttctgtgtccacgaagcgcttccgagctgtgcccagtcccgggaattccgcccagtctgcccacacttccctcggtccctgcccgtttcctcaaattcgggccgtgcgcgccctctggtgtcgcctctcacactttgcagtcatttaccaggattcccgtagggcgttttgtaaaataaactataatattaatgaaaagtataaaatgtatagagttttcaagaaactgcgttctacttccagaagatggtcactttaaccttgtaaatatttatctaaaatgatatttacaaaactgggatatattattatttgattggatatggacaactgtaaatacatttgtacctctcttgtattctaaaataaaaattacttggaacattaaa

SEQ ID NO: 94935 - DNA, 289 bp, Homo Sapiens
tttgcaaaatcataataatagctaattaattaagggatgtgaaaacaccagaacaattgctctcagaggaggaggccgggtgggaactttcagcgccatttgatgtgagcagagcccaagccaaggtgtcaccagcctgggtctggagggccccactccctgcctggttccagcctccctcaccagtgtgcccagggaggaaaggaggggacagacttctggaacattctcccgggttctctaggaggttggccacagaagcgggatttctagaggctgcctttttttt

SEQ ID NO: 94936 - DNA, 395 bp, Homo Sapiens
  misc_feature (365)..(365): n is a, c, g, or t
gtaggatggagtaacctctaacctgaggtcagtcaagtgtccttgccttttattaagaggggcctctaactcactctgtcttaggagaaactccaactcccctaagttgggcctctaacccaatccccatttgttactcgggtaccccatcacttacccaaagtcgtccaatcagtgctgcagtctattcctttggggttggggggatttcttcagtatcatcctttctgtggtttgccagaaatatgttacaggaccccaacacttacgcaaaggtagccgttgggtcaacgtttctgcactattagtcccttctgtggtcaccagaaatatgttacaaggaaagggtcccaattcaatcctanagggtaggatgcctaactttctgagaatgc

SEQ ID NO: 94937 - DNA, 506 bp, Homo Sapiens
gctgatgcctcagtttttctggatcagtagtgctgcacttccacttttcctctccctcattttactgtctttatttttagccttttttctgtgtagccctctaacctgccctttatattttgaaccaaataaaacatttcttggaatcggagctttggactacagtatacagacaaacaactcacaattttagcatatgaggctactatcttctgtggatgtgtatgtaattatacagtttctgtatttatcctgtggctgatagaaaaagttaaagctgtttaattcaccatagtatttctacaacacagcaatttattagtctgacttctcttctaaaatcaactctaaaatggtattttgtacttgtctcagagacgaattctgccatgatccttatgatctgtgttatgttgggccaaaggtgattactttataaattataaagatccctaaactctgcattgcctttggtcccaaacaagcaaatctgggtcaattaatga

SEQ ID NO: 94938 - DNA, 538 bp, Homo Sapiens
  misc_feature (159)..(214): n is a, c, g, or t
agaggaggtgattcattagtgagaagacattctgtgaagtatactaccctattagagattctagtatcctagagatgagtggatctcaggttttagtatacataggaaccccctggaaccccctgtttgttaaaacaggttcctggcccccaccccagnnnnnnnnnnnnnnnnnnnnnnnnnnnnnnnnnnnnnnnnnnnnnnnnnnnnnnnntaagattttgtaagattgagaactaaactttgggtagcatctttatagattagacatatgctgtacttaaatgggtgaattttatgacgtgaagtatatctcaataaagatgctaaaaaattggcataaagatagtaaaatgtaagttttagtggtttgttaatggcaagacaatgctctgtaagggaattggtttaattattaatttcttcatttgtaaaatgtgtcactctcctgtgtatgtaccacctagggttgtggtgaaaatggggttatgtgttcttttccaaatggtgttctgtgggtaaaacgtgttgccttaaa

SEQ ID NO: 94939 - DNA, 394 bp, Homo Sapiens
ccccactcccccagagtactccccactgtgaaaagagctggaaactaaactggttagaatgaacctggctccctgagcatccctggatccttcaaataggccctgagatgtgaggtctgctgcttcactggggcccgatgactttggctgggggagggggcctagggcctcttctcattgaaagctctgctttatacagacccaagcatacacaccaggccgtcactttgggttctggcataagttcagaacaattcaagtccatgtgtcccatggctggtcagagccctgggtcaaaaccactcagcccaggggaggggatgaggcattgtcaccctagacccctcttcctctctcccccaccatagtgtgcaataaagtgtctgttcttacc

SEQ ID NO: 94940 - DNA, 474 bp, Homo Sapiens
  misc_feature (83)..(83): n is a, c, g, or t
taaaataatgaactactgttaacatatatcagattggcaaaaaaagtaaaaatgctgaaaatagatttggcatcatctcatanaattaaactgaagagacagaatagtatagtaatcaacagctggttttagaaactacacttacaggtttcaaatcttgcttttaattattaatacgagggtgagtggtattgtttattaagtaattttagtctgactgcacctcagttaagtcatctgtaaaatggaaacaatgataatacctcacagacttataaccacaaaagtaatacaaataaagcacttaaacaagtccctggcccatgctatgcatttggtgattgtaagtgatggtaattactgaaaatgtctgtatttgacccagcaaaatcacatatatgcatatacccaagagaagcatcaactagaaacatttgcaagaatgtgcattgcattcagcattgtcaaaatagc

SEQ ID NO: 94941 - DNA, 1098 bp, Homo Sapiens
  misc_feature (135)..(135): n is a, c, g, or t
  misc_feature (529)..(537): n is a, c, g, or t
cccagctgcttagaatatttaggaaaaaaattcaggctaaagtgaaaagatttccaaggaaaatgcccttaaaaaaccaaggattgtaactaggatgaccctttataagccatgtcccccaaagcaaaaacaatnccaggagtatttcacctgagataaaaactggtatctgaatattttataactgagtagacaaagcatttcaagaggaaaatccattgaaattagtttaaaatatacatctgatcctattttacaatatatgcaatttaagcaattcagatcaatgaaaaagtcttaaccaaaaaaatcacagtgtttatcaatgttaattacaaaatgtatgctacttgttttgtttttaagatgtaatggcttggttaagtgttttaaaatctattcttctgaaatctaacttgcataacaaaatcaagtagcaataatgtaaagcatcagaactggctcttaaaagattatttacatgttgattatttgggaaataaccaaccaaaaaatattaaaaagtgannnnnnnnnacacagtatgaagtcattgaagagattagacaatacaaaaagcaaaattctttcctgaataaatgaatacctgtggcactaagttcactcgctaatggactgtaacatggaactgccaaacatgcatttaagttatattaattacactttctgtttccaacttaggttgatcagcagctttgttctgttagaatccttcaaagagagaagctcaaacaggaaaaagaaggcatatataaaacagtaaacactgacctcctgaggttcctacaacataaaaatattcaagtagaaaatctacatcacttagcagcggctatttctgtagttgagcacactaacagcattttagtgtgtaaggagcagatgaagtaagccgtgctttaagcatgccaagaggcagaaacactggaatgtaacaaagacaaactcacaattttatagacattcagtcaacattcaaaactattaagactacaccacaagaattaagttgctttatatatatcccatgatgtattagattttatcagaataaatgctaaatcagagcttacctca

SEQ ID NO: 94942 - DNA, 919 bp, Homo Sapiens
  misc_feature (83)..(112): n is a, c, g, or t
aagataagctaggtacgaggcttggtgtaaatcggcaccgagggtccatagcatgggtgcagctgtggatgtgtgcaaaagannnnnnnnnnnnnnnnnnnnnnnnnnnnnnaaaggggtctgtcctagagcccacatcagtttgttgtgaatctggaaaaagggtcggtgagggccgggagatgttgaccctggtgggagcaggctgaggctgccccgttctccacatcctctgttttgcccagtctctgattccattagggggagtgtgctgaagccattctcggatgcttcccagaccaggctccctctgccagagtcacatgcatccgagctgctggtctccattgtccagcaggaaggcggaaaggcaggcaagatggtgtgaagcttaaagcttgtatttgatggaaaaggtctcccctgttcatctgagaggccaagcctggacaccccaggctcagaacctgggcttcaagaaatgtgctgggagctcctaacttacacatccctccagccttccttgaatcctcccacaacccctatttcctttaatttctcaggtctgctccctcctcccccaaccccacagctgggcaagaagtctgcaaaagctgcatctgcagctgtctctaactcttcccagccatctcccgtattttggggtaccttgattccttgactcttaataagccaagccaccttatctctgtagttcttatttttggttgactacatgggggggtcttttatggtcgtgtcatgacctattaaatggggcttggggttttcaccttcccctctgaatgaaagcagatgggggaaggcgggaatctgcacggaggtgaacaaacgtgaggccggtccgaaggggggtcccccaagaaggagagctgttgctgcctgcacggggggactg

SEQ ID NO: 94943 - DNA, 831 bp, Homo Sapiens
caaggaataccactccctctttaagacaatgagcaatgagctgcagaatccatttcttttttctctccagcatcagtaatgagcatgaatcatggagtcagtgacttaggcttgaatccaagctcacataccagctcatagcataagctccatatagctgaggcactgtatttattcatctccaagttttaatccattttttaacagacatcagtcttttaaccatgtcttttcaagggggtagaaaagaaaactcttgccaccatttcctgatttctttcttctgatagtcttcatcagccagactttaaatgttggtattattcaagattttatattgagcccacttccctttagcccctaccttgaatatctgagtgatcttgcgtctttaatgaagcaatgaaaaatcatttatatctctagaccaagaatgcccctgaatctcagaactttatttctcattgttttctctctctctggctgtttaaaaatctctatgcaaagcagagtttctctctccctacctaccatttttcttaaaccttctcatactaataaaagcctatggcccagtctgggaatctgacctatttctttttctttagataaatgtagataatcttttataattgtgagtcacaaaaggtgaaagatttatatgatctgaagagaaactggagtgtgagtcacaaaacgtaacaattcgaatggccttccatttaaataaaggaacacaaaagatttcttgacaaaaaataccatgtttggacctgagtcaggtagtggcaactcagtggtttaaccaattctctgagcctaacaaataat

SEQ ID NO: 94944 - DNA, 851 bp, Homo Sapiens
  misc_feature (53)..(67): n is a, c, g, or t
ccaagtttatgtcgtattaaaattactggcactgtttgacagtcaatacaggnnnnnnnnnnnnnnntatgtcctggaagagaattgagaaagtgccttaaagagtaactggatgcctccgaaaaattcttaagcctagtaggtttgccaatattccttacaatttcctgtgacagtgtcctcagaatgaaggtgaagaaacctgagaaacagaaatgccttaggaaatgatgaatctggatgagaaaaaggagagaagggtctggatgggatctttgccatagtgaaagaagggtctcagaaaatgttactgcaaaatgaagtcctcagaagcagctctctctctgaccttctccaaacctcctgtctctggaccttcatttccacccatctcctcctccccaccaccgccaggctggccatgcgtactagactccctcttcctcaaggtgaattgactgctggggaaatgggctcagaagattaaaggcctgcttattaatggaaagagcttcctcccacacacagatatataaagccgcctcgccatttcttccttccaccgtgacccatagtctttctgggacaagggctgagatttcacagccgagttttaaagttgctggggatgctaacaacagggacttttatgcttgaatttctgctgcaaatcatacacccttggactcagtccactaagtctatagaattatctgcaaagcaatgcaataggatatacaaattttttgactatttgtatcgaaaataaatcaggaccttgaactatataaaaagctaacacattatcatgaaaactctgcatgaatactgataaaacatactggatgccc

SEQ ID NO: 94945 - DNA, 349 bp, Homo Sapiens
aattcggaacgaggagagactgttatttgaatttaggtgatgccctatgtctattcacagtgtgtgtagatatttaaaattacactcagcttgggagaaaagaacattgagtagtgggaaaaagtctcacccacagctgttatacaaatgtacagacaaatgtctggagaagatagcatgttttcaaatattttcgtctctttgtcagtctctgccaaatagaccctcaggggctctctctgtctcttggatgaacactctcctgagggcttggagacatccacagtatgagttaaccacccactgcagatttaataaatgttcaaataaatgagattgaatgaaaaat

SEQ ID NO: 94946 - DNA, 340 bp, Homo Sapiens
aacgtacaggcaggggaaatgtctcttccaaggctaaaagtaaacatcagaacatatgataattccattccaatcagtgaatcaagcagaaaatcatggaatcaaaaacactttgctttgacatttcccaaaccactccagagaggtacaaatgataaatcaagacctttgaaatcacaaataacagttactcctgaagcaccgtggattcataagctgctttaaagaacaactgagcacttggtttcacagaatggccttaccacagtaagcaccacctactctcaaatgagcatttctacctctgtggaactgaaataaaaacaagtcttccatgagt

SEQ ID NO: 94947 - DNA, 383 bp, Homo Sapiens
aaaaaataataatagtaaatgaaagcaattttagaggtggaaaataccttagaatggaatcatttgcattatttgacaaatgagagaagtgacatgacttgcctaaggtcatcctgcaaagttagtggcagagttaggacttgaattccagtcttctaattccttggtcagggcaatttctactgtgttatgctgtctgttagaaataatgacttatggacactttgtctttaagttgtattattgtaaatacccttaaactggccaatagattttagaaaggcaggcatgggagtagatgctgagaattctagccataagaagaaaagtattttaaatcttacagaaatgtttaaacaacccaaaatacatgaataaaaatg

SEQ ID NO: 94948 - DNA, 419 bp, Homo Sapiens
ggcacgagggtggctacttcccttcgcgttctacctcgattgaaaattttctgaggcctccgtagccatgcttcccgtacagctgtggaaccgatttaaaattatggaaattcttcaggcagaaaatgggcacatatggttatcacagaaaagctgttttaaagccagttttaaggtattattatgccgctaccttcaagaagtaatttgcgtgctgtttattggagctgtgaatttaatcatctcaatcccacgctattacaggatgactataagaagatgtattgacatttctttggacacataattttgcctccattgtgtgttgttttgccagaatactgaaggcagtgtttgtatgatggcacatccaaataaaaagcaggtcctccttttgggacagtgatccatttaaaaaa

SEQ ID NO: 94949 - DNA, 819 bp, Homo Sapiens
ctgatgataagataggaaccacagtcatcgaccttgaaaaccgactcctatctggctttggagctcattgtgggctctccaaatcctactgccagtcagggccctttagatggcgggatcagatgcccccaagctacctcctagaacgctatgccaagcggaaagggctacctccgcctctgttcagtcctgaggaagatgctgttttctataatgggaaaaagttcaagctgcaaagctttgagcccaaaacccctactgttcatggtttgggacccaagaaggaacgccttgcactgtacctcctgcacacccaggggctggtacctgagcacgtggagacccgcacactgtacagccacagccagccaggcatcgaccaggtatgagactggaggggccactcctggctcctacaggaggagctagatcaggagacagagatgcctgtccacccaggacatagtccacgagaggggaaggacaggccaaacatttagtaatgtacatgcacagaagacaagcatgctgtgcacattaataagcaagaagttctggtggtgtcacttagaatggagaatttcagagctggaaaggtcatctacaagaaacagaggccatgcgccagctgtgggaggcaccagggagccctaccagtcaatgtctccattgccttaagtctctcccgaggggtgggaaggtggcgctcaggtcagacagcgcagacatgacaacgcgggttctggctgttaattgtaggctgtgtcttcttcacagcaaataaccccaaacagagaaataaaaatccccaaacgcaaa

SEQ ID NO: 94950 - DNA, 465 bp, Homo Sapiens
ctgtgttgtcactaacacagtgactaacactgactaaagttttaaattatattttaaaatactgactagttttaaattatattttaaaaatacatgtataaggaagaatgataaagacccacatgccctccatccagtttaaggagaaaaaagttacttttactctaaaaaggatgcatataattcattatccaaacaatgacaatttggggagtgacagtgctattaatcattacaccaggcaatcagcaaaccagaactgtgctaggtaaaccaggactgtttggccaaaccaacacatataattatcatacttttaagctccttgttcaccttttccttacttcattcccttccctctgtagctagaggagatcactgccttgaatttgtgcttatcattcttttgctttaatttatagatttacttatgtgtgtaccttaggctatttactttcattggtt

SEQ ID NO: 94951 - DNA, 409 bp, Homo Sapiens
tttgaagtgtctcgggaaaggaagccttctttctggaacagtctcaaaacagatccaaaaggaaacctcccacccaatttactaaagtgcaaacgaagggaaaaccaggtccctgcactgaagtctagtggtctgccctggctaatagtcgccctggtgccagtgccatggtgcagtcactcagagagactctcttgatactggcccacattcacgttcacagtaacaacaaaggtgctgaatgagcagcctgtggttccacatccacctgtctcctccactgtggtcacgccccgcatgcctgtccctcttcctgcttgccactcagcgtggctcccgacaaatcctgggcgcagcctcctggtgcggtcctctgagcagaggtcccaggtgactggctcagagcaat

SEQ ID NO: 94952 - DNA, 515 bp, Homo Sapiens
agtttcatgaattgtaacctaaagacctagcacaagatttgagatcagaagaaagtggtgaacccttagggcaggtcagttattactaaaaaatgaatctttatttaccaagagggaaaactagcaaatcaaaggggaaatgattttgattttttggaagaatttcagtagctcttagtattggtatatgaacaacttagataacatgcggtgggaccagactgcagatttggccttagacaaaattgtaaatagacaaagttcatccatacagtctctcttttggtttttctttctttttatatctccttgaacaagtttccagccattatgttgacttttaattacccagtttctactgctttcttagctcacctgtgtcttccctgggtctttccagcaccttgtctagacatggtttcttctttcctctccagaagattcaaggtagattgcgatttacttgttatatttcatattttattttcaggcgggaagaggtaaaggtgttgatg

SEQ ID NO: 94953 - DNA, 953 bp, Homo Sapiens
gtgcagagtatctttgtttcgcttttccagggagtaacgtgctgcactggttcagggctttgtctttattcacaacacattcatgtgcctcagcatgggggcagctgcactgttgcctgccagcctgtcctctttgactgccgaatgaaccaaaggataactctccattcgtgagagagagtgagctacagaggaagaaagaccacgcaaaagggagggggagagaggggggcgaagaggatgttctccggctcactcctacattaggtctctgtgcaaaggcagaggctgtgggagcagcatcaagcaagacttcgggcagtgattctaactattgcctatgaacaccgtggctgggacgactttgacgaggcaatttattacttacgcatagaacactggctgtgctgaaactgggagcgcaaacagccccttgttttctaatttagagacttgcatcttttcgacactcaacagtatcaagaaactgggagcgcaaacagccccttgttttctaatttagagacttgcatcttttcgacactcaacagtatcaagacactctgctactacagaatcttctggagaggaaagaagaaaccatgtctagacaaggtgctggaaagacccagggaagacacagggaaatcatctttcgggaatttatctaagaagaacttcttatgatatgaagtctgggggtaagacctgcagtaatttcccttaagatactacagaatttccaaggacttgaggaataattgcactcttgaaagagcctatgaaaaaagaagagacttgggaaatttaacagaagttcactttccaccactgcgcaaactaaggaaaaacttaaagcagtaaatagctgcggttggcaaagctgttttggctcaggagcagctatcaggccttgataaggtccacaagtctgctgttctaaaatcaaaaaa

SEQ ID NO: 94954 - DNA, 534 bp, Homo Sapiens
ttgttttctaatttagagacttgcatcttttcgacactcaacagtatcaagacactctgctactacagattgatttccaccatcaacacctttacctcttcccgcctgaaaataaaatatgaaatataacaagtaaatcgcaatctaccttgcacagaatcttctggagaggaaagaagaaaccatgtctagacaaggtgctggaaagacccagggaagacacagggaaatcatctttcgggaatttatctaagaagaacttcttatgatatatgaagtctgggggtaagacctgcagtaatttcccttaagatactacagaatttccaaggacttgaggaataattgcactcttgaaagagcctatgaaaaaagaagagacttgggaaatttaacagaagttcactttccaccactgcgcaaactaaggaaaaacttaaagcagtaaatagctgcggttggcaaagctgttttggccccagaaccagctatcagcccttgataaggtccacaagtctgctgttctaaaatcaa

SEQ ID NO: 94955 - DNA, 624 bp, Homo Sapiens
tgcatagtcacattaatttggtgttcagattgagctaacaaaaaggaagtcaggccccagcaaagacagacaagctagaagttagtctttctctctgtatgaaacattaagtctttaccatatcttttctgtccattctttttagacagtgtgcctcggcccatttttgttaaattccctaaaatccaatgtgtctctattaatactgcatagatataatatgaaattatcctccagctccaaaatacaaattcaaaaactatataagaaaattcagataaaactttcaaggtagagtttactttttcaacagaagagcaaaattaatttaagtgtaaatgtacaacaaagtcgagctaatagaaggatggtgaagtaaattttggtattttcgttcttcagatactacagaatttccaaggacttgaggaataattgcactcttgaaagagcctatgaaaaaagaagagacttgggaaatttaacagaagttcactttccaccactgcgcaaactaaggaaaaacttaaagcagtaaatagctgcggttggcaaagctgttttggctcaggagcagctatcaggccttgataaggtccacaagtctgctgttctaaaatcaaa

SEQ ID NO: 94956 - DNA, 1334 bp, Homo Sapiens
  misc_feature (1274)..(1274): n is a, c, g, or t
  misc_feature (1320)..(1320): n is a, c, g, or t
aaaaatagtgctaggtacgaggccgggtggtcgaatcggcacgaggccttaacactcttgcaccttctgaaagcctgtcctgccaagaagttactgatgatgaggtcttagatgcaagctgcttgtagtgatgtcttaagaatgtacatgatggcatgatctcatcatttgaagaacatgtgatgctcacgaattattccatgtcattacctacgtcattgtgaatgatgatgctgagaccgccagcctcgggtcacacatttgtttgatgtgcattccctggagcagcagtcagaaataactcccaaacaaattacctgccgcacaagagggtcacctcaccccacatccaatcactggaagtctcaacatccttttcatggaagactcactagtaatatggtctgcaaacactgtgaacaccagagtcctgttcgattttgatacctttgatagcctttcactaagtattccagccgccacatggggtcacccattgaccctggaccactgccttcaccacttcatctcatcagaatcagtgcgggatgttgtgtgtgacaactgtacaaagattgaagccaagggaacgttgaacggggaaaaggtggaacaccagaggaccacttttgttaaacagttaaaactagggaagctccctcagtgtctctgcatccacctacagcggctgagctggtcaagccacggcacgcctctgaagcggcatgagcacgtgcagttcaatgagttcctgatgatggacatttacaagtaccacctccttggacataaacctagtcaacacaaccctaaactgaacaagaacccagggcctacactggagctgcaggatgggccgggagcccccacaccagttctgaatcagccaggggcccccaaaacacagatttttatgaatggcgcctgctccccatctttattgccaacgctgtcagcgccgatgcccttccctctcccagttgttcccgactacagctcctccacatacctcttccggctgatggcagttgtcgtccaccatggagacatgcactctggacactttgtcacttaccgacggtccccaccttctgccaggaaccctctctcaactagcaatcagtggctgtgggtctccgatgacactgtccgcaaggccagccctgcaggaggtcctgtcctccagcgcctacctgctgttctacgagcgcgtcctttccaggatgcagcaccagagccaggagtgcaagtctgaagaatgactgtgccctccntgcaaggctagaagctgatggcactggtctgcactgtcccaggaanaagtaaaactggta

SEQ ID NO: 94957 - DNA, 485 bp, Homo Sapiens
caaagagtctttggtgcatttaccaaatggcaagaagtccagagtggctgttgggcactgaatgtgagagtgtttagatttgaaactttaagaattaggtggggactatgtcctaaaagactgttctcaatgccaaagactttagacttcatacactgatctatactgcagatcttagaagaagaaaatcaattctacataaatggcaaaagcagtgttccccaagctggggctgacagacccctgagaaaaaagcattacgtgctagtggaggagctggaagttgtggatctccaacactgatttccaatatttggttctcctctgctcctgatcacatgcgaaaattacactttcccatgttgtttcagcaaaacatcatccatcactgtaaattaatgttgttaatattgaacttactgattttgtggttttgatggtttttactttgtgaattatttttattaaaacaagcatatataaaa

SEQ ID NO: 94958 - DNA, 724 bp, Homo Sapiens
tttggtggggtaccagcaatcatgacctttcatggactccacagcattagaagaacaacgtttatggccttcaagaactttcagggtgaagctatttctctaggatcagcttttcatgtggcagtagccttgggcctgtcacagccctgtatcttatcttctcaccaaccctggtttagttttcaacagacagaaatttgagccagaagaaatggatgtcactacacagttcacccctgacatctgtgatagtgtatgttatcactgacatgttctcattcaaactatgttataagagcaaggagaaagaagtaagaaaaatttgctatcatgtagaaaattctggggaacctcaaataactcactttatatttagcaggagtttatgcttcagagatcatctgtccctgcaatagacattttatcatggtaagggtgtggtcagcaatagaaaactatgatctcagcagaagtccctctaccaccccatagcttagtaattttcttaccaacagctagctgaggtagtgtgcatcccagacgctccgcaattggggaaaggtcttttagcttgttttgctgttttctcccttcttcacttacaattctttctttcaaccactggtagcactggggaaaagcataacattgaaatgttaatgtctggtaaagatctgatgtcaaagaatggtaattcaataaaatatgtgaacctcaaaaaaaa

SEQ ID NO: 94959 - DNA, 616 bp, Homo Sapiens
catggacgagggtcagcgtggatctccagttctactaggctgccaaagtagcagagacaagcttcaattcgaagatatttacgacctgacaaataccccatctcaagaacttacagaaacctcagcatggacagcctggagtgaaaggatgcttacttcctaggaagggcatttctgcttgggaaatgctcagctgtgcctcagtttcccttagtcttcctctgagctgcaggtaattgagactgagaggctttccacacttcccagaaggggcagacttgatggtgcttcctatctccacgcaagagcaactattgtggatcctcacctccgacagtgctgatggaaacacccacaactgctcgcagcgggtctgggctttcctagtcaatcattttactttcagggcgtagaggtaggagaatgaaacagattgcacagcactggtgaaaagaaaaggagaaattcagggaggaggaatgagggatcctctttcttgtgtgtgggtgttagcttgcctcccaaccacactgacacttgctgtgccattgatttgacttttctcctatcttaacaataacaaatcattaaaaaatcagtttatcaaaatataaaa

SEQ ID NO: 94960 - DNA, 614 bp, Homo Sapiens
  misc_feature (270)..(270): n is a, c, g, or t
  misc_feature (276)..(320): n is a, c, g, or t
  misc_feature (429)..(429): n is a, c, g, or t
  misc_feature (441)..(441): n is a, c, g, or t
  misc_feature (536)..(536): n is a, c, g, or t
gcggccgcccggactccgagcccgcgcgaatgtgagattccgggctcctggcgcctcccgatcgccggctccggcgcggcgctgcttcgcccaggaggcggcggccccggctggccgtggggcttgtggattaataaaaatttggctccgaggaggaccatttcctctcgacatgcatccctccggatagactgaacatccctccgttcacccccccgccccgcgcggtcagaggcaggcgctgagtgtgcgaagaggatccgggttganaattgnnnnnnnnnnnnnnnnnnnnnnnnnnnnnnnnnnnnnnnnnnnnntcccggagtcgaaatttcccgggattatgtttcggaaaggaacccggcgaggaaatacatgcactggctgagaatcgcccgcgccagggcgcaacgccacaaggtgtanggagtgtgcggngtggggcgaaaggtgacccaagagtccctgtggctcggagtgccgggcccgcggttcttcattcctgccctcggggcagacggagtgaccccggnccccactccccgtccgaccatggtagtgttcaatggcctttcttagatcataatctgcgaagccgtgagcttgagccc

SEQ ID NO: 94961 - DNA, 448 bp, Homo Sapiens
tggggtgtgttttatgactttaggcaaatcaacctaagagacagttttctcttactgcagagttttaggaaagtcacaaattaatgtacttgaagaaagtgtacaatagaatagtagtattaccaaatcctaaagttcttattgtggaaaatctctgaaatattacctgcctatgtagatgccaacccttcagcaatccagacaagcttattatcttttctggatgaattaagtcaagtgtccacagttttgtacctcttcaatgtgattactttgtaggctagactgcagactgttaattgactactttctggtaccctctagctattgtcttgagacagtaaaataattactgatctctagctacatccttagcattttcctgttctgaaatgaaatcattttcttatgttaaaaataaagttaattactgttcaactcccaaaaa

SEQ ID NO: 94962 - DNA, 461 bp, Homo Sapiens
aaatacgagcatgtggacatccagaacttctcctccagctggagcagtggtatgcccttctgtgccctcatccacaagttcttccctgacgcctttgactacgcagagctggatacaccaaagcgccggcacaacttcaccctggccttctccacagcagagaaactggctgactgtgctcagctgctggacgtggatgacatggtgcggttggctgtgcccgactccaagtgcgtctacacatacatccaggaactgtaccgcagccttgtgcagaaaggactggtgaagaccaagaagaagtgaggaggtgactggctctgtgggcagagatgggcagggtgcccagctcagcagccacggcccgggggttcccttctgctccatggaggcaccagagccaggggcttaggcaagggtgtgtggcgttggttttaactgcattaaaagtacttttgtaa

SEQ ID NO: 94963 - DNA, 701 bp, Homo Sapiens
cccttgggaggggaattccttgttatcatcagagaccagaccagacatcaaaagccaggctttctcctggggtctggaattattaaatgagtaaaagccaaatataagtacctccaccaggaaatacaggaaataaagacacagggagccaataaagttatcatttaagggtgttttcttctttttttaaatcttaagattacctctaatttatagtacaaaagtcctaacaaattaatttcttgttcacaaaaaagacattagatgatttcggccaataagtaacatttccctcgccttctttaacataactgaaagcaagaaaaagtaggcaatctctaagcacaagcaaataatccatcattcagaaccttgaaaaaatatcacaccaccaactggtctgacgtcttgaccacctcaccatttaggaaggaatactggggccccttcttggaaaatgcctgctgacagaactattgggaaaaacagctatgggggtcaccatgcactgagaaaataaaagttagggatttacagtgtcatcctcaaaaagttctgtgacaaaaacacatctttattgccccaaatcaagatctatgacaggcctgctcctcattacatgcatttcatgttaagagtatttggagacatctacgtcaagggagtgaaggaatgtgggcaagaattactggaggcagtgt

SEQ ID NO: 94964 - DNA, 425 bp, Homo Sapiens
tacatccacccccacagcccccttctgcccttccactcctgagtctcttctttaccttcgtcactgcctgctttcagatatttttctcttcaggcagccctgcaagtgcctagcaaggatgacaaatgagcttgacttccgcggcgacgtgactgtccacaaacatagcctggagcatgcacaatgcagcggcgtccacggcacagtgcaaatgccggaatgtgctgtggggttggacagagatcattgcctgcagaaacaaaatgcagttttagattagcattctaggctatagatagctttgcttaattagaggaataagcaaataagtatcctgagtagcttctggattgtctcaacagaggaaaatgtataagtgaacaagctgcacgtaattaaataaaattcactgtgatctggcacac

SEQ ID NO: 94965 - DNA, 488 bp, Homo Sapiens
aagaaatgtctggcatctatcacaggtgctggcactgataagtgcttgataaataggctggctgactgtgagtgatgctgacgggcaaaggacagagacaccaggaaggagaacaggacacgaaagataactgtctcagcccttggggagtttctgacccaggaggatgggaacatcaattatcaatagttacagatcattaaataattgcaagtgtgaggcgcactataaagaggaggctcagagtccccgcatgctcacactcacacctggccacagacaggtgacacccctggcttgcccaggccagcgggtctgcaatgaggccaaggacctgggctcttgagaagttttaagtttgaaaacattgctctttaagcttaaaacaatgaaccttaataaaagtaaacacttccattgagctttgaaacacttaataggagttaaaagtaattaggctaataaaatagtcttttgttccaattcaa

SEQ ID NO: 94966 - DNA, 719 bp, Homo Sapiens
  misc_feature (127)..(127): n is a, c, g, or t
cacgccatcatgggcacgaagaaagtatctgtgtctgccacacctggtcacacgaagactttcagactctctatgtgaagcctggctactgcctgtgtgactgtcctggcttggtgatgccatcttntgtgtctaccaaggcagaaatgacttgcagcggaatcctcccaattgatcagatgagagatcatgttcctcctgtatcactagtttgccagaatattccaagacatgtcttagaagctacctatggcattaacatcataacgcctaagagaggatgaagatccccaccgacctccaacatcggaagaactgttgacagcttatggatacatgcgaggattcatgacagcgcatggacagccagaccagcctcgatctgcgcgctacatcctgaaggactatgtcagtggtaagctgctgtactgccatcctcctcctggaagagatcctgtaacttttcagcatcaacaccagcgactcctagagaacaaaatgaacagtgatgaaataaaaatgcagctaggcagaaataaaaaagcaaagcagattgaaaatatcgttgacaaaacttttttccatcaagagaatgtgagggctttgaccaaaggagtccaggctgtgatgggttacaagcccgggagtggtgtagtgactgcatccactgcgagctctgagaacggggcggggaagccctggaaaaaacatggcaacag

SEQ ID NO: 94967 - DNA, 1276 bp, Homo Sapiens
  misc_feature (1108)..(1108): n is a, c, g, or t
  misc_feature (1179)..(1179): n is a, c, g, or t
aagcagagaaagaaactttctagaatggagacgtcagcttgtccggctagaagaggaacagaagctgatattgactccatttgaacgaaatttggacttttggcgccagctctggagagtcattgagagaagtgatattgtggtccagatagtagatgctcgaaacccactcctgtttagatgtgaggatttggaatgttatgtgaaagaaatggatgccaataaggagaacgtcattctgatcaacaaggcagacttgctgactgctgagcagcggagtgcctgggccatgtacttcgaaaaagaagatgtgaaggttattttctggtcagctttggccggagccattcccctgaatggtgactctgaggaagaggcaaacagagatgatagacaaagcaacacaactgagtttggacattccagtttcgaccaggctgaaatttcccacagtgaatccgaacatctcccagctagggattctccttcacttagtgaaaatcccacaacggatgaagatgacagtgagtatgaggactgtccagaggaggaggaagacgactggcagacgtgctcagaagaagacggtcccaaggaagaggactgcagccaggactggaaggaaagctctactgcagattctgaggctcggagcaggaaaaccccacagaagaggcagatacacaattttagccatctggtatccaagcaggagttactggagctctttaaggagctacacactgggagaaaggtgaaagatgggcaacttacggtcggactggtgggctaccctaatgttggtaagagttcaacaatcaacaccatcatgggcaacaagaaagtatctgtgtctgccacacctggtcacacaaagcactttcagactctctatgtggagcctggcctctgcctgtgtgactgtcctggcttggtgatgccatcttttgtgtctaccaaggcagaaatgacttgcagcggaatcctcccaattgatcagatgagagatcatgttcctcctgtatcactaatcataacgcctagagaggatgaagatccccaccgacctccaacatcggaagaactgttgacagcttatggatacatngcgaggatcatgacagcgcatggacagccaggacagcctcgatctgcgcgctacatcctgaagggactatngtcagtggtaagctgcctgtactggccatcctcctcctggaaggagaatcctgtaaacttttcggcatcaaaaccagcggacttcctaaaagaacaa

SEQ ID NO: 94968 - DNA, 467 bp, Homo Sapiens
ctagagggctaagatcccaaacgtgcccccaggctctctctgcagaaccctctcgccccaccatgctggcgtggcccccaggagggtgcaggctgggataggagactggggcatccctgcaaggcaggggccagagcctgaaccaatgcccgagagaccaggcaagccgctgactactgtgagcctccgtatcctggtctgtgaaatgacggtgaagacctggctcctgccacccctgggctcagcagatgaggcccacagacacccaggaggggtggacaccctcttagaagtgagaatgcacaacagggcggagttcgcagacaccaactggcacagtgttcaggaggatagtcctgttctagggtcacattttcccctgtcaaaatcagtttcctagttccaaggctctgaactcacagggctggacatttgcatttgaataaagggcagagtggagaccccca

SEQ ID NO: 94969 - DNA, 833 bp, Homo Sapiens
ttcattaacaaatatttattgagagtctactatatgccacgtacatttttaggtaccagggatatatctgtaaataacaaaaagtccttactctcatggaacgtacattcgaaaggagataaacaagttaaaaaggaaatatgatttcagaacccccttctcagcagactaatcaaagctgtcatcacctctactttgactatgtattataccatcctcctacatagtctccccaacttccagcctgtcccctaccagaatgtccagctgccagaatgatattttccagcctgtccagctgccagaatgatatttttcaaatagtaatcagattatatcttctgccaaaaccttttatggttttatgattgcctattgtttataattttaacaaggcatatagaaaaatatttgatcatttgactttcattcataaaaagtttattacatgaaatatttcatatttcaattaagttcaaatgttatgttttgcaaatttcatgaatgtgatcaaattttcatacatctggggttttcttcaggtgttttgggggaagaattattaatacgttttagcttagaaatactgtgattggaaaatatagtctacatgtcaccaaatgcttgatatttcctgatacttgctttatagcatagtatgtagtcaaatttttaataatggtccatgtgtgcttgaaaagaatatgttcctacagttgttgaaataggattttatatattccattagatgaagcctattaagcatgttttgtattcttactgatgttatgtctacttggtttagaagatactgacacatattttaaaactca

SEQ ID NO: 94970 - DNA, 455 bp, Homo Sapiens
cccctcctggaaagcctggaccagcatcccttcttgggtggatggagcctcgtcctcatctccagctacatcagtcattctctgcagggcaaaatctcctccccctaccccagctgtttctgcagaaggccccctggctgtgttggcaggacttcggtgtccagggtagatctcccctccactgaggagtgaggtcccagaatcctgttgggtcccaggcctcagccctgcacagatgtgatgtggggcgatggctctctgggaaccctctacagatctatttttatatggaacttgttcactggacagaggtggcctgcaagcccccattaccctggtctgagctcacactgggagggagggggccagtcggagggggttccttctggagatgtttttatatttcttgggttctctatgcaggataataaaaacttgtctgtgatatggtgaaa

SEQ ID NO: 94971 - DNA, 600 bp, Homo Sapiens
gtttggggctggggaggtggctcccaccagaatcttgctggtctctgtggtgatattggtgttgtagttccagttggcctcggcatactcgttccacaccacctgggatgtccggtcatattcctccacaaacttgctggcctcagcctcatcagtcaccaggtctatgccctccgggtagttgtcaggcaacggcgggtgccactggtactcgggccagcccaggacctcgccgttctgctggttctgctcctgcagccactgggtgactggctggaagtacttgagcagcggctgggcatccagggcatctaagccgaccatgtccttcagcacctcctgccagggcctggaggagccagcctgcagcaccttcctggtgggcagagtgggtaccatgggcacaggggactcaggctggagtctgctcctggaccccggcccacatccccctggccacttccgccccccaatggactgcagaaactgtggcaataagaccctggggcctgggatctctctgatggtggcagggggcatttgtgtcgccccatgccagccagaaggcccactcaataaatatttgatgacatagcgaaa

SEQ ID NO: 94972 - DNA, 562 bp, Homo Sapiens
catcattcacatttatcaatgttacatatataagaactcacccaccatattcttccttgaggaattacagcatgtaattctataatcatttttataatcgtctaacaattttataatggattggttgcttactatcaattttttaaaagtcatggcttctccagtcatttcttgcttatcgaaattatttcatgagatgggtctctccttgtatatttgaaaatgaggtttgcttccttctacttaaaaaacaacttgaacatacctgtttggatcacatggtcttgtcctgataacttggaagaggttgcttcagcattgttcttattgttgtggtggttattattaatattgtttcatattctgtttaaaaaattaaaattttacacaagaccaatgtcttcttttcaattccagtacatttttcagaagtaactaatgctattggctttgtgcattgtaatttcagaccattttatatgtctttagttatatgtacagtatacacacatatgtgtcatattattccattttttctagcattaaacattgctatggaaaa

SEQ ID NO: 94973 - DNA, 461 bp, Homo Sapiens
  misc_feature (155)..(155): n is a, c, g, or t
  misc_feature (163)..(163): n is a, c, g, or t
tgccttactcccctcttgatggtgtcctgtggagcatcccctgccctaaaaagttcaagatccccaaatacacggcctctgacactggacagacgaggtggatggtgacctacgagccacgtgtgctcctgccagggagaagggtgccacctgcncactcagnggccacgtagggggtgcgctcaggcacagaggaagccagcagccctggggaaggcaggccttgtagtaacagagagggtgcggtgcccctggtttccaagggaggatgtggcttgtgtgagtaattcctgggcttgcagggaggggagaccattaggtggaagaccaggtgggtgctgctggtccagctgagaggggaacgcacccgtggggaacctgggtgggggcacatctggagaggacttctgagccgggtggagctcaaagaggtgaaggtggtgcgcgggatgctgccttat

SEQ ID NO: 94974 - DNA, 622 bp, Homo Sapiens
  misc_feature (47)..(91): n is a, c, g, or t
  misc_feature (442)..(468): n is a, c, g, or t
caaaaacttcagaaagaggatagcaaaaaaagatctagtgcgatttnnnnnnnnnnnnnnnnnnnnnnnnnnnnnnnnnnnnnnnnnnnnngcttaagctgatttaaaacaaaggccttagactaattttcgattttctttcttgaaataagctaatggcttgtttgtgtaaagcttttttattaaaagaaaaattttaaaaatcttgtacctagcacagtattgttatagaatatacatgtaacattttatatggtagtttaagtctgtcagtttcttaattgtggacaaattaacagttggctctggccttttgctgtaacatgcctgtgtcactcacttagccttggcatttgtgcagacataccattttcagttctgctgtcacttggaagttcaggctcagcatgaatttttggcaggtagctctaatacctggagnnnnnnnnnnnnnnnnnnnnnnnnnnnagttgaagtttatgagggaaataccagtgttcagttttgaactataatagtttgtatattcaacatttgaagtatattctattttgttgtactcttgtttcaaagtgtattcaagtaggttttctgaaatatagaaatgaaatttatcttcaaa

SEQ ID NO: 94975 - DNA, 387 bp, Homo Sapiens
caaacttattgattcttttggagaatgctgggaaaccaatatgttattctaaaaacagaaacaacaaaaagaatgaatcaagtgtttatcttgcccttcctggaagaactgcacctcagggtaacctaagggaatagttgatgcgagaaagtttgtctataagaaatattgtagttaataaatgaagaagaattggtaaaattaaaatatcacctgtctgcaactcataatgaaatcttgggtccaggcaatggtgattaattcttgctgacatcacagaaagagaaccaaccttatgtgtctcctgatttgatgcaatagtgcaaacaatacttcccatgacatattcctgctttaaataaaattgaaactgagttgaatcaaaaa

SEQ ID NO: 94976 - DNA, 1640 bp, Homo Sapiens
ataggtctaggtacgaggctgggtgttgaattcggcacgaggtccagcctaaggaagtgcaaaccctgtggtgcacagacagccaggtctcagaaacgacaaccaggatatctctactcaaagccgttttctacagttttgagcagtgttctggtgaactctctctacctgttcatttacagggattaaagagtaaggggaaagctgaggtggctgtcaccttgtatcagcatgtttgtgttcatctgtgtacatttattacttcctttcatccctcactgtttgctgaactggatgctgctctgctgaatgctgtacttagtgctaatatgatcacctctttgttagctatggatgcatggtgcttccttgctcgatatgggactgctgaactgtgtgcacaccatgtcaccatagtggctcatctgataaagtcatgccctggagaatgttatcaactcatcaacctatcaatactgttgaagcgtctctttttcttcatggcaccaccccatcagctggagtttatccagaaattttccccaaaagaagcagaaaatctgcctctgtggcaacatatttccttccaggcgttacctcctgagcttagggaacaaactgtccatgaggtcaccacagtaggcactgcagaatgcaggaaatggctgagcaggagtcgtactttgggagaactagaatctctgaacacagtactgtctgctttgcttgcagtatgtaattctgctggtgaagctttggatacaggaaaacaaactgcaattatcgaagttgtgagtcagctttgggcttttttaaacattaaacaggtagcagatcaaccttatgttcaacagacattcagccttttacttccactgttgggatttttcattcaaactctagatcctaaactgatacttcaggcagtaactttgcagacctcgctacttaaattagagcttcctgactatgttcgtttggcaatgttggattttgtatcttctttaggaaaactttttatacctgaagctatccaggacagaattctgcccaacctgtcctgtatggttgccttactgctagctgacaggagattggctgctaaaaaaacataccttggaggcgtttactcagttcgctgagggaacaaatcatgaagagatagttccacagtgtctcagttctgaagaaactaagaacaaagttgtatcctttctggagaagactgggtttgtagatgaaactgaagctgccaaagtggaacgtgtgaaacaggaaaaaggtattttctgggaaccctttgctaatgtgactgtagaagaagcaaagaggtcatctttacagccttatgcaaaaagagctcgtcaggagttcccctgggaagaagagtacaggtcagcgctgcatacaatagcaggggctttggaagcaactgagtcactactccaaaagggtcctgctccagcctggctttcaatggaaatggaggcgctccaagaaaggatggataagctaaaacgttacatacatactctagggtgaaacttatcactaggcagaactgggtttgatgctttgtcaactgaaaatacttatgtctgtacattttctaacagatataaaacaaattttgtaaagtt

SEQ ID NO: 94977 - DNA, 878 bp, Homo Sapiens
ttcacttagatttgctggtgaaagtgaatgcaaaccctaacttttgttgctgtggtcactgcagtgagcctcactcaacctgtcactatgaatgctcatcttttgactgagtatatcatattaatgtttgaattcaggtagaagtacagttgtcacttgaagggagtagatgtggaagggcgttcggggaggagtggaaagtggggaaagccaggctaaagaatgagggttatagctttagcaatgttgatgagccacatttcccacacagatctgtagcatttgctgttgacctcttttgagatgaactctcccataggccctgccaggcagcactgagacatggaggaaattcagacaaaaaatggctcaccctgatagggaaggagtgactatattttaaattaaacttgctttttccaacactgtgaggtttctgtaatatttagcttttatttggaagcgatagcgtatggcattttttatgctgtttggtttatattgtctactgcaggcttctttgtataagctttgcctgggctcaccctctcctggacactgttttaaagtgtcaccgctgtccatggctgccagaggctctgatgtgaagctgtactctcaagatccacgtttttaagtcggcatgattagtaatgactttttgtggcaatagaaaagcccattaactcaaaaaaaccaaggagagtaaaaaggaaaggaaactatgaatcgtgcctcatctttcattgaatcctatatttattattctagaaaaaaagaacttacaagatagagaagaactaatagagcatctactttacccctcaggctgtccagtggggataattattaataaacatttaatggaaaattcaaaa

SEQ ID NO: 94978 - DNA, 387 bp, Homo Sapiens
gaacttgtggctgccatgtggacagtaccaggggatatgtctcagcagccggccgggaactcttggctgcagacggttgcacagctcgttatcttgatgccaaaacaagaaccaaggacccttttccactaggagaactctcggcaagcaggacttgagacgagcggagtccagctcccctggaggtccagtaacaatatgaaaaattgcagatgcagccacccactcataagtagctggaagaagccgcagggttcgaataatcttttcggaaaactgtggatgcaccacgtagcctctggaaactccaccgtacactcgtgagagaatgagagccagaaagacaattcctttagtattaatataaaaatagatttgtaaaataaa

SEQ ID NO: 94979 - DNA, 321 bp, Homo Sapiens
tggggagcggcgagcagcctgagtgaagaggaactctctctcttcagagaagtcccacaaataggcttttcctgcatcctaccccggtcccccagggcccttctctcttgtccgtttcaaaggcccttttcgttgatgtcaacgccaaggccagaccgttaacatgcactccccatcaagataaggagtcccagttcaaagcctgtcctgactaactctttccgttaagtaaaaatattaatcttggttttatttaagcagtttttttggcaagaaatgaatccctgtggctaaaaataaacccaaagacacacactcaaa

SEQ ID NO: 94980 - DNA, 756 bp, Homo Sapiens
tatcttctgtctcatgctagcagtggaataggaaaaggactcaaaagacttctactggccataatgaagtacctgttactatatttgctttcctaccataagcaactataaaactggacaatatataggcaactgatctcatgcatttcaagcagcacaggattctgataattaacagaaggaaagcacatgaggataatactggaggctgccatgggagaagtctgcacaaaaagagcaagtttaagagcttcaggagtcataaatggcttgagaagattatgctagagattgaagcagatggaagattctagaaacagaaagcattcttttcattggtgtgagtcttgaatataaatggaaatcagaggtctgtaatagcaggccagtgtggataaggcagtaaggttttgagtctgaggagatggctgggggcagtttgtagacttattgtcagtccagtgtagaatttgagaatatagccagggcttaaggttccagtttcaaattaaagacaaaagaaatcagcaataccaaaatgaagacagaagcctgggaattgtgcctcaagatctggactgagaggacatttctacacaacagctcccctaagggcggggtatgaccgttgttgctaagctgtcaccatctctccttccctattagactggcttctgtggggtaattaaccagtacaaggatgtatgggaagctcttctgagaagacctcacattaaaacaaagtgttgttattca

SEQ ID NO: 94981 - DNA, 496 bp, Homo Sapiens
tttccgtgtcacttctcacttctaaatagctctagacttggtcccattgcactaacttaattcactctccatcatctttggcttggagtacaactccgtccttccatctaatctgcctgtctccaatcgttctcccctttgatgtgcagggcagccactgatctctctaacatttacagaagaatgcaccacttgggttgtttaaaacccttcaatggcttcccattgccccaagttcaaactctgcaatgtggcctacacatctctctagcttcacctcctgctcaatatcctacagcacagtgaagttcttggtggtcctcaaaagggccctcaaacttcaaacattcccttcaacctaaaatcctcaatggacattactgagtcctctaagaggtcttctctgaccttcccttccaccaagccaggtgaactttctgccacttgtcctcatcacaccctcagcttttcacatcagaacccttacctcacttta

SEQ ID NO: 94982 - DNA, 470 bp, Homo Sapiens
tatctgcgccagccagagaccacctgggcaagaagcgtgacccagacatcgaggagggtgaagcctcgctgggccgccccgcaaccccaggaagccccggaccagcgagaggctcccgggcggtctcttgccgacacccggtcacgggctcacccgcgcgctcacactccgcccgctccccgctaagggactgggttcgctccaaaggcagaggaaacctatgggctccccggctcgtgtctcccgactcgtgtctcttgcctacgcttcccagctttcccgaccctgcccggacggggtttcggggttccctgctcgggccccgcgcgctcccctcccacaggctggatgggctccgggcgcggcgggaggcagcgggaacgtgagaccggggtcgccccacacgccctccgcgcccctcgggccgcggcccctgcgagtaggccccccgtgaccgaccacgcggccgc

SEQ ID NO: 94983 - DNA, 600 bp, Homo Sapiens
gcggccgctgaacagcagagaagaatcacttggagaaactgcccaagattactggaaaactgacaataatgtcatttatcaagttgatggaagtaaatccttcaattttgatcgtgtctttcatggtaatgaaactaccaaaaatgtgtatgaagaaatagcagcaccaatcatcgattctgccatacaaggctacaatggtactatatttgcctatggacagactgcttcaggaaaaacatataccatgatgggttcagaagatcatttgggagttatacccagggcaattcatgacattttccaaaaaattaagaagtttcctgatagggaatttctcttacgtgtatcttacatggaaatatacaatgaaaccattacagatttactctgtggcactcaaaaaatgaaacctttaattattcgagaagatgtcaataggaatgtgtatgttgctgatctcacagaagaagttgtatatacatcagaaatggcttctgaaatggatttacacaggtgagaaaagagcaggcattatggagaaacaaaaatgaatcaaaagaggcagtcgatctcataccatctttaggatgaattttg

SEQ ID NO: 94984 - DNA, 428 bp, Homo Sapiens
atctgaaaagacgttgatgctagttatgacaaatatcagtcaatgtagtcagttgattaaatattacaaggtcgattagtaaattacattttaaaataaaatgaatactttctattgcatatcaaacaagtaggcattgtgtgttcaagattcagactcatagaatggtagtgaatgtaaaaactcttggaaagcttcttgcaaacacacattaaattttatgaaacctgaagagaaagagtatttacctcaacctggcttatgttacttatttttagcgtctttaaggtatcgtttataattaattccccagccctcttcgtcttgtaaatgtaagcttagtgtcttatgttctcaaagcacttcatcaccttagaatgtcttattcttctgaacttaaaagttttatgtttgggcgatacatgcgt

SEQ ID NO: 94985 - DNA, 434 bp, Homo Sapiens
tttccaggtccataactctcgtgttgtgcacaagattgtgtacattttccgagtttgttaaagggaacagcgcccccaaaagggttaaagtttgattgtggaataatctggttatccagaagagaacgatctctgcgggctctcctgtctcgacgaagtcctttagtggctgagggtctcggccacattccaaaggggcggaatccccctgcctcgcgtaccccaggggtctcggcagcgccgctattctgtgagcctattcctctcagaagcgccgagcactaggcctggaagaggacaagtctagcaaatgaggggacacgggcggagggagggattaaaagatgggggtgtgatccgtgccaatggggacacccactggttcgaatattaacgcgaggtttgtccgcttcttcacaatctgtccgtttcgt

SEQ ID NO: 94986 - DNA, 373 bp, Homo Sapiens
tggccgctcacccgagcaggggggccgctgcccaagaaccctttcctggagagctgctccgagaccgcacagcgccgccgcgtcttctccttttccactcctctttcctaatttttttgatttaccagcgttcgacatcgttatctcttcctctagattaagtgcttcgctcttttgagcaagaatactctgtgtggcatctttggtactatggggaacgagaatccagcattatctttaataaaatccagaaacatttttggttgtttcctttgaggggtacgtagcagcacgctcacttttttccccttctcgttggccttggtccttcagtttcacaaaatgtggatagtgacttaaaaataccttaaaa

SEQ ID NO: 94987 - DNA, 448 bp, Homo Sapiens
gagagagctctctggggtctctttttgtcaggatgctaatcccatcctgggggcctcaccgtcatgacctcctctaaccctaatcacctcccaaaggccccgcctcctaatactatcccacggaggggttagggcatcaacataagaatttggagggggccacagttcagtccacagcaggatgtgtgtgtgtggagtgaagcagactgaccgggcctcaacatcacctgggaatcctggaaggaaacaggttcctgggccttgctccaacctaaggaacccgaatctgcatagctcacatggcgccgtatttccaacgttcagagcacattggaaagttgggaggaaggatgaggcttgtgttttcactcacaaactccctccagaagatgataatgaaagtgtctgacgcataaggaaataaataagatggttatgtgcccaaaaa

SEQ ID NO: 94988 - DNA, 364 bp, Homo Sapiens
cttagacatagcttttaatggggaaatggaattagtaaatgactatttttcccttaactcagtgattagacaggaaggaagacattagtgattagacaggagggaagatattagtgattagacagcagggaagatattagtggtaaagagtgaatgatagtagtgaatataaatggggctgaggaaactttaagcataaaagattcctgagatgactttacaagtctgtacgaatctgccttgactgtatatttcatactgcccaacaaaacaataaaaaacaattttaaatgcatatttttaaatgtacacagttttctatttcatcagacttaagtaaaaagcttccacatgaagacccttt

SEQ ID NO: 94989 - DNA, 1575 bp, Homo Sapiens
  misc_feature (49)..(49): n is a, c, g, or t
  misc_feature (77)..(77): n is a, c, g, or t
  misc_feature (146)..(146): n is a, c, g, or t
  misc_feature (185)..(185): n is a, c, g, or t
  misc_feature (291)..(291): n is a, c, g, or t
ccttgaggcagacttccatctggtttcaacactggggtcttggactttnctgaacccccccctgcaaggtatctttntatggtagaggaccagggcacaatcccctgagggatccttgtactttcaggctgggggctggttcttcntcaggaatgtcagaatttggagctaactcttattttccnagtgtagtctcccaccccacagagaccaggtgcccaaaggtctccagcatcacatcgcggtactcggtcctctgtgtcgggcccagcagcccccactcctcccggntgaagtccacagccacatcctggaaggtcactggctcctcagggagcactgtcactgggcagatggctgcatcctcctgcttctcctcctgctgggcagtgacctcgaggcagcaggtggtgccctcggcagggtgtcctgcaggaagtacttcctcctcagacatccaggtcacacccgtctaccagggccacaacctcttggcagttctctgggtgctgcgattccacccatgtccggagcttcacagggcagtgcacctaggaactgctccagcaccagcagctccaggatctgctccttggagcgtgccttaggctgtagccactggtgacacagctctcggagctggtccagggcctcccggggacctgtcatgtccttataacggaactgccggaacctctggcgcgcggcctcagggtcacctggatgcttgccctgctgttggacctgctcactgggggcatctgcactcaggcttccatcttcagcatatagggcctggatctgggcattccgggaaccagccacctcctggttcagtgtgaggacctcaacaacctcaatgttcattaggggactctcagcaggaagaggatccaatttagggtccagctggagctcaggatactctggaatggtgtcttgaggaattcctctctccactggccagaaatcttctgcctcctctaactgagataccacatctggtttggaaagctgatgttccactgagaccaggttcctgtagttctccagcatcacttccctgtacagggacttctgtttgaggtccagcagtccccactcttccggggtaaaacccagtgttacatcttcaaaggtcactggttcacaggaccaggccgtcggaagcctggaggccatagtttcctccttctcaatgtgtctctggtggaagtgggcagagtcccggcgcgcgccgcacaatggcgcccgtcggccggcggcgaagtgcgtcagcccgccgtcccgaactacaactcccagacgcccccgcggcgcgccagcttgcctcacccagcggcggccatcttgactggccggttaggggcggcaggcgaagccggggacagcaggaggaggatactcgtcgatgtccctcggcggtccagctaggcaaggggaggcctctggtgagggacgctaggccgcagggccccacactaatgtgggcggcgacccgagctgggagagagtcgtgccctgccacgaaggcgaccctcgtgccgaattcggcgcgccgtcacttcatactct

SEQ ID NO: 94990 - DNA, 343 bp, Homo Sapiens
ccatagacccacaccatcacgcccggctaattctttttttctaatacatggggttttcttacattgtcctggccgatctgcaactcctgggctcaagcaatccttccgaaagtcctgggactacaggtgtgagccaccacgctcagcctttttttccttattactgtactagggacatttgtggcttttccacaatgagacttagtagagaaatgacagcttcccttggccctatcctgaaatacactaactagctcttctctgccagggctaccgttttctccctaacctttgcagatgtatgtatccatataaatgtttctatttcaacaaactgtagaaa

SEQ ID NO: 94991 - DNA, 491 bp, Homo Sapiens
gcggccgccgccacgtacatgaagtgcaactgcgccggcgggggcggctccacggtctcactctgcacggcctcgatcttgtaggggatgttgaggctgcccagcgaggcgagcgctcccaggaatgcggccacatcggtggcactctggaagcactgcgaggaggcctgcacacactgccggttgtcaatctccaggtagacgatggagccgcggacgtccatggggtccagctccctccgccgccgcccaccctcgctgccaccagggagcagcgaggccttcacctggcccagcagggcgtcaggtgcggcccagccctcggcggcacgcttgatggggtgcttgcgcagctcctcctcgcggccgtagtaggggaagatcatctgctggccgtgtgcgtcacgcttgaagaccacgttggtgtgcagcacgcggctgagctcccgcatgaagtggaaggagctgttgcgccagtgctccggcgagat

SEQ ID NO: 94992 - DNA, 175 bp, Homo Sapiens
tatacacacaacatccagtatgcagtaaggcgcaaacccctccttgggctgtggtaagcatatctaatgccatttgattttgcaacacaacagtatgcagctgagcaaattcatctggtaacaacataagcccagtgctactagcatttagaccattctctacaagtaagctcaa

SEQ ID NO: 94993 - DNA, 355 bp, Homo Sapiens
ggcaccctgaggcacggacttgaaaaaatgcattgattcaagatggaataaaccgagtaggtttcagaacagccacccttggcctggacagtgcaagagctgcagagtgtcacctcacagggccagcggcgacccaagacacgggtgcctggaaagggggctctctgcggggacagggctcagaaaggctggacctgtcctgaaccacagaaacaggttccctgaacctcggccatcgtctaccattacggcgccctgtccagatataaagtcagaaaatctcagatgcacaaacattttgaagtaaaagatagtttctaaaccattactcaaaccaataaaacgtgaagtgaaa

SEQ ID NO: 94994 - DNA, 426 bp, Homo Sapiens
cctaaatgtttcaatgccataaagcttacattcccttgaagcagagtacaggaaaccttagcaatatgctaccatccagtaggatataaatataaagaagctgtatcagcaagggatgctcagggaatgtgtttgcagcccgtttcacggtagccgcttgagaggggatattggaagtgagtgactttctttcatttggcaaagtttccttatctcagcacctactctttctgatggtatgtttttgaaggctgcacagtacgactctgggtaccgtgtgtacatacatatgtaaggaataacgtttatgttgctcagaataggcactttttgaaggcagtaaatctaaaagtaaagttaatagagcctatatttagtgctcatcttctcactttgctgatgtgtatgctgaacagaagatcacag

SEQ ID NO: 94995 - DNA, 373 bp, Homo Sapiens
ctaactctcctggtaactcacagaacagctcaggttcatttctaggtgactgtcctaggctactgctcccccaggagactcaacactaaataaaggagtctgactctctgccctcccatcagtagcattcatcagccaaaacggccatagcagtaggtagccaatgacacagctagattccctgacaaccattagccaacatcatggtccttgtgggtagagtgtctggctacctttgtctttctgggtcaaggagggccactgtaaagatgcaaaatggctgcttccaaacaagggaaatggtcatttagtatgagtgtctctgtacttcccaggaagcaccatgaaaactgctttaatcaactctgactat

SEQ ID NO: 94996 - DNA, 368 bp, Homo Sapiens
catctaaacaattcatttggtgtttattgagaattatacttctcctatctatttaatcattcatgaccacaatgctataatacttgatggccccaagcaggattcctctccttggtttttatacttcacatgaaattcaagctcccttttcacgtagcaaaataacagagagtatctgaacaaaagtctgtaggaaccaggaatccaaagtttttttcactttgagactcattgtgttcctgcacagactcacacacaatagaattccagatacttttaataaatagaatactccattcttttgaagagcaatgatgtctgtcttgtgatcacctcatcctgctatggcattcaacaaaaccaaatca

SEQ ID NO: 94997 - DNA, 1808 bp, Homo Sapiens
  misc_feature (1488)..(1488): n is a, c, g, or t
  misc_feature (1523)..(1567): n is a, c, g, or t
  misc_feature (1644)..(1658): n is a, c, g, or t
  misc_feature (1668)..(1691): n is a, c, g, or t
gggactgtacacatgctagggtccaggacagcaggaccaagccagcagaaacagcctgagcccaccgcagactggcctggctatactggacaatgccactcctcctgtacacctgtcttctctggctgcccaccagcggcctctggaccgtccaggccatggatcctaacgctgcttatgtgaacatgagtaaccatcaccggggcctggcttcagccaacgttgactttgccttcagcctgtataagcacctagtggccttgagtcccaaaaagaacattttcatctcccctgtgagcatctccatggccttagctatgctgtccctgggcacctgtggccacacacgggcccagcttctccagggcctgggtttcaacctcactgagaggtctgagactgagatccaccagggtttccagcacctgcaccaactctttgcaaagtcagacaccagcttagaaatgaccatgggcaatgccttgtttcttgatggcagcctggagttgctggagtcattctcagcagacatcaagcactactatgagtcagaggtcttggctatgaatttccaggactgggcaacagccagcagacagatcaacagctatgtcaagaataagacacaggggaaaattgtcgacttgttttcagggctggatagcccagccatcctcgtcctggtcaactatatcttcttcaaaggcacatggacacagccctttgacctggcaagcaccagggaggagaacttctatgtggacgagacaactgtggtgaaggtgcccatgatgttgcagtcgagcaccatcagttaccttcatgacgcggagctcccctgccagctggtgcagatgaactacgtgggcaatgggactgtcttcttcatccttccggacaaggggaagatgaacacagtcatcgctgcactgagccgggacacgattaacaggtggtccgcaggcctgaccagcagccaggtggacctgtacattccaaaggtcaccatctctggagtctatgacctcgggagatgtgctggaggaaatgggcattgcagacttgttcaccaaccaggcaaatttctcacgcatcacccaggacgcccagctgaagtcatcaaaggtggtccataaagctgtgctgcaactcaatgaggagggtgtggacacagctggctccactggggtaaccctaaacctgacgtccaagcctatcatcttgcgtttcaaccagcccttcatcatcatgatcttcgaccacttcacctggagcagccttttcctggcgagggttatgaacccagtgtaagagaccacccacccagagcctcagcactgtctgactttgggaaccagggatcccacagaaatgttttggagagcgggaggtttcccccaatctcctccaagttcttctccctccaaccagagttgtgtctaactttaggcatcttttaataaatgtcattgcgactcctgaaaaacnacaacccacccactacaccttctatgaatcgcttnnnnnnnnnnnnnnnnnnnnnnnnnnnnnnnnnnnnnnnnnnnnncgccgcaatcccagtggtaccctataacaagcatgaaagcggagcccctcaacgagaaaataaaatttttttggggnnnnnnnnnnnnnnnacacaaaaannnnnnnnnnnnnnnnnnnnnnnnggggcgggcgggcggcccacaaagggagaaagtggaaaccgggcctcaaaacgtggttctcccccaagaaaaaatcccggggcaagccaaacaagggtgctctgccttcccccccac

SEQ ID NO: 94998 - DNA, 453 bp, Homo Sapiens
agaggctaccttagaccgacaccaggcagttgcctactctgcgccctccaggcggacaccggtgacccttaggcacccaggcaaatccctaagagcacccaatgcccaggccagggggtgcagccctcagcccccgccaagattcccgcaggttcctggactggaagctccctccgcggtcggattctggagggtgggaggcatcttggcctgcagtaagcggtgctgacggggactctggccacagaggtcaggcctcctgaaaacagcactgccttccgcgctgccccagcttgccccattccttgtccgccaacccaccgtgattcatcttctgaagctgggagtgaaactgggtcagctgtaacctgttcctattcatctggaaggagggaggcttggatgagcaggggatgagagctgcagggaaataaatgagatattcgtccttaa

SEQ ID NO: 94999 - DNA, 791 bp, Homo Sapiens
gactttccacaatttaattaagtggctttagagtccggagttggcctaacaagctcctgttcatgaatgaaagatttgtccgcagcagcgggggccggctagctcgcagcaaatatgccatccatatgcccaggatcacaaccggaatcagctccatcaggcctttgaacaagacaggttttctagaaagacaaaaaatattggctggttggaagaagagaggggccagctgccgctgtgaaatgttcctcgtttacagttgttgagtgtccctgcccttggctgtggtctgtcaagcaggtttgggatcagggggtcttttgcagctactttccagtggagggttcaatgagtgtttttctctgactgtatttttagaaaaaattatgatgacagttgttaggtctcaggcaggcaggcaggcagcacattccattacaaagttagcatgaaatcaatatgtaaataaccctttctaactggcagctatttttgaaggcagaacgcaccggatgttgcaggtttgttccagttcactttaaatacctctctgttctcagagcctgtgaatgtgctcacattgagaagagccttttccccttttcacttgatctttgcagcgtccctgatagtggtaatgccaccatgagctttgtcctcaaacctcctcctccatcatttaaaaatcagattgacaagacccgcaccaggctgggagtgttagttccccttcggcatggtcatttttcaaaagcacgggttgctccaggaagggtacaggcggcaaaagc

SEQ ID NO: 95000 - DNA, 377 bp, Homo Sapiens
  misc_feature (50)..(149): n is a, c, g, or t
agttgtcaataccctaaatgttctgtggttttaagctacagagtttgtannnnnnnnnnnnnnnnnnnnnnnnnnnnnnnnnnnnnnnnnnnnnnnnnnnnnnnnnnnnnnnnnnnnnnnnnnnnnnnnnnnnnnnnnnnnnnnnnnnngatgcttatgtgtggggagttgggtggtggggtcaaacaacaattacattaaaatagaaaatagtgacataaataaacctataaatattgcaacccagagttatattataaatgtaagtagtgactaggactctcatgcagatatacctctgtgctgggacaaatgaaagtttaagtgtaatttcccatatgcaagtcaaaataaaaagtgacactagaaaacacaaa

SEQ ID NO: 95001 - DNA, 410 bp, Homo Sapiens
aaaccaaaatcgtacagccattgaaatatattcaaaccaagaaagcagcagctcacagcatgtttgcacaacttcatgcacatcttatcaaccttactttgcaaggacttcagccttccattcttacatcaagctttcccagaagtttcctacccagagatgacaaagtggtaggaaaagtctccacagctcatagactgctatgaacttcaggcgccttaaagcaacagatgcatgtttcaaagtgatgagaggcaagaccccaacaagcagcacaaacagaaatccaggactaaacacaggaagttatggtataaaacttcacgagtcttagaaattaggatccttacccccacctccacgaccttgctgacagatatgaaaataaactttacactccctaattcaaa

SEQ ID NO: 95002 - DNA, 437 bp, Homo Sapiens
ccggggtacgagtggagggcgggggcgccggtgtccatacgaggagaagtctgctcagcatggctctagacagcgggtgtccccacggggtgtccagaagctgctgcatggaccatgcatcgatcccggtcgcggggagaatgtgcccagctctccacacaacgcttctcaaatccactaaaatcaacacaataattgaaatattttcaagctgattacaccgcagcccgaggctagcctggttgctaagggtgagctccgcggttgctagggggagtaaatcatcttgcattatttgatttttgttatagatatgaaaccgctactcccgcgattaaatgtctctcagcctaacacctatgggacctggggagagggaagagaaaggctccaaccttgaccctgtcaaataaatatctctaactttttctgtcaaa

SEQ ID NO: 95003 - DNA, 564 bp, Homo Sapiens
  misc_feature (13)..(13): n is a, c, g, or t
acagagcttatcntccacgcacaggcagagctgcactggctctgggaggaggccccaactgggctcctgctctgcaggggccctggcttcgggcccaagccaattgtgaccactttgtcttcttggcagtccccatgggttcagactctgttgtaatttatgggcaaaactcctacctcctgtccacatcctaaatctcaaacttggtttcttctcaactccagatacaggataagcaaacaaaccaccaaaagactccaacctggaaaatttcggccttcatcccaccatcccaacatagtgtgcattagaagaaggagctatgttcctcaatcctgaaatcttttctttttagcagtcaccctttgtgggattgtgtccagatacccaggactgcattttgagaccacagcactttctagaggaaaactccagactgctactagattccttgttgtactccatggccagcttcttttggagatgaagcatctaagctttaagtcaagtctgcaagtttgagcatgattcaaatgttgaataaaacctggagatgacaacttt

SEQ ID NO: 95004 - DNA, 441 bp, Homo Sapiens
gcagtaattactggagatccaagtaaggggatgagttaacaaagggctaaattggcaggcagcctgactgggtccagatgggcagatgcggccacatcaaagagactcatcagtttagtcagtgacccaaagcaaacttataagcccagggcatctgagttctagaggctggtggtgagagaagagagcagaagaacagaaattagcccaaaagaggctggaattcaagaacaagatttcatctgctggtagaacaccaaaagcagagcccgcctgacagtgctggaccaggagatgttgaaacagagcttcctctatgcattcctatttaagaactgaatcaacctctcagatttaaaaccatcagaaataactaagtactcacaatatgaagatgagtagttataccttgataacaaataaaatccaaacacttgaaaa

SEQ ID NO: 95005 - DNA, 671 bp, Homo Sapiens
gcggccgcgctggagcaggagtagctgcactctggacacttctccgggtggtcggcctggtgcagccggctgtgctccaggaggtcagcccggtcccggccctggaaggcacagtgcagacatttgaaggtgtgcttgatgcggatgtgcgatttgagattcgccttcatggtgcagcggacgtcgcagaactcgcacttgaaaggcttctcccccgagtgcacgatcatgtgccttttcaagtccgagctgattttgaacttggcgctacagagccagcactggaagggggtatcccccgtgtgagatcgcaggtggacggtgagctggctggagttgcggctggcataggggcagagctggcatttgtacggccgctcatcagagtggatccgcaggtgcttcttgaggctactgctgtccacggcagcgtagtcacacaggtgacacttgtgtggcttcacactggtgtggcaccgcatgtgcatggtcaggttgtccttccggctgaagcacttgtcacagaactcacacttgtgcggtttgtctcccgtgtggattctgagatggcggtccaagtctttcatgccatggacagttctgaagtggcaacctgggtagcaacagttgaacgtcctctctccacggtggccatttgttcccttgcctct

SEQ ID NO: 95006 - DNA, 465 bp, Homo Sapiens
  misc_feature (37)..(37): n is a, c, g, or t
cataaatcatacttgttaacataaaccatctgattanactgatattttgtggcccaagacctgagacatgcaaaactattctcagcagatagaattttctaaaagctgagagctcattctccaggagctggccaaggaccagtactaaaggcagacctttcttggaaatgtacacagtctgggcaaacaagacctgctgagttaaccctttcctatacatatgcagacggtattcagcacagggcctgacagaaggcagtgtttgttattattattcatagcattagcccatttcttgttgtgagcaacatgaacaaggagactaaggggagaaaaatgcccttttttagggtgaccaccctaactgatttgaaagtctacaattttttcagtttaaaatggtatttatttgtaacatgtactattattgaataacaatttctaattaaaaaactacgctagttt

SEQ ID NO: 95007 - DNA, 799 bp, Homo Sapiens
ttttcatcaaaatgattttattgtagtgtttggagaagcaagcgtggcaaaagaaaccttggaaggtcttccttacctatataagaattctgagcaaggaaaaggaatatgcagaacacaggcaagggaatgtgaacttcgaagggaaacactgacattccatttacacggtcacaaaatggatcttcacattttaataaaatcaacagtataaaatagtttagaccttcacatgaattctccaggggagcactgaacaacaaactaccagagtttctggatatttttaggaaatgcaaacagcatagtacatttagtttaaaaataaaaacatactcagtttaaaaatgactgcagtttcaaatgctggcacctatcttacctacggagctctagattttatttaaaacaaaaataaacacaagattcagggtcaggttaaaacatgtatttgttgcatttcaatttcgtttcatatttcttgtccttttaaaaagaggaaataacattgtcaacatggtaatttcagagtttattttaggcagttattggatatttatgtttatcacataaaagtcatctttcattcctcgatgttgcacagttccttatattttatttttttaatcttttgaatgagatttaaatgtttaatgtctaaatattcaaaatgcaaatgtataacagctgaaattgttatggttctgccatatacacacagctctatttgttaagaggcaagaaatagtgaaaatcattttctcattcactgttgtataaaaacactctcacaccgggt

SEQ ID NO: 95008 - DNA, 1076 bp, Homo Sapiens
  misc_feature (992)..(992): n is a, c, g, or t
cggcttcggttgcgggtcggaacggcgctgctctgcggggccggtccaggctggcagctgccggcgcttggcggtgagggcgggctcccgagtggccccccaccgaaggcggtgggaccagcggctgaggccaggatgccgtccaggcggcgcggcggctcctcactcatcccagatgttggttatctttctgaagtagactgtccatggcctgaacattttccgaaaatcattttgagcaaaatatctgtttaataacaagataaccacatcaagatggttggaaagctgaagcagaacttactattggcatgtctggtgattagttctgtgactgtgttttacctgggccagcatgccatggaatgccatcaccggatagaggaacgtagccagccagtcaaattggagagcacaaggaccactgtgagaactggcctggacctcaaagccaacaaaacctttgcctatcacaaagatatgcctttaatatttattggaggtgtgcctcggagtggaaccacactcatgagggccatgctggacgcacatcctgacattcgctgtggagaggaaaccagggtcattccccgaatcctggccctgaagcagatgtggtcacggtcaagtaaagagaagatccgcctggatgaggctggtgttactgatgaagtgctggattctgccatgcaagccttcttactagaaattatcgttaagcatggggagccagccccttatttatgtaataaagatccttttgccctgaaatctttaacttacctttctagggtattccccaatgccaaatttctccttgatggtcccgagatggccgggcaatcagtacattcaatgattttctcgaaaagttactatagctggatttgatcttgaacagctatagggactgtttgacaaagtggaatcgtgctatagagaacatgtataaccattttatgggagttggttataaaaagtgcatgtttggntcactatggaacactttgtctacatccttgaacggttggatgaaaaacctcctaaagatccctcccgattcctggaaaccactc

SEQ ID NO: 95009 - DNA, 702 bp, Homo Sapiens
cccgcccctccgacccccccgacacggtagggagcctgggtggcgaattcagcacgagggtcgctgacgtggaggcgtccgaagggcagcagggtgtgtcggggctcggattaacacatcggagtcggagacctgagagatgttaaccaaattcgagaccaagagcgcgcgggtcaaagggctcagctttcaccccaaaagaccttggatcctgactagtttacataatggggtcatccagttatgggactatcggatgtgcactctcattgacaagtttgatgaacatgatggtccagtgcgaggcattgacttccataagcagcagccactgttcgtctctggaggagatgactataagattaaggtttggaattacaagcttcggcgctgtcttttcacattgcttgggcacttagattatattcgcaccacgttttttcatcatgaatatccctggattctgagtgcctccgatgatcagaccatccgagtgtggaactggcaatctagaacctgtgtttggtaaagcaggaggcagagggctcgaaaagagtcttcatttttcctagtttttcataatgagcttctcttagaacaatcttctcccttctcaaatggactatgtcggctgattaattactgattgtatttgtaggatgcttttaagtgcaaaataataaatgtagaggcaatcccaaa

SEQ ID NO: 95010 - DNA, 436 bp, Homo Sapiens
cttctgattatatggcaggtcacctgtcacatgaggatcttcacttctttgctctgcaaacaaaccttccccacctggcccaggtaacaccttctccaagttgagcatctctctctgctgtcagccagccacaggcttctccatggggaaggaacagtgggaaggaaaatgggtgtctggacactgagaggcagaatccacagtgcttggcacctaactatgggaggagacaggtaaataatgatgccatccaaagaaatgtaagagtcaggaaggagaaactgtagggccccggggggatgaatcacaacagagaggatcttgaggagtagctgtcaggatccctctgaaccccagggctgatctgtggcctttagatgtttccgtggaagatattttctgtaaaggtgatgccttaggtttatacttttccaaa

SEQ ID NO: 95011 - DNA, 544 bp, Homo Sapiens
  misc_feature (137)..(137): n is a, c, g, or t
aggaagcaactgggaagggcttagtagaaagcttcagaacaaggcgggtcattagctccccaggacgcaggtcagtctctgagatgcggcgcttgacgatggcctcctcccctattcgcacagtgatctgacacagnggaggtggagcctgcagctgagaggggccccggcacaacccctgtggggggacccccacctccaccaatccaccccactggcttggctgtgatgagaacgatcattccttcctctgactcatcaaccttttgtgctcctatggccagcatccaccttacacagcagcagagactcaggttctcatgccctcagctggggatccctgagcatccgggtcttctgaaatggactgctgcaaatgctaagttctgcagcaactggggagaagagtgttggagggagttgcacagaaaggaccatccactgaatgttccagaaggcagcagagtacagtagttaagagcacaagatcttcaacctgattgcccgggttcaaatacagcttcacctcttactagctaaaaaa

SEQ ID NO: 95012 - DNA, 480 bp, Homo Sapiens
cctctcacagtttatcttaagtaggaaagaaggaacccaacaagggcagccactttcctaaaaaattttgacgtgctgagaaaatagttcctgtccagatgctcagcagacacctgtagcacagcttccttcactgactgtgaagaaggtacggtgttgcagctacacactgccaccaacatagtttgcattaccttgttcaaacttgaaatcaatttaagaatactggttcatttcttttctctttttcctttttccactggtttctggtgatagctcctgccattttttaatggcatcagaaaaggcctttcgggtgattgcatagtgtcctttgagctcgtgcagggcccacatgatgtcctgactactgagcactttgaagtcggccatgaggaggtcagcagcttggatgaagcagtgctggtcaagaggagtcaatttagaatagtcaaaaaagtcttattttaggcaacttgt

SEQ ID NO: 95013 - DNA, 467 bp, Homo Sapiens
tttgcaggcatggttcaggctttactgggcatcacacggagctggggtagggacccagcaaagggagcagggcatacagatggtctttgaggacagtgctagggagctcagagatcagtctggcttctcaaagaagagaaaagcactgacaggaaaagcagtcaggttggcgttagtgcagggaaaggaagacgttaggagggggactttgatggaggacagtggggagctgaagctttaaagagcctcgatgcggggagggatgatgttagaagaaaggaagccaatgaggccttggggaagagaagagagtagaaagaaggaaaaaggaagaaggcaggtccagggagtcaggctgtcctccagggtcgcaggcagcaaggttggctcctccctcccatcttctggcatcactgggcccctattggctggtccatgtagctgactttccaaacaaaagacctcgg

SEQ ID NO: 95014 - DNA, 888 bp, Homo Sapiens
cattcttgctgggaatgaggctgtcaatctacctgattaagagtgagagaagagagtgtttgctgcgcatcaggatgtttggtggacattccattgtggatggaccctggcttcttgcccaaccgcttatgttggaaatgcccaccagactggacctccctggagaccaaacgcagcccatcttgggagctggccagtgccacatcctccccctcttgcagggaccagctgagtcagttgctccatctcgcacctctcaacaccttcctgtgtggcactggaccacctgtggaagccctggcatgccttgctaccatagctcgcagaagttatggagaaaaggaggcccacacagactgagaaaacaccaaggcgagggcatggctgggatcccagcgcaggatccccgttcttctgcagtcacagtcttggctgaactgagccctttcctcccagtgtttggcttggatgctagaccaggtcctgggagaaacctcactcctgggaagctcctgcgtgctacccctgtcagctgggagacagctctgccgcatttttttcagctcctccattgctctgctgattcacagcctccagcttccagaacctttcccctgtcgggacagtagtccaactccgttttcacatgcttgtcctatttgctcgttgggttccaggaggctctctccgtcccctggctctgtgtatggcccatcgtccttaccacactgtcctgcaagtgctcgttaactcacctggcttctccactgccctctctgttccctcaatgaaggaaccctgggatcttgctcgcccctagtatctggcacatagtatacccccaggaagtatttattgtgaaaatcaataaattacttgaattgaaaa

SEQ ID NO: 95015 - DNA, 398 bp, Homo Sapiens
gggccgcgctagccctctgccaccccccagctgcccagacccgcgcctgccccctcgcgcctctccgccgccggccctgagccccagcacaccgagcagggccccacattgcagcagacggagcagggcgcactcaaggcgggcaggccagggccgagatgcaggggagaggggagaaccccacggtgatggcgcttgaggtggcggcccaggctggagcgtgaggagaagcggagctcgcagaccaggcagcagtagggtttctcaccagtgtggacgacctggtggtgcagcaggccggtggagtcgcggaacccacttggcacaggcagagcagcggtagggccgctccccggtgtgcgagcgcaggtggttggctaggttgaagctgtcttgaa

SEQ ID NO: 95016 - DNA, 441 bp, Homo Sapiens
tattttttggccagcctgcttccttccccctttcccctccctccctgcctgccatcatctgcctggtgagtttgcatcactcctagggcccaggggtccaattaggggactcccccagggaagctgactgaggcaatccactcgcaagggggcctccctgagctgaagttttaattagccatcactgctctccctgacactctgacctgcccatagctctaccatcccaggctggccttgtggcaggaggcagaaggcaggactggcgttcaacccagctgccgagcagaagctgccctggcagagcagagagatgtggccaggcttccctcccacacagctctctgtatccacctcagcatcacctcatttagtccagtaaatggattacaaaataaatggactaagcgacttcatccattaaatagattaaataccaaa

SEQ ID NO: 95017 - DNA, 312 bp, Homo Sapiens
aggagaagaaagaagctttcactccaggcaggaggaacagtgtgaggaactgccaggaaagctgcagaacagaggtctgaaaacataagagaagccaggaaaatgcaagtccttcctcctgaccctagaaaatctctgctgccaaggctgggactctgctgccaacttcaggcctgggaaaaccaagactccaggagctctacctctaggattcttccaaacatctcaccatgtcctctgatacctctgtagtcatctgccacaacctacttctgaataaatcctacattccacctttctgtgcctgtaaaa

SEQ ID NO: 95018 - DNA, 744 bp, Homo Sapiens
ttacatattgagccatctagctcatttatcactgacgtctcaatgacaattttaatgaagatgttcattatttttttcattcttactcaaatacctatcattaattaagagaagagtttgagatgtataaggctaataaaggaagtgagagtgtggtgaattaagtgatgagtattatgtacaattgcctttacaaaaaacgtatttttactgtggaagaaattcatgcagagatgcctgtggaaaagtatcaataagaaaacaaaacacctttaacactatgacatactgattataatatactatgatatgtattattacagcattacttacacattctactttaggcaatgtaatctacttctgaatgaccttgttaatttttaaggcatcagtgcatcaagggcaaagatccataaaataaatataaaaacaagaaagcattagctaatttgtggcatagagaatgatcactgtatattatatctgttggccattccatataggtaataaattgtacatcttattgtaaaaatgttatagcataaatttcacatcatttttcaacacttcatttaaagggctaaactgatctggcagtattctcattttcattgttccatcagctccacaggagaaaatgtgatttgcaggccctgtctcaatttgcatcactccagttccaatatttctaaaaatggactgccgagcatgttcactgacaaaaagtatgagaagaccaaa

SEQ ID NO: 95019 - DNA, 139 bp, Homo Sapiens
cttagtgtaaaaactgtactgttttggaaatgtgctgtgaaatattaggtttaactgtgtagatcctagaataaggggatttatatagatgaagttgtaaccaagaaactggttattaaaaatttatttactccaaaaa

SEQ ID NO: 95020 - DNA, 494 bp, Homo Sapiens
ggagacggagtctggctctgtctcaaaaaaaagaaacgagctttgaaaaatatgaaagactggcgataccaagtgctgtcaaagatacagaacaattggaacttacgcaatgccacgtggggtgtgaattaatacaaccatacaggaaaacgggaagaacctactaaaactaaacacgtacctatcttctcccccaataattcccaacaaaaatgagtgcaactgtacagcaaaagaatgctaacagcatctctaatcgaaacagccacaagctacaaaatccaaaatgtctactaagaaaagactagaaaaataaattgccacatactcatgcaaaagaaaattatacagcaatgaaactgctgctcgtaccatgaatgaatctcacaaccatgctgaattcaagtaagatacaaagagttcaaactgtaggattccaaaaaagtacatagcaataaaaacaaattggggctttctttgttttttgttttgtt

SEQ ID NO: 95021 - DNA, 342 bp, Homo Sapiens
gcagcagtagtatgaagataaatctagtgtttattgctgcccctttggttaactagcagaaagctccaagttagagtctacaacagaatcacttccttcatgatgcctgtagcatactataaatgctctaaatactcaggaatgggatatcatgtaacttagtggttaaaacatgaatgttagaggcaggtggacctgacttatcagctgtacaactggcaacttatcaaacatctcttcagttttgttacctggggattatcataatttactactaagattgctttgaacattaaatgagctattcaggccatttgattaaaagggcacctggcatacaaa

SEQ ID NO: 95022 - DNA, 1184 bp, Homo Sapiens
  misc_feature (604)..(631): n is a, c, g, or t
ttcccaagggccgtatacggtctaagtagcgaggcctgggtggcgaattcgcacgagggacgggggggcgcgggtttcccgggaggccgcggccactcccccccgggccggcgcggcgggggaggcggaggatggaaacacccttctacggcgatgaggcgctgagcggcctgggcggcggcgccagtggcagcggcggcagcttcgcgtccccgggccgcttgttccccggggcgcccccgacggccgcggccggcagcatgatgaagaaggacgcgctgacgctgagcctgagtgagcaggtggcggcagcgctcaagcctgcggccgcgccgcctcctacccccctgcgcgccgacggcgcccccagcgcggcaccccccgacggcctgctcgcctctcccgacctggggctgctgaagctggcctcccccgagctcgagcgcctcatcatccagtccaacgggctggtcaccaccacgccgacgagctcacagttcctctaccccaaggtggcggccagcgaggagcaggagttcgccgaggggcttcgtcaaggccctggaggatttacacaagcagaaccagctcggcgcgggcgcgnnnnnnnnnnnnnnnnnnnnnnnnnnnngggggccctcgggcacggccacgggctccgcgccccccggcgagctggccccggcggcggccgcgcccgaagcgcctgtctacgcgaacctgagcagctacgcgggccggcccgggggctcggggggagactcgaactggatcatttccttgccccacctgtgcccattgctgcggacatacataccctcgtgggacaaaggcgtctgcggagcctggaactgcggctccaccacccattgctctgtaccggcccacgccagggacatgtatctattcataggacaaggcaccccaccactcttgccgccccacctaaataagtcataccatacacgaacccattcccctcatatcactgaccagactccgctcgcaacggcacgtcgtgcgacccacatgctcagcatgcaactcccctgataacacatagactctaggctcatgacaaaggatgggtgttaaaaactgagagaccggcagtgagatatccgcacgccgcatctactgagaaagcaccggattcagcacatcctattcctcctccgtctctc

SEQ ID NO: 95023 - DNA, 449 bp, Homo Sapiens
tttttgacagtgaagaaatcaggtttttcttttgacataataatgctaatttggattcctgggtgtgatttttgatagttgggatttacaggtgttcacagtacttttgtgacggccacagcttgacatcacacaatgttgacaggaagtatgcacagagaaggaatctcaggccggaattgctgccaggaagccagaaggcatccctggactgtgattaatatagcatcttcttttcttcacactgctcttggctagagtttgtcttctttgaacttctataacatacagaaacctaggcctgctgaaccagatgtgcattttaacatgatctctgggtgactggcgtgcacagtcatgtctgtgaagtattgcccaagggagtctgctgagacaattattttgcgaggtgctggtacgaatacagaaatggatataataaaggcaac

SEQ ID NO: 95024 - DNA, 888 bp, Homo Sapiens
ggtggatgtggtggtctgcactctggtgctgtgctctgtgcagagcccaaggaaggtcctgcaggaggtccggagagtactgagaccgggaggtgtgctctttttctgggagcatgtggcagaaccatatggaagctgggccttcatgtggcagcaagttttcgagcccacctggaaacacattggggatggctgctgcctcaccagagagacctggaaggatcttgagaacgcccagttctccgaaatccaaatggaacgacagccccctcccttgaagtggctacctgttgggccccacatcatgggaaaggctgtcaaataatcttttccaagctccaaggcactcatttgctccttccccagcctccaattagaacaagccacccaccagcctatctatcttccactgagagggacctagcagaatgagagaagacattcatgtaccacctcctagtccctctctccccaacctctgccagggcaatctctaacttcaatcccgccttcgacagtgaaaaagctctacttctacgctgacccagggaggaaacactaggaccctgttgtatcctcaactgcaagtttctggactagtctcccaacgtttgcctcccaatgttgtccctttccttcgttcccatggtaaagctcctctcgctttcctcctgaggctacacccatgcgtctctaggaactgctcacaaaagtcatggtgcctgcatccctgccaagcccccctgaccctctctccccactaccaccttcttcctgagctgggggcaccagcgagaatcagagatgctggggatgccagagcaagactcaaagaggcagaggttttgttctcaaatattttttaataaatagacgaaaccacgaaaa

SEQ ID NO: 95025 - DNA, 1081 bp, Homo Sapiens
  misc_feature (371)..(379): n is a, c, g, or t
  misc_feature (453)..(526): n is a, c, g, or t
  misc_feature (654)..(662): n is a, c, g, or t
  misc_feature (672)..(912): n is a, c, g, or t
tggtgcaaacacagctctctccacaacctcttgggctcaagtgatactcccacctctgccttacaaaatacagggattactggtgtgagccactgtgtctggccagaaaaggcatttttgagaaggcaaatcgtataccttattagcgaaatagaagaatatatatatattgcttatctgagaatgcgtgaaaccagaattgttttgcattttttgaatatttgtatacacataatgagaccttggggatgggacccaagtctgaacgtggaattcacctgtgtttcgtgtatatgcctcatacacataattttgtgcatgaaacagagtttttgtataagaagatacactgcagctgaagagggctgggnnnnnnnnnctcttagggtcgctgcataaactgttgtatgcctggtgctttgcgacttgtcacacgaggtcacgtgtggaatnnnnnnnnnnnnnnnnnnnnnnnnnnnnnnnnnnnnnnnnnnnnnnnnnnnnnnnnnnnnnnnnnnnnnnnnnngcaactgtttctacttccccatttcaggtgtgagatgtaacccaccttgaccataaattggcttttcatagtgctcagatgtttcataattcttcccccaaaataatgaagtttgcagtttaacaacnnnnnnnnngagagggggnnnnnnnnnnnnnnnnnnnnnnnnnnnnnnnnnnnnnnnnnnnnnnnnnnnnnnnnnnnnnnnnnnnnnnnnnnnnnnnnnnnnnnnnnnnnnnnnnnnnnnnnnnnnnnnnnnnnnnnnnnnnnnnnnnnnnnnnnnnnnnnnnnnnnnnnnnnnnnnnnnnnnnnnnnnnnnnnnnnnnnnnnnnnnnnnnnnnnnnnnnnnnnnnnnnnnnnnnnnnnnnnnnnnnnnnnnnnnnnnnaaaaagtactagaattataggcatgagccattgcgcccagccaatttaataatttttttagacgtattattttggggctgggctgtggctaatcttgaagcagtgactttcctatttttttggctcagacccatttttgggaagcttgtgaaccctggaaataagggga

SEQ ID NO: 95026 - DNA, 483 bp, Homo Sapiens; identical to SEQ ID NO: 9853

SEQ ID NO: 95027 - DNA, 481 bp, Homo Sapiens
agcaggaagacctatttttaccacccaggccttggaaagtgttccaggaatggactttctgcagtatgatgacctgcaaaagcagcccttccatttacatttcaaactccaagtcagccgtgtcaaagtttgaaccagaactgtggaggataatgggtcagatgcaattagcagcccagagaaccacacgttgcagtctgatttatttttttgcccatcagattccaagaatcctagtgcttaaaagcaactaaacaatcgctctattgtactgaaataaagcccggttaattcagaaatcaattgcaccaccaggtggggcacactctggccccaaacagatggggttgaaaactcctctcaaaatgcagtcttgttaaattaaaaacttgatccaggagtggaacaaatagggagccatgaatggaatggagtcaggtccactcaggcggattctttcttctcccactccttttccttt

SEQ ID NO: 95028 - DNA, 564 bp, Homo Sapiens
cgaaaaggctgttctggtgttcccccttcaatcaggaacccccaataacaaagttttcagttgccccatgcccagcaatggtgtcctacctctttaaagcatctccctacactctacccctggaggccatcgttgttaaggccttggtaaattggcatttgagtcactcagcagaggccttgccaggagcccaacccaagtaaacagtttcctcgctcctgtttccctgggtcactgcctctctattccagccactcagctctagctgagcagatccagagagagaggaggcccccagtgcctggaggaaggccaccattgtggaatgggacttgcttcttggggctgaggcccaatgtttgtaatcaccatctgtaaccacagcctgatcctgcagctctggccctgctcccccagcccggacaagcaaggaggagaaaaaccaggcccaactggggccgctatagcctcctgattgccattagcaagcaagcagcagacacctggaacctgaccactatgggaggtgaaattctggcctaccttctcaccaacaaacctgtc

SEQ ID NO: 95029 - DNA, 577 bp, Homo Sapiens
cgtttgtcgtctttctccatataaagtggtgaattttatggtatgtgaatcatatatcccatttgaaaagcagactgacaaaaatttgtttctaggcaggaaacaggaaactggggaagccaagtgtagctttaccctactcagggagaacagtgttggagagaaagctgtcagcttttagaacgcgatggcaaaagctgtgtgtgtggcagggagaagtcttggggctttttgcagcaaggaaagttctgggcaaccttcgtggcagtgactccccctctggagcctcagcttcagcaaaggacgagggcatgtccccagagcagccacagtcaggcccagatcaaggtttcaacccacggggaggctgggctgggggctccgtgcaggggtcgagccacaaggcatcttgagcatcccctgcaagagcataaagatgaaagccagggataattaacgccgtcaggcctggggcgactccacaaaatcctttgtggcggcctgaggctgccgtctctcctccaagggctgggggtccccttctgatcatccttctctgcttctttgtcccctccac

SEQ ID NO: 95030 - DNA, 1071 bp, Homo Sapiens
  misc_feature (13)..(13): n is a, c, g, or t
gacagtaactctnacggttataaggtagcgaggcctgggtggcgaattcggcacgaggcgccgcccgctcgcaggtcccgaggagcgcagactgtgtccctgacaatgggaacagccgacagtgatgagatggccccggaggccccacagcacacccacatcgatgtgcacatccaccaggagtctgccctggccaagctcctgctcacctgctgctctgcgctgcggccccgggccacccaggccaggggcagcagccggctgctggtggcctcatgggtgatgcagatcgtgctggggatcttgagtgcagtcctaggaggatttttctacatccgcgactacaccctcctcgtcacctcgggagctgccatctggacaggggctgtggctgtgctggctggagctgctgccttcatttacgagaaacggggtggtacatactgggccctgctgaggactctgctagcgctggcagctttctccacagccatcgctgccctcaaactttggaatgaagatttccgatatggctactcttattacaacagtgcctgccgcatctccagctcgagtgactggaacactccagcccccactcagagtccagaagaagtcagaaggctacacctatgtacctccttcatggacatgctgaaggccttgttcagaacccttcaggccatgctcttgggtgtctggattctgctgcttctggcatctctggcccctctgtggctgtactgctggagaatgttcccaaccaaagggaaaagagaccagaaggaaatgttggaagtgagtggaatctagccatgcctctcctgattattagtgcctggtgcttctgcaccgggcgtccctgcatctgactgctggaagaagaaccagactgaggaaaagaggctcttcaacagccccagttatcctggccccatgaccgtggccacagccctgctccagcagcacttgcccattccttacaccccttccccatcctgctccgcttcatgtcccctcctgagtagtcatgtgataataaactctcatgttattgttcccagaaaaaaa

SEQ ID NO: 95031 - DNA, 549 bp, Homo Sapiens
tcagtattaaactttgcaaagttagtgctgtattcacatcccaaatttggtatgttctctttgtccctccctttgagagccgttatcagagagctcacggtgtctttctgtgtactgtgggcttaattcgtgagcgacacatggtatccctgcctgacatacatgcagtaggtgttttgtagaggaaagcgttcactgaaagaagaagaatttaaacaacaacagaagcagttcaaaactagaacctggagatagtactcagaaagcagagcaccttcttacgtcaagaatgtgttcaggcttggagcctggacagggatctgtgctacccactctgacgtggcccactggcctccactgacacacaggcctgcctcgcccagtggactggatcctcgtcagcgtcgcatcccgagttcccagcagagtgcctgcctcagcctgagactcagtacatatttgccaccatagccctgatgccagaagaaattagtttctctcttcttgatctgttcatgttagattaaaaatcaagactttctagccctc

SEQ ID NO: 95032 - DNA, 393 bp, Homo Sapiens
gtaggcagccgcggctaccctctgcaggcccggccacgcacaacagaggctgtatgcgagaggaatggaaatgagcctcaggacctgccgaaggagccccatcaccttacccgcgcgggactgaggaatgctggccagccggaaaggaaccctcgctgggaacgccgctctcgcgcctctgaaaccccattgagaagaaccctttaatgcaattaaagcgcatttcattgcaggcctgggaggagggaacgaccggcaagcttttttctgtctcggacgtgtgtatgcacctttgtgggccgggttacttagagaccaggcgggaacttgaactccctctctcgcagacgttctgtaacatcagaaaagcgtacccataaacagattggtttt

SEQ ID NO: 95033 - DNA, 489 bp, Homo Sapiens
caggaaacgtcaattatgaactgaattcttccagaattgctgagcttttcctggcaatggcttctgtctccctatttctctctcactcaccagggcatgcgcctcttgttccctccttcttcaccatccagggctcttttccttgctccaataatgagatcacatctggcttagaaacagaaactcccaatgataccaaactcctgtagttctccaacatcactttcctgtacaaaatcctctgagcagggttcagccattcccattcctcttgagagaaatttacagccacatccccaaatgtcaccaaatccttggacatggctttaaggattccagaattcgacagttcttctgtcctactccttcagctcctctgtgggagagggacagtatcctgagaaagtcgagcgcctcctccctccagtgggcacactccttcggcgcggtccttggaggccggggctgggccagggcccgggccagggc

SEQ ID NO: 95034 - DNA, 569 bp, Homo Sapiens
  misc_feature (459)..(459): n is a, c, g, or t
  misc_feature (536)..(536): n is a, c, g, or t
  misc_feature (548)..(548): n is a, c, g, or t
gcggccgcctgcacttgcgctggggactcgctggactgcggtgggcgcgggctggctgcgttgcccggggacctgccctcctggacgcggaccctaaacctgagttacaacaaactctctgagattgaccctgctggttttgaggacttgccgaacctacaggaagtgtacctcaataataatgagttgacagcggtaccatccctgggcgctgcttcatcacatgtcgtctctctctttctgcagcacaacaagattcgcagcgtggaggggagccagctgaaggcctacctttccttagaagtgttagatctgagtttgaacaacatcacggaagtgcggaacacctgctttccacacggaccgcctataaaggagctcaacctggcaggcaatcggattggcaccctggagttgggagcatttgatggtctgtcacggtcgctgctaactcttcgnctgagcaaaaacaggatcacccagcttcctgtaagagcattcaagctacccaggctgacacaactgggacctcatcngaacaggattcngctgatagaaggcctcaactt

SEQ ID NO: 95035 - DNA, 335 bp, Homo Sapiens
  misc_feature (13)..(13): n is a, c, g, or t
aataaaaacaggnaggaggagaaaggaggaagcaacaccagccgctttggggaggagctcctagcctaccaagagagatggaaagcatagactgggacccgaatgtcaccaccatcatctcatcttcaccaccatctggcagcttccatgcctcctaagccagtgcgtcccaggcactgggcacaggctctgcccaccttatcaccagtcctccggacagcactgcaagccagctacctttatcaacacacccggttgatagatggctcatgtatgctatttacttcatgtatactctatttgaaattttctgtaataaaaagtttaaagaaaaa

SEQ ID NO: 95036 - DNA, 355 bp, Homo Sapiens
tcatttttttccctccctcttccatctagctctcccctccatggcccatctcatccacctctgccatctccatgtccaagttcaggggcagcactggtatgtgatgttggcagcagtgcccaaacatcagcaatcagtctactgctgtcccagcactcaagccaggggctgtgaagggtgaaggtgaaggctctttgggtcatctgacccttgtctccactcaaaatgagacaccagggtgttctccacccacatacattcaggattgctgtctccagtctctatttgagacatcagagatgtcatcatttccatatgcttctcctaataaagtaacatccatttaaaggcaaaa

SEQ ID NO: 95037 - DNA, 710 bp, Homo Sapiens
  misc_feature (119)..(119): n is a, c, g, or t
  misc_feature (138)..(138): n is a, c, g, or t
  misc_feature (160)..(160): n is a, c, g, or t
  misc_feature (163)..(199): n is a, c, g, or t
  misc_feature (217)..(217): n is a, c, g, or t
  misc_feature (282)..(282): n is a, c, g, or t
  misc_feature (373)..(373): n is a, c, g, or t
ccggaaacgggcggggcgcgggccctggcaaaagaaactaatagctgtatgacaacagccaaagagtaaatatcctttcaagtccaatcctgcctaagatgtcaaaatcaagaatgaanaggttatgtgctgaaacanaatgaccttcacaagatgcagnctnnnnnnnnnnnnnnnnnnnnnnnnnnnnnnnnnnnnncagagccccataaatganaagccacgaagactgaggttacacagtgatccacagttgccacaaaactgagcaggcatcaaggnacatcttggtgttgaatgaagttgttccatatgggctcatttctcagtactgaagaatgggattttggacacagaagtgattttgataagngacagaattctgccgaaggccagaggcaaaaagaggcaaaacaaggaacataaaaatagagaatctacaaattagcatgttataattactctcttgcatagcatttaaggacatctttgaaaagattcaatgtcttcagcaactgtatctaactagcatgtactataactcaaattgacatgattcctaaagagaagcatcgggacaactcttctatagtgatgaggcattactgaacaatgtttttggttgataaacagtaatagaaatttgggattaaaatggccttttcaaaggagtaggtcattcctatgaaaataatagatacttaaattta

SEQ ID NO: 95038 - DNA, 635 bp, Homo Sapiens
  misc_feature (20)..(21): n is a, c, g, or t
  misc_feature (106)..(106): n is a, c, g, or t
gcaaaacggtcatcgtcagnngcgtccaccagtgagctgcttcgctgcctgggtgagtttctctgccgccggtgctaccgcatgaagcacctgtcccccacggacnccgtgctctggctgcgcagcgtggaacgcttcgctgcttctgcagggctggcaggaccagggcttcatcacgccggccaacgtggtcttcctctacatgctctgcagggatgttatctcctccgaggtgggctcggatcacgagctccaggccgtcctgctgacatgcctgtacctctcctactcctacatgggcaacgagatctcctacccgctcaagcccttcctggtggagagctgcaaggaggccttttgggaccgttgcctctctgtcatcaacctcatgagctcaaagatgctgcagataaatgccgacccacactacttcacacaggtcttctccgacctgaagaacgagagcggccaggaggacaagaagcggctcctcctaggcctggatcggtgagcactgtagcctgcgtcatggctcaaggattcaatgcatttttaagaatttattattaaatcagttttgtgtacagtatgtgtctagcaaagccaccaaaggcctcacctttcccacaatctct

SEQ ID NO: 95039 - DNA, 489 bp, Homo Sapiens
ctcacaggacagggctccaagtgggtggcccagaaccctgcagagaaaaagcctgtcctcctcagggcctctgtgtccaccagagcatctctgcatagtctcccaatttggggggccacgcccctctccggggtgggaggggaggcggtcaaagcaggcaaacctcagagctgctctgttgccctcagggtggaggaggtgaactgggcttcatgggagcagacgctgcctacgctgtgtgaggacccgtcaggggcaggtgtccctcgaactctcgagaaccctgtcctggcttcccctcccaaggaggatgaggatggtgcctctgaggaaaactatgtgcccgtccagctcctccagtccaactgatggcccagatgcagcaggaggccagaggacagagcagaggatctttccaaccacatctgctggctctggggtcccagtgaattctggtggcaaatatatattttcactaactaaaaaaaa

SEQ ID NO: 95040 - DNA, 620 bp, Homo Sapiens
ttggagctcttcaaattcaccatcggcatgggcgagctggcctaccaggagcagctgcacttccgcagcatggtgctgctgctgctgctggcatacgtgctgctcacctacatcctgctgctcaacatgctcatcgccctcatgagcgagaccgtcaacagtgtcgccactgacagctggagcatctggaagctgcagaaagccatctctgtcctggagatggagaatggctattggtggtgcaggaagaagcagcgggcaggtgtgatgctgaccgttggcactaagccagatggcagcccggatgagcgctggtgcttcagggtggaggaggtgaactgggcttcatgggagcagacgctgcctacgctgtgtgaggacccgtcaggggcaggtgtccctcgaactctcgagaaccctgtcctggcttcccctcccaaggaggatgaggatggtgcctctgaggaaaactatgtgcccgtccagctcctccagtccaactgatggcccagatgcagcaggaggccagaggacagagcagaggatctttccaaccacatctgctggctctggggtcccagtgaattctggtggcaaatatatattttcactaactcaaa

SEQ ID NO: 95041 - DNA, 580 bp, Homo Sapiens
gggaaaccaaagggacttggagtgcagatggcatccttcggttcttccagacaagctgcaagacgctgaccatggccaagatggagctctcgaaggccttctctggccagcggacactcctatctgccatcctcagcatgctatcactcagcttctccacaacatccctgctcagcaactactggtttgtgggcacacagaaggtgcccaagcccctgtgcgagaaaggtctggcagccaagtgctttgacatgccagtgtccctggatggagataccaacacatccacccaggaggtggtacaatacaactgggagactggggatgaccggttctccttccggagcttccggagtggcatgtggctatcctgtgaggaaactgtggaagaaccagcactgctccatccccagtcctggaaacaatttaagagcccttcggtccagtggtacagcggcagcaaaaggggagaggtgcccaagtttcattgaacttacaccaccacacaagaggtggagaagaggacttataaatattgtttctatgacatttgaaaataaatgttttactccatgctaaa

SEQ ID NO: 95042 - DNA, 346 bp, Homo Sapiens
  misc_feature (105)..(117): n is a, c, g, or t
caggttgggcctcaccctatgagcagggaacccaccttccccctcaacaaaagaaaagatgactttggaatgttctggattcccacagctgggaatgttcctacnnnnnnnnnnnnnctctgcagaagacagcaagatgccccagggaatgtttgtgaaaaaggatgactggatgggaagcaagctgaagaaaaagaaggaaagaaagagagaaatcagtaaatcaccacacaagaggtggagaagaggacttataaatattgtttctatgacatttgaaaataaatgttttactccatgctaatagtgaatgtgatgtcttcagtttgaagggctttaagtgaag

SEQ ID NO: 95043 - DNA, 1144 bp, Homo Sapiens
  misc_feature (1050)..(1090): n is a, c, g, or t
cggtcccgaggcggcgcaggcccatggcggagacccacgcctgggctggtacccgccctacgccaacccgccgcccgaggcgtacgggccgccgcgcgcgctggagccgccctacctgccggtgcgcagctccgacacgcccccgccgggtggggagcggaacggcgcgcagcagggccgcctcagcgtgggcagcgtgtaccggcccaaccagaacggccgcggtctccctgacttggtcccagaccccaactatgtgcaagcatccacttatgtgcagagagcccacctgtactccctgcgctgtgctgcggaggagaagtgtctggccagcacagcctatgcccctgaggccaccgactacgatgtgcgggtgctactgcgcttcccccagcgcgtgaagaaccagggcacagcagacttcctccccaaccggccacggcacacctgggagtggcacagctgccaccagcattaccacagcatggacgagttcagccactacgacctactggatgcagccacaggcaagaaggtggccgagggccacaaggccagtttctgcctggaggacagcacctgtgacttcggcaacctcaagcgctatgcatgcacctctcatacccagggcctgagcccaggctgctatgacacctacaatgcggacatcgactgccagtggatcgacataaccgacgtgcagcctgggaactacatcctcaaggtgcacgtgaacccaaagtatattgttttggagtctgacttcaccaacaacgtggtgagatgcaacattcactacacaggtcgctacgtttctgcaacaaactgcaaaattgtccaatcctgatctccgggagggacagatggccaatctctccccttccaaagcaggccctgctccccgggcagcctcccgccgaggggcccagcccccaacccacaggcacggaggggcatccctccctgccggcctcagggagcgaacgtggatgaaaaccacagggattccggatgccagaccccattttatacttcacttttctctacagnnnnnnnnnnnnnnnnnnnnnnnnnnnnnnnnnnnnnnnnnccataccacagagctagattgcccaggtctgggctgaataaaacaaggttttct

SEQ ID NO: 95044 - DNA, 352 bp, Homo Sapiens
aagcgccacgccagtgggggctgatacagctccagcctgtgcggggcaggcgttagactgcagaaggggagagcttaggataaccgcactcaggtggcgcaaggaagtcagccacgaagaaaaagaaagggaaggaaaaacatcgtcccagactgataaactctctgctccccggtgtaacgtcgctcagtatagcgagagcatggatggacgaatgaagccctcttgatgcagactatccaaaaatttaatttacaaagggctccaaaaatttaaattgcaaaggttccagcagtgtaaaagcctcagtcagaagagtggtcaataaagtagcacatcacctctggtaaaa

SEQ ID NO: 95045 - DNA, 456 bp, Homo Sapiens
ccccacctgcagagtcaagtccctcctcccacctcagcactgctagaaaagagcttcaggatggagccacacatgtcactcaagcccaagggtcagtcaacagcccacagccctaaactcatctgtccaatgccagaccctgcaactgctgatttacatgaatcaactccatcatgcaagcctcatgacatcccaatgagccaccatcctgtgaggaagcccagagcacatgaagagaccacctgcacatgttcagatccactgccccagctaagatctccgctgacagccagaccaatcaccaatcttaggagctggcgagccttcagatggtccaacctttgaggccccccagaggagccaggtggagcatagatgagccatccatgtggatccctccaccaaatggaagatttaggagcaaaataaacaatgttgtcattgctttcacccaaa

SEQ ID NO: 95046 - DNA, 375 bp, Homo Sapiens
cgaacaaaaccatctggactctgctgcatggccccgtctgtggctgctgtagctgcccgtgggacagccctgcctccagcttctgcccttggctgcgaaccatggagtcccggctcccaggcctatccccgggatgatgcactagacatttttgtggcagggtgcagaacaatggattccccctgatgcttgctttaagcatgaatttttgttttgcaaatgcaatcctgggaaggaagggagtccaccaattagtgggaacagctcttactgactaatggatggttaactttacaagtggaatgatttttacaaatgagctacaatatgactgtaagtagaaagtaaaaaagcaaatctttttcatcctgcaaa

SEQ ID NO: 95047 - DNA, 807 bp, Homo Sapiens
gccaaatctcgtggtgtttcgcagaaaaaaatccagaaaatttcaaatgcagttgagtattcttttttaaatgcagattttcaaaacatattttttttcaggtggtcttttttgtgtctggcttgctgagtgtaaaagttgttatctggacgatctgtctctctgctccaaagaaattttggagtgagtggcagtcctgcgccagcctcgcgggacacgtgttgtacataagcctctgcagtgtcctcttgttaatggtggggttttctgctttgtttttatgtaagaaaataaacacgacatatttaaagaaggttctttcacctgggagcaaatgaacaatagctaagtgtcttggtatttaaagagtaaattatttgtggctttgctgagtgaaggaaggggagcaaggggtggtgcccctggtcccagcatgccccgcgcctgagactggctggaaatgctctgactcctgtgaaggcacagccagcgttgtggcctgagggaggccctgctgggaccctgatctgggccttcctgtcccagggcctatgggcaactgcgttgaaaggacgttcgccaagggccgtgtgtaaatacgaactgcgccatggagaggagaggcactgccggagcccttgccagatctccctccctctctccgtgcagtagctgtgtgtccgaggtcagtgtgcggaatcacagccaaggacgtgaagagatgtacgggggaaagagaagctggggattggatgaaagtcaaaggttgtctactttaagaaaataaaataccctgaatggaaaaaa

SEQ ID NO: 95048 - DNA, 399 bp, Homo Sapiens
tttctaagaaaggatgacagtaatttaatatatgcaaatatacatcattttcctcttaaatgtatgctgaatgagaaaatactattagagtggtaaattgagagacaaggatctggcataaaacagactagaaaatttacccaacaataggaatctctacatacataacagagataaagccatctctaatcctcctgggtagaattcttgagtggaagagttcacagaagtccaggatccatctatgtatttgagtcactttgttcgtaaatgcatttggtcctcataactctcccaaatgtattcactttgagcagtgtttcacagtgatgatggattgaatcaagtccttctcacatatttaatatatactgaacatcggtgcgtggatatgctatg

SEQ ID NO: 95049 - DNA, 471 bp, Homo Sapiens
cactaactgcttagcaaacaactccaaagtctcagaggtttagtgcaataaatgtttgtcattttctcacatgacagtgagtaggtgaaggagctctgatccacatggccattcagggtcccagaattcttccgtgtagtggatctacctttctttacaacatggaattaattacatattggattatctgcatctggcagagagtgtgtatgtgttttctcataggccgggactggaagtagagtagcatcatttctgactacttctttttggccagaagtcagttgcatagtcctgtctagcaagggaaactgggaaatagcatgtagctatgtattaagggaagcaataaaattatttgatgaacacatggcagtcatgtgatcctgttaaaacgtaagaatcaaattggtttattgtttaatactttccaatgttttccttctctctctctgtaaaaaacaaaacaaa

SEQ ID NO: 95050 - DNA, 390 bp, Homo Sapiens
cagagtgtgccagggtcccattgtggccgctcgtgggagatcccatcctcagctaacctggactcccaccaggagtgaagctttcctctggacatgctggaggcctaggtgtgagctgccacagccatgcgggtgcttctgggaagagggaggagagctggtgtccagccccatgccagccccacaggggctgagagcagaacagttgagagccagccaggcccgctgggctcgggaggccttggaagccccactctgcccccagagcatgcctggtgcttcctttcacaagttgccatcagcataatggaccagtgtgatgccatgtgagatggcaagaaataaagtccctgtgaaataaattatatggatgcagttcgctacaggaaa

SEQ ID NO: 95051 - DNA, 291 bp, Homo Sapiens
attggacaactcaagttgccccaagtcctggtggtaggccaacaccctcacaattccagaaatgcctccttatcagctgaaagctccagcccattgacaactgctttctgaattctgaggacgctccctatcctgtagcgctgtggatggctcctgtggactccagtttatctcagcctcaaagctaatagagttaaaccagctgctcaatttaaagaggaactgaagcagtgagatgttactgtattctgagatggggctaataaactttaatagatttcatctaaaaaa

SEQ ID NO: 95052 - DNA, 368 bp, Homo Sapiens
acgcactctcccctttatgattctactgacccatggagtttttccgtccttgccattttggctgtttttgactcactagaagttgtttttgaagccagttcctagtcatgaaactaaacatgaaatgatcgctctggtgaagcaaaagcatcaaacaaatgacctatcaggatccaagagcagccatgcagaaagcccatgggctgaagcaggtggtggcctggtgctgctgctgatcacctggactactgtgggcagctgacatcacctcctgagcatcactttcttcatctgtaaagtgaattcggaagtgtcaagtggagttgttgtgagaattaaataaaacaagccagcttttctagccaaaa

SEQ ID NO: 95053 - DNA, 545 bp, Homo Sapiens
gagcccgcgcgcccccctctacccccgctgcccaggaatggtaggctccaccgctcggcagccggcttccctgctcggacgccgagaaccgccaaagcgcacttcgattttcagaattcctcctgggaatgctgactccttgcttggtgccctgatgcttctctgagataaactgatgaattggaaccatggtgcaaaagaagaagttctgtcctcggttacttgactatctagtgatcgtaggggccaggaacccgagcagtgatagcatggccaagactcctgaattgctacggcgataccccttggaggatcacactgagtttcccctgcccccagatgtagtgatcttctgccagcccgagggtgcactgagcgtgcggcacggcgcatagagccttcgggatgatacctcttttgtcttcaccctcactgacaaggacactggagtcacgcgatatggcatctgtgttaacttctaccgctcattccaaaagcgaatctctaaggagaagggggaaggtggggcagggtccgtgggaagg

SEQ ID NO: 95054 - DNA, 363 bp, Homo Sapiens
  misc_feature (83)..(84): n is a, c, g, or t
  misc_feature (89)..(90): n is a, c, g, or t
cccgggcccagatgagtttgcgctgaatctaaagtcggtaggtccctggacattttctatatggaagccaagaaaaacccctnnccccnnccacctctaaccagtgtggatcgggtttctggcacttgcagtgtctgcacggtctcctctccttccttctccattgccctttctcacccgcctgggcccgccaccctgaactaccgggacacatgctgttcctgcctccaggcgtgcacttcttcctgcagcctcctcccctactaactccttcttgaacttgatagctccattgtcactttcgagtcttccctaaaccactcccttcccaaataaaactgtttcatgtatttttctttcaaa

SEQ ID NO: 95055 - DNA, 954 bp, Homo Sapiens
tttaaatttaacagagtttatttggtccacagaacaactcatgagttgggcagcactcagaaccagaagcagttcagaagactgctgcagcagcttggacagcaagtttatgggctaaatgcagaaggaaggcaaagaaaacgtatttcaatatcgactagagtctttaccagtcagcaaccacaaactaacttctgttggtggtttctgactgataaaggcgctagtttcatttcactgttttatgctgggatttggtttgcttagtgggaacttaaagcccaggagccattccagcctaatgacctcccaatttatatatatattttttaattattatacatgacctcccaatttaaaaaaatattttagcaattcctcacctatcagcctcttgttatgatagattgaccacaacatggccataaacaccactccctgtcatgatcatggctggtttttcttcttctcagcacaaaactcctgagtcacaacatcaggctcctggaagaaatattccttttgttgttcacccatttttgtcaccctaaccacagtgagaccttctctcatacctttaatggctacagatatacatttaatacccttgaaagaatacaatgcaccaggaccagggagactgcaatgaggactataagaggataataccaagacactggagtatgctccttagccaatgcccccattaaccagatcaactaaaatgaacaaaataaaaacaaaggttaatgggtagaacaagctatcaacttagtctctgggtccagagagcagtcagtagagaagatttctagatttaaactcagaatgtattttcctggtttgtcatttaaatgtctctgattatgtcattggacatttcagtgtattccctgaatggtccatgcatgcatcaataggcatgagagctgtcctctagaatttagatcaagt

SEQ ID NO: 95056 - DNA, 607 bp, Homo Sapiens
acagctgaccctagcctccaccttcactgtcacgctgctctttggctccgaccctcctgccaccccttgtgaatattcaggtgccagggccctctccatctcaacatctctactcaccctgcaaagccccttgagccacaggaggtcacatgtccacagcttccagggacaagggtgtggacattttggaggagccatgatgctgcctcccacacctccgttcgaacattatcacagcccagacagattctcctgcagcctggggcctggaatgcaaaggccactggggccaaatcagctgcacggagctgagccagcagagccgcaggcagcagccgccctgtgagcagctgggaaccactgagaagtggagatgtttgtcatagcagcagcagctggcagatacttgctatccacacaccctgggcacacatgggcaccaaggctgggggcgacagaactttacactgtgggattctctcctgacagccaagaagggggttttcccttctaccatgaagaacttccccggaggtctccccacatcttataattaggaagataacgtggtcatcaacaataaaagctgcccatgcaggcgcctgca

SEQ ID NO: 95057 - DNA, 624 bp, Homo Sapiens
  misc_feature (39)..(39): n is a, c, g, or t
aaatcttaattctgcagtattggagcacggttgtcatanattgggttcgagacaacaggaggaagagcagtcgtcaaatacccatgttcatcagggagaaatacttgataacacagtctcaccacatggaggtcacaatctccaatatcattcagctgtttttcagggacattgaatggattgattcctgcctttattcttgtaataatagcttcttttacttcttttttcttcacacatcgaatacccaaattttggaaaaacaaaggtctgcgttcttgtccaaattctgcttcatagtagccgtctctgcagtcttttccaactaaatcatgaggatgaggtttatatgggtcattctttgttactaatgtaattctcacttttccttttccataatagttcataatctggatagaagggtatgttcggttgttgtctgtgctgtgctcccctggaatgctgcctgctgatcgcccttcacatttgtatctaaaacgcattcccctctgcctgggttgttcaattatctctatatacgggttatacgcaccggaggccatggctccgctccccgcaccttcccgcaggcagctcccagcgtcctggccggaggcggccgca

SEQ ID NO: 95058 - DNA, 596 bp, Homo Sapiens
  misc_feature (73)..(73): n is a, c, g, or t
ccacagtggcataaatagatgctacctcaaactttataatgcacatattcatgttctatgtaaataccgaagnctttttaactagccctttattgctactcactggttcaggtttttgtagcaaacgtccttgtgtaaataggctggcctgtttctgttagtatatccacaggttaaattcccaggattgaaaccattgagtatgggcatgtacagtttttattttgagagatgctatgaaattgttcccaaggaaggctacatcaaagtatgccaacataagaaatgtttaagaggaactttctttcccctctgccctttgccatcactgggttttaccaaaacttcaccaaaatgtttccagtctcgttgaaaaaaatacttagcttattgttttcacttgctttagaaaattcagtaggtctacgcattctgttacatgtttattgttcattaaaaatctaaacatcctattcatcgtattcagccatttttttctgttgtttcttttattaatttatacgagctctttgtaaattaagaaaaccttttgtctgtttatgtattataaatatttttcctatttgaaaccaaaa

SEQ ID NO: 95059 - DNA, 189 bp, Homo Sapiens
tttccaagcgtacaagattaatattctgtcagagcaagaacactttgttttggatttctcccttcccctcccacctcccacctctggaatataccgtctgctcaagtacccaagataagagttacacagatcagggcagaggaccgggaagaatgaaaaaagataaagggaaggaagtcaccactgaag

SEQ ID NO: 95060 - DNA, 420 bp, Homo Sapiens
  misc_feature (170)..(178): n is a, c, g, or t
gagaggcttgtgtcttttttcccaagcaaagccaaatagcattcaatgagagttcactttggtgatgtttaatgaaaatctaactcagatagaggcctcactggaatactccatgaacagaaatgtaatctgggcaaaaccctgcaggctttatcctgggaaatgtaatnnnnnnnnntcagaatattgtctctattgctgaatcagtagcctggaagtcactgcagaagttttacctgtgggaggctatgggaaccctcttgtgtcatgtgctctcaaatgtgaatgagcgggccaagaactaagaatattcaaaagattttaaatgtccaaataggcagttctggaaatacctcaacattgtttggatattacatttgacatgaaataaaaaggcatatgaaatactttgaaaaaaaa

SEQ ID NO: 95061 - DNA, 657 bp, Homo Sapiens
tgaacagcatggtgccagagcaggttgtgatgaagaaactgagtctcagtgaagtgaactgcctaaggtcacatagccagttggttgaggagccaggattcaaacccaagcccatctgagtgcagagcctgtgttgttatcactgtggaactatgaagcacccttttggtggttgggctttgcgctaccaatagagacgagtgtggaagaaaacaaggctcgcttccctcatttccctcagcgtcaagtgaaacacgcaggcctgaacagaccttcggtagcagcagctgaggaagaaagcaaaggcagcatcaccactccctctctgctgctacagtcaccctgagccagggacctgcaattgttggcatctgacctccttctggccctgacggttctttgtgatttcagttctctacctcatggcccaggaaagttctgctaatcttccaggggccacctcctctgggagtctcgcctggccctcccagtatgagtgttcaaaacacacacttgggccctattataatttgtcagaggtaatgatctggccctacgcacttgggttctctaagggcagggcctggacctccttcccttcttttttggaaatctgcacaggaaatgtcagtaaaatctcacctgctattgtaaaaa

SEQ ID NO: 95062 - DNA, 444 bp, Homo Sapiens
gtgttgcgtagaaatcaccatagtaacatgttcctgcaagaagattgacttcatcctagcattttctcctttgggtgaaacacgcaggaacaagccaaggagtgcggtctcattagttggatttccatcctgagctccgcgtcttggttttgtacacctgctggatcctcttggccatttttctctttatcagcttgccttccaagttctttctgttcttggggcagcggcagtgcaggatggtgggccgcatgggagagtggtgggagttcatagtctttttgtggcgctttggtggtggactagtgttgggactctggctctggtggccggatgaactgtgggctccagttgggttgcgctagctggacaggctctggctggagctctggctccgctggcccgatgggtctgtatggaactctggctgaaggtttggcaatg

SEQ ID NO: 95063 - DNA, 586 bp, Homo Sapiens
  misc_feature (108)..(108): n is a, c, g, or t
accgtgagccgctgggtgccagcaggcaggaggctgcgtggggaagggaacagttaattcattagtcctcaggccagccatgcttttcacattaagcccctttatctncttgcaattgcatctgatcaaggcaatagaaagcaatttggttaagtggttaatttaatcatgctgcagccgttcagaaaccacttaacgcctctgatggcgaatggctccgccgctctctgcttacctggaaagcacgcttcttctaaacacaaggctttcgggcccccagcaactcggtttgcagaatgataaaaatgacagcacgccttcctggctcagccctttcagcttaaaggtctgagagagagggaacgagatgaattctatggtccctatttttttcctcccaacaattgcatgggtgtaggcacaccttcagctcacaggtgctggaactgcctctcagagagatagacttccttgccattccaagaatgtcttattcctaagccttcgccttcgagtcaactgtatcatttttaattacctcattttcgaatattacttttgtaattaaaattctttccattataaa

SEQ ID NO: 95064 - DNA, 415 bp, Homo Sapiens
tttaaaagaaagttgatgtccgaaccaagggccgtattggcttttcttatactctagaacatacgacgacaaagaagattttgatgaagttcaaattagagtcagcgtgctcatcagaaagaaagcgcagccaacacgtttaggaacagaaacggattatgttgaagacaaacaatccattgcgtttgtgttcagtaacccaagcatcaaaggaacttgtggctggggagaaggcttgactatttgaaatctcaggactcctctgtccaggagctcccagactcccgtggagtggaagcctgggggctcgctgaagaagtcacgtgactggaacgtgcttaatgcttggctgtctggtaaggaaaataaagtggtgcattttgaataaaaataaaagctgattttaaatgtgaaa

SEQ ID NO: 95065 - DNA, 432 bp, Homo Sapiens
atgatgcaacatggcagagaaaatgcacttggcttccagctccctcaacagccattaacagcctcctaccgtggctcccacctcctatgtctccagagatcaaggcaatggggagggaaagctggcaggaggcagtcccttgtgggcctgaggccctttggctcctaagtgtccacattctgttctcttccaagtcccttcattgttaagctgattctccaacaagatgcaatgaacagatgcaatgtctaccccgcgctgggcgagttcccgaggccatgggctgtttggaatcacacttcattaagagacaaactgttccttcccttattgtgccttaatgcttatgacaaggcagctctgaattgatcccaagctggagcctctgaatgctttaaagagtttgaatatagacggtttgagagcaaaaaa

SEQ ID NO: 95066 - DNA, 931 bp, Homo Sapiens
  misc_feature (264)..(299): n is a, c, g, or t
  misc_feature (834)..(882): n is a, c, g, or t
acaaacggcgcatttcccttggagtggaacagaaaggaaaccatttaatggcgcccttcttttcaagcatgaatacattttaatgaaactattttattgtatttgaggaaatggagagttgaacattccaaccaatcaatagccaattaattgctataaagctaaaaagaaaataaataaatcctgagtctattttaaacactgcaaaaagttcagagcctcagaatctggccttcccctccataaggtgcacgagcatgtaannnnnnnnnnnnnnnnnnnnnnnnnnnnnnnnnnnntcactcactcccctacacctcagacatacttgaaactcagaaacagcactgagtctccccatgccaattcttgcctgctgtcttcgacttgggtcagagaaggtgagcagacccggcagcagcctgtcccggggctcaggaagaggcaggcccatcccctggccccaagcacccagcacaacagagggtggcgggcagtgagggcctggcgttgcctgggccccacttctcaagccccagctgctgggcctccaaggttgggctgaggatggagttttggctctgggtttgccctgactcctgctggaagacgctgccctggtttttcaccctctagtggccttggacattgagtatttgtagaaatgcagattacattgcaaatggaaacctttgccaggaagacacatgcattttgcttttaattctttgagacatttgattttgtcttagggactgacctttcagcatcaaagaaatacatatctactgtatccgccaaagtttgtgatgcctgcatagacgcttacttgtnnnnnnnnnnnnnnnnnnnnnnnnnnnnnnnnnnnnnnnnnnnnnnnnncacaattgaattgcctttgaagtgggagatgatctgtctccaacggatt

SEQ ID NO: 95067 - DNA, 382 bp, Homo Sapiens
ctgctgatcatggaaaatcttcgcagctcatgcacaggacgcacatttgtcaattagccgggcgaattggaatggagggaaaaacagtagttgaagatcatccctgtggctcccaagatgaaagttactggggtggcctgaacttcccagtgtggctcgaagattaaccacttcagagaataccagatcaacaccgtgttttgcatgcctgcaacttcggagaggaagctgttatttcagaagccaggcagaacaaagggagtcatctggtgcgatcctagtaattagagagaagaggcccctcaggtgactgctgagaaagctcccttaatttgaccctgtttcacacagtccaattttcaataaaaagagacacttcaaa

SEQ ID NO: 95068 - DNA, 519 bp, Homo Sapiens
ctaccccacctcttggctctcagatcgccgtgggctaaccaagatctcaagcttagctttctgtctgatgcaatttcaagctgcagctgacccctgtcttcactctcctcctgctgttcaatgtagctgtcccatgtattgcctgcccttggggcttatcaaaggggatcaaccaattcatcatcaataatttaacagtggcatactaccatagcatgagttaacaaaggggaatgacgggcagagcagtgtcttgatgctattgcgatgggtgctcttgctaaaggagaaattttattaggaagagaagagaggagtgaatacagaccatgtggaattgccatgatgaagatggatggagggaagagaaaagcatcaaagaacagcgttcatgatattagtgatgatgatgataacttattgagcactttctacaaaaatcatagctgacactattgaacacttagtgtcagatattatgtaataaactttacatactaatgaggttaaacatcaaaa

SEQ ID NO: 95069 - DNA, 451 bp, Homo Sapiens
ccagcaaggtgaccctcacaacagactctggaatcagcacaccgaagccagaaaaaagaggcacacctccccaagatgggctctgtggaggctaatggtagaaaccaggctccagagaccaaagggaagctggtatttggttatctccagaatcaactgccatcatgtattcagcagacagcagcgccctgtgtcgtctacctgcactgtatcacatcactctctaggtcatttggctcacaaaattgatttaggagagattattcaattccattttacattttcatgttttggaactctgccagcagcaacttctgttcttccagaggtcaggaagctatggacaaggcatctcttgctgttgtaaacggaactccatattccctttatgaatttcctgtcaatcttcaaattacttcaaatacgattgcccttcacttaaacaatgaaa

SEQ ID NO: 95070 - DNA, 276 bp, Homo Sapiens
atttgaagaaaattatgggatgtcttactttaggtaacagatttttaggttgggctcttttaagtgttttctatgtatctccttttgagaaaatgcatataaccaagccattctttattacatgttatttctgactcatgttagggttagtgaacaatgtacactaggtagaaaatgtaaatttcataaagcagggactcatctgtttaatcaccagtttaaccattgtgctgagaccaattcttgaaaaaaggcagttgctcagaatttgttgag

SEQ ID NO: 95071 - DNA, 529 bp, Homo Sapiens
ccatggacagatcaagcccagtgggcccaagtaaaactcaggcaagggcgccatcagccacagacgtctctggctggaaaagtgacaccccaaagatctcataacaccaggcccaactgtccagactaaaaattataaaggagtcactcatgctcaccaaaccgaaattgagctgtcaagaaatcgagagaatgaatttcccaaagaggccagtttcaactgacgtcgtatgaagctctctctgttttaatctttcatctgaagtaacctgatgttaaccaatcagcttatttttccattattctatctccctgtccccaccctaaaatgaccaatccactttttttctggagcaaccctattaactgagaccaatccactttttgttctttttttcttctttatccaaccccttttctgtctataaagccaatctcctctgcttcactcattagaacacttattctattttatagaaggaagtgttgcccaatgctagaatcacaataaacccaattgagatctttaa

SEQ ID NO: 95072 - DNA, 1654 bp, Homo Sapiens
gaggcctgggtggcgaattcggcacgaggctcttttctggaatgtccaagacctttgtctggagcttccttatgcattttctgtcctctaagtcctcagtgaggagggctggacaagaatccattccttggtttattacagccagtgggggccagtgaaggggtgtcaggccacagggcagctatataggggccaaacaagtgaggtttgactccatccatgtagaaagatatataaatccattccacagtgaaacaggtggcctcgtgggtagtgacccttctgtccctagaggtttattactagaggctggactatcacctgtccaggggaaaaggggatctgaatagagtgaaaggttggactgggtggcccctgaggtctcttccagccctcagtctgaggttctgtattggaaagtgcatggagcccatggagaccgccgagccacagtcctcgccagcccactcctcgccagcccactcctcgccagcccactcctcgccagtccagtctctgctgagagcacaaggagcctccagcctgccctgtggcacataccaccccccagcttggcctccccaccagcccgctgagcaggctgccacccccgatgctgagcctcacagcgagcctcctgatcaccaggagcgccctgccgtccaccgcgggatccgctacctgttgtacagagcacagagagccatccgccttcgccatgccctccgcttgcaccctcaattgcatcgggcccctattcggacttggtctccccatgtggtccaagccagcactcctgccatcacagggcccctcaaccatcctgccaatgcccaggaacatcctgcccagctgcaaaggggcatcagcccaccccaccggatacgaggggctgtgcgatcccgcagccgctccctccggggctcctcccatttatcccagtggctcaacaacttttttgccctccccttctcctccatggcttcccagcttgacatgtcttccgtggtgggggcaggggaaagcagagcccagactcttggagcaggtgttccccctggggactctgtcagaggctccatggaggcctctcaagtccaagtgcctctggaagcctctccaattacattcccaccaccctgtgccccagaaaggccccccatcagcccagtcccaggcgcccgtcaagcaggcctctgagagtgctacccttctcttgtaaccttgcagccaacacccctgcccggcccctgagctgcctcctccagcccatgctcttacaggccctgcacagagtagcactcattaattcttggttaaggaatgaatcaacgaatgaatggctatgcatggacctctgggcagggagacctgggtcttctctggctgagaggggaaggctaaggcatggctgagattcaagccaccattccaggcctctttgcccaagaaagaaacttctgtcacccttgcactctcctgtgttctgagtccctggccaatagcacagccttccatgccccgacccccaccccaagcctctccactaggcctctgccaggatctaagcccatgagcacagggactggctatcccaagacctggcagatgtggctgctcaataaacacttgttgaaccattaagaaattaaac

SEQ ID NO: 95073 - DNA, 990 bp, Homo Sapiens
gcgcggtaccagcgcgactacgaggagatggccagtcggctgggccgcctggatgctgtgctgcagcgcatccgcacgggcagcgcgctggtgcagaggatgaagtgctacgcctcggaccaggaggtgctggacatgcacggtttcctgcgccaggcgctctgccgcctgcgccaggaggagccccagagcctgcaagctgccgtgcgcaccgatggcttcgacgagttcaaggtgcgcctgcaggacctcagctcttgcatcacccaggggaaagatgcagctgtatccaagaaagccagcccagaggctgccagcactcccagggaccctattgacgttggacctggatgtctccaatacaacgacagcccagaagaggaagtcaagccagacccagtgccccaggaaggtcatcaagatggagtctgaggaggggaaggagccaaggttggctcggagctccccggaccagcccaggcccagcacctccaaggcagtctcaccaccccacctggatggaccgcctagccccaggagccccgttcataggaagtgaggtcttcctgcccaacagcaaaccacgtgcccagtggcgccggggagccagaggaacgcgttgtggtgatcagcagctcggaagactcagatgccgaaaactcgtcctcccgagagctggatgacagcagcagtgagtccagtgacctccagctggaaggccccagcaccctcaggggcctggacgagaaccttgctgacccccaagcagaagacagacctctggttttctttgaactcaagattgaccaatgaaagggggttctccctggggctacccccacccctttcaaatttagttctcggagtcccaaaaagaaatgcatgcagagccatctgccaggcccaggagagctctgagctctggccaacaactgcagccaggctgggcagagcactccggctcacctgggctcctggcgtgtcatttgc

SEQ ID NO: 95074 - DNA, 346 bp, Homo Sapiens
tgtgctttgtcacccacgggtggggagagaaggcgttttatctattaaaacacagagataatctcgagaagccgtgggacaaaggacagtagggcgtaggttgcgtgtctcaggaattaacattttgaatggaatggaactgaagactcagcagccttggagcagcttttatgctaattgaggaaactaagaatcttcaccctcagcgtgaaaaaacctccaacggaccataaaaccaaacgtgtaaaagacacagaaactcaactgggaaaaaagaacccccaaaagccgttagttcagtgacgagctgagtagtctccagccaaagcttccaggagaccatgaa

SEQ ID NO: 95075 - DNA, 527 bp, Homo Sapiens
agctgaccgtgcggctcttaatccctggccttgggaaagtgaattggcctgaatagcaaggaggagaacttgggtgtggaaataccggattggcatgagggataccaacaccggaatatgtgatgagatgtgtgaagagcatggcaatggatgcaaactccctttgtgtttctggctttaagcagctctatactctcatgctgtcctacactcagcagcaatttgtcacaagtttgggaaattcttcctactcttttgaactccagcccaatttcctttctatcactgccctaggtcttactcttccagaagaaaaagggaaaacccaacctgaatgtcccctaaaagtgaagaaatgtccacacttctatgtgcagattgtagacctttggaatctacattcaacatttgatactgcgtgtgactcctgatgaacacgctgaagatacatgatgtccagtaatttttactggggataatacctgcaatatacataagatggtgtcattaaagtacatttaaaatta

SEQ ID NO: 95076 - DNA, 634 bp, Homo Sapiens
  misc_feature (15)..(15): n is a, c, g, or t
ctggtcccactgcgnacgctctggtcggtgttcgcgctgctgaccgggcagggctttgagctgccccctgtgtgcatcggcgtgagccccgggcggccggggaagtcggtgctctccacacggtgcgctttggcgcgctctcttgctggctgggcgagatgagcaccgagcaaagggaacccgtacagctgacccaggtagaggaaaatatggtaatggtgttgatggatggctctgtaaagcctggtgaccccggaggggtccccagtccggggacttcgcacacctgagatccccatgaccgaagcggtggaggccgtggctatggttggaggtcagcttcaggccttctggaagcatggagtgcaggtgtgggctctaggctcggatcagctgctacaggagctgagagaccctaccctcactttccgtttgcttggctcccccaggcctgtagtggtggagacacgcccagtggatgatcctactgctcccagcaacctttacatccaggaatgagtccctaggggggtgtcaggaactagtccttgcaccccctcccccatagacacactagtggtcatggcatgtcctcatctcccaataaacatgactttagcctctgctaaaaaaa

SEQ ID NO: 95077 - DNA, 856 bp, Homo Sapiens
tgcaagagcctttggccccatggagggactgctggctgccggcttcttcacttcagctccttctggagatgaccaagtctgtggtggtgcctgaagatttaagcaaggcccaggtcatgctgggtttcatggggagatgatggttcatcaggacaaagacaaaaattccttaaaattatctcaaaagagtgaagaatatcagaaaatgttaacagactggataaaaatgtagatattcaggaaagtctaaaaccattcataataagctcaaaaattaaaagaagaaataaacaatctcaatgaacctagtaaagccacatccacaagcataggccaagtcacacatgacagagaatgacagatctgatccctgtctacagccagggaagtctgacaccctcgcctggcccccttcttgatagtaacactgtggggggcagagaggggtgacttggactaggatacgtaaagtgaatccggaaaagagacaacctggatgatcaagcaggaactgatttaaaggaattgatgtctgctgctaagagtatgaacccctgagggctgagaccacatctgcctggttttctgtggcagctgcagcatcaacactggctcttcgaagagtagcagctgatgaacattactccggcaaacaattttctctgctaggaactggataaatgcaaaggaaggaggggagagtgtgtcagacggggaccctgccctactggagcacacacatcaccacctgggttaggacggcctcacccgtcccctggaccttcaccttatgtcccagagaggagacatctgctagagcaaagaaaattcattgtcatataaaacaaacaagaaa

SEQ ID NO: 95078 - DNA, 371 bp, Homo Sapiens
ttgaggcttcaggaggggagggtagagtctgcagcagggagccccaggagtcaccagcccaaagtcacccagggacaactggtgaaggaaacaggctcagaagtccaagagcttgaccaaagtaactcagctggtatgtagcagaaccagctctcatacaaagatgacctgaggacagagacagtagaggacagtgcagggtagtgcaagaagctgtggctctggggtctggtcaagatgcccctttcttctgttaggaagctttcccactcctctgtcctgctttcgcatctcttccaaaatacaagtgattgcatgtgactcccttgttagagcaggctctcaataaataggctttgcttgatttcaaa

SEQ ID NO: 95079 - DNA, 567 bp, Homo Sapiens
  misc_feature (44)..(44): n is a, c, g, or t
ctatcgcgtatttctcctgctcaaaacatttttctgactattcncgccccgtgctttttaaagtcctcacccgcgaggtggattccagccatgggcgcctcccagtatcgccccagttggcacctggagcgcggcgccccgcccccagccccggggaggctgcgtcctctgcctggtcctggcaccctgcaggtcccacctttctcttagggtgccgtcgcccaccacgtccctcctggtgccgggccctgctgctccccaagtcttcgcttcccctgagccagggttgggctgggtcgcaggggcttgtcctatgataccaggtgttctttcctgtccagctccaccccctggaaaatgcgcttctacgggatgcaggcgtcttactccaaacccgcctgtgattactccaaacccgcctgggccaaagggatcaggagatagagagagggactgagagagcagtagaaaaccagagacagagaaaagaagaatgagaaaggcccataacagatggcaaagtagaggatgggttaggaacttgccaagagacagcaaaagtgaaag

SEQ ID NO: 95080 - DNA, 870 bp, Homo Sapiens
atgacccaccatgccagacttcccattttactttctgcaagctgtttccctagcagctccctctaggggagaggtgaaatcttgcaagttgtagcaagagcacacaggaaacccctaactttcctataccccacccgcctcttcccctttctgtcccgggatacctggcggcaagagacttcttggctattgtccatgctcccagaatcaagcataaatgccagacacggcgattgagaagccaatcagtgaaccctttggcaaagcccccatccacacctggcactcccctctaccaatccctggcacagggttcctggagagcaggtgctgtacattttacagctttacaatggggctgttgacagccataattagggaggcatgaattatgcggctataatgcagagccctacaattaaggcgggaatgaggggctggaggcagcaaacggaatctgccctatgagcgtggctgttgagtcctgtctcctgggtctgactttccgtaatatgattggggtacagtagaggtgattaatggggctggcatctctctttggcctgaggttctgtattctgggaaaggtacacagggtggagtagggagaagctgccccaggaggcgatgtagtggtggaaagaagaggcagagaggtcgtcgtcgtcgcccagcagcaagggctgcaaaatagtagaactcgtggttgctttggacaggtgtgatttgtgcaagccaggttcaacccttgcctcaagaaatcagatgggaccaatttagtgtccttccacctgtgagccaagcccccatttgaggacatctatcgtattcttgtgtgctgggtctcaaatagaatttttaaagattaaa

SEQ ID NO: 95081 - DNA, 540 bp, Homo Sapiens
ttctgcaatctgaaccttgctctcaatattatgctcactcaagtcaatgttatagtagaagtatgtgctattttcacacagctatctcaaatgtaaacaagatcatttaaaagccagaagagagctccattagtctaattaaactattctgtgtttactccttcataaaacaaaagactaatccttaacttgtatagaggtttatacaaaataagctcaatgaagtcatagactggttaagatgctttggaaaagacaagaactcctacagcaggaacgcattctggtggcagagaccgtgaaatgtatatgaccttcagtatacttaaaagacaagcagacatctgcacatatacatagaaccacttctagaaatctacaggaagaaaataatccaaacactgaaagttagcctaaagctaagagacagagacagaaacatacaagtgctcaatacaaataatcattgactatccaaccacaggtattcaagcaatcatttacaatgtttataaagtttttatttacaaggaaaaataa

SEQ ID NO: 95082 - DNA, 1362 bp, Homo Sapiens
gcgggtcaggggcggccgcggaggcggaagcatccatggcggagggcggcagcccagacgggcgggcagggccgggctccgcaggtcgtaatctgaaggagtggctgagggagcaattttgtgatcatccgctggagcactgtgaggacacgaggctccatgatgcagcttacgtcggggacctccagaccctcaggagcctattgcaagaggagagctaccggagccgcatcaacgagaagtctgtctggtgctgtggctggctcccctgcacaccgttgcgaatcgcggccactgcaggccatgggagctgtgtggacttcctcatccggaagggggccgaggtggatctggtggacgtaaaaggacagacggccctgtatgtggctgtggtgaacaggcacctagagagtacccagatccttctcgaagctggcgcggaccccaacggaagccggcaccatcgcagcacccctgtctaccacgcctctcgcgtgggccgggcagacatcctgaaggccctcatcaggtacggggctgatgttgacgtcaaccaccacctgactcctgatgtccagcctcgattctcccggcggctcacctccttggtggtctgccccttgtacatcagcgcagcctaccacaacctccagtgcttccggctgctcctcctggctggcgcgaaccctgacttcaactgcaatggtcctgtcaacacacagggattctacaggggctcccctgggtgcgtcatggatgctgttctgcgccacggctgtgaggcagccttcgtgagcctgctgggtagaatttggagccaacctgaatctagtgaagtgggaatcgctgggccccagagtcgagagggaagaagaaaagtggaccctgaggccttgcaggtctttaaagaagccaaaaatggtcccagaaccttgctgtgtctgtgcccgggtggctggaaaaaaagctcttggcaaaacaccgggcttcatctgatttccttcgcctgcctctgccagacccccataaaaaagttcctactccatgagtaaactccaagtgctgcggttgattccagtgagggagaaagtgatctgcagggaggtggacaccgagccctgagtgctgtgctgctgctggtctcctgatggctgttgctgcagaagatgtcctcctagactgtcattgcctcctcaggtgcctggggccgctaccaggtctttggggtaaatgttcagctgaaaaggctttatactaaaggcccattatttgcttttctccccgacttttcccccacagtatattaccatttacacaaattaccgctcgtgtcccggctccaccttctcgacgctatttttt

SEQ ID NO: 95083 - DNA, 603 bp, Homo Sapiens
ggcatcgaaattactccccgtaaacctttacgcggtgttaaacccggcgcacaaggaccttgtcttaatccgcttaaaaagcaggggaacccttgtccaaaacgttccaggttgtgaagcccattgtccttccgaagcccggcagcacctccccgccaggacacaagtcccagattgcgggctgggggccacttggatgagaaagtgagcggctactcctagctccctgcgggaggccctggtccccctggtcgccgaccacaagtgcagcagccctgaggtctacggcgccgacatcagccccaacatgctctgtgccggctacttcgactgcaagtccgacgcctgccagggggactcaggggcgcccctggcctgcgagaagaacggcgtggcttacctctacggcatcatcagctggggtgacggctgcgggcggctccacaagccgggggtctacacccgcgtggccaactatgtggactggatcaacgaccggatacggcctcccaggcggcttgtggctccctcctgaccctccagcgggacaccctggttcccaccattccctgccttgctgacaataaagatatttccaagaaa

SEQ ID NO: 95084 - DNA, 493 bp, Homo Sapiens
gaaaccctgagcggtctctgaggacctggtgagcagattgttgcaccattagaagctaggttgatccacagacagatggctgaaagtggaaaagaaaaaataaaatggacaaccaccattattattagctcatctcttaagattcctgggttgtaacttacgaatacttccagtacacaacacagtaaatgctattaatcttatgtgcactatagcaaagactacctccaaaccatacatagatagcatttgctacagaatgataacagctaaagcttacatcattgagcaaagtcctgtttggaaaacacttcagaagataaaactgaatagtgattcagttaacccaaattagagtaccaacttaatgtttttctcgaagaatgtgaaaataattagacctgttaaattataatattcaaatatctatttaaagacatttatattaatttgaaataataacatatacaattaaaagtgattttattttaaa

SEQ ID NO: 95085 - DNA, 382 bp, Homo Sapiens
cttgtctcataatgttacgccagagtcagattggaaagtaagtcacgatctatagggtcaaataaaacccatctgatgagaatttatggtttgtagggcatgaccccttcaaacaattagatagaaatttgggcaagataaaaaattcagagcttagtcctcagttcctaaataagatggctacaagaagaaaagctacatacctcccccatcttttgcccacaagaaaatttctagtgagccgcaagatctttaccctaaggtgtttctgttaaaatgtaaactgatagcttatctttacagatacagtcacccccctgcccaacagacacaaatgcatatctgattgttcccctgcctcgttttgtcttgtcttatgtta

SEQ ID NO: 95086 - DNA, 419 bp, Homo Sapiens
catatgttaacttattgaatgctgacagcagccctctaaggtagatgccattaatatttccatttacagatgaggaaacagaagcatagattaaataatttgcccaatgtcacacagtaagtggcagagttcatatcccttgaagacatgaccaccacgcttcactccctgcctgtgacacagaggaagctctgagatgaagagtcctctccgccaccagaagcagcagcgaaaacccatccaaagggttcaagaaaaactttcattctgagaagaggaaccgggtcggggaggcacgccggactccacatcatttcttccttcaattttgaaggagagtcgagggctggaccatcaaggctttagtctgaattcaggcctaatgtgagaattaaagaacagaaaccgccagactaaaa

SEQ ID NO: 95087 - DNA, 255 bp, Homo Sapiens
cagattttggggcaacagtacctaattaggcacacccaggcacaccctaacttacccttggagcttacaggaattccaagaaaatccacatgggtagagattgagcgtctttcccaatgggcagtcaagatgatgagatggatcactaaattctaaagaatccatgtcatgctgtatacacacagcaaggagggccttaatattagcaaaacaacatcaagtgtctcacattaaataaatgttgttaactttaaa

SEQ ID NO: 95088 - DNA, 1383 bp, Homo Sapiens
  misc_feature (17)..(17): n is a, c, g, or t
  misc_feature (27)..(27): n is a, c, g, or t
  misc_feature (550)..(571): n is a, c, g, or t
  misc_feature (1302)..(1323): n is a, c, g, or t
ggcaaccatttttaganggaaaaaggnttaggcaaaaataatttattttgctcttgtttctaacaaggacttggagacttggtggtctgagctgtcccaagtcctccaggttcttcctcgggattggcgggtccacttgccagggctctgggggcagattttgtggggacctcagcctgcaccctcttctcctctggcttccctctctgaaatagccgaactccaggctgggctgagcccaaagccagagtggccacggcccagggagggtgagctggtgcctgctttgacgggccaggccctggagggcagagacaatcacgggcggtcctgcacagattcccaggccagggctgcgtcacaggaaggaaacaacattctcttgaaagggaaaacgtctcccagatcgctcccttggctttgagcccgaacctcctgtgactgtctcccctaactgaccgcaagccacagcctgtcttgtcaggtgaaccctgtaaatacatcctttacctgctaacccttcaaccccctcgcctcctactctgagacnnnnnnnnnnnnnnnnnnnnnntgcataggcttaactcgctgatgagttaattgttttatttttacactctttttgggtccagttgattgtacgtagccacaggagccctgctatgaaaggaataaaacctacacacaaggttggagctttgcaattctttttggaaaagagctgggatcccacagccctagtatgaaagctgggggtggggaggggcctttgctgcccttggtttctgggggctggttggcatttgctggcctggcagggggtgaaggcaggagttgggggcaggtcaggaccaggacccagggagaggctgtgtccctgctggggtctcaggtccagctttactgtggctgtctggatccttcccaaggtacagctgtatataaacgtgtcccgagcttagattctgtatgcggtgacggcggggtgtggtggcctgtgaggggcccctggcccaggaggaggattgtgctgatgtagtgaccaagtgcaatatgggcgggcagtcgctgcagggagcaccacggccagaagtaacttattttgtactagtgtccgcataagaaaaagaatcggcagtattttctgtttttatgttttatttggcttgttttattttggattagtgaactaagttattgttaattatgtacaacatttatatattgtctgtaaaaaatgtatgctatcctcttattcctttaaagtgagtactgttaagaataataaaatactttttgtgnnnnnnnnnnnnnnnnnnnnnngaccgcgtatgcggccgcaagcttattcccttgtagtgagggttaattttcgcttagcac

SEQ ID NO: 95089 - DNA, 340 bp, Homo Sapiens
gtttcatgacttgccccccagagtggaacttgggtagagttagagtcagggccctggtccctggtgctctttcctggtcgcttctcatagccaggacgttgcttacattagttctcaaccccactgggaccaatcatttttattgccaatctattttggggctctgttctagtggcaataaatcattctttcagagctccctatttaaccttgtgagagcgtgtgtgtgtggtggaggtgcttacataaatgcagtatttttaacctgcctggcacgctttaggttggcgttaaatgaatatctggagaataaaggtttgtagttattctgaagcaaaaa

SEQ ID NO: 95090 - DNA, 193 bp, Homo Sapiens
gattctaccccgtcggtccagtgtctgcacagacgccttcatttctctgtaaatatgtgacttggaacaaatgtttaacacaaacgagaagtggtcatgaatgcatggtgttgagatgttttgcactattctgactttttggtctctgtaaaaatattttattaacagcagacattaaaaaaaagtatgccac

SEQ ID NO: 95091 - DNA, 237 bp, Homo Sapiens
gctgactgtgagggagctatggatgtatgcttctgcgtcagaaaaccgaggccctgagcagctgagtaacccactcagaggaagaagaaattgaggtgcagagaggctaagccattggctaactagcagatggcgatgcttggaaatgaaccaagtctgaatccagggttcccgtgtgtaatctctgcattgagcggcaattagtgaatgaatgaataaacagaatgaagttaaaaa

SEQ ID NO: 95092 - DNA, 412 bp, Homo Sapiens
acagaaaggaagctcacctgcttatggagccaagcagacacagctcgttccacacacgttttcaagacggacagtaactgttaccaactgagtcagcttttcccctaaagatggtatcgtgaagccaatacatgaaacccaaagcgagcctcaagcagtgcagactttattcaatggccaaagaatggagaagcaggagcatggccgcaagtcaacttcttgtctagtgagaggtttcaataaactgatgccaagaatttatggagaaaattataaaagtttactaaaagatatgagaaacggaatgaatgaagcaagcaattgtgttcatggacaggaaaaggcaatacaagggaaagatatcatttctccccaagctagtctgcaaaataaataaagtgaaacattaaaa

SEQ ID NO: 95093 - DNA, 451 bp, Homo Sapiens
ggacataaatatttcaaaactctgtagttgctctggaattgtctttagtctaacattgctcttaatatgcagttttgtacaggattttatgatgaaaataattttcactcagaattttgaagacattggttcctgattttctagcttctggtgtggctactgacaagtttgatgagaatacaagtcctgttcttttatatgtaaacttttttatttccccagcccaccctctctgacccccaagtttctgtttctgaaatttcagtcatgttcattggtgtggaacttctgtccattgtgccaggaacccagtgggtatgggtttccacagaaatgtacatgttaacagtaggggaaactggatgaggggccatgggaactccctgtactatctttgaagcttctgtgtaaatctaaaattgatccaaaataaaaagtttatttaaaaaaa

SEQ ID NO: 95094 - DNA, 828 bp, Homo Sapiens
  misc_feature (730)..(730): n is a, c, g, or t
  misc_feature (732)..(733): n is a, c, g, or t
  misc_feature (736)..(736): n is a, c, g, or t
gggactgcacatcctgggcttgcggcgcagtgtagacctgggaggatgggcggcctgctgctggctgcttttctggctttggtctcggtgcccagggcccaggccgtgtggttgggaagactggaccctgagcagcttcttgggccctggtacgtgcttgcggtggcctcccgggaaaagggctttgccatggagaaggacatgaagaacgtcgtgggggtggtggtgaccctcactccagaaaacaacctgcggacgctgtcctctcagcacgggctgggagggtgtgaccagagtgtcatggacctgataaagcgaaactccggatgggtgtttgagaatccctcaataggcgtgctggagctctgggtgctggccaccaacttcagagactatgccatcatcttcactcagctggagttcgggaacgagcccttcaacaccgtggagctgtacagtctgacggagacagccagccaggaggccatggggctcttcaccaagtggagcaggagcctgggcttcctgtcacagtagcaggcccagctgcagaaggaactcacctgtgctcacaagatccttctgtgagtgctgcgtccccagtaagggatggcgcccacagggtcctgtgacctccgccagggtccacccacctcgctcagcgggttcccggggcccgcccccagctcagaaaaaggcgagtccccccccaaaaaagggagaacacaanannganggaaattgtggggccggctccggccctcgaagaaattttctaaaaccctttcgtttggggcgcgcggcccccccgcgggtagggggacctct

SEQ ID NO: 95095 - DNA, 742 bp, Homo Sapiens
  misc_feature (202)..(202): n is a, c, g, or t
  misc_feature (276)..(276): n is a, c, g, or t
gctggttagcccacaccctgaatatacatttagttcaatcatgggatgtggataaactaaatgccttcaggagagaaagactcaagtgtgcaggaagttgcagaattcccctgggaagacaaatatgaggaaacaatgagaattactttcaaatagtgaaagttcataagggattagaatattttgtatagccccaaagaantgagatcagtgaatggaaggtacaaagtaacaaattttatcttagtaataaggagaagtggaggcccaaagagnttaagcaagagtttaaggctcattcagtgagaatgccatagaggagactcaggaaacagctgagtaattggaataagttatctttatggtcccttccaaatagacttcctgagagtctataattctagttatcaaattctttggactaactagatgtcttccaaggaagcttttcatactgatatgctattctttggaggcgtttgatgaaaaaaggagagaaaccagacattagtctctgcccaaagtataaaatgtttcataaatgtttcaggctacccaatcacaaccttaaaagagtatctccataacttctagcacaatctaatccactgtatggctgtctactgtgttctcacagccctgccgcaggtatggaagcctatgttaattttagaagtcacagaatcctcaggtctttgatgagctgcacaggtttagcaaaactgagttgccagagagagag

SEQ ID NO: 95096 - DNA, 444 bp, Homo Sapiens
tgctccatatgcgagactcaccaagaactgggtcatgtgtgtggaagagttactgagtgtgaggcaagaaccatgtcttttttctccgcagggtagaatggaggttgcactgttcaggccggccactcttctactggctgacaggatgccgcctgagatgaaagcagggtgcgggtgcaccgtggagtcattccaagactcctgtcctcactcagggattcttcatttcttcttcctactgcctccacttcatgttattttcttcccttcccatttacaactaaaactgaccagagccccaggaataaatggttttcttggcttcctccttactcccatctggacccagtcccctggttcctgtctgttatttgtaaactgaggaccacaataaagaaatctttatatttatcgaaatattaaagcactcgctctgcaaaaaaa

SEQ ID NO: 95097 - DNA, 550 bp, Homo Sapiens
agtctccctagaagagcacagtccagaattgaggaggtacagcagaaacagactgcaggcagagagaggtctcatagagcttggacagggctaggcacagaaagaacaggcagcgtatccagaagggggcagggaatgggtgaagaggttgtgctctagggcagagctgagctctgatctagaaaggacagcaaagatacctggaaggcctcccgattcatgcgttgttggcgtcgctcccgaagccgggcccgctcccgttcatcctcctcttccctctccaaagctcggatgtgctcctcaaaacagatcagtgcatcttccttgtccatgtctaaagacaggcaggaggttccgcgggcattgtcccagcaggataccctctcagaccccagcacccctaatgtttcaacgatgctgtcctacaggtgctagggatacccagggtggtgggggaagggcctggagggggctctgtgggagcagccactgcaatggtagttcttaagaggggatcattaattgtataagaataaataagcaagtattc

SEQ ID NO: 95098 - DNA, 543 bp, Homo Sapiens
tctaactctccagtcaacgaaaacattcctctctcagctgctctggtgggtcatccaggctcacagtgaatgttcccggcaagaaagtgccttcctgctttccaaagaagtccttttcaaggtggcggagcactgaatagtacagaattcatcagtatattgagttcagatcctatctataacttaggtacttttgttttcctgttttaaagataacattaagaacctgctgttttttcctctatagaatctggcatttacagcactttctcatcgatcacaccactgagtgttaccattcctattttacagagggaaatgtgaggctgagaaagtttggacaacatagccatggcagtttataactcaaagtatatggatggatgacactcgctagagagttgcaacagccgatgcagctgtccccaggccccaaactcacttatatttcctgaaacaccaggaaaagcatcttttatttttatatgagagccctaagagattattttcatcttattcaaaaatgaaaagataaaatttaaa

SEQ ID NO: 95099 - DNA, 432 bp, Homo Sapiens
  misc_feature (235)..(235): n is a, c, g, or t
ctgggtggaaacaaggaatggctccaaggttcaccccgttgtgtctgtaagtgggggaagggggcggaaccctcatgctggggttcgggtggacgtgggtgggtggtgacccctgttgggaggcagacacagtcacaggcgtcgccattgggaagggcagccggagaagctggccctgtgtggggctgggctgatgggtttcccagtggcttgcggagcagagagctggatgggnactggtcagccaagcaaacctcgaggcaggggctggatggggacacgcacatgtcccttggccacgacaaaatggcagtgatgctgcttgccttcctgcagcatctgtgaggatcaaatgcgtgcacctacgcaaagcatccgcacatagcaagtgctcacctagcacaggagccccgtgctcctcccaagtctcag

SEQ ID NO: 95100 - DNA, 473 bp, Homo Sapiens
cggactgtggtatctggcaacagcgcccccagcaccagcccctccagcctttgcctacatctcctcggttcccatcatgccttatccacctgccgctgtgtactatgcgcctgcaggacctacctcagcccaaccagctgccaagtggccgcccacagcctctcccccaccagcccggagacaccggcactccatccagctcgacctgggcgacctagaggagctcaacaaggccctgagccgggccgtgcaggctgccgagagcgtccgctctaccaccaggcagatgagaagctcgctgtcagccgacctgcgccaggctcacagcctgcggggctcctgcctcttctgacttcactgggggcccagaggcagatgggtgggtgggtgggcaggtggcctgccaggccaggagtgggctggagctgctgaggcccagaaggcccgcatagttcctcaccaggagggtctcc

SEQ ID NO: 95101 - DNA, 519 bp, Homo Sapiens
caacatttggcatttcccctttttcagctcagttaccatagaatacttccaagctttactacttcctctgtaagtcatttcagttatgccaggatatttgatgattttgtttatgtagaattaggtaacaaagccaattatgctatccttattattgaaggattaatcttatgacttaacataagctttggttatatttgggtgtagtctttggctaagtacccattaaggctagtagcaaacacttggaaggtggctaactgggactgggaatacgtgtctcaacttgagaaaccaaatagtgcgaagggactcagggtggccagacctgtgaccttggcctcatttgtatcttgttttcgctgaggtgatcagacacttagtaccctagaaatggactggaattattgaatcttcttctgtaacatcacaatcttcctggttttcagaataaacgtttttgtgcttttgatataaatatatactctataataaaatgtttgactaatttaaaaaaaa

SEQ ID NO: 95102 - DNA, 267 bp, Homo Sapiens
aaatgtggtttatgttgctgttactcaactgcttttgaaaacaaatgtcctatagtgttttatagaaacgacgccaggcagaagtataatctttatggtgaagtcattagaaatctcagtctaactgccttaatagaacttaagacaagttatcaagcaggcttctcagagtccacacacaattgacagaatgagggcagaggtggatgcaaaagcgtgaatcttttttcaaacaacttaagatcagaccatgaaaagggattctta

SEQ ID NO: 95103 - DNA, 656 bp, Homo Sapiens
tgtttgtgttgcctttttaattttaaaaaataaatatatacttttaaacatacagaaaataggaaaaaatagcacattgaacacccatatacacaccagttagattcactaacatcttgccatatatgcttcatgccatgtacattaatttttaataatggctgtgactaataatcagcaagcaaaatttctgaaaatttcacaatcagctcttctaagtcaagacaacctcgctctagcaacaccactagtctcagctttctcaccccagtaccatggttagccaatcaggacagagagagcagaggaagtgtgagcatggaaatgaacaattttcttctcccagtggactgagaaatttctcaacagtgatatcagggtacccaagacaaagcacacaacctatcctagaacaggcacaaggctggtgcatgtgtgtctaaaagcagactttagggagacacagcccttctaaccttgcaagctcattattagccttagaagtgactcatgtaagttctgagtcatgagatatactaggtggctcccacacacactcaaagtcaccagtttagtcagccttccatattgagagtagaggagcttgaaaactcctcctagaatttccttgcttggtgctatcattctaaaacaag

SEQ ID NO: 95104 - DNA, 935 bp, Homo Sapiens
gcatgatgaacttcacctatgagccccaggacttttatcggctggtggccctcagtcgatacaacgtcctgaacaacgtggagaccttgaagtgcgccctccagctggctctggaccggcaccaggctcgggagagggcaggggcctgaccaaggcaggaagcggaggactgtgacagagaggagacacactgctcatggtcagggcttgtagagggaggagcgatggggactctgtgcaggatctgcttcccttctctccaggacctgcctcgaggtgccccaggccccggaaagctcttgcagaattgcagcttggactggggcagggctctccttgtgtgtttttggagaagatgggcagtagatcgctccagggactcttggggatgtagggcagaagagaacagcactcatttcacagcggggtgtggagagaatcaggtgagccacagagcccaccccagacacagaaggacctcagagggcccaagtcctcagacccacacagaacaggggctgagggcaccgagaagccagctgtcctccttacactgagatggaaagcagagatgcatccatccacacttcctgcagagcggcccaagccccaaccccacctcgagctcctggatgcactgctatcaagaacaatgaggggctgaggggatggccagcctatgttgctgactccatcatcctaaccctccttctgccttctggtctcctcgtgcctcctcccagatcacccttctcttcccagcgccctaaagcctgtggggtgatgtcccattctggctgctccaggtgggagatgtgcgcgtgtctccctgccagttacccaggcttcactcttcgaacctggaccacagtctctggtgatgtgtgtagtggccacatcatgcaaatatagtctcaccattcctaggaaaaaaa

SEQ ID NO: 95105 - DNA, 664 bp, Homo Sapiens
ctctctctctccatcaagctgggtaagtcagaaacctgaagtcaccaagacctaaatgcaaaccctccactctgggccccagccgctaggggtgtctccggaacatggccaaggctcaaagtcagcacctgctctgtgcaggctctatgctacaagccgctgacctatcaggaataaaacacatgacccctgtggaagctgaagcaactccatcttggaagctaacctgccacattgacttaactgagtgaccccagttccaaggcagggcctctacaatttccagtttatctattgtttcctgtgtaagagcagatacttactgtaagtccgtaagtgctactcgtaggtcaaacaaccttgatgatatcacacttcaattgtcttataaatcccatctgaaccactcctaccctatggtatatgagccctgggtttgggtgctaatgcggggatccaccatctcatctcattgccgcctgagacacctacatggcttctgttggaaagtcccctagctttctcagcctctttcttcaacttctcaacttcctcagactttggggtaggtttgcataggcctgtctactgcagaacaactcctgttctcagggagcttccagtctactgacagagaaagaaaataaacaatctgacttatgaa

SEQ ID NO: 95106 - DNA, 265 bp, Homo Sapiens
agaaaaaggcattgcacacacgggtgaaatgtgaagtactagaactgctatttattatcaaactacttcatgtgcttactatgtaatagtgccagaagtctgaggttcatgcttccctcaccttattaaaggatgttgcaaaattccatttttatatggaataaattgttaatattagctagttaagaaaaccatgcatgagtcattgcatgcaaaacatgggtatagtcaaagtgagacagtcatcaatccaaaaaagcaccag

SEQ ID NO: 95107 - DNA, 465 bp, Homo Sapiens
caaatatttaaatctgttacaaaacagccagtagaatgggaggttgtgtgtgtgttcaaagtatcccctcaaaatgcagatgattggaacaaaagcatgaagggaaaaaacggggacagctgagctgcaactgattacgcagttttcttttatgctttctgaattccaaggtgaaaacgatgactgtgagtctaacctgttacagaggctaaaagtggcttcaaaagcaatgtctaaaagagaacaaatacatgatacaagcattatgtagtcaacatggcactgaaattctttgggctcccggagagtttaggagaaaaccttaactgatttttcttcattctaattattgtcctaacacttagcataatatttgagaaaggaaataatagacaactcctgctcattctccatcaccacaatgagtacttttccttccccttaaataaaatggctccatcaaaa

SEQ ID NO: 95108 - DNA, 918 bp, Homo Sapiens
agaaagtgtgtgaccgtcgcccattctcccagagcgcggggtggatcaaaaggaacgtccttcagcccatccttattgaagatcttctgccaactattctccattcatgtagatgctataaacatcatggttctcaaggtggatacctctgagtccttatggcatattcagatcagtagaagcagatttcttttggatagtgatgggaaaaggctaatctgtgaggtgagcttatgtaagatcaacagcaaagttctaaagagtggtcagctggaggacacctgcctagtggagctttcactggccctggacctgtgtctaaaggtgggcattagcagtcggcatctcactgctatcactgtggatgtgtggacactccatgctgaactgcatgagggcctcttccagagccaactgctgtgccagggcccaagcctagcatctaagcctgttccctgttcagaggtgacagaaaacttagttgagccaactctgcctggcctattccttctccagcagctgccagaccaggtcaaggttaagatggagaacacaagcgtggtattgtccatgaatagtcaaaagaggcacctgacttggactctgaagctgctgcagttcctgtaccaccgtgatgaggatcagctgccccttcgaagcttcacagcaaactctgatatggcacagatgagcactgaactgctgctggaagatgggttgttgttgtcccagagtcgccaacgcattgtctgcctcaactccctcaaggctagtgtgcaggtgaccaccattgacctctcagcctccctagttctgaacacttgcatcattcactaccggcaccaggaattctctcactggctgcacctgctagcactggaaacccaagggtctagttcacctgttctaaagcaaagg

SEQ ID NO: 95109 - DNA, 179 bp, Homo Sapiens
atacttaaggcaaattcatcttgcttataactctggtgcatgtgcattaaaatactattgcattgtaactgagtttgtacctattttctgctttctgattatttcctttgttcatgaaaataaatgactggtattacaaggtcacctaaataaataggtttgtgtacgtctgcgaaaaa

SEQ ID NO: 95110 - DNA, 931 bp, Homo Sapiens
cttctctctgacctggatatccacggcagatctgctcagttcacaaggcatcaaccactaaaactgtgtttgttttgttggccactcccagtattgattttcaccaactctgagacttgccagcttcaaattgcatgatgctcctactctgtcttcttccagccaatgaatttcaaggtctggcacctgcaacctgcagaaggcaggggcttctttctgatttaacagggatcctatttccgatgtacatatttctgtcctccatacataaaaactgtattttctttcctagaattgtggcatataacttgatctgaacttatagataccagtagggatggtgagaagaggtattggggattagaaatgtatccaagcacctaggctgcatggtcactatacccattgccctctacctgggaagcatttggacatggccaggaaacaatgcttacatcagcaagttcttaaccctctcaccaaatgtccttgcagaattgccccttgttctaagccctaacagggctaaggggtttctccaaaagctatcgttggctccaattagctggccaatttaacaggacaaatgaaaccgagttgaccgcctggacatccatgatgagtgaccaggcccaaaactcctgaatctcctcggacccaccgctgcccagcctccagggcaaagaaccccaaacagggtgaagcagatgcctccctcctggggagaaacgagtgtgtaagatgtttcacatgcagcagcagtagccactgcagcaaaaaaggcaagttcaaaggtaattggacgaggagttttaagcacggctgttcccgtagcaaactgtttcatgaatacccatcgggatctgtccatatggacagcagaagggttcctgctgttcttttgctaataaaaactgttgtgattacaaaa

SEQ ID NO: 95111 - DNA, 483 bp, Homo Sapiens
tcttccaccaactttctcttgttgccagttcattacacatggaatagaatgttattctgttcaattcatttgccctgttatcagctgaatatggttaaacacactcaatttttcatgctgttttgaaattgatattttgttgcatttaaaaaatttaaatgatggtcaaagggtacaaaatctccgacaggaagaatccattttataatttttttgaggtctgttgcacagtgtggtgaatatagttagtagagtattatacatttcaaaattgctaagagtaaatttcaaatgttctcactacaaaatgctaagtatttgaagtgatggatatgttaactagctcgatttaattattctacattgtatccacagattatgacatcattttgtaacccataaatttatacaattataaattgtcatttacagtaagaaataatttgttgcatctttttagaaaaataaaataattttttacaa

SEQ ID NO: 95112 - DNA, 831 bp, Homo Sapiens
ctcaagtccatgggaaaaaattatcagggcttacgtataagggaaaaaaattgatctagatttgaaacgaagatacatttaattctgctgtgttttacttcaagaacagggagcaaactccattctgtaacagtaacgaataatgttaaaaggctacttcagttccatgttgcgaccagagaggaaagtagagccatgatgcggtgagttgaggaaaggtaatcctgttgacactagtggtctctaaagtactttcacattcatggactccccgcagtgggaggaagataccaccagaactgggacagaggagcatgctggagtccccacagccaccagcactcaggctgcgttctcagggcaggaacaccaggaccatcttcccttgttatcataagcccctggctggctgggacaagcctttgtttttcctcctgattgattgattggcattttacacttgtgtgtaactgggaaccatcgggctctaggtcacaaaacagggactgagttaaacccccacgagtaacaccctcatccatggaaatcacagaccaagcccttagcacctgcatcgtgtgcccagccagtgccaggctcaaggagatgcccaacaaatggtgctgaaataggtaagtgacccacaggggaaggagacttagatctgcgtagagatgctgaaatgctgacactattaagaaaagtttggagaaatagtggtttatcttaaacttatttgtatatatttagaaattcaacatggggactaccagaaaaatctgggataaataacatttccctttttttcctaattaaaaagtcttcgagaaa

SEQ ID NO: 95113 - DNA, 498 bp, Homo Sapiens
agaaatcaagtctaaagagagagacagaataaatcgtcttagaaatgaataatttattgcatgcaaagagaacagcccttcagctcctggaaatcttccaggatagttgatgctgagcaagacgtgtgctcctggctggtggccactgggttctttccctatagcagcattcatcgaagtgaatccaacatttcagccagaggagggcaggacgcttaggacccattgccagtgagcttttgcgaccgaaatgatctccaggagcacaacgctggactctagcccacattccatcttgggtaattaacattttaccgtcccaaatccccatcccctgtagcttcagtgggatcaccgcccttgtttcacttcctgatccaagctgttgtgtaacctccttggcactgctttaataataaaacaaccattgtaacatagtaacaatgctcaacacttagagcctttcagcaaatgaagccaaggtatttcataaacgtc

SEQ ID NO: 95114 - DNA, 424 bp, Homo Sapiens
caaaggagaaattcaacagtgtcaagaaatttttttaaaaatactaaagtaattggtacatttaaaaatgtgattttccttaattatacaggttagggaaacagggtaatgtttcaaacactatggttactttacttaacagtagttatattttttaattacttgaaattataagcactatgattacatgggaggcttgctgtaaaggctgccttatcagaagggccttttggctattggtaaccactttccagagtctacggtggaacagcaatatgctgaattacagggaagtgcattttatggtgcgattgtaatgattccacgtgacagtaaatagaagtcctataattttctttatattcactcattcattcattcttagtaaaaataatttaccataaaacttacactgtggagaagc

SEQ ID NO: 95115 - DNA, 523 bp, Homo Sapiens
ctgctcaacagttaatcagcagtgaatcatcttgcagctatgcaatttaaaaaaaatacagattaccaatttcaagtgctgccagctaaaataactgttttaacgggtatcttttgtttgttcttttcacttaattattttattgtgctttgcatctccaggcagttctctcacatttgggtaaaatgtttagcaggctgtaaacttaagaaaagggtaaaataaaattttctggagaggaacttggaatttgagggagattttatatacctttaaaaactgtaatttaattgggatgccaggtttatagcaatttgcaactttaattttccagataatctggaggttagcatttgataaatgattttttaaagtagatatgaagattttgttaatttataatttattcatgtgttattactgtaattgaaaatgttatagacacttttaaattcagtttgtgtagaaagaaatgtgttaaacaaaattatgttaataaatattcccacatttataaaaaaaa

SEQ ID NO: 95116 - DNA, 278 bp, Homo Sapiens
tttggttctgctctgtgtaacttacattctgtaacctaggatgaagaagttacctggggcatcctctgcaggataagtagggttctgctgcaacagtgcggcacaacaaagaaaataatctaccacagactcccgggatcctatgtgcatccagcctttttctattatagaaactggactttatttttatccccctttcactatttctcagttctcaatgcaaaagttttactggcatgattactcaataaacaaataaataagtaaataataaagat

SEQ ID NO: 95117 - DNA, 368 bp, Homo Sapiens
ccggccgcgaggcaagctgggaaggcgagttcctggagctgggcggcacaggccgacactgaagcctggaaactaccaatcccagaatgcatgacttgagcgccggtcccaggctgcggggtctgccgggcaatgtggtttgccagacgttagcgtccgggaaggaagagtttttcgccaataggctttcggcattaggttctcccgccgagcacccttcttggaatcggctggtcttcctagaaactacagtctatgactgtccttgcccgtggcttacagtggaggaatttaagggcttcctgagatatctgtagtacgtaattatagctaacaaccgcagtaacaacaataaataccattcgtgg

SEQ ID NO: 95118 - DNA, 394 bp, Homo Sapiens
  misc_feature (102)..(113): n is a, c, g, or t
  misc_feature (338)..(346): n is a, c, g, or t
tgtgtgtcttgtagctcaagttattactagagacaacaagggttttgtggattcctgtagcctctctggcctgtttacttcaaggccattgctgcacagacnnnnnnnnnnnnggatgaagtcaagagagattcggttgtccttggtgcggcttttgtgatccagtagcaatcctcttaacgctgatggaaatggccttcattgctcacctgtatttcctgccactgaagcaggtctgcctctacgtggcctggggagctagatggtagagtcaatagagacttagtaaaccagactttttgaagtgtcaatgaccaagattgttattgcatccattnnnnnnnnntcaagttataattgatgtggaataaattatatatatttaaagtgtaaa

SEQ ID NO: 95119 - DNA, 309 bp, Homo Sapiens
gtaagaaatcaagtaacctcagctgaggaggaggtggacaatgagaatagatcttgctgccgattcagagaggatctggaatacctcttgaaacaccgtttcattgggcgagtgttcatcttttgcttgttatagagcagtctgtttgcagtgcaggtgactgctatagaaggatcaagacagagtggttcagctgtagctaggatgagctggctctcaagcaaaagtttgtcttcctgggtccatttgtggttatcacttgttattgaatgtacatcacaaattaaagtctgcattgttggacgtaag

SEQ ID NO: 95120 - DNA, 549 bp, Homo Sapiens
gcggccgccatggctcgagaatggcgagaccagcggccccccgcgcccctcccgcggccctgctgcggcccaaggctcggctgctgccccggctgagcctaaaatcatcaaagtcacggtgaagactcccaaagagaaagaggagttcgcggtgcccgagaacagctcggttcagcagtttaaggaagcgatttcgaaacgcttcaaatcccaaaccgatcagctagtgctgatttttgccggaaaaatcttaaaagatcaagataccttgatccagcatggcatccatgatgggctgactgttcaccttgtcatcaaaagccagaaccgacctcagggccagtccacgcagcctagcaatgccgcgggaactaacactacctcggcgtcgactcccaggagtaactccacacctatttccacaaatagcaacccgtttgggttggggagcctgggaggacttgcaggccttagcagcctgagcttgagctcgaccaacttctctgagctccagagccagatgcagcagcagcttatggccagccctga

SEQ ID NO: 95121 - DNA, 651 bp, Homo Sapiens
ttcccagaggaaaccctttgcctgagttcggaatttaaaacgccccaccttagggaatattgcccccgagggccagaaattcggccccggggattgatccatggggttggatttgcccaaaatgaaaaggggccctattgggaaaatacccccatcaatctcccaatttggtcttttaaccggcttcaagctttctcagcctttggaccatcatgcttggactctgtgctcagcagcacacgatgtggaccacccaggggtgaaccagccatttttgataaaaactaaccaccatcttgcaaacctatatcaggtaagggagcccaaactgggagccagccacagtatggccaatcgccttaggccccggtgctcaagcctgaatcttgcccatggagaaagccttgttttagggtcctagaagttcaaagacgaatgaaacacaatctctgccctcaaaaatttgttcaaactcagatgctcaaaatgagcaaaatccaagcaaacttaatcccagtttgaaagaggtttgaggaattagctcatgtcgatacaattgttttttaaaatctctaaagagtaaatacttgtgctgttctttgtatccaaagaccttactagaataaagtgagccgctgtttttcttttaaa

SEQ ID NO: 95122 - DNA, 858 bp, Homo Sapiens
tgtatactggagttattgggcggccctgaggagaagagacaaaaaggagccttcctgaacacgtccacggttggttgaatccagatgcagaaactgcggataaggaggaccttctctgtactgtattccggaatcttctacttaccattccactcaatcagtctatgccccagagtgagctagagaaggcagcggagaatctaccatccacacaattgatttcacagtaattaaaaatcagtgtttttccttaaacatggcctctagatacatgccagctgcctcaactcatacttaactgatggaatatgatctgtctcagagacagagagaggaacagactgtgtcaacttagagaaaccaaatatactgatctccaaagggacagcttcttaagctgtgaccttaaaaaattgtgaccatacacaattttcagccaatgtgatggtttccatcacctcccacctaagagatgacaccattaatgtatacaaattgttgtagaagcttagagaaagaaccaactaatggggaagttggagaaaatgtctcagcagcggggatattcgagctgagttttgaaggataaagagcagtttccaaatgaggaagaagtgggcaaggacaagctaagtaaagttgcctgaactgttgacggccaccactggctctagaaaagcccctgctacttccttctgtctacttgaaagtgcaacataagatgttttcagaacaaacaggagtatgaatgggaagactgtggttcagtatttcccaaagtgtttgccatggaactagttctgtgagatgcttcattgaaaagagattctgaataaaataaaacattcatttaacaaa

SEQ ID NO: 95123 - DNA, 962 bp, Homo Sapiens
tatgttcatctaggtggtacaaactttcaaggtgaactccaataatcttaaaaaaagatttgcttatgtagtagtgtccttatttttgaaatcaaatgtaatttttaaacatgcctaattttgcttattttacatggaaggaaacttacagtgtttgtgtatgattgcagcttatctttcttttggactaagagcatatcttttttgactagaaactagaagaacattgtgatagatatcatttttaaatttaaggaatattaggaattagggaaaatttggctgtaaaagtgatcctttaagagaattgatacatttccattgtgtttagcacagatgagtgataaagagtacacagaaggctttggatagaaatagttcatgccctccagggacagataatctaaggccaaccataatcatatgaacacataaaaatgtaaagtgtcatgaaaaaatactgtaaaggtgtttttagtacattataaccatggtaaaaaatatgtcagactaatcttactagtagtttattgcctctatggtattgtttgattatattgtgttatattacatggtgtcacatagtttttcctgttaaaatatctgaaagtttcactgctagatattaaaaacttttgtattctctagtcacctaatgaaatacagatatctctgggagttgaaataattttaaccattatcaggtaattcttaaggagctcattgtaagaaacgtgataaaccacatgaaaattttgcatggtaagtaccaggagactactgtgcactacagtgtatcatggatatattttacaagaggagcacgtgattcagtcctgggaagatgccatctaggctgaatctcaaatgatgagtagatgttagctgggcagattgttctctaagcaaaaatcttaaaactcccaattcctctttgcccccaaaacctttaaattgttaaa

SEQ ID NO: 95124 - DNA, 1071 bp, Homo Sapiens
  misc_feature (681)..(681): n is a, c, g, or t
  misc_feature (770)..(770): n is a, c, g, or t
gattcccgggatcgtcagtgaagagggatcattgagaaccgtataggctgtcctgcaatcatgtcttccacgagttctgcatccgtggctggtgcatcgtgggaagagaagcaaacgtgtccctactgcaaagagaaggtagacctcaagaggatgttcagcaatccctgggagaggcctcacgtcatgtatgggcaactgctggactggcttcgatacttggtagcctggcagcctgtcatcattggtgtagtccaaggcatcaactacatcctgggcctggaatagtgatgaagagcatcagtggaaaacccaccccacacgccatggacctcagggcactctcctccctgcccacaaagacctcctgggtgggaaagactcaaaggggcgcttgggccactcaggacccctccggctgtgtcggactggggagggatatgatggagagccagccagtggggctgtcagcagtggggggctttttaaaagaaaactattttgatgaatatatttaaaaaacctttttttattgtggagcataggaattgcccccctccaggcttcaccctccctgcctaagcagggtgggggcagagccatgacatttttggtttaaaggagccttctcatctctggccgagaacactgctgggctcccaggtagctgaaggcctcagnccacccactcccttcttcccctgtgtgggggctcaagcctggtgcacttagtatagaagagctaacgtactcaggcctgtgccacgggntgagcactgagggccccaggtgtccctcccttcccccactgtctggggacacagggacaggtggttggcgtctgaactctggcctccccctgtcccagaagctatagggttggttggaggccaatgggaacccttaatccagtggactgggcccaacaaggggaagccttggggggcctcccaatttcctttgaaaattttggttttggggacaactggaaaaaattccggcaccatgggataactcccccccgtggggccagggcttggtggctcaccccaagaaataaaaagggcccat

SEQ ID NO: 95125 - DNA, 769 bp, Homo Sapiens
  misc_feature (695)..(695): n is a, c, g, or t
ttgaattgaatatcctactgcacaccagaaccctaaaccctcacctccttctgctccagtgtgcaaccatatgcaaattcagtgtgtcaatgagatagacatctgcttaaaagtaagatgaatgtgtgtcagtagggggcaataaaagtgggggattgagaaagaaagagaacccagagccaaagaccccacaaaacccaggccccgtgactctcgagtacctcaaatccatggaagcaaaaggttctgagggcctcctggctctacacttcctgcacagctgaagccagctggcgaggtggcagctctctctcacctgtcagaatttcagaacctcattatgacaagcaccacttccaccccacgtgctcctggtgtctgctggaactgctcactgacagtgcttaggtccagaagaactcgaaaatgcttaattggttaaacgaacgagtgactgattaaggaataaaatccaacctgaaacagttgacaaaagtaaaatgatgactctgtcatgtaatgatataggaagactaatgcacagacatctgtggagctccaggatttcaggaatgggtcaagccatagacgccaccaagctctcattttaaggccatggaatctaaagtccggggaggttgtgacatttccccaaaacacataaagctaagttcattcatgtatttaatatttgntgaaggtctgttatgaccaggtacccttttgcatatttggcatgcaacagtgaataaaacagacaaaaatccag

SEQ ID NO: 95126 - DNA, 436 bp, Homo Sapiens
  misc_feature (197)..(197): n is a, c, g, or t
  misc_feature (260)..(260): n is a, c, g, or t
  misc_feature (267)..(267): n is a, c, g, or t
aagatctaagtcctttccttgtaagatgcaaaatctggaattgacaatgtacataactgctacgtgtctcaaacctaagatgtaattaggcatttctaaagctcacactttttaaatgtttaaatattttgttagagttttaaagaatgatttagttaaaaaatacgattatgggggtgtgtggccaagatgactgnctagaagaagctagggtgcacggctctcatggagaggaatgaaaagggcaagtcaatacagcnccttcanctgaaacaaccaggtactcgcattactcacataatcaaggaaacaactccagccagccaccagcaacagtgttttacctacctgagactgacttcctaggggacagggcaggccaccatctttgttgtttgggtaacttagccattccagcctgttgggcttttgagaa

SEQ ID NO: 95127 - DNA, 527 bp, Homo Sapiens
gccgtaagaacagatgaagcttcactagctccccagccgctcgtctcctgctgtgtggcctgagatcaatactggccaacacatgatggggcatttttcttgaccctctccaatgtgaattacttccttttatatggaagattgtgagccctttgaagacctgatggaagctattggacagtagaagacacagagtgtacatgcagaataactgttgattgtgctgggagtgcaacaacttgagataagaaggaactggctggaacagtccaaggtctctccctgtccctcctagaacaagatgtcctgcaacacttgtgctcagtgagtcaacttcccctaggtataaaacctagagtggagcatcttttggcgtcccttggctgtggtgctgcctagggcatgtgcagatggactctacccaccctggccagcttgcctgagccttgtcggggagcagggaccctaggctcctgctgtcccctgatgccgatccgcgaataataaagttgcttttcttaaaaaaa

SEQ ID NO: 95128 - DNA, 595 bp, Homo Sapiens
tgagtgaccttgtctgatgctggtgttttgtgagattgtttgtgtccaagagaactcattggctacctgtgagcaccaggtcagccctaacagctctgaagcctggctgtgtcaggccagttcccagattacaggagctactttcctctctctcacctgctaagtcatcacagataagaggaaaattacgggtcagttaatcgtagcattttttccatgcaaatggctctggttaaaaaataatgagaaaaaaatagtagcatttggtagaatcaaactgaacacttgtacttagtgttggttagcgcatttatgttagagaaatctctgttctctagtgataagcccaagggctatgttttattgtaaaaagaaaaaacccaactcgggtaaacatgtaaaaaacccatttatcaacagtaacacaggaagagctaaataatattcaaagtgtctgtaacttgaattgactaaaacactggagcactctcacactaaaaaattgcttagatcttgaactagtttgaggaacaatgttagagatttatattagcaataattcacatgagaacaaactgggacttccagttggctg

SEQ ID NO: 95129 - DNA, 481 bp, Homo Sapiens
aggtcctatctgactctgttacgggatgaggaagcagagtctttacggaaagcacgctccagacaagctcggcagacacgaaggtctactcaaggtgtcaccctaacagaccttcaagaagcagaaaggacattcagccggtcgagggcagagaggcaagctcaggagcagcctcgtgagaagcccacagacactgaagggcttgaggggagccctgagaagcatgagccctcagcagttccagcaacagaagctggggagggccagcagccctggggcaggagtctggatgaagagcctatctgtcatcgcctgaggtgcccagctcagccagacaaacccaccacgccagcatctccttctacgtcaagaccctcactctacaccagttcccacctgctatggacaaatagattttcagtccctgattacgagagttcagagactaccacaaacactacaactgcaaacgaaatggaca

SEQ ID NO: 95130 - DNA, 808 bp, Homo Sapiens
  misc_feature (602)..(640): n is a, c, g, or t
gcaaacttctgcctcgaaaagtatatgcggtctcctttcaaaggtggggatcaaagcaagtcacatggccagggaggagaaggcagagaactgaacgtatttagtgatcagaactaatgactgccaggatgaaaagctgttcatgatttgcagttaaataaaagatgtagggtactgtaggtgcttgcttttcattgttgctttgtttttgtatgtgtttgttttttaatggcaaacaaagaaataacaacaacaataagtaattttgtctgtgcacagaaatgagactgctaagatgccacagtgtgaacagcattggaaccaatcagagaatgaatggaaataacttctttctcctatttgcttattttttcctaaattttgtataataaattatgagaaattattttaataagaaaaacatacatatatacacagattaacacacatacatttctttctccttataacagctctaatgaaggagagtaatgtatgtattattttaaaaaggtttccaaacttgaaacaaactttcagagtggaaggaagatcccaacctaggattaacataaagtgatagacgctttttcttataacgnnnnnnnnnnnnnnnnnnnnnnnnnnnnnnnnnnnnnnngtattaggggaacttaatggctttttatagctgctcttgggatgggtggattaatttaacattaagagaaaacagcagtacagaaaactctttgcaatctatattgctccattctgttcaattaatgataattattttaaagcatgaaagaataaaacatatttgaaa

SEQ ID NO: 95131 - DNA, 741 bp, Homo Sapiens
  misc_feature (375)..(503): n is a, c, g, or t
tttaaaccaatttagtaacaatcttcttctgaaaaacaaattataaatctctatcttataaaacttttacagaaaaatagaactctgccacagatcaatcaattattaagatttacataagggaatgaggggtgggggatgggcagactttcagaatttgtgtaaacaacttttttaaaagaaccttactaggaaagaaccttgggagagggattgccacctagattttgtaagtagattgtaccagaattggacctaggccatgttgggaagtaaataaaatgtgtctttggtatccttctaagtccttcacaattatctttcacaaagaactacccttttgaaacctcctaaaaataaagtgatggtagaatnnnnnnnnnnnnnnnnnnnnnnnnnnnnnnnnnnnnnnnnnnnnnnnnnnnnnnnnnnnnnnnnnnnnnnnnnnnnnnnnnnnnnnnnnnnnnnnnnnnnnnnnnnnnnnnnnnnnnnnnnnnnnnnnnaaagctaaaataaagcacagaaaatttagtaacttgctcaagattaacaaagacaataaggcatggagctgggatttgaacaagtaatctggctcagtgggtgtactcaaaatgaacaaatcgttaataatgaaaatagttgatattagtaacacttagtaagttttagatcttattgagccctggcaggcattttacatattattatgttattgagtcttatgaagtaggtattatt

SEQ ID NO: 95132 - DNA, 424 bp, Homo Sapiens
cagagggttgggtggggctggaagcagataggaggggtctccagggactataggagtacaatcaacttgagtaatcacctgcttttttccccaaaccctgtgtggaatgcagccagctagctggtttaaaccagttcatgacagacctcagcaatttacagatggatcccagtgtactttcctcattaccatgctagtatcttcaccctgggagatgctatagcttcattaccataacatgtgacctgtgtgctgaaataacgactcactgcatctgcacaactgcaacccctttccatgcaacgacataccctcttccctctctatcaccccataaaaccctcctgtcactttcctgctttggagactatgcccggtgctttatttgtgacaagtaataaaactattgctcaaagcctgcaaa

SEQ ID NO: 95133 - DNA, 505 bp, Homo Sapiens
cctgcctcgccctgctctgctccccttactattctggcaacccaggccccgagtccaagatctcgcctttctgggtgatgcctcctcccgagcaaaggcccagtgactatggcatccccatggatgtggagatggcctacgtccaggacagcttcctgaccaatgacatccttcacgagatgatgctgctggtggagttctacaagggttcccctgacctcgtgaggctccaggaaccctggagccaggagcacacctacctcgacaagcttaagatctccttggccagcaggacgcccaaggaccagagcctgtgtcacgtcctggaacaggtgtgcggcgtcctcaagcaggggagctgagccttccagggcagggtgggctccagttgtcttgagggtccggatgggctcaggtaataaagaaacggaagcagcagccagccacgctggtctccccaaggctggggtgagggtggctgggtgcccaggctggtaccatcaaa

SEQ ID NO: 95134 - DNA, 378 bp, Homo Sapiens
agacagaggtgacacaagaacctaggatttctgatttgtagatgagaactctttctataatattaaaatcaattataaattttggggagggaagcagggagatccttgttttttcctcccccaactgataagtaagtactaagaaggtcaatcttgaattagctatataataccaaaagttaagtttttcacacagacctggttcagtattgattccttttatgaaaaccctgtttatactcaagttgtcaaagaattccagagggcatatgaagccattgttaaaataattatatgcctttgtttttgaagaaaagtatccaaaatatataagcttattgtttgagttaaacaataaaaacatctgctgttaaaaaa

SEQ ID NO: 95135 - DNA, 441 bp, Homo Sapiens
agcatagtgaccatatgaaccagttggtaaaaaaagcaggctggtacggtcggaattcccgggatatcgtcgaacccacgcgtccgtacctcatcatttgttgtagggattaaatccgggagagcaattctgaagcctataaatttccttgaagagatctaagaacctattatgctcttggtgtaccaagctctggggtatatattcagaatacctcatgttctggaagctgagcactagctcccctttattgcctgcctggcagagcctgtttgattactgcaggcccttttacccatgcttctagtttaggtattctttctttgatatgaggctcttgaccagaaaagagttctttctctaggtgttctgagagaagtttgtaaatttggatagtacattctatcctgataaaaccaccttgctgtggtcttgatgtac

SEQ ID NO: 95136 - DNA, 767 bp, Homo Sapiens
tgactctgaatgttcttgtgactaaatctgtgtgtgctttcttaatgtaacactaccactgctgtcattactattggctacagtgccaggcattgtaccaagtacttatgagcgttgtctcatttactccttaatcctgtgtggtagctaatgttaggaaataatataggtaaagatcctgttttgcagaattaactggggctaagagattttaggtgacttgctacactactagtgagtagtggagccagcatttaaactttaggagagtgacttcagagcttgaatatataactagtatatttattacctctcatgttgttctttttgtacaaaaaagctcttctcccatcttaaaaacactaaagtcttacttccttcactggctactgcctaaaattttttgatcctgtttatagcaaaactcctccagagagttgaatgcattcgctattagcagtccttctcttcctcccattgtttcttactctgaccagacgttttcgcctaccactctactgtacccacgctcttatggtcaccaacagctaaatccagtgataaatttttaattttcagttctaatttttcttgacgtgttacttgacattgttttgtcacttcttcctttttgatatacttttttcacttgactttcgagggtccatattcttgatttttttcctttttgcagtaacgtgaccatagcacactgtagcctcgaactcctagggcttaaacaatccccctgcctcagtctcctgaat

SEQ ID NO: 95137 - DNA, 412 bp, Homo Sapiens
cataaatccttaccttctccagaagcaacgaatggtgttgagaatagcatatgttactactcagccatattccatagccttttctccaagatatttttccaaagttgccccttttctgaatcccttgcaagcaaacaaacaacaaaacaatgggtaataaaataattgtttaactttcatttatatgctctgagattgatgtgattttgataaataactatattaaaagacaaatgggagtggtgattttgtgaaaagcccatgcctctgcccatggaatatgtggcttggcctggagctcttattttacttatatatttctaagcagaattattcaagaatgtctcttattacaggtcttgaaacttggacagccaacagaaaggaagctaataaataaatttgtcagaaa

SEQ ID NO: 95138 - DNA, 2196 bp, Homo Sapiens
  misc_feature (1196)..(1196): n is a, c, g, or t
  misc_feature (2108)..(2108): n is a, c, g, or t
  misc_feature (2160)..(2160): n is a, c, g, or t
cgcgctgtgcgaccctcccggggccccagggccacctgggcctgccccggccacccacggtcccgcgcctctcagtgctcaggagctgtcccaggaaatcaaggcttttctgactggcgtagaccccattctgggccaccaactctcaacccgggaacatgctcgctgtggtcttctcctgctccgttctttgccacctgctcgggctgctgtgcttgaccacttgagaggtgtctttgatgagagtgtccgggcccacctggctgccctggatgaaacccctgtggctggtccacctcacctccgtccacctccaccctctcatgtccctgctggtggacctggtctagaggatgtggttcaggaagtgcagcaggtgctgtctgagtttatccgggccaacccaaaggcctgggcacctgtgattagtgcatggtccattgacctcatggggcaactgagcagcacgtactcaggccagcaccagcgtgttccccacgctactggcgctcttaatgaactgctacagctgtggatgggttgtagggccacgcgtacattaatggacatctatgtgcagtgcctctcggctctcattggtagctgcccagatgcgtgtgtggatgccttgctggatacctctgttcagcattctccacactttgactgggttgtggcacatattggctcctcttttcctggcaccatcatttcccgggttctctcctgtggccttaaggacttttgtgtccatggtggggctggaggtggagctggcagtagtggtggaagctcttctcagaccccctctacagaccccttccctggatctcctgccattcctgcggagaaacgggtgcccaagattgcctcagttgtaggcatcctaggtcacctggcctcccgccacggagatagcatccgacgggagctcctgcggaatgttccatgatagcctggcagggggatctggaggccgcagtggggacccctcccttcaggccacggttccgttcctactgcagctggcagtcatgtcaccagctttgctgggcactgtctctggagagcttgtggattgcctcaagcccccagctgtgctgagccagctgcagcaacaccttcaaggattcccccgagaggagctggacaacatgttgaacctggctgtgcacctggtgagccaggcctctggngcaggtgcctaccgcttgctgcagttcctggtggacacagctatgcctgcttcggtcattaccacccagggcctggctgtgccagacaccgtgcgtgaggcttgtgaccggctaatccagctgctgctgctgcacctgcaaaaactggttcatcaccggggagggtctcctggggaaggggtgctaggcccgcccccacctccccgcttggtgccctttttagatgcgctcaaaaaccatgttggagagctgtgtggagagacgttacgattggaacggaagcgcttcctctggcagcaccagctcttgggcctgctgtctgtctatacccggcctagctgtggacctgaggccttgggccatctgctgagccgagcccgaagccctgaagagttgagtttggccacccagttatatgcagggctagtggtcagcctctctggcctcctgcccctggctttccgaagctgtctggctcgggtgcatgcagggacattacagcctcccttcacggcccggttcctgcgcaacttggcactgctagtagggtgggaacagcagggtggcgagggccctgcagccctaggggcgcactttggggaatctgcctcagcccatctgtctgacctggctcctctcctgctacatcctgaggaggaagtagctgaagctgctgcctctctcctggccatttgtccctttccttctgaagccttatccccctcccagctcctgggactggtaaagggctggggtgcaccgccttctttgcctctctgaggctgcatggacccccaggtgtgggcctcagcctgtcagcttctcacccgcctgtctcagacatcccccgcctggggctcaaggctgtcctgcagctgctggttgaaggagccttacatcgagggcacacanaaactgtttggttggggcaagtaaatgggggacaaatgagacttctctcagnttgtttccgctttcttttggccttctggccttcccg

SEQ ID NO: 95139 - DNA, 490 bp, Homo Sapiens
agctgctggagaacccagagcatgaataaaagttacacttggcagccaggaactctttcagaagataaaataacagatagatattctccgaaaggatcccaggaaagaggatggcaactgccatttattatgtgaagtgaactggggacttttaactaagccatctaagttaatctcccaatagcactatgcgtaggaagggggtattgttccttttttgcagataaggaatctgaaactcagaaaggtcaagggacgtgcccaaagtcaccctgttggaaacatgagttgagaatggaaccctggtatgcttagttctaaagctcttttctctataccatactgcattccagaatagaattatgtctttcttctcatgttttaggtatctaatgtgatttttcttgcagcaatataacttctgcaaatactatgaatcatcaccaatgtatgaaattgttgaaagaaataaaagaccatgaatttgaaa

SEQ ID NO: 95140 - DNA, 442 bp, Homo Sapiens
caccagaagacccacatgctagcgaacctttttaaatgtaccgtgtgtgggaaaactttcaagtcgaatttgcatctcattactcataagcgaactcacataaaaaacaccacgtaaagtaaatataacaaattgttattagtgattgggcttttcagtatctgtatggtgggaagcagttactgtatatgtcccaggcaatgtgctaagcactttacacacattcccatgtaatacttaattctcagcacaaccttgatttaggcagtatcatttccattttataagtagggatgcaaaatccgtgtcactaaactagtgaatgaacccaggatttgaactcagttactgtacaactgtgagccagaagaagatacacaacttttgtttaaattcaattttcattaaaatgaaggctcttgctaaagttattttaaaaaaa

SEQ ID NO: 95141 - DNA, 716 bp, Homo Sapiens
  misc_feature (486)..(500): n is a, c, g, or t
gttgttgggttgaagcagagcaggtatggaataaagtcacaccatcggatctattaacaattatttgccaatggtcacacagatatcctgaaagctccgatttcaaatgctttgaaaatctgcagcacaaatgaacaaaggttggagaaggggcccagctcagtcatattagagatggaccctccatacatcatggtgacctctccacaggtcggccccacattttctatttgcaattcaaacccaaggcgagggtgaagagggcaagcttgggttcttgattatatctgcaaggtcaccattgctatgcagagttagaggaggccaggtggcaacccagcacatttgaaaattggatctttgttggaaactgcctcgatttcatggcagaaaccaaacttgagatgtctatattagaggcatctggggagtcacgaggtacattcgttgccagataaaggggaggagggaaaggggagaaggacnnnnnnnnnnnnnnnccaaggaaatattttctactgctatgtgagaggtcaggtgcagccaaatcctaaattagctcaagaaagggcgctggagagtgctggagccccaagtcccgtagatgcgaacaatgctagagtttcaattacaaaatagctctcttccaagaacaactgcaaaatatcaagtctgtggaaatctgtacgaccgaaggggggaaaagtgaaaattga

SEQ ID NO: 95142 - DNA, 875 bp, Homo Sapiens
cctacacctagctcatcattttctatggatagacaatccgctcttcatccagaaaaccaacctgccctccccaaatatgtgctcaccagcagcaacaggctatctgagtctttccaagagcaattgccaagggcacaggagaggtcattgtcacccaagcagaggccaccttctcctgagaagttgctgttgaccaaggagaggtcacattcttttcaggagaaatcactgttgcacagagaaagccagctgtcgtcatttgagagccagccacagcctctggggagccagtcatttctttcaggccagctgacgttggagagccagccagactcctcggaggagaagtcagcatttttgaagccctccacaccgttccggaagagctggcaaaaggagcctcacacccccaaggaggggacggtgccacttccagacaagacccacaaatctcaggtggagactctgccaccaagtctggaagaatcgtccacgtccacgagcgagcagcctatggaggtggagctgtggcccgcggagaagcagtcatcatcatccatggagtggctgctggtgcccggggaggagcagctatccttgcccccagaggagcagtcattgccctctgcggaggggaccagggttcagcagtgacgtagcatctgaatccctagacccatctgatgaagaggcatcttcgagcccaaaggagtcacgctggcatatcaggaagatgtccttcctgggaagaagaagttccagccagttctgctgcaagtcaaccagcatgcagggggccttcctctaaagacaaggactccacatgcttttctttttctaataaaccagggtccatctgaccccagcgctaaaaa

SEQ ID NO: 95143 - DNA, 694 bp, Homo Sapiens
aaaacttgatttcaaagtgaaattagacatctatcccccctcattgcctccccccatgagccaccactcctgactttaattttatttttaattgtacttgtttatttacttagtgtcatatctgaatgacttactttttctgcctattttaaggtaacttttacgtaggctgcctctccaggaagaaaatgtatcctggattacaaaagaagagtgggaaataggggaatctaataaagctgtgttaatgagtatgactttgtacttttttagaagcagacttcaattgttttaatacggtttcatggatacgataaaaaatcaaatctggcaaaacccagtcgtaaatgaggcctccccaaaatcattgcagaaaatcatattattatatggttaatgaaatgaccagagtgagcctgtaccgctagcctgcaagaaattctggggtctagcggcatgatttaagtctgtcttggccctggccaccagttgctgtcaccttgtttaaacatggatggggacaattttgagtccagctactgggattaggacttctactttattaatgcatatatttctgtaaaatatatttctagaagtaggattagtagattggtattaagcatttccagtgccaagtattattaatacttgcaattttgaaattcaaaaagctctgaaaaatcaagttgtt

SEQ ID NO: 95144 - DNA, 627 bp, Homo Sapiens
atctgatttggttctagggagtttttggattccctgcctccaggccctattctcctgccttagaggtacctatagcaatgtgctaggattcagctaaaaccaagatgcccacgccagccctcacagccaagtgcccaagatgactccaggatgcagagcctcctgcacaatgcatgtgctcccatgtgcaaactcaaaaatagtccctgtgtctgtcttttctgtatttctgacagcatccattgctaaatagagaaacagaaaacctcacctcggcatgcatggtgtggatttggttcctggctcaatttgagacaaactagatcagtgacatagggttttcttcgctactaaacacaaagatctgcctcttagtcaatagagaaaacagggtcccaacttcaaagagcttgacatataataacataatggataagacaaaaattagttatttaaatttacagttatttttatataaagttatctgactttaaggttatctgacattacacaggcaagacttttttcatatttcagtcattccgtttttcattgacaaaatgcataaatgtttctattttaagcccttttaacatgtcagtaaatatcaattaccttcaacataaa

SEQ ID NO: 95145 - DNA, 504 bp, Homo Sapiens
gaattgaaaagttttggagccagttcgaggactttctgctgcacaaagtgttggctggaagcatgaagcaataacacatggtttgccaaagaatctgcattgaataatactggtggtgaccacaagaacatgcctctctgactgcaaggaacaagagtgacccagggtttcagctgctgccttggaaattcatcacagtgcaagtctatgcttcccacgggctgctcccagcctgtgaataagcctggcatctttgttgaggcaggcctatttctggagatgcaggatcctccgatgggcgaatttggctctaggactgcttgatggccttgacagactttccttagaaatgcatggcaatttagggttcctccacccttccctctttctctccttcacctagggtcggacttgcatcatggcctgaaagctccaccagcctctcctgccctcctcctcattttctttcacaggcatatcctctaataaatttcttgcacattg

SEQ ID NO: 95146 - DNA, 435 bp, Homo Sapiens
gcatgtgtcataaaagagaaatgggggcagatatagctccctttcatatgctataccagaacaaaaatttgtaaaatgcataagtgcattaactgaatatgtttgaatttaaattctgggtttttaccttcaaagcacaggcagctgtagatacaaaaagtcctctaatggagtactggaatgtttcattgtcttcacaacttggagtgtcagagttttctctgccttctatattgtaaaactgagtgactattcttggtcgtttttattagatttattgatgtccaagcaatacaagaattaactgttcatatactgtatgtttccttaacatgcttatttggtttctttgatggagattgtcaaggccaaagaaactttttcatttgtcatccaaccaataaatggacagaagctgttagaagctctttaaaa

SEQ ID NO: 95147 - DNA, 647 bp, Homo Sapiens
  misc_feature (562)..(562): n is a, c, g, or t
  misc_feature (627)..(628): n is a, c, g, or t
tttgctaggcagcggcagtggcggcggcagcggcggctggagcctctgattgggtttcggagtccggtactggagccaatcagcgcgggcagcgaaccgggggagcgaggcacggagtgtacctcacagccttctaggatctccagagtggacaggaatctcacttggagggaccatggagcagtatacagcaaacagcaatagttcgacagagcagattgttgtccaggcaggacagattcagcagcaggtccaagggcagccattaatggtgcaggtcagtggaggccagctaatcacatcaactggccaacccatcatggtccaggctgtccctggtggacaaggtcaaaccatcatgcaagtacctgtttctggaacacagggtttgcagcaaatacagttggtcccacctggacagatccagatccagggtggacaggctgtgcaggtgcagggccagcagggccagacccagcagatcatcatccagcagccccagacggctgtcactgctggccagactcagacacagcagcagattggctgtccaggacagcangtggcacagactgctgaaggcagaccatcgtctatcaaccaggtaatggcagatgcaccattctnncagcagtacagtccctgtt

SEQ ID NO: 95148 - DNA, 511 bp, Homo Sapiens
  misc_feature (54)..(54): n is a, c, g, or t
  misc_feature (80)..(80): n is a, c, g, or t
ctctgtgcatgcatctgtcagtctatcaatccccgatcccttcttgtaatggtngttgagcgctcacaactccctcatcntaagacgctcgttggatccattccctcccctcaccccatgctgctctctgccctcccttcccggtcaagttctccagccagtggtctcaactcaatcttcacttcccccgctcctctcacacctatccccactgcattctaaattcttccccaacgcgctgggcctacaggcactaaaaaggtcactttgtccctggatgaccaaacacaggccaatgtaacttactgggcttgttttgccccagccacagctgaccacttcctccttcactcttgttgttgatcacctttgggcttagtctttctccatctctgttgagtccttctcccctgccacctactccttcatgctggggttctctgtagctctgtacctgacagtcacgttccaccctttcctcccagaagctcgccaacccccgtggactgct

SEQ ID NO: 95149 - DNA, 501 bp, Homo Sapiens
cctttgtgcgagcaggttgatgttaaaagcaatgaggaacttcttcgcccccgtggccgtggccccccaactggggacaaaggagctgggaccaaagtcgggcgcccagtcggcctgctggagctgtgagcaagttcgctctgggaaccgcaagcaaccacataaatataacggcagagaaaaggaaaaactcgtgaacccgcacaccagtgtgactgtgacgtgggccctgcgtcgggatttccttcggggggactggcatgaccgtgacgggggttacgtgtgccctgcatgccggcgtgaccgtgacgggggttacgtgtgccctgcacgctggcgtgactgtgacctacgtccctgcctcgggatttctttccaggagcgctgggttggtgcagcctaggggtgggtatgcactttgtccagtttgtctctgtttgtttcatatcattttcttgatttagttaatttcccaaagtgaaattattctgctctagaaaa

SEQ ID NO: 95150 - DNA, 122 bp, Homo Sapiens
tttgttaaaaattttgcattaattttcatttataaatatcacataaatatcactagcaggtataatagtaaatcattaaactaatttctaaatattgatttaaaaagctttgagcatgtttc

SEQ ID NO: 95151 - DNA, 458 bp, Homo Sapiens
gcggccgcctcctcgcagaattggcacatcttggcgcgaaagtcgttcacttctgggtcgcacaaggagtcaaactcgtggaggcctttgccgatgaggaggctgatctgtgagttgatgagcttcttcacgcggtcgccctcacgggccaccaggcgcaggacgggcaggaagggctgcacgtcacacagacgccgttgctcgtcctccaagctcctgctgctccgctgtctggttgatgcaagtgaacacataaggccccgggccagttaagcaatttgaaaaaccggctcatactgggcccggtgccacagcagctgcttaatggtcctaaggtttgcattcatgcgcccagggaatttcaggtaaacccctttgggcaccaggaattcaaccacaaggctctgattctcctccttggtccagaattccatggggcagtccaccccaggggcaat

SEQ ID NO: 95152 - DNA, 713 bp, Homo Sapiens
ctcggaggctgctggtaggggggcaccactttcagataaaaacatagacctgaatggcatcatccagtatccaaggaaaccatgcttgcttgaagagtgagcaggtgagcaaagagacaagattacatgtttaaaccaagaaaagaatcttgaaaaacagattggaagaatgcgaaatgttattagacacaggcacagcatagcagtagaaacatcttaactgagaacttggaactgaaagagaaagcaaccaacttaaagggcagacaagacacatggttatgtaacacagcagtgggtattcacagtgatgacacaagacaaaacaattacattttcattctaaaagtaatttttaaggaggcaagggcatttataaaacattttagaaactatttaataaaaatggtaaaattaaagtgtttgtttatgtactcaacaaatatttatttggaaagtgcatgcctgggggcacatctcgttaatgaggtgatcctgtgtttagaactgaaggcagtcctcatccattctctcaaaaggtgaccttctttgttcttcttatagcctcaccacatttaattttcagaggttttgacataaattaaaaacattctttggtagattgtattgtatgaaaacaatcttcaaaagtgtaagcattgatatctggaatatctgggaaaatgtacaataaagacatctcttctggtctt

SEQ ID NO: 95153 - DNA, 648 bp, Homo Sapiens
  misc_feature (502)..(573): n is a, c, g, or t
gcatagctcacttcctcacatctttcaggtctgtacaagtgtcagcttctgaaagagccagtccatctaaaaccgtaaccccttcccctccgcttgtacataccaccaaattcactatagattttacttatttactttttctgcctctccctggcccttaactgcagtagagcaagaattttgttttgctcactcctgtgttcccaatacctaccacaatgtcaggcacatggtacatctcaatatttattaaacaaatgcatgaacaaactaagtgaataaataaatgaattctcttttttacaggatcttcttcatgccagccataccgggcaggaaccatcagagagacacactgaggaggcactcagaaaattttgatagaattgaatttacatatagctgataaagcctaaatagaaaggttgatgtatttagcttgaatccttcactttagtggtctaatcaacagataaatgacaagcaaagaatgaaacaatcnnnnnnnnnnnnnnnnnnnnnnnnnnnnnnnnnnnnnnnnnnnnnnnnnnnnnnnnnnnnnnnnnnnnnnnntataccaaggcaaaaaaatcatataagctatatcataaatacaagagtttcaaaacatacaagagacatataatg

SEQ ID NO: 95154 - DNA, 995 bp, Homo Sapiens
  misc_feature (250)..(307): n is a, c, g, or t
  misc_feature (390)..(398): n is a, c, g, or t
  misc_feature (589)..(732): n is a, c, g, or t
ctccaaacccatccccaagccccgcgttagcattcgcaagtccgtggatcttcttcatgccagccataccgggcaggaaccatcagagagacacactgaggaggcactcagaaaattttgatagaattgaatttacatatagctgataaagcctaaatagaaaggttgatgtatttagcttgaatccttcactttagtggtctaatcaacagataaatgacaagcaaagaatgaaacaatccaaaaatgnnnnnnnnnnnnnnnnnnnnnnnnnnnnnnnnnnnnnnnnnnnnnnnnnnnnnnnnnnaaaatgtataccaaggcaaaaaaatcatataagctatatcataaatacaagagtttcaaaacatacaagagacatataatgtnnnnnnnnnttatatatatgaagtccaatgtaatttataatacaaaaaaatacagcaagggaaaatgctttagaaatgctcatctgcaaactacaaaacaaaatcctcctcttgaccgactgcatgaactgccatgaaatttgcagctccatcatactaggtatctcttctttcttcatgttaccttgtctttcttcccnnnnnnnnnnnnnnnnnnnnnnnnnnnnnnnnnnnnnnnnnnnnnnnnnnnnnnnnnnnnnnnnnnnnnnnnnnnnnnnnnnnnnnnnnnnnnnnnnnnnnnnnnnnnnnnnnnnnnnnnnnnnnnnnnnnnnnnnnnnnnnnnacaagggccattcaaggctttttaaaacctgatgtgtgttgttatactttataacagtcagtggcttttaattccaaaaggtaatactttatactctgcctacatgagatgagcccctaacagtgtgtacaaataaaattatgatttgggtattctaaggagacataccatttacagaaatttcttttgataaaattaaggtttcacttttcacatttgcttaaatcacagtaagcctgtaaactagctccttgacccacccc

SEQ ID NO: 95155 - DNA, 593 bp, Homo Sapiens
  misc_feature (174)..(174): n is a, c, g, or t
ccgaggcagcagcagccataagaaaaaacaggagaggaaggcgatgtggcgcttctgccgggccctcagactggggagtgtgaggtcaggacaggctggcgtgtcgttttcgtctctgtggctgctggacgtgtgaatgtgtggttcaaaccttggtacaagttgctgcactgngtctgcgcaggtggttttgtatattggtatttggtactcttgacttgcagttgtagatgttagatttataagccggacccaggaggtcatataacccagacatgcttgttgtacagatgaagaaccgtggataggttaagtgctaacttcgtgtagcttgaagtcattgaacttcttggctatatatgaactttgggttcaggggtagttccctaacccatctgtgtccccattggcccattagtgtattttttggctcagttaaagttgagccacagaagccttaactaatagaaatacagttcttagttggtggatttgtatgtcagttaaccagggtctttggaaagtatattgtcttttctataaaatgcttgggtcctttagatgattataaataaatgttcaaaatcaaaaaa

SEQ ID NO: 95156 - DNA, 502 bp, Homo Sapiens
agagcagagtctgcagcaggaagcccgagagtcaccagcccaaagtcacccagggatgactgcgtttctcacctctggaggactcagcattcaaggtgccatcttggaagcagagagcagccctcactagactacaaacctctggcgctttgatcttggacttcccacccaccagaactctctccactcccttcctagactttcttcatagagccagaagagggtacctgaattggcctggactgctcagcctgtacggttctgggagtggggtggggtggatggagtgaactcagcaggcacccccagctctgctctcctgtggtgtgactggatctccaggagggacttcgacttttccaggtcttagcactgaagatgctttggtgcttctgcacaggggagaaaattcaaaataaaaaccaaacccataaccatgcaatacaactttttatatgggatgctaaaaataaaatgttgttttgttttcttaaagttaaaa

SEQ ID NO: 95157 - DNA, 342 bp, Homo Sapiens
gcactgttcacagtagccaaaaactagaaaccacatgtccgtcagctgatgaatggagaataaaacgtgggaaatccacaccaggagagaaaaaggagtgaggcaccagcataggcaccccgtggatgaacccggaacctgacgctaactgaaggaaggctccggctatagggagtgtcccagcacagccagagattgaagggtgccggggccgggagttggtgggggttggggctggggacacagtggccagtgtgtgggtttgttttggggatgatgaaaatgttcttaggttgtgtgtggtgatggctgctcacctctataaaccttttactaaaaacc

SEQ ID NO: 95158 - DNA, 619 bp, Homo Sapiens
tgctcggggctcttgattggagcttccggtatgtgatgacggtatgtcatgtatgcatggatgtactcaactgtgtttaatactctgaattttaattagaaaaaaatacaatagcagcaaggccctggtttctaagctgtatccttttattcatgtgggacatgagcaaatggcagaattaggggcgagtgctttcaatgctcgaaactaagcaagtataaatttttcctcttatttgcatgaaaggacaagacactgttatgccctgtcctaaatgtgaagacagaggttgaattttttaaaaaatatctttaaaagactgatcacaaaatccaaggtgctacaggaaacaagcacactcaagaaagtttttttctgaataacagtttttcccaatttctccgttttataagacatttcctaatttatggggattttaattgaaaataaacttgagtcccaatagagctgtttttttctcacttcctacaaaatgcaaatgcaaaataaataactaagcagcttttgtttggttctgaaccgtatgtggcgtattgttattaggttctagcttcctttaaactaataaagaataagaaaacttgttatgttttaaaaa

SEQ ID NO: 95159 - DNA, 472 bp, Homo Sapiens
  misc_feature (122)..(216): n is a, c, g, or t
  misc_feature (396)..(432): n is a, c, g, or t
ctagagataaagaaagtataaatataactaactccaaacacatacaggaagaaaaaaaatcaagtatagtagacggtaataaagcacaacatgaaaaacccttatcccttaaagaaaaaacnnnnnnnnnnnnnnnnnnnnnnnnnnnnnnnnnnnnnnnnnnnnnnnnnnnnnnnnnnnnnnnnnnnnnnnnnnnnnnnnnnnnnnnnnnnnnnnaaattcaaataaatagcttactcaaactaaaatctgaagcagataagcctaaacctaagtcatcaccagcatcaaaagatacccgacctaaagaaaagaggttagtgaatgatgatttaatgcagacaagttttgaacgaatgctaagccttaaagacctagaaatagaacagtggcacnnnnnnnnnnnnnnnnnnnnnnnnnnnnnnnnnnnnnaacggttgagaaaccgaaactgtttagaacttaaaataaa

SEQ ID NO: 95160 - DNA, 419 bp, Homo Sapiens
  misc_feature (69)..(163): n is a, c, g, or t
  misc_feature (343)..(379): n is a, c, g, or t
aaaaaatcaagtatagtagacggtaataaagcacaacatgaaaaacccttatcccttaaagaaaaaacnnnnnnnnnnnnnnnnnnnnnnnnnnnnnnnnnnnnnnnnnnnnnnnnnnnnnnnnnnnnnnnnnnnnnnnnnnnnnnnnnnnnnnnnnnnnnnnaaattcaaataaatagcttactcaaactaaaatctgaagcagataagcctaaacctaagtcatcaccagcatcaaaagatacccgacctaaagaaaagaggttagtgaatgatgatttaatgcagacaagttttgaacgaatgctaagccttaaagacctagaaatagaacagtggcacnnnnnnnnnnnnnnnnnnnnnnnnnnnnnnnnnnnnnaacggttgagaaaccgaaactgtttagaacttaaaataaa

SEQ ID NO: 95161 - DNA, 622 bp, Homo Sapiens
  misc_feature (462)..(559): n is a, c, g, or t
ggccgggtggttaatcggcacgaggagggtgggtatgaggcggtagcggaccgcggagtcgagacctacccgaacgacgcgggcgagcggggctttggacgccggtggagacgcaggcgaggaagaagatgagccttaggtctgaacgccgaggaattcatgtggatcctgtgcaagaaaggatgtggttactgtggcaaccctacctggcagggtttctgctccaagtgctggagggaagagtagcacaaagccaggcagaagcagattcaggagtactgggagctggtggaacgactccagcgggaggaagaagaggcctttgccagcagtcagagcagccaaggggcccaatccctcatattctccaagtttgaaggaaagaaaaccaacaagaagacccgcaaggttaccacagtgaagaaatcttcagtacgtcttccagggtcggatcaaagaagnnnnnnnnnnnnnnnnnnnnnnnnnnnnnnnnnnnnnnnnnnnnnnnnnnnnnnnnnnnnnnnnnnnnnnnnnnnnnnnnnnnnnnnnnnnnnnnnnnatattgaaatggattccaggcgtgtgcctcgagacaagctggcctgcatcaccaagtgcagca

SEQ ID NO: 95162 - DNA, 1138 bp, Homo Sapiens
  misc_feature (272)..(369): n is a, c, g, or t
gcgaggaggagggtgggtatgaggcggtagcggaccgcggagtcgagacctacccgaacgacgcgggcgagcggggctttggacgccggtggagacgcaggcgagactccagcgggaggaagaagaggcctttgccagcagtcagagcagccaaggtggcccaatccctcacattctccaagtttgaaggaaagaaaaccaacaagaagacccgcaaggttaccacagtgaagaaatcttcagtacgtcttccagggtcggatcaaagaagnnnnnnnnnnnnnnnnnnnnnnnnnnnnnnnnnnnnnnnnnnnnnnnnnnnnnnnnnnnnnnnnnnnnnnnnnnnnnnnnnnnnnnnnnnnnnnnnnnatattgaacatggattccaagcgtgtgcctcgagacaagctggcctgcatcaccaagtgcagcaagcacatcttcaatgccatcaagatcaccaagaacgagccggcgtcagcagatgacttcctccccaccctcatctacattgttttgaagggcaaccccccacgccttcagtctaatatccagtatatcacgcgcttctgcaatccaagccgactgatgactggagaggatggctactatttcaccaatctgtgctgtgctgtggctttcattgagaagctagacgcccagtctttgaatctaagtcaggaggattttgatcgctacatgtctggccagacctctcccaggaagcaagaagctgagagttggtctcctgatgcttgcttaggcgtcaagcaaatgtataagaactggatctctgtctcagttgaatgaacgaccaagaaaggatcatgaatgacgcccagaaagtggaaaagacctcatgatggacagatggcatgcaagagaagtcagacatcgttgagaataccactgggaattaagctcgaattcaacgtgacagtatggctctgaaacgtgaacggttacgtgctcacatggaacgagttaggcggtgaccacgtagggagtatatggcaaattagtgctgtaaataaggagggataacggacagggtagagagaaaaaggcaagagagcggacgggacaaaaaacatggggaaacaggggggaaaacatgacaaagaacagacgaacaaga

SEQ ID NO: 95163 - DNA, 406 bp, Homo Sapiens
ttttgaggggaaaaactgagtcatatttatatttcccatagttcacaaagcaatattatacactgaataaattgagtacattgaatataaattcatgtatggttggatggattggtgtaagcagaagaaaagtgggaggaatcttctttagatgatatgccctgggtcttgcctcttaatgtacatcaactttatgtttaaagacttccattgtggtgaataaaagtatccacaataatgtaatcatttcttgtttctcccattctccctcaccatgaaaatatcaggcaatatttgcattcaaggagctgctcatgaatccatgggatgctgagagaagcgccatttctttccagaaggctgtgtttccaaattaacttgttcagatgctaagcagaaaagcagc

SEQ ID NO: 95164 - DNA, 295 bp, Homo Sapiens
cctcctcagatccatggtgggactgagctcttgtcagtcttcgatgctggtgaatctgtttctgttcctcaattagtctcttctctatacattctttggcaattctcaatgcctcttttaactttgtagggatcttaaactgtggtttttcagaagtggttagtaaaacatcgctgaataatggcatctgtaagagccgggagatggtaggcatgccatttttacaggcttcacaagacagcgtagactccaacacggccaccacagccatggacggggcaggagggaaggagtc

SEQ ID NO: 95165 - DNA, 820 bp, Homo Sapiens
  misc_feature (384)..(384): n is a, c, g, or t
cctttggggatttgagagtttaggagaccgggatccccctcctatttcgacggttccaggaccctttggaaaaactcggttgagggcaaagccatttctggcatcttaacgggaaacttgccgaacggaatcttgcgcacaagttttgaaccatgctgccccaaatggactgtttcctcgggattgagaccttttaagagatccgccaagaaatttcaggagcctggaagattgaaacagtgacctgcttctccttgatttgaaccaaagcaataaattttaagtgcagctctccagagaatttgaaagcttcatcagtggatgaagatagctgcccgtgtctacaatgaaaccgaagatgtgtattttaaatgttctttctgntgaagagatgttctcgtttgcatactgctttttaaagactttgatttctccaagtgtgtatcatctgcactaggaactttgtttttaagcaataggtctggatacacatttaacttaggaggctcctccaatttgcctcaaacctcttacggagcttctcctcagaagtggtaccatcgccttccaaagtcagcactctacactcttgaatgtaccaaggatctcttggcgacagtaccaagcacggttctctacacaggtgactgaagttgcctctgtgttggctggcatccctgagtccctcctgcgtcctatggagcctagaagaaaccttcacttgcagaaaacttgagtcagaaaattctggaacttgaaaaagtagtaagggcctccagaattgacttagccctagtaataaaagcactgccaaaacatc

SEQ ID NO: 95166 - DNA, 561 bp, Homo Sapiens
gaaaagtccttggcgaactgagcagccgcctagtatatctctgaagcctcctgcggagacttcacggcttgtcccaggagcttctacaacagcctggcattgagagtagagttgtaatattttccgccagtttttcccagcccggccccgaagcgtctgatcttaaagtccacgtatcagactccggggggcgtccctgcaagagcgccaggtccccgacacccaccagggaatgaatctgcgcccaggtccccgacacccgccagggaatgaatctccgtcccaggagaagggcgtggcgaggggagaagcaacaaccacaggacccgtgacagtgcccaagccttagaggccccgcatgcctgccaggcgcccgagcccacgcagtccaggtttccccatccgggcgggaaccagctgtttcccctgcacgggcgagggcgctggggtcacctccgccgacgccaggcgtgagctccagaacccgctcccaaccgcccggtcccgtgagcgcggggagcctggctctcgcctgacaataaagaaatcatcacggacaaa

SEQ ID NO: 95167 - DNA, 795 bp, Homo Sapiens
  misc_feature (537)..(537): n is a, c, g, or t
  misc_feature (675)..(675): n is a, c, g, or t
  misc_feature (686)..(731): n is a, c, g, or t
ataattttaaaaatcatatttaataggatccatttattattaaatgaacattaaattacttaatgtataataaatccttaacacaatgaaaactcttaatgcagagtgagaccaaaatgaaggtattaactgttttcttcctaatccttgctttagttgttctttccaccagatcgtcactttatttgaaggatattgtaatagcacaaagccatcagctttaccattagagagatcttcattaaattatctttgttgtaataaaggtcatctggaggaaatactggtctgaatacaataataaatgttaagctttctagtattttccacttttagacacaaattgaaagaatcatttataatgtcaaaaacacttttttctaactaatctattctatgactaagacactattagcaattaaagtagatagatcaaatctaaatgtggagagaaaaagtaatttctacttatgtttaaacagatgaaagcatgaataaattgaaagcctgaaatattagcttgggggaataacgtcnctttcggggagcaggagcaggatataccagcctttagctctacacactccccccaagaaaaaaatatatagatagttatgtacaaaccaaaatagctctgggagggttcaagggaccatttaagaaactatggcaacncagtgaagccnnnnnnnnnnnnnnnnnnnnnnnnnnnnnnnnnnnnnnnnnnnnnntagccatatagaaaaaacagctgctgaaatctgcatacctgagatgcgagaaacatcttttttg

SEQ ID NO: 95168 - DNA, 413 bp, Homo Sapiens
ggcatttcaatgggcgagggccggcgactgtggatctggagctggacgcgctggaggggaaggagttgatgcaggacggcgcgtccctgagcgacagcaccgaggacgaggaggagggggcgagcctgggcgacggcagcggggcggaaggcggcacctgcagcagcacctaggcggtcgggcggcgatggcggggacgaagtggagggcagcggtgtgggagctggcgaaggagagactgtccagcacttcccgctcgcgcggcccaagtctctaatgcagaagctccaatgctccttccagacctcctggctcaaggactttccctggctgcgctattccaaggatactggtcttatgtcttgcggctggtgccaaaagacccctgcagatgggggaagcgtggaccttcc

SEQ ID NO: 95169 - DNA, 354 bp, Homo Sapiens
cttaaacaaggttttcttgagctgccatcttgacagatgccatctaacatacctgtttttaaaatgtgttaacaacacttgtttttataaattttctattgtgtcttttttttccaaattgttgcttcacagtgtaaaaatgctactgtaatgattagcttgaatgatgtccatacttaaggcatacagtgctgaattttacattagatttacaaaatcgaatattagattttctaaaatctttccctctcagccataaagtgtacttggtcttatagcagtgaacaaaaaccatcactaagaaaaaatgtttgtttatgtaaagcaaataaataattatctttaacatgcaaa

SEQ ID NO: 95170 - DNA, 544 bp, Homo Sapiens
aggatgggcaagccacggcttctccttctggaaacggagctcatctccaaagaagaccatcattttctactatggacaatgtggatgctagttctctcccattcacaggtgtggaaatggcctgtagcctgcaggagcctgaggagaagggaggagctagcagccccagtcaagtctagcgaagtgcatcttggcctgcagtgatggctgtttcccccagaaagttcttccacttctggatcccacctcgactgaaccttacacaatctactgctggactttccaatggcatgagttggtaaatcatctcatttttgctaaagcaagtgtaacttgagtttccatcacttgcagctgagagaacacttgttcttgagttttatccacaatgaggtgctggatgttttctgtttgccccatgaactcactctctgccttccctgtcttgctgtctacccttactggttcttttttcctttctgctttggtttccagttggctctggccaatgatagaagacgataaaagagcgagggagaataaa

SEQ ID NO: 95171 - DNA, 299 bp, Homo Sapiens
agtgctaaccagaaaaaaaagagcaaggaagtgaaagggtgggtgagttgttattcatctagagtgattacagcagcctcatgagtaaagacctgaaagaaggagggagccattttggatacctaagcatttcaagttggggacacagtggaaggatatcctggtgtatctgaagagactatgcaggcccttgcacaccactctgagactttgactttcattctgattgaaaagggaagctctcaacaggttttaaacgtaaaaaaggaacaacctaatttttcaactttatttttaat

SEQ ID NO: 95172 - DNA, 924 bp, Homo Sapiens
tccaagcacctctgcaaatccacttctcacaaacatgataattatgatgttatctgtggtcatttgactgaaatctaagccaatggaatgggaatagagatatctgtgccacctacaccttcacacctggtcaatgaaaactgcctgcatgttctcccacctttcaactgatggcaacactagaactgtcttagcagcctacagtgtaaatcttggccaaaagaaagaaccagaacttgaagatgtaatcaaagactttcattcaggagtatcaaggaattgtgacccgtctctatagcctccagaccttgacaaagaagacagaattgcttcttagttcctcagagcagaactgtgcatgaaatgagacccatcaataattttctggagcccatctcacagctgtgtgttccaacagcaggcttatacccctggcgttttcaacaacatggcctaaggcacagccttataggctttctagaagaaaaacttctttgggagccctttcctgctcacttaccagccctgtgattcatgaagataaagattatatgagataatatatgcaaaatactgtgaaaactactagggcaagtataaggaattatcatctaatttagctggctacagatacccaatggttcatccagaagtttgttccagctaacagcagttgtgcctctttcatgagacttatcatcctttggtggactagactagacttatttggaacatggagacctaagagtttcaagactgaaagcaaatgattaggacatttccctaaggtctaaccccagaagtcatatagctttgctgtgctgtattctttgggtcaaagaaaatcacaaggtcaggccaggttcaagggaaagggaaaatatgctccaccttgtgatggcagatttggaaataatcacatac

SEQ ID NO: 95173 - DNA, 1089 bp, Homo Sapiens
ataaatgagaaatcagaatgatgcaatgtgagaaactgatgttcaggagacttcggataatatagacaggatttacaagcaggaggccctaaaattacactcatgtcaaaaatcagagaggagagagaccaaccatatttgggatgagtgtaaaagctttcagaaataagttacaaatctttgtagatgaaaataatggaaggaatgtggagcaataaatgtatcaaatgttgtagtatcatcatgaagattcagagaatttacactaggaacaccttataagttcaataaattaaggaagcattttcccattgaaagtgtgttccatggaaagtcacattccagatttgaagctgtgtttttgtaaaataaaatcttggtatgaacagttgacctcatggtggagtataaagttgtttttttaaaaatatgtaaataatgttcaggaaaaacgcagggaacagagtcttaaagttaatggatatttaatgtgactttcctgagttaacactgaatagtatttctaaaattttttgtactttattttttaatgtaacttgttctatctatctatatatatatttgatagtttgtggaataatatcccccagtattttccatattaaatgctaattatcttttgatttctttttcataagcagatctggcatttattacagggctgccgcttaagagaactcattataatgaacgtttattatattttgcagttccatgcctgttgtccattgattgacatgagcacccctgttttctctggagaaatacctcccctctctggggtgcttcctgtggtagtgtctttcaggtatccgttccactagctacaggtgagcattttacccattgttggataatggtaatctctttttcagaattttgagtctgtaattcatttgtacatgaaccagaaaatgtgggaactcattcattcttgtcccagaattctgttgagaacatccattcattctggctaattgattacaagaataactgtggatacgatccctttagaacctgcttctctgatctgtgtgtttcctcacttctcaataaaaatgtcttttg

SEQ ID NO: 95174 - DNA, 961 bp, Homo Sapiens
cggtccggaattcccgggatatcgtcgacccacgcgtccgcccacgcgtccggagaaagccaagaaggccaatgttgtggcccttgtggcagttgccgaacattcaggagaatttgaaagattatgcaactttcagaaaggtataatgggtttgtcctgccatgcttgggtgttcatccagttcaaggacttccaccagaagaccaaagaagtgtcacactaaaggatttggatgtagctttgcccattattgagaattataaggatcggttgttggcaattggagaggttggactagatttctcccccagatttgctggcactggtgaacagaaggaagagcaaagacaagtcctaatcagacagatccagttagccaaaagactaaatttgcctgtaaatgtgcactcacgctctgctggaagacctaccatcaaccttttacaagagcaaggtgctgagaaggtactgctgcagccatttgatggtcggccatctgtagccatggaaggagtaagagctgggtacttcttctcaattcccccttctatcataagaagtggacagcagaaacttgtgaaacaattgcctttaacttctatatgcttagaaacagattcacctgcactaggaccagaaaaacaggtacggaatgagccctggaacatttctatttcagcagaatatattgcccaggtgaaagggatctcagtggaagaagttatagaagtgacgacacagaatgcattaaaactgtttcctaagctccgacacttgctccagaaatagcttcaaaaccatccattacaaaatcgaatcaactgcagggggcagcatttgaaaaatagaaatgtttctgaggaagaatctgaactgaagaagctgttttatagggttatagaagattgtaattgtagagaaatatttctcttagaaataaaactgggcttggatcctgaaa

SEQ ID NO: 95175 - DNA, 1215 bp, Homo Sapiens
ccttggccagctcctctgcgtgtccccactcatggccgggcacctgcacccagggaccagggcacgcccccagagcacctggctctgagccacggcactgcccgcagcaggctcggagtcccgccagcccggccgggcccagcagacccctgacgttccccggacattcgtcgtcagtcacctccacgtggatgacggatgggctagatctcgttctgcaccagctcccgcacaccccgagcacccagctccagcaggcagtgcttcttcccaacagactcctggatggcccggatcctgctgcctagcccaggggtggcaggctgagccttgggggctccaggcgctgaggatgggcacagttcctccccagagaggctttccgctgggcacacttggaagtccagccgggagctgggcaggtctagcaggttacggatgacccggggcgccaggcactcagccaacagcacccacgggccgcagggcagacaccagttagccggccgcaccaaactgtagggtctgaggctccgctccggctctgcacagggctccagcagcagctgatccggggagtcccctgcaggcgcccccacgggcttgggcctcaccagccgcagctggtccagggctctcttcttcagattactgcgggggcctcggtgccggctggagggcaggcatttctcctgaacttctaggagctgctgggctctctgataattgggcacggtgccccggtccaggtcccgcagagtgagggggtcaacccgggtgcagaaccattcctgcctccgcttgtatgccgagtccaccagtcgaaggatctcttgggctttcacgcaaagggcatggggatctgccctctcaggcaaggtgaggttggcacgaatgtagaagggctcggcacctggtccctttgcccaggcttctagggcctcgtggaaggactggcaggccttcgagtccatcagggaggggagtgtggacccctgattccagagcaaggttctctgctgggcctcggcttccaggcacgccccctccagaccagcagcttccaccctttgctctcttggttccatcctggcggacccaggcccagacagcaccctgcgcaccacagccccagaccatctgtccccataaaacgacagtccatctggtcccttgtcctgcggctctgcctcgtgccgaattcgccacccaggc

SEQ ID NO: 95176 - DNA, 405 bp, Homo Sapiens
gtaagcacatttccccaaaggtctcaacacaggggccagagctctcaacacactgctcttccccagctgcttctccccaaagcttcgggtccccaggatcagccagaggcagggcgaagagcaagtgacatcctgacccctcgccactgtaagcactgtccttgggcccacatggagaagtatctctccttccctaccctcaaggcttcccttaccaggggtttgcaaaaggtgttagccaaatgcctggataaccatcgacccctacccaccaaatctagtcagtagagaaaaggctggtaatactagcacttggtatgccaagacctgaagccaaaccagggggaaggtggggatgtggagacaagaaatggaaattctaataaactagctgaattagataaa

SEQ ID NO: 95177 - DNA, 760 bp, Homo Sapiens
  misc_feature (722)..(722): n is a, c, g, or t
taaagaaaatcattctgctgaaaaatcctagaaatgtgaagaatgtgaaaaagcctttaaatgattgtcacacttgattgtaggtaagataattcatactggagaaaactaccagtgtgaacaacgtggccaagcttcgacaatgctcacaccctattgcacaggaaagcatttatacttgagaagaaatgtacaaatattggcaaagtaaaaaatccattaacacctgctcacatcttactcaaaattgtagagttcatagtaaataaaagcattaaaattctaattactctcagaagatctgtcagaaagtatgtctttaaagtatagaagagcatttattttgaaaaaaacattacacatatgaagaggattgtaatatctttacttgtaccacagatcttattgtacacattttatactagagaaaaaccctcaggcagttgttaaaattttgttgaacatcagggagtttaagaaaaccctgcaagtataatgaatttggaaaaacattttttcaaaaactacaaattataaaacaccaaagtgttcatactaaaatatatttttgcagatacattaaatatgaaagatattcaatccaaaattaagtctatgtaaatatcagggaataattcacagtagaaatatctagggcattcaagctttagacatttacactaaatcagagtgctgagtatagaaaataatacaaacagatntgtctaaacatttgtatataactttaaaaatagcaatc

SEQ ID NO: 95178 - DNA, 621 bp, Homo Sapiens
attcagccttcagatggaagggacagccttgaagatgcataagttttgatacttaaacttttggaggattaaatttgcgaaaacagaagctgaggaccaaagcagctacaggactgacctgcccaaaaccacacagtgagtctgcagcccggcttcggaccagagtttcttctgacaagcggcaagctcactgatggccacacccgctcatcctggataacagtattccccagtggaattaacacgatgcatcttcctggagtatcatttttactttaagatttaaaagcaagcaagcaaattaaatagtcatttaaatcatatttatattaagcctaacatggccatattgtagagcaaaccatcgggatttaataaacaaaacaggaaacttcaaagaatgctttttcttggaaagaaggcaggagagcaagaaaagcgactgcctcagcctttatcactctccagaccagtgccaaggagccaaagagaagaaatgagaataaccaaggtatgctgtgtccaattaattaactattagcaaacaaaggaccaaacaatgtgactgtaagcttcatgacagcagggagtttgtatatcttttcacctgtgtatcggcag

SEQ ID NO: 95179 - DNA, 705 bp, Homo Sapiens
gaggccttgagctctttgtttttatattaatgaggagaaaagtatgaaaacaagaagtcttaagtaaatattgaggtcattgtttttggcttaagtttattatagaaaatcaacactaatgtttttagattttaattgtcctattgatgaggctagcaccttaatcactgtttagttttgtattcatttttaaaagcaattattgaagccattttcaatagattggccattttaatgttcagcaacctgaatggttatttttgttaattaaaattaaatttttaagagatattttcaaaaccctatttattttcttgttcacagtaatgcatgtcaataataaatgtttccccttactgataagcggccactttaggagtgtagcaaatatagattgagctatgttagtttgcaataatatatgttaactttagtaattaaagactggtttctatagtatgaatgtcttaattttgagttatatgatgtttatttgaatgactgttgaacattcaaatttgtattatttggagatgaagatttgactaacagtgagccttattaagaacactactacagttctgaaggggaaatataacatctatggttatatattttaaaaacttagattataggctgtaattataaaatatattggcttttgttttcaatgtgaaagatacattaaatggacacatatcttgc

SEQ ID NO: 95180 - DNA, 641 bp, Homo Sapiens
  misc_feature (102)..(102): n is a, c, g, or t
gaatgctcacctagtcatttcaagtgccgctcaggacagtgtgttctggcttccagaagatgtgatggccaggccgactgtgacgatgacagtgatgagganaactgtggttgtaaagagagagatctttgggaatgtccatccaataaacaatgtttgaagcacacagtgatctgcgatgggttcccagactgccctgattacagggacgagaaaaactgctcatttgcccaagatgatgagctggaatgtgcaaaccatgcgtgtgtgtcacgtgacctgtggtgtgatggtgaagccgactgctcagacagttcagatgaatgggactgtggtgagctacttgtttctgccatctgttgtactctctcatgcctgtcagccactgaagctgaatggatcctaaattacttccttggattttactgaccaagttcatctattttgttttactgttataaaagctgatagtgctgatctatgtgtgttatttccaactcacagaaaatttccccacgaagctacttctctatttgaaatatctatattgtatggaaaaacgtttgggttcaaaatgttgtaatcatataattgctgggagaggatttaaaaactcttcattaaaacccaacttcaataaa

SEQ ID NO: 95181 - DNA, 539 bp, Homo Sapiens
tacaggcagacacataataccagacttatggttttcccacagacagtatcctcagggtatgggaaagagtaggggaagactcagtagtaatagacacctgaattagatgtattggtaagatagtggccatgtaacaatctcctctaattcaaaagaagcccaatcatagaccttattttcttctgatagccccatatcaccatgcctctgccttatcatcatccctgtcacatctctccataattccttccccaacacaccaccccaggcccagcaccttagcacctgaggctgctacctgagaagtacgcactgttctggcttcatggagaccatgctccatttctgctgttgaagtctttgagagaccaggatcatgggctgagtgcaacctcctccccatgccatctgcagagcctgaagaggaaaacacaaatacaagttgaggccatctcttcccctagggcctaacctctaagcctagcagcacaaactcaggagctgttgtttcatttaataataaatatgcatccttgaaa

SEQ ID NO: 95182 - DNA, 492 bp, Homo Sapiens
tttctcataaaacaattcattaggcacttaaacttggagctgttctgatggcttcgtaaacacagatgagcctctgatgtctgataaaagactgtgcaagacggcagccagctgagacgctcattatctcggaaaagccaaaactgcttattcaagacaaagcagttttggtctcgggtagggaggcagtgcctgggaagcctccggcagtggcttgttgatcatagcattggatgtgatgcggaagagggtggcccgctcattcaccaccttcagcttctccccactctcagatgggatcttgaggccgtccagctctgtcagggagcgctggagtgcggcgccgtgcttggcgatgaggtcattgcacgtgctgaggtcatctaacttcagggaaagattcttcagggtgtgatgcagctcgctcttgtcggctggggtggtagcctcgtcgtcgtccccagagtcatctctccccttggatgctccact

SEQ ID NO: 95183 - DNA, 536 bp, Homo Sapiens
gagacctgctgtcatagagtttacaggccaggagaatgcagacatttatagattttttaaaaccctacctataataaattgtatagcattactcaaaggggaaattgtaaggcatcaacctaaggtgagtatataccaggagaacccaataaaacttagtggattgttaaagcctctttgaaacctggaagcggggtaagagttagtagggagatgtcatcagtaaattttattaggaaaaagggcagaatttcaaatcccacaaggtctgaaggaactgggcacttttgaagaacagaaaaaaggccagtgaagaacaggaaagagagaagggcctagttctgtagaggaaaatggaaactagatcaggtagggcctttgtaagctgcataaaggattttggattttatcctaaactcagtgagaaagcatttttgaagggttttggtggggtaggatcagtgtacatgacctatcagatttgcctactttttaaaggcttttatgagccatataaaaccattgtagcttttaaa

SEQ ID NO: 95184 - DNA, 642 bp, Homo Sapiens
  misc_feature (157)..(157): n is a, c, g, or t
  misc_feature (478)..(512): n is a, c, g, or t
agtggccagccaatgcccaatgacccaacagaattgaatgagaaagtaatacaagtgacagaagatgttgctcagcagagcaactaagggctgggagaagaaaccctgatgctgcgatgtgtttgtggcagtctccaaatgaaaagatgtgttcaantttcaacaagttcagaggagttttagatgatgcaatatggttcctaagaaacatgtaaactgctactgttttcagaggctagcttttggatatcatttaatattctaggcctttccctatggctagaaagtctgatcattgttggcagaaaagagagtccaaacttaattctttattattaatagtctaccctggaaaaaaaatgaacgaaagagtgactatgcttatttttattttcattcacaggaaattttactcaattctttagctcagagttagaacaccaaaaaacaatgcaccgtaacctacgcacccccccgnnnnnnnnnnnnnnnnnnnnnnnnnnnnnnnnnnntagtcttaacaattcaaagtgaaggaatcatgcttcctgatggggaaaaaactgtttgcctacttgaacttaaatcttccttcttcattattcattcattcaataaataaaccatgattgaatacccaaa

SEQ ID NO: 95185 - DNA, 372 bp, Homo Sapiens
tggctaagtgtaggggacggagatgcagtaatctaaggagagctgggcacctctttgcctctcaaccactacaggtcaggaaacagaatgagggacagggtgaaatctcacctcctcttccacctaagactggcacctctgctatcttggcctccttcaggaaggctttctggagactgaagcggacggggcaggtttgggaccttaccctcgattcttgcagcctggcaagaaccctgccttcatggcaggtccagtccatttgcagctttgccctccccatctcagtggctttcttttccgccagggtccctctcatatctgcagggcctcagaaaattaagaaataaaagccctttctcatcagaaaaa

SEQ ID NO: 95186 - DNA, 552 bp, Homo Sapiens
atgctatatcttccacatagcagtgtgaaattagagaattgtatgcaaaaaggatactgcagtgttatcagttataaatagggctggaaaaatctaagcatacattgttataaataaattgttaattcaatattaatgaaaaacttagtatattcaactgcaactatcaccacaaagtatagattgaaaaatatataaaatgtagtttgaaaaaggcctattgcccttctccttgggaagaactgcattgagtattcttggatttgggttgtgtttccagaggtgatttctttctgatacttacctattcttaccagacctgccttcagaacaagagggttgcttaaggggctggagtttcaatatgtgaccacccaggaggaaatataaattgacaggcacttctgtatggaagtctgtcttaggaattgtcaatattgtactcaacaacactataaactacaaggttctgcaaagctaatcataacaaagccttatgatatataggccttgattgagactaggtgaattttaccagaaagtaaaaaaaaa

SEQ ID NO: 95187 - DNA, 1006 bp, Homo Sapiens
  misc_feature (341)..(362): n is a, c, g, or t
atccggagcgccaccggcaaagaggtgttgcagaacctcggccccaaggacaaggtttattactgaggaacttggctgttggtctccactgggaaagaaacacaaggatatggaattctacttggaaaactcaggtcttcctgtttgctggataaatacagagacaaaatcacaatgagccctctcacattgatgtgaaaaaagatctttggatagaaacctactcatttattctcaggactttaagtgccctgcttcatgttttggcatgttgcaactgactttattttatttattttattacaagcaagagaaacaaagtctggttcccgtatgatttnnnnnnnnnnnnnnnnnnnnnngacttgggttgggttaggagtttctctgaaccatgaaaatgacctcaatattggctgaaaaatttgacaagaatgaaaaatggcatggtacaagctccaggaagatgttgcagagatgagcttcagatgcatttcattttgcgttgttattaatggcttggaaagaggccataaacctattatggtaattatgtctgcagatgagggtaaataggatggtgttataaacaccagtaagcaagagacgtagtacagagcaacctagggagattagaaatatggacaggaaatgaacaaacgagatcagcctggaaaagtgaaaacatgcatctggagaaatacataatttgaaaaacagagagatacttaaaggcaggggtcatacttgggaaagcagtaatggtaaataggcctttgagcagatatcagccctggataaatttgtaacatgatggaaaaataatactcagacctggtgttcatatagcctttcaaaatgcattttttcccaaacagaggcatttccattatctcatttgatcatcaacccaaagaggttggaagcaaagaattctccactgaagaaatgaaaagaggttaagtgaattgcttagggtcaatttgttaataaaatagacatggct

SEQ ID NO: 95188 - DNA, 427 bp, Homo Sapiens
agatttcatggacatttatcacttcttcccgaattaacactcttataatttcttatgcttgtctttactttaatctcttaatcctgttatcttcgtaagctgagaatgtacatcacctcaggaccactattgtacaaatggattgtaaaacatatgtgtttgaaatcagtgaaccctgtctcctgttaagatgtttatcaagacaatgcatgcacagcgggacacagactctcatcagtaattctaattttgcccttgccttgtgatcttttattgccctttgaagcatgtgatccttgtgacctactccctgttcgtacatcccctccccttttaaaatccctaataaaaacttgctggttttgtggcttggggttgccatcacagtcctaccaatatgcgatgacacccccggaggcccagctgt

SEQ ID NO: 95189 - DNA, 691 bp, Homo Sapiens
cttatttaggtatatatgtatgtggtgaatgttttgcttaagcttgaatcaaaatcattactgccaatgtcatttttttggttaaaaatgtgtgttcagagaagatgatctaaataaatggagataattcttattttcttggataaatcaacctaatatcatattagtgaaattccaattcaagtttcatttggatattttgaggaatatggtaaacatattcaaaaatgtttatgaaagaataaaggtcctaaatagctaagtcatccttcaataaagaggagtaaatgtgggaggtgtgggtggggttggcccttcctacctgatattagtacatcttacaaaaccatggaaataaaatcagtattgtattggcacaagaatagaaagtgagtcaacctaataaagagctcaggaacagacccatgaatatttggggacttaatatacagtaaagtagcacaaatcaaagaggatggacagactgtgtagtagacggtgttgggaaaactgtctcactttatggagaaaaatacttgatctctacttaataccgtatagagaagtgagtgtcacaggactaaagacctaaatgtaaaaatgtaaagctataaaattgaatataacaaaatacaaaatattgctgtgacctagaggcaggaggagacatcagaagctcaaaccaaaaggc

SEQ ID NO: 95190 - DNA, 750 bp, Homo Sapiens
  misc_feature (111)..(119): n is a, c, g, or t
catttctgcagtgtgtttagagattgtcttttagttacaagtataaaagcagtagaacctcttggctggaatcatagctaattaacctagttgaaggaaggtaataattgnnnnnnnnncacgacaacctctatgctcagatctttgctgagtgcagtgaagggaaggaaggtaatacaagctccaccgggtctagggctttctcagtatccctgcactgaagccattttatctctgttttaaaccttgtaatagttctgattaaaaatatttaaatgctttaatatgtttagttttggtagggatatactttcttttggtaatccatttggaggatttctacttctttgcaaggcaaattgtaagtctgctgaggagatgataaggaaaacaacgaattgaaattaaaaaaagttttaatataaaaagagttggaggaagttgttgggagaagcaaagtgtctctcctccttcttgacaaatatggaagattatttccttctggttgggaaaacatatctcagataatctcacatagctccattccattataaaatttagttttttattaaaatttctcaagaagacaaatattttaagtgtgggaatttgaaactatctaaacaatactttctctgagaaaaaaattctgtaaatgggagaaagcaagaaggccctcttctttgttcagtactacatattgcgtgattaattttacactaaaaataaaatgatgatacaataagtaaa

SEQ ID NO: 95191 - DNA, 474 bp, Homo Sapiens
ggttgtttctgccaagaaaagatttcctaccatggtggctggaagcagtaattagactcctccctcaggatgctgccctcttactcagctgccctctcttaatcagcagcgaagtcaagtcccaaattaactgacaggaggagccagtggtctcttctggggtttgtcacaatgaaccaaccttagatccccattgtaaggatctcactcattagaaaatgtttgaactggtttctaacagctgataatgatttatagagtatgttctgatgactttaaaatatggctggatctaatgttgtatttttcaatacagatgaagtttaagcagttggtcattttaaaaagaccagatttgaggagttggatgtgcaaattaattgaattatacaatgtgtgcaatattattttgaatggaaagttggatgttataaaactgaaaataaagaaaaaatacaatctttttgtagcgga

SEQ ID NO: 95192 - DNA, 1056 bp, Homo Sapiens
gggaagttgccttccccacctggcccccaagagctcctcgacagtcccccagccctgtatgctgagcccttagactccctgcgcattgctccatgcccttcccaggactccctatactcagaccccttggacagcacgtctgctcaggcaggagagggagtacaacggaagaaacctctctattgggacttgtatgagcatgcgcagcagcagttgctgaaggccaagctgacagaccccaaagaggatcccatctatgatgaacctgagggcctggccccagtccctccccagggcctttatgatctgcctcgggagcccaaggatgcatggtggtgccaagctcgggtgaaggaggagggctatgagctcccctacaaccctgccactgatgactacgctgtgccaccccctcggagcacaaagcccctccttgctcccaagccccagggcccagccttccctgaacctggtactgcaactggcagtggcatcaaaagccacaactcagccctgtacagccaggtccagaagagcggggcctcagggagctgggactgtgggctctctagagtagggactgacaagactggggtcaagtcagagggctctacctgagaaggacggcaaggctgaggtggctaagggggaccatggggaggtggcactagggatcaaagaagatggttagaaccagcagaagccagagggtgggaggggccatgctgtgtgagaccaggggaccagagggatgggagagtcaagggaaggacaatcccaggaagtcctaagaagtggggcagatggcagggctgaggatgggctctgcatcccccaaagccatcccttccctacttccccaaatgaagggacggctgtgggaccaggtctgtggaaagtggtgcatggtcagaatgggtgcagtttgaggggcctgtgtggaggcctcagggagatgttggactgtgcctggatccttactcctgcattgttctttgccagagacctatttaaaaattttaaaattctcattaaagtcagcttgggtttaagaaa

SEQ ID NO: 95193 - DNA, 381 bp, Homo Sapiens
agccttggctgcgctagtagctgcctttcatgtatttaggattgagtgtccaagaagactgtcccaaactttcaacttcctagaaacgctgattttcgatatgcacagtccttattttccttctttgaaagaaaaggaaaacgaagtaggatttcagcacccactcacttaatagcatgccaaatattgtactggaatttacctctgggaaaactgaagcttcataagaaattgttttgatttagggttgtggtagaggtaggtatgagaaaatcatcttgtatttatagatgctaatgaatttcaatgctttctatctttacacttagatattaagttctttgtgaaattctgtaataaaattctacttcattaaaaaaa

SEQ ID NO: 95194 - DNA, 367 bp, Homo Sapiens
  misc_feature (318)..(318): n is a, c, g, or t
tgtgcagcatgggggtcctgttctcattcagccacccgcacggccaccccagtgtgattcctcagcagccacacagaacacagatggtccataggagactcagaaacagagaagcctcacgccaggtccacagaggcacccacgcccgccaaaaggatcccacgcactcaccctcgcctctggggagcacagtgggagtccaggacaccgccttggatggggtgaggctccgtctgtgacctcacaaagtcagtctggggctggacttgacatgggaaacagaacaaaactgcctgtccacctgagcttgccgccctnaaaatccctgacatgatacagaagtcagtgctgacagagggcctgctac

SEQ ID NO: 95195 - DNA, 602 bp, Homo Sapiens
tgtggctattgaaaatggactggagaagatgagtgggagtgagaagaggataacagaatcagataaaaacctgtcatgttactaagagcaggagatgaggcagcctggaccaagatggtggcagagagaagaaaattgcttgagagaattgattaaactacttggttagcacagatagagctgaatcaaaaattaggatggtaagctaagtaattttacaccaaaaaggcagagttgcattcataattagtctctccttcagactgaatattacagacaaaatatagccattggtgttgcaatcacttcctttgggttgtatccaaggttaagaatgtcagcatccaaagacccaaattcttaatgtttttagttgataaagtttattcaaggtagacagcctgtgttgaataacttagtcttccacaaatttcaagaaaaatccattgtccctcttctccgccacagacacactttagttgaacattaagcatatttattaaagaaacattctccttgtgctttttctcccaagatggatggtgttcttacttagagttataagtgtcagaataaaaatgcccatgaggttgaattgtaaa

SEQ ID NO: 95196 - DNA, 561 bp, Homo Sapiens
  misc_feature (26)..(26): n is a, c, g, or t
  misc_feature (48)..(48): n is a, c, g, or t
  misc_feature (83)..(83): n is a, c, g, or t
  misc_feature (97)..(97): n is a, c, g, or t
gcgcaacgggaaagcactaattctgncgagcagtcttctgcggttctngggtagacgacaagcaaatgatctgtattatggancgctaagataccanactggtagactgtcgtcttatagacatattcctatgtcatatattctctccctgttgttagagaacctatctttgtttttggtcaaaacacacatagaaaacaaaatgatccaatgaaaactggtttaactagcaaaagccttggcacctgttggagactatgaccaagccaataaaaagggcatttaaatcagccctgttagtaggaatgtggctatagctggtgcctcttctagtcacaagtttgtttttggagggggtccagaagatcattcccttgcatagatttctcttttaccaatttgagtgcctcctacatgggcagcagtggactaagtgctgggtgtgataaagaggaatgacttaattatgagactgtatataatcaaatacagtgtgggttaggacctgtggcagaccattataataaagcatggccccgtgagggttttgaaagagaaaaa

SEQ ID NO: 95197 - DNA, 457 bp, Homo Sapiens
  misc_feature (388)..(388): n is a, c, g, or t
ctcctccacttcccagggcacttggccaacaaagaaggaaaggccccagcagaactcaccatctgccgcctgaggctccaccacctcgaagacatccttgcaagatccacagactggcccagaccaggaggtttctgtcttcttcttgtgtcttcttcactctcctggactggttcgtgaaccctttctcctatctctgtttcctctggatgttaaatgctactttctttgttgtggaacgttaacctgtaacatgtatatactgattaagtacactattacgttgtcgtgtgcaatattggctgacatgtgcagtggcttgagcccgtgtgaccgcagctctcactactgagggaaaggagcactaagcagcatgcctccttggganacgccgtgtggctcgtggctttagggattgaaatagcctcaataaaattctgacattgtgaaagacaaa

SEQ ID NO: 95198 - DNA, 890 bp, Homo Sapiens
ggggaaggcgttcagactcttagctgaacgcggagctgcggcggctatgctgtggagcggctgccggcgtttcggggcgcgcctcggctgcctgcccggcggtctccgggtcctcgtccagaccggccaccggagcttgacctcctgcatcgacccttccatgggacttaatgaagagcagaaagaatttcaaaaagtggcctttgactttgctgcccgagagatggctccaaatatggcagagtgggaccagaaggagctgttcccagtggatgtgatgcggaaggcagcccagctaggcttcggaggggtctacatacaaacagatgtgggcgggtctgggctgtcacgtcttgatacctctgtcatttttgaagccttggctacaggctgcaccagcaccacagcctatataagcatccacaacatgtgtgcctggatgattgatagcttcggaaatgaggaacagaggcacaaattttgcccaccgctctgtaccatggagaagtttgcttcctactgcctcactgaaccaggaagtgggagtgatgctgcctctcttctgacctccgctaagaaacagggagatcattacatcctcaatggctccaaggccttcatcagtggtgctggtgagtcagacatctatgtggtcatgtgccgaacaggaggaccacgccccaagggcatctcatgcatagttgttgagaaggggacccctggcctcagctttggcaagaaggagaaaaagctgcttacgttggtgcactttgttgctccaggaagagacgcttagagaagacctggtgttggccacaagtctcagtaatggaaggcgtgtggtcccttttgcttctttgattaaaaataaagtaaaactcattggaaaa

SEQ ID NO: 95199 - DNA, 240 bp, Homo Sapiens
gtatttttaataaggattttatgtaacattttggcaacaagaggaccgtattttctagtgaattttataataacattttgctaaaaatgtttcttcctaggtcagtttttgttaaggtgaaccaaaagtcttattttaccaggggtttaaaaaaagtttgaagcttgaaagcaaagttatatttaaacatcatatgtaacaaataaataaagatgttttatagacttgtcctaaaaaggt

SEQ ID NO: 95200 - DNA, 928 bp, Homo Sapiens
cacagctcggtgctcagcactcttccagacatcgccctatttatctcttcatcaggcttttcacttcttatcctttataataaaccagtgattccaattaactcagaaagtgtcaacttctgtatctacatcaatgacacccaaatatgcatctctagcctgacatagctcaagcggctccagtgcaggagacagagggagcctggaatccaaagaagagagctccaaccagcatagagttgtcaacagtgcaagctgctgaaaagaggacaaggaaggtattatccctccacgccaaccagcatgcacttctcaaccagccttactgcctataaactaccgctgttttgactgtcagctaaatgatgaaagcctgagagagggcattttattagtggcatagtcagatgcagctgtgctctaagaccatcctctgaaaatgcctgggagaaactatttccttctcatagacaattactaaaaatggtcattcgttggccaggtccactaaacagtgcatacgttgatcagagttattttgtttgaaattagtgtgctgcacagaaagctttgtcttgcatgaacctgtgttttgataaaacagagaccttgggcattagcagataggaggatgggtgacagtttaccactaactttaaacaggttcaaaggtaaataccatattttggtaattttcatattcattaaagatctaaatattgagaagtttgcttgaggattaagtatcttccaaccaggggcaccaaggtgaggacactttaaactagatatacttgggctacagcactgaaaagtagggcctatgagggtgggggattttgtgtcttgtttgttgctgtattcccagagcctggaacactgctgagtatataacaggcactaaataaatacttctaagtgaatgaaa

SEQ ID NO: 95201 - DNA, 368 bp, Homo Sapiens
  misc_feature (54)..(70): n is a, c, g, or t
  misc_feature (184)..(259): n is a, c, g, or t
acagtctgtgatttcatagtacccacctctgaaataagactctgtctacaattnnnnnnnnnnnnnnnnnggtactttaggtcttcactatccactatgtctactgagcacttgaaatgtgtgattagtccaaattaacatgtgctgtaagtgtgaaatattcctcagattttaaaaacttggnnnnnnnnnnnnnnnnnnnnnnnnnnnnnnnnnnnnnnnnnnnnnnnnnnnnnnnnnnnnnnnnnnnnnnnnnnnncacacatgtaatatctccatttttacattgattaaatgttgaaaatattgggttattttttaatagtgtatattgggttaaataaaatatattattaaacttcaaaaaa

SEQ ID NO: 95202 - DNA, 420 bp, Homo Sapiens
gacgttcttagaacagtgcctgacttaattctacttcataaggttgatgtaattttgagacttaaataagttgatactaaaataccaagcagtgtctgggacactaagtgctatgatgaccacttcagggaagctcagcaggagagctggcatgtggtccctagtacaggccacaccaggggaactgcagaatcctgggctgggaattagacttcaggcccagcctgctgcatctctacctccatgtgggaccctccaacagcacagtgataaataatttggcaccccttcagggtggctcctggcagagcaggggatggggtaatacccggaatggggtagcaaacccataacctttggcaccttggatgacgtaaattaccttctcccttggtacaaagcctgtgctactcagcttca

SEQ ID NO: 95203 - DNA, 559 bp, Homo Sapiens
ataactggatgttacttatttttgaactgaatacatcttttcctaaaatgtacaaaaatagtaggagggaatatttattgggaacaaagctatctttcaagaacatgaataaaatctttttctggacatagtaaaatttttctccataaataattgtacttaattgtggatgactgacaaatttttattgtatattcctacagatcagtcataattaaattacctgcattatagggtttataaaatttttatattttacaatgttcagttctaactagtggaaagttactctagctttttaaaaggctgtttacaattctgtgtaaaaatagagcagtatctactcaagtttgtgtaaatgttagggataatttgaaaaatatatatatttaatacattaatttctctggaagcaggaggcatgtttaaataactattaaaataatttatttttctagccataaaggatggaagtcaagaactttttgttgtttagtcatgttaagtatagtttatgaaattaacttgtaaataaaagtgtaaaatattttcattaaaa

SEQ ID NO: 95204 - DNA, 897 bp, Homo Sapiens
gtgtaagccaccacacctggccaatttgaggcttttcaaagaacaatcctaaaaaggtctaaaaggacatgaacataaaacaaccattcagcaaaactgatctaagcttgaatgaactatgtatagaataattgttaacattttaaatggattatcttatgacattagtatagtattagaaacttaaattcttgcctaaattttacagccaagtgtaagaagaagtaaataaaacaattatagtgaacgaatcatatgtgaaatagaaggttctgagttttccatataaggtgatggcaaaatcctagaattactattcttttggttttgtttgtcttgctttgttttgttaggggagagagcgtcaggggaacttaaattatttcgaacttcattcgggataactgcaaagactatggtatactgagaacttctactgccagatattatgtaaaaaattacaattattaaaacaccatatttcaccaaatctaagacactgttgattgtgacacttcactgttatgtaccataaaaagatgcccagaaagggagtctcaaaggagaacccctcacaaaaagtgggggactaaacatctatagtctcaatgagggataaaagcaagcaactacatgcagaagggatggcaaagaggtctgcgcacctcttccttgacaatggaaagagggaacaaaaactccaatatctgaactgacaaccccatccctgcaaattttgggggctgaaatcacactaccagcatcatcctaaaaaatcccaagcagagaaattagcttaagcagaggcaagttggtaaagcccctcccccagtgaccagcagaagagaatgcacagcttctcagaaagaactcaacttccgttaaggcaacagctga

SEQ ID NO: 95205 - DNA, 853 bp, Homo Sapiens
  misc_feature (24)..(24): n is a, c, g, or t
tggataccccggggtggggaagancggtaccacttgtggggcagccacagcaggcactggccccgggggcagaggaaaggtgcagccgtcggggggccaggcaccacttgggccaggggccccaggacctcctctccaagggctggtcccggagcagccacctgggcccctttggtctcaggggcctccgactgagcctcctccagccgcacctcccctgtctgagggtccaggaccagagaggtcttggtctcgctggccccctgagggctgggctgcggtggaggggcacccccgcccccagtgagcagcagcgggcccaggctggaggcctcgcccagggccaggccgttgatgatgacggggcccccgttgaggagcactgctggggagccgctggctgccaggaagctcccgttcaccaggatggaggaggaagccgggcaaggcgcgggagggccggtccctgccaggaatatggagccctgggcagcggcctcggcggacactggggccgcccctctctccaggtcctcaggacttcggctggactcgtcctcagtcgtgggattcccatcagactcgctcttgcagggcgcgccgcctccggccccggtccggtcgcgctgtcgccggttcttgaaccagttgctgacctgcgtgagcgacaggccggtgagtgtggccaggcggcgcttctcgtccggcgtggggtagcggttgccgcggtagcaggccttgagcgctgcgcgggagcgctccttgaagcagtagactgtctcctcgccgtcccagatggtcttgggcagcgggaacttcttgcgcagtcgataaaagtccactgcgccaagcg

SEQ ID NO: 95206 - DNA, 315 bp, Homo Sapiens
  misc_feature (60)..(100): n is a, c, g, or t
aagccatcaacaacaacagaggatttggctgaccagcttgcttgtccaacagccttattnnnnnnnnnnnnnnnnnnnnnnnnnnnnnnnnnnnnnnnnntctctactttgttttgttttaggcttttagcagcctgaagccatggtttttcatttctgtctctagtgataagcaggaaagagggatgaagaagagggtttactggccggttagaacccgtgactgtattctctcccttggatacccctatgcctacatcatattccttacctcttttgggaaatatttttcaaaaataaaataaccgaaaaatt

SEQ ID NO: 95207 - DNA, 841 bp, Homo Sapiens
  misc_feature (158)..(158): n is a, c, g, or t
  misc_feature (175)..(175): n is a, c, g, or t
  misc_feature (357)..(371): n is a, c, g, or t
  misc_feature (599)..(616): n is a, c, g, or t
tcgtggcaagtactggctttgttctatagcacactggtgtggccttgaatgctagggcattatacatctgaagcaattttaccgcagatttctttgtagaaatctatgtaaatgcaggtaccactggcccatggctgtacctattgggcaattagaanaaagaaaaaacataaanactagtgtctatgctgctttgaatatgtttgaagtctaaaatgtaatagttatcaaaaaaaatcttgtacagtccagtgtaaagtttttaaatgaccttaagggttgccatcacatctttctcacactctcctcttgataataataataataaaaagtttgctaaggattaaagaaatgggnnnnnnnnnnnnnnntctcttcaaatttacaggaatgaatcattgttcttagctttgttgcatacacaaacttcttggattttgttgtgcagtattgacgtgagataaagctcaacattgaataatctttcagtggtacttttcaaagtcttcccctcctctgcctcataattaagggaaaagacaaaattgaaagacacactgtctttatctatcctggtgtatgttggcaccttagctacnnnnnnnnnnnnnnnnnngcacaaggtgctttcctgatatgttcaacatgccatctttgggtgataatgtatatgccgtgatggggctcaggccccttaggggagtgtctataagaactgcctatttatgctcatttacctcaagactgtcctctctaccctaatctagttgtcatcactccatcttttgtactgctgttgacacttacaaattaaagataaattttgttttatgaaaaaaaa

SEQ ID NO: 95208 - DNA, 509 bp, Homo Sapiens
gagcaagtaccattttatgaataaagcaccattgaagtcattgctattccttgaagccaaaaaagtgtcagtaaaacccagtcagaattaccatcttctgaactccatgcgagaaaactccattactcccagatactgttggatcttccaccagatttactctgtggccctccgagacttcgtgtaacagcaactgcattttaatgcaatggcagctatggaaaacacaaaactatcagtcattgtcaaatactccataaatggagacagagaaggggttcagttctctgtgtaacaaggacagaggagaaaggcatctgcagtgtcaaatctacagagacaagtgcacctggagacaaatgaccagactaccataaaacagaagcttaattatgttcacttacattttcaaattattcccaacaaattactctgtttttccaggcagaagaagcagagtgaagagaggacattccaaataaaatgaatgctgatcctgcattgagtgc

SEQ ID NO: 95209 - DNA, 580 bp, Homo Sapiens
ttcagacggagctctcactctgtctcccaggctgccagagggttgttttcaggggttccatcagattcctggacaatcgcagaacattctggaaagagaaagggtcttctagtgccctctctttattctccctcaaccacttacctccactaatttccttatgtgcttgttgatgaccgtggggtctggctttggcatcacccctaatgcccactccaggggtaccacaggcttgttgggcgtcgtaggggaggtaggctgcgatttagaatttctaggctccagcaccagtgacagtttgtaaatatcatcttcagtgtgatagaggtccagggaaagcgtgaagcaggttgatcaaatccatgttgggttctaagtggtgagaggcattctgcagggagactagttcactcagggtaacggagaactggtgcattttcacaatgttcactttgttctcctctgtccagtctgggaaaatgacatggacagctatcaagtctttcaagtgtaccccaagggatgggaattttgaaccatcgcagtcgcaaagccttgcgtacgaagggggatgacacga

SEQ ID NO: 95210 - DNA, 462 bp, Homo Sapiens
agcgccgtcgatgccgtagagggagctgtcgtcgccctggaagacgatcccgagttcaacgcaggttgtgggtctgtcttgaacacaaatggtgaggttgaaatggatgctagtatcatggatggaaaagacctgtctgcaggagcagtgtccgcagtccagtgtatagcaaatcccattaaacttgctcggcttgtcatggaaaagacacctcattgctttctgactgaccaaggcgcagcgcagtttgcagcagctatgggggttccagagattcctggagaaaaactggtgacagagagaaacaaaaagcgcctggaaaaagagaagcatgaaaaaggtgctcagaaaacagattgtcaaaagtaagtcttacctgtggctcgcattatttgggagttattaaaatatgaaagtttggcaaatacaccacacgagaggacgcgactgtccgtgtcgcgg

SEQ ID NO: 95211 - DNA, 1002 bp, Homo Sapiens
ccgcttccctttctggacttcccccttggggctgttttttcccgctctcaggcctcctcctgcgtccagcctgagtgggcccttcccccgtcccggttgcaaccggtgggccacttacttacctgcttcatttacccacgtagtccgcacctctttaccgtcttccctgtctatgtggaacaggtgagtctaccaggttcaccttcagaagctttcccccatgccctgtggttgagacggctccgatgtcattgtcggcataacctccagctcctagacacggtgagtccccaacgcggccgaccattttattaacgataccgcctgtggaggttgcgtaggctacattccctttgcagtccaaggcaacagcacccacggttcccaagtttttttgacaatctgttttctgagcacctttttcatgcttctctttttccaggcgctttttgtttctctctgtcaccagtttttctccaggaatctctggaacccccatagctgctgcaaactgcgctgcgccttggtcagtcagaaagcaatgaggtgtcttttccatgacaagccgagcaagtttaatgggatttgctatacactggactgcggacactgctcctgcagacaggtcttttccatccatgatactagcatccatttcaacctcaccatttgtgttcaagacagacccacaacctgcgttgaactcgggatcgtcttccagggcgacgacagctccctctacggcatccacggcgctcccgccctcccggaggatgccgtagcccacggtggcggctctgaccatgcctggtgcactcgctccttccgatccttggagatgggaccggctccgccgccgtggaccactacgatgggattcatgtcggcgggtcccagggcaccgcaggacgcggacgccgagacctccagctgggtcgagccagccccgcagccgcccggtacccctctgccgatttaaaccagcctcgtactagctaagtt

SEQ ID NO: 95212 - DNA, 497 bp, Homo Sapiens
agaggcgttagctgctgcttttatttttgtgaaattctagagctgctctgctgcaaggatttcctgccttcagactgaagaagcccccttatcattttagatttatacttgggtactcaaggagaaggaatgcatactgtcatttgcaggctgtcatttgagcataaaatattttcagatattttccagggtgaaatctgtaatgcagatgatataatgcccacttgtgctcttatgaagttaactgttcacagatgccagccttgatcctgatgagctatgcactctaatgtggggccactcaccagtcagccaatcttttattgttcctttgctactttgaaaggaaaaaaaaggttgtctcttgatttctgtaattcttctgctgatctgtgagtaaggcactgccctgctcccaatcaaacttagtctttttatgagaaacctggaccttccatgaatgttgccagcaataaagtgacttgtcctaatctaaa

SEQ ID NO: 95213 - DNA, 654 bp, Homo Sapiens
ctcagcctgcgggcagcagaaggcggcggccagcctcctcctgcccctcggccggacgaaccgcggctgccgcgcctgtcacctctgcacctgcccggctgagtagaaaaatctgaaatttgaaacagaaatggccacataaggacaactcagatgaagtgcaggcgggctgacatcgcgcacttgggtctttccgggaaagacagccgcgctctgggagaagcctagtcctccggcttgtccccggacccgccccaaaggccgctgggagctcggtgaggacgtggcggtccccttgctcatctgactccggaggcaggttccgcagaaagagctctcaatctcggccgctgggctccaagataatctcctggcgaaagctaagaggcggccatcccttcccggggactcagcccctagattcagcttcttccgccgcaaaaaactcccaagccctgcgaactcgcaacttgcctctccaggcttccggcgtgggcgtcccagctacactttcgagcactttgcttggccggcatctacccgctcttcgattaaggaaagcgcagtggcgacagaggcaactcctgcctcctgtaccaggcctacgtagtcgcccaggtggccgggtcacaaataaacaattccaccatcaaa

SEQ ID NO: 95214 - DNA, 493 bp, Homo Sapiens
tgcggccgccgtttcccggtcccgtccagacgctgtctggcgagatcggacggtgagcctaaggcggaacgcgtgaggcgcttttgagtctggggtccggggccgagagcaggcggaaagagaggggacccggcagaccccgagtggccgccgctgcggggcccaagtccttggctgctgagtggtgacagtagcccagcccgccggccagatatggtccagacctgtacatgaataactttggttagtcagagtgaaatattcaataatgagtggtgcagctttgggacttgagattgtttttgtcttttttctggcattatttctacttcatcgatatggagactttaagaaacagcatagacttgtgattattggaacactgcttgcttggtatctctgctttcttattgtcttcatactgcctctggatgttagtacgacaatatacaaccggtgcaagcatgctgctgcaaattcaagccctcctggg

SEQ ID NO: 95215 - DNA, 788 bp, Homo Sapiens
aaaaggttaggaacttgccccaggtcaccagttagtggcacgacatttcttcaaccaaaaatttggaatatttttgttgttgctgttactgtactcatcaccacccatgtaattctaccataataaaaataaaaagtgagttgaatataaggtgccattcagaactcttaactgaaataagcaaacactgacaaaaatatttagaactgacataaaatactaccaataacaaaatgacttctgcctgctaaaatcctccacaccctataggtggatttctcttaaattttgttaatttattaattcaacaaatatttattaggtatctaatttgagcaaggcataatgctaggactatgatggatataaatatatctatgatatactttggaaattatattctagtagtatattcaccaacacactttgactaacatttaagcagatatcataaatccaaaatagggaaagacaggcaaatacactccagaaactaattttgaattgcatatgtagttttctttgttatttttctaaagcaccattattattactattagaaagtcactaacctgttcatctgaaacagaatttccatttaagtctgaggaagggcttgtccggtcacatggaagattatcatcagagacatcagtattatagccactgccggttggagaatcagaagaattattggatgtcagcactccacccctttctgtgtcactagctttacccataattccaaaactgttatataaaacagcaccagactgtcttcctcctat

SEQ ID NO: 95216 - DNA, 812 bp, Homo Sapiens
gcggccgccaagagagatcacacccccagccgaccctgccagcgagcgagcccgaccccaggcgtccatggagcgtcgcctccgcccggtccctgccccgacccccgcctgcggcggctcctgccttgaccaggacttgggactttgcgaaaggatcgcggggcccggagaggtaaccgccgcgcctcccggagaggtgttggagagcacaatggctgaacaagtccttcctcaggctttgtatttgagcaatatgcggaaagctgtgaagatacgggagagaactccagaagacatttttaaacctactaatgggatcattcatcattttaaaaccatgcaccgatacacactggaaatgttcagaacttgccagttttgtcctcagtttcgggagatcatccacaaagccctcatcgacagaaacatccaggccaccctggaaagccagaagaaactcaactgggtgtcgagaagtccggaagcttgtggcgctgaaaacgaacggtaagacttgttctgttgtgtttcttttgcctgggtgatagctcccgcctgctggatccccattcatgaagctttaataggacaagcccaaactcaaatcaatcttgagatttagtattgagacctttatatagaatctctattcggggtatgtgataatagcagacttgttttgtgaatctatttattaaggatattttctgattgtgtatattgcagagcacattgaggcttggagaatgcatttgtaaacaccatctccattaggtgtttctttctattcctgcaaatattcggggccggct

SEQ ID NO: 95217 - DNA, 316 bp, Homo Sapiens
tataagaaatttgccatcaaaagagggaaaataatctatgtttgcagactccagaaagctgtcactcacctaagagtttgcaatttctgtctgggggaaaagaagagaaagttgactgtgaaaataagcattaccatagagccttctctatggcaacatcaaaaatgaaagctgattctcatcttcctaacaatctgcaaagacaagtgaaacacaacctactgagcatcaagttaaagaaggagtgaatttgagtagcacgggaggaaaccatgtcttcgccactagggaaataaatatgaccactgttaaaaaa

SEQ ID NO: 95218 - DNA, 1051 bp, Homo Sapiens
  misc_feature (96)..(104): n is a, c, g, or t
  misc_feature (133)..(163): n is a, c, g, or t
  misc_feature (699)..(699): n is a, c, g, or t
  misc_feature (822)..(822): n is a, c, g, or t
tttcgggatgttggagggttggtggtagcggcttggggaggtgctcgctctgtcggtcttgctctctcgcacgcttcccccggctcccttcgtttnnnnnnnnnggtcgcctgcgtgccggagtgtgtgcgannnnnnnnnnnnnnnnnnnnnnnnnnnnnnnaggcgttccggtccccaagagacccgcggagggaggcggaggctgtgagggactccgggaagccatggacgtcgagaggctccaggaggcgctgaaagattttgagaagagggggaaaaaggaagtttgtcctgtcctggatcagtttctttgtcatgtagccaagactggagaaacaatgattcagtggtcccaatttaaaggctattttattttcaaactggagaaagtgatggatgatttcagaacttcagctcctgagccaagaggtcctcccaaccctaatgtcgaatatattccctttgatgaaatgaaggaaagaatactgaaaattgtcactggatttaatggtatcccttttactattcagcgactatgtgaattgttaacagatccaaggagaaactatacaggaacagacaaatttctcagaggagtagaaaagaatgtgatggttgttagctgtgtttatccttcttcagagaaaaacaattccaatagtttaaatcgaatgaatggtgttatgtttcctgganattcaccaagctatactgagaggtctaatataaatgggcctgggacacccaggccacttaatcgaccaaggtttctttgtcagcccccatgacaacaaatgggttgcctgagagcacagacangcaagagggcaattttgcagcaaaatgaggagaaaaatcacagtgactcttcgacctctgaatcagaagtttcctcagtgagccctttgaaaaataaacatccagatgaagatgctgtggaaactgaggggcatgaggtaaaaagactcaaggtttgacaaagaaagtgaagtcaaaggaaccgcccagtccaaccaactttccagcgaaaatttccttcagttattgg

SEQ ID NO: 95219 - DNA, 513 bp, Homo Sapiens
ttttttttaatatgcgataatatgaagctttatatgtgtactgtgaacttaaatatttcatatcagtttattgtcaattcatagtatgctaaatatattagatttcatattctgaaactagtacttatgaaatgagtgtttatctagtagtaagacctaggatttttacattttccaattaagtgcaaatagtatttataagcagagtgattatggattgagatgtttttaacttgatggaaggagctagttttcctgagcctgtgtgtgcaccaggcactggggctgatgttccagcctcgtggcgtgggagcaggagagctccgtcctgcatttctgtggtccgtggccgctgtttctgtgcgcctgcgcctcggagagcaagtgaaggagcatcatgggttttgttttctcccttaaccctctgaaagacagtttgatactaacaaaaaacgcagcagaggggatccaacgtcagagcttttagaattacttttttaagcagctgtcttc

SEQ ID NO: 95220 - DNA, 451 bp, Homo Sapiens
ccagggtgcagcgcagaggcagggcgaggccggtcggcgctcgggagagggctgatggtgtgcacctctccagcccctcgccagcttttgttaagcaggtttaaccctgcagctaggtgttgatactctactaagtaaaatggaatattccccgtctgccctccagccacgcgaacgcagcgctgttgaatttgtgtgcgcgcctttagccttgcttggtggatgagttggattttagtgcattttcaatcaatgtgcgtgtacacttaagcacaaggagaggtggctttgtgctgtcatcgaggattagatgtgtgatgagacccacccagctctgccctgtgccctaattctgctgctttgcctgttgaaaccttgcctgtctcgtcaccccaaattctctaaacttagcagtacttaacctttattaaaaacagcagaatcactcaaa

SEQ ID NO: 95221 - DNA, 687 bp, Homo Sapiens
agctaggtacgaggctgggtggtgaatcggcacgaggtggtgatctcgtcgccccttctctcccaggcaacatgtcggaaggaaacgccgccggcgagcccagcacgccgggagggccccgacctctcctgactggggcccgggggctcatcgggcggcggccggcgcctcccctcacccccggccgccttccctccatccgttccagggacctcaccctcgggggagtcaagaagaaaaccttcaccccaaatatcatcagtcggaagatcaaggaagagcccaaggaagaagtaactgtcaagaaggagaagcgtgaaagggacagagaccgacaacgagaggggcatggacgagggcgaggccgtccagaagtgatccagtctcactccatctttgagcagggcccagccgaaatgatgaagaaaaaagggaactgggataagacagtggatgtgtcagacatgggaccttctcatatcatcaacatcaaaaaagagaagagagagacagacgaagaaactaaacagatcttgcgtatgctggagaaggacgatttcctcgatgaccccggcctgaggaacgacactcgaaatatgcctgtgcagctgccgctggctcactcaggatggctttttacggaagaaaatgacgaaccagatgttaaaccttggctggctggcccag

SEQ ID NO: 95222 - DNA, 802 bp, Homo Sapiens
  misc_feature (185)..(195): n is a, c, g, or t
ctgtaggagactgaattatgggcttgactggaagactgtgatacattgatgagcttcttcacgactccaagggatgatttgtttgtgctttgatacatggtatttcaaaaccaaattgtacgtgtaatcaccaacaaaagaaactgaagaaattgcatgagattaaaagttacaaagattgttgnnnnnnnnnnngtttctgagtcacaagcaagtcatttttgaaagcactgtgctcagcaagacaggtttataaatgaatgctactcacaggtggaaactagaatgaacaaaaccactaaaagctacataaaaggtttcttatttttctgtactgcatgattaattagagccattgggtgaaaaagagaggaaaattgcttctctttgttgtatttagctgttaggtagtttttattagatatttatataggtataccttttgtcacgtgtataaatgagagccaagttcattatttgaggtctcactgattgggatttatgataagtcacatagagatggttttaagtttacctctgcttagcaaatgaaaaataaaggactgcgaagggcggattgaaaagatgaaccttctaaagcattttggaagctcaatatgcaaacaaccaagacactaattagaaatgcttcctgtttatccttaaagacaagaagcctgagaatttctagaaggcaatactttgttaccctgagcagctgtacatttttctttttctgtatattttaagagaaaagagttttatgtgtacttataaagaaatcatttatatgaatttcaaa

SEQ ID NO: 95223 - DNA, 455 bp, Homo Sapiens
gaacttgtgaattgtattgtaatcagttctctggtaactacacaaaggaagttgaaagccatgtctctgttgggtagtcggaaccaactggctagagctgttctgaatccaaaccctatggacttctgtacaaaagatttactgactacaacatctgagagaattattgcgtacttaagagatttcaatgaagaccaaaagaaagcaatagaaactgcatatgctatggtgaaacactcaccatcagttgccaaaatctgcttgattcatggaccacctggaacaggaaaatcaaaaactattgttggcctcctctatcgtctactgacagagaaccagaggaaggggcattcagacgaaaactccaatgccaaaatcaaacaaaaccgtgtcctcgtgtgtgcaccttccaatgcagctgttgaataactcaataaaataccatacccttaaaa

SEQ ID NO: 95224 - DNA, 533 bp, Homo Sapiens
tgcggccgcggcgggtgcctcgctctacggtgcctctggccccttccagcgcgccgcgctgcctgtggcgcccgtgggactctacacggcccatgtgggctacagcatgtaccacctgacatagagggttccaggtcgcccacctgtgggccagccgattcctccagccctggtgctgtacccccgacgtgctcccctgctcggcaccgccagccgccttccctttaaccctcacactgctccagtttcacctctttgctccctgagttcactctccgaagtctgatccctgccaaaaagtggctggaagagtcccttagtactcttctagcatttagatctacactctcgagttaaagatggggaaactgagggcagagaggttaacagatttatctaaggtccccagcagaattgacagttgaacagagctagaggccatgtctcctgcatagcttttccctgtcctgacaccaggcaagaaaagcgcagagaaatcggtgtctgacgattttggaaatgggaacaatctc

SEQ ID NO: 95225 - DNA, 389 bp, Homo Sapiens
gaaaaatgcaaacaattaattaaacggcttcagtcgacttaaacacagcttaaggggcctgtcccaggcttggggacccatgtttcttgctgggctttgttggtcttcttgatgtgagggggatgaatccaagcaggaatgctgtctactttcagagcttttggcatggggaggataacagtatgaggtcctttccaggcaggagtgagtccttccttctggaactttctaaacatataccaggtcacccagctggaaagaagggcagatccctgtctggtcaggaactggattgggatgtgctccctggacaagtggctggatgatgtcttataccaggacacaacttgcacaagggattggggctctcacatgaggatgcattccgc

SEQ ID NO: 95226 - DNA, 814 bp, Homo Sapiens
  misc_feature (248)..(248): n is a, c, g, or t
gagaaaccggccagttctcttggtttcatccctcaagggtcgtgggttgaagtcgaaccactaactgggaggtgggttgtttttaacacgaaaaacaaaagacttggtcccccttcacacaggatggaaccgtcggcttctctgtaatgcaatactcaccagatgggaaatttcttaaccataggctcacaggacaactgcatctatatatatgccgttagtgacaaacggaaggaagtacacgcgangtgggcaagtgctcgggtcattccagcttcattactcacctggactggtctgtaaactcacagttcctcgtgtcaaattccggagactacgaaatcctctactgggttccctctgcctgtaagcaagtcgtaagtgtggaaactaccaagaaacattgaatggcctacctatacctccactttgggattccatgtttttggagtgtgcccagaaggctcggacggaaccaacataaatgccgtctgtcgggcccatgagaagaaactcctgtcaacaggcgacgactttggcaaagtgcacctcttctcatacccctgctcgcagttcagggctccaagccacatctacggcgggcacagcagccatgtcaccaatgtcgatttcctctgtgaagacagccacctcatctccacgggcgggaaagacacaagcatcatgcagtggcgcgtcatttagtacccaccgagagctgtggggagcagcatgggcaaggaagacacagactcgcattacccttggtcactgtgatttctgttttgtttaaaaaattcttacaaacctcaaa

SEQ ID NO: 95227 - DNA, 420 bp, Homo Sapiens
tttcaaaatcacagaggtcattttactattttgcaatgtttaatgttcacacttacaaacagaagattttgcatggaaacgtacattgtggcataagtatactgtagaaaattaaattaaaagtttaatttctaagatatattttcaagcaaattttatatttgccacactttgtgtaagaatttaataagattattctttaacaaacagagaaaaacaacgctaaatgatttaatcctttcatctgtggacactgtatgctttttgttttaatttaactgatcagaaaattatattgatatgcaaaatctccagttaaaaccaatcttgcagcgcatttaaaataccgatctctcatcaaaacctacaatataccatgtgaaatgacatggtgtgaagagaacagtgagaaaactgtag

SEQ ID NO: 95228 - DNA, 645 bp, Homo Sapiens
taattggagttatcctgcgatgcatgcttaacttctccgtattctcttgtctttgtggtgatgtggagggacccactgaccagaagatacatcattgcctgaacactggcaggaaaggaagagctgccaagtaccaaccagaatctaaacggagattgttgaaggatggaagaagaaattagatataggctgtcagtgcacatattttttgcattaaattataaacaatatgctgttaatatttaaatcacggaggaataccagaagagaaaatatgtgtccttgtttttctatcatttcactttctcctcaccatgtcaatatcaaaagtatactgtgtctttgtactccatgtcatcaggcatatgcctatctgcaagtacacaacactgcagagatgttaaaggcaaataagaagcattcagaaaacttcatgaacatcaaatgtcaattgcaacacaagattttgatacaactcttgatttgactggattacttcccaaccctcagtaatgctccattgtgggagcctgtgtctcaacagttcacacctgccgtttactccactgggttgtgaagattcacagaagatgacaggaaggggggataaataagctaaaataaactttagaggatggccccaaa

SEQ ID NO: 95229 - DNA, 566 bp, Homo Sapiens
ttcagtgttgccttcatctactggctctgctacattttcgcgcgcagtctctatggctctgctctcctgcgtctgctgcttcctcctcagattggtcttgacacagcaccagtcgctctacgacaggtgcacaggacaaatggtccaaagggaaaagagaaagagacatctttgtaacccttctcagaagagtgaggaacatctttcctaaaaagaccctcatgtgatggccacgccccctcttacgatgttatatcacgtgatccttcctatgctggatcttagtacagtcactcttcaaccacgggtaggatcagattcacaagacacctgagctgagtggaaaatcagccagtacattaatacaactggtgttttcttgggaagaagaaatgagagaatggatgccagacgcacaaccaaaaacaacccaaattccaacttgccaaaaattcttttttacccgaatagagtcaaagcaaaccatcctaatgaccatccctctgttgttcagtattaactcatgttggttttattaaatataaaatgctgcctggtcaaaaaaa

SEQ ID NO: 95230 - DNA, 423 bp, Homo Sapiens
ataccaaaaacattttgtttttattttatatctaaggggtacatgtgcagatttgtaaaacaggtagactacatgatgttgaggtttggacacttaataattccattgcccaagtagtatacatcatacctaaccagattttcaatgcttgtctcccatccttcctccttctctttagaattcccagtgtttattgttttcatctttgtttccatgtgcacccaatttttagcatccatgtatgagtgagaacatgtggcatttgtttttctgatgcaataatttgcttagaatggcctgaagcagagctgcattcatgttgctgcaaaagacgttacttcatgctcttctgttgctgcatagtattggaggttgtataagtacatcattttttcttaaccaataaaagattcatgggtaact

SEQ ID NO: 95231 - DNA, 375 bp, Homo Sapiens
gacggcactatttcctctccgcagggcccagaatgcaacaggtctttgaggattattgaggaagttgctcaacacagaagcttcctaagtcagtctaaattgtgttttaagttattacgtagtagccaatgggcagaaatttttgaatttaaaatgctcagcttcatctacgtggaagccattgcctgctctagtttggtcatttgatcgccgaaacagccccagactttcagcctgtttaggcagctggaacttgttctggaaaaggaaagatgaagatagttctgatgtgctaagaatcttagtgcctagaacttgttctggaaaaggaaagatgaagatagttctgacgcaccaagaatcttggtgcctagc

SEQ ID NO: 95232 - DNA, 1231 bp, Homo Sapiens
tttaggccaggagttcgatatgacttcagaattatgggttatctacaaaaaggttgcttgtttattagagaaaaaaacaggatactctcaggaacttgctccttcagacaaccctcacgtgctggtggatacattgacatcccactccttcactctgagttggaaagattactctactgaatctcaacctggttttatacaagggtaccatgtctatctgaaatccaaggcgaggcagtgccacccacgatttgaaaaggcagttctttcagatggttcagaatgttgcaaatacaaaattgacaacccggaagaaaaggcattgattgtggacaacctaaagccagaatccttctatgagtttttcatcactccattcactagtgctggtgaaggccccagtgctacgttcacgaaggtcacgactccggatgaacactcctcgatgctgattcatatcctactacccatggttttctgcgtcttgctcatcatggtcatgtgctacttgaaaagtcagtggatcaaggagacctgttatcctgacatccctgacccttacaagagcagcatcctgtcattaataaaattcaaggagaaccctcacctaataataatgaatgtcagtgactgtatcccagatgctattgaagttgtaagcaagccagaagggacaaagatacagttcctaggcactaggaagtcactcacagaaaccgagttgactaagcctaactacctttatctccttccaacagaaaagaatcactctggccctggcccctgcatctgttttgagaacttgacctataaccaggcagcttctgactctggctcttgtggccatgttccagtatccccaaaagccccaagtatgctgggactaatgacctcacctgaaaatgtactaaaggcactagaaaaaaactacatgaactccctgggagaaatcccagctggagaaacaagtttgaattatgtgtcccagttggcttcacccatgtttggagacaaggacagtctcccaacaaacccagtagaggcaccacactgttcaaagtataaaatgcaaatggcagtctccctgcgtcttgccttgcctcccccgaacgagaatagcagccctctcctcaattaccccttttagattcaaggggaacactactggctaaccagcatgcccgatttcataaccttatgctacccccgacctttaagaagaaccagagct

SEQ ID NO: 95233 - DNA, 647 bp, Homo Sapiens
tttgccacagctgacattttatttgctaaatttcaacaataaccatcatcaaacagtgaaaaatgaacaggaataaatagcatgggaacattaaggtggccaaaggggtatgagaaaaatgttaggaaattcttgttatctgtgcaattagaaacaaaataaaccaaagaattgaattaatgacaagaaggtgatatatattgaagctaaaatatgttagcatctagtcatttctatttctaaaatatcatagtaaagggaagaaaagccattgtattcaactgctcagaaatctgactgtgagtactccagcatctacctacctttgactatggacttctgaagactatagtactagcactagcagggaacaacattcaaagaaccttggactgggcaaccagccttgcgattaaatgcttcttgctcaatgttcatctaatacctttgggttccaagatctcaacacattcttagcatttggtctcagcaaaagatcagataatcatttgcttctcagcgtagatttcagttagtgggtttgatttcctcatctagtactatttgcctcttaaatcaaatgtccaaaaagaaataaggacagggcaaaaggcaatatgcaaaaggcaccagaagctactatgcgg

SEQ ID NO: 95234 - DNA, 451 bp, Homo Sapiens
cgcaccgtgtgccagggccccttgcatctggtctacgtgcgcctggcgctcagctccgatgcccacggaaggtgcttcttccacctggtcctcggcggccacaggttggagcccctggtgctggtgcagctgtcggagcactacgagcaaatggaatacttgggccgttacatcgcccggaaactcaacatcaactacttcgactacctggccacctcctaccggcacgtggttcgccactggccaccccctggcgctggcactgtgatgggcaagagccccatgggtcacaagcccagctcctctcagtccagcctggaggtgtgactctgagggcctcccccacctcgggactgtgttctcggtaacctcccagccccactctggggcagatcaaatgtgagtcccactcactggccttcctttcaataaagctgcctcagcttcaaaa

SEQ ID NO: 95235 - DNA, 962 bp, Homo Sapiens
  misc_feature (701)..(701): n is a, c, g, or t
  misc_feature (781)..(781): n is a, c, g, or t
ggaccggtccggaattcccgggatagcgcgcgctcccagcgaaagcagcagggcagggatctgcgttggaggaagggactgctctggtgctagaatgctgtgcgtcggaaggctgggcggcttgggagccagagcagcagctctgccgccccgccgggcgggccggggaagcctcgaagccgggatccgggcccgaagggtcagcaccagctggtctcccgtgggctgccgccttcaatgtcaagccccatgggcagcctgcttggacctgttcggctgagcgccggggtcttttgggagttcctgagctgagtgccccagaagggatttcatatttgcacaagaaaaagccttgagaaagacagaattgcttgtggaccgtgcatgttccaccccacctgggccccagaccgtgctgatcttcgatgagctctcggattccttatgcagagtggccgacttggctgattttgtgaaaatcgctcaccctgagccagcattcagagaagctgcggaagaagcttgtagaagtattggcaccatggtagagaagttgaacacaaatgtggatttatatcaaagtttgcaaaaattactagctgataaaaaacttgtggattcccttgatccagaaacaaggcgagtggctgaactgtttatgtttgattttgaaattagtgggatccatctagacaaagaanagcgtaaaagagcagtggacctcaatgttaaaatcttggatttgagtagtacatttcttatggggaacaatttttccccnacagattgagaagcatctcttaccagaacacattcgtcgtaactttacatctgctggggatcatatccataattggatggtctccacgcagaatcacccagatgactttggtgcgaaaaagctgccttataaaaatttttttctttatccccaaatgctggggccaaattgaaaatggttt

SEQ ID NO: 95236 - DNA, 676 bp, Homo Sapiens
gccgccacgtggggcagcgtgggccgctgccttggaaacgcagagcgcgcgctccaggtaaaggctgctgcgcccaggacagggttctcacggtggaggaaaggacttctgcgggataccacgctgtgcgccaaaaagccgggcggcttcggagccagagcagcggctctgcggcgcaggcggcgggtcggggcagccttgaagccgggatccggcccgaaggggtctttttggagttcctgagctcagtgccccagaaggcacatacttcatatgaaatatgaaggatttcatactgcacaagaaaaagccttgagaaagacagaattgcttgtggaccgtgcgtgttccaccccacctgggccccagaccgtgctgatccttgatgagctctcggattccttgtgcagagtgaccgacttggtaagatgctttgcctcagacttgaagctacctctctttcaacctgttaaaatttaagtgaaatttatcctttgttgtttactgttaatattagattataaagttaaaaatgtctgaaactatttgagatccattgggtataattttttgtgatgaaatacatcattaggaatggggaaaatgttataggaaaaggtgacatttagaacttgtactttaatgtgtgtatttaataaaatatacctgtaatata

SEQ ID NO: 95237 - DNA, 512 bp, Homo Sapiens
aaaaaaagaatagaacaaataatgggagcattgggttgacctttgcaaattatctagttttatttacctattttacacaggagaagactgagagaagggaggagtagcttgctgtagttcagacagcaacttatttcaaagctggtgctaaaacctagagtgaactggtacttctccatttctgaaggaaatgcagaagaaacagaagcagaaagacaacattttggcctggacatatttaacttaaagatgactccatttttgaactttatttcttggaatagagtatcttctaaatttaaactgatccaactttcacaaaattgggcagttagaagtcacagagggaattagcagctgttgttataagaaaaagcaaagggattgttgccagacttcataaatcttggcatatttgagaaaaatgtcccaatttgttacatatgctcattcatgtgtgtaaacctttggttatagtgctttgtcaatataaatatgttttacattataaa

SEQ ID NO: 95238 - DNA, 444 bp, Homo Sapiens
taacaagagactgaaggggacaagagtagaaacggataaccagtttggagtctactgtagcaattctggtaacagatgatgacgtcggccagtaacagcagaagtgaaaatatgtggtagattatgggtatattgtgagggtaaatctatttgaacttttttatggtgtgagaaggaaagaagaagcatggacgactctaagaaaacttgatttgatatgagctaaaagggggaagaaaagtaaaaagcagatacagatattttgcccttttggaaactgaagataaaacagaaaaagaaaagaattttaagatatgttaatctagcaaaactaacataagaatggccaccgtgaatttcatgaaattttgccacagagcaatactaaaaactgaatgattatgcctttttccatattttaattaaaactgaaatgaaaataaa

SEQ ID NO: 95239 - DNA, 264 bp, Homo Sapiens
gatccctgtcccccgacattgaagagatctcattcaggccagagacacagagaccacatagcccagtgattaaaccccggtttcactctggccccaggagtggagcctggccactcctgtttggttctcactggggagcccactggccttggatcatctcctcatgcacacccggagttttacctgcttgcttgctttcctggactgctgtttgcaagaaagtaactaaaacatgaaaagtaaacctccagcttccacagtaaa

SEQ ID NO: 95240 - DNA, 603 bp, Homo Sapiens
gggcattgcagccttcctacttgggctaatcttccttctggggggaatcgtcatccagctaagggctcagaaaggatatgtgaggacccagatgtcgggtaatgaggtctcaagagctgttctgctccctcagtcatgctaaggtcctcactgaagcttctctctctggagcctgaagtagtgatgagtagtctgggccctgggtgaggtaaaggacattcatgaggtcaatgttctgggaataactctcttccctgatccttggaggagcccgaactgattctggagctctgtgttctgagatcatgcatctcccacccatctgcccttctcccttctacgtgtacatcattaatccccattgccaagggcattgtccagaaactcccctgagaccttactccttccagccccaaatcatttacttttctgtggtccagccctactcctataagtcatgatctccaaagctttctgtcttccaactgcagtctccacagtcttcagaagacaaatgctcaggtagtcactgtttccttttcactgtttttaaaaaccttttattgtcaaataaaatggagatcccccttcacatcaaaacat

SEQ ID NO: 95241 - DNA, 502 bp, Homo Sapiens
cagtcagcggcggtacacgggaaagttccttgcaaccatttcactctcaacgaggaagaggattgctttaaggcactgatttggataaggaataactccatcaccacagaagatggaggaagagcatcagtgttattctgctgacttgcccagttgtcagggatggtgatgctgtggtgcccccttaaagggaaatgttttttcaagatttaagactgactcccagcagccagtgcataaagccatttggagtgcctgcttttgtccaccaaatagccaggataagaagtatgtggaaattagtttcctgtcttacatgtaggtgattttctccaggtctggtgcttaatgactcccccaggcacctctcaggtaggtgctcttaacactgaaatgctaggaccaagctctgggagccttcagggaaacctgacctggccaagttcatttaactctgtgtagaggcccttttcaagtaaattctcaagtaaaaaaagttaag

SEQ ID NO: 95242 - DNA, 986 bp, Homo Sapiens
cgctgtgcagccgctgctgcccaggccccacggcgctttgagtgtggcacctgtggcaagaaagtgggctcagctgctcgactgcaggcacacgaggcggcccatgcagctgctgggcctggagaggtcctggctaaggagccccctgcccctcgagccccacgggccactcgtgcaccagttgcctctccagcagcccttggaagcactgctacagcatcccctgcggcccctgcccgccgccggggtctagagtgcagcgagtgcaagaagctgttcagcacagagacgtcactgcaggtgcaccggcgcatccacacaggtgagcggccatacccatgtccagactgtggcaaagcgttccgtcagagtacccacctgaaagaccaccggcgcctgcacacaggtgagcggccctttgcctgtgaagtgtgtggcaaggcctttgccatctccatgcgcctggcagaacatcgccgcatccacacaggcgaacgaccctactcctgccctgactgtggcaagagctaccgctccttctccaacctctggaagcaccgcaagacccatcagcagcagcatcaggcagctggggcggcagcaactggcaaaaggcggaggctgcccgttggcctggccgtcatggagactgctgtggaggcgctacccctggtggaagccattgagatctaccctctggccgaggctgagggcgtccagatcagtggctgactctgcccgacttcctctttggcacctccattccctgttgctgaaggccctccagcatccccttaagcatctgtacatactgtgtcccttcctcttcccatccccaccaccttgtaagttctaaattggatttattctctcgtgaggggggtgctctggggtccttgacacacataaaggtgcccccccaccttccacctcttagcactggtgaccccaaaaatgaaaccatcaataaagactgagttgccagc

SEQ ID NO: 95243 - DNA, 578 bp, Homo Sapiens
ggcagcagacacaggtatgccgagcaggaaaacggaatcaaccaggggagtgcccagatgctctctgagaatggcgaactgaagtttccagagaaaatgggattgtctgcagcgcccttcctcaccaaaatagaacccagcaagcccgcggcaacgaggaagaggaggtggtcggcgccagagagccgcaaactggagaagtcagaagacgaaccacctttgactcttcctaagccttctctaattcctcaggaggttaagatttgcattgaaggccggtctaatgtaggcaagtagaggcagcgtgggggaaaggaaacgtggctctcccttatcatttgtatccagattactgtactgtaggctaaaataacacagtatttacatgttatcttcttaattttaggtttctgttctaaccttgtcattagagttacagcaggtgtgtcgcaggagactggtgcatatgctttttccacgagtgtctgtcagtgagccggcgggaggaagggcacagcaggagcggtcagggctccaggcatccccggggaagaaaggaacggggcttcacagtgcct

SEQ ID NO: 95244 - DNA, 482 bp, Homo Sapiens
caaggtaatggtctgaatcggacaatccttttgtttttacattgatgttttctatatttattttgtacctggaaaaatatttttacaatttattttgattttatatgtgtagaaaaatgtactgaacaatgttgacatgcttatttttgtaagagatgggtacttcttgttccccttggatttcggaagcaaagcaatgggaccctacgcttcagagtcttaatggggtggggcagtgtccattgaggtgccctgtcgggaatgacaagtccagggcagattatgaggcaggcatcctttggagttcttctctcaggtatattttaactaaaagctatcatttaagttgaagaaatcaagtcttgtgaattgatacgattgtacttctagagtctttgatgataagttgtctttgcggtacagattggctcctcgatctttcaaagtgtcatttaaatggaaataaatgtctgaaacagaaa

SEQ ID NO: 95245 - DNA, 537 bp, Homo Sapiens
gagatagagtctgatctggaggctggaaggcggggctaaaactcccactcacttacctccaccaacaactaggccaccaagtcatttctgaggactggctcaagaaagcagatttaacttacactggcctagcccaggccaccagatgcatccacggagatccaaatgcatataatcacttgaatcaagatctagacagggacgcgtgcagcaggcttcatctgactgattcctgacacgggagagaaagcctaagctccgaatcatccttcaatgtttacaaaggccctaaatagcagtgggctaattgctgttcctggatttccaggagacctgagacccatgaaggagcaggaaagagcttggggataaaaaattaatctggaacctactggagcggaaggggctgcactcacctggaaaagacaaagttcttgggaactggccacgtaggccaggtccctaagcaattccatcccgcaccctaacaccccgactggtgttgctgggtccctaacattgtctgtacccgcttcg

SEQ ID NO: 95246 - DNA, 392 bp, Homo Sapiens
tttgactctatataaggatatgtctctctatatatttataaatatttatataatttaccatgaagacatgcaagtagtgttatagcaactattatacaatataatacagaaggactgatcttccaatattacagttgctttagataaacagcaagtatgtcttatctattgcattcctctggagtgtttgaaactggagagaaattaagattccacactatgctacatttcttataagagacgttatatgcctcaatagtgttttgagtttgtttttttaaaaagctcaacacagataaagagaacaagagaagttcagtgcagcttcagggcagctttgatgcagcattagaagatgttcacttggggaggaaatgtattcctttcttttt

SEQ ID NO: 95247 - DNA, 491 bp, Homo Sapiens
gcggccgccgctgctgctgcgcgtgctgtagaggcgtggggccacgccgtcggctggcggcgcacgcgggaactctttgagagagcggctcagcggcttggccttgccgtgcgcctgcgccgccgcctccagcttgtaggcgctgctgctgcccgccggcgacgtagcgctcttgggcagcggctgcagcgggtgctccggccgctcggcatccatggcgaagctgacgggccgcaggaagcagatgtccaggctggactcggaggaggcaggcgagcagttctcgaagagggccggagcctggaacggctcctcgtcgtagggcgcgggcagcgcgaagatctcgccgccgtactcgaactcttcgtaggccgcgggcacgaagccgcgggcatcgggcaggagctcggccggggcgcgcagggagcgctccacgttgcccagcggctccgccggagagggctcgaagtccatctccgggatggcctgca

SEQ ID NO: 95248 - DNA, 463 bp, Homo Sapiens
aaaggaaccactgacatttaaagatgtcgccatagaattctctctggagaagtgcaatgcctggatactgcacagcgggatttatataggaatgtgttgttagagaactacagaaacctggtctttttgggtattgctgtctctaagccatatctgatcacctgtctggagcaaaaaaaagagccctggaatataaaaagacatgagatggtagccaaacccccagtaatgtcttttcattttgcccaagacctttggccagagcagaacataaaagattctttccagaaagtgacactgagaagatacggaaaatgtgaatatgagaatttacagttaaggaaaggctgtaaacatgtggatgagtgtacggggcacaaaggaggtcataatacagttaaccaatgtttgacagctaccccaagcaaaatattccagtgtaataaatatgtgaaagtcaaaa

SEQ ID NO: 95249 - DNA, 979 bp, Homo Sapiens
gattccctgaggaagtggcacctaaatgaaaataaaaatgagtacgaaataaattagtcaagatagggttgggaaagggatagaagtatttcagatggagatgattggtatgtcaaaggtcgtagaagggcagcatatcatgttacaggaggtgaaaaaaaataggtttacaaagcaaaaaattttactgaagaaagacctgaagttgctaaggaaggagcaaaggaatagaaacaggagttactgtgagcaagtagactctattccatttcaatgatggaagcgcttcctaatcacacgtggtgctggggtctctggggtctcaacagcaattggttggagcatgtagcagtggatgcacacctgaataaggtggaaaactggtgagaggagaaactattttgctgaaacttattcatggaacctcgcagcctccttccttcagccaagccctattcctaaagtttccctcaaaacacgaacagtctgtcctcaaatattcagtttctctcttcatatcccggcccctctcctcccaacctcctaccgatactttcaggaattcagaagcagctatttctactttttggatgtgggattttaggtgggagtataatgagaagaacagattttagagctgttagaataagggatatattgcttagtttttgtttgaatctagaatgtattttctcataacagttttgtaaaaggtggttaggaactcttgcacttaattccataattttaaattacacaattaacatatatgctcattgtgtaaaacctaggcaataaatgagcaaaaaatacctaaacattgcttatgatcccagagattaaatggatatctaaggaaatttttaatttgtgtatgtttattttaatataaacatggaatcactgttttgtagcttgctttttttcttacagtaaattgtgaactgcttatgttaataaatatatttctacaacaaaa

SEQ ID NO: 95250 - DNA, 543 bp, Homo Sapiens
gcggccgctctcccccctccccgacacacactcacaggcgggggcgagccgggggagggcgcctactcgcagcccggctaccacgtccgagaccgagatctcggcaagatccacaaagctgccagcgcgggtaatgtggcgaaagtgcagcagatccttttgctcaggaagaatggcttgaacgatagagacaagatgaacaggacggctctacatttggcctgtgccaatggtcatccagaagtagtaactctcctggtggacagaaaatgccagctcaatgtctgtggacaacggaaaacaggacagcttctgatgaaggctgtacaatgccaggaagagaaatgtgcaactattctgctagaacatggtgctgatccaaatcttgcggatgtccatggcaacactgctcttcactatgctgtctataatgaggacatatcagtagcaacaaagctgcttttgtatgatgcaaatattgaagcacaaaaccaggatgacctcacaccacttttacttgcagtaagtggaaaaagcagcaat

SEQ ID NO: 95251 - DNA, 361 bp, Homo Sapiens
tttgaacaatgtcctatacgtgggtttaatttgttttgtaaatacaagtgtaattggcatttaaggggccactctaaattgccatcgccccctctgtctgagcatgagtaatctaatttttctgcagagcatgttgcagtttgatagacaggtctccgaggactgtcttgtatgtcagcatcggtgaaaatgagttctgaagtacagtcacacccccacgcgagcgaggagtcccaatcacccacgactcatagatccatttgccccatgtcttgcttcggacagataatatattcatttgcttctggctggcgttttacaggacataggtaaagaaagccagaaaggcacagtgacttgg

SEQ ID NO: 95252 - DNA, 1177 bp, Homo Sapiens
  misc_feature (1082)..(1082): n is a, c, g, or t
  misc_feature (1105)..(1105): n is a, c, g, or t
ttgagctcaaagcttagcagcttcaatgttgtagttaggcataaacagcttgcaaatttcaggttttttttctctcctcacttttgaactagatttgggcaatggaggtgatgacagcattttagaagacagaacaggaattctaggtgtttaggcacgttgaagagaaacttgctagaggtgatgaagtggaaagaaaaagacaattcactatagggatcaacattattgcagttctgcaaaggatattttcttttaaaacatccatatctcttctttgccatggaaactacacccaatctacctgaacctgcggcacccctctgatgacccatttggattctctgatttcactgccaagattctcagttctccaaaatacttatcattcaggttgaataaaccagttctacagactgcttcttccatgcatttcccaatgatgctaactgcccttaaaattctttcagatttggaactgtatctgtatggaaacaacagagttttcttgaagtacaactaaggacaggtcaccactaggcactaacatcgctgacttgcatgattatggagatggtctatctgatgctgaaaatgtctctagttttttgacaacggctaaataaccatgggatcaagtggccttgggaaagcagcaacattagatgaactgctgtgcacttgcattgagatgtttgatgacaatggagagctggataatagttatttgccaagaatagttctactgatgcaccgatggtatttatcttccactgaattggcagaaaaacttctctgcatatatcttttcaactactgggtaattttttacatcataaatcaagctctgaatttagatagagcgactatcctgcgcgcggaaattcccaatgaataaactaccccttgccctaaaggtccttccactgaacatgcaattaaaacctcactctatccctccgccatatcccccgaatcccttccactgtccgcgcttcacaaacttagattatcgccgctgtaatatgcgccccgaccactatatataaaacattttattattacacacaacccctataggnatggagcccgacgccccaatctntttaggccctaccggaccagtatattattccccgccattaaccgtcctatctaagttagagcgggagcggac

SEQ ID NO: 95253 - DNA, 632 bp, Homo Sapiens
acctggttcttcattgacggccgaggcaatgcgcagctcaacggagtaagttctcgtcattgcctgccatcacagtcaccaccgtaccatccggcacgtcccccaatgccaccaccctgaaggcgacgggcagcgtcttgttgcagcgccagtgcgagggcagcacggaccagaggaagttgggcctgtcggtgcgcacgagctcgcctgcgtggtccgccagcacgtccaccatcgagcgcacctcgggccgggcgcgccctccgggccccacggccgcctgcgcgctcagcgcgccgctgttctcgcccatcttgccgccgccgccgccgcaggggaaggccggggagggaggtgtgaagcggcggctggtgcttgggtctacgggaatacgcataacagcggccgtcagggcgccgggcaggcggagacggcgcggcttcccccgggggcggccggcgcgggcgcctcctcggccgccgctgccgcgagaagcgggaaagcagaagcggcggggcccgggcctcagggcgcagggggcggcgcccggccactactcgccagggcccgcccgctgcgaggcctcgctggcccgacggccgcccgcagcctgcccggctagtcccgcatcc

SEQ ID NO: 95254 - DNA, 631 bp, Homo Sapiens
aaacttgtgcaagttgtagaaattgcagctcaaaatgcagtggatgaaagcgtttggactcctgttcctcatgattgacttcataatgatttctgctgttttccacgcagtgggagccctcccctaggactggtaactggcgcaccatgaatctgcttcacatataacacctgccaggtgtccttcaaaaatgtcatgtgctcataaacacttcaaattctcagtggttctttctgaattataaactccatgaagacccaattccatcagcagccattggaagtttttgacaaaatgggaagatcactgctgtatatttgtagtttaaatagcgagcatttaaagctttctctgaggcagtttctggaaagttaaagactaatgagaaaaacagctgaagaaactctccccaatgagtttatgtccctaagcgatgaatttttgaatggtgcaatgttctaacatgtgatggacagcgaattcccagagaatcatcaagtacactttggaataaatgaacagcaggacatattttttaaggagtgctgagccgcagtaaaactccagagaatgctctaatttcttgatttatttcctggatttcctcctaataaacaaagaatgatgaaaa

SEQ ID NO: 95255 - DNA, 402 bp, Homo Sapiens
ctaactgcccagcagaattatcttaggagcttttctgctaaaacctggagattctgatttagcagacctgggtgttcagcacataagtaattaccgactaggggaagtcacacctttgtttttctgctgacctacctcagaatatggcactccctggacagtccatccatgcctagaatagatagggcaaacctcgtgggcagaacccaagttttgctccagatcaatcactaatttctagcaacaaaactggttcctctgctggatggtgcccataaaacaagatggcataggaaaacaattctgaacaaggtgagcaccagacaaatacaggtacaattactcactgtattataatcaacaatatatttttaaatgtggagtcctaattagggaaaagga

SEQ ID NO: 95256 - DNA, 464 bp, Homo Sapiens
ggtgttttttccccccagtagaaaaaattgatgaaaggagctcagaaccagacacttcgttctccaaagccaccaggcagttccaccttcttttacatggcttctacatggattccgtaggaaagcacaaggcagatctacagattactctaaatgccaaggctaattcttggccttaactgtttttcaaaatacattcagatacacagccatccctggaacataacaaatgaggctgtggaacactgagcgaaagacgaatttggctcagagtgcagatctgccattgctctcaatgctggctgcaaggaagcggaacccaaggctccatgtcctttttttgatgaaattggtgtatgtaaagacaagcaaatacgaaagaagaatttgaaggacagacaaactgcaacatcaacatagattacaacatcaaaataaacattatctttgtagtagttttaaaa

SEQ ID NO: 95257 - DNA, 996 bp, Homo Sapiens
  misc_feature (75)..(75): n is a, c, g, or t
  misc_feature (91)..(131): n is a, c, g, or t
  misc_feature (135)..(135): n is a, c, g, or t
  misc_feature (186)..(186): n is a, c, g, or t
  misc_feature (338)..(338): n is a, c, g, or t
  misc_feature (407)..(407): n is a, c, g, or t
acaatagccaaagtgctgggtttacaggcgtgagccaacacatccagctaacagagattacttatatgatgtggngtgtgtgtgtgtaaannnnnnnnnnnnnnnnnnnnnnnnnnnnnnnnnnnnnnnnnctgnggaaggaaacagaaggaatagtaacattgatttccattagtgatgaaaagngtgaattcaattttaagcctactcacagtctctccttaagagaacaagatgcctactttctaatcttttggagaaggaactgagctccctagctggctcactgatgggacttgacaagtgctgaaaatattatctttagcttggtgagtagngggagcatttctgctattccctctttctagttaaattcagggccaaaatatattcttgggatggcttanaacctttccttttcctgtgtccagagtcattaatagtcaaaaactacttattggagaaagtatactgtgaggatccctgttaggggtgtataaaatcaatgaaaggcaagttgcctgctatcaagtagctggaatccccatgttggtgagatagaggtgggttcctcatcgtttttctttcgggatttcaagaagtggttctcttgtattcttatgccacgtataataacaatttatatcattaaatgttttcccattatcaaaagatgttcatgcttatttttaaaacagaaataagaagtaatacagagaaaaagaagaaaagtcttccattgttttacaacccaaaaataaccaccatttttgggagacatttgtttccatttttacttttatagtattttgttggtgtgtgtaggaagtaatctgggcgttttgcccagtttggtttaatttttgtttatttgtgaagtgtcttagattgcattacacttattagatcattactgttattagctgttcctaatgatacatcataatgtgatcttatcaatctaaaattgaagcaataaaaagttcattccctaaa

SEQ ID NO: 95258 - DNA, 433 bp, Homo Sapiens
ttcctggaaggggagaggtactgaggttgagtctatccccaatggccaatgatgtcatcaatcatgcctaaataatgaagcctccataaaaactcaaaaggatgggatttggagaacttctggaatgctgagcatgtggaggtgcctggagagggcatggaagctccacatgcctgcccacatactttgcactgtgcatcccttccatctggctgttcatctgtatcctttgtatgtgagaacaagctcattcttgtacctttcctccgtggatttggtgatcacaacaagggacttatccatcattggagtggccacaatctgaacaagttccacccactgcctgagagtcctgccctgaattttagactttgatcataaaaaaatggataatataatttaacagtgaataaattagatatcaatgaaaaaa

SEQ ID NO: 95259 - DNA, 609 bp, Homo Sapiens
cttgagtgttgtgttgaggaagaggagagcagggagggaagtgtttttatgttttgcaaatatcaaacagcacagagccgttctgcaacttcctgactggtatttgtaaaccatagtgctacacatccttgggtaatggctctagttcaggtgaattaatgtgttaggctgactaccaaagtttcatctagtctctttggctcctattttcacgttcagcaatattgtaatcaaaaatgtcactttccagtgaaatgagcctggattgtatttttaaatccacaggtctccatatttgataacttttatatgaagttttaaacatgttttttctgcagtattgtggttgaagaaattcaacactatggttcttactgcaaccacattttcatttccttatacatatgtaatagtttatattttcaggcatatagaaggacctcacttaaaactatgtctcgggtctgcaaacctagtaattcataaaccaaccatcagcaaaccatagctggtgactccaagagctttgctttttaataatatactacagggcacttatcataaaacatcatgcagaatcatgttgcaataaatgatcaaaggatcaaa

SEQ ID NO: 95260 - DNA, 432 bp, Homo Sapiens
tttcagtgctacaatgtttaatgaattgaattgtatgctggccaatattaggctttacaattgttaaaagatggtttgatatgcttagtcttgtcaaaaacattgtatgtaagaagaagaaacttgagaaaggtggtcagtagagagcctcttcgactaatagacagtttgagcatctgacagctgcattagaagcagaaattggtaaacaacttgacatagtatagcaaaacattcatgaaggcagccctgaatcccaaacagggatggataaccaatctccctcgagatctgggtgaaggcctccacaccgctctcaccatagttcccctcagaagccagtgtcaaaacataattccatcccagtgctgtcacgatgtccaccaggcttgggcttggtaggagtacaggcggaaccactcgagagaaaaa

SEQ ID NO: 95261 - DNA, 329 bp, Homo Sapiens
cggccaagcatgtggccaatcttcgagtgtgttctaggtgcatataagaagagcatatatttggttgatggatggcatattctgtagatgtccattaggagcaattggttaagtgcagagtttaagtccaaaatttatttattagtattctgcttcagtgatctgtcagtgagaagtcaaagtcccccactgttatattgctgtctaagtcttttcataggtctagaagtacttgttttcttaatctgggtgctccaacattgggtgtatacgtatttggaatagttctatttggaatattattcttgttgaatacgaccctttattga

SEQ ID NO: 95262 - DNA, 400 bp, Homo Sapiens
gaattccacctcacagaacctgcatttgagggtgtagatgttgcccacgaacttgacaagtgatgtctgggcgggccggcgcaccagggaggggactggccggactcgggctgggtgttgccgcacctcctccagcttctgctgtaggtcattggtgtcctcgcctccccgggctgcggaggcatctggagggcgggcttgtcggcgttcaaatttgttgatgttctgccgctggtgctcctcagccttcacggtgcctggcgggctggctgccagaggccgctcaccaccgtcggctgcccggccagcctcgggccctggctcccgctccggcactgccgccgaccaccgccaggcccccgggtgccagccccagggacgcccgcgttgtcactgtcac

SEQ ID NO: 95263 - DNA, 423 bp, Homo Sapiens
gacagtgacagaataaaataaaatgtgatgtttgcctttgtaaaacaagacagaatgaacatgataaggtgggcagcaatggaggtttacatggagacttcatagaagactctgaaacaaaatggaaccctgttggaagatgccctgcaatatagggatacaagggtttcaaaatggctatgacaaaatctttcaagtattcaagatggctttaggatagcaatactacattatactaaattcttataatttaaaggaataaaaaggaaatttgatttgtaaataatcacaaacttaaaggctattaccatctataaaagggcaactgatgtcaaaattatagctattagtaaataaaagttaggttctagaccaagttcttagtattagaaatcaagtacactttgttttttttctgagaca

SEQ ID NO: 95264 - DNA, 445 bp, Homo Sapiens
ctttggaaatcctagtagtttggactcctataattcagagcatacgtcattggaagacttcctggaaatcagtgtaaatcttgcaacatagctctcaagataccactgtataatatgtaattgtttgtctgcaaatgcatttttcatctataaaatgtcatgaaagaaaataaaggtagtgaaatatggacaaaggacatttatatattaactaaagttgtttatgtttgtgttcttaaatttaaaacacgaagaaaaagaaatgtctttcttgttagtgaacaggcctgttttaaatatcttagtatgatatcaaaagaataatcaatttagttacctcccaactaaaaagtaaaaatgaaaaagacgacatggcagaagttgaaacaaacttgtatgtatctgtatgtgacctctagatggaaataaaagtttgatgtttgct

SEQ ID NO: 95265 - DNA, 580 bp, Homo Sapiens
  misc_feature (256)..(268): n is a, c, g, or t
aatggattgtgtatgggcgtgagagtaaaactttacaaggtcgagggtcatacaaaagccaaagccgcattaaagccagtcccagccaggcttaaggagagctggaatggagaggattctcatctaacatctgggttgcagttgtatgttaacatggacttcctaggaagtaacatatcaaacaaaagggaaagtgatcaaccagcagcaggtaccagccacagttaactgcacctgctaggagctctgaaagacnnnnnnnnnnnnnaaacgaataaagaaattctcatttcactctcctccacactggactcgctgaagaaagagtagctggctggaggaagctatccagagggaagcagcacagcatctatgcacagacatagcaaataagagcaagtgaaccacgccacacttacgactatgtcaacaaaggaatagaagcaaaggaaaagactgacatagcttagactgggaatccttctagaaagtaagaaagaattcagagagattcctctctctagtcttgaagaaatgaaggtcttcaaaatgaagattgaagaaatatagaatatctaaa

SEQ ID NO: 95266 - DNA, 819 bp, Homo Sapiens
cggtccggaattcccgggatcggagctgggccgccagttccgggactggtgcttgcgcacctacggcgactcggccaaaaccaagacggtgacacgcagcaaataccagcggatcgccgaggtcctgcagggcggcggcgggactggcgcgggcagcggccccgcagccggcgagaaaggcaagttccagttctgggtgcgctccaagggcttccgcctgggcagcggccgggaacccaagatgggccaagtggtgtatgtgccggtcaagacgggctcgggggcagatggcctgtcggagccagagggcatctctctgaagcgggtcgctgtggtggaagatttctttgacatcatctactcgatgcatgtggagagctcagcggagccaggcaaagcccccaagcacgctgggcagaagaaaacctaccgagcgatcgcagagacctatgccttcctcccgagagaggccgtgacccggttcctgatgagctgtacggagtgtcagaagaggatgcactttaactccaatggcctggaacccaaagaaaacgagcctccatctccactggtctctgggattattgattacaacatgcccctcacctccacctacctgaagcagatgaagcttcgagtgatgaattcccaggagcagccatcctcactgtctccggcacctggcttcgtaaacactgttatcaccgtgctcatctgtgcccatgaagaatgaagcacaaaaccgcacaaacagccggaagcacagccccctggttttgtttcatacagaatggcactaaatccaggtcaccactaaaa

SEQ ID NO: 95267 - DNA, 564 bp, Homo Sapiens
atagaaacttgcagtctcttggggaaaaaatgtgttgacgtgtttaccaagtccaagtggagcatggcagagggaagagaaagggaccaatattattgagctcctactgtgtgccaggtgagttcatatatctggtctcatttaaggctcacaatgatacaatctgctaggttttattctcaattttgcagataagaaaattgaagctcaggaaagttctccaatcttttccaaagttttgtgctagtaggtggttaaaatcagaaggaatttacacccactttttctgaggcaaaaaccagtatgctttctgctctactaggttgcctttcaagtcgttaggaaacaaatatgtttggcttaacctgaggaagccatcatggaacagaagatatttgagtaataaatgagatgttcaccaaagtggaggaaagatggaaggatactcaccctctgtataaacttctcagctcactacaactcacagaacgctctcccttctgactttcattcacttctataatgtaatacattgattcaataaatatttatcaaatacctact

SEQ ID NO: 95268 - DNA, 425 bp, Homo Sapiens
tgctgctgcattaaaagggaacaaagggaaggtgcaacgtagagccagacacaacctgagatgcccttgagatttaggagaacaggagggcgccctttctgttgtgacctgactcttaaaagaaatcttctaaaagaattctttaatttggtaatgagttgaagtccagggtaatggaagctctagggcagagaacaaaagaattgcaaaatgtattcagcaccaaacaaggctaaaccaagaaacatccaatcacaaaactaggaagtttggcaagaagtggttagagaaatctctgggcttttccatgggcagggtcgacagactctcttttcagtgatttctggctctgagaaacctctttactcactagaaaagaactttatttaaatggccaattttgttcctcagaaaaagaaattaaa

SEQ ID NO: 95269 - DNA, 1044 bp, Homo Sapiens
tggcgaaggtctcagagctttacgatgtcacttgggaaggtaacttcgggtgggggcgggtgcggaaagactaaaagcgctgggaagccgttcgggagtacccgctgctttcggggagctgggttctctggtgtctttttggtaccagagccctcactgtacgggccaagctgaggtggaggctgaggctgacccttcccttggcccggacgcgtactctgcagcgtttcccacggtgtctgctcctcggttgacctgccctcctccgcgccagtccagcgtcccggggccgcttttatttatgaggcgggcgggagggacttggggctggggttgtcgcacgctaactggttgctgggcggtgcggaagaggcggaataggtggttactgaagcttctttggagccaagaaacacagggcctgtaaggccctttactaagtggtgtgtaaggattacagctctgtgcagaaaagctgtgtaaaagatgcgtgaacaaatgtgattctcatatgccaatctacatttagttttcttcttaaacccgggtttccagtttcttttccttttagtctagtctctgtcccactcccttctcaaaacacatttacacacacaacacaacttctttcttactccctactagtagtctcttttctgaagggaaaaataactaattaactctgggctacgtaagtgcttacgtgtgatggtcacttttccctatccttagttgatctagagtgggatatgttctttaaatctgggaacagccaaaccttggatcaattctgtgtgcttaagaaacttgagtttcattaaggcgtggaatttgtgtaattggaattcatattcccagcatttaacataatacaggagacttcagtagctaatttgcttaacgaatgccttcttgggatgttttaataatgacctgaaaacatgtggaccgaaagttgtattttctgttttatcgtgaataaatatatcagttattataaagttgtaaatccgttacaaataaagcaaaatttctttgtacttg

SEQ ID NO: 95270 - DNA, 401 bp, Homo Sapiens
aaatttcagaatgcaagaccatcaaggcaaggatgttaattttcttcaatgaggtatctcctgtgtctggaatgatataaggctcatcccagatgatgaatgaacagtgaatctgtggagcttcagcatcctcacctaagatgggaatagctatgcccatctcccgagattattgtggagatcagatgttatgcgtacaaagcacagggcatgatacctgatacacatcttgctctataaagactggtagaggagtgtgttgttattgttatcaatatcattatcatttttatccataaaatgaagattataaaacctaagttgctgtgaatattgagacaaagtatgaaaagtacctggcaactggagatgtttaataaactggaatttattttctcaaa

SEQ ID NO: 95271 - DNA, 644 bp, Homo Sapiens
ggacccgttgtacatcattggtaggaatgtaaaatagtgcaccaattgtggaaaatggtctgtcagtatcgcaaaatgtgaaacatagagttactatgtgagacacaactattccgctcctggatatatgcccaaaagaaatgaaaatatatatctgtgcaaaaatcctgtacattaatgttcatggcagcattacttgttaatagtcaaaaagcagaaacaacccaaatgctcatcaactgaggagtggataaacaaaatgtgttatagccatatgatgacttattaagttattaaaaggaatgaagtactcatactacaatcttaaaaacatgctaagtgtacatcaaattacatctagtgtaaaaaaaatgctaagtgaaggaagctggtcacaaaagaccacatattatatgattcaatttatatgaaagtctagaacaagcaaatccatagagacaaaatgtagactgatggtaaccaagggatgaggggaaagtgcaatgagattgtactttcaagaatttcaactcctcaaaaattgactagttcttttcaaaatgataaaaatgttctaaaaatgattgtagtgctggttgctcaactccatgaatatattaaaatttgttgaattgtatgtttta

SEQ ID NO: 95272 - DNA, 483 bp, Homo Sapiens
tttaaactccatctggcactttaatctcttaaaaattattaagttaggcatgaagaacaagcccatctgggcggcaggtttggattttaagtactattctgctcttgtatctttttccttggcttggcacatctttgagatccagcagaatcccaggacatctttggtggggaagcaagtcttcatgatggagcatttcagtccattttacacatcttagtggccaagtaacagcactgccttctcctttgtgcattttactaatataattataaggaagtgtttctttcccagcactccccaccccaccctcccccttgtatgagggcattccatttattcatttctgaacacaacatttcctcatgtcctataccaaggacccggcccgactctgggctggtaccatgacaggtactgcaccaattcgttccagtgttgcgtggctgatggtgtaggaatgagtgtgtggaggccgaggct

SEQ ID NO: 95273 - DNA, 680 bp, Homo Sapiens
gtagcgcatcacactcagttgaaatcgcagcacacaatgctttgcactactttattaataataaactggcatggggtaaaagtgggggttatactggaaaagctactacaaaagctaaaagaaatgtatatttcactctaaaggaagattctttaacaataaatgtaatctcattgaagctgatttttaaagtatttttatttcagagataagttgttaaatactatttcttataatagaactattttgatctgtttatatactatgcttgaatgtcaattaaattccctttctacagaaaggctttgacctcaacatgctttatttaatgtatcatgtttaaaatgacatgcttctgtctgcataccatcactgtttgttgctaaaaacataatgttccatgaacatgatgttactacagaaagtttattgatgagataactgtttgaaataactttcaattataccttatgtgagacttttatgttctgtgctgacaatgtgtactcaaatgtctataagcctgatattctacaacctcagatgtatctagtggatagtaaccattaacagatgactaatttgtttcactgtatcaaatttcagatgtttagttcaatggtaatgctgactacacattcactgtattaaatacaaaagaaaataatctttcccacgta

SEQ ID NO: 95274 - DNA, 911 bp, Homo Sapiens
acttggatgccaaaagctttatccttactgtagctctgtgagctatatagatgggtgacattactggcaccattttgcggatgaggacatccaggattagagaggctaagcagtttgcctaagatcacacagctcataatgaatttgagatggtagccaggcctaggtactggtagagaggagctgtttttattctcccaaagccatgggatcacctggaatgtgatataggaaggcctagggttgtctttaaactgggatctgggagccattaggcagctctggccatgtctgttcctacttggaatatataacagcttctggacattattaagtgggctggcttgtgttttgttgaggaacaggacaaatggggcatttactagtgctgtgtgcctcgttgcttttctgggtagtgtttggtgatgggcatagtgtggagtggtggtagagtacacagtgtgattctgtctggtaaggaagctgtatgttgatgttcactgatgtgaataggttcatacagtcccttaggcatttggctggaggataaagaacagccattgaccagcagagtactttttttgaagtttatgcaagacagcgtgctaggtactactgccagcttgacaataaaggcagaaagacatttagagccattaaagaattatttataccagaatacaaaaacacacttttcaaatgttttgtaggcccttctccctcacagcatgtgcctcatctactcaaatttaggaaaggtggttggtggttttgcagagaagcaaggaactgtaatatctgtctgcattggtcatgcttatcatgtaacacactggattcagtataaaggaaaaccgacaggtatggagtgtctgctgttttatttttaaaaaattgttcattttttaatt

SEQ ID NO: 95275 - DNA, 544 bp, Homo Sapiens
gaaaacacatctattctttgctgacccctagtgtccacagcaagtaagcgtggaatctaaaaatcccaaaggaaaaacatggcagtttgagaaatgacattttgtttcattcaaaacaagaaagaaagaaaaaatgcgttccaaaataaaataattcacctccagtaaattatatagttagcacagaaacatacataaagaatgaaacagatattttcaaattcagcttctgcttttgatagagggtaaatctgaggaagacttttcagggctatggagcacaatctgaattgttttgtgggaaccacttctttctctctggctacactggcctcaaatctgttctacaagcatgtgaagataatctttgggttttcaaatccttccagcactacccgaccaccactctgggcagcatcaccgccatcaccaggaccaacagccttgtcgacatgaccaaccgctgggagcaagaaacaggtggtctcccctccatgaggctgtgaggacaaataaatgttacctaagcaaagtgaaagagaaa

SEQ ID NO: 95276 - DNA, 549 bp, Homo Sapiens
  misc_feature (488)..(500): n is a, c, g, or t
aacaagtcctctccctctaaaagccagcaggttgaagctttacgcatccagaggcagaaaactaaagatggaacagaaaatgtatccagggttttccagatgtggggagaggggttaagggagccctgaggagaggagagggtaagggtcttggcagaattgtgccaagggcacaccaaggctttggccaaccggtcgcccctgctaagtaacagtaatccatgtatacaggcgaaagtctctaagaggacagaagagtaaaaaggaagagtagagttaagatgatgatcccagttctccgtcttgtaccccagggaagacctgtgtatccttccaggtttctttaggcacatttacaagtacatacacttggacatataacctttttttcctacagcatcatgatcatattagccacactttcagagtatatacttaaaaggtcttgctatagtggcacagatatctttcattctttttagatgacnnnnnnnnnnnnnaagcacagtctctccactacctctctttccctaactccctaatctttaa

SEQ ID NO: 95277 - DNA, 510 bp, Homo Sapiens
tttgctgatggtcaacactctggccctgctgccccatgtccctgtggagaagtgtgaaggacgggtgccttaaacccacacttccagggacccttcagcacaggtcctgcctgttcccatggtgcttctcaccctgaaccctcagagctacagccagggatagagcagatgagcagtgagctggtttccaccctctggggcaggaggggcttgggcttccctttgaccctcttccttcctttcccagatcttcaatatttgttgtgatgtaacagccataagagctgtaagaggaactgtgggctttgggagctttcttgggttgaaagaggggtggggggaggggatgcatgcaggggtatgaaggcagcccaaggtctcccagaggctcgggaggaaacccttttggaatacatgtgttattgttgcattactgtgttgtgaagataagaagctgctctgtatgctaaagctttctctcctcaataaaaatataaagggtgtgtaaaa

SEQ ID NO: 95278 - DNA, 525 bp, Homo Sapiens
taggttatctaaattaatctcagctgtgaactttgtgtttttcaacacattctgtcacaccatttttgtgacagaaaaatacttgaaaattattctaatgtagtttgtagtaggttcaaatttttattcagacatgctctgacagatggaaaattgtactctgaagagaaaatgcaatcttctggatgtccaacgagggagcttccccttggaagcatctcctaagaatcacagtttaggtttgaatcgccttgttatgatgaggagaggaacttgatgttagtcagaaataaagtcacatgccctttagataacttgaaatcacacatggagttgataaggaatggaccaaaataggtcctcaaacaattttgcaacacttaattaagttttcctctcttcctcttccatactatgtggaaataccagtgttacggcagggcgtacttctaactcacagtaagccagatagatcttgtccatggcaaattccttgtttaaaataaacataccatttaacccaaa

SEQ ID NO: 95279 - DNA, 531 bp, Homo Sapiens
atgtctgattttgtggaaagcgaggctgaggagtcagaggaagaatacaatgatgaaggcgagtggtaccccgagtcaccaagaaatttgtggaagaggaggatgatggtgaggagccccagcctcaagcttctccccactattgctaagctttggatagttggattcttgctgatgaaaagctcaggctcagcacagaagttatcacacatgagatgaggaggaggaggaggagaacctagatgatcaggatgagcaaggcaacttgaaaggctttatcaatgacgatgatgatgaagatgaaggggaggaggatgagggcagtgactctggtgattcagaagatgatgttggccacaagaagagaaaacgcacctcttttgatgaccgcctggaggatgatgattttgacctcattgaggagaattggggtgtcaaagtcaaaagaggacaaaagtaccggcgtgtcaaaaaaatgtcagatgacgaggacgatgacgaggaggaatatggcaaggaggaacatgaaaa

SEQ ID NO: 95280 - DNA, 889 bp, Homo Sapiens
  misc_feature (400)..(433): n is a, c, g, or t
taaaattgaactgagggcaattagccgtagaaagaaagaattccgcccccccaacctattaaatatgcaataaaacagataattcttaatcacccattggtagattaatttaatcgataaaattccactgaggctagtcctgtgtgaaagccctacagagtgttgaaagcatcaaccaaataggcaatgtatattaagttccagtaaaccttttacggcagttttatgtaaaatgttagaaatcacgctctcaacaattgcatcttgcggtagaaactacaacagtctatttaaataacaacagtctattaaaatgagataccatcttacatacagctgggaatggggaggagggagaaaagcaacaggacgaaaaggaaaattaagaaattgaaagagnnnnnnnnnnnnnnnnnnnnnnnnnnnnnnnnnnaatgtttttctcaatcatgcatcttttcctgggcaagaccactttccttgagaaagaaaacatgttttatccatagcttcagtaatgaggccactaaaatattaattttctgagcattcttaaacataactgaatcagcttcaatttgcctggatagatagacattttagtggcttatagcaaaatgtaataaactgaataactgtaggctttaatgtaatctcacacaatcctattacatcccaattacttatttgacctttttaaggataattcctgcctaaacacacacaatcctgcaattccgaatgtcttcttcccgtgttgttccaaggcaatcaatagatcagaaagaattaatatcttgctgtgtcctccatttgtaatatacactgtcccaggaaggtataatgcatccctcccaggcataataaatgtttattgagcactgttaaa

SEQ ID NO: 95281 - DNA, 457 bp, Homo Sapiens
agcaacaatctaattagtcctgaccagagcctgttctttctttcagcctatttgcttttgccttcagggttagtagctggcaactaatatccactagaactgaatcacccgaattatcatagggctgagctaatatcctgctgtagatgctatcataggcagaaagaaaattgaaaggcaagttctaccatggcctggctgtaagcagccactgttaggtccagactccatgctttaaagttagcctcaagattcctggaaatttttacttaggctaaactagggaccccccaaaaggtgtcccagttatttttagtatccctttgttgcaagatagtataggatatggggcaaaactagatctcatgctttcagtagttaataaccttaacagttgtcatttatttaaggcctgtgctgaatgctttatataagtttttctcatttattccccaaa

SEQ ID NO: 95282 - DNA, 913 bp, Homo Sapiens
gggagagacgcagtcgtaacgcacttccggcggtctacgcgaggaagatggctgcatcccagcagcaagcttcagcggcttcctcagctgctggtgtatcgggtcctagttcggctggcggcccgggtccccagcagcagccgcaaccgccagcacaactggtgggccctgcccagagcggcctcctgcagcaacagcaacaggacttcgatcctgtgcagcgttataagatgctcatcccgcagctgaaggagagtctacagaccttgatgaaggttgcggcccaaaacttgattcagaacactaacatcgacaatggacaaaagagcagtgatggacccatacagcgctttgacaagtgcctggaagagttctatgcactctgtgaccagctggagctgtgcctgcgcctggcgcatgagtgcctgtcacagagttgtgacagtgccaagcactctccaacgttggtgcccacagccaccaagcccgacgcagtgcagcctgacagcctcccctacccacagtacctggcggtcatcaaagcccagatttcctgtgccaaggacattcacaccgccctgctggactgtgccaacaaggtcacgggcaagacacccgcaccacctgctggccctgggggcactctgtgaagtgggggacagggagtggggcaggcagtggttggtgggtggtgtgcaaacggaatgaagagcgtcctgggcctaaacacagcagcctcctctcttcctgcctgagcaccgcagcggggagccagcagggtggcagcagaggccaacagggagctcgcaggccgggccctgcgtcccttgcccttcttcctgtcccctcctaatctagggtagaatttgaactgtgtttgttgatgaacttttctgtccacagggcctcccca

SEQ ID NO: 95283 - DNA, 726 bp, Homo Sapiens
ggggagccagtcaagattggctgcctcatgttgaggttcagagttacgactcggactggacagaggcgccggcagctgtggtgattggcggggagacctacggcgtgagcctggagtccctgcagctggccgagagcactggtggcaagaggctgctgatccccgttgtgcctggtgtggacagcctcaactcggccatggcggcaagcatcctgcttttcgaagggaaaagacagctgcgggggagggcggaggacttgagcagggacaggagttaccactgaggacgcagaagtgacttctgcttgaggacgtctgcagctcctcctacaccagcacactggtgggaggctggcggagtcagtgactatggcccccacgttcaggaggaaggtgtgatgccgtcatacagttacaggaaaaataagaacttcctcagaaagaacaggtccgaattcttcctgtcgcgtcactgattttgaggttcttttttctcttggtgacaataggtgacccacgtggctctgtgtgtttttaaaaattgtccaccaagaagcactttgtgcccagaaagttcctgaagcatcatcctggcagggaggcgcctgctccaccagctggtgggtgtttgtaatcgccaagcaccagctataggtcacagccacatcactcacagctgatcactggttggtggaaaataaactatgagcagcagattacgttaaa

SEQ ID NO: 95284 - DNA, 789 bp, Homo Sapiens
gaacctaagaggagtctatgacaactacagaagataaatcgaatgagttcccacggggattttttagtgcccctcccaactctgccattcataggaacctacggggagttggctttaatcggggttgatattatagtcttaaatcttaaaatataattaaaagaatgtaagaattaaagcgtaagagttaaaaagttgtgggctctcagggggctgctgctgggccactgggtctctctttgtggattttgtctcccgaggcctggagcaggaggaagagggagaggaagatggggacaggatgtatcaccaggatgctaggggaagagagaatattgacgtgtggggcagcctgcatccccaaatcaggagcactgggtgctgctgtgttacagtgagtgtaggagcatgccgttctgggcttcactctgcccaaatatgtcttgctcattttcaccgccatatggctgctcgtcccggtctgtttgaggttccttcctgttccctctctgcctctaagtccttcaaaaagccaactggaagtgcctcttccaggctttccttagcctttctttattcccttgaacttctattatgttaattgttcaaaagattagttctgacacttaccctatgctgctttgtattactattggaaaacaacagtagctctctcaacccattgggtggatggtacatgccatgctttatacattcccgtggccctgctgtacctggcacacacaaaaggggattaataaatatgcatatgttgaatgaataaaaaaa

SEQ ID NO: 95285 - DNA, 439 bp, Homo Sapiens
caggcttttggagaagacagacattaaccatgaagaccccaaagccaaaactgtcttaacagttcaaaggacatgctttgtttactcctcactactatctgtacccacagtgtctttgggtgctagtccaagcagaactgggtgtgatcagctccggccatattcaccacaggcagagcaatgtggtatatggatgctgctcaggcaaattctctgattcctagccttgtttttccatccggacaaaaattcatccatccatctaagacaggtcaaatctggcctgctgcctgtttttatatggtctaggagctaagaatcattgatattacacttgtaaatgattgaaagcaaatcaaaagaagaagagtattttgtgacacataaaaattgtacgaaaatcaaatttcagtgttaataaagttatattagaatacaa

SEQ ID NO: 95286 - DNA, 818 bp, Homo Sapiens
  misc_feature (167)..(167): n is a, c, g, or t
  misc_feature (173)..(173): n is a, c, g, or t
  misc_feature (197)..(198): n is a, c, g, or t
  misc_feature (217)..(217): n is a, c, g, or t
  misc_feature (279)..(279): n is a, c, g, or t
ccgcgtctcacacaggtggattgcacttcttacaaaaaggacttataaaaagtttgggatttttttcctaatcataaaaatagccccagaaagagcctaagctatgttcagatagaagcctcgaaattcctgtaaattgtttactttatgatgtttacatacacgtntcactntgaaaaaaaatgcaaatcgacttnntaacaactgttgagatgtntcatgggacagtagaactctgactcaccaactgggctaaatttaatttaaaaatgttttatntgagttctttccccccctcaccctcaccatctgaggggctccctgagatcttggtagaggaggcccctcctgcccagaccttcgtttgtttccccggtggcccttgcttcttgctttgcagactgcctgcagccatgattttgtcactgacatctgtgagccaaagactgagcctttttggcaggaataataagcaatactacacaacttgctactttcagaaaacttttttttagcttcaccgatgacaacagaggaagaagggaactgggatttgggtaagttctcctccactgtttgaccaaattctcagtgataaatatgtgtgcagatccctagaagagaaaacgctgactttctttttaagtgtggcacataaggatctgcagaattttccgtagacaaagaaaggatcttgtgtatttttgtccatatccaatgttatatgaactaattgtattgttttatactgtgaccacaaatattatgcaatgcaccatttgttttttatttcattaaaggaagtttaatttaaattg

SEQ ID NO: 95287 - DNA, 486 bp, Homo Sapiens
attcatttagcttgaattcatttaagaaatctgatttgttttaaattcttggtgtataacataaaacactgatggaggggttcaaatctgaaattttcctaggttaagtcttcaatcctttagtgagcttccttttatggaaaacttggttgtgtgttctgagctaaaaagtaccaagtcataaatgaatatgatagaatcatgtggtggcaaaatcaaagcaaagttacaattatcctctattgaccccagcctactcagcagtgcaaaatgctgagaaagaataaataagttgtctacccttagaacttactacctggctggagaaagagaaattagttcatcaggtacctgttatgggtaaagcattttgttaagtatggtggggtacagataaagataggagaagctccctgatctcaaaaatcttactgcctaattgagaatgatataagcatatgtattaaaagataaccaataaaggtc

SEQ ID NO: 95288 - DNA, 697 bp, Homo Sapiens
  misc_feature (381)..(500): n is a, c, g, or t
  misc_feature (514)..(633): n is a, c, g, or t
ggactgggggggccactggtgatcagttcccaactctagctctcctctgactcatctcaggacccattgaggacatccaaaactcactcaagatcaccaagtggtaggaaagtactaactcctggcatagccctaggggagtgactacaatgtgaatactcatggaatgcctagccaggtgaagaagtgaatgcatgttggcatcccagagggaccccccttaagagggcatagtttggggttcagatttgactccagcatactgttgaaattgggcacagggggctagtgattagtcaggatcaatcagtggagaggagattaaaactcacatctgggagtccggaatcagaacttgtagttcttttttttgaaatggannnnnnnnnnnnnnnnnnnnnnnnnnnnnnnnnnnnnnnnnnnnnnnnnnnnnnnnnnnnnnnnnnnnnnnnnnnnnnnnnnnnnnnnnnnnnnnnnnnnnnnnnnnnnnnnnnnnnnnncccaccaccacagnnnnnnnnnnnnnnnnnnnnnnnnnnnnnnnnnnnnnnnnnnnnnnnnnnnnnnnnnnnnnnnnnnnnnnnnnnnnnnnnnnnnnnnnnnnnnnnnnnnnnnnnnnnnnnnnnnnnnnnntgagccaccatgcccagccctatagtagttcttcttttgccccttaatatcctcacccacatgt

SEQ ID NO: 95289 - DNA, 490 bp, Homo Sapiens
tatacttttgtaaggaaatgttgaagtcttgagtatttttattcttttaggggactatagttagtgtcaactgtgagcactgataaatattattcatgtgtggttttccttctttttaatccagactttttaagaaactgttttggcatagagctttacttaaaatgctgcttcattttacacattgtgaatactgaagattctaaaaaataaagatgcatttaaaatctctgtgctgttccattgtagaaatggtaatgtgcattgctttgccaaagtggtaattaaatgtttaatggtttagaactcctagttcacaacagggcttctcgtcatcacttgcagcgtgtgagcttccaaataagccgccatttctttggaaaacgcacgcacttaggcatggcgatctcctgttccgttaggaaatacggttatgttgacattatggttactgtgcttgtggttttgcaataaacatgtattgaaagca

SEQ ID NO: 95290 - DNA, 423 bp, Homo Sapiens
gcgagttggtaaccagggggaactcacttctccagcgcgcgggatccgctggcgactgacaaaatggctgctgcaccaccggaagtgacgcaaggcaagggcggggactgagccctgattggagcgcactctcgttttctggcttgatggagccgatccagtgacgtcaggaatgcgggtggacattttggaagcgggtaggacccttcactgcagttcgagggagtctttaagcagacatcttaagtcctggcagtttctcttttcatttttcccttttccacgctttctaaggagccacgtgtagggggagctggtggacagttgagagttcagccgaaacatccagagggttaggagtccgtttttacgtttgagactcccaacatcataaaagcatattttcaggcttctggaaaaaaa

SEQ ID NO: 95291 - DNA, 1103 bp, Homo Sapiens
attatatgagccaatttttattattagaatcaaccatttatgtttcaatttaatagagccaaaaagaaaaggaaggataccttgatttttttagagattctgaggggctcagaaacagatcattggaggatttgaacaacaatcacaaaatgacataaaataaagatggtgttttacagttacaccacgcagaagccaagatatattatatgtggttacagaagtaaaatgcaaaaaatacaaactacagctcccgctgataggaataaatacttaaatgtcagcctccattttgaagacatatttctgttttctccaaatgaagaaccgatgggcaaatgtttgtgctctgtaattttccagctggatttttaaaacagaaagcagtaccaggctcttttataatgaaaggcaaagaggctttcagaaaaagagatcttctaaacagagaccttacagattcaatttactaaagagatctttcagaaatttaactatacaaattcgcgctataatccaaaagagttttggagtaccagtttttgaaatccaccatttctttccaacaagttaaatgtgatactctcaattctttttgtttttaactttaatacacaagaattgaaagatcctgcattatgtttataaaaggaactaactggagtacaacggcaactacacaaaaaagatctaactatatttctgattcctattcatgttagtagggttttggtatacactaatactcagacttaagatatactaaacacctagaaatctaataaaacagtacagttacaggtcttatttaactctcattaatcaggaactgaaattattatgtggaaaagataaactcataatgaatggaatcaatatcactataaaatccacaatagaatcattccaattaaattaattttctattcgcattgctaatgcaattccttttcatctcttaattcatatttccaagtcaatttactactaaggaagtatttcaactcaagccctccagtcttcaatcttactaatagtaaaaagttacctatggatttccacttaaacaaacaaaaaaaattgaaagatgttaattaagccat

SEQ ID NO: 95292 - DNA, 491 bp, Homo Sapiens; identical to SEQ ID NO: 58916

SEQ ID NO: 95293 - DNA, 441 bp, Homo Sapiens
tttcagttaaaatttaatgaacttagtgtggaccagcaagaaaacagagatcgcctggggggctgcagacacagggggagtttgtatccactcacaggctcttctccacagatttcattggatgcttacaaaaaagattgaggcaagggtgtgggtactgagaaagtgtcccttactgttccccctggaggagagggacagtagatccttttggaaagacacgaagccctgtctgagtccttcttcccttctttgctcctatgagataagagccttaaaccaaggtgacactggagatcggtgtaaggcgcaagaacgtggaggcagaccagctcagatgcagcgtaaaaggaagaccaaaaaagctgaaggtcgaacagacactgaggaaaacatcctctggcaaaccagccactaccctaacacagttcgaagctggtg

SEQ ID NO: 95294 - DNA, 348 bp, Homo Sapiens
gcacgaggatcagtcataagagttgtatgaaagggagcagagatcaggagcacctaacctagtggaggggatcaggaaggcgtcctgaaggaagtgacatttaagctaagggctgatcggcaagcagacgttagcagttataagtgattgccaaaataactaataaaagcagtcatgaaatcactgtcagaaatatttgttgaaggcattaattcattcacattcatatacatatatggcctactgtttgccaggaagcatcagagcagtgaatgaaacaactccctgcttacaaagagatgccagagactggatatgaacaaacctaagcctaatcttttttaaaaa

SEQ ID NO: 95295 - DNA, 586 bp, Homo Sapiens
ttgataagatcagtggaagtgtttacatgtgcaaacatgttttataacaaaagaagaaggaaatagtcatgacagttacagtcctcatttctgcagctggttcacgtggtcgtagctggtattgatgaccaccttcttctactacccattctgtattccctttgccttcaacaagcacctcagcaggccatggatattcacctggaggagtgacccaaaccttcattcctgaaaagtctgagccatatggagtcatacctggattgggctgttgtagcttaccattgaccttaatcacagggcatggtaatactaagagacaccctaatgaatatcatgtataccatgcatactcttccttacctctgctgtggagtagtagactgatttcatcttgatagtctgggtcagtcatcccaactaacactgtaactcccctttctagcctgttgacttaaatgtaggaggagcccaaactgtccaggtggcaatctttacttccagttttatggatcattggtgcatctcctggtggcagcattccttcctcctgaactaagaatgccaggccagcagaacataaagt

SEQ ID NO: 95296 - DNA, 670 bp, Homo Sapiens
gccggcagagccgccgagacgccgaagagcccgccgcccgcgcgaggtgtagacggggcactgccttcagagcaggtcctgccagcctcgctggagaggatgccctcgtgtccgtgatgggctgtgggacaagcaaggtccttcccgagccacccaaggatgtccagctggatctggtcaagaaggtggagcccttcagtggcactaagagtgacgtgtacaagcacttcatcacagaggtggacagtgttggccctgtcaaagccgggttcccagcagcaagtcagtatgcacacccctgccccggtcccccgactgctggccacacggagcctccctcagaaccaccacgcagggccagggtagctaagtacagggccaagtttgacccacgtgttacagctaagtatgacatcaaggccctaattggccgaggcagcttcagccgagtggtacgtgtagagcaccgggcaacccggcagccgtatgccatcaagatgattgagaccaagtaccgggaggggcgggaggtgtgtgagtcggagctgcgtgtgctgcgtcgggtgcgtcatgccaacatcatccagctggtggaggtgttcgagacacaggagcgggtgtacatggtgatggagctggccactggtggagagctctttgaccgcatcat

SEQ ID NO: 95297 - DNA, 625 bp, Homo Sapiens
ctgatagctttaacccagcgcagacatttatgagcctcgccacagcagggtcactcagagggctatgtggggcttggtgtcacaggtccaggagtccccctctggagaaccccaccccacactctcctggggacccagggcaggcagcgcctccagaaccccagggcctgcccctgtggtctcccatctcctagctgcagctcagagagccgggctgacctcagaccccggcctggccactcaggctggggctggtcctctgctctcaggcaccaccgtggactctgccgtctttgaggacctttgtcctggtcactgatctggccactgcacctctccacaaaggactgggtttggggctaagggaggcaggggcgcttctgacagggcctgagggggctgcaccctttcctccgtcctcccccagccaaggcacgttctgagaatccccagcatctgcggggcatggctccagcagctccttggccgcggggccccgtctttcctagtggggcctccaatctccagatcttccccatcagccagggccgccctccagcagcggaggaggaactgaccgctgttccctgaccccctgcaccacccacagacgcgatgcggccgc

SEQ ID NO: 95298 - DNA, 579 bp, Homo Sapiens
gactctagcaggatccctgcaggagagagaactggagatcgaaagaccatactggtgcaaatgatacaaatcaaaaacattaaagtgttctactttactggtggtaggggacaattcgcctgcagttgaggctgtggtcgaatgcaattcccgcctgaaccctataaatacaactttgctaaagatggcggactgtgggggactgccccaggtagttcagcctgggaagctcaccgaggccttcaagtactttttgcagggaatgggctacataccatctgccagcatgactcggctcgcccgatcacgaacccactcaacctcgagtagcctcggctctggagaaagtcccttcagccggtctgtcaccagcaatcagtcagatggaactcaagaatcctgtgagtcccctgatgtcctggacagacaccagaccatggaggtgtcctgctaagcagatgctcctcccctggaccattgcaagtccatccttcaaatgaccactccataatataacatttcatccagtaaactggcctctactatctttaactcatgcatggccactgaacctcaaaa

SEQ ID NO: 95299 - DNA, 677 bp, Homo Sapiens
tttctactgtgatcctttactgggcactagggatacagtaatgaatacacaatttctaccacaggagctcatggtctaataggaagatatacatgagaactgttatacaaaggggcaagtgttattacagagacaggaatctgaagaactaacatttgaactgtgcatttagaaatttgtaggtggaagaggttggagtgtacacggggtactaagagcaaaggcaagggggtggaaagggcatgccaggtctgaggaggaagaagcatagctaattgtaaactggtagcacacagattgttctttctggcctgtacagtgttctgtaaaaatttggaatttgttgctaacattttaaaaccaggaaacttcacatagaaaatctgaatctttagcttctcttgtcaatatggattatctagcagtactgagctggatttgcaaggcattctgcagactcaagctgagatgccactttagaaagggcaagtcatccttctcaccattccttagtgccttcttgatactgtcgcaagtgtcagctgccatttaccatcacacatggcctgttgctcttcttctactggagaagagaaatagttctcaatatttacatcttatcaaaagtggaaaagtgagtgagtgatggactaaaccttgtgttccaaaagaaaaaa

SEQ ID NO: 95300 - DNA, 455 bp, Homo Sapiens
tactatttatcttatattgaggtttttattataaaatgagtacatttataacatagaaaatatattttaagaaatgtaataaccattattaagcctttctggtacatattctttctgtttttcttaatgccatctttatactttttatcatacagatgttagactatatgagaattgtccctgtgtttaaaaatagacaacaggatttagatattcattcattcattcaatgatcaataagttaatatttaagcatttgttcgttcgtaaactgccacgccatgttaggtggcagagattgagaatgggaaggtttttgccctcagggagttcaaggtctggcagggaagagggatgggtcaataagtaaatactgtataatggaatatggttgctactgtagaggtaggttcagggaacattagaaacaggaaagcgggcacaaaccccagaca

SEQ ID NO: 95301 - DNA, 574 bp, Homo Sapiens
agacaaaaacatttgatctgttaatcatcagtagctgtggtcatctctctttcttaaactcttgggcaatgggtggaaatcagagaccaacttcaaatttaatgtgtaaaaaacaaatagttcagctgcttctattggtaagaaaattcaacttcctaccagccttagaaaggtctctttaaacaatttctttccccctagggttacctagctggtccatacaggttttatcacctcactgcaaggaggaagttgaatattctgttccccacggggatctggcttaatccctagttgctcatatagttggtatcagcatagcaatattttgcataatgctttatttttctcaaatgactattgcatagatgatcttgatatttgcaacagcctagtggatttggtagggtcctgaatcatctctataaggcaaacaaggaaattgtaacacaaagaaataaacatattgaatataattgctattctgtaagacatacagtctgtgtaagatgtatcttatttacagagacatttttgaaaattaaaatattaaatactttttgttatatagaaa

SEQ ID NO: 95302 - DNA, 496 bp, Homo Sapiens
aaaaaaattacgtttctgagtcctgaaaaattattaataaatatttgttatatagtttctttgaacatgtggtcactctgcctgcaaacgtaaagacttttaattttcatagagtgaaatatacacatattcctctgaagataaaccttaggtgtaagaaaattatgaagtgagtgtttggtaaatatgcatttgtacatattttcagaagaaaacacaattattggaacaaaataagtttttaggtgattaatggaaaactaaacaccttgaatatgctgaaagcaaatgtatactttctgctttgtatggaatttattaatataaaattttatggcttatggctcggattctccccagaatccgtgtattaaagcacaggcaactttgtctccagaaataacactcttgagtacaacaataaaagccctcttcaaacacactcaaaaaattatttttaacgcttattttaataaaaatttaaccaaaattgaaa

SEQ ID NO: 95303 - DNA, 326 bp, Homo Sapiens
ccggcacctcacgcaactctttgtaagcgcagtccgcgaactggtgagcgtacttgtccacgcaggcgcacggctccgggcatgatccggccactcctagaagcgcccagaccaaccacagggcccgaagggggaacatcgcggctcctgcagatggaagccaggtgaagaagaaagaaggtgactcactgaaccccagcttacctcccctatcaagctgtgcctccgcaagcccgtttagcactagttccagggctccggtaacctcctctatggccaggagcctctctgaagtgaaggtcaataaaaatctcgaggttcaacgg

SEQ ID NO: 95304 - DNA, 437 bp, Homo Sapiens
tttggcttgcctgacaccttacagaggacttaatgcaatgcctattcgggcaataaatgaatacttgatgcattcatacaggcaagaatcccagcatcccagagaagctctgtctgcgctgcaaagccatggctgcagacatcagggaagctggtgcagttctagtctcgcctcctcgatttccctgccagcagtcttcctctctctcattcttctggccctctgcagaaccagggaggccaactgacttccacccatatggctttggtgcaggagcagaccaaaggtatctcccaattgaaggctaagaagtcctttgggctaatgtttagtgtcacgaagttcctttaaaaagagaggaaagcataccagaagtccctatggattagttaaagtagttccattcagggcacccatctgcaaacccagaccttctg

SEQ ID NO: 95305 - DNA, 552 bp, Homo Sapiens
  misc_feature (440)..(440): n is a, c, g, or t
gcggccgctggagcagcgtcagaatgggagaacagcccatcttcaccccccgagcgcgggtcttccagattgaccccaacaccaagaagaactggatgcctgcgagcaagcaggcggtcaccgtttcctacttctatgatgtcacaaggaacagctatcggatcatcagtgtggacggagccaaggtgatcataaacagcacaatcacaccgaatatgaccttcaccaaaacgtcacagaagtttgggcagtgggccgacagcagagccaacacagtgtttggtttggggttttcctctgagcagcagctgacaaagtttgcagagaaattccaggaggtgaaagaagctgccaagatagccaaagacaagacgcaggagaaaatcgagacctcaagtaatcattccaagcttccagtgtcaacgggacggacgatgaanaggcctctacgcccggtccagccacacacacctggagtctggagatgaccgggctcgcacagaattgatgagctggagaaccttgcctgggagatcacagagaggagggaga

SEQ ID NO: 95306 - DNA, 596 bp, Homo Sapiens
  misc_feature (407)..(407): n is a, c, g, or t
  misc_feature (453)..(453): n is a, c, g, or t
  misc_feature (581)..(581): n is a, c, g, or t
ggtatcaactctattttattaacagttgatgtaactggagtacacagaaaagggaaaggcagttatctttataaaatcagctttgttgaggtataacttatatgcaaaaaatccatcaacttcaagggtttgataagtgcgaacaaatatgtccagtcaagcaaccaacactacaatcaagacacaaaacatttccataacccaaaaaagctctctgatgttcccttgtaatcaatcccgctcccacacctttaaagctggacaaccactaatcacagtcaacatttaataaacattacacattgtacgaattcatgatgtattattaaatctaccttctaaagttgtaagaatagattccatcgtccccacattatggatgcgaaaactcactcaggttttctcanacaattatcttagacaattctacagctagtaagtggcagagacagnctcaaatccagatttacccaactccaacattaaaaattgagttttcacctaaaaatactgaatttcggggcttcttttgaaaaaaaattagtatctgtgtacatctatttctgcatacatacttactnagctggaatctgtgg

SEQ ID NO: 95307 - DNA, 360 bp, Homo Sapiens
tttgcgcatgtggatgacctggtggcactgggacagagagccaggtcacacggcctctcccaccaacccccagtggtgccaagtcaaatttattgttttttaagcacaaacttcagtgggaggggaagggagaacggaaccccacaccccctaggcacctgccatcgggtgtcctttggaggaagccacctcccctcctgcccgaggagaggctgctaggcagctccccaaggctgactccagccctttcggaggcccccatcaggaggccttggaaaagccgccctgcatctgggcctgacgtaacgcacgcgggtccagggctgctgagcagacagctgaggacccggctccagccct

SEQ ID NO: 95308 - DNA, 328 bp, Homo Sapiens
tttaactttgtaatgctaaaaagtagcttttatgtttccttccttatgatagcaaagcagccaaagtgagaggctgcagggagcagggcaaggaggtgactgtctccatcagcagcccctggggtcaccttagggttctcagggaaagcaagagagggttgcaacagggccaacaggtttcaagtggggtggaagggtccagaccagcacagctctggtgcctggaggattcagtccagggctgagtgtttcaaggcttcttattccttaaaaccaaagtaacttttaaaaaaaaggctttttttgattgtagtttttagacatggta

SEQ ID NO: 95309 - DNA, 504 bp, Homo Sapiens
aaaacattggacagagcggttacatagttgacaaagactaagcaaaggttactcagccttatgttgttctagtgtcaacacagatagaaggaaaaatgtttcctccattgttgctgacgtagataaagaatattcccttcaatatgctaacccctaggtggcttttcattcagaaggttcctaataatttgatctttaccctgaaatcaaacacatggaaaagagatggaagaatgtcctggagggattaagtgaagaaacagaccaggattcatttatgaaatatcctcagtgttatttcaattcagctccattcacattttattcttttgtgtctctgcactaatgccctccatattctccattctcctgccttagctagcaccttctcgatcttccctctacaaaactccttcagttcacattgcatttgtgctctatcctgggatatgtgttttctttcccatttcctcagttgctatgtattaaaaattaggactttta

SEQ ID NO: 95310 - DNA, 870 bp, Homo Sapiens
  misc_feature (60)..(60): n is a, c, g, or t
  misc_feature (105)..(105): n is a, c, g, or t
  misc_feature (110)..(110): n is a, c, g, or t
  misc_feature (140)..(141): n is a, c, g, or t
  misc_feature (144)..(144): n is a, c, g, or t
  misc_feature (167)..(167): n is a, c, g, or t
  misc_feature (172)..(172): n is a, c, g, or t
  misc_feature (174)..(174): n is a, c, g, or t
  misc_feature (263)..(263): n is a, c, g, or t
  misc_feature (284)..(285): n is a, c, g, or t
  misc_feature (311)..(311): n is a, c, g, or t
  misc_feature (368)..(368): n is a, c, g, or t
  misc_feature (390)..(390): n is a, c, g, or t
ggaacacgaaacaaattgtggggaccgttaaaacccctgggagagaattttgcggttggntaaagtgtgaggctcattgagaactgagaaggaaagagagaagtntgcanccttagaaatcagcttcggcaacatgaacnnctnccggaagattttgagaagagaancaagncnttggagagaaaagtcaaggaatttgtcaatccagtgaagaaacccaagaccgaggcttaaaggttcccaggagtactgcaggaacagcnccagagaggcccaactctgcnncctttctcagtgctatctgatgacgnggaaacaaaattattctctgagagggaaaggacatttgagggaaacatcaaatttcnccataaataaatgaatggagtntgcaggaaggtgagggtgagcagagatgtgtgtggacatctctgaccatccatcgctgtattcaaatggattgttctattccattctggtctcaggcatgaccacgtccagtgaagacatttgaggcagcacatctcaggacccaggcaatagactggccccaactcaggctggactaaggtgtgattaattctttgttttttgtgtggaacagctcaccttgtcagacagcctcagggcatctctgagacacaggggcagaaaatgacattcatcttttgagtcctcatccatggagtgctgtgtttggggggctgcatctgctgaagcgagaaccccattctgccaccccaccaggatgcccattctccaggacttctccaacttactattagactaaaccagaacaagcaacaaactgtatttatgcaagcaaaattgatgagaaaattatattcaaataaagcaaaaattaaaaaa

SEQ ID NO: 95311 - DNA, 541 bp, Homo Sapiens
atcatcttctacctggccggctctaagggggccctggctggggtcttcatggctgtcgccaccaactgctgcctgcgttgtgctaaagctgccccgtcaggccaaggcactgagggcggagccagtgacactgaggacgctgaggctgaaggggactctgagcccctgcctgttgttgcagaggaacccggcaacctggaggccctggaggtgctcagcgcccggggcgagcccacagaaccagaaatagaggcgaggccgaggctggctgccgagtctgtataactcagggtgctctgggtggggtggcccagtgacttgggaacacagcttcttgtctcagagagcctggtacgctgggaggctggtctggggtggtcactcccggggtccacgtctgggctccagttgatcccctgggtgtctgggaactgcctccctcatctgtgccccaagttccgccaggccctgccccatcgccagtgaagctgctatggagcaacaggaaactggtgataaagctcagctgaacgacaaaaaa

SEQ ID NO: 95312 - DNA, 442 bp, Homo Sapiens
tctggggagaagaaatgggttttggccccaaatccttctgctgcatttttcccctatccctgggaagccatgagacctcaaacctgtgttcccaaggaggcgagctgctgttcccaggtgatgatatgatgtgcttggggaaagtaagtggctgccagacatggctgagagctgttgtcactgccgtcaagtgcatgtctccaagccatatcacacggcgtccctcgatgtgaggccacatggcaagtgggccgtggatctccctctgccctttgcaagcacgtaagacagcagattttgcagataccttgtggcgcaggggaatttcctttggccaggtctgaagaaataaagcagcaggcaccgagaacaaaaccaaggctttcaaaagacaaggagccaaaaaacttactcaaaataaaagtagttttaaaatgtcaaa

SEQ ID NO: 95313 - DNA, 415 bp, Homo Sapiens
aatgtctcagcatttcaaaatattaattataacagtagtcaattagaaatgtttctggcaactttctaactctgaaagtgttttctaataataactattggtgatattaataaagaatcttgggaaaaaggaacaactatataaaattatatttctcaatacacattactattatctcttatgtctgttgcatatttttatttgtttacttagtgccaaaatcctggaactgtgcttgtgggacatgtacaaagaaagtgtctctcgtctctgaggtctttcctgattcatcaaaatgtattaggaaagaaaagtgactgtcttggcaaagaaccacagtattttgctgcatttgtttgtttttattaacacaactcatatttgaaataaaaacacattttataccataaaaaaa

SEQ ID NO: 95314 - DNA, 542 bp, Homo Sapiens
  misc_feature (71)..(112): n is a, c, g, or t
  misc_feature (319)..(332): n is a, c, g, or t
  misc_feature (338)..(350): n is a, c, g, or t
cacattttgccaggtcaggcattttgctagtaagcaggatgcccccaactctccctgccatggaggattcnnnnnnnnnnnnnnnnnnnnnnnnnnnnnnnnnnnnnnnnnnaatgtggggaaggagcttgctctgacgtcaccctcctctcccctgactcctgtcctgagagctgtggatgccgcctcctgccctgcctacccctgaaacgtggggaatgggggccccaggacagcatcaggacttttgagtccagcttgccagcatggttccaactcgaggcagcgcctcttggtccccatttctgtatagcaggcnnnnnnnnnnnnnncgaggnnnnnnnnnnnnngcttaatcaaactccattcccaaatgcactccatctctggctctgagggcgctccctcctctcagccgggcagcctggcctctcctgcccagacctgcggtcccagcatcccccagagccagggaacaggcccagcgggagggggttttatgttttgtttcaaacagaaaacacaaccttatttttctttac

SEQ ID NO: 95315 - DNA, 181 bp, Homo Sapiens
cgagactctgtctgaagaaaaaataaagtaaatttgtttctgtattaaagtactgtaaaaatgtgatttgggagacccttggtcagattcctttttatcagcctgaatgccctgtaaattgtgatgtctactgtacttaaataaatcactttaaggcccatcggacctttcctggaagaaa

SEQ ID NO: 95316 - DNA, 684 bp, Homo Sapiens
atgaaccaccgtgcctggccaaagatgtaatttaaaatagttagaagggacttggcatgggccagctccgtgcatggcattttcacccccagagcttcctaatcctgttttcacacaggaagtttctaggtctttctagaacagctagaaatagtagctgactcccgcccaaggcccaaccttcaaaccctgagctcttcaggctgcatcctctggtgagctatagaggagaacgtggctcctaaactctagccatcctgtgggaggaaatagacttctttgggctgtggcttgcagaacaaactacactttttttccctctattgtttaaattttatttaataatttgtgtgtttttctgtctttattttctgtatttcacgtgttccttcactccctagaaactgcactttctttgaaaccataggtaatgaatcttactaggagaggcatggggatagagacagttctgggagtgtgacctgtaagcctcctgtagggcagtgccaggccttgattgcccacgttctctccgttccttcttccttcatacatttgatcacacagcctacacccagccccgagtgtgcatcacggtaaaagagctgagggctctcttcagggagcagcccatttaggtctcttttgttgttgttagggagaatacacatctttcttggaaaa

SEQ ID NO: 95317 - DNA, 750 bp, Homo Sapiens
gctcaccccagctcacctgcattctctccttcctgtaaggggtttgagtgcatggtggctgagtaaatgagccaccccctttgtgaggagtcccatgaaggggccaaggcaattctcccatctcagttccactggtcatgatcagttgtatggccacacttaactaattgtagggaaggttgtgaaatacagcacccatgtggaggagaagacagaattttgttgagttacttatagtctgccatacaaagaccatttgaagaagctctgaaagcccagagtcctcccatcccaatgggtatgccagcttgtacatgtgtcactctatggtatctgttcatcctagactcacattgcacaacgtcctttgattcttcccttctgtgaggcttgtagtctaaatgtttgcaagcatcactttgcatctgtccttgagagaaccttattttctgtgtttctgaaccttcgactgttttattaaagttacctggaatcctgattacaacaccctcaaataactactctcttaatatccattgatgccaccttcccacttcatggatctcctgtagagaacattattcaaggatttgatgatgaaaaagaggctaaatattactggtaggagaattaacttttatggctcatgtttcttatattcctgacctgaaactgaattcacttatggttgtgtgatatagatcttatttgtacaagtaattaaacaataaattatgctaagcaataaaa

SEQ ID NO: 95318 - DNA, 575 bp, Homo Sapiens
  misc_feature (42)..(92): n is a, c, g, or t
atgattaacgtcaaacatctggcaaggtcggaatgattttgnnnnnnnnnnnnnnnnnnnnnnnnnnnnnnnnnnnnnnnnnnnnnnnnnnnaaattcttggcctcaagcgatcctcctgcctcaccctcctgaaaggactgggattacaggcgtgagccaccatgcccagcctccttttgctgagttttaacaaatacagtagtgtaaccgaagatgccatcaagacaaatagaacacgtccctcaccccagaaaattctcttatgcccctttccattctatgtccactgctaccatgccacctgtgctgatttctccactatgcttccgcctgttctaagagttcatactaatggatcattgggtacatgtccttgtgtaaggcgtctttcccttagcgtcatgtttctggagattcttctgtgttgtttcatgtctcaggagtttgttcttttgattgccaagcagtccagtgtaaacacaccggtgtgtttatctgatgtattcatggacacttggaactgtgtctggctattggcgatcacgaataaagatgctgttggctttctttttg

SEQ ID NO: 95319 - DNA, 323 bp, Homo Sapiens
taggtccttgctttatttcaactaggtcccctgatatctcagtctgatcaaaaagtcctcatcacccatccttgatatctgatcaccctggcctgtcttcagcaacaatgctgtcaggtcagtttagcaagaatccccctacccttgagatcttctctgagttatttattttccatccaataaccgttcatccttctcattggctgtaagtccccaggtgtctttactgtattcagagttgagcttgacaaagctcccctattgtgattgtgttggcacccattacaataaccccgaaataaaccctgtcttactgttttaaa

SEQ ID NO: 95320 - DNA, 486 bp, Homo Sapiens
aaactgctgagtagtgttccattctatgaatatatcattattctgttgatgaacatttgggttgtttccaggttggggatattattataaatatgaacattttaaaaagcagctttgaatattgttttgtaagtctttgtgtggatgcatattttcatttttcttgagcaaataccttagatgatagggtagaagagatcatagggtaagtatatatttaacttttaaaaataactgcctgttttccaaagtggttattccatatttcattcctgctagcaatgaatgaaagagttccaattcctctacatgttcatcaagacttagtgttatcagtctatttaatttgagctattctagggtggtatatagtggtgtttcattgtgattttaatttgattttctgatgaggcataatgggcacattttcaggtgccaactgactatttagacttcttcttttgtgaaacatcttttcaattcttt

SEQ ID NO: 95321 - DNA, 565 bp, Homo Sapiens
  misc_feature (531)..(531): n is a, c, g, or t
taatgcttccattaaggaaaaacaggcattatcacttacaatctagatacaacgaatcttttcaatcttttatatttaagtcatcttagcaaaactttgcagaggaataattaaattgtaaaaaaacttcactctaaattttcattttaatgataacccaaaactattcctggacttgaaggcatctatacctgaaatgggtaacatcttttggatgcaactaactgctcatctactgcttttggtgaacttggaacatatttatcttataaatattgatttcagatttcaaaaaatatttctaacaggcgctagcttattaatctagttcttctttcttgcatttgttctgtcaaattgcaacacttctaaaaccactgatggctcccaattgtgttgaaaagagaacagttatcttctttggtccatgactgcaaaacattttcaattttagatttataaacaccaattacaatgatgaatccaatgaatttttctacttctgcataatctatttccttttaatcactnttatattcataccagccttcagcatttctccact

SEQ ID NO: 95322 - DNA, 564 bp, Homo Sapiens
ttagatgctgaataaatattcggtcacagtgtatttctattttgaggaagaaggaaagattgtgttggtgttcaaacatgaagatgtgcttacagtgggaatgcgatactatcttcaatagacaatcttttggcaatgtctagagactgtactttctctacataaatgttttcttttgcttttaggcaagaaagcatgcaaactctgaagcacagtgtaaaacacttgaagagatacgagaggaaaactttgtgaatctgaattctgcgtgctattgaagcatggttcttttcaaactcatggcaaatatacctcagaattaaactctataattaaggaagaaaccctcattctccctgtaataactgaatgcctaagcacattaaaaggcctaaataatctggtgttttcccataagcattctgtaaagtttttcttaagctatgcggcagttataccctttgcttcctttaaaacaatatgaatgagcattttaaagagataaatggaatttataagctatcaacttctcgtcattaaaaaataattaaagctgatttaaaa

SEQ ID NO: 95323 - DNA, 568 bp, Homo Sapiens
ccatcaaggccagaggatggaaccaagataacataaaataggtgctcctttgtgataatgggctatttgtatctctgagggcttccacacaggatggccattcaagaagcttctgctctgcctttcattacagtctatctttagtcctcctaaaccttcagctataatctctatgcaatcaacttaaatatatgtttgtagtattgtccctttctcccaaattccatgtaaaacacttgcctgaattgaattgtttccacaaagttgttttcccctgtggactttgtttatatcagtagtttttattttcccaattttccaaattcaagagtgataattataaatagttgtgttcttgtttgttatctttctcactagaatgtatactctaagaaggcaagaaccttgcttgctttattcattgttgtattcctagcttctgttacagtgtctggcacaagagtaagtgctcaataaaaatttaaaatccacgtgtgaataaatgtgattaccatgtgccctaccgtatattgagaaaaataagaatacatgtgaaaagcacgagatt

SEQ ID NO: 95324 - DNA, 518 bp, Homo Sapiens
gcggccgcggctgtggcagggatcgggaaggcagtcgttgggattggtgtcgcagagctcgccctcccagccgctggggcagaagcagcggaaggcgtccacctcatcgatgcatgtgcccccattgcggcagggctggcccaggcagtcgtcaatgttctcatggcagtaggtgccagtaaagccactgtcacagatgcaggaaaagttgccccctggctggctgacgcagcgtccatgggggccacacacgccggaggctgctgtgccaggcatcccaagcccccgcgtctgacccgcagccatcgatcactatggcaggccccgccagggcacggctcgcggggcacggagcagttcttgccaccaaagtcatcagggcaggcgcagtaatagtcaccctccaggttatagcagcgagcgccgttccggcaggggcttggctcacaaaggtcgacatccacctcacagagaggcccggagaagccctgggggcagtggcagtggaagccgtcggc

SEQ ID NO: 95325 - DNA, 854 bp, Homo Sapiens
  misc_feature (249)..(249): n is a, c, g, or t
aattcggaacgagggtaagttagtaacaggtctaagccagtagcaaccccctaatgatttaggccacacatggatgtgataagtcaggaaaaaggagcaagccaagatagaggacagtgagctgcccatggcatacaagcaactcacataacatctgggtaatgactatatgaagatgactttactccacctggagcatctgattatacctgggctctttgcagtacatgttaatgacccagaccacanacagagtatcgtggccaagctgttcttgcactgaattataaaagagacttgagggtttgtgcaagctgtttggcaagacaaggttggcttggagtaagaacttctggaaatatcaggaaatgaactcagaagagaagaagactaggctgcctgaagagatctcaagaataatcgtagaacgtgctgagaattcaacattctgaggtataatatctcagttagcctatgaagagaatgttgtggatctccctccaactcacttcacaagtatttagattcaaggctgggcacaggaagcagatggcaggtacaattgctgagagttgcaatctggtctcagcaaaactggtatcacagggacataattcacttatgctgacgtgcaagtgcttttgcgaaaacattgtcgtgtagcagaaagagcatgggctttggagtcacactgacctaggttgaagtcttagatgagttctcactttagttttctttctttaagatgtagataactcctaccttgcaccatgatttgaggactaaataaggaaaataatattaagttctatagcaaccctgaaacacacacattaaaagtatgtcttttcaaa

SEQ ID NO: 95326 - DNA, 474 bp, Homo Sapiens
ataaaagagagagagaatcagacctgggtggaactctcctgctcctcaggaactatgggagcctcagactcattgtaattcaagctttccgagtcaagtgattgacaactgaagagacacgtggctagggttccactggagaattgaaaaggactcttgagccctcctggaatggagctgtataactgtgcagagactttatccatgccaatagttgctgtccccttccaggggtcaccttgagaggcatgacagctgttccacaggggctatcccttctcagaaaacttctcttctgagcctctttaacagctttctccagaaccagtgtctgaaccaccctggaaattctgccttattatttcttactcaaacatgtttagagtggatagaaaattatgcagcttgcacacccatcgtctttaaccccaaatttcctttggctattaaaaaagtggtggcaaaaggcatcct

SEQ ID NO: 95327 - DNA, 787 bp, Homo Sapiens
  misc_feature (636)..(636): n is a, c, g, or t
gaaaatccctcttcgttccgtcaagggacatagggaggagggcccgcactgtgtgaggctgaaaagggagctgccggcgctttgtgcaatgtgctgagctctgtcctgcgcagaggtcccagacagccggctcactactgcctggcctgggaagctcaggcctctggatctctttcctcctgtctctcacgcgcagagctccgggctcttcgccctgcccgccacgaaagggaggaggcgcaggccggctgcctttccaaaagattctgtctcccttcttcccaagaagcaggcctctccgcgcgcgagaacagaggtgggaggacgggagtttgcaggcgcaaagaacaggagtttaagcagactatttccaccaggggaaataagaagcacaaagagcgcctgctgcagctctttgcgctcttgcccaaagctaagcttcctctgggctgtggggagactcctctggtccccgttccatctacccagcccggcccctctggggctcagcgcttgggtttagccctcccctatgtccatgactagccccgatcacagtctcttaagcctctcccggcccccggctcccaggccctgcggagccaagcacttggaacaccaggtaccgcgcgcggnggacccagctctgccatgccgcagatagccgcagtgccaaccctgtttaaatggtttggatctgcttggatggccccagcccctcttgcttcgatctttggggaagttccctagggaaaggagaataaccaaagtatttctgcccagaggc

SEQ ID NO: 95328 - DNA, 417 bp, Homo Sapiens
agctccaaggacatgtcttaatgcttattgtgaagagtaaaactgtatttgtgggagcaattaacatccgactctgtagtgtcccactcgataaagaaaaatggtatccattaggaaacagtataatttgaccattgctatgaacatatgcattattcattaactacttgtatttttttcacttccgggcctctgaatcacataagtaaggcatctttgttgtcaaagacagcacagggtattaaggacacagaaaaaaaatcagaattagtcttttgtgttgtttattttctacctgtgctttcattgttttttcataatcttttctccttcagtggagtactgattgcatgaaatttgatgtgtaaaataataaaagacctttattaaatcattttaatatattttaaattaaaa

SEQ ID NO: 95329 - DNA, 849 bp, Homo Sapiens
gctgcaggccgccctgaagccctacctgggctcacaaggggatgtgcacctgtgagctctgcctgctccaggcagcctctgcacagctgcagctcaaacacctctgcatcctcctcctggatgggcctcttccacccaggtcatccccagaggccagggacaccaattgaactccctcctttccttattctttccttattttgtcacctacccaaggtcctggagacttgactttcagtgtcattggccagcagtctgtcctaaagtcctctgtattcagaggccaagagactggcctaggcccggtaaggctccggggagctggcccagcctggcctgccagtcagtgttcctgtgacaggcacaaggtgagcacccagcccattcccatggaacccacttgctgtagtgacacacaggaagaggaagcaagggactgctattgaaggccctgtccacagctctgtggctagaggcaggtcaccggcctcacagagcctatggtgggagtgagacaaatgggttgacaggtgcccacatggttgccaggcacatttcagagagcaggtgtatgctgctcaggcagccaaagggcctcacctggccaaggtgggccacaaggcagcccagaggaggtggcttcaaaccaagtcctggaggacaagcaggagccagctctaactctattatgggtgtgaagatgggctgtctccaatggcgttattcggcaggcactctgaagtgcttccccaaaccctgttgtccactttcctggacttgagtaatggtgctactagtggctttatttgatcttcattaaatttgggaattgttcttaccaactcaaaa

SEQ ID NO: 95330 - DNA, 523 bp, Homo Sapiens
  misc_feature (189)..(197): n is a, c, g, or t
ctaagagggaggtgggaaacaaatgccagtgggcaagggcgaaacagggagacaatttcagcaaccatttcagtgccctaagaaggagatggcgaggagtgaatgatcttcgtggcctggcaggaggagctcacattgttgacaattaacccaatccaagagacctgcataaatcaatcactacagggnnnnnnnnnttgttcttgatctacagtgacaaatgtgtagacaaggatgctgactgctatgctgtgaggaacccaagcagcccagtggggagatccaagtgttgtaaagaaccgaggcacctcaccaatagccagcatgggcttgctggtcacaagagtgtgccatcttggaagcagatcctccagccccagtccagtcttcagatgactgcagtcccaactgtcattcgagttcatgggagataataagccagaactacccagccacaagccactcttgcgttcctgacccacagaaactgtgtgagataataaatattagttgttgttttaaa

SEQ ID NO: 95331 - DNA, 867 bp, Homo Sapiens
cctacggagactaccggcctccggcgctgacgcccaacgcgggctctctgttcagcgcctcgcccctaccgccgctcctgccaccgcccttccccggagacccagctcacttcctatttagggactcatgggagcagacgttgcctgacggtctcagccagcctgaccctgtgtctgccgatgccctgctgaccttgccacccagcacgagttgcctctcccagcttgagtccgggagcatcgcccagcacaggggctcaagctgggggtcatccctggctggggctcagtcatactcgctgcatgctctggaagatctgcaccacactccggggtaccctaccccgcctccttaccccttcacccctttcatgacggtgtcaaatgacctaccgcccaaggtggggccactctccccagatgaggaagcagacaccggttccctccatgacccttccccttgggtgaaagaagatgggagtattgcctgggggtcatatgaatgccgcagagcttattgaggggagggccaaatgacttctgggtttttctttaacttgaggtgtattccaaagattgttttaggtgtgtcagcccattcaggactggattttcagaataagcctcaatgctgctctttgttagtggacgagggcatttatttgtaatcctctccactgtaaccccactgaaataaaacagaatgttaattaaatgtgtcagagaccgtattctagtaagataaccttacaatgtggtctttttggaactgttgtaacccattacgttctgaatcttctgttatctttgaagtatcatttttggcactgatttttcttaaattacattaaaaagtttatgcagatc

SEQ ID NO: 95332 - DNA, 422 bp, Homo Sapiens
cagagagattgacggattcattgaatatcaacaggaagaaacggtgggaaaagaatgacatcacgttgacaagcgcccatgtcccctcgcccctgagtccagctggtgaagcaccatgctttggctttccctcccgcggagcggtgccgtcctccctgggtctggtcggatcttcgggaagctggatccaggaaagcattccaggaggtagggccctggggctggtggactgtgggtcttggtccctcacagaatgactcaggggatcttagccgggctcgaactctcctctctggccattatggaattttcaggcccatcattggccagagacctaaattcagttcaaagtcagagaaagtttctctttggctgaaggacaagaagaggggaggctctgggtgccatgctagggaccagag

SEQ ID NO: 95333 - DNA, 1415 bp, Homo Sapiens
  misc_feature (1348)..(1348): n is a, c, g, or t
gctggaccggtccggaattccccggatctgcgcgccttctccagtccgcggtgccatggcccccgcccgtctgttcgcgctgctgctgctcttcgtaggcggagtcgccgagtcgatccgagagactgaggtcatcgacccccaggacctcctagaaggccgatacttctccggagccctaccagacgatgaggatgtagtggggcccgggcaggaatctgatgactttgagctgtctggctctggagatctggatgacttggaagactccatgatcggccctgaagttgtccatcccttggtgcctctagataaccatatccctgagagggcagggtctgggagccaagtccccaccgaacccaagaaactagaggagaatgaggttatccccaagagaatctcacccgttgaagagagtgaggatgtgtccaacaaggtgtcaatgtccagcactgtgcagggcagcaacatctttgagagaacggaggtcctggcagctctgattgtgggtggcatcgtgggcatcctctttgccgtcttcctgatcctactgctcatgtaccgtatgaagaagaaggatgaaggcagctatgacctgggcaagaaacccatctacaagaaagcccccaccaatgagttctacgcgtgaagcttgcttgtgggcactggcttggactttagcggggagggaagccaggggattttgaagggtggacattagggtagggtgaggtcaacctaatactgacttgtcagtatctccagctctgattacctttgaagtgttcagaagagacattgtcttctactgttctgccaggttcttcttgagctttgggcctcagttgccctggcagaaaaatggattcaacttggcctttctgaaggcaagactgggattggatcacttcttaaacttcaggttaagaatctaggtccgccctcaagcccatactgaccatgcctcatccagagctcctctgaagccagggggctaacggatgttgtgtggagtcctggctggaggtcctcccccagtggccttcctcccttcctttcacagccggtctctctgccaggaaatgggggaaggaactagaaccacctgcaccttgagatgtttctgtaaatgggtacttgtgatcacactacgggaatctctgtggtatatacctggggccattctaggctctttcaagtgacttttggaaatcaaccttttttatttgggggggaggatggggaaaagagctgagagtttatgctgaaatggatttatagaatatttgtaaatctatttttaatatttattcctttttttaactattcattcctttatacaaantatatatctctacctaaacaaaaatataaaaatccaaaatatcttcattctctcacacatttccaca

SEQ ID NO: 95334 - DNA, 523 bp, Homo Sapiens
cttctgtggaacataccactcccctctggtattcgtgggctcagccctgggtaagtcagctgcttagacagtcaaaacttacgcgtacttggctcctcaaagtcacattggggatgatggccatttgtcaagtgcctcactggcagctcagtttggagaagagcactatgtttaggcaagatgtgcctgtgtcaaatgcagttcatgttaatgtagcaaaagtcagtctagtagatttggcaaacttctaagagaataaacatcataacgtcatcaccactgaagttgtgggtcaatcatggaatgacttaaaccatataaattccttatcagcaaaatactttgaaatagtccgtgcttagaaatgagaggtgaggaggatgggaggagggaaaggagcagaaaaggtaactattgggtacttggcctaatacctggatgataaaataatacgtacaacaaacccctgtgacacatgtttacttacataataaacattcacatgtacccccaaacctaaaag

SEQ ID NO: 95335 - DNA, 499 bp, Homo Sapiens
ctcagagaaagctctgctatgtaaatgccagtgttaatggtatacttctccaatcttttaccttctctttattgagaccatgagcaggcaagtaactcagctatgttttatagaacctgtttctgtttgtgattccacttctttggctccctgcactccaaactcaaaatgagtgtcagcctcttagagcctcagaatttttagttgctcatatgctacacttgtcttctgtttggggtcatataatacatccctccatggcattcagaggaagtgatctacctttttcctttaagtctcctgaagtaactatgcaaccttccttgataactctgtaagagatacagtgtattgtagttccagaatatctcgtaccaggctgactctggctttctggctgagccttaaaggtaaatgggggtttgggagaaaccctttttcttagcccttgatatgttaaataaagaaattcagaaaatcctatattgcttataaaaaa

SEQ ID NO: 95336 - DNA, 1188 bp, Homo Sapiens
ctcggctctaccttgtctcgggagcggggtgagctgcagggtgaacgcggggagctacggggccggctggcgcggctggagctggagcgggcacagctggagatgcagagccagcagctgcgcgagtccaaccagcagctggacctgagcgcctgccggctgaccacgcagtgtgagctattgacacagctgcgaagtgcccaggaagaggagaaccggcagctgctggctgaagttcaggccctgagccgggagaacagggagctcctggagcgcagcctggagagtcgggaccacctgcaccgcgaacagcgggagtacctggaccagcttaatgccctgcgccgcgagaagcagaagctcgtggagaagatcatggaccaataccgcgtgctggagcctgtgcccctgccccggaccaaggtccccttccccggcacccatgcgccgggcccagagctccctctgcctgcgggatgagaccttggcaggcgggcagcggcggaaactcagctcaaggttcccggtggggcgaagctctgagtcattcagccctggggacacccctaggcaacgattccgacagcgccatccaggccccctgggggcgcccgtctcccacagcaaaggacctggtgtgggatgggagaactccgctgagaccctgcaggaacacgaaacagatgccaaccgagagggccctgaggtacaggaaccggagaaacgtcccctcaccccatccctcagccagtgacaccgtgggaacagcaggcttgggagtgcagccttctcggcactggagtgtcagcggaggccccaggcagcccaagagctcagggagccaggaaccccaaggggagtccttggacaaggaggcctggggccctgagatcctccacggtcagcgccggggcccggagatggagctgggacgagtgtgtggacaggggggatggctggcccccacgagcagctccaggctggagttctggttcttccagggtggctcccgctgaggcagcggtctctgggggatcccccagctgaaggaggctggcaggagttggcaagagaaccccctgccctgtccaggtgggaagctgagtcccagtgctgggggactgtggccggggctgatcttgagccttaactggacatgaggggcatgaaaataaagctgaactgcaa

SEQ ID NO: 95337 - DNA, 700 bp, Homo Sapiens
  misc_feature (142)..(154): n is a, c, g, or t
aaattacaactgtatttaattatatgggcaataagtaaaagaattgagagaagaaagtcatgcttattttatgacatccatgggatgacctcatttttgtcacgctagtttctcaaattataaacttgtgcatttattaggnnnnnnnnnnnnnggttcatcactcaaaaacaattatctggggatggggaagaaaatagagatgcgtatcctgtttattaaatgtgccttgtttattagggtgactgacgttttccaactccactcttgtccctgtacccataatttttaaattgggagaaagaatttgaatgtcctttgggtttcttaattttgtcaagtttctaatatgtgcaaaatacagttctaggtattaagtaataagaaaaacacagtcatacccttgaagatcagtgtctctttggggaaattataatttatgggattaatattctaagagataggcatgcaaaggaaagcgggcacattctttacttggtagggtagaagagaaaatctctagctgggtttttaaggaggaatagattataggagacaaagaggcctggcactgtgtggtttggtgggtctggggtaccctaagtatggggaacctagacaggaaaggagcattaccattttgaagtggcctccttcaataagtaaaggtaggtcttaaatatacagtttttgtttgttt

SEQ ID NO: 95338 - DNA, 227 bp, Homo Sapiens
ctcgttcccggcatcacctacacaccacaagcaggttttaatggaagcaagttgctccaccaaatccacaaaagggtaaagtttgtgatttttctttatcattgcgatcaccatctgataccgtaaggagtgcacttgtttggaagttctgacttctctgatctgtcttggtcgtttgtgttataaaaccaaagttctctacagactttatttttgtacaatatcat

SEQ ID NO: 95339 - DNA, 558 bp, Homo Sapiens
ccaagatgttaccacctgacaaaagggtctcatatgaatgatggaggtttctgttaccgtatgcccataaaggggcctgaaaccaaatatgatttgaatagaaaagaccttgggaaacataagtagcactttggggctaagctgcgaaggcactcgtattgtacaagtaatttcgaagagagcctaaatttgctacccccctgcttctacagggtataccagatttttgctgtcttgggacactgagctcatggaagcctgtggaggaaactaaccggtaagctggggatctaggtagtcatccaagagtctggagggagaagaaatttgttacttccacagctggggtcctgtagaaccatactaatgtacaaatggatgctgaaaaatacctgcatagtttcaaaacaaaactccctctccactcccagttactgacatgatgcttcttggctatctcataaggagtagcagtatgaatactttctggctccttcctaatacgttgacctgtcatacgcgcattcacttagaatttcttttgcacaactaaagttg

SEQ ID NO: 95340 - DNA, 509 bp, Homo Sapiens
catgctaccaagctgtaggtgtcccattaagtcctgctatttaagaaatacttacataacccttaggaactcttcaggctttaaaaggcaaggagcaaataattttaggagaccgataatgtcacctaaatttgaaatactaagaagaggttagtgttctcaactatgtgaaatctgtttctcctactttctcaaatctaatcctaggaatcttgcttataaacaaagcatttctgggacaggagtacttcctctattatagcaatgcttcacatcatattgtgctgcagtttccatcatttttaaaggacagagacataaatgataaataatggtatacaaatattacaatctaccaccctcaaaaaaacaaatattgtttatggaattcagagtttggagattcaagtattgattgcagttttattttgaaaagaatgctacaatttatgtggtttttatttctcatgtttatattaaaagctaataaactctattttaattaaaaa

SEQ ID NO: 95341 - DNA, 409 bp, Homo Sapiens
  misc_feature (40)..(40): n is a, c, g, or t
atgcatgggaaagccaggagggccctgacctcccactgcncaggaggcagtggcgggctccccgatgggacataaaacctcaccgaagatggatgcttaccccttgaggcctgagaagggcaggatcagaagggaccttggcacagcgacctcatcccccaagtggacacggtttgcctgctaactcgcaaagcaattgcctgccttgtactttatgggcttggggtgtgtagaatgattttgcgggggagtggggagaaagatgaaagaggtcttatttgtattctgaatcagcaattatattccctgtgattatttggaagagtgtgtaggaaagacgtttttccagttcaaaatgccttatacaatcaagaggaaaaaaaattccacaatttcaggcaagctaaaa

SEQ ID NO: 95342 - DNA, 875 bp, Homo Sapiens
ggcccggagcactttgcagagcacgtccagccctcatggggtccctgcatagaaatgtgaacccctgccactgaggaagatgaaggtagaccctgtgtctggaggtgctggagggcagcgggtcacctcttgtattcccaccttagtttggggtgttttgaagaggttcagagactaaatcttaaaccttatttgaataccaacgatagctattttgggaatttcgatcttaaaaagtgacaaaacacatttcccattttcatttttcagctgaattttagtaacttatttttgatgttttaattttatcatggcctcctctttggaggccaaccttcccatgggtctcaaagcagtgacatttggtagtaaatcactgcctctcaggagtcggtatgcacaagcactcagcagccactgttgatgccttctagggaaacctaatttccgttggtaaaggtaggggcctcggaactgttccggatctgctgtagaacttcaccgtgtggaatggtgacagccacacaccgttgaccagtttagaagaggttgcattcaataaaactcttagcttgagcttatgcaatgattggttaagattttggcattgtaagaattaggagatgatcatagaaatatatgtaaagtattcaattttcaatcattttcaaattactgttataaattgtttttgctgagttgtaatacttttgagatacaatgtattccttgtactgaaagaatgaaaaaggactttttcagcatttgaggtaagttctttaacgtttcattaaaaacattttttacaaatattttgtacatgcacttgcagtattgaggttaatcattttaataaattcggaaattaaaacaaa

SEQ ID NO: 95343 - DNA, 510 bp, Homo Sapiens
  misc_feature (22)..(22): n is a, c, g, or t
  misc_feature (35)..(35): n is a, c, g, or t
tttttttctctggactctaagnctggttgatgccnccaggccttgggaaaaagcctgccttctgataggattgctattgagtagcaaaaattcttggattctgataacatctttcatgcagaaactcaaagcatctcccaaattataagcccattcttttacactgttctacactctcacactctaggaacaactcatttcaatctttgggacattgaccagaattcagggaaactagcatgatccttccagtctgacgtttcattccatctactgtccaaagctgtgtctacaaggcatcacctatgagacaataaaacaaaccctctgaaatcaggaaatttgccagaagatggcgagctgggaagaaataaaaccaggatttgagccagaacttggcttcaagctgacctcaccccacctgcaagtcttaatacacttggacatgccatgaaatgacaagaaatattcagattttagatatgtaaaaatattaaaactatgcctctt

SEQ ID NO: 95344 - DNA, 277 bp, Homo Sapiens
cctctcccctctctactttaattcattggagcatgggatttggagttaggtggttttgggtttgaattccagctctactatttttggttgtgtgatagagttatttaacctctttgagcctcagttccctcgtatgtaaaatgatgataataatacctacctcacagggttgttgtgaggatttaaattagatattgtacgaaaagtgcctagcacagtgcctggcacacagtagagtaggtgctcaataaacggtagctattattattaaaaaaaa

SEQ ID NO: 95345 - DNA, 195 bp, Homo Sapiens
ttgcttacctttgttagactccaaatcctgtgtgactatgaaactcattaactgaaacaacccggcacctttggacctgtgcaggcaaaggcaagggagttgaccaggagcacacagcacagacgagaacagtcccaaagccttttgctgtatcccatctgtgcaaaccactcccaataaacaaacaaacacaaa

SEQ ID NO: 95346 - DNA, 463 bp, Homo Sapiens
tttgttttaaaaattagagtatatttaaaaaattctattaatattttagtgtcattaaaattgggagtgcacagattataaattcagaaaatataaaatgtacatgaatttctcatatttttacctaacagactgtctgagaataaaataaaaatgagttttgtgaaatcatggcctctttcaagatcatgtctagtaacatggtctcacttgaatgatttgtcaacaagtgccatcagaggtcagtgaaaatattctcacaatggatggaaatttaagcattaaacaagcataaagtttcttctcacttcacatatgaaaacagtacatgtacagaaatttacttatcctgacaagtaataagctctgatacaaataagctctcaccttccctaaaagaataatgccttgttctctaattcaattccacataagattagttgaaaaatgaacctgatatcat

SEQ ID NO: 95347 - DNA, 844 bp, Homo Sapiens
  misc_feature (251)..(251): n is a, c, g, or t
  misc_feature (319)..(319): n is a, c, g, or t
aattcggcacgaggcggcacgaggagcgtggccaagacacagccagtggtgctcgggactgcatcagccgatcacacggctttgctgtggagcatagagacagggaagtgcctagtcaagtacgcaggccacgtgggctcagtaaattctatcaaatttcatccctcagagcagttggctctcactgcttctggagatcagactgctcatatctggagatacgcggtgcagctgccgacaccccagcctgntgctgacactagtggcacgaccaggagttgacgcactgctgcacacaccccacccagcggctcgtggngacctcctcccgtgacacgactttccgcctctgggatttcagggacccctccatccactcggtgaatgttttccagggacacacggacttcgttctgcgtgtcctgtactcaacagtcatctcatgctgcagggtggctgcgtgtgctccgtacatcacacccattatttcaggtagggacggttcccggagggtgctcagcaccatgccgactactgctggctggcacgttcgcacgtggccatgtcagctccaaggaggatgctgacatcctgctggcttggcacgttcgcacgtgtccatgttagctgcgagggccatgccgacatcctgctggctggcacttccacaggtagccatgttagctgagagggcgatgccaacatcttgctggttggcacgtttgcacgcggccatgttagctgcgaggacaatgcttctgcaacttttggtttcttccctttcatcctcccacccctgaccgtttttgcctgggagcaagtgcctaataaattacctgcactc

SEQ ID NO: 95348 - DNA, 534 bp, Homo Sapiens
  misc_feature (79)..(89): n is a, c, g, or t
  misc_feature (508)..(508): n is a, c, g, or t
  misc_feature (518)..(518): n is a, c, g, or t
cttgatttaaaacaatgcatcttttattgaacaatgctgttaatcaaacagaaaaccatctatatacaagttacacaannnnnnnnnnngccactactggaattcagaataattccaaatgactccatccattccaggatggagctggagccaaacaaaacttcaacagcagtttcttcaaggctcaaatggtcacaacttcaatgtattttctcattgtgaacaagctgctcagtggtcacagcaccatatgtagcatggcagttgtctgttccaattatgaaaacactagcacttccattaggctctgaaatggaatagcccaatgccctgaaacacctgggtctctttttctagaaagaacaaaatatacaagagtcaacataaaatatccaagtggggctgcatgcatggaccagaactttgaaaacactgatgtatcacagaaggtcagtaggtacaatcttatggcaagagtagcaaatacaagccaccatcagttcaattnctgggcgttnctggggccctgcttca

SEQ ID NO: 95349 - DNA, 529 bp, Homo Sapiens
gtttaaatatgaatttaattaaacagaaaattgtaactggctgttgaatgatgggaaatggcttcacgtcacagaacccacctccggcaacaatagcgtattagacaccagtggaacaacttgatccagtgagcgaattcgtgatttctgtttacatcacagcaggatgtgtctagaaatcccaggttaggaatgacagtgggaagaattttggctgtgaacagactcttctcagcaccaggtcctcgacagcacaaccatgtgcaaatacacaaatatacacatgatgtgaggttggtaaaaatgctaaacatgtatataaagaatggactgtctttgagaccaatcgttgattcaatctccccataaacctggtcgcaaatcctgttctgaaatcatttgagtgaagacagcaggtgatgggtttagaagcatcttggcgcacagtcggctgggagtaaggattgccacgcactctctgcaggctgtatattctctcctgtgtggcctcagattttccctggcgaga

SEQ ID NO: 95350 - DNA, 610 bp, Homo Sapiens
  misc_feature (37)..(37): n is a, c, g, or t
  misc_feature (44)..(44): n is a, c, g, or t
ggagacccagaaaatctcagtaatggtaccagcagcnaatgtgnaagcagccaaaaggttggccaaacgcctttatcagctggacagattcaaaagatcagatgttgcaaaacaccttggcaagaacaacgaatttagcaaactagttgcagaagaatatctgaagttttttgattttacaggaatgacgctggatcagtcactcaggtatttctttaaagcattctctcttgtgggagaaactcaagaacgagagagagttttaatacacttctccaatagatatttttattgtaacccagataccattgcttcacaagatggagtccattgccttacctgtgcaataatgcttcttaataccgatctacatggccacaatattggaaagaagatgacctgtcaggagttcattgcaaatctgcaaggggtaaatgagggtgttgatttctccaaggatctgctgaaagtgttgtgggattggagaagatgctgaaaccaaatgggcacctgtcctcagagatcacagactactgagaaatattggaggtgtctttctccataaaataaacagttattccatgttgaaataaaagtataagccaaattc

SEQ ID NO: 95351 - DNA, 869 bp, Homo Sapiens
  misc_feature (383)..(397): n is a, c, g, or t
  misc_feature (830)..(830): n is a, c, g, or t
  misc_feature (834)..(834): n is a, c, g, or t
aatgatgcttaatataggcccccaaccttttctggcctgtaaggtttctgctaagaggtccactgttagcccttgtacatgacctgccccttctctctagctgcctttaagattttttctttcacattgactttggggaatctgatgacaatgtggcttggggatggtcatcttgcataatatcttacaggggttctctgaatttcctgaacttgtgcgttgacgtctctagagatgttgggaaaattttcgtggacaatatccttaaatatgtttccaaagttacttgctctctctcaatctctttcaagaatccaatgagtttggtctcttttacataattccatatttcttagaggttttgttcattttcttaaaattannnnnnnnnnnnnnnatctgcttgtattgattcaaaagaatggtctttgagttctgagattctttccttagcttggtctattctgatattaatgcttccaattacattatgaagttcctgtgctaatttttcatttcagaagttcagtttggttctctcttaaaatgaatatgtcctctctcaactcttgaaccattttactgttttctgtggattgagtttcaaccttctgtatctcaatgagcttccttgacattgagattctgaattctatgttatttcagtcatttcagtctggttgagaaccatggctggggagctagtgtgatcatttggaggtatgaagacactcttgctttcagagtggctggagttattgcactcgcactttctcacctgtgtaggctgatgttcctttaatctttaaagttattgtcttttgaatggngctntttgcctttatattcttcaccatcatgcccagact

SEQ ID NO: 95352 - DNA, 868 bp, Homo Sapiens
  misc_feature (261)..(273): n is a, c, g, or t
gcacaaaggctatgtcaacactgaacacttatagagagtttaccactctagaatagaagatataggaaagctgtagtcctggtcttcatcttcctcctcttcctcggtgtcttccgaaatggctagatgggggaatacaggggagctgttgtttaaatacggacaacaacagcgcagaagcagctcagtgtatgttttcaaagccctctgatacagccatattacagcgttgcatttttatgtgacttgcagtgagatgcnnnnnnnnnnnnnggcatctgctgttatgcaataagttaaaaaaatttttttaaagcataatctatgaagtcaaaaactgcagaaagttctgaagaatcaatggctcaggttttacgggcagattcagttgcaagatccggagtgctttacttccagtagcacacctgaggagcaggcagcttccttcatggcacactcgctggcataagtggcattgtcactggcacagacaggctcatccgacttactgtcagggcacagctcatcacagagggaacaccggcctctcccaaccttgaaatcccataaacattttttcccaccagtgcactggatatcttcacaggactttgctttgatacactttccctcataggctaatccaatagatctgcccagcaggcaggtagcctttctcaggtggcaggcactggagtaggtgactccatcattcccacagagatattgctcagaggaagcaggctctgggcaaatccgattacaggtcacacagtaggcattattgggtctggtccaccacacatgtgggagctgccctgggacagaaaacatccccgaccagtgcttttttacatctgcgcttggc

SEQ ID NO: 95353 - DNA, 487 bp, Homo Sapiens
tgcacaaaggctatgtcaacactgaacacttatagagagtttaccaactctaagaataggaagatataggaaagctgtaagtcctggtcttcatcttcctcctcttcctcggtgtcttccgaaatggagttgcaagatccggagtgctttacttccagtagcacacctgaggagcaggcagcttccttcatggcacactcgctggcataagtggcattgtcactggcacagacaggctcatccgacttactgtcagggcacagctcatcacagagggaacaccggcctctcccaaccttgaaatcccataaacattttttcccaccagtgcactggatatcttcacaggactttgtgatacactttccctcataggctaatccaatagatctgcccagcaggcaggtagcctttctcaggtggcaggcactggagtaggtgactccatcattcccacagagatattgctcagaggaagcaggctctg

SEQ ID NO: 95354 - DNA, 461 bp, Homo Sapiens
gggttggtaaatgcagcaaaccaccatggcacacattttcctatgtaacaaatttgcaaattgtgcacatggacccagaacttaaagtgagacaaaaccaatgtccacgcctttgcagtttgattgaacgtataaaggagaaaaatcctgtaagtatgctgaacatgaaaggacctggaagcagtagtgtgtcttcagcctttaccaaattatccctacttgagagaaaacttggaaatgtaatcaatgtggcacaaatttcaaccagttttttaaacagactacacatctttgaaatcatactagggataaccaaatctgcttctccaagattggcctggaatattattacagaataactaccagacaacatttgttaaaactcaggacagtatgtattttaaaggagcaagtgcatgtgtgaaaatggctcattcagtttataaaatattacattaaaa

SEQ ID NO: 95355 - DNA, 366 bp, Homo Sapiens
atttggacctgagcaacagggacccctgcccataggtccatccttcagcagggtgcactgcgtccccctccactgcagctgtctctatgagatgaagcatctgtcgctcagtgtagccatcaggtccactgcccctgaaatatgactgactaggttcaaatgttgactctgacacttagaagctgtgccaccttggggcaagttacttcatctctctgtgccttactttcttcctttataaaatgggtaaaataataaccacaccatcggttgtctatgaagattaaatgagttgataatatatgcaaagcacttagcatggctactggcacaagggtcagtaaacgttaactgttccacaaaaaa

SEQ ID NO: 95356 - DNA, 442 bp, Homo Sapiens
agccagaggctcagtgctgggctggggctggctggcctgacccaagccacctggttactcagagcccagcactgggtggaatccctggggtctacaggcattcacccatccccagaagcccagatgagtctctgaacagttggctgtgagtgagatgacctcagaaatggaagaggtcagtgccttagccagacaggcactgacatgaatgtcataggcatgctccagggccttctgagaaatggaaataccatctggatggaatgacctttatgcaacaaaaagtttaattaaaagaagtctcctcaacaggcattgaatattagtgctcgtcaagattcaaaagagatttcccttagaataattcctcaccacatatattgaggttctggagtgattcatcctaccctcatacataaatgtttgagctaaccagaaaaaa

SEQ ID NO: 95357 - DNA, 410 bp, Homo Sapiens
cagatttcacaagccttcttcctatgagactagaaatttgaagaaggtaggtcaggactcaccagtgctgtttcaaaagccttttggttgtgagtgccacatctgaccactgcacagatagcactgagaaagaaaattggacccagttctctgcttttgccttccattctccctgtaagggtccacgtgaacagcaagtttggcctggtttccttaggtccctctgggcccatttcttttctttcatcatctttcctaaagctgatatgacaattccatggggaagaaacaaatagtacacttggatgaactttgagaaacacaaagacctttcctcttatccctgattctaaagggatttttctgtatttaataagtaaataaatgagaacagttttagactgaaaaaa

SEQ ID NO: 95358 - DNA, 950 bp, Homo Sapiens
  misc_feature (164)..(164): n is a, c, g, or t
  misc_feature (176)..(176): n is a, c, g, or t
  misc_feature (226)..(226): n is a, c, g, or t
  misc_feature (357)..(357): n is a, c, g, or t
  misc_feature (363)..(363): n is a, c, g, or t
  misc_feature (380)..(380): n is a, c, g, or t
  misc_feature (411)..(411): n is a, c, g, or t
  misc_feature (443)..(443): n is a, c, g, or t
caatttgaacgacaatggacttcttatcaggagtcatgaagccacatggaagtagcaaacattttcaagtgctgaagaaggggaactcttaacccagaatccttggatatccactggaaacaattcatgaaggacattctcagataaaggaaaactaagagagnttgtcaccagcnaactgaggaagctgaaatatagtggcatgtatagctgatcaggagccagngaggaaaccccagggacaggtggctgaaaggatttaatagcacagaaattgtatacatcagggtccaggaggtgaaggagatctctttacatgaacagtctacagaaatcttgagtaaggctttggatttncacagngcattgacctaggcatntaagccaatcatatctaaattcaaatggcancaaaatatttttaaaaatctttcaaagcaggngatgctacagtctctgtgcttcacaaatccaagttatcattattggctaccactcctccatatgcacaggcaataagtcaggtattccttccaggaattggggctacaatgtaaacttagcaaagcttccagattaacacatttgtaaaaacaagacttcctaataacctgtcatctgctttcccaatttctctataattttagtctgtagatgacattcttgtggagttttaggtgactgtcatattgcagccatctggcagccctgtttaagaagcacaactctgacattataagatgatgaatcagtggttaaaaacaaaacaaaaggtggttgatgtttattgtaatacaatcttataaaatctgagagtattaactaattagtatttataaaagcatcttcaaactgaaatatccattaccattgaaaatcattttaactagataaaatatttccccaagttgtttttttgtgacacaaaataaaatagtggacattcaaaa

SEQ ID NO: 95359 - DNA, 545 bp, Homo Sapiens
tcctaaatattggtgggaagacccaccgctgtggggggggttgcatatcctcatgggggtcactgggcttggccagtctgcttatcaactcttgctcttctctcccctttgcctccctctgcaggggccttaatctgcccctggtaggggaggcttccactgaacaggcacaggtgagggagagcaggctggcttagagggacagggtccccatggtcatcaagctgctattgatgacaaagactcaaaggctggaagagctcccaaggaagctagaaatgcttggctttgaaagaactgtgggaccccttcagattccctgaggtatggcttggtcactctcaggtcctcaaagcctgtcttagttgggctgggtcctagctgcagggtctttgtgagggtcacagttgctctgggacacctccctgaagagcctttccacctgtacaatcgtattttctttctgtcatttgctttgaagcccattgtgccttatgccaataattcaattgctgcaaacaccaataaagattgattcatggaaa

SEQ ID NO: 95360 - DNA, 476 bp, Homo Sapiens
ccttcctcgtgcttctccttcctgagggtttgggaaggtcctggggcagactctggggctcccatggggtggaaggagcctgttccagcacccttctcccagctgcattcccacgggtggccctggagctggtgagctttgtctgggcgttgtcttcggctggcattgctcctcccagctctggcccctctgctccctcaggaagcagtcccctcgtctccctttctgggcagcttccttgaggacagaaacttgaaaacaaacacaaaccaaagtttctggccatctgtggctggagggttctgaatgtcctctctccatgtcaggcagagggtcagcccccatgcttctgcctcaggccccaccccaccccaccccaggcctgcccctcacctcagggccatacccacagcgccctgatggaggaaccagaccgcaggctgtgccaccattaaacaagagcggctgtggcaaaa

SEQ ID NO: 95361 - DNA, 491 bp, Homo Sapiens
agtggattcggctttctggaagacactgtgtgttgttgagcattaattactggacacttggaataatgtgtcccggaaagtttcacagatatattaagtcgggcggtttttcaagccaactgacatctccctgagcctcaaaggagaagaattgagtgtcaggccccatcctggcgctcgatctgcacccaaggccagcgccagcgtcccggggcagggccctcctgctagagacctggtgtgtactcggttttcctgtctgtgatgctcatgtcaacctgttggttccaactgcaacccaccagcgcccccagcattcctgcacccaggaggccggtatctgaggctctgcagacttcccagggcctctgtcaggggtgctgtgtgtcctgtcccagggcccaggtcgaggtctaaccattttaaatctccatctgaacagcactcacaggggacaggagccctcagtaaactcctgtcgcaaacgaaaa

SEQ ID NO: 95362 - DNA, 293 bp, Homo Sapiens
agacatacacatggcggacaccttatgctttctccccatcaaattgacagtaaatacctaaaaaagggtataaacacaaggacaaagggatcagaaaaagcaacaatagtgaacaagagataatcatgaacatctggaatgcagaggcagatagggtgtaagctccagaagatgggaattttgttcacctcattcaaagtatcctgcatatggcatatagtaatcatcatttttgtagataaaatgaatagctatacccatgtaaataaactatatattagcaattcgaaaaa

SEQ ID NO: 95363 - DNA, 1143 bp, Homo Sapiens
  misc_feature (521)..(521): n is a, c, g, or t
gccaacgggcaccgcaccgcctcggacgccggcttccccgttggctcccacgtccagtaccgctgcctgccagggtacagcctcgagggggcagccatgctcacctgctacagccgggacacaggcacacccaagtggagcgatagggtccccaaatgcgccttgaagtacgagccgtgcctgaacccgggggttcccgagaatggctaccagacgctgtacaagcaccactaccaggcgggcgagtctctgcgcttcttctgctatgagggctttgagcttatcggcgaggtcaccatcacctgtgtgcccggccacccctcccagtggaccagccagcccccactctgcaaagtgacccagaccacagatccatcacggcagctggaaggggggaacctggccctggccatcctgctgcctctaggcttggtcattgtcctcggcagtggcgtttacatctactacaccaagcttcagggaaagtcccttttcggcttctcgggctcccactcctacangccccatcaccgtggagtcggacttcagcaacccgctgtatgaagctggggatacgcgggagtatgaagtttccatctgaaccccaagactacagctgcaggacccaggacgcccctcccctcctcattcgggcagagggaaatacgggacccggtctctgcctcctggctgccctcctccctggctgtgtaaatagtctccctatcccacgagggggctttgatggccctggagatcctacagtaaataaaccagcatcctgccgcccaaagccgcctcttctcagttgccaaacgaggggcctgccccccgccctaccggcttttggattctgggaggggaactctgcctccctgcaaatcttgcagcccctcctgcccagggcacccctcaaggactgcccccgatagctctactgttcccttggccacgaaggtgcccccctcccagatgccctggccctaggcctgactccggccaggagggtcagaagaaggacaaaggggagagctgggacaaggccttgcccccttcctgccatctccccaacccacagtctctccacctttgcttctgaattcttgtttttgagcaataaacagaaaatcgccacttgtaaaa

SEQ ID NO: 95364 - DNA, 884 bp, Homo Sapiens
aggtagcgaggcctgggtggcgtattcggcacgaggctcacctgctacagccgggacacaggcacacccaagtggagcgatagggtccccaaatgcgccttgaagtacgagccgtgcctgaacccgggggttcccgagaatggctaccagacgctgtacaagcaccactaccaggcgggcgagtctctgcgcttcttctgctatgagggctttgagcttatcggcgaggtcaccatcacctgtgtgcccggccacccctcccagtggaccagccagcccccactctgcaaagttgcctatgaggagctcctggacaaccgaaaactggaagtgacccagaccacagatccatcacggcagctggaaggggggaacctggccctggccatcctgctgcctctaggcttggtcattgtcctcggcagtggcgtttacatctactacaccaagcttcagggaaagtcccttttcggcttctcgggctcccactcctacagccccatcaccgtggagtcggacttcagcaacccgctgtatgaagctggggatacgcgggagtatgaagtttccatctgaaccccaagactacagctgcaggacccaggacgcccctcccctcctcattcgggcagagggaaatacgggacccggtctctgcctcctggctgccctcctccctggctgtgtaaatagtctccctatcccacgagggggctttgatggccctggagatcctacagtaaataaaccagcatcctgcccgccccaagccgccctcttctccgtttgccaaaacgagggggcctgcccccccggcccctaccgggctttttgggattctgggggagggggaaacctctggccttcccctggccaaattctta

SEQ ID NO: 95365 - DNA, 731 bp, Homo Sapiens
cggagacagagtgaagaaactgtgtcccccctgggttgctatcgatcaagggtaaaattccattctgatatcaaaatgcagtattcgcaccgactgtgagcaccttttagagagactgaacaaacagcgggaagcaggttttctctgtgactgtaccatagtgatggggaattccagtttaaagctcataggaatgtgctggcctcctttagtgagtattttggtgcgatctacagaagcacttctgagaacaatgtctttcttgatcagagtcaggtgaaggctgatggatttcagaaactgttggagtttatatacacaggaactttaaatcttgacagtggaatgttaaagaaattcatcaggctgctgactatctcaaagtggaagaggtggtcactaaatgcaaaataaagatggaagattttgcttttattgctaatccttcttctacagagatatctagtattactggaaacattgaattgaatcaacagacttgtcttcttactctgcgagattataataatcgagagaaatcagaagtatctacagatttgattcaggcaaatcctaaacaaggcgcgttagcgaaaaagtcatctcaaacgaaaaagaagaagaaggctttcaacctccccgaaaacagggcagaataaaacagtgcaatatcccagtgacatcttagagaatgcatctgttgaattattcctagatgcaaataaactgcc

SEQ ID NO: 95366 - DNA, 927 bp, Homo Sapiens
tttaaggtgaataaaaagtcttagtttaataaaaagtaggggctaaatatgcacgtgttttataacttctttatttggctcctttcgttccactatttagcttgtagaaactgtctacctaaaagttgaaatactcaattcccccacatgtgttctgagagactgagctcgtttgactgctgattccttggtgttccaaggtttcctggaaaaagatgaacaggtaatttagttgaagaccaggcatctattttggttcttcttttcagatgccccatgttgtattccagctcagtgatggtatcctgtggactgtttttgagcctgtgccccaaggtgatgtttggctgtgtctccacccaatatttcatcttgaattgccttcctcataattcccacaggtcaagggagagaccaggtggaagtaattgaatcatggaggtggtttcctggcaagtttctagtgagtgagttctcgcgagatctgatgattgtataagaggctcttcccccttcactgggcgctttcctttcctgttccttgtgaggaaggtgtcttgcttccttttctgccgtgactgcttttcttgaggcctccccagccatgttgaactgtgagtccattaaacctctttccttcataaattacctagttgcgggcagttcttcatagcagtatcaaaatggactgatatacaaaatggactgatatacttgctgagcttaaaagcagtgcaagtgattaagtcttgcaccctggaaattttgattctgtaaactcagggtagacttgggaatcacaggctgttctgggggcatgtgattcgcgttaaccacagcacttttactgctcctttccactgttgtaaatcccctttcctataggctgcccacctagaaaagagcaatggaaggccctgttccttt

SEQ ID NO: 95367 - DNA, 833 bp, Homo Sapiens
tattaatagtagctcattctctctaaaaatttactgcccactgataggatgttttgtttccttgataaaacaaatgtaaatgaggaattttatttgaattggaatattgtttttctagaggacattcatatctgcactattatctgatgacatgttggtaattttaaagactgcaaggcagtttagagaatgaagtaaaccaatagatactcttttgattctccaaagaaatataattttggtttttgttcctcagagagagtttgaaagaaattttcagatgttctgttccctatagagggcctattccaggatctaaatgaatgggaatttataattcctttcatagactcaaacctgaaagcagaaatttttagtagttgagttgctttaagtgaattttaacaaatatgacacagaaaaggtcagatgctgttgtataaaattttttactagtgtgtcttatataattctttcttctcattaattcagtgcctttttcctctaagcatactcttggtccatgccccatgcagtgtcaactgatgtttaagctacagagcattgttgtagtggtgagggccctctgttgcaggggcatggggaaatgcatatattaatcaggggctggaggagtatacatgattcttgtgttcatgttgtcatttgaaactcttcacataaaattttctaatattcatttggaaaacctctccactggagaggtttcatctctgagaggttttgtaataatagtgtaagttcagtaaatccagtccaaattctcatcacatgtattatttgatactaaattttcaattattacttcaaaa

SEQ ID NO: 95368 - DNA, 415 bp, Homo Sapiens
aaaaggccccagcctggcttaaaccaaccttgagtcatcacctgacactggacactttgtttatccaagcaaaatcaggattttctgttagcaagcaaaggaactgctcatgggtaagaaattaacagtgtgtgccataattcatatttgtcgccaagcatcttctcaggctgacactgtgccaaacaagggattatagagatgaagatgcagcttccatccctgaaagctcacagtccattctctcagggcaatcccggtaacctcctcatcacaatcatccatccagatcatggaagtccctttactccccaaataagaaggagtagcaggaaaaagtgacctcatcaagctgactcgagtttttccaaaagcaaataaataaataaataactttttaacctgcacagccaaa

SEQ ID NO: 95369 - DNA, 693 bp, Homo Sapiens
  misc_feature (582)..(592): n is a, c, g, or t
tttcattgaggaaggccgggagacatgtctagtttctattatggttataagcagtggcaatttgcaattattaaggaaggagagagggagaaaattctggaaactgtttactcttatttcaccttgagatgccagattttctctatttctatttgctagcaaagcataccgtcacccaaaatagccactgagttttcttgtaaaaatcaaagcaattgtccctaaatacttcatttgtgttcttagatacaaaggcttacagaagaagataagtatttccccttctttgaggataagatggtgtgaaaacataaagcaaaagagggcaaaaggttgaatattcaaaggttaagtaattcaaaaagagaaacaaacagatggatttttgtcacacgtactgttctttgttgaaaaccctggtagtggcagaaatagtccagggctaacgacgacctgcattgactctaggcgctgcagctttctgctgtgtaaaccttagtcacctctgtgccttaattccctagtatttaaaatagaaaatatcaccagctacctcggagttttttaggccttctgccagannnnnnnnnnnaaaagtgcttcaaagctatttcataggtacttgtgggcttttcctgggttttttcaaggatgatgtcacagatcctatatcaaaaagaacatgtatttctg

SEQ ID NO: 95370 - DNA, 469 bp, Homo Sapiens
cagcgttgctcatgctcgcctgttctcagtgtatctgggaaactgacaattttcaatcgtgattctgtattctgggctctctagcacatggctgaaccatcagcaaaactctggccacaggctgtgtctgcatcactaaactcaacaccatccatcagcaagaggcggagcaaattaaaacaccagtaacaccctgtccccttctgaccccccctctcctgatggccttgcttatgccacaggaacagcatgcacatggcctgtacatgccctcagcttggctctcctcacagcaagctggtcttgcaggatcgtgagcagtaactccctctcctgtacatgtgtccacagttctctgccattagaacttaagctcctgaggggcacaggcctgttttttcatttttgtatcttggacacagcagacacaacaaatgtttgtctagagaataaagttcttatttacata

SEQ ID NO: 95371 - DNA, 393 bp, Homo Sapiens
tggcacttccgaggtcattcataaacaggcacagcaggagcaaaaaattggagtcaccccacgggcatgttcccaggcactgggacaactcttttccaaagaaagacccaaaaatcgtacaaataagtccaaatgaagcatgatgggaaatcagggactaattctgcttggaggacagggaaggctttcaaagctcttacaatgaaacatggcaataaacaaaatctcatttactgttggaaagatctgggagcaatgttagaagaaaagttaacaaaaaggtaaaaggattttaggagccaatataactactaataatgaaaatacctgtgagaaaattattcccaactagatgactacctaaaacaaataaatatttttctctaacctaaa

SEQ ID NO: 95372 - DNA, 424 bp, Homo Sapiens
gtggcagccacgagagtctgtgcacgtctgtgctggaaagggtatggatgggaatcaagcctatgccagtgctgatgaagctggaggagtctctcctctgctctccactcagatgtgggacatcagtcgccaaaagccactcagccccagccacctcgcgtgagaccctcactgttcattgtgttcatctttgagtgctctctgccagccaggcctttcctgcaagctgctgtgcttccccgtccacgtgtatctctgctgtgacacactgacctgacgcacatttccagtgcagctgcagaagagaaatgggattggctcttgttttctgcaagttcatgttttgcattttatgttcttccacaattgatctgatgttcaggaaaagataataaaggcaaattagttagtggttgagacaaaa

SEQ ID NO: 95373 - DNA, 451 bp, Homo Sapiens
cagacagtaaacaaaatatatggcatgtcaaagtggaaagtgctaggaagaaaataaaggaagcaaaggggaccaataagactgttgtgaattcagttttaaataatttggtcagggaaggttggtaagtgagaaggttgtatttgagggaaaagccaaagaatatgaagagcaaattccccatgcagaattcaagggggaaaatatttgaagcagagagaatggcatgtgcaaatgctctgaggcgaagcaagcctagcacatttgagaatggctggagacaaaagaaagtcaaagaaatgaggtcaaagagggggtgagttcaacaaggagtaataaggtgcttgctggctgtttcttccatacctttatgatccagagagaattctcactgcaatttggatacttgcatatgtaatttaaagttaataaaaagatcgggaccaagaaa

SEQ ID NO: 95374 - DNA, 611 bp, Homo Sapiens
  misc_feature (34)..(34): n is a, c, g, or t
agtaagcccaagtgccacctactggatccattcncaaagcttcagcatcaaaaataccttactaatatactcccctctgaaaccagaaatgagaagtcagcttcaaataaagaccctgcacaaagcctcagcctggtgaaaacatccgaaaataggtctacggactgtactcaatctacactgcaattaaaggaaaaaccataggtggaaatgagaagaaaccaatgcaagaactccagtaactcaaatggcctctgtgtcatatgtccttcagacaaccacaccagttctccaacaagagttcttaacctggatgaactgtctggaattacataaatataattgagaatatggataggaaaaaaaatcatcaagactcaggacaatggcagaacccaatccaaggaaaataagaataacaataaagtgttataggagctgaaggacaaagtagctggtataataaaaaaagaaactaactgatctgaaagcgccaaataacacaatacaagaatttcacaatgcaatcacaagtattaacagcagaaaaaaccaatctgaggaatgaatctcagaacttgaagattggttcctctaaaataagatggacc

SEQ ID NO: 95375 - DNA, 765 bp, Homo Sapiens
tgagcactaggtgcagccaagatgctgatgggaaagaaaagtctaggttttgcccccctgcgtcgttcctcgtgacaggattatgctgagggagggcacattagattgactcacacatactgaaatggtcatagttattgaggttacccagtttccaggcctgaactagtaaacccagcaatgagaatcagccagcattagcaagttttccgtgtgggagtggggtgggggtggggactggagggagcaggcgctgaaccaggaaaggaggaggatgctcatcattggctaaagatccatgcctggaaattaacggcgttaaagtgagacttgcttcaggttccaacccggtaaggcaaatggagaggctgtcaggagaccagaagtttacctcagctatgcaccgacgcaccacgtgctctggtgcacatccaccgcctcttcctgcctcagtttctccttttgtaaaacaacagcttgtaaaggcctggggatcttctcatccacgggagttttctaaggatgcaggcgaaagaggtaggaaaagtactctgtctctgtcctgggtgttcgggatcaaggccttttgaaccaattccggaatccgccaccgggcggtggtaggagagagccagaggattcgtcagtaagtgtgcgtgcgtgacagagggcttttaaatagatcgctttgtatctagcacggtagcacccgcttctaagcttccaacggcagctcgagcaacgcgatcattcagaagcggccgc

SEQ ID NO: 95376 - DNA, 780 bp, Homo Sapiens
  misc_feature (272)..(272): n is a, c, g, or t
  misc_feature (290)..(290): n is a, c, g, or t
agaccttaaaacatcaattgtgttatgccataggatacagacacctatttaagtcaaagactattatgaaggcgttacattgtttttaataagaagaatccaacttccctttggtattgcttaagctgcagaaatggcaatattttgagtgttcagtctttcaatgagtaatgacgacaataaagtgcctgtcactccaggaaagctaaaatgaaccattatgcatccctctacaggcagaacctcgggtcttgatggacatcctgcggagntttaggtacacttaccanaaaatgctcttgtgttatatgtagacgtgcttaatgaggcaaaagataatggattccttttaggcacagaaaagctgctaaaggaaatgtaattgggctggaaagttgggatttattggacttttctccttcccaaatcagaactatatcatccttatgaaaatattagcaatgtggctaagaaaaatgagacaaagtaattactgcattatttaataaccttgctctatttagagaaaattctcctatgaaacctgtagaactctacacatgaatctatcacagcatctgtaatcctgggacctcaaaagtacaatggctgaattatgaggccttgtcttgtctgtgaaatgaaaggatggttttattgtattttatgtatcataaatccctaaaactactttaaaaaagtaattgtatagggaaatctgtcatttcctcctctctggtgtctattcccctttattctggtaataaaatcttgatattc

SEQ ID NO: 95377 - DNA, 606 bp, Homo Sapiens
  misc_feature (368)..(383): n is a, c, g, or t
tttgagaattaaaaatatatttatttatgttatttaaaataagaatattaaaatacatgttaaaatgaacaaaatatttataatgtaggtatatctatgaagacgatattttactacagaagcaaattacaacaaaacttagatgagggtaactgttttacatttttacaaatctcttcagtttctggtttattgtgatgtagctgggtcttatatatgtttctgcattcaattattagcaatatgttgtttttatttaagtatataaagaaaattcaggctcccagagatttatagttggaggaatattttgattgcttttctgaaaagatatgaatattctttgattttttacacaaaaactaagnnnnnnnnnnnnnnnnctaataagtaaggtgaactaggggatctgcaaccttatcaacgaacattttaatctttgttatggtaaagtctcctgaccttcttgtgtgttgaatggctttttaggttcgcttctctcttggcagcagaaatggcttcatcaggtccacacttcacctctttacagtgcctccatcagagggagagagagctcccttggaaagaaataggaagcttctttcc

SEQ ID NO: 95378 - DNA, 906 bp, Homo Sapiens
accatcagggctggtgcctctgcagcccaagacacctcagcagacctctgcttcccaacaaatgctcaactttcctgacaaaggcaaagagaaaccaacagacatgcaaaactttgggctgcgcacagacatgtacacaaaaaagaatgttccctccaagagcaaggctgcagccagtgccactcgtgagtggacagaacaggaaaccctgcttctcctggaggcactggaaatgtacaaagatgactggaacaaagtgtccgagcatgtgggaagccgcacacaggacgagtgcatcttgcattttcttcgtcttcccattgaagacccatacctggaggactcagaggcctccctaggccccctggcctaccaacccatccccttcagtcagtcgggcaaccctgttatgagcactgttgccttcctggcctctgtcgtcgatccccgagtcgcctctgctgctgcaaagtcagccctagaggagttctccaaaatgaaggaagaggtacccacggccttggtggaggcccatgttcgaaaagtggaagaagcagccaaagtaacaggcaaggcggaccctgccttcggtctggaaagcagtggcattgcaggaaccacctctgatgagcctgagcggattgaggagagcgggaatgacgaggctcgggtggaaggccaggccacagatgagaagaaggagcccaaggaaccccgagaaggagggggtgctatagaggaggaagcaaaagagaaaaccagcgaggctcccaagaaggatgagggagaaagggaaagaaggcgacagtgagaaggagtccgagaagagtgatggagacccaatagtcgatcctgagaaggagaaggagccaaaggaagggcaggaggaagtgctgaagaagtggg

SEQ ID NO: 95379 - DNA, 754 bp, Homo Sapiens
ggcagtaactctaacggttctaaggtagcgaggcctgggtggcgaattcggcacgagggatcgacgggacaagaaggggggaaactataagaagaggaagcgctccccctctccttcaccaaccccagaagcaaagaagaaaaatgctaagaaagggtgtgccagcccctagcctgcccccgtgttcaccattctctccacatcatgttgaaggaaggaaagacaaatcccttcctataaccacctggccctgacctgggtgtgccataatactgcaggtgtcctgagagggaagatgaggagagctttagctgctcagttgttagttctggttctggccccactagtacatttaaagagagctttatcaagtgaaaagcctttgccacttcccattactgtgtgattactggtttctgtttgtactcagctctacccttggaattctctgtcacttcccttcccttgaacttcaacttccagggactccttgtccaaggatgactgggttctctttcactctctttccttcccagtccctcaacaccttacactaagtcaaagcgtggccacagagaagaggagcaagaagacctgacaaaggacatggacgagccctcaccagtacccaatgtagaagaggtgacacttcccaaaacagtcaacacacaagaacagactcagagtcgagcccagtcaaaggcggcaccatgaccgacctggatgaacaggaagatgaaagccatggagacgc

SEQ ID NO: 95380 - DNA, 1957 bp, Homo Sapiens
  misc_feature (1944)..(1944): n is a, c, g, or t
ggggagccggagaagatggcggtgcggaatgaaggactggcggccccaacgtgaagtactacgaggccgcggacaccgtgacccagttcgacaactgtgcggtctgtggctcggcaagaactacaagaagtatatacaagctgaaccacccaccaacaagtccctgtctagcctggttgtacagttgctacaatttcaggaagaagtttttggcaaacatgtcagcaatgcaccgctcactaaactgccgatcaaatgtttcctagatttcaaagcgggaggctccttgtgccacattcttgcagctgcctacaaattcaagagtgaccagggatggcggcgttacgatttccagaatccatcacgcatggaccgcaatgtggaaatgtttatgaccattgagaagtccttggtgcagaataattgcctgtctcgacctaacatttttctgtgcccagaaattgagcccaaactactagggaaattaaaggacattatcaagagacaccagggaacagtcactgaggataagaacaatgcctcccatgttgtgtatcctgtcccggggaatctagaagaagaggaatgggtacgaccagtcatgaagagggataagcaggttcttctgcactggggctactatcctgacagttacgacacgtggatcccagcgagtgaaattgaggcatctgtggaagatgctccaactcctgagaaacctaggaaggttcatgcaaagtggatcctggacaccgacaccttcaatgaatggatgaatgaggaagactatgaagtaaatgatgacaaaaaccctgtctcccgccgaaagaagatttcagccaagacactgacagatgaggtgaacagcccagattcagatcgacgggacaagaaggggggaaactataagaagaggaagcgctccccctctccttcaccaaccccagaagcaaagaagaaaaatgctaagaaaggtccctcaacaccttacactaagtcaaagcgtggccacagagaagaggagcaagaagacctgacgaaggacatggacgagccctcaccagtccccaatgtagaagaggtgacacttcccaaaacagtcaacacaaagaaagactcagagtcggccccagtcaaaggcggcaccatgaccgacctggatgaacaggaagatgaaagcatggagacgacgggcaaggatgaggatgagaacagtacggggaacaagggagagcagaccaagaatccagacctgcatgaggacaatgtgactgaacagacccaccacatcatcattcccagctacgctgcctggtttgactacaatagtgttcatgccattgagcggagggctctccccgagttcttcaacggcaagaacaagtccaagactccagagatctacctggcctatcgaaactttatgattgacacttaccgactgaacccccaagagtatcttacctctaccgcctgccgccgaaacctagcgggtgatgtctgtgccatcatgagggtccatgccttcctagaacagtggggtcttattaactaccaggtggatgctgagagtcgaccaaccccaatggggcctccgcctacctctcacttccatgtcttggctgacacaccatcagggctggtgcctctgcagcccaagacacctcagcagacctctgcttcccaacaaatgctcaactttcctgacaaaggcaaagagaaaccaacagacatgcaaaactttgggctgcgcacagacatgtacacaaaaaagaatgttccctccaagagcaaggctgcagccagtgccactcgtgagtggacagaacaggaaaccctgcttctcctggaggcactggaaatgtacaaagatgactgggacaaagtgtccgagcatgtgggaagccgcacacaggacgagtggcatcttgcatttttcttcgntcttccccattga

SEQ ID NO: 95381 - DNA, 538 bp, Homo Sapiens
aaaatggaatgctgtggaaagcatatctatatcttaaaaaacactcagacaggagttaaggacagctttaataatttttttgtttaccacttaatctttatcaactttgattttagttagggcttagctcatggttgaagaaaagtggaaaataacaagtgcccatttaggtttgaagaatccagaatgttttacctttgactttatgagttatagaagcttggctttgctctaggcttcatgttcccaaatgagccatctgtcagtatattcacttaattcttactaatttcagtttcctgtaaaggaaacaacttacatattgatgcttaaatccagaaagtgtaaaaggttttcttaaactgttaaaatatagtgtctgatataaaggatgtaagttactcagctttctgctccctaagccaaacagtgtttgtcttcagtgtgaaatttaactgtaaaaactacttgtaatgtcaagagattatagatcatattattaataaaatggacctgggtctaataaatttttttcttc

SEQ ID NO: 95382 - DNA, 514 bp, Homo Sapiens
gtttcacggtcgccccggctgagcgcgttgggtcggctggaatgtgttgccttagggtctaagtgaaagttgtaaattgtttgtctaaatttattttctccagccaatttctgttttgtctttgtcccctactttctcttcctagtcttgtcatgccagtttacgcttctggctttgatatgtttactttttgagtactgagagtgacagcggtatgcaggacacattcttagcacctaactgaacccctccttgcccccaataaaacatgcttcctaataaaagacacagctgatcttactgttagcactgcatgtactgacagtgaaattggtgtagggtggagggcggtggctccatcacttgtcccaaactgctgttaggatttctcaaactagattttcaaagacacaagtgtgcttagttaacctgaaaggtttatttgctggtgcagaggctttaaaaagccctgttgaagattgatagctgtttcccttcaaaaacctaagtacgt

SEQ ID NO: 95383 - DNA, 487 bp, Homo Sapiens
gatctagtggctctgacatctgcttctctttttcaggtgataacacattttgttttgttttactttgctgttgctttggagaaagtagcttaactagctttccatatgtcacagtaaagctgggctctacatcaaaatattcctggtcccatggaaatacatgaatggcacagtgtttatgaaaaacagaggttgctgacgcgttatatatactaggaggttgagatttgcatactctgaaaatattgtctagaggaacaacctttgactgcatatttttgaatgcattgatttcagttaaaccccaagatgtctcttgtttcttctcagattgaaaggaaaaaatgcttcctatcatagtccataaacttgctactgatgatgagtcaactggaatctctgactcgttttcattagattcagtgattcccacagtatttgactgaagttgcttggtttgaagttctttcatctgtccctcgtgcct

SEQ ID NO: 95384 - DNA, 490 bp, Homo Sapiens
  misc_feature (449)..(449): n is a, c, g, or t
ctattttttaaacctctgatcaaatccaaagtcataaagatagttcagtacgtcctctgatgacaaggtctcctgtaaataccattgtgaacagaaggaaaaccatagtgtaatcccttgaccaccaaagcatatcccttgagcctgttgtagtacttttttctgggagagaggaaattgcgatctgaagattaaaatctttggtgacagaactggagtggatatgcaaatttcaaggaagaagttttccaaagcctcaagagaagtatcctaggacagttaatgtgaatatattttaaaaagtcaatcatttctttctatagctttggtttggtgcagtcaatgtcctcttagtgattacccaatacttatttctaagtacctgttaaaagctctggatttagtttcttacttaaaacagagataatgctttgagtgcttaaggaatntcttatgctagtttggttggctctaaatggagtttttctgt

SEQ ID NO: 95385 - DNA, 703 bp, Homo Sapiens
gctgggggcctgggtgggccccgaggggggctaacacctccaagaagcttctacagtggctgcagaaccctgctccattgcacttccggacccccattggggagcttcccttcctcccggagccccccccagaatatggcctgggagaccctccaccgccccctggcttgttgcagccccccaccctggccccctggcagccctcgaggggtgatgggcccccccgccgtgtcctcccagcccagtgggggccgaagcctgggcgaggagggtccccaaacccgcggcgcctccccgccgacccccccagtcagcatcaagtttgagcgcctctctccggcccccgggggccccggcgactttcctaagaccttcccctatcccttgctcctcgcccggtccctggcagagcctctgcggcctgggcccgccctgcgccggctgcccttggccgacggctggccccggtaggagatcacccggtggcaccagcccagagcgctcgccaggtacggcgagggcacgtggggaccccacctccctccaggcctcttcagagaagacccaacagtgacgcccccctccgcggtgggggcttggaggtgggcggctggactcaatccaccctggggggctcctttccttcttcctatttgtgtgtatatccacaaataaaacgcgcgtggcgtccgtggaccagaaa

SEQ ID NO: 95386 - DNA, 958 bp, Homo Sapiens
agtcaaactaggttctgatttcgaagataaggcgaaatccagagcagtttgggaaatgaaggaatctgactgaacaataagagtcagaaccattgccctaccataagcaacaccttaacagaaacaaattcctttgtccgttcattctatccacagactattttcagagaagagaatgtcccagctagaaatgcaagtggacgagtgccaacccgatgaggccaatgatttgcgagtggagacctctgaggaacttggtaaagaaagcagggctttggccttcgcctgggaaggcttgggacccctgaccaccccctgccccatcaccaataaacagacaggaaggaggaattcagggacagccttcagaaaggagtggctatccactggccacagcgatgactaaagagaggttcatgccacagcagaacacaaacggcgccaaagctgtctaaagcagacactgagtttattatttgctgaagaaggggagtgacccatttcattaagaaaggtcagaacagctctccaaactgaaggtaaacaggacggacacactgtggaaaagaggacattttgtttaaaggtctgattggcttaattgtaaactctcttgagggagtggctgctgttctggttgtgtgtcacagaggcttgagaacagctcgcaggagatcctggatgatctgacctgtggtgcacggccctggcagcctggtgtctgtgcctcctctcgttgagatgagatttttctctggcacccacttgggttaagagtgagaagccctggggcccatgggcctgctgcatgactctgtacccatcacctggcacatatgcagacttcctggtcacagggatgaggaaaccacatgaaaagcagttggagaaatttgttaccatgcagccatcctattttctaaacaggaaaactgagttgcagagagcgaagccccag

SEQ ID NO: 95387 - DNA, 705 bp, Homo Sapiens
gcagatggagaaccaaagtcggtgttgtcacgggtgaggcaaggcaggccatgcagctctgcaggagagccaggtgggctcctgccccacagcagaccagttggaggctgaactggcaggacagacacactcaccacccgctgccccaccccgatccagccgagaggggacgaggaagagatgggatgccttcagcacacagcctggcgtattttgcctgaatccacctggcaagggtggaccatgggctgtcacccaccaggaagttctctctgccaccgaggggagggagggagggccaggggccacagtgtcccaggtgggtgtccttcaactgggagggaacatcaggagtgcacagtaaacaccccacccaaccccacacggttcctcttggttctagggctatcagaaggcttcatctcgggagagctgctctcctgtttggtgggaaccccgcccgtggccttaggatgacacggagatgatgcccagagcctgctgtgaactcagggaggctgagacagaggagctcagctgctctgtacagcgatcatcatgtggcccagtccagattcactcaagaaagcagtcagtcactctacggatttcaggaaagggggttccatatgagaatgaaggtttttataactgtgggggtggctaggggagggaggtctggcagtgggggtggtcactaactcg

SEQ ID NO: 95388 - DNA, 587 bp, Homo Sapiens
aatcattcctatttgggtgcaattacatgtctataaagcgagtgatttccaagtctatcactatttcatgaactcccatgcaaactcattaggctgaatatttctaaaaccaaaaacaattacagttgatcacaaaagtaagaattgccaaaacatttatatgaccttttaagacaatcaggactcagttccacttcatctgacatacgactagatggcacaactttcagaaaattgaatcactttaaagacatttgaaatgaaggcaatggaaggacgaggaagtgaattgaggaaaggagtattttctagatgtcctgagtcacaacttcaggacaaagacagctacccatggctgtggaggaaatcgtgctggcatatagcagagtatgtgaaagcggcaagattcagttagcaaacatgtacaattcacaggcaaactgcaagagtaattacacctcctgagcaaggggaaggaagtgtggaaacacctgcaggtcatgagatgttacatttcaggatcattggtccatagatacgttcatcaatgtcgcctatcatcataaagtattaaagcaaatgtaaaa

SEQ ID NO: 95389 - DNA, 285 bp, Homo Sapiens
  misc_feature (11)..(11): n is a, c, g, or t
gacgaaccagnggcattcccttggacacaatcttatacttcattaccagagccactggatcaaatttttctcctattaatttcctcccaaatacaagctttcctaattcattgagcatattcttttccctcatgatgccaaataccatgcacatgcttgaacacaactatcaaagctccactagctactgaggaacatataaggtggttccgttttttagctttgtcattgctgtgtcttcaacctctcaataatctccaaataaatctcacgttcttgaaaaaa

SEQ ID NO: 95390 - DNA, 976 bp, Homo Sapiens
gttgggaggctcatcctgttccccttgacttctctttttcgcagttcttcgggcaaggccaccaggtgcagtttttacgaggccttctgctttttccccttccccacaagaagcagcccgcagggaagctggatctggcttcttcaaatcttctggatccagcagctcatctgagtcaatgagatccatgctgtcgtcctccatatcgttggctgagagggtccacagcttggcagcagcagggtccacagcaggtttcactgaaggagaagacttcttggtgatggaaagcttaagctgcctagaagaacccacttcaaagtttggttttttgcctgtgatctgaacaaacagcaggttgtcactttcatgaccaaggtgttctcgaacagactgtacttcctcaggggttaggggctcccgctgcagctctttcacttccacaagaccagaaagagtcagggctgaacacagcttagatgctgtcttcactttgctattgttatctacagctgtctctactggctccttcagaaaaagacatccaccaggccgaaggatccgggcgatttcagccaaaatctcagcactgtgcagagtggtgcttcctgggactaaacctgacaaaataatgtcaaagctggattctttgtgggcagattgcaacagctgcttgatgttttccacagacacgcggccctcattgccggttaacgcttgaagcttatccaccagacctttcagagcctccactggggatgacttatcccagaccactgccacaaactggccagcagagatcccaaaatctgccattcttgcagtgcagtactgacagacctaaaaactgctggccaaaagggaatcaagactgccgcctgggctcgctcccggcttctctccagccgtcgaccctcgtgccgaattcgccacccagcctcgctaccttagaaccgttatagttactgcccgtgcc

SEQ ID NO: 95391 - DNA, 1010 bp, Homo Sapiens
taggctagtacgaggcgtggtggtgaattcggcacgaggagaagccgggagcgagcccaggcggcagtcttgattcccttttggccagcagtttttaggtctgtcagtactgcactgcaagaatggcagattttgggatctctgctggccagtttgtggcagtggtctgggataagtcatccccagtggaggctctgaaaggtctggtggataagcttcaagcgttaaccggcaatgagggccgcgtgtctgtggaaaacatcaagcagctgttgcaatctgcccacaaagaatccagctttgacattattttgtcaggtttagtcccaggaagcaccactctgcacagtgctgagattttggctgaaatcgcccggatccttcggcctggtggatgtctttttctgaaggagccagtagagacagctgtagataacaatagcaaagtgaagacagcatctaagctgtgttcagccctgactctttctggtcttgtggaagtgaaagagctgcagcgggagcccctaacccctgaggaagtacagtctgttcgagaacaccttggtcatgaaagtgacaacctgctgtttgttcagatcacaggcaaaaaaccaaactttgaagctgggttcttctaggcagcttaagctttccatcaccaagaagtcttctccttcagtgaaacctgctggtggaccctgctgctgccaagctgtggaccctctcaggcaacgatatggaggacgacagcatgggctactgggcgatgcttccgctgtgccagctgccctaccttgggatgcaggccttcaaacctggggcacaaggtgcttctgaggtgatagcatcttctgatgcttggggttctggcttgggccctcttgttctccagcaatcctgttctccctccgccaggggtctcccccctctggtttgtccccggctcgtggcggtggttcccccaggtcgtggggccggtgtcgcggtctcaacaccttgccgcgggggcc

SEQ ID NO: 95392 - DNA, 442 bp, Homo Sapiens
gacctaactcaggaagaaacatacacttcctacattttatcccataagcaaagcaacttctgtagaactgcccatggagattttgtcttaacttcaaaaagtgcttctcctaatttattttctgttgcacggtatcaagaagcacctgtggaaaaaaaggattcaaaagaagaaaaccataaccatcttacaagtttttgcattgctgaagactgacgacttcacccagacccaccaactggtcctgggacccccacccaggaacccattcagtgcaggaggacagcttcagctccctgtgtcttcacgtgtgacccaattgatcagcacttccctcttcctggccccctactgaccaaactatcctttaaaaaccctagtcactgagtttccagggagactaatttgactaataataaaactggtctcccattcaaaaaaa

SEQ ID NO: 95393 - DNA, 1028 bp, Homo Sapiens
  misc_feature (1011)..(1011): n is a, c, g, or t
ttgctcctctgtccccagcaccccttatttcttaagcagcaccaccagtccccagaggacaagagcagctatatctcatccacctgtgcatttctgcaccagcgatgcaaaaaacaccctgggtgggccacagagaaaaccgtaactatggatacccaaggggcagagcagccagctggacctgctctgtaattcacttacttaccagagggtggttcaagtcaaacaaacaaaaccaaagacagttgcaacccatggtggatccaaaggtacagtatcaaaatcatggaactcttgcccaaagaaaagactgcaaatagtcatctggtatatcttgtggaaagatgataggtttatagtgactcaaaatattttagaaaaatttctgtagtgtcaagttctttcaaacttaaaattttaaccccagaggattttcgctgaataaatgagaattggctctatttcttctacttctggatagcccgagtaaaaatactaataatttctagattttagtggggaactacaattattaggacccatggatattgctgcagttcaaatacaatacagtaattacaaaatatagaccatctctttacaaatacaaattatagtatattacaagtcatgtacagtaaatctataattttaaacaaactagtgtatctaagtttacctggttgcgagtgcattattattccagtttacagttgcccttagcgtgacagtcagaaaccgaccatcggagtgatattctcttatgtaaactggcgtcacatcacagaaaaccttatttatgaggtcccattgccctcgcaataatcactggtagctgggttctgacttacttacacaccgtatttcagaacagctaaacaggaaccaggacgcagtgtatttgggggaaagggtttaaaaatggatatgttgggcccagtgactgatatgctagaccgatggctgaggtaacgacacaggtgtgatgatcgtcatcacctttaactttcncctgcacccgccgccag

SEQ ID NO: 95394 - DNA, 489 bp, Homo Sapiens
  misc_feature (19)..(19): n is a, c, g, or t
ctcctgtctcacctcctgngtagctgagattacacacatgccaccaggcccaggtcaggagatatgtccatgaagtggagccaacaggaagaactggaaggagttatctaggccaaaagatcgggggtggaggccacatagcatcattaaagatgctgaataacaaggccatacagaacaatgtctctgatatacctgagagcttctcccttcaagtatttgactagaggcatgttgttctgtactggatctctgatcctcctcagaccaccttcacctgggagcttcaaccacacataaaacagtatatatggttgctttctcttatgtagaatgtatctgtgtgtatacatattaatatatacaaatatgaatatacagtttcaaatttattctttttcacgtctaagaatagtaaccatataaatagacatgttttagtagagtcttcaatgttttttaaaatattaaaaaatagatttttttaaa

SEQ ID NO: 95395 - DNA, 351 bp, Homo Sapiens
gagtattttattaaattaaataaacatttcttaggctgtgaaataaaatcctgagaagagtctttgattaaggtctctacatgaaggaaagagatctagatacttaaatgaactacaagttcatctgcagtatgaacttgggagaaactggatctattgactaggaggccttctcagctgccagggtttccttatttccctttattcattgtttgtctgggtgctaggagcaaaaggtaatatttttaggcagtctttctgtttgaaatacaaattattttaccaacttggtattgaattgttgctttatatcattaccttgaaggcaacaaagaagtgaagcgctggctg

SEQ ID NO: 95396 - DNA, 704 bp, Homo Sapiens
gcggccgcctgcatgaaccaaaagcatctgctgcgcttcatcaagcacacataccagacggagcctgacaggactgtggcagagaagcggggccggaagatcaccctgcggcaggtgtttgacggcctgcacatggacccctacgacctcactgtggactcactggatgtccacgcgggccggcagacattccaccgctttgacaagttcaactccaaatacaaccctgtgggggccagtgagctgcgtgacctgtatttgaaaactgaaaactatctgggaggagagtactttgctcggatggtcaaggaggttgcccgggagctggaggagagcaagtaccagtactcagagccacggctctccatctacggccgcagtcctgaggagtggcccaacctggcctactggttcatccagcacaaggtctactctcccaacatgcgctggatcatccaggtgccccggatttatgacatatttaggtcaaagaagctgctgccaaactttgggaagatgctggagaacatcttcctgccccttttcaggccactatcaacccccaagatcatcgagagcttcacctcttccttaatatgtgacgggtttgacagcgtggatgatgagtccaagcacagcgaacacatgtttgccgacaagagcccaaacccggacgtctggaccagtgagcagaacccacccta

SEQ ID NO: 95397 - DNA, 424 bp, Homo Sapiens
tcctaagtggcaggagtgggattagtgcttagacctgtcaggccccaagccacacaccctctttccctgtcccatggctgccccagacctgttattctctgaggccgcatgacctctcagtcagatagaagagaaagctgcttccgtagcacctcccggcaagcacaatcatggtggctttccagggggctgagtccccagccagggctgctgtctgctggcggcactggagcagaagctcactcaccgcgtggacatccagtgagtccacagtgaggtcgtaggggtccatgtgcaggccgtcaaacacctgccgcagggtgatcttccggccccgcttctctgccacagtcctgtcaggctccgtctggtatgtgtgcttgatgaagcgcagcagatgcttttggttcatgcaggcggccgc

SEQ ID NO: 95398 - DNA, 580 bp, Homo Sapiens
  misc_feature (218)..(218): n is a, c, g, or t
ctatggctttgccagaccccgggtgccgccaccccaatggaattgcaggactgttatctgagcaacgtcgacgggggagaacacccctgcccgaggttaaagatagcaccgctcgaatcacatcacaggccgaaaaggccagatgacccaccagggacattgaatccgtgtcccgagaggggtggggcgggggtgtggattcctgcggggagcttcgnggactggaaaaaacagagagtgctctgaccgagtgtttaccaaaacatgtattaggcaagacccgggccgaatgtgggtggcaccgcccctgtgctgggccaggagaatgtgcccgcaccggtcccagatcctgtttccccagtgggttgtacaagacaccttgaacttctgcatgaactgggacattcagaattccctggagcaaccccctccctccaccctgtgccttgatatctcctattaaagcttgtgtttgaatgtctgttaatagacatgatttaattattgatattaattcaaatgtattaatttgaattattaacttattaatcatttgatgtcgattaaagcaatgatcttg

SEQ ID NO: 95399 - DNA, 473 bp, Homo Sapiens
aaaacaggctctgctgacaaatctcagacgccaggaacagaagaaccgaaagaaactgcaagagtttgagccaaaaggatggactgttggagtagctgagggtgaagctgccggaactcctcaaagtggaacagcaaagccagcaccagagatggacaagaaaaacaaactatcaacgaaaattcgcagaaatcaaagttagatgctaaagcagcgaaaaaccgttcacgccacgatagaaacagagttgatgatggagtctgagaaacgaatcttagggagagaaaggacagcagtgaacatggtcaggtgctgaggattctggtccactggaccccaccatccctaggatagtaaataccatcccagtcatcacccagcaagttaccaccacagcatttcctgtgtgtttcaaaaaaataaataaaggtgattcttaacataagtgcaaataaaaagtcattcatcataaa

SEQ ID NO: 95400 - DNA, 454 bp, Homo Sapiens
gggaaggggctgaggttgacatggagtcctgatgtaaggagccgaagcagtgggattggctgatttgaggagatgtctctaagtgaattctcgtattcttaagggaaaagttattttccatacttgaagttatatttccaaacctgagaaatgaagaaagattgttctgacattaaatacctacagttactactgaacctcttaataaggatttgtcaaggatagagtacagttgtaggggaagtattttatgtatgcattcttagagcaaaaagttttgtttaaattctagaattgaaggtactgatcttataaaaagaaattctagcagttttagaaataggtgggaaaaactcaaatattcctcctatctgcaccaaaaagtttatttgtggtatataaaatgaatattgttttataataacttgttaataaagtactttctaatacattc

SEQ ID NO: 95401 - DNA, 1113 bp, Homo Sapiens
  misc_feature (153)..(153): n is a, c, g, or t
  misc_feature (376)..(376): n is a, c, g, or t
  misc_feature (436)..(436): n is a, c, g, or t
  misc_feature (540)..(540): n is a, c, g, or t
agtgacgatgacccgagcgacttgatcgtaaggacctcgttccacagtctggtaccagttactggcctcatcattaaggtctggtcagacttgatccctgagcctctcggaacagaggcgctgaatgtctagaaccttctgtgtctacaattncagaaaaatctgacagcatgcctagttacgcagattttactaaccagcaggctgtgtctaaacctgaggtcacccttttccactagccgagttagcatattaacttctaggatgacgctgatgagtaccagttaccaccatggtgcaaatactgacacagtagtagttctcatgggacctggaccagcagcctcagcatcacttgcaacttgtaaaatgcaanttctctggccccatccccgattcattaaattggactctgagggtgagatcctgcagtctngtgttttcaccgagcccttgagtggattctactgcccatgtcaagtttgagaaccactgcttaaaagcctggttttagttcctggtgaagatgaagaagaaaanacaaaatagtgcctgagtgcaaatagatgtttcagttatggatcaaaagatggccttagtttgctctccttattcctcagggagcacctgcaggaggaagagcaggagctctagaatctgctttctggcctcaccactcatttgctgtatggattgttaacacaggacctaacattctctgaattttagtttgctcatctttaaactggaaatgcagaaaaatgggagcaaatatatgaagtaaccagtgtaatatattcacatggcagatacaataaacattattacccttatttcagatttttttcctgtcccatatttaagaatagtaatgttcactgtcagcagtgttgttctttttttatatatccagtatataattgtatattgtgtgtgatgtatacatgttggagtatttcatactgtagagtgttctacaggttgttttctttttgagaatctcttatcttggtactttgtcaagttttttgtttgtttgagacagactgacaaatatttagagaattttgccaagttttgctctatataataaaataaccggcaattagcaaa

SEQ ID NO: 95402 - DNA, 355 bp, Homo Sapiens
aggagatgaagagtgtcatttattgtttcctcagttatctcaagaggtccacgtctatctctctcatgaagcgtaagcactcctctgactcagaacactcagttaactgaggtgctttttaaacagagatatggatttagatcatggagcatatcctctcacccgtgaccagtagccaatattgcagaacagctgacagaaatgtggtagggatgctgcgtgactacctgggcattactctacagagctggatcacagaacctaacttcattagcatcatagtctaatgagataactagtgagtgcaataaatacttgatgactacgaataaagtcagcaaagaaaacaaaaaaa

SEQ ID NO: 95403 - DNA, 616 bp, Homo Sapiens
tacatattattccaaagtgggagactattaacgaattcattatgactaacatttatcaggcaccactaggaaatagaggatttctttttcacagtttaagttttccttggtgacaaaatgacctaatctttggttgacaagagcaagatgaagaataatccattatgatgtattgtgtacatcagtgactcaggaagaacaaaagcagaaagaaatgttagcatcctatggaagaggacacagggctaggccttggccccatcaaaataaaaccatctgtagctccttgcacaataatgtcatcaccaaacaaaacttagaagacaaatgtaagaaacaaggactcatgcaagccagtaatctgtcttttcagctcataaatatggatagcataactgtgaatgttaaagagaataatgcaatgttagaggatacctcccaatgacgatgaacacatccttttactttaaagtaaatatactgcatgtgtatttctgagatacaaaatattcatttacatagtgcagattctgagaattgaccttttctgatgctgctggcatttcattcactgcagtgatgacctccatttcatcttatagcttctaatattttg

SEQ ID NO: 95404 - DNA, 666 bp, Homo Sapiens
  misc_feature (101)..(101): n is a, c, g, or t
  misc_feature (113)..(113): n is a, c, g, or t
  misc_feature (120)..(120): n is a, c, g, or t
  misc_feature (162)..(162): n is a, c, g, or t
  misc_feature (184)..(184): n is a, c, g, or t
  misc_feature (217)..(217): n is a, c, g, or t
  misc_feature (239)..(239): n is a, c, g, or t
  misc_feature (242)..(242): n is a, c, g, or t
  misc_feature (285)..(285): n is a, c, g, or t
  misc_feature (287)..(287): n is a, c, g, or t
  misc_feature (297)..(297): n is a, c, g, or t
  misc_feature (304)..(304): n is a, c, g, or t
  misc_feature (424)..(424): n is a, c, g, or t
gatcggggctgcttttgctcctagcacattctatttcttgttagttgttttagttgttgattttccttttgctgttcctgatccctgtaaagtggagatgnggttcttgctgnaaaaagnccactgctcaagccctttccctgcagctcaggtggggctcanactgtggctcctgcagccacgngggagaggctgatgggacttccttctctcccgntgctcataaccctccactgtgntgngtagagactcacttgtattaaaactctgacaaatgaaactagnantgaccatganggagggntcttaagcccatattcctgataacaagaactatcataaatatactctgcttaaccacaatcttgggaagaagacaccaccatcttataaaaaaattacttttgcaaggacatcatcccanaaactgccacttcaaccttacactgatgccacccttggtattgattctacaactacaggatcgttctctcaaaacaacttttgtaacccatccattttcacttcataaacctgtgaattgacatcctggagttactgctgcatttgttgataacgttaaataataaggccttttgacaatgtttgaagctgcttttttctgatgtctcttctaaaataaagaatttccaagttgatgacaat

SEQ ID NO: 95405 - DNA, 553 bp, Homo Sapiens
ggtaattgaccagcctcaacacaattttggacaaagctagtaactgaacacaggtctgtctgccccacacttctctttctcttgtaactgcacaatagcagaaaattggcaagatgtatttttactttccaagatgccgtgtgtgccaagaataaatgaaatgatgttaaagcataataataacatatctttaaaaagcttttcaaaatatattttcaccctgacagtgacccttgtaacttaaatgatttttggaaatattagtatgtaagtataattcaaagttgtcaaaatgtaagacatttagaagtaatttttattatttatattgttaatacttaatcactggaaattcattttccttactcgatgttttctttcaactgagaagcctaaaacaaacaaaaaccttgtgtgttatcctgatatagttgactaaatgtatttgttcttatatggatagtaatatgaatgtgacatgcaccaattgtcctattataattttcagataagtgtaactaagcacttgtgtaataaatattagtcattttaa

SEQ ID NO: 95406 - DNA, 405 bp, Homo Sapiens
ggggcggcgcggaagggtttcgttgctagggagatgggctgagccgggcgggcatcgcgccagacctgctactctggataatccactctcctggataatccactaccctggataatcggctgcccgcttttgcgcatgttagggagttgacggcctgtagcattctgatgcagcaaaatatttcgcagggtctgtcatagggatctccggtgagaggaggttcccttcgaaggcagaactggaaaccttgctgctaacttggtagggttgttgagataattacatgagatggcatatgaagggcggcttagttcaatacctggcatgtagtaggtgttcagtgggcgtagttaccggattgattcagatagtctgaacgccagtgtctcttgaaagaaataaact

SEQ ID NO: 95407 - DNA, 919 bp, Homo Sapiens
agaccgggaaagccgtttcacacccgtcctagtcgaagtcgagatttcctttggcttcaaagctctctcaccatattttgggaagttatggatcatcacattcccatgcatgcgttgcctgaagaaatccaaaagatgttgcctgaagaaaaagtttgtaagtactgtggagtcagctatctaattcttcatgaatttaaggctatggaagaaaaagtgaaagcaatggaaaaagagatgaaattttatcaaggaagtgtagatcgtgaaaagagacttcaagaaaagctgcattctcttagccaagaacttgaacagtacaaaattgacaacaaatccaaaacagaaagaatttacgatgtaggcatgcagttaaaaagtcaacaaaatgaatttcagaaagtaaagaaacaactgagtcatttgcaagatgagctaaaaattaaatatagacaatcatacatcttcagtcaaagattgtcagagtacaaatatttctggaataagactctttcattacttacttttactaaaagggaactaaccagtattaaaaatgaagtatatgataattaccaaaactggacttcattgaaagggagcagtttttctacaaattaaatctataagtgaaacagccttgacagaaatagacatactgaataaaagtttgacagtatcccagagaaataaagtatgccttgaaaagggaaatgaaaaatctgaaattgttgtcagatgcagccatattgagatctcagcagattcggacatctagacaacaggaagtaaacttgcaaaccagatgctatgatttgcaaaaagaagtactaggtaaagaaaagtcttttgctgtttttggtgactagttatataagtacatgaataaatgtttacatttttacttataattaaaaaa

SEQ ID NO: 95408 - DNA, 490 bp, Homo Sapiens
cactagtaaaaatgcatggaatgcagttctgggatgcttcctgtgaagtgaagacacttaaccaaaaataatatattattttggtgggcttgattttatagtttctcttaaaaattgtttggttgccatccagagggctcttttatgaagaatctatataaactactaaaacatttcttaggacctttttggtgaatttgatcataaaattaaaaagcgtgtatgtgttttataaaggcatacctctgttaagaaggctggttttatgtttgccttttcttctctactttgatcaccaccctagctgttcctttctccagaccaccttacttttcaaacttgattcttgctatcacagctctctgtaacatcagttaaaatcagctgcctcaactctttgaggatgtttgtgcataggacggcattgtgaaacatagggaaatggcagtcttactaacaaaacaggacctatctctggccaaaaagaaaa

SEQ ID NO: 95409 - DNA, 615 bp, Homo Sapiens
tttaaaaatcacatatttaatcagaaacttagaaaaggctgaaaatagattcaattatgagatcagcacatttgttcccaagcattacattttcatctgcgttcaacacatgcctcttctacttaagggtcccttccatcaccttcggtttagtctgcaatatgatcatcctatacttaagataaaggcatttatacagtatatgttgtaaataattattttttcactctccccttagcaggtatttgcatctaagttcaagtcaaactgaggaggaggactggggttagaagattcaagcaaggcacggcagtaaaaaaggaggcaaggccgaggcaggatataaagaaagattgttctacaagcaaaactcatagaaagccttatttcagtcatgcagtaagagtaaggttactccagtagtttggtgaagaggaaggaaaagttttaggtacatatactgaatcacctttggactaagtcatagattacaactaattaaatgcataataaattggtcctgacaattacataataaatgctatcaaatgacatttgaaaggttattcttttcaaaaataaaactgcccctattcagctattggtgcagtacct

SEQ ID NO: 95410 - DNA, 347 bp, Homo Sapiens
ggcaagaaggcagtgtgctacaatgaagagtgtgatcttagaagtcaggataatctgagttctaattccatgcacctactttcccaaactttaagggccttgcaaaaaaggcacttaaaatccctgaattcagtttctctgcagatatatatcataaaagccatctataagaggcactgtgaagatttgagatcatttattcctataatatgtattgggtgcttgctctgtgcctggtactgagagaccatggagaaccacagtgtctgcctgtcctccaggggctctgtcagtaacaacacactcatgcctaacaagctggaatgacaaacgtaccataaaactaa

SEQ ID NO: 95411 - DNA, 856 bp, Homo Sapiens
tttgcctattgtggtcctaagaggaaagcacagtgccagctttttcaggatgcatttcttgagtttccaaagggccaagtctgctaaacagagacaggaatgttcattcactctgatttggcagggcacagggcaaaaccaccctgacactcaggtacacggacagcaagtccactttgtccagccccggcgtggcgtccaaatgctgggtggtgggtctggttctgtttattttgttgtccttcaacccaaacctgtacacaaagaactctatgacaatggaggatcccactcggcccaacttcactatggaaacgaggctcatttctaaagggagtgagactgttgattacatccctaagctgaacaccccaattttactttgttgtagttctgactccttattactttcacgaagggaaggaaggtgtggaaaggcaggagaaaacacgcagggacataagcatttgggctaacacacagccacgatatcaactggcgtcttcaattctaaaagggatcctaggggaaagagcttcagaatcccaggacagttttgccaatcctggccgccccaccctggttctgtgagtgtttccattacaactgtgcttcatgtcctctctaccgactcctgactcccctagacaagtcagggctagtgcccaaagggaactcggggacaagtctcccactctttatttttacagatgaggaaacaaagccggaagtcggtggggtggggaggggacatgcctagggccacagtcagcccaggaggagtctgggctagaacctcttgccctcagccactgatttcagaatgattacacgggggaaatgtgggtatttttaa

SEQ ID NO: 95412 - DNA, 570 bp, Homo Sapiens
gggatcgcgcggggctcccacaatgtacacggtgcactgctgttctgagaacgtcctcgcttggctcccttgaagggttcaaccgggagcctcgggtcaatgggaattccgttctaaatatgccagtgaatggagtataatttttctcgggattcagttgaatttatcaatgaaatctaaatacgtgctttcccaagggtcctggcaactgaaagctcccagcttttgcccagacgctcctactcttaacccacaggaaaggaacactcgttggagggtccacgcctgtgtagtgtcgccggcttttcatctcccctgtagagatcgcggcccttgggcggagctgagggtgccggtagcgttttcctccgcgagatggagctgacgagtacgggagggggggtgccctcagactcagcgacaggataaaagactttataggaatttgcacagaaggtgcggggtgggggaggttgttgttgttgttgtttatttatttatttttagaaaaaagctctgcctccgttttattagcaaataaaaattatggagaaatgtaatagccaaaaa

SEQ ID NO: 95413 - DNA, 891 bp, Homo Sapiens
  misc_feature (62)..(88): n is a, c, g, or t
  misc_feature (549)..(549): n is a, c, g, or t
  misc_feature (576)..(576): n is a, c, g, or t
  misc_feature (607)..(607): n is a, c, g, or t
  misc_feature (616)..(616): n is a, c, g, or t
  misc_feature (754)..(754): n is a, c, g, or t
  misc_feature (794)..(794): n is a, c, g, or t
gtgctaatgctaaaattaaccctcaactaaagggaataagcttgcggccgcatacgcgttcnnnnnnnnnnnnnnnnnnnnnnnnnnnaacattttaatttcaacgtgccagcatttgtccaaatgagatgatacaggctagaatgcacggcggaattccagactggactcactccataagccaactcatcactgcccgtgaacatgaattctggtcctcagagaagctgacattgtttccctgaacattcccgtggtctccctctgaaagccgatgaccatccaaccctgactcacctgaaatatcctacgagcatcgccctccgagactgacgattattaaccacccacacggaaaaagaaacagcccctccatcacccacatcttgtacacaaaaaaatgccaccactaatgccataaattcaggcaggttcctctatccaaaggctaaactgcttcaggtgacctaaaaagtggccacgcctctccacgtaaacacatccagctgacacaggctaggatcgagttctcccacggccttcctatcncgtctctaatttactctctgcttttcnctggaatgtgcatgagaaataaaccttccanacatttcanaagtcgcactttcctcctttattacaacgatgcccatttttaacgacactctcggtggcccctgacagctacctggtgagatacacagcatattgttgccattgaatgaagatactctgacaatgaggcttctcgtgnaataatttcccgtctcataaactgagaatctctggaaaanctgaatgggatggctttaggaggccatgatcactagttattgaaactgagtattgagggtaaacaagcatagcatcaaggtggccactgacctgatt

SEQ ID NO: 95414 - DNA, 444 bp, Homo Sapiens
cagtggcaggacgacaatcacagcaattgtccagactggcgggggctggagcaccggtctcttcagtgtctgcagagataggagaatttgcattatggagagtgtctttgttggccgttgttacctgggtccacctttgcactgagaattggcaccagggagagacataaaatacagggcacactgtgtgaagactggctggcggtgcactgctgttgggctttttccatctgccaggtggcccgggaactcaagatgaggacctcccaagtctatgaaatctgtgcagtcccaatgactaaggacaccctggtttgacagcaagataactcctcctccttactccccaacaccctcctctcaaacctctcagtggaacaattgctttttcctaagtttttactgaaatggtatgaaaataaatgatttcccccctaaaaaaaa

SEQ ID NO: 95415 - DNA, 850 bp, Homo Sapiens
  misc_feature (290)..(290): n is a, c, g, or t
cctaaatattgttgattataaaattagtatatgcttgttgtgggaaatttgggaagaaagtagaaacgtttgaaatcctatctcccagagacaactactgttaatattctgctgtatttcctcgccgtcttttctctctgccctttaacatgagcagaatatgaaattccatatcaagcatgtataatatcatatcgtgccttttctactttataccacatgcactttctcctgccacaaaatattctttaaaaagctgtatgcacttaaatggactccccccacccccnattttaaggcactgcatgtcttctatagagattcagataagtccttatctgaatttctacatatttctctaggactgattcctagaaggtaaattatcaggtcaaatacagtaattctttttcaatgaaagcctctctcagctctctaaacatactggcccagttgtgggtaggggttggttcacagttagctgcattatttgcagagaacaattgtgttttatgcgggatctgaaattgggctttgctgtcccaggactgctgctcacagaggagccctgttctcaaatcctttttcttgaggtatctgtagatcatgcagcatactgtggccatctgagaaccacactccccagcaggctgtgtggggaagagcgggccatgctttgaaagctacagaattgtttccttgagtataagcacgagcgtggctctggaagaatccagtttccctcattaaggagcaaatgagttgacccaggaaagtcagatgcacgggccttggtctatggtgtcctcgccaaccccgtggtaatcaggagccatgtgctgatggtgag

SEQ ID NO: 95416 - DNA, 424 bp, Homo Sapiens
cattttaataatttatttaacacattcaaaatattgtcattttgacatgaggcactagccacatttcaagtgttcaatagccatctgttgatagcacacttctagagaattaataatcttcatgacagacaaagccttagtatgatattgaaggaacatgcaggcatcctccaggtcacagctacattctggatcatttttcctaccatatctacataggtctctgtgatctaattggccagggctacaggaaaggtgggtctaatctatggcctttgaaagggcctgtggaaagcagccgagtaaacatctagtgcaacatatgctcttgtaaaggcatatcactggctaaggggcgaaacattctgccagtgggacagggtggattagaaaagacttcacaaggccaggtgcggtggctcat

SEQ ID NO: 95417 - DNA, 2083 bp, Homo Sapiens
  misc_feature (1143)..(1143): n is a, c, g, or t
  misc_feature (1258)..(1258): n is a, c, g, or t
  misc_feature (1836)..(2032): n is a, c, g, or t
gctggtaccggtccggaattcccgggatctcgcccgctcccaggccggacccgcgcccgggacagggacccggccgagtcgagccgtcgcgccagcgctgcgccgccggtcggtgcgcctagcggatcggagctgcgcgcggaaccgtgctgccccgccccgctccacccgtgagggtggcccgaggcagccgggatgacagctctccccaggaatcctgctgcctgctgagaaacatggtcagcaagtcccgctggaagctcctggccatgttggctctggtcctggtcgtcatggtgtggtattccatctcccgggaagacaggtacatcgagcttttttattttcccatcccagagaagaaggagccgtgcctccagggtgaggcagagagcaaggcctctaagctctttggcaactactcccgggatcagcccatcttcctgcggcttgaggattatttctgggtcaagacgccatctgcttacgagctgccctatgggaccaaggggagtgaggatctgctcctccgggtgctagccatcaccagctcctccatccccaagaacatccagagcctcaggtgccgccgctgtgtggtcgtggggaacgggcaccggctgcggaacagctcactgggagatgccatcaacaagtacgatgtggtcatcagattgaacaatgccccagtggctggctatgagggtgacgtgggctccaagaccaccatgcgtctcttctaccctgaatctgcccacttcgaccccaaagtagaaaacaacccagacacactcctcgtcctggtagctttcaagggcaatggacttccactggatttgagaccatcctgagtgacaagaagccggtacgaaagggttcttggaaacagcctcccatcatctgggatgtcaatcctaaacagattcggattctcaaccccttcttcatggagattgcagctgacaaactgctgagcctgccaatgcaacagccacggaagattaagcagaagcccaccacgggcctgttggccatcacgctggccctccacctctgtgacttggtgcacattgccggctttggctacccagaccgcctacaacaagaagcagaccattcactactatgagcagatcacgctcnaagtccatgccggggtcaggccataatgtctcccaagaggccctggcccattaagcggatgctggagatgggagctatcaagaacctcacgtccttctgacctgggcaagagctngtagcctgtcggttgcctactctgctgtctgggtgacccccatgcgtggcttgtggggggtggctggtgccagtatgacccacttggactcaccccctcttggggagggagttctgggcctggccaggtctgagatgaggccatgcccctggctgctcttatggagccgagatccagtcagggtgggggcgctggagccgtgggagcccggccagggcagggggctcgttgctgtggcaccccctctctgccagcaccaagagattatttaatgggctatttaattaaggggtaggaaggtgctgtgggctggtcccacacatccaggaaagaggccagtagagaattctgcccactttttataaaaacttacagcgatggccccaccaaggcctagacacggcactggcctcccaggagggcaggggcattgggaatgggtgggtgccctccagagaggggctgctacctcccagcaggcatgggaagagcactggtgtgggggttccaccgagaaggggacctcatctagaaaagaggttacaaacctaccattaaactatttttcctaaaacggnnnnnnnnnnnnnnnnnnnnnnnnnnnnnnnnnnnnnnnnnnnnnnnnnnnnnnnnnnnnnnnnnnnnnnnnnnnnnnnnnnnnnnnnnnnnnnnnnnnnnnnnnnnnnnnnnnnnnnnnnnnnnnnnnnnnnnnnnnnnnnnnnnnnnnnnnnnnnnnnnnnnnnnnnnnnnnnnnnnnnnnnnnnnnnnnnnnnnccccaaaaggaaaggaaaaggggccaaacgtgttcccaaaaaaacccgggc

SEQ ID NO: 95418 - DNA, 546 bp, Homo Sapiens
  misc_feature (119)..(136): n is a, c, g, or t
ttttttagtttatccaacaaatatttattgagtatgtatgatgtacagccattgttttaaatgctgagggtatagcagtgatatacagttcctgcttacatgaaacttacattccaatnnnnnnnnnnnnnnnnnntttagatataatgttggttagcggtaagtgcttttgagaaaatcgtgaggaaaggattggagagtgacaggttgtaattttaagagggaggccggggactgcctcttgatcattaacatttgagcagagacatgagtcaggtgagagagcgggctctgcggctatctggagaaagagcgttctaagctaaggcaacagccaatgtaaatgccttgaagtagaagctcccttgtattcaaagaataccaagaaggccaacgtggctgcagtacaccgcacaaggggagaacagtaggctatagggtcagacacgtagtgaaggacaggtcattagggccttacagatctttcaattttttctaggctgtgatggaaagccacaaagaagagaatcacattttaaaataatt

SEQ ID NO: 95419 - DNA, 260 bp, Homo Sapiens
ccttggccagaagtatgctttaggaacttaatccttattttttagcctctggtaaaattggttttgctatacgttgtttcacttaaaagtcctgattcccaagaacgcactgacagcagtgaggacttgctgcgcatgcgggaggccagattttcttatctgtgtgaagccagacatgaaagagatctgtcaacacataaaacaaaatcaaagtctgttttttgtctggaaaagatttttaataaaaatataacttatgt

SEQ ID NO: 95420 - DNA, 660 bp, Homo Sapiens
ccggttgagtgttcctactgcacagtgagagtatgatggatttggctaccgatgccacaagtgtcacaataccagctctgtcaggactgcttttggaggggacatgccggtggttctcatagcaaccagcaccaaatgaaagagtacacgtcatggaaatcacctgctaagaagctgactaatgcattaagcaagtccctgagctgtgcttccagccgtgaacctttgcaccccatgttcccagatcagcctgagaagccactcaacttggctcacatcgttgatacttggcctcccagacctgtaaccagcatgaacgacaccctgttctcccactctgttccctcctcaggaagtccttttattaccaggagctcggacggtgcttttggtggatgcgtctagatggataacatgacttcttctaccctaaaatattcctataatactttgagctgttctggttcctccagggtgcatggtacccattaacccaaaatatgattatttcccttttttcccattttcagtcattttggaatgttctctgtgaaccacagttgtgttgtttaaagctcacatttctttctgtcaccacagagattggcctacggtttctgttttgagggtgctgttcaataaagctgtgaaaactaaaaa

SEQ ID NO: 95421 - DNA, 492 bp, Homo Sapiens
caactcatgaaatggaaggtcattcttgcaataaattccagtaaattctgatggatttttcttatgagtagtaaaaggtggtaaggttggttttgtggcagggatttcgaccctcaaatgtggtcctttagctgcaaaaatttaagaacagatgaaatatagctctcatgtggtaatatctagggtgcctgaggcaaagctcactgagaagatggcctggccgacttgagaattctgaattcattgctttctatctacaacagccgtgggaagcacaggaaaggcagcactatttctgctccaccaaaaatgtgttttgtagcacttcaccccaggatcatggagcggagtacttatagagactgacacttcgatcatacatacattgacacatcacattgcatcacatctcctgaattgaattgatgaaggaaatcagaaaagggtgcctacattcaataatctgaattcttcgagacagctcagtactct

SEQ ID NO: 95422 - DNA, 505 bp, Homo Sapiens
tcgaatcgcaatactgactgcgtggctggcggagctcgttaatgggtgatgccggccatgcttctggcagtatgtcaggctaacaggtgctttatttccagagaatcgttaatgcccttttttgaaaagagcagcagaaattccggacaagaatctgaaaaataggtgtcaaaaactatttcccagaaggtagctgtacaggagtttgagtctccagctgccagggcattaggtgtctagtcactccactcttccccaaagccgctctgctccccacagctcccaggtgtcagttctcattctacccaccctcacactaagagaggttctggggatcactttatcttgttccactcagtcctctctcttggggtggtttggggcaaatcctgatcatcgtctgtgttaaatgtttccctgtcccccttccccagggtggtttggtgttggtccttctcaacacacactggttacaaacacagcaaactttaaataaaggagaaac

SEQ ID NO: 95423 - DNA, 312 bp, Homo Sapiens
tagactaaaagtttcagacaccttgttcaaatatcccattagttgctagagacttaaaatgaacagaacgcacattgtcaggatggctattaccaaaaaatcaaaagacagcaagtattggtgaggatgtagagaaactggaacttttgtgcactgtttatgagaatgtaaaatggagcagctgctgtggaaaagagtatgcaggttcctcaaagagtaaaaccaagatgtggaaacaactaaatgcccatcagtggatgaaggggtagacaatatgtggtatatacataccatggagtactattcagcctc

SEQ ID NO: 95424 - DNA, 610 bp, Homo Sapiens
ttgggattcatcagtgaagaggagcttgggcaggtataacagatggcggggccaaggatcccaacttgctttccagggtgttggtgagattccagtgagacgctggaagggcaagttttcatcaccaatcaagggcctgcagatccaggactgacactgctcgtggacatgcttacctcagaaagctgatatattttaacattttcctgagccaccgtttgcctaggctgcatgacataccaattcttatggaaggactcagtgctcaccatcctcgaaaacctgattcaaaacctatcttgccattcttgcgtgctcctaaaagaagagaaaaaggcctccagttagaggccatcaacaaaaatgctgaatgggtcatcgtatttcctaaaagtcaagaacaaagaagacccagacaaggcttctgagaactatggagacgtatccagatgccacactgaaaatacaattccaccacccatccattatttgctcaggcatataacaagacatctcttttcactggtttctcttctgccacctgttaaattagaaaaacaactagtcttataaatgaataaaggtgcttattatagatacataccaaaaa

SEQ ID NO: 95425 - DNA, 338 bp, Homo Sapiens
cagaatagtcacttttgttggacccagacaaaatagggccgggaaggaggcacatgcatgcatgtcggaggtaagaactgcttccaaggacttactaaaaactgcttcacacgcttcatgcttctcctgctctgataaggtttgtcattaaacattctttaggactgcaataattcaaacaagacattctccaaaggatacctgctcagtaacagcatctccgtcaatgaactgataacaactcgggctttgaacctatggaacccatggactctgtttctaagcagcttatgaaaatctttttttgctaataaaagttccccttacacagaaagaaa

SEQ ID NO: 95426 - DNA, 692 bp, Homo Sapiens
gggcttcgcacggctctgtgccctgtccccttcaccccaggggctaaagaccctggaggagctcggaatcccaggcttccagagcctgactcctgccctttgcccactgcccagcaaagtccgggctctacgttccatcgccacctggtcacccggtccctgccctgttgttcctcttttgcaggacttggcttggctctcttgtcctcagtccacgtcttgtctcaaacaaaggccctccccagacacagtacgctccccagtagtgacatgtgaacagccacacatccctgatttccagggacacttgtgacttcgcgtattcaccctccattttaaaaagtcacatttcccatgaagtgctgggtacagcattcaaagcgcatctcctggactgctgtgtgctctgggcagctgccagaggagaccgtggcaggatgtatgccactgtcaccagatgaataaccccttcttagcatacgttgcaatataatcaaatcccatcgtgcctgtttggggatgttaattccagaatttgatgttatgttttatggtggtaagaacacatgagatctggcctgctaaaatgctaagtgtccaccgcagcatcgcgactatggctgtgatgtccggctagcggagctctagagctcattcatttggcgtaattaaaactgaactgccggttgaaa

SEQ ID NO: 95427 - DNA, 1125 bp, Homo Sapiens
gagtatgaagtcgacggcgcgccgaattcggcacgagggctgcccatcccctccccaccggcgtcccggacgttgggacctgtgaccgtggcctcgggctgggcttccaaagccggccgcagcccggcgacccccgaggcctctcgccccgggcccctagacctctcactatgaccgcggccgccgcctccaactgggggctgatcacgaacatcgtgaacagcatcgtaggggtcagtgtcctcaccatgcccttctgcttcaaacagtgcggcatcgtcctgggggcgctgctcttggtcttctgctcatggatgacgcaccagtcgtgcatgttcttggtgaagtcggccagcctgagcaagcggaggacctacgccggcctggcattccacgcctacgggaaggcaggcaagatgctggtggagaccagcatgatcgggctgatgctgggcacctgcatcgccttctacgtcgtgatcggcgacttggggtccaacttctttgcccggctgttcgggtttcaggtgggcggcaccttccgcatgttcctgctgttcgccgtgtcgctgtgcatcgtgctcccgctcagcctgcagcggaacactgatggcctccatccagtccttcagccgccatggccctcctcttctacaccgtgtccatgttcgtgatcgtgctctcctctctcaagcacggcctcttcagtgggcagctggctgcgtgcgggtcagctacgtccgctgggagggcgtcttccgctgcatccccatcttcggcatgtccttcgcctgccagtcccaggtgctgcccaactacgacagcctggatgagccgacagtgaaaaccatgagctctatataagcattcctcccttaatgtggtcaccaccattctacgtacatggtggggtcacacggctacgatcagctacaccagagagccacggacggcaacgttgattcattgcacattacccctcgaagacctgatgaacggagagcatgcatcccgggtgggcataccatgaatgtcccagtgcgctgcgagagctacccccatgaatgaacctggcatggccggcagggaccatagccagcactgcagtgagcgcgaccagacaag

SEQ ID NO: 95428 - DNA, 452 bp, Homo Sapiens
ggacttacctgacagttagagaagacagccataaagattcagtcatggtggcgtggaaacatggtgcgccgcacgttactgcaggcagcactcagagcctgggtcatccagtgctggtggaggtcaatgcaggccaagatgttggagcaaagacggcgcctggcactaagactctatacctgccaggagtgggcggtggtgaaggtgcaggcacaggttcgaatgtggcaggcccgcaggcggttcctccaggcacgccaagcggcctgcatcatccagtctcactggcgctggcatgccagccaaacccgaggcctgatccggggccactatgaggtcagagccagccggctggagcttgacatcgaaatcctcatgacctagggcgctgacagagccaaggaggctggatctctcttccaataaagacccttgacggaccatagagggga

SEQ ID NO: 95429 - DNA, 607 bp, Homo Sapiens
cttggactcgagcaatccttcaggctaaaaggtttatgaagacatctgtcttgtccggcatcatatcctgggacccacaaagtgactgaaatatatctggtggtcaatatatatttgcatctttcaatttagaccggccacatttcaagtgctcaatagccgcatgtagctagcggctacaatattgaacagtgcagctctggaaatttaaaaaactgaaagcctacaagaagcaaaacagagcagagagtcataagcagggctgatagccattgtcatcaaagtctccctctctgcacacacagcacttgacttcatccactctgtcagtcccattcctactaccacaaatctaaagcagcctttaggaaagtcccagagaagaggacctcagtctattagaacacggaaagaataagcataggaaaaatggagatgaaatcaaaatctggtataaataaagaagactatacattccgagacaaaatataaccgtgcattcattaaacagattttaatgccctgctggtgctaaactaaagctgtggatatgtcactgaagaagaaaactataggtaactaataaaacacaaattcatttaaaaaa

SEQ ID NO: 95430 - DNA, 341 bp, Homo Sapiens
ctgaagaatctcttataaagaggttgctagtgctctttttgccttatacaaagccattatcttcattatcctgatcagaaaacacagcttcctcttgccctgatataagacactcttgctgtcttccaagattgtttgctatacaaacattcttaaaaagattgtccggacctaaggctgtttattccttagtggacatgaagaaatgcaaaatacccacggagaattatctcccaagagcatccaagagcaggctgctcatcaatatatcaaaaggatgtttaaatttcttcaagatttactaacagtttgaaaaaaataataaaacaagtatacttaaa

SEQ ID NO: 95431 - DNA, 202 bp, Homo Sapiens
ctgggcaacatagtgagaccctgtctctatggaaaaaatacaaaaattagccaggcttcgtggtatgcacctgcagtcccagctactccggaggctgaggtggaaggactgcttgtagcccgaggggtcgatgctgcagtgagctatgatcacactactgtactccagtctgagtcacaaagtgagactctgtctcagatta

SEQ ID NO: 95432 - DNA, 450 bp, Homo Sapiens
tgctggtctttagggtgtctggcctccaggaatcctagaggtagtatttggagagatttttaaaagctttgtttctgtgaccagcaaaacctggatttgacactgaggtcagcccgtttcagccagtgacgtaacctgtctttttgccccagtaaattgggaactacagcactcgatgttagagttgtcgtgaagattaaagaaggtgacgactggacaactcccagcccaatacctgaaactgtaccagcacccagtgagcactgctattcctgtgactgctgcacatttgccttatctcagcagtatgcctgtgtcacttttttggcactcttttctcatgggtacattcagagaagaggaatgtttgttcactggtgaagagaacatcccgtgtactatcgtgtagaagttgtagtagacgctgtggtctttccaacaacaaacaaa

SEQ ID NO: 95433 - DNA, 652 bp, Homo Sapiens
cttgtcagcacctacgccaaaggcttcaccatcatcatcgagccctttgacgacagaaccccgaccattgccaaccccatcctgcacttcagctgcatggacgcctcgctggccatcaaacccgtatttgagcgtttccagtctgtcatcatcacatctgggacactgtccccgctggacatctaccccaagatcctggacttccaccccgtcaccatggcaaccttcaccatgacgctggcacgggtctgcctctgccctatggtgagtgggagaggctagggctggggccgggaggggagatgggggcaaggggccgccctccttccttggcttcccccactgctcaggcaggagagctttacagcgaagaggctgggttcgggattcagacagacttaggcttgattctgcttctctgtgggctcgactctcaagcctcagttttctcatctgtgaaatgggaatgtatcctccctgatctcccagggtggttgagaggattgagagagagaactggggtaaaccacttaggtcgcccagggcctggcacaggtaggcgcttagtcagcatcttagcatcttgccgagtacgtggtctggctgtgacccaggtaagtgagccttcctctccgtctccgtctgaacaaag

SEQ ID NO: 95434 - DNA, 470 bp, Homo Sapiens
ctctaaggtggcacaattttaagaaaataccatccatttttctcagtctaatctgaatccatacattaaaacaaaagtgcaagtgatgagatgaacatcttgttggagaacaaagcatcttgtttgagaatgaaaaccctttttaaggttaatatctaccaaggggttccttatttgaggatggcttacttttgtttttttaaaaatatgacagcgttgtataaattgctggggttggatatttaagggtagatggtgtgaaggctgctgactcagtgaatttccaggagtctcattctgaaagaatcccaccatggtgacagccacaaaaacatcacaaacatctgttggggagcgactcgatgacacatggcaaaaatggaatctcagatgtttgggtaatgagagcccagacatattgtgatccagaactcccattatacagaaggggaaaattaggactgagaggt

SEQ ID NO: 95435 - DNA, 450 bp, Homo Sapiens
gaaatacctgattatcaatcctccattttgcagaagagaaaacagattctcagagagctaaatgccaggcttgaatccaaattagtctggcaccaagatcggagcatttaaccactatactgcctcccagtcccgttcaatggggaacaaacacttctacagtctcaatatcttcacaaaattctcctaccactccagtcttaagtgaggataggccgtccccctgcagcgccagatctgcacactgacctttactgcactctttctactctcttgtctcccactcccactgggagcccagacactggcttcagaagctctcctcctcctcctctattgaccatcctcttcatcctctcactctctactggctgcttcctacccacgaattgtgggaaatatgctaaaatatctccaatttttaaagtacaacaaaattccacatgaaaa

SEQ ID NO: 95436 - DNA, 702 bp, Homo Sapiens
  misc_feature (688)..(688): n is a, c, g, or t
ctcctgggccattacccggacttcctggctgctggcatcatcctcctgccctctgcctttgtctcctgtggagcccgcgtgtcctcctggctcaatcacaccttctcggccatcagcctgcttgtcattctcttcattgtcatcctgggcttcatcctggcccagcctcacaactggagcgctgacgaaggcggctttgcacccttcggcttctccggcgtcatggcccgcactgcctcctgcttctatgctttcgtgggcttcgacgtcattgccgcctccagtgaggaggcccagaacccacggcggtctgtgcctctggccatcgccatctcgcttgccattgcagctggtgcctacatccttgtctccaccgtgctaaccctcatggtgccctggcacagcctggaccccgactcagcgcttgcagatgccttctaccagcggggctacaggtgggctggcttcatcgtggcagctggctccatctgcgccatgaacaccgtcctgctcagcctcctcttctccctgccacgcattgtctatgccatggccgccgatgggctcttcttccaggtgtttgcccatgtgcacccccggacacatgtgcctgtggcgggcaccctggcgttcgggctcctcacggccttcctggcactgctgctggacctggagtcgctggttcagntcctgtcccttgca

SEQ ID NO: 95437 - DNA, 372 bp, Homo Sapiens
tcttcccagaacgtaatgtgtcttaaatccgtcatgctgacctggggccctgggtgcccttgggcaggagctgatggcactagtaccttgataaagttcttactggcaccagaagagaataaagtaactctccttccccttctctgacttatggccaggtgcccattcccactggcttgccgctccccagctccctgcgctttatattgttgaggcctcctctctcagctaagaaacaggaagtacacagatgtgtattcttaaagacagcattagccacggggcccccaccctcaaagggtgggagcgataactgctgctggttgaaactgacagttactactgataataaagttaattgttacccagtca

SEQ ID NO: 95438 - DNA, 876 bp, Homo Sapiens
caccatctcacaattagtttaatctgaaaaaaaatggattataaagttaaaagctacagcaactcttttttgtgctcataaaaggcatcatctgtttttttctgtatcaacaaaagtagaatgttcaagtttggatcttggtgtaagatcaacaatagatctgtacctctgactccaatgcaggggctcgtgggatggctcacagtggaatcatcaaacggacttccttctcatagatgtcagggatcattcccactggggaactgaccatgtgcacagtgttcttgccaaacaattggaactcatagtggatgagctgctcccaaaagccgctgttgggtcggatgatgggccggcatgacttggtccacgtgtgggcgtccagcagggacatggcgtggtacttcatgaggtaggcgaggcacagggcagctgagcggctcacaccagcagcacagtgcagcaaagtacggccctgcttcatctccacgctgtggatatggtcagcaatagggtcaaagaagtcacagagacgtgagttaggggagtcagccacaggtacctgcatgtactggatatcctcatacaaggtgttcactacctccactgagacattgatgaccatggtgatctggttgctagacagcatgagcttgttgttggcggccacaccattgctgatatacaggcttttggttatctgcgagaggccgctgactgagggctgccggaactgaactgggaaggcacacgagggtgctgtcatcaaggcggtgggtcagtggtcagcagtcagcgaagcacgaaggctgcgtctttctgctaggctgtgtccatggaaaactgctcgataggctcagtcgccgctaagtaatt

SEQ ID NO: 95439 - DNA, 364 bp, Homo Sapiens
tttgaataaaaaaccatatatattggggaatattaaatgttctgcatgtactaacatgagagaaaatacttttcctctacatagagtgaattttttcttggggacttgtttttctccagggaaggctaaaaaagaatttgtgactgaccaaatcagatacctccccaaaaaagacagtgccttggacagtggtgatggtggctagaggcaccggatgtcttcggccagtgctgagggggactgactggggatacagctttcttggggagcaagagttggggatgtcgcaggccccattgctcattgttgcaccgcacacttttcaagggctgctgatctctgatttgtctgtctctgttgggac

SEQ ID NO: 95440 - DNA, 749 bp, Homo Sapiens
gggttttcatacagtctcggggttttaaaactttgaaatcaaggacacgacgtctccagtctacctccgagagattagctgaaacacagaatatagcgccatcattcgtgaaggggtttcttttgcgggacagaggatcagatgttgagagtttggacaaactcatgaaaaccaaaaatatacctgaagctcaccaagatgcatttaaaactggttttgcggaaggttttctgaaagctcaagcactcacacaaaaaaccaatgattccctaaggcgaacccgtctgattctcttcgttctgctgctattcggcatttatggacttctaaaaaacccatttttatctgtccgcttccggacaacaacagggcttgattctgcagtagatcctgtccagatgaaaaatgtcacctttgaacatgttaaaggggtggaggaagctaaacaagaattacaggaagttgttgaattcttgaaaaatccacaaaaatttactattcttggaggtaaacttccaaaaggaattcttttagttggacccccagggactggaaagacacttcttgcccgagctgtggcgggagaagctgatgttcctttttattatgcttctggatccgaatttgatgagatgttttgtgggtgtggggaaccagccgtatcagaaattttttttagggaagcaaaaggcgaatggctccttgcgggagatataattggctggaataaaatacattttgtgtgggag

SEQ ID NO: 95441 - DNA, 501 bp, Homo Sapiens
aaaatgaaaacatgtccacacaaagacttgtacactaacgttcaaaacacttgcataccaatgttcaaagcagcattattcctaacaggcaaaaactggaaaaacctcaaatgttcttcaactagtgaatgaacgaagcatccacataatgtaatattatttatgataaaaaggaataaagtactagtatgttacaacatggatgaacttaaaacacattaatgaaaaaaacacagaaagatcacatataacataaaatgtacagaaaaagacaactctagagacacaaagtcgactgagtagtgggtgcctgggattagaggttggacgggagattaactgtaaactggaataacggatcttgctgggatgatgttctaaaaaatggattatggtaatggttgcacaactcagcatatttactaaaactcactgaattgtacacttgaaatggttttaatgatatgtaatttgtacctcaataaattcctttaaaaaaaa

SEQ ID NO: 95442 - DNA, 436 bp, Homo Sapiens
tggctagtaattgtatgtgatggtccacaaatgggaggaaaatgccttttacctgtggggtgaggctgtagagtgtagtgtatctataggtcacttagctgttaatatgaagtggccagttacatagcccaggggtgcttctctccgtaaaatagctgctgctccagcccattacattaggctgtggcttctggggtgttcttatggggacaaggtttgacaagcgatgctggggttcactattagaaaggtttggcaattcttttgctccttgtaacactcggggctcattttctcctgtcttcttagtaagttgttgcagaattgattaagtaaaagaggccagccacataatgtactgaaagaaatgtcatactagccccacattccttttatgtgaagcccttttaaaaatgaacacaacccactctttaaa

SEQ ID NO: 95443 - DNA, 578 bp, Homo Sapiens
  misc_feature (451)..(475): n is a, c, g, or t
cttggcttccttttaaaggccttgctaataccatgaagtcacccttgtctatgcttgaaatggtgaagacttgctgttgcgataaacaagatcaggaactatataaatccagcagtagttatactatttttctttgtattctggcaaaagttgttaaaaaagcaatgaagagcaatggccctcatccttggaaacaagtcaaaggaaggtatatgcagtatcttctgtcatgagtgtgcactgatatctttggataggtgttactatttgtattttgttatgtttacttgggattagagtcttaattagttataatgttactaggtaatccattatatgcatttgattaaaagtgatagaaacaaacatcttcaagttgtacgttggtaggtaatagtttcaacatataaaacttttgtgttctttgagcccagcggttcacaagcactgnnnnnnnnnnnnnnnnnnnnnnnnnaaatgagaactgaccacagtatagtagaaccagataactaatgttctcatttgggaactatgctgttttcatttctgataaaataaactttggtcacattaaa

SEQ ID NO: 95444 - DNA, 1015 bp, Homo Sapiens
  misc_feature (41)..(92): n is a, c, g, or t
aaacaagaggtttctgcactagcttccatcttccagactcnnnnnnnnnnnnnnnnnnnnnnnnnnnnnnnnnnnnnnnnnnnnnnnnnnnnaatgtgactaatctgaatggagatgtccggtaagttgtaaaatacacccgggatttttgaagattcagtaccaaaaaaataatataaaatatctccattaaaattttatggttgattacaggttgaaatattttggatgcatattaacttcacttgtttaaaatatattagaaatgtaaaaattgtatatggggctcacattatatttctattggacagctctgtcctagagccaagctcggactgccaaagattggacatcctgtgactgcaagtttccagtgagcccttactcagcagcttgcttaggtggtctgtggttcatagaaacagagaggaggccaagcatgcgaaaaaggaacgggagaaaacagctctcagggactttaataattacagtctgtaacaaataagcagtgaatgtttgaatttggttggtggaaagctgggatgcaagtcatctctgcctattacgacaaaagcctatcgaccccagcagccagcacaggcaggctgcagctgaagcaagcaatagcctggagaataaacacaatatgaaaagctaggtgcatttcttaccgattcccacccacacacgcatattcccactccccctcccacctttcctcctgcccatacatgaggcacaagggaagaagcagggaggagggtatgcagttcttagatagcaacagaagcagctcttgagcttgggtagagaagagcaggcaaagatcacctcgggatgggaggggagtggtggagcacccctttctcttcggttggatccactccggctttcgtttcttgccagtttgctgggataaccttttgtcgtttgacatatggcttcttaggtggcaaatcggaaatcgggatgaagtaaatctgctttcccactcatcttcacaaggagagtcttg

SEQ ID NO: 95445 - DNA, 441 bp, Homo Sapiens
caagagtatagaaattgcatgagcggaaaatcatttcagggatggatccagctgcttttgcacatgtgagaatggccatgccaacttagggtaccccctcaaagagggggtgaaggaagggcacctgagccccactgcctgtccctccccatcctgtgtcctctccaggacatgctgattgccactgtctcttcaccccggcagctaaagaaagttgcatgggacgtggtggggaaggaaatcaaaagtctagaacccacacggaatgctggtcattcttcatctctcatttgtcgctctaacaacatgtcatttcacggctcaagtgaagccacgtttcactgtagtttattctctcagaagctgaagccccacgctctggtttctatcccacgtactgtatttaattttagcaaaatcctagtaaataaaataatttgg

SEQ ID NO: 95446 - DNA, 444 bp, Homo Sapiens
taaaccataaaaataaggactgttttaaaccaatacaggtattgttcattcaccaaacacataaatcacagagcttttgattccacgtagctctgtaagtttccagtttaacctataacatgccaccctcctccatggatctctgctcaactgaagaacttacatcaaaccatccatcgcgtgctgtaaccaaatggccccatccagcagcagcagtaatttcctgcttgaagaatgatgcctctaggactctggaggatggaaggactttaattaactttgtttcctagtgtgatagctctttggtgcaaccataggaacagttacatacagggactgttaacatgcaatgtctcatttacacaattaccattaaatcttacggtattgacatttgtctcaataaggtttcattaaaacagactgtttactaaaactgttaaa

SEQ ID NO: 95447 - DNA, 163 bp, Homo Sapiens
tgagccaccacacctggcctgggtggacctggtttctaatggcttacatttgcatatcaaaggttgccagcctggctctaaaagcaggggctttacaagaaacttttccagagatgctttaaaaaatgaaaacttcccaaggaccccttttcctctctatctg

SEQ ID NO: 95448 - DNA, 406 bp, Homo Sapiens
ttcctgttacctctttccaccccacctttccacccacaccataggatttaccagctcttacccaacttttacaaatctagacgtgcttttctgaagcattcctccctgcaggtcgtttggactgggagactcttgtgcacgaaaatctgcccgggctaatggaaatggatcaggatgaccgtgtttggcccagagactcactcttccgatattttgagttgctagaaaagcttcagtataacctagaggaacgtaagaagttacaagagtttgcagtgcaggcactgatgaacttggaagacaagtaaagcaatggatggcttcaatatccttgggcccagcaaaagataatgaagggaattgttggaaatagagaattgaaaatataaacattcagatagaaaaa

SEQ ID NO: 95449 - DNA, 1112 bp, Homo Sapiens
  misc_feature (925)..(925): n is a, c, g, or t
  misc_feature (929)..(929): n is a, c, g, or t
  misc_feature (1024)..(1024): n is a, c, g, or t
cgccccctttccttacgcggattggtagctgcaggcttccctatctgattggccgaacgaacgcagcgcgtaatttaaaatattgtatctgtaacaaagctgcacctcgtgggcggagttgtgctctgcggctgcgaaagtccagcttcggcgactaggtgtgagtaagccagtatcccaggaggagcaagtggcacgtcttcggacctaggctgcccctgccgtcatgtcgcaagggatcctttctccgccagcgggcttgctgtccgatgacgatgtcgtagtttctcccatgtttgagtccacagctgcagatttggggtctgtggtacgcaagaacctgctatcagactgctctgtcgtctctacctccctagaggacaagcagcaggttccatctgaggacagtatggagaaggtgaaagtatacttgagggttaggcccttgttaccttcagagttggaacgacaggaagatcagggttgtgtccgtattgagaatgtggagacccttgttctacaagcacccaaggactcttttgccctgaagagcaatgaacggggaattggccaagccacacacaggttcaccttttcccagatctttgggccagaagtgggacaggcatccttcttcaacctaactgtgaaggaaatggtaaaggatgtactcaaagggcagaactggctcatctatacatatggagtcactaactcagggaaaacccacacgattcaagggaccatcaaggatggaaggattctcccccggcccctggcgctgatcttcaatagcctccaagggccaacttcatccaacacctggatctgaagcccttgctctccaatgaggtaatctggctagacagcaagcagatccgacaggaggaaatgaagaagctgtccctgctaaatggaggcctcncagnaggaggagctgtccacttccttttgagagagtgtctacatcgaaagtcggataggtaccagcaccagcttcgacggtggcattgctgggctctcnttctatcagtcagtgtaccagcagtaaccagctggatgaaaccagtcatcgatgggcacaccagacactggcccacttactgtccggg

SEQ ID NO: 95450 - DNA, 280 bp, Homo Sapiens
cagatacgtgtcctaaggcattcagctgaatgtttgggttttagggaaggaaggatattccatgtgcaacattcagtattggatgatctggattcagtacagaaagcctggacttttgagcctaaacaggatctgaagcagaaggatgaaaaacagatcaaccaacaacaagaatcaaccatcttggtttctcatttgtcaataatgggcaatagtcctgcccacatatcagggaatgtatatgccataattaaatactaatgcttctatcttctaaaaa

SEQ ID NO: 95451 - DNA, 348 bp, Homo Sapiens
ggggttcagcagatactctccaaacacttgaaaatactgtcttgtaataattctattatgggtcaatccagagtggatcaaaccagaaatgaacgtctctggccagagcaaaccttactgagagaaataatatatctaactcaggaattgagccaagaaaaccctgggaagtaaatatttctgaagtgaaaagtctcctgtgtgtgtacaaaactatctggttctagtagtagagatagtctcatctctctattaaagcttaatgtgattccattaaatatttgaatcataaaactggaccttttattctgttccttttctcaataaatgcagttctgaatattattt

SEQ ID NO: 95452 - DNA, 414 bp, Homo Sapiens
gaggctatggaatgtttctgcaacctaaggcacaagagagcccaaccctgagtgtctcagaggccccctgagtgttccccttggcctgagccccttacccattcctgcagccagtgagagacctggcctcagccctggcagggctctctcttcaaggccatatccacctgtgccctggggcttgggagaccccatagggccgggactcttgggtcagcccggccactggcttctctctttttctccgtttcattctctgtgcgttgtggggtgggggagggggtccacctgccttacctttctgagttgcctttagagagatgcgtttttctaggactctgtgcaactgtcgtatatggtcccgtgggctgaccgctttgtacatgagaataaatctatttctttctaccaaaa

SEQ ID NO: 95453 - DNA, 486 bp, Homo Sapiens
tgccatggtgtaggcaatcccggattaagaggtcccttttacaaataaggaaatagactttaagatggctgccagtaagtggcagtgctgggacttaactcgggtctcatcattaatccagggcttctggaattccgggaatatggcactgtctgccataattttgttaatttactgcttgttttagaaatacatctgttataactagaaattcggggacagcttagtcaatttgttttccttacaagcaaaataaagtaaaatgtagcagtctgctcattagtgctctggtgggatggtttacctgtgaaccttggagaaccatgtcctgctttcacaatttaccaggaaaaatggctactccgaatttaaatatatgtaggacattaatggaaacacctacattccaactcagtcattgccactctgtagaatcttactgctatttcaaatgtccaattacagcaattaaaatactgaaaaaaa

SEQ ID NO: 95454 - DNA, 379 bp, Homo Sapiens
atcgtacacgagaagaaattcaggaagtaagaagtaagagggatcctataataattctccaagatagaatggtaaacagcaagctcgccactgtggaagaattaaaggaaattggggctgaggtgaggaaagaaattgatgatgctgcccagtttgctaccactgatcctgagccacatttggaagaattaggccatcacatctacagcagtgattcatcttttgaagttcgtggtgcaaatccatggatcaagtttaagtccgtcagttaaagggaggctacgtgtgaatttatcatcagtctctcaatggaatgttcatggtcaaatttaagaaactgtgttctcaactcaaggaggaataaaactcataaaacaaa

SEQ ID NO: 95455 - DNA, 582 bp, Homo Sapiens
  misc_feature (487)..(507): n is a, c, g, or t
tttctcaataaagcgggaaaaaatgctgaaagaattttttagatgtattcctttcttgtgttggaaagataatcttactgaaacaggaatggaatctagcttatgtctctctttcctattcttagaatcctaaacaaagaaatgaatgtctacaaggtggtttggggaaacagttagaagattcccatgggaagcaagttaaattgagagtccaagaagactagaaaccactttatatcagtgctgggctcacaggagagctaggtgataggagaaagggccagtgatgtggacagatcatgatagtgacagtgaagagagtccaggtaagacctaacgaatgacttaatagatcaactggagtggttttagtggataggtttgcatgtttctaacgacacagaaacctacaaaatagttcactggttttcagaaaaatactggaaggattcatcacaaactcctagccccagccaaccccagtgcnnnnnnnnnnnnnnnnnnnnntcatgcccaatccttcaaaagattcatatgtgcagggttattactctagacatcagcttgcctgggaccatcctg

SEQ ID NO: 95456 - DNA, 496 bp, Homo Sapiens
gaaaaactgagagctcctcagctgcagcggtggaaacccgcgaagaaatctgcagcgtccccaaacgcggggcaagaatcgcacactcgggcattggaacctgcttttggaaaaatttcacctctgtcagctgatgaagagacaatacacaaatacgctggccacaagaatcagagtgccactctcctgggacaaagatcgtcatctaacaatccagctcctccaaagccaatgagtttaaagatagaaagaattagctcgtggaaaacaccaccacaggaaaatagagataaaaatctttccaggagacgtcaagacagaagagcaacacctactggaagcccaactccctgtgcagagagacgggggggtgtctgaagatggaaaggtggcctcggacacctgtgtcactctacactggccccttggaaaattcagattcagataaagttccacttaggtctaataaaagtacacaaaatgttattcaaaaaaa

SEQ ID NO: 95457 - DNA, 694 bp, Homo Sapiens
ccatagtaaattaatcaggctatataaggtaatatttccccagagggtaattttagtgggacgagggtggtgggatgatgtcatatcatacatgggattgcatcagaagggttctgtaaagcctgaactcccttttaaaagtgcctagtgatagaggcgttgtttgtcatctattataattggaatgtcattgtagttcagtgaattttgatgtaaataaaatatcttttaaaaatgttaaagtaccaggataaacaaacaaaaagaaacaacccttaagatgacagattttcctcaacatgcaggtttcccttcttatatacctcaagtatccaacatctagccatgcaaattgattacctgaagcatagtactggaaagtagaatagcatgaaaaacttaattttgtggacattacctttttttgtaatcagctactgtatgttttattttagatcttttgttttgggtgggttttctgctctggaggtatatgcactaacaaaacattttcctcctttcatatacgcatgttaattagcaatgtgagcaatatttcctaccatacttcactcccaatattttttgagatgtttgtataaaatggaatttaaagttcacttatgattgtatatgaaccacagaggagcccatttattaataaaaaacttttttaatagttaaatgtagaggg

SEQ ID NO: 95458 - DNA, 832 bp, Homo Sapiens
tgttgagtgtggaagcgaaaaccaagttaagaagtcctgttatttgggtcatggtctacggtgaaacatcaaagaaacctgtaacggaaaacgacttgtttgaaagagccagttctctatccaaatttaccaatcagaatcttgcactgaaaaaataaaccaatcgtgaatctctacggccacttccggaatttagcaaccgatcactaacagggatcgtccacaatccaatcagagtgattctgttcctatatagaggggcaaaccaatcttcctaactcatttactttgcagatgaactatggcgcgtactaagcagacggctcgtaaatccacaggcggtaaagcaccgcgcaaacagctggccactaaggcagctcgcaagagcgctccggccacgggcggcgtgaagaagccccatcgctaccgccctggcaccgtggctctgcgcgagatccgtcgctaccagaagtctaccgagcttctaatccggaagctgccgtttcagcgcctggtgcgagaaatagctcaggacttcaagaccgacctgcgcttccagagttccgcggtgatggcgctgcaggaggcctgcgaggcctacttggtggggcttttcgaggacaccaacctgtgcgctattcatgccaaacgcgtgaccatcatgcctaaagacatccagcttgcccgccgcattcgtggggagagggcgtgaattgttttgagtacaaaccttaaatccaaaggctcttctcagagccaaccactttgtccgtgaaaagggctgtaatcctttgagacgcattagaccactaaactgcactgatccaaaaaa

SEQ ID NO: 95459 - DNA, 540 bp, Homo Sapiens
acatcctactacttgccctgagcacaacaggctcagctataaggcagcacattaaaaccaagcagcttcttggggctcccaaagcctcaatctcagccaccctctgggtaaattcactgaacaaggcaaaagaaataaactacagcaggcaggccttctagcttaggcagcttccttctgtccgaaaggcacccaatgccccctgctgtctgacttggaaacatgagcttccctaagggaagggcagggaagttcctaccccatccagaagagttagttccagatctagctgctaaagcattttgagtcttttagtgaaaagaggaacacataggaaaggcaccctgccttgcagctggacctatagtccaagaaaacaacttcttttagttctctctggaccaaccacctcccctgcctcacctgcacaggcagagaacagctgaggagaagtcaagggcaggcatggaaaatagagctgacctacagacttcccacttactttgacttccatcttacaaataaacaaatgctcagaaa

SEQ ID NO: 95460 - DNA, 594 bp, Homo Sapiens
ggtgtaaccagtaggtatgttactcagactggcaccccatgtctaacaagttctacaattaaacatcagaagagagaggatgtactaaaaattagtggtccatgtatcgtgtgcagctgtattgcgggtgttgattttgagattacatctcttgatgaacaaattgtggttggcaggatctcaaagcactggtctgggtttttaagagaggcatttactgatgctgacaactttggaatccaattccctagagaccttgatgttaaaatgaaagccgtgatgattggtgcctgtttcctcattgactacatgttttttgaaagaactaggtaatgactggaatgtcagagtgtgggagtggattaatgattccggatctttggctaggcaaaatgaaactataactgatctaaacggttccttccttcttctactgtgcaaggaagatgtaaggaaaaactcgcacactatctgtggaactcatttaaattcaaatactagataaacatttcgcattgaatatttacatggagaaaaatcatcaaacatcaacaattatcaagttaattaataaaaatactaggtattgcaaaa

SEQ ID NO: 95461 - DNA, 1246 bp, Homo Sapiens
  misc_feature (189)..(189): n is a, c, g, or t
  misc_feature (258)..(268): n is a, c, g, or t
  misc_feature (290)..(303): n is a, c, g, or t
  misc_feature (766)..(775): n is a, c, g, or t
  misc_feature (1043)..(1051): n is a, c, g, or t
  misc_feature (1186)..(1187): n is a, c, g, or t
gggggcggtaggctatacgcccgggacacaatcgttaagcgccagaggagccgtgctcccggacaccttatgcaggctgtctgaagaacgcaaggtagtgagttattaacaggtgtggtatcctcctgcaaggatgacaagacattcgactgggggtaacgcgttactgctcgccggtggggaggggtntgattagggggagggatcagtgctcgctaatactgggtgtcggggggttgttcgggattgtgtcctaannnnnnnnnnnaaaaaaaggagccaacagcccnnnnnnnnnnnnnngctgaaacttgatggatggaaaaatttcccccctccaaaaatcttttttcccccattgcccttgctttaaaaagttccatgggaaaaatttgtgttgttcaatatcaaagggaaaaagatctccccactagaaaattcacagccatgaaactgttaattcaaaggaggttttggtttttagagaaatactaggattgtaagtagatgaaccgtttaaaagtagggcctggtatcagccttgtgctctcagtaaccccttcccagtgccaatttggagcccaaaatgcaagcatgaaaacgtggcagacccttcgacaccgaatttccaagctgctttcagcaaagttgtctgaaagggaatctcctcacagctgaatttgcaatggagtttggtggtgcaatcggtattgattagtttggcatagacagatgcagcagtttagagcaaaatcgagaaaatgannnnnnnnnncctccttgatttcctggcagaagatatcttactttttcagcaaacttttcttttaacactaaagcagcctagggcaatgccagatacttagagcttttctcttgattataagtagaaatgggggtgtctgggctagaggtggagggtggatgtgctgtcgtcacagtctagctggcagcaagcaaggcaaaagcagagactgctctagaagcggttccaagcagcagagacgtcaggaaaggcacttcttagtaccaacctctcacannnnnnnnncagaggcggccccactgtcgaccaagtgcccaaggcattgtgggagtcatgattccaagatgcccgcgacggaaaatggaacttgtcagctccttgtcatgggagcattgtgggcgcatccgggagtattcctgnncctctacatacaaataaagacggagaagcacgggcgtgacttaaaaaatattcctctat

SEQ ID NO: 95462 - DNA, 383 bp, Homo Sapiens
acgtcgtgctctgcgcaagagggaagtcctgatttttggggtgccacaagcctgagacaaaacaaatttccattttcaaccagaatgaaattaagaaaacagataaaagccacatacaaaatctcattgagagtctttttgctttttaactataaaaatttacaactaaaatgaaaagtgccccggaatgaaatattaaatccaagctggtgtctgtccacctgtccttaggaagtctcaacttacgaagtccactaaatttctcaaaaaagagttttatcactctgaatttgccccctgacttaaaatcccccaaaatatacaatatctaataaaaatcagccttttacttataaaataaattcatttatcagcaaaaaaaa

SEQ ID NO: 95463 - DNA, 656 bp, Homo Sapiens
tttaagcagttagataatttatttttctcaaggacgtgcaaaaaagtgaccgtagagtttcttctcagaggaattccacaagcattcaggaaggccactctacaattcaaacttaatcattatggtttcaaacgcaatcccattccaagttactcaagggaaagtcatttaccagagcgaaatatcaggataaaatcagcaatagtcaagactggaatcccgccttcctatgctgaagcagtgcttgtcttccacaattccttgaagacagacttcccaaactgggtgaggattatacctagatgtcaaaaggcagagtgtacatggtgagtgtattagaaatggtgagatgataggtggcagaaagaaattttttgccctgctggcctcttagttctctctcttcttttctctagtgataagagagtgtttgtaatatagaacacagaaaccgcgactttggggcaatttatgctttgacgttatgctgtgagaggcaggcagtgttagcaggtgagaggcctgtttgtatcttagacctgccatgccaaagaatgtaaaaggcctgcctttcacagctgccctttcttcatggatctggcaccacaatcaacatgattttaagactttttagaaccccattgggctagagccaa

SEQ ID NO: 95464 - DNA, 367 bp, Homo Sapiens
tggcaagcgtcgagccggaaattcagttgaatagagccctaaatgtttttttgtttgacattcatgcttaacagaaaatgatgaatccattagcaactccttccgttgccaaaagaaacagacttgcacttgtagattgctttcattctgcgctatcaagccactgccatgtgctgctttcacaaagctgacagtcatctatcatttttaaatgggtttagaggtggaagagatgtacccaggacctctgtagaagcaggtacaagctaccaaaagttcctactttatttattttgagtttggaatgcagcaactacaaggaaaggaagaaaattgtcaaataaaagaaaattttataaattaaaaa

SEQ ID NO: 95465 - DNA, 534 bp, Homo Sapiens
  misc_feature (41)..(41): n is a, c, g, or t
tttgaatatacctccggctttgcaggtgtattcacgtgagnaaaatggtcgctcagcatctctcggacgaggcccgctgactctgcaagggctttcaatagcacctgccccacaatgggcccagatggagaaagctctgagcatcggatttgagacctcaaggtaagagccagccacccgaccactggggaaagctggcagcctgggaccaggaagctgggcttagaactggaagcctcctctcccacagctgaatggattattgcctaaggagtaaaccccacgtattaatttggccaagtcaatctgcaacctgtatgacaactggagtttaaagtcagctaaagacacctttgtgaatcatagagcgggaacccagaggaagccattaggggtcctctcggctggaatcctcttgtctaacctgcttccacagagctctcctggctttgaagaagctgcagtatcattgtcagaaccacaagaaaacataaaccaaataacagtgtttgaaataaatatgtggctgttaaa

SEQ ID NO: 95466 - DNA, 753 bp, Homo Sapiens
ccgccaatcgtatcccccggccctgggcagccctggagctctagccggggccggagtgggagcggcggggcccttggagagacggggggcgcaacccggacgacactctgtgaccggctacggggactgcgccgtgggcgcccggtaccaggacgagctaacagctttgcttcgcctgacggtgggcaccggtgggcgagaagccggagcccgcggagaaccctcggggattgagccgtcgggtctggaggagccaccaggtcctttcgttccggaggccgcccgggcccggatgcgggagccagaggccagggaggactacttcggaatcatgctcacatggtcccctctgcacggagccctctgccaagccagatccttttctccatccttggaagtctgcagtggagagaaatcattctataactgaacagctcgtttgactgatgggaaactgaagtcccagagacgatttctgggcctagcctgctttctctagaaagtattttcaagtctgctgctgagcacctgtggactggcatctttgaccgttcatcctacacactgcaacagagatcataccttgcctgtgtagtcttttctccccaacagaaactaagcatctgaatgccagggaccatatcttcgactttctccaggtttccttaggtagtggtgctgtgttaagcacaaaacagatgctcagaaaatatctgttgagtaattaaataaacaagaatggatctgctcaaa

SEQ ID NO: 95467 - DNA, 589 bp, Homo Sapiens
atgggcttcaggctcctctgctgtgtggccttttgtctcctgggagcaggcccagtggattctggagtcacacaaaccccaaagcacctgatcacagcaactggacagcgagtgacgctgagatgctcccctaggtctggagacctctctgtgtactggtaccaacagagcctggaccagggcctccagttcctcattcagtattataatggagaagagagagcaaaaggaaacattcttgaacgattctccgcacaacagttccctgacttgcactctgaactaaacctgagctctctggagctggggaactcagctttgtatttctgtgccagcagcgtagcacagccctgcatgagcatcagccttctgtgcaataacattcctgccccactcaggaagtgacggtgaggggagggctgccagccagaggggctcaggccctggagagtggacaggcctttcccaggcactctctggtgcttctgtatgtgatctggtttactgctcactgaagctgtttcactcgaatagctccttgaccaactgtaacccagaatcataaagataaaggcattcttagaaatat

SEQ ID NO: 95468 - DNA, 432 bp, Homo Sapiens
  misc_feature (41)..(107): n is a, c, g, or t
taaagatctcaggggccaggcatggtgctcatgcctgtaannnnnnnnnnnnnnnnnnnnnnnnnnnnnnnnnnnnnnnnnnnnnnnnnnnnnnnnnnnnnnnnnnnagcagagcttatgagggaggagaacaagggtgcaaaagggacctagatatcactgagaactgcccttgttgtttggttgaggaaatgggcccagacagtggacaagacttgctcagggagacaaacgagatggtgtccagtgcaacaaacctaggtttcctaacttccagttctgtccactctacatcagtgcctctcacctgtccctgcaggttcacattttggttatgtggataaggagaaataaattgaagatcacaatgtcccattttatcttccccaagacaagctctgtaacattaaagaccactatgcaaaccgaaaa

SEQ ID NO: 95469 - DNA, 199 bp, Homo Sapiens
ctttaaattcatgccactcttgttaaatgtggtagcagaaacgcagaaattttcatttggaagtgatctttagcaggatcatgatcctttgtcagatgcttcaattttgcacagatttaatgcagaatttttgttttagtactgtaagacatacatgacagctgggcatttttataaagtgtttctttattttatgttc

SEQ ID NO: 95470 - DNA, 550 bp, Homo Sapiens
ccaacacactataaactttcaaggagagaggctgtgtcttcttcatgtttatatctgctacaacactgagttcatggcttttcacacataattgctcaacagagcaggtgccatggaaagtcaattcaatgagtaaaattacctcaaaatagtccgttaattcactcacctttgatgtagacagattattctgcattgatacttatctcttactcttaaaattcgctatgtattaataaatattttattgaatattaaggaatgatcactattttaataagatgttctctaccatatatttctatatgtacatgataattagaagtatcaaattatattgtggaatgtaaaagcttttcttctgaagccaagcatttgttttattgtcatttcagtggcaaatatggacttcatattcaaaatgatgttctatattatttttccttacaagctttttgaaaaacaatttaataattccatgattgttgtagcaccactgaattgattctgaaagcttactttttaaataaaaattgacctttatcaaaca

SEQ ID NO: 95471 - DNA, 954 bp, Homo Sapiens
tttttttaatgaaaatcgtttatataacataagcaatccatatcaacagtagcaaaatacaccaagatactccacacattaccagtgttcttcaaactttcatgagcactagaatctccatctgattgctggctcacacctcctgtttctgcatcagttggtctagagagtgacccaagaatttgcatttctaatcagttcctagctgttgctgttgctggttgaagaacaacattttgaaaaccactgtcaaaacgtgaagagcaccattctaatcttgcagggaaaatatgcatatgcgcctgagttctgggatctaggtgtctgaagcagttaaaatagatattcccccaaaataagtgtttttcattgagatttcatcctgagatacttgttccttcattctgagtgaagtacaggattctctttgcaaggatgaagtacaggattctctttgcaaggatgaagtgaggccgagtgagtctgtcaagcaggtctgtacaaagagtcaccttcttattccccctgagggatcacccctgcctgtgtgctaggtagccgagagttctctgcttttcttaacagctcctcaaaaatcccattgtgcatgtaaaagaagatatacccagagtgaagcctcgcctcctgcattttggtctctgagatttctgatacacatagatcgttgtatgtgaaccaggcctgcttctgaaagtcatacacatcgctgatgtaatggcctgaatttggggagctcccgatatggctgacaacactgatgagtctgtaggcctggagaggatcccccatcttcacgtttcttgttagttccttggcttcacctcttgtgttctctgcatctaaaatgtttttgtttcctgggttgtcagaacccagtgccccaaggtgattcaggtcagccttttgaagtcttaattctgtagactgattgag

SEQ ID NO: 95472 - DNA, 440 bp, Homo Sapiens
tatatttcaaaatatgtacttgcgggattcccttcaagtaaaccatccctgaaacctaaattcacgtttccccttgactaagaaaagcacctacctctgccatgtgatgtttctgaaaagcctctgtatgtccccatttgctttggttttgtcctgccttctccaatatcacgtgctcagttttgcctctacttacccatggagtcaggataacactgacgctccctggcatcctatcttattcagccctaccatcttgccagctctgtctttccagctgtctgtcgctaaaacgtggcctatagcttccttccggaaagcttgctttgaaaaacttaaaaagcccccgtttacatgtaggcaggactgtgataacagtgcaagctctgtgttgacaagagttgtggacaaaaagccaaaataaatattcttcctgatta

SEQ ID NO: 95473 - DNA, 529 bp, Homo Sapiens
tctgtcttaagttgatatctattcattttcatacctctacccactttcccaaaacataagaatctctttagctgtgtaaaaaaaaggtagtaacataaatctggataataattagaaattgtggaataacaagaaggtcattctcacaagtgagaagtgagggggaaattttaagagagtcaaacttctaccttaagaaatacagtagaaatgagagtgaattttgaaattaaagaaattggcatgtaattgatctttattttcaaaggagcaggtgtttttggtaggaactacatgataggattgattcagcagttggggttaccaggcctcacttagtagagaagagcaaatgcatgagaaggtcatcctctgggttttgagaatccaacacttcaggctctattatgaactattcccttcctcttccattcttaaggtgtgacttcaaaagaataactattaataatataatcttctatgacagtatataagtagagaatgtttaataaatcctaattgccattgc

SEQ ID NO: 95474 - DNA, 951 bp, Homo Sapiens
  misc_feature (106)..(106): n is a, c, g, or t
ggagaggggtggggggtaggtggccggggagtaataggcaggagatgggggacagccgggtacaggggacatcatggagacgccgggggactggccaagggcgggnagcccagggggtggctacagtggagagggcttggggcggacctccggtgagtacgggtgccctgccaagttggggaatccggcggggatggccatgctcctcctggcagggggaggaagaagaaggtctgctccggctccagcacgtccaggggagacatttcaggaggtgtgggcagcccgtacgggtacgtgtccacactgctcggggtgccgccgccgccaccaccagccggcccctcgtggtagcagccccggaggctgggcagggcagtgccgggggagtactcacccctgtcctccttctcccccagcgccccccggctgccgcttctcttctccggcagggcgttctggtcccgggagagggagctcagaaggaagcccgggtccacgcgcttgcacagccgcttggcctgcttcttcctgcgcggccggtacttgtagttggggtagtcctgcatgtgctgcaggcgcagccgctccgcctcgtccacgtacggcctcttctgggacagcgtcagcgccttccacgactttcccagcatcttgctgagctcggcgttgtgcaggtccgggttctgcactgccagccgtttcctctcgtccttggcccaaaccatgaaggcgttcatgggccgccggatacggctctcggagcccttgtcccccgggggccgggggacggccggcggcgattgtccatccgacagctcggcgtccagggccgggcactcgagaccctcgggccaagggtaggctcccagcagcgaagccatggccgcacgcgggtcgcctcgcttcgcctggcggggcaggcgcaggacctggccctcgcacgggtcg

SEQ ID NO: 95475 - DNA, 810 bp, Homo Sapiens
tttgtaatatcgaaaggtttgttttaataattgcaaggactgtgacataaaaccttcagaccgcagtgttaaatttgagacattacatttgttagactatttcagaagattgtgttttgttcaattaatgtaaagtgtctttgtcttaggaggctgatttgtctcaacaacgttgtgataatcacttactataatctcacatctggggtcataagtaaccaaacaattgtaaacattgaacacattcttattgctaggaagatatgtaaaaatgttcctctttgccaaaaattattttgcaaataaaataggtaaatgactttaactgattagacattaaacacaatataaaatctcattctttcacaataccacttctgggagctggcaagatgtgggattgaaaagtagcaaatctctgacttaatgaaaatttcctgacattccacccatgaagttccttgtcatctccctgacctcatattggggtgtcccaggatccagtgtgagggttccttttcttcctaaatgcactctcatggagatccaatctggcctcaggttttaaatagcatctattatatgcagatctttccccagaactcttattgttcctcttcatttctcaatgtcaacaagtccaaaactgacatgaaccctcctgatcttcagccccaaacttgctcctcttagtcttcccctttgtaattaatggcaacccaatccttctgaattcttagtataaaaaccttggagtgatgcttgattcctctccctctctctcagatcccacatcaatccatatccaaa

SEQ ID NO: 95476 - DNA, 444 bp, Homo Sapiens
gccagggtggggccaccactacagaacccctctgccctggccagctgtggggctgccgaaaaggggaggcttggcaatcccagatgctgcagaaaaacagatgtgtgggaagggcgtggaactcagcagtgccagcctcctgcaggcccctgaacactcctgtcccgggtgccagtgtggagcatttgcctttcagaggttgggtcccttagggttgaactccaatctgacggctgaaggacaggttccctactcccctggtgtctgtctgttaatccctgctgtgagctctgggcctgataggaaagtgtgaagttgtgtctgaggatttggtgtttgcagcctgtcattgtcggagcaatccagagctgtaccctccagcatgcagccgccagccatggtgatcatttattaattaattaaagtgaaatcaaggtaacaaaa

SEQ ID NO: 95477 - DNA, 672 bp, Homo Sapiens
agcagggataggttgtctgtgctcactcagcataagctgggacagcttgcaggctgaggcctgaagtcatgtgaaggctctctctcacgcatctggtggttgatgctggctgatggctgagattcaagctggcgtgcctgccagagcactcacagatgcttctccatgtcacctgggcttccttccaacatggtggctggtgttccatagataaggcaacagaggccagaggaggttcagtgatgcacccagggccacataaccagtgaatgttggggatcagattagagtgcccacgtctccagcctccttctgccattgacaccatcacatcgaccatccgggcaagaccccgcgctaccgcccccaagggcgcaggcttgatttcactgccaagccaataatgtcagcaacagcacttatggtgctggaccataaatgaaacaagctttgagaactaactgccaccccagaggcctcagggaggaggtggctgccctcaaaggctcagtctcgtattctgtaacctctctaccctgaagaagatcccaccagctgcctcttcttccagatcctgccaagaattaggcatctcccaaccccactcctgggcctcttctccacattctccctgccaatcatcccctttaataaaaaacggtgaataataaa

SEQ ID NO: 95478 - DNA, 517 bp, Homo Sapiens
tctttccctggactcaatacctagggggcattgttacatattcctggcccagaacctaggtgatgtgactctcctacctggtcactgctcacaggcacagtatccgacaactgggattgccactctcacacatggacaaagcccacagggatgaggcctcattatgttgcttaggctggagtgcagtagctagtcacaaacacaatcatggtgcattacagcctgggctcaaagggtcctcctgacttagcctcccgagccgttgggactaaagggacatgtcaccacacccggctatgtttttaaaaaccacttttacactattgcacatttttggacactgggaacaaacagattttgactctcaagaaaaaagtacttcatggcacattaaacaatgagtgaatgagtttacaaaacacaagaggcagggtagttattccaaaatgacaagaaacaacattgtgcctttgcttttgtttgaagagaaataaactgtttccactcaagttttaaa

SEQ ID NO: 95479 - DNA, 549 bp, Homo Sapiens
  misc_feature (350)..(358): n is a, c, g, or t
aggtccctttctctctagcagtgctcctctctacttctgagatctgttcccagtggacctctactctctgcttcctgtatctggcagtcatttccaggagagcagagccatccagggcagttccataattttgtgcccatttcccactcatttctgacagaacctttcattttattgacaacacatgattgtttttactgttcctccctccagcttcaacaaaggtggagggggtgggtcaatattttatataggtatttacttagcattaactcttcaaactgtcatgttattttaaactttagtttcattttttaaaaatctatgacataccctaattggaggtgacnnnnnnnnnctaatcatggataatccagaggatggaaggcattggggctagtggctctactccccaaggttttgtaaggatggaggttttaaaaaaaatgagtctatatctgtggatggaaggaaaaaataattttaaaaaatgataactctgtcctattctttcagggtcaaattccagaaaaatcatactttggaaaa

SEQ ID NO: 95480 - DNA, 782 bp, Homo Sapiens
ctctaaacgaaacaaaacaacagagtcactgaaggaaagcaagactcagacaaacacacacttaccaaagcctcgcaaacacacacattccgggacacagatgtgcagactttaagagacacagttacacactgacaacatatacagaaaccccgaaacccactgactccattcaggaacctcattcattctgctgcagcagctagggctccagagatgcatcaaacccaggcactgcttcaggggctccaggcccgagaaaatggagattattgcagcccaggatgattgtggaccaagaaagagagccactgccacctgcacacatgcaccaatgcagactggcatgttcccagggatgcccctagcagctcctgagagcaccagccagagagagaggggttgcaccctgcctatctgcatgctggaaacgcagcaatggacaagacaggccaggctctgcccccacaggactcagagtccagtggtggagtcagatccatcccaatataatgatgacagagggggcagcactgggatgggggaccccagagggctgtgggagcacaaaggaggaagcccgactcagcctgggagtcagggagggcttcctggaggagggggcacctgacctgagatccaaaggatgagtaggagtgagccagatggcacattagggagttgcatcccaggctaagggaccagcctctgcaaagaacctgagttgagagagaactttcattcgttcaataataaactcaatttcaggcacacctcaaaaa

SEQ ID NO: 95481 - DNA, 460 bp, Homo Sapiens
  misc_feature (358)..(367): n is a, c, g, or t
aaggataaagtctgtagtttatttagattttgaaaggcaacaaaaattttccgatcactcatctagctgaaaaagaaatggtagttactggaattagtaaacacttttggtttgtaaagttgtaatgagcagtgttcattaaaaagtaactcaagataaaatatgcaattaaaatgcccatttctttagtttctctggatactgtttaattatccaatctatcaagagtctagaaagaaaaagattaaaccaggttttacagttccaaagatatcccaatttccttttattgccaaaagttaaaattgtcaattacgagatgattatgacacaaccatatcaaacctaaaaatctaannnnnnnnnnactttgagaaatcaaaaataccaaatagattctaagtgctctatgttaactgaagtgtatatgtaaagtaaaatacaattaagctttaaaacg

SEQ ID NO: 95482 - DNA, 480 bp, Homo Sapiens
tttgaatcttcaaaactgtatttggaatggacaaaatcttcctaaagacaaggccctgagcacacagagaccggctccaccatgaaaatattacataagctgtacagaacaaaattagcaatgagtgatctttggcactagaacaggtgattccttagctgttcatgcaatatccaaactgcacaccacatgacattagattgctggttaaccatttaattttacatttaaattatcttaaaaggctggaagtcctagctaagttttcaatatcaatatgctacccatgtcataacacttagcgcctgaggtagagatttctgtaagagatatttttaaaacacaattcagagtataatacagaaaaacatttaaatcttggaagcatatagcctggttcaacaagccaactctgaaatgcagaactagtaccttttttatttgagtctcactccatcacccaagctggagtgcagtggt

SEQ ID NO: 95483 - DNA, 512 bp, Homo Sapiens
cagaaaaggaataaagcttgcctctttttttgaaaaacccagctggacaatgggcatattcatatggccaaggcctcctctaattgctggcttgggaagaactggagataactcagcaatggagagacaaggagggctcctagggaacaacttggagaccgaggaatcttgctgaatgccagcagaaaatctggaagcagagccagtataattcagcattactgagcccactgagctctccagggaagtataaattgagcacagaagctctgaaatggattgtaaccacaacatcagaggttataagaccctcattccagagtggtactgccctgcgtctgggaagaaggaaggccacacagagagaccaagaagaatcctaacagacagggcttgcttggtttccccctcagtctcttaccgttagatcagacctctttggtcctaccacgtttctacatggctgtccattcttcatcgaatctaagaataaaaatggatagttttccctg

SEQ ID NO: 95484 - DNA, 905 bp, Homo Sapiens
tttacacaggaatttggactttaattctggatacaatggaggtgtgaaagcagaaggacaatggtccaaacttgggcttaggaagatcttactggtgacaatgtgaaagagggattcgaggagggaggggctggaagcacaaagacctcttagaatagaccctctggggtggtccttgtgagtgacagagggatgagaagcaggagatagacttgagaaccaccccacactccttaatgctgtgagctggtcccaagtgctttccaataaatgaaaatagctcccctaggtcacttaataacttcagcaagatagggcgggagggcgaaatgatttttctaagactccattaggaaagatcagatgaccaccaggaagagctttttctttcatttctcacctgtgtgggttccccgagcgcctaaggctggccgcactgcaaatgcaaattattagttgccatttgagaagccttaattatctggatccattggaaaccttgtcagttacttgaaaccaagaggtcaatagttctaatcaatgccgggccattaaggcacccaagcgctcaacagaaacagccgcggccccacacacagaactcaggttgcccgaggaacctttgctttctgaaaagagaacagaaaactctttagattggactgtgtgatcgctgacgaggtgggcatatgtaaccacagctgccaggagtgtacagaattagattaagatctttcattttaggtggtcagaaaggttttgccttttatccccctcaggaaatgggttgttaatctttaaagtgaatcaaacctgaggggtcctctcatgtctcccctacagacccatctcattccagagaaccttgactggacaaaggagagatgaactcttccctttttttt

SEQ ID NO: 95485 - DNA, 382 bp, Homo Sapiens
ctgagcccagcccagatgccaacccacagagccatgagctaaatgaatgtctcagtgttgtgagccgctggggtttggggtagttaatgacacagcaagagctactgctgccccagcctcaggtggctcacgctgccttccattgctctaaactccatttacattgattcacttacctgcttactatctgtcttccccgttagaatatcagattcaagaggacttgatctttgtcaccactgcatctcaacaatactagcgtctaaacaaataataagagttcacatttattaaagatttacaatacaccaggctttgctctgtttgtgatttaatattttaatctctagtggcaataaatgggtcaacctgttaaaaaaaa

SEQ ID NO: 95486 - DNA, 307 bp, Homo Sapiens
taagggcataaagcaggaccataatcacatacatgctgactgtgtgttgagagcagtttctgaggcttactgccggcagggtcacagtgagaagggcctctaatttgggtggtgccttctggaaaccaagttggtatggatcacgtccatacaagacactgcaaactgggaccattgcttccactcctaagaagctgtctggcattctggtagacgctggttttcctccaccgttcctggctgacccttccaggagaggtcccacctaagccctgggggcaggaatgctgacatcaggaagcttccg

SEQ ID NO: 95487 - DNA, 337 bp, Homo Sapiens
gctgagactcggctacttgttacaagagcacttccaatctctgtacacatccagactgtgtctgcttttacgtcgatgtagaagataaaggaagctgacttcaagacaactgcccttcctaataatgatgatgggatttggttgagtcacatgctacactcatattgcctctaactcccccaggatttatattcctcgaaactacatacaccgtcatatgttcatagtgtaattttgtcatttctacactttgtgtccgttcctgttctatatcttaataatttctggaagacactctctactttcttattaaaagtaaatatatttggcccaaaaa

SEQ ID NO: 95488 - DNA, 465 bp, Homo Sapiens
gctgctgcttttggacaacttgctggctctgcctccacaagacaaagttgaagtttaaagtaacagtccagactcatttgaatctaaatatgaggctgatgttttacttagatactgatttcctcagactacgttattccagcagaataaaataacctgggtgctgaaatgaatctatgtacagtaaggccatagagagatttccaaatagaccaaaatccaaccctagaaccattttaccctggctacttgcctttcaaaacagcacttctcaatctgtttgaacgtcaaaatcatttgggaagcttttgaagacatcaaaaaatgtcccaatgcccaggcccatccctttggatggggctttaaattgatctgcagtgggaactgggcatcattcttgttttaaaagcagctcaggtgattctcataaactggtagataataaaatgagagtcaataaccaaa

SEQ ID NO: 95489 - DNA, 574 bp, Homo Sapiens
tgcgggattaagcttgctgctgcgtgacagcggagggctaggaaaatggcgcagtggggcccggagctgtcacccctgactcgacgcagcttccgttctcctggtgacgtggcctacaggaaccgccccagtggtcagctgccgcgctgttgctaggcaacagcgtgcggagctcagatcagcgtggggtgaaggagaagtggagtttggaagttcaggggcacaggggcacaggcccacgactgcagcgggatggaccagtactgcatcctgggccgcatcggggagggcgcccacggcatcgtcttcaaggccaagcacgtggagactggcgagatagttgccctcaagaaggtggccctaaggcggtcggaagacggcttccctaaccaggccctgcgggagattaaggctctgcaggagatggaggacaatcagtatgtggtacaactgaaggctgtgttcccacacggtggaggctttgtgctggcctttgagttcatgctgtcggatctggccgaggtggtgcgccatgcccagaggccactagcccaggcacaggtcaagagctacc

SEQ ID NO: 95490 - DNA, 483 bp, Homo Sapiens
tcatgaaaaagtaaaggtggtcctagttagcgtcttttggtgtcttatttgcacgtggtggttaactggggtcgtggtggcaacttcggtggtagagaagttgcacacactctcaacgaggtgtttgggtcctaaagcacttaaatcttcattcacggaggctcgtgaattatataatacagactagcatttccggtaaggtaacaggaagtccactgtactcttctcactgcctaaggagcattctcatttttctcggcttacaaatctggatgctcttagcctggtgaggatgctgtggggcttaaatgcctcgtgtgctttgaaatcctgaaatgaaagatatcgcagcattgcaaatagcaataataaggccttctatttatgtttactgtacactcaggcgtttggctgggaccacggcttattcctaagcaggtacaggacattagcattacctgcccaaagaacaatgcatccaaa

SEQ ID NO: 95491 - DNA, 587 bp, Homo Sapiens
taacttaactaagtttaattttatttataatttcgtaagatgaaatctatacttctaaattccatgaaaatttttcatgaaaaacaaatacctatcataaattagaccattaactccaagttccttcaatttccttctgttttcaggatcattggtatcatcaccccagcagaatatgactagtcccttagcttttgcctcttgaatataggatgggtttctgagcaagtcttcagtatgtacatttatccccagtagattttcaaactgtgcaaagctcattgcaatgggggttgtccgagatctgaggtccatgagttcaggataaatctcagattttccttgagttaaaaatagtatcggatatttgttctgcttttgccgaaccattgtgcaaatatctgcatcaaatgaagaaaacactattctcctcttcccagaattttctaaaacagtttttaaaattatttcctataacagattcatgtcaaaatatgttgataagttaccatcccacatttccatccctttgctggcagtactccattttatttcaatactgggttcgagggactgggtttcgaggg

SEQ ID NO: 95492 - DNA, 348 bp, Homo Sapiens
ttcttttttagaagttgttatttctttctttactgagaggtatttgcccctttgccatagtatagatgagaacaggaaaatacttgggatatcgctgagggtcacgttatctgttataatgaggtttggctccatggaatagaaaagttgttttcatactgcaaggatttcttttcatcactttgttaaagacccggaataaacagtcaggaactgttttggcagctctgtgaagtcatcagggtttcggccttctgtttcctccagcatgtgacatccatcctcaaggtcacatgatgtctgctgaagcagtagaaggaagaaagaggggaaggcaaagagaggggc

SEQ ID NO: 95493 - DNA, 650 bp, Homo Sapiens
taagtatacaatttgtttttatttacaataccctataaaaatgtaaatttagaaacttttattttcattaattagaaccaatccaaacaaaaaagataaagcacagtaaggaagagataataatcaagtattcacttgattggttgtgaagggaaggtaggaaaggcatgtagtggaaatggtcagtagacaacggtagagggaagctaggtaacatcactggggaacagctggtggagcctggggttacagcatgggaagaaatggagatggagaacaggacagctggttttaacagaggatcttactgttgtacaatacatgtatgtgcaaaatgtttattctctttaaataccataacctgtccctcccaccccccaactacattcgaaaaagtaagaacagcagaaagatcacgaaggccatgtaaaattaattcagatttaattttcttcagggctgtaatcactagggatcaaaactccttagtctggttgattgctgaatgggagaggagtaagtgagaaagatcatggcaggctggccctgcaattattcaaacccaggcccctggctgcctgggaacgggacttgggtgagatgaagtagtaaagacagcagttctgcccatggtgtggagactaaaaagc

SEQ ID NO: 95494 - DNA, 377 bp, Homo Sapiens
tcactaccggaaatggaggaagccggactgggagaccttgagagttgggagcgagagggaatcgtaggacgcagctgagaattgggaaagattttcttaggcttgttcttcctgtccatctcagttaaataataatcataactcatgtaagtctagaatttgtctcaaagttatgcctacctggctcgtaggatgccaacgttaggagtgaaaatagtcaacgctctcccgagagagcacatgacactacatgagcttcatcaagaccctcggaggcccagaatgctcatcaaagagccatcgacgataattcttctacccaacttttatttagtattattaaatattcagtaaagttaaaagaaatttgcatcaaa

SEQ ID NO: 95495 - DNA, 523 bp, Homo Sapiens
  misc_feature (324)..(324): n is a, c, g, or t
cggcaggacttgggagagggatctggactgaagtggaggaatccagtacaagtagtggagccgtctgaaatcttgcatttcagaatggatgctttcttaagtcacagcacttaacaatccctggattgttttggccattcaaaaccaaagtgaatggatccaggttttattactctttgaaaggaaacctgtcaagcacaatgcctgctgtgggagccaccttctccaactgacaccgcctgaccccaacttccagctcactccccgctctgtgaaggaagcagctccagcatttgtccctggagggtctctgaaagtccaggntcagcccctgggctgggtccccacagtaagaagagaactgtgatgggcaacaccccagaaaagaagacttgcagcctcacttcaggtcaatttgcaagaactgacatcacacagcagcttggtttcttcagaccgtccagcttgctgcctcttgcccagtcacgtggagctaataaagatacgctgttccacaccaaaa

SEQ ID NO: 95496 - DNA, 453 bp, Homo Sapiens
tttcaagttttcttaatgtttgtacactacttcagaggtttataacctcaaagcagaagaagagcctcaacaacccgggacttataagttatttttatgttactagactcgcataaaaattcttgttctccaactcttcattttgttgcaatgtgttattacaggatatatgaaccaattaaggtttttcactacagttcttgaataaaatttaaaaatcattttttattttaattaaaaatatttcccatttatagaatgcatatatttgcaatggacttccactttcatcaactttccatctcatcgctttaaacaggaacttgaacaagcactgttagtttagacctaaaggataggaaagcattaaataatactttggatctcctgaggaaaagataagtttgcttgcaatttacacattccatggggaaagaagagccatatttcctt

SEQ ID NO: 95497 - DNA, 536 bp, Homo Sapiens
cggacccaggtgcggctgcggggcggcgtcaggtaggcgggggagctggccggtctggacatggcgaggccactttcgctttccgaccgggcttgctgctgctcggagccggtggacctggtgaggcacggctggcgccggcctgtacctgaaatgcagcgaggctaatcgcgctttgtggctcctcctggccaggtcatacttcgaagttgtcccctcgccaaagggacgggtcagtagcgtcttaaagcactaggtggagtcgggtttcgtggctcctgctgcacagccttactgtggttccgaaacagaagtcagtgcagaactctgcgtccatccgttaaatcagaagccatttgtgctgagctttgtcgagaaataaagcatagtgtagtggagatgatcaagctgccacatgattgtagcacagtgtgttaaatgacaaaatgagagatggagaaaacgctgacgtaaaggtagaagccaataatttacatcgtttaccccagccaggtaatctggttaataaacatggg

SEQ ID NO: 95498 - DNA, 865 bp, Homo Sapiens
ggcggcgccttggaggcgatggcccacggggctgctagccgtgctgcggcccctgctcacctgccggcccctgcaaggcgcgacgctgcaacgggatgtgctgctctttgagcatgatcggggccgcttcttcaccatcctcgggctgttctgcgcgggccagggcgtcttctgggcttccatggctgtggcagccgtgtcccggcccccggttccggtgcagcctctggatgcggaggtcccaaatcgtggccccttcgacctgcgctccgcgctctggcgctacggtctggccgtcggctgcggcgccatcgggtatagcacaataaaaaaccgacaaaaacagcagctgatgactcactccaacaacgcacagcaccagaaggcaaggaaatcaaacctcagaggctaaatgttccatgacttctccaagatcatgaagtaagcactgagtaagtagggagggggagcaaggactcaaccccttgctcctaatctttactctataccgcattcaggagccgccagctgtatggggaacaaggcctggatcccaacccaaagaccatggattggagacccaccccttggtgacctagacccgccaatagaatcgatgtgaagctgcagttatccctatctgtaacaatgggagcattagtccaccagcgcgaaaggcacggagggagttcccctattatattgaccgtacacgaaatctagacttgtgaccaaagtcttcccgttcctcaagctcctctcctccgaatcctcaagcactagtcacggctggagaggaggcgtgggaaactgacctccgggggccgggccttcggcaacgcgcatactaccaccgggctagcca

SEQ ID NO: 95499 - DNA, 450 bp, Homo Sapiens
agaccacgagattgggattataggaggggtctgaaatctgctaagatgtaggcttagttaaataataacctgccattgttccatagcttgctttcttataatccctaatcattcaggattcatgaatccagacttcacaagatttgtgacttccccaattgctcatatagatacccaaagggggccttttgagatgtttttcagactattgcattcttacaactaactccatttggacccatgactcagtactcaacccagtcctgtggtccccacccaaaggctgactcagctcacgaggacagttttccacacccctatgattttatcttcaaccaataagcactacccattgcttagccctcccggccaaattatccatgaaaaccctagcttccaagctttcaggaagactgatatgagtaataaactcctatctcttgcttaaaa

SEQ ID NO: 95500 - DNA, 595 bp, Homo Sapiens
  misc_feature (164)..(180): n is a, c, g, or t
  misc_feature (469)..(520): n is a, c, g, or t
acctctgtccaggtctgaagacgaaccttggccgcagtccttgcgaactgttcgcaaaacagtgcgggctgcggtgggtcagcgtcacatgctaatgacaggatgttcctcgtagctttttattttgtgcgtcttatgtttgtatagtgtgttgtcattttgannnnnnnnnnnnnnnnnaagtataaaagctgcttagaatagttctatcatgaagggcacttttcagattgtgggctggaaagggttattttatctgtgggggagggagggagacgtgaagcctatttaaaatgagcctgtgacgattatgcacatgaccagaggcggccggtaatcagggcagagtctggtgtggaccgccgggcgcagagcggctccacagcaggagctgaccggaaggcgcgggctgcaatctgctctctgttcccctgaatccacctatgcacattacccttgtttcattacnnnnnnnnnnnnnnnnnnnnnnnnnnnnnnnnnnnnnnnnnnnnnnnnnnnngacatatcaaacatgcaaatacttaaatccagcaggccaataataaaatgtaaacactttctaattctacacttc

SEQ ID NO: 95501 - DNA, 414 bp, Homo Sapiens
gcggccgcacgcctgccgggactgtggcaaggccttcagccagagctccaacctggccgagcacctgaagatccacgcgggcgcacggccacacgcctgtcccgactgcggcaaggccttcgtgcgtgtggcggggctgcggcagcaccggcgcacgcacagcagcgagaagcccttcccctgcgccgagtgcggaaaggctttccgcgagagctcgcagctcctgcagcaccagcgcacgcacactggtgagcggcccttcgagtgcgccgagtgcggccaggctttcgtcatgggctcctacctggcggagcaccggcgcgtgcacacgggcgagaagcctcatgcgtgcgcccagtgcggcaaggccttcagccagcgctccaacctactgagccaccggcgcacgcactc

SEQ ID NO: 95502 - DNA, 572 bp, Homo Sapiens
gtcggcccgcaccagggtgtggtgggcgctggagcagcgcgccgacagcgctgacctcgtcccaagcaccaggagcttcctcactcttgtcccctacatggtcaccggagcttccccacgcgaaagacctcatgcacgcgctcaggaagaccggaacggcgaatgctgagaaggtaacgggagccgacctgacttggaagaggaagcatcgactccacgagcctccccgactccttcggattagcctttgtggttgcacccgccgcggccacctgcaacgaatttagctcggcttaggccccgcagctcaggttccgcggccacgtcacgtgacgcgagggcggggacgcgctcgggagcgagcgtgggagcctggaagcctcggtgggtcccgaggctgcagcgaggccgggaccgtgccctctgctggcgggacctggcgttttccggcaccccgccccaaatcccggactcggtgttaagggaggtgcattggcctgaaatgcttacaacagctgtcttcaataactcgtgcatagaatgcgcccagtaaatatgtgttgactgcaaaa

SEQ ID NO: 95503 - DNA, 960 bp, Homo Sapiens
  misc_feature (71)..(71): n is a, c, g, or t
  misc_feature (882)..(890): n is a, c, g, or t
gtttgaagttgcttaaggtcctgatatatgttagggaaataaacttaggcttaatagaagcagaatttagngaaactaataattatttattagtttaataactttggtttaacaatcctttattttctttagctgttagctaagggatgtcgatatgaattggttgcattttactgcaagttagggatgagtttctaaaaattttatgatttaaaacttgcataatttaaagaataattctgtcaagaatggccgaagtggtgccatggtggtggtagggtaagcgttgtttgtaatttaccttccagcttttaaattatgagattcttgatgagtatttaatgaggaatcccgttatttaagatgtgtgcatatggtgagactttattattaataataacttttatattgtacgatcagatttgtataaaatatcctgcttgttttgagtttctgtaagtgccacaaccaaacatcatcaggtgcccgaaaatatattaaggaggctgaagggagatttcgtagtgttgaggaagaaaggttgggttgagaatcacaacatgtaagttttaatcttggatgccatttgggctgttgtagaccactgaatgtctggttatgccttcctttaaaatttttcaggctaaaattttatgaatcagaattttgggggcttggtagtgattcccctggtctccaggtggaggtggaatagccttctttgcatttaggcgtccatcattactagatccttccactctaagaagaggatgtcagctattctcgtagcctgtgagggcccatgagtctgtatttgatgagcacaggatacttgcattccaggaatcttccaggggctatattgtcctattctttccattnnnnnnnnnttattaaaagtttggctataagaaatagtgttacctgagaatgaattaagagatacctatttcttaaatt

SEQ ID NO: 95504 - DNA, 527 bp, Homo Sapiens
gagcaactcagtccaggctgcacaaattgagtagcactgctctgcagctcgctgcactaaaagtggaagatattttccattacagcaagtgctcccacagaaggatcacgagccacacacggagccttactctccaaataggcgccatggcccagtcgtcccttagcctaagaactcagagagccaggctgtaataatggcgctgccgtgtgagcacagcagccatcgagctgctccggttcatttcccagaggttgagctgcagtgtgtccagtatttaaaagtatggaacttgtttcagggctgacccattcttgcccaattcatcttccccgtgtgaagttatttagcaaacagccaagttcagctggaaatcgtttttcatcccctccaacttctagtcacatgggcagctggccagctacatgttaacaagcgcctcagaactcctaagacaccaccggcctctgttcccttcagtgcattcttgtaaataaataaataataaaacctgcctttcccccccc

SEQ ID NO: 95505 - DNA, 844 bp, Homo Sapiens
  misc_feature (825)..(825): n is a, c, g, or t
ccagtcgagaagcctgagcctcagaggggtaagtgactcctctcatttatgctgctggcgtctggtgaggcttagtctcggcattcaggtgtgcagatggttatgtgtgtggtggggagtagaagtctcttcttaatgttctgctgactgctcagtattttatgatgagcccaagtcatttgtcttgcatcagtttttcctcccttgctctaatgcttctctttagatagagcaaatgtattcttttgttcaccagctggtccttttacctttgaggaggtaaaagaagtaggtttccagcaggggaagagggagtatgaatgaaggtcatgggagcatagagcaggaagaaatggtcccagaggagttgcctagtggccacctaggatgagaggcagattcgttgaatctgtcttcgatgtaaggtgatgctgtgcctacggggatgaaagaaatggcagtgagggtgagcagcttcccagaatacacctgggccccgtgctcatggtcacttgttggttggagccacatctgggtctgagattcaggctggacacaagattgctgtgatggatgtactttcatttcatcacatcctatttgtatcacagcaatatcaagaaaatgaacacacaaagctagatcaccatggagagaaggcagtttagatgtatttgttttttccccctgtatttttaatgttttgcttgatttctcatcatttgaagttgctcctctgatgttacagagataacatttgcctgatgatctcagctagaaagtggtcacaggagtagcattccacaggacactgagcattcgctncttgggagcacatcgtttg

SEQ ID NO: 95506 - DNA, 474 bp, Homo Sapiens
gcatacaaacatttaatgcgagttccatgtgatgtgggccccttcaaaacaaagaccaaagaaatggtctatttcacagcggagcaggagtgagcggaggatggaagggtgtgatcaaggcccgacttgactctgacatccctttcctctggttagggggcgggacaccacgtgagggtctgcagggagagggtctgggagtggccttcctgggttttatggcctgcttcagggaagaaaggcagggaggttagaatggcctcaacggtgaaatatttatctttttcttcctccctaatcccagaattcagaaactgttagtgggtttgcataagttcaatgagaatctgttcttgtaatagggcacaattgaaaacattggttatattaccaaggctttgactggaatgtcctattttcagatacgactaaaggagttagggttgactgcatggtccaataaagccccttgga

SEQ ID NO: 95507 - DNA, 1789 bp, Homo Sapiens
  misc_feature (504)..(512): n is a, c, g, or t
  misc_feature (589)..(634): n is a, c, g, or t
  misc_feature (1064)..(1064): n is a, c, g, or t
cctgccactgaggccctgggcagatgctgcagcccgcccccttctcatggtgctacttcctctgtcagctacagaaagcctccgtgacaccgtccaccagagctctggggtctcgaacataacaacacagctacctttgaaacaacactttctccagctcagagtcacctggggcacatgtgtcacggccactcacgtctcgcccgcctgtgctgtgggccagggaatccagcggcgtctggcctcctgggcactgcttgcctggcctcgtgcttggattgtcccgggggctcctctccgtgtgtccttctgtggccgcaccgtgtggctccgcctcctggcccccagccagttctcagaaacgtggctggggcccagcacagcagcctgcaagggcccctgtttgttgatgcagcttttgttgaacaaaaatcgtgctctttcctggtttgaaagtagcatggatgtttccagtcttgttgattgtaatttgacgtgaagagnnnnnnnnnttcctcctgcgtgagccaaggcagcgggtgctgtttcccaggcggggagcccctccctgggtgtcacagggcctgtnnnnnnnnnnnnnnnnnnnnnnnnnnnnnnnnnnnnnnnnnnnnnnactgtgggctggggacgcctgcccttctgtctccggacgctctaggcgagttcagcttggggtgtgagtgagacagcttgccagctgcatccctgcagacagaggatgtgtgtccacatgagtgtttctgtgtgggaaatgcttcctggctctgggaaactttttctgcccattctgtggttcccagggagcgtggccctggtgggccaggggtggtttgacctcttcagcccgtccggtggcctggaggccggaggctctcctgagtgtctgcccctgcagtggcttcttgtcgcctgctgctgggcgtgatgtcgctggaggtgctggcagggactctgatttggtggtccgcgctgcccctgccctgcctctgtcctggctctgaactagtagatgatggtgccagagggcagggagctcgcctggnggagagggctgtgccccgtagggacagtgcccaggtgaaggatgcccctggtcctccagggcactgactttgcccttttttcccgttgatagtcatggctcagaggtgcttgtaaatgtcttgggaagaggtttctgtaacccctgccctggtgtgaggaggaaatggctctggcctggctgcctggccgtggcttctctttggctcccaaagagaaggacagtgttgggagtatctgccgtggcttctctttggctcccaaagagaagcacagtgttgggagtatctgccggcgctgtccaggtcctttagtcagcgtcactccatcagatgtgcagaagctgggctgcacctgcggggggtgggcatagaccgggctggtctgaagcagaccctggtcctgaggcaggcggcagtgaacagcactggcccacctcccactcaagccctctgtccctctgcagtgcacccaggtgggccctctgcgtgctttgggtgctcccctctcgtggtcgtactgaccgaggccttaaagttggagggtgagccaggcttggtttcccagacagctctgtgtggatggacgtgttggatttggtgaggattccaggctgtggggatacctgcccaggaatgttgggcagggtcttcttcactctggtccgacttggtgggtggggaagcggcgcggcacggggacaatgaacagcaaacggaggggctta

SEQ ID NO: 95508 - DNA, 466 bp, Homo Sapiens
cctcgtgccggaaattaaatgtgtggctacaacatcaaacaaccagaatttaagaattattacagaacagaataaagtgagggtctgaagaattatccataaagcatgatcctttcagaacgctgggctttaactgaacacatagcaacccaactaaagcgtcttttgcagctagaaatggccatgtgatcaagtttggaggaactagaggggttggcaagtgatgagtgtgactttggaccacctccttgaagatgcagctgcttcccaggacttctttcccacttcccacaggctggagagtgggcacccaggctttagtcacaaccaccaagatgaccctgtggggaggtgacagggagagaagatggacctcttggagaggagcagccacatctccagctatggactgctgacataagtactatttagagagaggaaaataaactatcccgtgtaagtcaaa

SEQ ID NO: 95509 - DNA, 525 bp, Homo Sapiens
aggatttctcaccacgtgcccttattttggaaaactgttcatttcaagaccacaggcaaaggggatactaagaataatcgcagaattaacatcggcaaggtatgatcaggatgaggacgtgagaaacgcagggctaagagttgggagtcctgggatgaacttcccacctcaaagcccagcacgagggtccctggacgctgtcggccccggacgtgggtccccgagactcgactgcagctcagagtggccacatctgccctgccaggctgccgcggagacaacacggaggagcacctgtgagaacacctgctacaccaagctcagggactcgtgcgtctccccgtccggcactccttctccttgtatttgaatcttttgatctctttttggcaaaggccaatcatttaaactttctgattttcagtttctttgtatggaaacgacagtaatttcattgattatatatgtaccataaaacaattttactaatttttagtaaataactagtttactaaccatcaaaaa

SEQ ID NO: 95510 - DNA, 821 bp, Homo Sapiens
cgtagagtctgcatgagctagagccaccacatacagaaaattcaggatctacgtgaaaattccacttataaacatgagaagatctgtaacagcatatgacaaaaccctaattaatgaggagagaaaggaaggaattacatatagacaaattttgatcccaacacttcaggctgtcttgctcattgaatcattacacttacacaactatttccatttcaaagatgaaggaactaaggctcagaaaagttaacctggatcaataagcgcttgggtagaaaacccacattcaaatcctgacagccttactggctacaagccatgtgatcttagataagttctttttttctgagtttgtttccccacctgtaaaatgtaaaggttatagtatctggaatttatgcaacatagcataacaagtgtcacagccaagcaataaactcgggtctgtaaaactccattccctttctacaacacaagacactggagaccaaaacaattcaaaggaaaaagtgatgaggtgcactgagaaattcagggaatactccaaagctgcagaggatataaagaataggatttcccagaagaagagacatttttatcccagtaatccacaataaaatggggtgtagagagatgtatccagagctgcacagctagtggacgtctgagcaggagccacatgcagaagagtctgactccagggcctcagcgtgtaatgccctacacctgctgcatgggtttacatttccagctgctttaaagttaagactatggatgtctgaacagctctttttccttagagcataaaactaaactaccct

SEQ ID NO: 95511 - DNA, 464 bp, Homo Sapiens
catgttctcaggatgctgtgaccttggtgacagcacggccaacacaggaagcctcggcattcgcctggtcactgagctcattcaagcaaagctatctccagtagggactttcccttttgagaacatgtgcaaagggtcagcaaactgacactttgctcattttaatagtaaaaaccatacccctgggtggagatttaagatgctaatgagacatgagtcctaggagcaagcatgtatagcaaatgcgcatgtgcacccagaggaccacccagaacatgcttactagtgatgcctcttcccacccattatgaagagttgtgtgagactcccataaagggagtttttcctgcagtaatcaacaccgtcccaacctgacaagcagtcccttctgaactcgctcaaggtgtattgtctattctgcaattaactttcaatatactgttttcttttgcaataagttaaac

SEQ ID NO: 95512 - DNA, 458 bp, Homo Sapiens
tttttgttataaggaaatgtttaatgccgtacatcatcaaatggattctggtgtctgattttctgcttgattatcagctggatctattgcttggagggcactgtcatgatctcccccaccccatctcatctcagattgtgtggtaaagaaacatcttttattaatctattcatgaacataaccctagtcttactttgtcagcgagacaaaggggaaaaggactgggctttcagtagagccaaattttcctggtgtttgcttcaactgctatttttctctttagtagttgcaatataaaaacaaccctttatttttcatataaacatcaagagcttagcaaatgcttagctccccctgacatatttttcattcatcttaaattatttctaaacttgttgaaattcttggtgattcaatcagaaaatcaacacatatctcaaaattattagctgaaactg

SEQ ID NO: 95513 - DNA, 368 bp, Homo Sapiens
tgtgagggaggctaaaaagtccttcctgtctagtgaaggagctttaacttacctttcagatgggtcaccattccacatcaaagaagaaaagcttttatctagagtgcactgaagttaaaggtcatgcttgatttctgaacatttaccatccatcccaccagaatattttccactgtcccataactccagggcctaggagagtggctaatgcatagtaagaccttacattagttgaatccaaagtcagggctgtggagacagacaaagcattgatcattttaatggggctatgaggtgtgtggtagtgccacaggaggaagcaatcagctggtgaggaggaacccataataaaaattactttgagaagc

SEQ ID NO: 95514 - DNA, 830 bp, Homo Sapiens
caagtaactataacggtcctaaggtagcgaggccgggtggcgaattcggcacgaggccttcccgggcgcgcacacgcgcttcctctcttgagctcccgggcgtccggaggcgaaggtcccggagcgttcacgagaatccgggtcccggcgagtccggggtccgctcctccagctgcgcccagggcgcacgagccggccagcctcggggagagggcgcgggggcgctgggggttcttacgggaagatgaggaagcccgacagcaagatcgtgctcctgggggacatgaacgtggggaagacgtcgctgctgcagcggtatatggagcggcgcttcccggacacggtcagcacggtgggcggcgccttctacctgaagcagtggcgctcctacaacatctccatctgggacaccgcagggcgggagcagttccacggcctgggatccatgtactgccggggggcggccgccatcatcctcacctatgatgtgaatcaccggcagagcctggtggagctggaggaccggttcctgggcctgacagacacagccagcaaagactgcctcttcgccatcgtggggaacaaagtggacctcactgaggagggggccttggcgggcaaggagaaggaagagtgcagtcccaatatggacgctggggaccgtgtctccccaagggcacctaagcaggtgcagctggaggatgcggtggccctttataaaaagatcctcaagtacaagatgctggatgagcaggatgtgccggccgctgagcaaatgtgctttgagaccagcgccaagaccggctacaatgtggacctcctgtttgaga

SEQ ID NO: 95515 - DNA, 630 bp, Homo Sapiens
tattgacttatgtctgttcaaataactggtgtggtttctctctcctgactcaaccccgaatgacacattcccttgaaggggcagaacatcccgagacaagatgcaacggtacacctaaataaagacataaaatcttcaaagaaagataatgtccttcagaaaagggtttgtcagccataggcgcctggcccagggagggtcagagaataaaccccaggatgacatcctcagcagtgacaagagaacagaccaccaccatccatagcctggatgactgtaaagactcctgctatagactggataactgcttcatgtgccccctaccctccaccccactgcccattcatatgttgaaaactaatccccaatgtgattgtatttagagtggggcttttaggatgtgattaggtcatgagtgtggaaccttcatgaatgggattggtgcccttaaaaaaagagacttcagagagctcctttccccttctgccacgtgaagacacagtgagaagatggccatctgtgaactaataaggcagccctcattagacatcaaatctgatgacactttgatcttggacttcccagcccctagaactgtaagaaataaatatttgttgtttataagccaaa

SEQ ID NO: 95516 - DNA, 139 bp, Homo Sapiens
aaactgtaagaaaatgttcctaagtttagatttattacctgtcatttagggcaaaaatccagtgtccccagcacatgatgacccaactttgtctcacagttgcaagtgtgttgaaaataaagttgctttgtgaacttaa

SEQ ID NO: 95517 - DNA, 831 bp, Homo Sapiens
agagccggtgattggtccccagccgagggcctcagccaattagcttgctgggtgggcctggagtcccgccccgcccagggcccgcggagatccaggttcgaggctggcggggcgagagtgggctggaggcggggcgggacgcgtctgtgcagcgggtaagcgcacggccgagcgagcatggagggggaccgagtggccgggcggccagtgctgtcgtcgttaccagtgctactgctgctgcagttgctaatgttgcgggccgcggcgctgcacccagacgagctcttcccacacggggagtcgtggggggaccagctcctgcaggaaggcgacgacgaaagctcagccgtggtgaagctggcgaatcccctgcacttctacgaagcccgattcagcaacctctacgtgggcaccaacggcatcatctccactcaggacttccccagggaaacgcagtatgtggactatgatttccccaccgacttcccggccatcgccccttttctggcggacatcgacacgagccacggcagaggccgagtcctgtaccgagtgaatgggaaagtgagtggccacctccacgtgggccatacacccgtgcacttcactgatgtggacctgcatgcgtatatcgtgggcaatgatggcagagcctacacggccatcagccacatcccacagccagcagcccaggccctcctccccctcacagcaagtggaggcctgtataggctggctctttgctttagaaaaacctggctctgagaacggttcagcctcgcaggtgctgcctttacccatgacatggaagttacattctacccgggagag

SEQ ID NO: 95518 - DNA, 751 bp, Homo Sapiens
gaggtgatggcaacggccaacttcggcaagatccagatcgggatttacgtggagatcaagcgcagcgatggccgaatacatcaagcaatggtaacatctttaaatgaagataatgaaagtgtaactgttgaatggatagaaaatggagatacaaaaggcaaagagattgacctggagagcatcttttcacttaaccctggacctttgttcctgatgaagaaattgaacccagtccagaaacacctccacctccagcatcctcagccaaagtaaacaaaattgtaaagaatcgacggactgtagcttctattaagaatgaccctccttcaagagataatagagtggttggttcagcacgtgcacggcccagtcaatttcctgaacagtcttcctctgcacaacagaatggtagtgtttcagatatatctccagttcaagctgcaaaaaaggaatttggacccccttcacgtagaaaatctaattgtgtgaaagaagtagaaaaactgcaagaaaaacgagagaaaaggagattgcaacagcaagaacttagagaaaaaagagcccaggacgttgatgctacaaacccaaattatgaaattatgtgtatgatcagagactttagaggaagtttggattatagaccattaacaacagcagatcctattgatgaacataggatatgtgtgtgtgtaagaaaacgaccactcaataaaaacgaaactcaaatgaacagatcttgatgtaatcacaa

SEQ ID NO: 95519 - DNA, 498 bp, Homo Sapiens
gtgacctctctgcacctttcctcctctgtagcatgttcccacatgaacatagggtataggaaggttggtgtgtcaagtgattaacagcagtacctggcacatatttcatgcttagtaggtgatagctcctaatgttcttaggaaacaccaagtcatatcacttaactgtgccaacagtgttgagacagggttattactatactttatagatgagctgagaaaggttaagtcgcttgcccaactggcagcagagccatgtgctgacccccagtgtgcctgactcctacctaggccaggctctgcgaggggagtttacttgcaatcctggctctggcactaacttagcaggacactgcaggcaggccccgtcgctctctgggcttcaagcttcccataggcgggatgggggaccagcataactctttgtgcaggataagtctcacagaatgtgggggctgctctctttgctccaaccacagcagaaggctttgctttaaa

SEQ ID NO: 95520 - DNA, 341 bp, Homo Sapiens
gcaggagaaaatacggcgcgctcggcatcgtccttctgaccggggactccagcatctcagtcatcgcgtcaccaagccccagggactatggaaagactacatttctcaaccttcctagtagatgtgatgtcaccagtcggaattgggcagaagaatgtatcacttcagtccaaggcaattaagtcaacagcaatttatttacggattacctactcagttggtgccaagcctggttctagatgctgaagacagagcctagatcaagattgacttggtcctggctttcctgaagttcccagcctggtagaagagacataataaacaactagcaaacacaaaaa

SEQ ID NO: 95521 - DNA, 998 bp, Homo Sapiens
gcggccgcaagagacacggcccgggaccctgctccctcgggccggcgaagggagcccggcatgcgctcggcccaaagcagacaagccgaagagagaagcggcagaccaccgagcagctgagtgccgaggagcgcgaggcgaccaaggagcgcgaggcggtcaaggaggcgaggaaagtgagccggggcatcgaccgcatgctgcgcgaccagaagcgcgacctgcagcagacgcaccggctcctgctgctcggtacttcgggagcatctagagggcgtgatttggagtctgctagccaggaggccacaggagaaacacaggtcagccccagaatcatggagcacacatttgcctcgaccccagctgtattttcttttctgggaaaatatcagcccctggaattaggccagacacaggaatctgtagatacaaagctcgctagcagagcaagactcagaacgcaagagtggcaccagggaggaatcaggaccgagcaagaggcgagtgctgatcccagagccggcctccttcttccctgtcaccctcagagggtggtgtaaatgaaccacaagcccacagctgtcctggtgaggaagcgcagaacaaggcccaagccagcataccccagagagttagactgagccacagatcaatcagctgtttgatttgtagagcagcttgtctattgagaaggacgtcagtgctgtgttacaggctactatttgtttattcagtagcaattactgacattcagtagcacgtctaccacgtcccaggttctgtcaggcttcagtctacaaactggagctgtctcaggagctgttctgtgtgctcaggagcttatgaccctgtgcgggagacaaaggtatcaaccagccattgcagcacagcataaaatacatccatgcaggtacagaagacagtgggagcagctcttgccccagtgagaagggaggcaggactgaggaggagggcagcagcttccaagaaccttccca

SEQ ID NO: 95522 - DNA, 466 bp, Homo Sapiens
aagctgagtgaggccatgtctgttaccaggagacatgagactcacagcagatctctctggcttaacatgggagatggcggcattgaccaacatctgtgggactatatttgtggtgtaacaaagatccaagatagccagatttctaagaaagaaatatatgggggtttggagatgtttatccagtaatggcagcaggataaggaccatatttcccatcaaagaaattgcatagaagaaaaagacaaccccagagatgatcatctccagctgaggcttcccagggaacccaaggagcataagccaaccaaaatgttggaattcctggaaaatgtggcgttcttaatagtcataaaagtactaaatatatactgcaaaatgctaggtgtgtctctgagatttaggacaacttctgaaagtactgtcattaacggagaagctggaataaaaagaaaagtcactccagaaa

SEQ ID NO: 95523 - DNA, 864 bp, Homo Sapiens
tttctcacataaacaaatctttaataattttgcatgtgcatatatttggttttatcatattgttaactgagttagaaactcacttgaatattctgtgccatcaagcggatttcatttctagcttgcaggtggatttcttcatttcttccggaattagttactaaggaagttggtaagatatgtttcctggaaatctttaaaacttgctgtgtatgagacacaaggtagggtgggttggtgaaggccgactgtccatttctgctatcagctaaagaccatcattccacccattttgtacttgcataggcagcttcctgctaagagtcactggagagtacacaaacctcttcctgtaactgggttacagtcacattgtagaaatggctaaataatttaactgcccatccaaacagttattgtggaagtcctggtccatctgtttttataacaactttgcaggtttcaacaggatttgctgcatttagcaagtcgtccaacagccttcagggagagggtgatcatgtgtaaggccgaagtcagccacagacagtatttctccttctcatgctctttcaggatgactagtgaaccaccctacccacacagcaggtcctgaaccgtcagcagaactacttcctttgctcctcacctattactttgttttgaaagtctatgaagtcagcattcaggctgagaaataagtagatcagaggcatattctttagttctgttgcctaattgaacataatttggaagtaactggttctagaaaacctctttgagttgcaatcccctggctgcctctagtcctcagtgcctcttcttcagtggagctgcagaactacagtcaggcactgcatcagg

SEQ ID NO: 95524 - DNA, 539 bp, Homo Sapiens
gcatgcaggatacctaatctgaatgtgcaatatgctattcatcaccacgacaatttcttacttcctcttaataacttaccagaatgttggtcattcctttaaggcagttaaggattgctttatttgtgttcttttttcccatgactttttttcactctcagctgactgtaagaaactgtgcaccgtttccgccataaccgtcctgtgacgatgcctccatttgacttctgtatcgctgatgttcacctcctgtaaatagtttggcaattaaattttttgagaaaagtaatgtttacttttttattggagtgaattctcgtgttattttaatctcagaaaaattatatagaccaaagagttttatccgaaaaaaaattacactcttcctccattatatatttcattgttgaaatatcctcaatttctctatattttaagaagtaatggacatttattaaggttacagatttaatatgtatgcaaaatggtatagattaaatgagtttttaattaataaatcctacagtatttagttaaaa

SEQ ID NO: 95525 - DNA, 571 bp, Homo Sapiens
ttagtattggcactgaactagggactgggatacaaatttgatgaagacatggttcataccctagaaggactcagaatggggggtggagtcatggactgttcttcattttcagtatgctgaatgatttttctgatcatggataatcagaaaaacagtaatgctgaagactagctgagagtaggcctggcaggaactgtgtgagctaaaggagaagaggaagacatgagacttggactgtggttaaatgggtccctctcctggctaatacatatggaagcaggcaccttttaaagacatcagctaaagcagattcagttttcagttaagggacatatagcaattatgatgttcggtggaagaaccagattctcttgtcttccctgagacccagaggctgaataaccaggaacttccagagatacttggttctcagaaagaaagaaagctgtccaacatgccattgaggatactggcttaaaagaagtctgttcttaccaggctgaagtagagctcttctcttcctcagacagatgcctcattaggcaaaattaaaaatctaggaaaatagaaa

SEQ ID NO: 95526 - DNA, 363 bp, Homo Sapiens
agggggcctggtgggcttgtcaggggacctgggaacggcaaaggggccccaggatcaggggtcagcaaggtacccctcacttccaaatgtcttcagggtgctctgcaaaataaaacctgctttgacgcccggagacaatgaagctgccaaaacccagctttgtgctgagcccttgggaggagaacaaactggccatgtcacatggccactttgttgttgggactggattttagaacgggactggaaagggacacgttctggattttagaacgggactggctgcggcctgaaggaggaaattttctctgttaacctcattggaagctgtaatcttcaaaagacctttttaatggccctttaaaa

SEQ ID NO: 95527 - DNA, 304 bp, Homo Sapiens
caaaagtaactgttttctctacactgcagtagctgcccttaaagcatcagatttagaaaagtgtatgttgggcgaagggagttttctatttagatattctaagtagaagagtcatagacagaacaaaaacagaactcagcagtaattttgtccaaccaccggctccgccactgatttcctactggccctcaggcaagttcctccccatctctcagtctatgaagtgaacagttggactaactgattattaaggactctgtcaactctgatattctgaaagtgaataaaagaaattaacttaaaa

SEQ ID NO: 95528 - DNA, 516 bp, Homo Sapiens
  misc_feature (60)..(60): n is a, c, g, or t
  misc_feature (142)..(142): n is a, c, g, or t
ctctcttcagcgaatttatcattgagcaccttctttctgctgggtgctttgctaggcagnggggaatgtcagcagatgagctagagtcctgctctcagaacttatgttcatacaccttttccatgaactcaggaaatgcagngtatggtgttgggcatctttgcatttggtcactagggagattacagcagaaagtgctgtccaggactgaggattcagggttctctacccctcccagattgtcccaccatctgccaacaagtgccctaaatttagatctggaagcccagcccagcagagaatttgcctctggcagttcagcaagtctcagtgatttgcaggcccctcagtgggctcagagctccagccacagcagtcagggttttctatttcaggattccatggttgctttgccttttcctaagtgctttcaggcagccggcccaaattaacctctttcctcttattcttcacttatggcccaagcaataaataaagtgccttatacactgaaaa

SEQ ID NO: 95529 - DNA, 696 bp, Homo Sapiens
gactcctatagggaatttggccctcgaggcccagaattcggcacgaggggcacgagggcagcttttgtcttgctgaaaccttccagttaaatttctccatcaatttttcaaatagtattattagctgagggactaaaatctgcctggcgttcttctgatgacaaaggaaacacagcacattcacaaacatctgaagccaactgcaaggcacccgtcactcagcgagaaaagcagaaaggtgccaattcagatggctgagctacttcgcctgggtcccgacctgtatcaccacagggtcacagaaatggaaccttctccgtcacacctcctgatggcagtcagctgtgacccgctgaatccaggacatcatgcattccagtttcatttgcgagaacatttccaggtcccgctgaagcctagtggctccagcagaggtctcaacccctttgggatgctcagtgggagacagaatcaagggccaatgatccatgacctagccctagtgcccatgtcagtttgtcaaaggccctcagagcagattgtgttttccctggcgggggccttgacttctttgctttaaaaaggattcttaagtatttattgcagcaaaattaaccaccttaaaatttctgccagatcccctggaggtatataccttattaacacaaaacaaatgtgacacttgaaaggcaaaaa

SEQ ID NO: 95530 - DNA, 718 bp, Homo Sapiens
ctaagaagccaacacctcccgactattatcctgagtgtcaaagtcaaccagcggtatcgtcccctcatcatattatacctcagaaacagcattatgcgccacctccatctccatcatcaccagtaaaccatcaaatgccatatcctcctcaggatgtagttactcctaactcggttcgtagccaagtgccagctctaaccacgacctacgatccatcatctggatatattattgtaaaggtgccacctgatatgaattctcctccactacgtgctccccagtctcaaaatggtaatccatctgcaagtgaatttgcttctcaccattataaccttaacattttacctcagttcaccgaaaatcaagaaaccttgagccctcagtttacacaaacagatgcaatggatcatagaaggtggcctgcatggaaacgactgtcaccttgtccaccaacgcggagtccacctccttcaaccctacatggtcgatcacatcattcacaccagagaagacatagacggtattaaggatgataacagtatttggaactgaagacctgatgggaaaaaaaccttcaagttctatactgtactgtggataagcggctcagttcagcagagctggagttgaacaactttgttcctctggtgtggtaaattgacctaaaggtgacctctgacgatttcctgaaataaatatgcaatgttacattttcaaa

SEQ ID NO: 95531 - DNA, 486 bp, Homo Sapiens
  misc_feature (127)..(127): n is a, c, g, or t
tttaaaagtttattgttttatttcaatattcaggaacagtgtacactttccgttcagccatcgtcacagcacgtgcgtgtgtgggtgcggccacgtatggatcgcagagccgacctcagctcagcgncgcagagtgcttctgctgaaaaatttggaggtttgtgtctggagttttgttctttgtaactctctcatcatcgaggctatatattaatagacatggtattaagcccacacgaaacattcagaataagaactggattaagaagacgcgtttaggcatcacgctgactactcctcatctccgtcctcggggagggtgatgccagcgtgagactcttgggaaggcctatcaatcacaggtgcgctaaaatcaaaaggtgggtcagtaggttagggagggaggcgcgaaaggagatgccagcgggtgttaagaaggatatggtcagaagagctctttgtctccatccacggggccgtctgctc

SEQ ID NO: 95532 - DNA, 579 bp, Homo Sapiens
ggaccctgaaaagcagcccaccctgggttttacaccacgggggaacatgatgcaaggagctccagaattgaaggacgtcccgtttctaggggagggtgggaacagagcctgagaattccagcctgctcacccttatctcagagtgttgcattcccaggacatcttccaaggccacctggagagctgtcctgcagtgacacacctcagcttacccagcgtagaagagcccaagggtggtggcttcagcaccctaggaaatgtgccagcaaggtctacagtatcagcaactttacctctccctcccaaagctttctggagtgcttagtagaagacagaggactctaaagtgtgaatgtggaatggaaatcgaggccactgggaacggctgcgtcgaagagtaacttgggaacgcatagggattcacaggatagatattgtctggatatcagggcgaaatgttaattagggatcaaaatgtccttttaaattagctatgttgaagagaaaggagaagaccaggaaacagaagaaagatatatgttatgtggtattttggaataaatatttatagaaaacaaa

SEQ ID NO: 95533 - DNA, 900 bp, Homo Sapiens
tggctcctctctaaaatgtaagctacacatcctctctcatcccagaagccccagccacagaaatgttctctttcctaaaattctgtaacatcttaaatctgtactaatcattacacatcatcatattcattcattcactcaacaagtatttatggagtccccaccatgggagagatgaggctagaggtgtaaacttcctagtgttcccgtttggaagatttttgccaggcacctggaaagagatttgggggagatcttgcagagtttatataggaaattaatttaggaatgttgttaattggtaagagcattgaatggactggagtagagagccacagagtctaggcttccatttgcttctcatgaggtctatgatagctcagcgcctggtctctctgggtctacccaaaaagtagagggtttttagttgttgtttgtttgttttaaataggcctaaggtttcaggtctaaaattctgtggtctcgtgttgttgttgtccccattttctgagtgttaatctccatgaaacaagcacagatgttagaaatccagttgtgtttgctgtttgctagcaaagtctgtttcctgagatgatatttccaaaaccggatctcatctctttgaatccttggaggtttatgaataacgcatgttggtgatgatgctggcgtggcagccccaatgaatgtatgaaatttgatgtttcccacgaggaaaaaggggagtggctgggattattgaaaggctctctggttctgggtttgaaggaagcatttagaattctgctagatccccttttgctacatccggatgattaattttacatcctaaatccttgctcgtgattgcttgcacccaggaattcaaggttacagtgagctatgatggcaccacttcat

SEQ ID NO: 95534 - DNA, 654 bp, Homo Sapiens
accagtgtaggatgtagtgcagtgggatgagtacatgagcagcaagaaatacatcctgtaatctgtatgcattgggaggaatatgctcctgcactcctcccccaggtcaagccagctgctgcagaaactgacatcctccagcaaatcctgaatgaatgaatgaaaacaacgtgatcgccctaataatgaccacaactgaacacacatctttggctgtattttatagaaaaggccaccattttctaacagattaatgccatatgcaactcctttgcacattttctagaactgtatgaaatgagaagtaacagaacgaacagaaaacagttacataaattttttagtgatttcgcttcaacagtgcacaaattgagttttgggattttcttgtagggactaagaggcataaaataagcattgcagattgtgtacagagggtctggtgggtgtgagtaagagaagtttcggcaattgctgcaacaacataatggccatctagtacctcctccccttttgtatataaacactaacatcttacaacggataatagtacaacttgtttttctgcatccttcaaaaggcttaatggcctaggaattacatgctccatcatcaagcatttttaataaaatttgtgatctggcttaaactaaa

SEQ ID NO: 95535 - DNA, 707 bp, Homo Sapiens
  misc_feature (512)..(522): n is a, c, g, or t
gaagaatttattactttaatcggcctttttcataatcagctcgtgattcctcagcctccagctgttccagacaatagaagacgggcagaagttctttcattaactggggaggtttcccagagcaggaaaccatcagcttcagaacgtttacctgatgagaaagtcgaactttttagcaaaatgagagtgctacaggaaaagaaacaaaaaaatggacaaattgcttggagaacttcatacacttcgagatcagcatcttaacaattcatcatcctctccacaaaggagtgtcgatcagagaagtacttcagctccctctgcttctgtaggcttggcaccggttgtcaatggagaatccaatagcctcacatcatctgttccttatcctactgcttctctagtatctcagaatgagagtgaaaacgaaggccacctcaatccatctgaaaaactccagtaaaacatttataatcattgtttacatgaagttaaataatagggataaattctgnnnnnnnnnnnatgttgaaaattctgcaaaacgagatttatttaatattgttgtaaacattcttaagggataagtagaagaggcgtgtgtgtgttgtgtgggcataatttgagttgtctaagagatgtgatgtaacatagtttctgtgaactgatgttactttcttgtttttcaaataaaggatcaaaaataaaaa

SEQ ID NO: 95536 - DNA, 466 bp, Homo Sapiens
  misc_feature (424)..(424): n is a, c, g, or t
ggaagagaagccttgtgtgtgcagagagtgtggccaaggctttctccaaaagtcacacctcaccttacatcaaatgacacatacgggggagaaaccatatgtgtgcaagacgtttgggcggggcttcagcctcaagtctcacctcagcagacacaggaagaccacgtctgtccaccacagaatgccagtgcagcccgaccctgagccgtgtgcagggcaaccttcggattccttatactctctctgaaggcaaagatggggacaaggactaagagtcagaatgttgacactttgatgaaatggagtagagaaatgcattctgtaagtggtcaaaggacatttgactgtttactttctccacactaagtcttctccatgttttgtggccttcggttgtaataaacttggcttctttatacaaaancacagggccttaacaaaaacacaaacgtggtgggccgccctc

SEQ ID NO: 95537 - DNA, 370 bp, Homo Sapiens
tgggcgctcttgccttcaagaaggtggggaggctcacagacgcagcatccacccctcgcagggaacctcagttcctggcctgtggtcccatgaaggacatcaggctggcagattggagcacaccccttctttctaacccctcttgaaagcttccttgaatctgccagtcctgccccctggagcaggaaggaaaacagaaggcctaggacgctagaggggtcccgagctttccggagctccagccaccatcaggtctgactgctcagggacagacacaccgaccacatcctgacctcaggatgacctgcggaagtacttggcatttcttcttagccaaatcccttcattaaaagacgggtgagggttcaaa

SEQ ID NO: 95538 - DNA, 386 bp, Homo Sapiens
ccctatcccattgaagcttctttggctgtttagagttatccaacgcttatttggcttgattttccagtcgcctccgcttgtagacaaaaaactaatctgcagacttaagctccagtgtcttccgtaaaattctctgtaattcgtatccgttgtatttcatttgtgggggaggagattcagaacatgagcctgaggaaacttgagaaaggaaagcacaaaaaaacgcagatgaggaagctaaaaatcagagcctttgataccgatgtcttgaagtaattgccaccagaacagctgtgaaacatctggctttctgaaacatctggctttcggagcagttagacacttgatgaaagagacattaactgtaataaactgggctgacaaaa

SEQ ID NO: 95539 - DNA, 605 bp, Homo Sapiens
atatatatatataaaatatgcaaaaactagcaagtagatttaaatagcttaaaacccttttaggtctactgttcaagagctaagcattaaaatacttagtatttacatatatattagcatacaaacagagcagaaaatcttaacctgctttcattttgttttataaggcatagtagtattttggtatttgcaagaatttgcctggtaatggttgattccatttagttaacttgagaacttgccatcatttgtatttaatcttttcacacagtgcaagtggtggtcgctctttccttctctcgtagcagcaagccgattctgctattttctatagcagcatacttcaggagtggagagggagagagtgtgtcaattataaataattcaaactacagtgtacaattctatttacctgtcagtgtttaagttgacagcacaccattatatgactgaaaaaaaattacatataatctctaccacaaaagcaaataaaaattctttcaagaagaaataaaataagtgcaaacacctaaaacaggcaactgaagcaactgttgtaacctgtagagaaacacaaaacatttaaaaaaggacaaaatattttt

SEQ ID NO: 95540 - DNA, 421 bp, Homo Sapiens
tttttttacacatggtaatcattttattttcacttaaaccatgtataaatgtaattcattcaccaatcctctgtgtagggccaaaaccttgtctttgagattggatctgcggacttgaattccagtctttcttgcatgcatcacacccatattctatcatttatgattacaatttcagttctagtaaagtacagcacaaacttcaacacatatgaaacaatcaggagagcagatttcttttttgtaagttcttccaatattttacatttgtctttgttcaacactaatttgacggccaatttttcaaaagaagtaattttactcactttttttagagcattcaacttagtttttatagaactaactctagcttttacactaatagttcatcattttacagaatatttaataaaaaatatac

SEQ ID NO: 95541 - DNA, 642 bp, Homo Sapiens
cgcatgcgtcgtgacagcttgggggattggaggtgggtgttagtggttagaagaaacttcccagcagagcgggttgctggagccaagcgcgcatctgtcaagaatgctctctgggcgctgttcttgcaaggatcctctgttgaacctcgagtgcagtagatgtggaaaggaagcgaaggtttgtgcatctaacagctaacgctgagggccctttggaatcgtacacactcctcagtcctagctaatgaacgtgtgagcatgatgcaaaaatgtatgctcatgatatgaaaggagaggcttagggagacagaaacgttgagatacagagtaaacgataccaccgcgagggggaaaaaacgcgtttaattacattttagacttttcaatgataacacctgtattttgtgttttattactcatgtgattttataatttgagctgggtcaatacaaacaaaaaggtactgtcagtttatgctgacgtaatgaactgcgatttcagattccttggtctgcgtgcttgttttctcctttgcccaagttcccagattctcaaaactctgagattagttttgaagggatgagacaagaaaacatataaatactccagaggattaaaatccaaaagcatttaaagttgaaa

SEQ ID NO: 95542 - DNA, 630 bp, Homo Sapiens
aataacacttcagggtaagcctgctaaagtggggaagacgcgagtgagcacaatggaaataattcacgaaggtcagaaaaggcttcctggacagtcggatgtaaatgtacagacagagcgtggctctgtgcacacatccagcacatctaatgcagtgcagctgccacgccctgaacgatgcacccctggcgcatgctttgctacacaaggtggatctggctggtgtgcaatgtagccttgcccacgtgcagccacagtcagatgaaagcgatgtgtagttttagggtatctcggaagatgatttcagaaccttgactgcatgccaccatctacctcagatattcaaaacactacaaggaactcattcttctgcagtatattttgtgataggccctgttttgttgttgttgttcctttgctctttctataataagcagaaatacatgctagagttgcaatacatctaacaaaggtcctaagtgaatctatcaaaaaccaatgccacgtaagtgatcattctctcatgtagattccagtgaggggcctggcaacatcatccacaaattcccaagtaagcaacagtcttttatgtgacagatgttaaataaatgtttgccatactgtaaaaaa

SEQ ID NO: 95543 - DNA, 315 bp, Homo Sapiens
ataaactagttagcttcacagcctctatggctacatggttcttctggccgatggtatgacacctaagttagaacacagccttggctggtgggtgccctctctagactggtatcagcagcctgtgtaacccctttcctgtaaaaggggttcatcttaacaaagtcatccatgatgagggaaaaagtggcatttcatttttggggaatccatgagcttcctttatttctggctcacagaggcagccacgaggcactacaccaagtattatataaaagccattaaatttgaatgcccttggacaagcttttcttaaaa

SEQ ID NO: 95544 - DNA, 550 bp, Homo Sapiens
  misc_feature (497)..(497): n is a, c, g, or t
  misc_feature (507)..(507): n is a, c, g, or t
  misc_feature (518)..(518): n is a, c, g, or t
ctgacataacaaaaaaagttaatatacaaaaccaacaaactctggtactcttaaagcttcatgcttttattagcagtctctgtacatgttgcatattagccctgtgatcaactatgtaggaaaagactaaaagcagcagtagcaaataaataggaatcttgatcttatgatgatagaaatggtaaggatgtaaatacttgtttaaaaatgaaaatggttattcctttctatgcctagaggttctgatgcctttgtttgccttatcagcttgcccaacagaaggtggaaaaaatcactgaaagtaaaaataaactggcctatgaaaacggaaaactccaggtatgagatttattttctgatttttcttgtttgaattttaaaaataccaattatcaaattaaatattgctagattttgagaatacctagctctgtcatttactaagtctatagtctctgaacatccttaagtttgtggcctcattaatagccaggtgncttctgtttncatactgtagntgctgaaacctaaaattgtgaagtaagctgag

SEQ ID NO: 95545 - DNA, 424 bp, Homo Sapiens
gcacgaggagatgggggctgtaccggagatgctgatcctttctgtgcagagggaaagaatgagggctggattggaaggaaggaggcacaagactgccaaggaggaagaagactatcgccatgaggccaccaggtcctactcagctgccctcccctcctcaccaggagacagccctgtaaccacccaaacattacgggaatgtgggctggctaatagaagagggacaactcagggtcagaacacagaggcctactcaccaggaatgagcatctagttggggacaaagacagacttttccacaatcactcccctctcacattaacgttctccacagaagacgccacttgtatctcctcagcccctccttcccaccacaatatttccctgaactaataaatacctatgttccttcaaacagcaaaaa

SEQ ID NO: 95546 - DNA, 401 bp, Homo Sapiens
tctgtgcctcagtctcctcatttgtaaaatgggcataaccacagcaccttctttataggattatgtgaaggtgtggtgagctaatacgttaagaattggagctcaataacatgttggctgtcattattacatatatctgtgtttcattcttcgctctggctggaatgttcttcccagctctccatatggctgatttctcatccttcgggacttgccccattctccaaccccatcactagttttatctttttcacttatttatgcagtctgctcttgtcctaggacatgagctccaggagggcgggaaacatctcgctttgtacactgctgtgccctctgtacctagcaaggcgcctgtgtataataggtgctcaataacataaaatgaacaaataatcctc

SEQ ID NO: 95547 - DNA, 625 bp, Homo Sapiens
ttagcatccttgtgactaactcatcaggcacatccacgattatttcctaggccttttaaatcaggtagatcctgcattgatgcagacttaccataacctgcagttgatgaaaatgaacctcagatatttctgttcttttcctggaattgcaaacgatctctctttgcactcatcgtttctcctcctcactgaatttcggcagccttctagcttttaacattttcagcattaagttgaaaaccagtttcctaattgttacatataccaggcattacattatgcactagcgcataagatgcaatgcatgggagcatctccccaccttcaaattgcatgcagttcatctgagaaaacaaacaagaggaggatgatcacaataccatctttaagtgctctgtgattccagagagcaggctgtaagccagattgagtagttaaagaagctgctcagagagctgatgggccacctatgcttcacctggagcaatgactgtgatcagccggaacctggtgggggatggggtagggagagggggtcacttccggcacatgaaaagcagttttcacagtattccaaaggaatatttttatttctctaataaaattctcaattatgccttttaaa

SEQ ID NO: 95548 - DNA, 448 bp, Homo Sapiens
gaggcagcccagcctggaccagcaacccaacctgcttcttcagagcaaaacaagaactaggaatcatcttttcacctgggaaggaatcaagtaaaaagcaaaattgaactaaaggttgtttacctttcaaacttggtggccatgttgtgaggaagcccaagtgacatgaggagttcccgtggaggtgtgctgctgacagccccaggtgagagctcagccaagaatcagcacaacactgtgagtgcaaacatgtgagtgagtgagcttgcagaggatgtgatcccacctaggatgtcagcattcaagacaccctagctgacactgagtgagtataggtgaagaacatttacaacagtgataatagaaaacttgtcataagtttttaatttgtgctgtaattacactctgatattcccaaatcttcaataaaaatccattgtacagtaaa

SEQ ID NO: 95549 - DNA, 533 bp, Homo Sapiens
ttcgtggtctcgctggctcgggagtgaagctgcagacgtttgcggaactcgtgagttatgacaaaaagatattatgactcccatgcagcggatgaagacattgatgcccatgaaaggagattcacaagcctccctcccagattcagggaaggagatgcagcccccaccccttgactggaggaggaccaaggtcaccttgcagagcaccgtgagatgtggaagatgccagaactgtctgtgggaaatgggatttgtacttggcttgtctgcctcttgcaaccagagtcctggttctcagggcctcacctgtgcatctcttgttgagcacagaggaggcactcggcataaatgaagaggatgcttgctgagctggctggcccatcctctcttctttcccttgtttttctattttatctttcaaagcagtgtttcaagtgtttataaactaatctatgtataaaatattatgtggcataagatttgcaaaatattaaagatctaaagaatcaaataaaatatttgtatgataccac

SEQ ID NO: 95550 - DNA, 510 bp, Homo Sapiens
  misc_feature (150)..(158): n is a, c, g, or t
ctcaacacaaccaaccacaaaaaggattggcagagccctcagcccacgccaggctgtgggagctggagccccagacctgccccagcaggcacgagggctgcagcagtctggttccccatcccctcctcaggggcctgagaacaaattggnnnnnnnnncaaacatggacagtttgtcttgtaggccacccacgtgcaggtcctctccatgctgtggacgcagccagttgtgaagcacaatccctccgtgacttcgcttcccagcggtacctgcaatttaaagttatgtcccctgcctactctcaggggcacctcaaggggacaaggccctctagcatccccttctcggaggctgttacccaaggatggaaactcatgcttctcccatctctgtaatcctatgcctgcaggcacagacttcaagttactgctgttatggttgagatttcaccaacatttggcattttcattttccaaaaataaaatgcattgactgcttttccaaactaaa

SEQ ID NO: 95551 - DNA, 269 bp, Homo Sapiens
ttagtggccaaactgcacagtgtattattttactctgttaggcgctgtggtccatagcgctgattttttgagctataggacacgtctagattccgttcactttcctcagaaaaccacagaagcttgaagctcttatccagagcattccttctaggatgtcactgtgaaccagcacttgtctgcacctcagcttgcaacttagcggattccttctttattctttgtctgttagaataagcaaatatgaaatgttactttaatttttgaaa

SEQ ID NO: 95552 - DNA, 366 bp, Homo Sapiens
tttacttagtaagtacttgaatagtcaaggaaagagggccaagcaaagcaaaagttctagggaaagaatgtgttaattaaacataattaaagtaaataattttactgcactttattggcaccttatttttttcttttaaaacctgtgcgaggttcttttgggccaactcagaggaatatcacagaggacaaccttgaagatcagttggctgttactcacttcagagcttgctataaaattctaacaatgtttcctcgagcagagtgacatttttactctgctaaagataaatctgcaggtcaaccaattatcaggcagggtggtactgaaaagtcaggtattttaagttattccagacatgtgcaa

SEQ ID NO: 95553 - DNA, 852 bp, Homo Sapiens
tttttggggacccataaattttattttaaaatttttcttagaaggaatgactgcatggacggaagaagaatgccgaagctttgaacatgcactcatgctttttggaaaagattttcatcttatacagaagaataaggtaaattaggcagattagtacagataaattactagttacagtgaatgtaagcaactaatttataagtcacttaagtaggaaaaaagaacaacttactaatgttcccttatagcatttcagatatcattctaacatgactaatttgctcagagatgccacagcctgcttatggaatggctgatagtatattcacatatcttttcacataaacagttgacacagaaagtggactcactgtattttttaggaagtctcactctcatttctccttgactttcctttcttatcaagccattcagaggtttgtggcctcaaaataatttctcttcagcagtgagagtagctgttgctgaaggaagaaacattgttactaaaacaactagaaacatattctaacaccaccaaatgctggtaaggatgggaagcaacaggaactcttattcattgcctgtaggaatgcaaagtggtacggccacgttggaagatagcttggaagtttcttataataccaaccatactcttaccgtataattaaataatcctgttccttggcatttacccaaatgcgttgaaaacttatgtccacacaaaagtgtttatagcagctttcatcataattgctaaaacttggaaggaacctgtatgtcctttgaggtgaaaggataaacaaagtgtggcacctccagaactggactattattcagcactaaaaaaaa

SEQ ID NO: 95554 - DNA, 406 bp, Homo Sapiens
aagaagcggagggaagcaacacagcgcagcgtgactacgtgcttgatctgtctcctcctaatgggcatgcagaaccccagcttttaagttggtctccgcagaggacaactgcattctccagcctcctgtacagcagagagtgccatgtgactaagaccaagttctaaccagtgggatcaaagcagggaagtgttgccttctttgccccttcctgctggctggaatatgacaaaacggctgcagcatgagcaaccttcttgggccctgaggtggaagccacctgttggttgaccgaccagatggtggagtgaccagatagaaggggcctggtgattgtggattctgccacactacctctggtcccctatacctatgtgaaaggaaaagaaatgtctgccatgttaaa

SEQ ID NO: 95555 - DNA, 433 bp, Homo Sapiens
acctaaaaggtcacccaaggactcatgggaaaactcagttgtttctatcaaaatttagcttcatgaactccaggcccttgcaaatgatggttaccaggtgagaaatgtctcactggcaacagaggttggcagacccagctccagttccatcccagccaacataccaatgtcattaaaataaggccattcatcaaggtggagactattactagaaacaagcattctaaagtgccatttgagtgccaggctctcaacactgggcgtagcactgctccatgaggcttttgagagcatatactgaggcatgaccaaaaaaattaagtcccatgtaagtgatgcaactgctccccaattactgtggaagtatctgcagactaactattgtgcgtgtgtgtttgtttgctttaatgaataaattcagtcaaccaacaaa

SEQ ID NO: 95556 - DNA, 387 bp, Homo Sapiens
gtaaattcgttcttcaggattgaacactattgttagcaagtgcctaaaaaagatgtgaaacagtttacatatgtcaactgtaacagtaggtcccaaatgggcccattcccctaatagttttatttttaaagaaagccatacatagaatgcttcaagctatcttgctatgcacattatacttgtactgttttgtgcagtttgtctactttcttagtgaagtattttttgtataaaatgttacaattgtgtttcttaaattgagcctaagaatggagttaattggaaatatacagtatatattaataatgtacatggtgtttaaagaatggtaagcattgttaatttctgtaatgaacattttcaattaaatttatcttgtttgtgttt

SEQ ID NO: 95557 - DNA, 744 bp, Homo Sapiens
gagatgggactcacacccaagaggatgcatttccatacacccatttctgaaatatgaagaggtgtccagtctgtttgattcatagctgcctgttccacaactgcagatacaaaaactcggatcttttacccagagcctctgatcccacgaggatcaataatttaagcagaacaatcatcaacatcgtcgtgtttaatatttgaattccatagcatcacttaggtcagcttcaaggtcctagggaaccgctgcctgcggccagatccaggctggagaggcagcggctgccaagctgacctcgctgcccgcctcgcaggagacgactgcccggaggcctcagctgcacatgctgctgagtgtgaagtcagcgcggtgcaaccctagacctcggcacaggcgtgaatacccaccgactcccactgtggggattaggggatgtgtgagcagagtcttagcgactagcttctcctcctccccatatcaacacccttcaatgctgacttctaaaagtatggtgctagggcgtcacctggaagcttgttacgcctctccccagaactactgtgtctgaaactgcatttaaaccagatcctcgggggatttagagctggttaacaaaatgaccagaggattaaagtttggaaatctccaatttcgactatattgattacattgcctgcgtgttcaacaactctgacaatatttgacccaataaacgagtgcccagcaaggtcaaagcacaaa

SEQ ID NO: 95558 - DNA, 283 bp, Homo Sapiens
  misc_feature (270)..(270): n is a, c, g, or t
ggccaggcatggtggctcatgcctataattccaccactattgggaggctgaggcacgtcacggcaacctctgaagaaggaattatagaaccaactttttattgttgaaaatggagtcttgtagagttcagtgatgggaaactaaagtagaaaaagcacatcacaaagaaacatatatagtacagtgtgatcccaattttgtaaaaatatctgtaatatgtaagcataggtatttgtatatcttaagaaaaaaagcctagaaataaagccncaaaaatattaaa

SEQ ID NO: 95559 - DNA, 350 bp, Homo Sapiens
agaatgagctctgctcctgagccccggtagctgcttcctcatctgcatttcatctggagcagggcaggtaaccacaggaggaggcatgcccgaggcagccaggactgggcgggaaggtgctccctggatatactctgtgaaccttctggaaggctgctggcagtttttcctttttgtccaccaccctgctctttttaataattgtacataatccgtgtatttgttttacctgctcatcttctaaactggcgagccctatagttcgttctcattgttagattttgccttttacaagtgtccccaacctgcaataaacttttccctcttgaaaaaaagtaatcaggaaaaaa

SEQ ID NO: 95560 - DNA, 585 bp, Homo Sapiens
cccaacatgattcaggaatctgactgcagaaaactggtcaataatttatcctagggtagaaaaagctaaggaactaaaaaaagaaaatataacatttacagatgtgttggtcactaatcttgtccacttcattgtggattctgatgcacctctgagcctgtgtaaaggccacgggatcagtgatgaagaaaatcaatttcgtctcagctgccacgtgcccttcagaggtggccagcattagaaggtaacgcatatggtatagaaatcctctcatctccttcagttagatctcttgtctcaacatgtctggggataaaactttcttccaaaataccaaagtataacaaggatcaactcattgttaagtaataatctctccagattgaaggagactgggaacataaatctcaggatcacagttcaagcccagtgtgcggacatcaaaactactaaccacctctgcatgcagcccaaaacctaattacttgatttgacctctgaaacccaactaggtctagttagctatgtaacactttacaagctcatcctgaatgaaccgcattaaataatctccctgccaaaaaa

SEQ ID NO: 95561 - DNA, 447 bp, Homo Sapiens
tgggactgggactggaggactgatttagggaattctgtcaatctctaatgccacaaacttctgtgaagcctctcctgtgtgccaagcactgggcttgaggtgaggtggatcccaagaggaaaggtgcagacagtcgcttcccatcaaggggcagagagcagacctggtgcagtcactgtgtctcagaggcgctgcttgaggtaacatctttgcagtatcttctgatggaggatataggaactgattactgatataggataaaaggcaaataggttgggactatatttcactgttgtcattgttccttactctttattcagaaggtgctttctcgtgacaagtttaaatagtgaatgaagatcagatatttcaacagtaactgaaataacctgttcataatgaagtgaactgtttggccagcagttaaataagtgcggctttttcctt

SEQ ID NO: 95562 - DNA, 850 bp, Homo Sapiens
tttagagctttcaaattatttattttaggttttattgaaactgaacaaacaaaatattattcataaatctattataagacagagaaaaactgctcaattctgggtggggtggaagtaggaataggggtacagctctgtccttcgtcattctacttatgcataaagcatgttctattgaattccttagagtctggacagcacagtttgaaaaaccttcagtgaaatacaaagatcactagattagaaatcgaaggatttagaatcccagttctgctatcagccagctgtgttactgaacctctatggtacagatttcctcacctgttaaataaggagaatgaactaggtctctttcaggtcaaatatttgaggaaaccattagcaactacatgtaaatcacaaaactcctatactttatttgttcactactgcaaaataagatgtttcctgggtaaaatccacatgcccacctcaaagttctaagtgtcgggagattttttcttttaaccttaagaaatttaaaggagttctgtgaaaattgcaatataaaatatctaattgtcctgttctaagcagtttcaacatttctgactctatttgggataatcggtggtatttcattgattcattcggcaaacacattgagtgtccactacctgacaggaactgagttaggtatagaggacagaaaagatgactaaaggatgtccactactctcctcccaatacaaaaggtaatgtgttttgaacaatttgtgtttttcaacgaaaccttatctgttgtctgcgatgatgcatcctttctaaatgataggggggctttgcacattttaaaactaaataaaaacga

SEQ ID NO: 95563 - DNA, 598 bp, Homo Sapiens
tctctctctcagcacagtatggaattggatacaagcaagttttttgggagagactagtgcacctcagcaaacaagtttgggactattagataatcttgctccagctgtgcaaatcatcttgaggatttctttcttgattttattgggaataggaatatatgccttatggaaacgaagtattcagtcaattcagaaaacattgttgtttgtaatcacactctacaaactttacaagaagggctcacatatttttgaggctttgctagccaacccagaaggaagtggtctccgaattcaagacaataataatcttttcctgtccttgggtctgcaagagaaaattttgaaaaaacttaagacagtggaaaacaaaatgaagaacctagaagggataatcgttgctcaaaaacctgccacgaagagggattgctcctctgagccctactgcagctgctctgactgccagagtcccttgtccacatcagggtttacttcccccatttgaaatgtgatggactccaatcttttccaggaaagcactgtttccctcatgtgtgcagtggtgtatcaataaagatagagaacgctattgaaaaaa

SEQ ID NO: 95564 - DNA, 510 bp, Homo Sapiens
  misc_feature (46)..(54): n is a, c, g, or t
ccgtgcatttcggagcaccaagcaaatacgagcagagagacctggnnnnnnnnntgatgaagacagtattaatgataaaattaacatggctgagtgaattgtcaatgcaagttcctttactaactctttgttaagttttgctttgtactccttacatcctctttctcttaagccattgttttaatttcttctcgttatcatttttaaaagtaacagaaatacagctttcttcctaccttcacgattgacttggtggaggttgggttgcaaagaggaagcagtaagaaaaaataattattctatacattcacaagtccttcaaggcacaaaataaaagtaagaaatagaaaatatgtcctttctcctaataaaggtctttataataaaatttaaatgaagttttgtgtttcataacagcttcccaaatactgttgtagatactaaaatgtgcctgtatgtatttccttccacaataataatagtaataataaacttttttaggtccaaatt

SEQ ID NO: 95565 - DNA, 472 bp, Homo Sapiens
agtagcccctcagactcttcttactaagtctcaggacgtcggtgttcccaactccaaggggacctggtgacagacgaggctgcaggctgcctccctctcagcctggacagctaccaggatctcactgggtctcagggcccagagctttggccagagcagagaacagaatgtgtcaaggagaagaatcatttgtttacaaactgatgagcagatcccagaccttctctaccttcaggaatggcagaaacctctattcctggggccagggcagagcttgaggtgttctggggaaggtggtgctcagagccttccctgtgcccctccacttgttctggaaaactcaccacttgacttcagagctttctctccaaagactaagatgaagacgtggcccaaggtagggggtagggggagcctgggtcttggagggctttgttaagtattaatataataaatgttacacatgtgaaaa

SEQ ID NO: 95566 - DNA, 586 bp, Homo Sapiens
  misc_feature (77)..(316): n is a, c, g, or t
agcagtcatttcagtcagacgattcatcttgtaaacagaccatgtacacgtacagtacaaatacaatacagtgttannnnnnnnnnnnnnnnnnnnnnnnnnnnnnnnnnnnnnnnnnnnnnnnnnnnnnnnnnnnnnnnnnnnnnnnnnnnnnnnnnnnnnnnnnnnnnnnnnnnnnnnnnnnnnnnnnnnnnnnnnnnnnnnnnnnnnnnnnnnnnnnnnnnnnnnnnnnnnnnnnnnnnnnnnnnnnnnnnnnnnnnnnnnnnnnnnnnnnnnnnnnnnnnnnnnnnnnnnnnnnnnnnnnnnnnnnnnnnnntattataaaagtagccttaataactttatcgtttatgcggcatacatgtttccacttgtcattactatatagtatgaaacgctgttgagtctattttgaatcctaaatatgtctataatactcagtaagatacggaagtcagattacatatacactgaacaaaaatcaccatgtagaatactgtacatgtaagtctgtagcttgaagtataaaaccagagccattaatgtgcagggtttattgttctttcagtgcaaggccgttcttatt

SEQ ID NO: 95567 - DNA, 409 bp, Homo Sapiens
  misc_feature (39)..(39): n is a, c, g, or t
  misc_feature (73)..(75): n is a, c, g, or t
gttgaggggactgacggggccaccaccgccccgccctcnagcgcctcctcccagggtactgcgcctcctgttnnnagggatcacacctgggtgatggcccaagccctcccggaaccaaagggtgaggctcagacggcggctttctggctgctgtgctgcctcctgtggctccagccctcccctgcccccagcccgtccctctgcccagggcacagcggagccatgggggctgggagtccccatcagaggcagtgaggtgggccccggccctgggacaggcagctgccttctggtctgcatgacactaagacgcttgtccacagcggcgacccaggcctccaagcttgcacagaggcaaggccagacttttccgtcgtttattttcaataaataagcagctcagcgcaaa

SEQ ID NO: 95568 - DNA, 350 bp, Homo Sapiens
ttgcctgctcactggaggggcaggggaagaagcagaagcaacagccatttgagggttgactggctctaaggaaaagctgtttgctggcagacacaggtggctggtgacaaagggaacagagcaggggaatggatagctcaaaacgagcctcgccactcctgaacagaacatgcaatcccagctgtgtcctttcgagggtgagtgaaagcacatgctgtcctttacatgcttgaggcggacttgcctgtctcttcaggccggatgctcttcgagggccctgtggggcttaaacacatgtactgagctagctccaatcttaatctgttccctttgtcaccagccacctgtgt

SEQ ID NO: 95569 - DNA, 798 bp, Homo Sapiens
tccaggaaaaactgagcgagttcttgtgaaactgaagtacactgaaggtgtttgctatttaaaggtatcttctggtggatcgtcttggaaaacatggacccaaatcttgcgagagctatcagtgagtctcctctcctgctctgcatctctcaggactgtgtcccagctccagaagaatgagcctgcacagcttggactgtcacctctggcaggttcctgctctttgatgaagcctcgtcataattacagctgtgtcaaaatatgtgctttgcctcctggctgagtgacagtggccatccgaaggcagtgactttccagggcacaaggacctccaaaggcaagtgtttgagctcagcccttctcggtggcccacaggaatcgcttcccattggaacactgccaccaaggttctggagctgagtttgtgacatggagacattcatggcatttttcctgtccctcaagggtcaggcagatctggtgctttccccctcctggaaatggatagagctggctgaaagcttcttgggatgaaatttgtcttttgtgcctcaggtgaaatctgactgattttgaatggtgtgcccatttctgggcttcccaccctccagatcccctggggccagattcctagcaccccaggaagctgttgggggatctgggtctctaggcactgagaagatggggagaagctctgataatcagaagcctaataaccaggtctccagggctcaaaggaaaagcaatttcctagatctttttgccttttatccattaaagaaaaattgtcaaggtcta

SEQ ID NO: 95570 - DNA, 496 bp, Homo Sapiens
aacctggatggggactggccagcccgaattctccagaagccccgttaccggatggcctgaaaccgaaggttattcttaaagacttctggctccaccgtaagatgaagaataccgactatttgacgcattatgacctctcagaatttgagaacattggtgccattggcctggagctttgccaggtgagatctggaaccatttttgataactttctgatcacagatgatgaagagtacgcagataatttgtgcaaggccacctggggcgaaaccaagggtccagaaagggagatggatgccatacaggccaaggaggaaatgaagaaggcccgcgaggaagaggaggaagagctgctgtcgggaaaaattaacaggcacgaacattacttcaatcaatttcacagaaggaatgaactttagtgatccccattggatataaggatgactggtaaaatctcattgctactttaatctatgtttcaaactcaaatgtcaaa

SEQ ID NO: 95571 - DNA, 404 bp, Homo Sapiens
  misc_feature (27)..(27): n is a, c, g, or t
cagtgggtgtgacctggaagaaatccncctagaccaatctcatgagagaagagcccctagttctcaggactttaaccctcttcctgccagcacccccaggccagtgctgaggctgacaagttgtctaaaagggcaggaggacttactcctgacatgcatctgccacccaaaccatcacaatagccttccgccttctcagtgggagtacgtgtgaccctgcagcagaaggcagcaggaggtggtgacaagaatacacgtctggccctaaaacctgggtcagtcacatcctggctgccattcaccagctatatgattttaggaaagtggattcacctctgagctgcagatacctcatcaataaaatgaagacaagaacacccacccttagtatttgggtatttaaa

SEQ ID NO: 95572 - DNA, 599 bp, Homo Sapiens
tgcggccgccggcgccgcgggaggtggtggaggcctagccggagccgagaggtctcttgttcccgtcccacggtcccggcgtcacccctccggcgcccagtccccgtcccggaactcccgggcctgtcctgggcccccggtctgtgcactccgctcgccgcagcgcccggcccgggccgctacccgccggccccatgaggagggacgtgaacggagtgaccaagagcaggtttgagatgttctcaaatagtgatgaagctgtaatcaataaaaaacttcccaaagaactcctgttacggatattttcttttctagatgttgttaccctgtgccgctgtgctcaggtctccagggcctggaatgttctggctctggatggcagtaactggcagcgaattgacctatttgatttccagagggatattgagggcacagtagtggagaatatttcaaaacgatgtgggggctttttacgaaagttaagtcctcgtggatgtcttggaatgggagacaatgcattaagaacccttgcacaaaactgcaggaacattgaagtactgaatctaaatgggtgtacaaagacaacagacgctacatgt

SEQ ID NO: 95573 - DNA, 630 bp, Homo Sapiens
  misc_feature (32)..(32): n is a, c, g, or t
ctctgtagacttggaaaatccagaaagaaaantaatgatttcaagccttctccccatttctgcctccattctgaccattgcagggtcgtcaccacctctctttgccattccaacagctcaagtctcccctgatcaagtcaccggagctttcaaagaaggaattctaggcatcccaggggaccacacctccctgaaccatccctgatgtctgtctggctgaggatttcaagcctgcctaggaattcccagcccaaagctgttggtctgtcccaccagctaggtggggcctagatccacacacagaggaagagcaggcacatggaggagcttgggggatgactagaggcagggaggggactatttatgaaggcaaaaaaaattaaattatttatttatggaggatggagagaggggaataatagaagaacatccaaggagaaacagagacaggcccaagagatgaagagtgagagggcatgcgcacaaggctgaccaagagagaaagaagtaggcatgagggatcacagggccccagaaggcagggaaaggctctgaaagccagctgccgaccagagccccacacggaggcatctgcaccctcgatgaagcccaataaacctcttttctttg

SEQ ID NO: 95574 - DNA, 258 bp, Homo Sapiens
gtaagaaagagaaaataaataggctagaaagtttattggcaaatctaggtcaagctccataatttaaaattatttaaaacaaaatcaaaaacatctataaaaggtcagaacattcagtattataagataaaattttttcaaaacaatatcatggttatgaaaacaacatctggcaggctatacatttttaaattatagaaaacattaaaaataaaatatctaacaaaatatgtcttgctgttgcttttggggaaaagg

SEQ ID NO: 95575 - DNA, 294 bp, Homo Sapiens
agggggcaaatctacccttagttgagaaacataggtttatgctaattctaatctatactcagttggatttattctgaaaagaagaggggattaatgtctcatatactcagtatagatttccttttggaatgatttctatttaaagaaaattatcttttgaagatgaattaagtttatcctgattgtgttggtggtcttgtgagtgtatacaattgtgaaagctcatctaattgtacactttaaataatgcaatttattgtctaaaattatattttaataaagttgatttttttg

SEQ ID NO: 95576 - DNA, 1220 bp, Homo Sapiens
  misc_feature (57)..(84): n is a, c, g, or t
  misc_feature (422)..(434): n is a, c, g, or t
aatgatatggaaggatactcaaagtatatcaagtgagaaaagatctaggaacaggannnnnnnnnnnnnnnnnnnnnnnnnnnngtagggacagggtctcaccatgttgcccaggcttaggagcaggatattagctaactcgtgttacttctgaaaatctttgaagctccccctgctcttttttccagaagtgtaaaaacaagcatgtatttagtattacacatttttaaaaaatgaaaaaatgctgctgtgtgaatgaaagagtatacatcgtgttgctccagatggtaaaactagagtagaatttactaaaataaagtttcagcacgtaaagtaaagcacttctctgctcttggccattttagacactaaccatctggagcaaccatgtaactcttgccactcatagctaacttaatgtnnnnnnnnnnnnntcgcttgactttcttagcacttcacaaatgcttgtaagactgacaccaggagccctgtcatctaaaaggcactttatagagtgctttcaattcttctgttttttcattcattgctcaaaatagatcgtagtgagataagatagtctctggccttcttggtctttggcacaaggaagagggttccagagttgagagtaaggactttgcatcctttgccatagaatttgattaggggccataaaaaggaccattgtgttctagaatgtgaaggactaagcataccactttatagtgcaaggaataagtgaagaagtccttttataagaaaaactgcagtagagcaataacttgaaattacacttatttatatttacttttcattaaatgtaaattattttcttttaccacattgtactactagaaagagaatcaggagtttaggcattcagtcatagatattcgataccattgatttacttaagcacttctcatgtcaacaagacttaagcctgcagataattcctattttatcagtgttcgttatagcttccctgttggttttacttgtgagtcataagcctagtatggtgaatatctaggaaatttcacggtaacagggcttgtcttaggttttgagaacaggtgtaacttgacttctctctgctgtttgtcatcctacacttcccactacatctggtcctttttgtagggtgttgagaacaacatttttcttcatgcaggggaaagtggaagtgcatgttttctaagaaggacaaataggaatag

SEQ ID NO: 95577 - DNA, 919 bp, Homo Sapiens
tatcgaattagtaaatatttacagatgacatggcagcaaaagttgctaatattctcagttttccttagattgtcctttgttattaagctatatagaattaagctattttcttttccttagagtaaatagcagaatataaaatcaagtgcataaagttgaaagttgtagtgctttttaaattgggcagttttgtaaaatatttctaaaattaaaaaattggtacataagattattttggtttggtttattgtaaaaccgtgatgtttgctctgtataagaacacaatctgatatggtaatatgttcttaaaaattatttggtgatagctttccatatgaattcaaaggcatcattattcacactttcatattctttctgtctgtggttaagaaaggctgtattaccctttttttaatgatctgtgtgtctcatgtctatctcttcatatgttaatttaaaaatctagctgcttgtatcaactatcaaatatcagttgttttgactttaatcataatgtagtcacagacaactttgttgtggcttccatttggatggtatagaaatgtcattatggattgtctatgtactgatgttgttacgtgtaacttttgtgctcttggttttacattttaatcctgtgcttcctattgccctgtgaaagctgagaggtgcctgggagcagaaaggtgacataaataatgctgtgtgcttgcttcctggctctgggtcccctaccactaattctaaacagctcagtccattctcagttgtttaggagctgctaaccagatccttggcttctctttccctctactgccttttcccctaactttctactgttcattagcacctgtaccagaaggtgggcaagggaaagaaaatgaggtgaaataaaatctgtagttttagctactgaaaa

SEQ ID NO: 95578 - DNA, 366 bp, Homo Sapiens
gcacgaggcttgataatgtagctgggataaactagaaaacaagtttccccatggtcagctggaaatactcatattgcacttggacggagcagattgtttctgaagagggccagtgatgagcaccagttccctccttgcccaggccaacagcgtttcacaggacccctgggatcgtcctgatggttctcttccaaacaatgatctagaaagatgccccgtgtcaagttgcttgcctttcgaaggtcttcaaatcattgttcctccatatcatattcagagctagtgctttcatgctgatgtggaaacatctaagaggactcataatgtcaacatgcatttccccaataagtaaacaagagaaatgac

SEQ ID NO: 95579 - DNA, 526 bp, Homo Sapiens
gcggccgccacgcagtcccacaatgccccgctcgcaccaccctgagggcggagagaaaggaccgctgccggggatagggcttccgccgagagcgccgagaagtgcgcacgcgcaccgaccccgcgggccctagcaaccagagcagtgacagtagcaaccgccggaatggaagctttcactgtctacaaactgcattgaaaaaattgccaacctgaatggcttaaaaaacttgaggatattatctttaggaagaaacaacataaagaacttaaatggactggaggcagtaggggacacattagaagaactgtggatctcctacaattttattgagaagttgaaagggatccacataatgaagaaattgaagattctctacatgtctaataacctggtaaaagactgggctgagtatgtgaagctggcagaactgccatgcctcgaagacctggtgtttgtaggcaatcccttggaagagaaacattctgctgagaataactggattgaagaagcaaccaagagagtg

SEQ ID NO: 95580 - DNA, 759 bp, Homo Sapiens
tttaagagtccaaaaactttatttaatacaccaacaaacacagctcagggatttgggggtgcctccttccctgattgctgaggtcccttggacaaaatccctctgggtgcctcaccacagtcggccctggagagctcagtggccctgcagtgaagcggggactcaccaggactgtcagcacagaggtccccacggtgacgttctcgtacaggctgatgttgtacagtggctggctgaagatgggccggttgtcattttcattgatgagagtgatcttcaccttggcatagcccacatggtcaggcacactctcattggcaaagagatcaaagtcgtagcggtccacggtctcgtagtccagtgggatggccacccgaatacgaatgtccgccttcccctggacggaggtcggggagatgatgaagtggtgggagttgttccccaccaagtacacctcaaacatgctgttcaggcccaaattctcatccttgtccaccacctggatgaagagtggaagggcaaagccgacctgtgccagctcagtgatggccacgctgtactcggagctgttgaactccggggcattgtcattgatgtcaataaccaggatattgaaggtcgtggtgactgtagcgtcagatggggtgcggtcatcgttcagctccgtgcccgtgagtggcaggcggctgcagcgggtgcgggactgtagctctgcctcacatcctggggtggagaccccagcacattgctgttgcattg

SEQ ID NO: 95581 - DNA, 694 bp, Homo Sapiens
  misc_feature (588)..(631): n is a, c, g, or t
aacatagaaagagtgtctttctacctaggattttccattgaaggccctctggcatatgatatagaagtaatttaagacaatacatcacctgtagttcaaatacgtttatttatatctttatgattttattctctctctctattctcatggcactttcataacattatggctaacctctaattacagattttgcttttgcctccctgaatgaattacaagcctttttaagatatgaaatatgcctacccgcagagcttggcacaaagtggagtcaatcttttaatgttttaaatatgcattttcagactcaaataattaagaagtttcattgatatccactggtcacatcataactgtctatagggcaataaaatctgtgttaaactcaattgcttttataagttttctaaattatttcttcactgtgacagcaaagatttaaataagatgaatgtaaaagagaaagcttattggactcaaacccacagatccacaccagagttctatttacctcatcttggtatcaataaaaacttatgtggaaggtaaatatattgttccccatccaccacataacactctccccannnnnnnnnnnnnnnnnnnnnnnnnnnnnnnnnnnnnnnnnnnntcccttgtacccccttgccctttctcccaagctcattggctcccgggagagaagaaagagttc

SEQ ID NO: 95582 - DNA, 520 bp, Homo Sapiens
  misc_feature (105)..(169): n is a, c, g, or t
tcagccatgtaccttctcccaacctgaagacaactcctcaccaggctacctatcaattctacctctttttttaagagatggggtctcactatgttgcccagcctnnnnnnnnnnnnnnnnnnnnnnnnnnnnnnnnnnnnnnnnnnnnnnnnnnnnnnnnnnnnnnnnnacacaccaccatgcccagctccatttccattgttcttcatgcttccttattgagttccttccctgtcccgattattcgtctttgattgggctttgactacctgggcatttagtagggtccataactgaatgcagcattccagccggggtctaagcaacagaatagagcaggaccatcatctccgcaatttccaatatcatactttcatcaatgtcttccgaaacaacattcacttttttatgttcatgttaaactaaaagacagggctgaaggcagcatcctggaacagtggaaacattcctataagttgacttgaatcctttaaataaagtccataaaacacaaaaaaaa

SEQ ID NO: 95583 - DNA, 474 bp, Homo Sapiens
tgtaaatgtcccaggagcctgtattgttattgtttgttattgcctgtctctgtgatattgcactgcacgtcacacgctcctttaatcagtctagaggctacatgtttagaactttacaaatcatctagtgcagaaacaataatgaaaaccgaacccaaacctcagaattcttttttaaaaaaatcaatgttaacattctttctacactaagaccatgtacctgtattttcccacacacgcgttcagtttgtgatcatatgtgtgacatgttttccttcattctgatcatagtttaggaatatattcgggtatgtaatttatttcactttctattataagcatgttaatgtgttgctacataatcaacattttattttgattattgaacaataccctaaagcttgactgcaagacttacatttactactgttgtttgatatttttatcactgcaataaacaccttttattataaa

SEQ ID NO: 95584 - DNA, 553 bp, Homo Sapiens
ctaggggcattttaacactcttggtgcatattactaaatttcttattcaaaggcagtgcactagtttatgctcttcagtaatacagtagagaacctacttctccacatacttgccagcatttttaccattttaaacattttctacttttagataggtaaacaaaaagctattattttaattttcatttcttctgtttctaatgaggttgaacttgttactaaaccgttgttatttcttcgtctgcacattgactagtttgcagctcagcgtggcctccttctgcatagggcagagtggaggatgctggtcctgcctctcaccttagcttggagcagggctcctgcctccacccggctcttttcaacatctctctcccactgaattctgatggtctcaaggatgtcgtccagaccagtgccaatgggagcatccatttgttccagctcacaccctgccaactgtttgtgcagcagcttcacatcctgaaaacaacaatatacattttagatgagttacggggggaaataaatggcatagaattttagccagcag

SEQ ID NO: 95585 - DNA, 553 bp, Homo Sapiens
gtatttaactgctaacatttggcctacaatggcattttcatttaacagtacagcatctgcctgtgataactgcagtgattctccagaaagaaaggccccagctgatactattaacctcgttgggtctcaggcatgctagcctgttcatctgtaattcacacaggcataaaaatgagttcagaatctatttcactaattatttagctgggatttggatttccctgacatgcttaatacaattacaatacctgtgtacaaacagaggcctgaggaaagaggcaaaatttgcttttcatccaaacagcaacaaaaggcagttgaaaccttcaagcctgttggttgcttttaaacctttgtgttattatgatatatattctttgttgagcactgaggtcctgagggatacatatctcttgctgttttctgcctacttttgactagctgtatgtaacaaaggctctacttttgctctgtcactgttcctacagtcctgttctttactagctagattagcctattttgcacctattaaattctaaaaaccttgtttaaa

SEQ ID NO: 95586 - DNA, 462 bp, Homo Sapiens
gcatttgagagaaatacagactgaagatgattggttactcaactagaaagaggggaacaagtcatccctagttccttttttctcccagggaataaccgggttatgtgagggagagagagaagagctgtcctcacatccctgagtccctgtaaccttgggatggtgcagaccatgggtgccaatgtggcttttcacccttgttaacagggggcctaggaggtgggaattatccgcatttacccacatgctgcctttcctctgctgtcagtaacctttgagttccctagaccttgtctgtgccatggatgctagcatgacctctatccatgaaatgggaggggtcctaactggcaggaattagtcatgctaaggtaaatctgtggtgctgagtcctcctcaaacaagggagagtaaagggtgtcttgtgagttggggtcctggcttaataagatgttttccaaa

SEQ ID NO: 95587 - DNA, 377 bp, Homo Sapiens
cttagaccttcaagatgagagtgctagctccccctgctgagaagaaaattaaaaagtatatccagaatttactctgcacagtcttctgatgcggaaatcttaggcatttgacattcttaggttttgtgtttcttagagtacattgtggcagaaatttgttaggaaaggtaaaaacgtgcaattacacgtggaataacttggtgaagcagaggtgagatactaacccactgccatttaacactgcagagattattttatagtggtggtgggagaagggcctgtggctgagtgctcacaggtaatgtttttgaaggatgttttgaaaacagtgtaaatttttgtttgagaacaaacaataaaatctttttcaagtgaaa

SEQ ID NO: 95588 - DNA, 692 bp, Homo Sapiens
  misc_feature (233)..(305): n is a, c, g, or t
tcagcggtggactctcgcctgtcttctctgtgggatcacggcatagttccatgatcttagtagagggcagacatgagccagcctaaagaaacctgcaccactgtgatttccagagggctgcattattcctgtaagatgagaaacagacagcctattttggcttttgcatggtgatcaagcctctgttgtatttcatctgcaagtcttctcattaggaggggctttttcattgnnnnnnnnnnnnnnnnnnnnnnnnnnnnnnnnnnnnnnnnnnnnnnnnnnnnnnnnnnnnnnnnnnnnnnnnntcagagagctgctacaaggctcaggatgaagggaggcagtgagataaagagcccagccatctttcactgacacccacctctggggtctcaggtatggttctatctcctaaggaatgctcaacaacgcaccagattttattccaatctccatgggacccgattctggtacacagtctcttttggtaatggagtcagaagaacagtttctgggaaacacctcactgtcttgaaacacctcccctttcaggctggctgacaattctaacagctgggcaccggagcctgcttcatgaatgctcatcagctagtctcagggcaccaggcctgaaataaactgtgaaatccctaaggatccaaaaggattcacaggatttctcattcctgcct

SEQ ID NO: 95589 - DNA, 477 bp, Homo Sapiens
atataccacaggatagaggttgagttataaatctttctttcatggatttgaatgaaaatctcattttgtgttagatcctagtatctgtgggcatggcttttggtattgactgaaatgttcccactgaatgtctgaacaacacctactttcaacaattatttaggaagggtgtccagccccactgaacaaagaaatggtctctttcctgggaatatatccaacattactcctcaattgactatttcaacaaactaccaatgttgatctcaaatgaatattattggagtccaaaccacagaaacgatttctttcttgatattgagtttatttttaaaataattttgtcttacacttataatctcttgctttcataagagttccttttgcaaattttcactttgctcccgagagctagaaataagtgcttgatttcttttaattcactcattacataacaaataaaacctcttagaaagg

SEQ ID NO: 95590 - DNA, 969 bp, Homo Sapiens
  misc_feature (110)..(110): n is a, c, g, or t
  misc_feature (118)..(375): n is a, c, g, or t
ccagctcaatttaagaactcaactgaagaagtggtaaagcatttgcagctgtcttttaattcaccacacctgattctcttctaaattggaattggccaagcagttgcagnggctcagnnnnnnnnnnnnnnnnnnnnnnnnnnnnnnnnnnnnnnnnnnnnnnnnnnnnnnnnnnnnnnnnnnnnnnnnnnnnnnnnnnnnnnnnnnnnnnnnnnnnnnnnnnnnnnnnnnnnnnnnnnnnnnnnnnnnnnnnnnnnnnnnnnnnnnnnnnnnnnnnnnnnnnnnnnnnnnnnnnnnnnnnnnnnnnnnnnnnnnnnnnnnnnnnnnnnnnnnnnnnnnnnnnnnnnnnnnnnnnnnnnnnnnnnnnnnnnnnnngaattcttcctgctagcatttagcttccaaacctccatatggtatgagagatataaatcattaacaaccattacaaatgatcaagtttgctgttaattaaagatgtgcagaggtaaagataggggcggcactgtaccttatggaagtggtaaataagaataaataataaattctaacacaggcaagcattcattaacaggcacttggtagaaacttctttcttaaggcacttcagccacctatttattccctgatccagtaatcccactcaagataattaatccagaaaaatcattcagaaagagaaaaaaaattatgtgtacaaacaagcttataggcgtcttattcacagctgtgaaacactagaaatgatgtgaacatagaaaaaaaattcaagtaaattatatcaaaatcttgttatactgtgtagccattaaattgataatggccacgcccgtgtagaaacataggagagtatttttaatgtaaataaagctaaaatttaaaaattgtgagtcatatgattatagtctattcaaactatgcctgtgagaatcaaaacaagaaaagaataaaaaaatagattttgttgaa

SEQ ID NO: 95591 - DNA, 595 bp, Homo Sapiens
ccagctttttctaagctccacagccaccatctgacctcatgaaggggactgcataagaacacaacgaagaggcaatgaccacacccacgtgggcctgggctttcactcaggagttcggatctcatggaaaaacaccgtggaagatgccctggggcagcaccactacccggatccacatccactcaatcgccctagtagggcctccagagcactcctgcaagcgtcacgtggtttcacagatcccaggcagaggcagggcaagtgttactaccaccaccagtgaggaaatgaaagcccagagaagctgtgagacttgatgaaggtcaccaactggctaaatgatgataggtgctctaatgagaagttttattacctcactatattgttttactcaaaaatatttcctgtctgacagctgcttcccggatttactgcttaaacttttgaagataaagcaggaaataatcttctttgaacatacttgataaaaattccccaaaaaagcaaaaacacatgcttctactgcattgaaaaaaatttactgcagtgtggcacttaagagtaataacaaatagcaataaaaagtaatttcaaa

SEQ ID NO: 95592 - DNA, 580 bp, Homo Sapiens
agtaaatgagctgtttcatccaagctggccgcgcagatccagggccacagagacagacagacacataaacgcattgatcaccctgctagggcctactggcctaccctgcatggaaaatgtgaatggaaagaaggcaaggaaaatacactatttgtagttctgagccacagctctgattgtaggtcaccccctttcctctgtggaagggcagtcacattgtgatctttcaaaacattggctaaggcggtgatgataaccaaggctgatatgttaccagcacacagcagatctcagggctgagagtgaggcatgaatcttccaagtaagtggctccatatgggcctctttgaggtctttaaagtcaacagtctcttcatcatggaattcaacttgacccctgttccaccgacatcagaactggtgaggtgacagggatttagagcgacttgtcaaagggatgggaaatgcatttgctcaaatgataatgacattcacaatagtcaagattcgttgagctaggatgcatgctaagaactttacaagcatttctattaaaatctcaacactgctcaatgaaaaa

SEQ ID NO: 95593 - DNA, 809 bp, Homo Sapiens
cgttgttcgaggcgttagttcagctgtctgttgaatcccctgaaactaatgctcagtctatattaatgtctcagtcccgagaaacctcagcctattctctcctataattaatcttgcaggtggtgccttgacattattggttcaccaacagagcagaactgcctcagccatcaataataattcaacgcatcaggatgaggcctacgcatgggccacagaggatatgtaatgacttaagataccaactccacattctgtggtaagagatgaagatccaggaaatgtatggacacctatagcctgaagaatattgtcagaaaaaaacactgggatctggaagcgaaaaggaaacatagaaaacgagacaggaaggtgaagaaagttgaagataaactttctttttcacaatgtttttatggacaagttcagcccataaatcaaaaattacctttatggatgaaatattagttaagtcaagatcatctttttcatttcctacatgcaggttgaatctcatttatggagtgagatgtcaaataacaacaaaaaatgcacttaatttgcataaagatgcttgtaaggtaacattgctccacactttgctttattcacatcattagaggaaatatcttattcctctagttgtttctggccatggctcaaggaattaaaaacttccattcattccttcagacagtacagttaacaagaggataactttttttattatctctgtccttctccctcaggaagcagagaattatcagattggtgagagaaaggaaataaaggtctgaacatgtgtcaaa

SEQ ID NO: 95594 - DNA, 487 bp, Homo Sapiens
cttctacaacggagagagaaagcgtgggcctgagggtgcctgagaggctagggccagcctcccgcctcaggctccccaacttgtcccccagcctccacaagagaccctgctcattcatgtatgggctgaggtcctttgaaaattggacctcaggccaggtcactccctgaaacctgaaactcttcagtggcatctcactggatatatgggaatgccacagaataaacctggctgcatctatcaagtttcctaacagcagagaagacatctatcttttcactgctgtgtccctggtacgtagaagagggcctggcaaacaggagaaactccatgcttgaggaaaggccatctgaggacatggagagaagacagccagccttttgcaacccaaagagagaagcctcaccagaaccgagtctgcctgtgccttgatcttagactttctagtctccaaaactgtgataaataaatgtctactgtccaaggc

SEQ ID NO: 95595 - DNA, 570 bp, Homo Sapiens
  misc_feature (238)..(254): n is a, c, g, or t
ccaaaataattctgttatagaggaggggggtattataaaataatttgtcccaggtgtcaaatatgctaagcacgccccctatcagaggccatggaatttctgcccaagttgtgagaaaatggtgaaaaggagggctatttctccgaagagagatgagaacttttgcagttcggtgcgtctctggtagttaaggttaagtccatcacgttagaagattttatcttccccaggtaataannnnnnnnnnnnnnnnnactcagatggttgatggccaatatcacaaaaaggtgtggtcttcaagatgatgaagagttgtgctgtttattttttaagggtataacacaaaaaggaaaaatgagtaagtgaataaataaaatgactgaacagtcactgtgaattctgggagctcttcagcgttgtaagccgggttgtgtcaccatatgactctctctgcctcaagagggagctattttcagagttcagtccaggcaggaagcgagtccacccacgaaggcaccaccctgtcacctgagtacgtggaaggcaatcacgggcaagagtcattgtcag

SEQ ID NO: 95596 - DNA, 537 bp, Homo Sapiens
aataaataaataaaaagagttaatgactaggcattggtaggtcacttttatcttcttcccacacctagttctctgtgcatccttagaaaggaacagttagggtgccaaaccccaaagcctttgcatatccagtttcattaaatggagatggcttggggtttccagtgtacaaattgaaagtatataaggaaagcatgtgttgtatgagggcctgaatttcataatttatggatgttcatttttccccctaaatgtgtcattctttttgtgatagacatgatgagaaagaaactgggaaacatatagcagatgtgaggaaaataagataatgattcccccactaacttgtatgccgcgggaagattgggactgtctcttactactccctccgcccactatctatctatctgctgtttatagtgtagtgtctacactcagtaacttatttgttgaataaatgaatgggttcccctgtttatagtatagtgtctacactcagtaaccatttgttaaataaatgaatgaattcctcataaa

SEQ ID NO: 95597 - DNA, 374 bp, Homo Sapiens
ttgtttgtttgttttgtttttgtgatagctttggtcccaatatttgggggaattttattttgaacatccagaggggagataagacaatctactctgcaacaaagtctaaactcagatatctctatttctgatttcctgaaaacgaaacaaaggctgaagtaagaaagacattaccatggccaatacaaactgctgtcttcagcgttttgtctcaagttctttcataaactggactctcaaggtcagttggcacgcttcttccccattggatttgcttgttgggcggataataatgcttttacatgagaggttttgaaggctggagctaataaacaaaaacgcttgataaataaaaatgtgagctgcaggagaaa

SEQ ID NO: 95598 - DNA, 943 bp, Homo Sapiens
ctttaagttccccaagagtaaaaaggtctagtcattattatactgtgggagaatgatagaagattgattacattagaactccagaacttctatttatttaaaagatttaagatttgacacaaaagcggtttattttagaatgtttatttctatagattgtcattacttcaactcagttttcataatttgtatttgagtatactaactttggaacatagtgtaatattaatggctacagaagaggtttgttgaagaattgtaatttgaaagaacagcatatgtttattgaagagagcatatagagatggaagtggttagaaactatgaactttctttagtttggcttttcatgtaaagtggaatatgaaaacaaaagtcctaaagacagttcagcagagttcctcttcaccctgtttttaagcagtgatgtaaaccatgaatttagtgttcccaccctcttttataccatgcaacaacctgtgaagtaggaactattatctccactttgaatgaggtactgagtttcagaggctcagcaacttgcccaaggtcattcttctggtaaatggtgttgctggcattccatcccagttcattctgtctactggaggccatatttataatcactcactcccctatcgtgcctcctaggcttcccacgtggcatacataccactccacaatgcatggaccagtctaggctcccactgaatttcttatgcctatggcaataaggcatggctttccagcccagggtaaaagagctttttctctatttgtgtttctgcattgttaagcctgttgtcatacacacagttgctcctcagtagcttatttcttgactcattctaaacatatggtaaacttctaaagttaaaaaaagttagtgttatattgagatgaaatatctgtgattaaaaaaatgaacatcatgtcacaatat

SEQ ID NO: 95599 - DNA, 590 bp, Homo Sapiens
tttggctcgagtgtttatctgtccagaagcatatttaatgttcatgtgggattcttgacactgacatcgctttctgaagcctgagtcttgcccacggctcgatgatcagtccacaaatcaaactcttggccaaatatgcacagctcgagtttatccagagtccaaacaaatcagatactccttctggacagaagtcaaattcttccttttggtaagaatttttcagaaatgcaaaaaagcagtatgttttatgttctcaaagttcctataatcacatccaatcttgtatcagatgcattaacggccataatggtttgaaaagtctgaagcttccaaaacagataaataaatcaaagcccatttgaacttttgagtaatatttcagtactataggatccaaaaactttaatgagtttgccccctctttgtaaaacagcacaatagatcagctacagttacaagtgaggaaaattctaagggatctcccagaggacatgctttttttaaaaaattgtaattaattatagggaatttgccagtctctaatggagtctacttcattctacaaaagaactggatctcaaatatct

SEQ ID NO: 95600 - DNA, 392 bp, Homo Sapiens
tttagcctctcaccttgagaattatacattacaggacagttctccagatggccttagtaccaactctgtttactccttttctcatttgtagttctcaagaataaccatagaacatgtggaagtagttggaacagcccaggttctgttctagtctctcccgagaacaggttgtcctacagtgttttaggctagcgtgtcatattacgctcagggtgcaaaacccaggaagggttgttttccatgatccctcatctgtggcgcaaatggggcccgtacagatgactccatctgacctgagtagatttcccaaggcttggggcaccaggtctcaatgaatcctggacttttcttgtccattgctatctataagtaataaacctactttacataaa

SEQ ID NO: 95601 - DNA, 563 bp, Homo Sapiens
gaaccgagaggtgggtatccatcctcgtctgaggactgattcacagtgggagtcgcttagcagggtctgtggcccgaaatccagtggtgacctcgacccgccccagcctagttcctggccctccgcggcgtgcctcagttcttcctccccagcctcttgggcactcggagctcggcaaatgctaaggggctggccctgggggtgctaagcctccgagcaggcgcggcgcggaaaggtgaggggtggccgccctgcccagtggacacctgcttcgctggccaggcctggcactcagttactgtgcaccaaggtgcgctggggcaaaggccagccaggccccgtccggagcgccctccactggccagacccggtccagcggccggcagctagcggccaggtctcagtccagctgcagtgtgggcggagaggtgcatcctcccgggccctaagttcccgccgcgcctttgcagtccgcccgggctgctccctgccatccttccctctcagagctcgcgcgcgcgttccccctcgtcggggaaataaagtcaaggtagatacagaaa

SEQ ID NO: 95602 - DNA, 337 bp, Homo Sapiens
catcactagggtacctccactccccatacagttaggaaactgtggaacagagacatcctcccgtgttcagagtcacacagcctagatagtggcagtggtaggactacaatcatggcagatcagtgctagaaaggctttagagtgtctgtatgtcattcagggttcccagccttgagaagaggacctgctatgcagttactgcggactgcaaattcacatgtacaccaactgttgtttgtagactaaataaataacatctaacatctgtataccgttactttaaaaacgaatgttgactctgctgtgattaataaattggaagtttattttcaaaaaa

SEQ ID NO: 95603 - DNA, 765 bp, Homo Sapiens
ttcatgcaacagcatcctcactgtaagccattacctgtgaccaggtagttcatgatgaggcggttcatgtctgctctctggacatgcaagaaaaaaataacagctgagggaggggtttagatgctcctccaagggcagagggcagcgctggaagagctgtgagccggagaatcccacactgagcatgtacggaaagacaacgctgccgtgggacacccaccagactgagaatgccaatgcttagcaaagaataagttcacttcaactttttctactctggtatcaggagaacggactgtgctacaaaaacaatctggtactccttacaaagctgaacatgtgtgctcctcacaacccagcaattctacttttaatacatttatattctagaaaaactcaccaggatgcaccaaacacagacaacgctgttcacagaagcaccgttcaaagcggcaggaatgtggaagccacccacctgagcgttcattcaacagcagcgtggaccaagggactgtggcgcacagaactgcatgtttaaaacccttgggcagatgggttttggaattcagaattcttcaatgtacaatgtacaattatttggcacaatttaccatgtaacagcctcactggggtttgggggcactccccatcatcagacgttatttcttcactgaaatgtgttaggtatctatactaagtggtagaggctattaaactttacctggtgaggttttggccaccaaataggttaaaaacaaaaccaaa

SEQ ID NO: 95604 - DNA, 524 bp, Homo Sapiens
ctgcgggacgcggccagcctcaatcatcttggccagtttccaggacaacagggcacatgttaggagccgtgaagtaggagacaaagtcgctattgtaaggaagccacaccggtccttcacagtccattccacaacatactcagcctaagcctgcagagcaatcgtcttcataggagccataggaaaacatgcttgagcaatgatctctgtcattgaccttggattattaatgagccaatcacaatttcagatgactcttggttgtttctcttctttagttctgctgtacacttctgagagtaggtttaaattcctaatggcagctgatcacagggattacattcaccccagtccctcagccttggcaagtgctggtcccaggaatccaggcttggccataccacaacagttgccatcagcctcccctacatcaagtggaggaccagcagctcagaccctcactctcacataaatgtatacaggttttactggtgaattatacctcaataaaactgcgggaaaaa

SEQ ID NO: 95605 - DNA, 379 bp, Homo Sapiens
ctaccaccctttacagaagcagccagaagttggaggcaatgtgtccatcttgcaccaggccaacatccccccatgcttccgcgtctcagccttgactgcctattgcaatcacatggagaactctaaagaaaatgctgggccctggtcttacagccagagtcttgtctagttgttccaaagcatagcctggtcattgagagtcttagaagcaggtaggctgatgccccctcacctcccacggcacagacatcccctcacctcttcgctggctgaaatagaagaaccctagtgtccatcagctgcttatagatgactcatcttcttaatcctttcttgacgaaaacttgcttcagatgttaataaaaagtacaaaatcaaa

SEQ ID NO: 95606 - DNA, 650 bp, Homo Sapiens
  misc_feature (53)..(53): n is a, c, g, or t
cttcttcttgatgcaggaattaatcttctctcttccaggcatgtgaaaaatcnaatgtttctgatatctcacttttcctggccaggggcagcagcaaccagggatgacaaaggtgtggaaggaaactgcagccctcacagcagccacggtgaccgtgctgggtccctggccaggacagtggctcagacatggcgagctttgatcatccaggaaaagcaaggcacacatgtgaccactgtgggccgacctgcctgccacccccctggacaatatcctggatgaattacccctgcatgcttcacctacaagccagctcactgcaatcatccaaagcccagaggagagagccgcaaagacagggttggacttctgcagagggctcctgagctggctctcctccggagctggactttggagggaagcccagacctgcagctccacctccagctcacctatgtgcccacaggaaggccataacaagccactttacctcaccagctctgtgtgcccatctaggaggtggcaagaaagaaaatcttctgacagtttctcaggaacttggggaagaaaaacttgtttgcaaaaacctacctacttagaaggcatttttattcctatactactttgaataaaatcatatatgatctaaa

SEQ ID NO: 95607 - DNA, 328 bp, Homo Sapiens
gagacagagtgtctcactcttgcccactgcactccagcccgggcaactaagtgaagccaagaagatttctttctgaaacaagatactttcaataaaactgcaaagaagaaaaccaccacctcttaaagaagtacattggtgttctttattcactcaatctgtatcatgagacttcgggaaaacctggtggattaaataccctcctgcaacctcactgaaagtggcagaaaagggattaaaatggatatgagctgcaaggataaagagaactgcaaaggagaagagaacaataacaccttagaacaataaaatctcagaactggaaagc

SEQ ID NO: 95608 - DNA, 708 bp, Homo Sapiens
  misc_feature (27)..(27): n is a, c, g, or t
  misc_feature (86)..(86): n is a, c, g, or t
ctacactatagggaatttggccctcgnggccaagaaattcggcacgaggcggcacgaggtgcggaggcagcagccagcaccccagnaacactccacctctcaaaagtcccccaatccacaccacttacccttagtcacgtatgcaacttctactggtttcccccaacccctagacctttaattgaataaatatttactaaatgtctacaaagggccagtcctaaaatgtatacgactgtgaaatagacaaacagggtttttagccagtcctaaaatgtatacgactgtgaaatagacaaacagggtttttagcctctagaggattgaggtcccctcagctggggatacaagatagcaagaggtgagtttaagacaatggataaaagcaatgctagaggcatatgggagcaccaaattctgacagagtgggagagaagtcttccagactgaaaactgaagaataagcaggcacccggatgtggatggaaaatgatcctgagcttacctttcattcataatttccttccttctttggctatttatatgattcataagatgtttccaaggtcatttcattttcttattattagagtttaattaaatgataatttaacctaaatataatttcattttaccacaatgtttctagggtatctcagagtaaatgcttcttttgattgataaataaattttagatcttaagcaaaa

SEQ ID NO: 95609 - DNA, 331 bp, Homo Sapiens
ggagaccggcgacgctctccgccgcgaccgaaagtctcacacgccctgagcagatgaaccggtccctcggtccggtctgccctcccgcaccggcgcctttgggctcagcgggccagtggccagatggcgagagttctggatctcatcagctttgtcctcgtcacccctctgggagttcagcctcctaaggctgtgaaacagcccaaaaggcccggacacgctactccaaaacgtctctcctgggctgtgtgaacaataagagctatttggggacgacaggaaaagatatggcccatagaagggctcctgaaatctaaccttgcgactcttt

SEQ ID NO: 95610 - DNA, 561 bp, Homo Sapiens
  misc_feature (404)..(417): n is a, c, g, or t
attgtttggctttttacttgctgatttgtttgaattatttgtagattctggatactagtcctttgtcagatatatagattgtgagtattttctcccactctgtgggttgtctgtgaactctgctgattatttattttgctgtgcggaaggctttttgcttaattaagttccacttatctttgtttttgttacatttgcttttgggctcttggttgtgaagtctttgtctaagccaaagtctacgaggggttaatagttttaatataagtgtgggacatgtttatgtcactggaaaagatggaagggtaagaattgagtcatgactaaaattattgagcacaaagattccctttaagactgacttcttttctccagtcctattggcctctcagccaggtgttaannnnnnnnnnnnnnggtaccatgagcccttttgccagtctggggaaatccatgggctccttctcaaaataatgtcttaaacttaataaaactaaatacataagattacaaggcaaaccaatgatatcaaaagacagttattaaaatatcaacaacaaa

SEQ ID NO: 95611 - DNA, 672 bp, Homo Sapiens
  misc_feature (187)..(187): n is a, c, g, or t
ttattatctctggctcatagatggagacactggacttcacagagttaaacataagttgccctgacccatacagctgttaagtagagaggctgaagatggaatgaaagccaggtctggcaactacaaagctcaggcccttgaattctaaccttaaccacttgcaatttaaaatgtctgaaagaagaantataaactaattttaaaatacgtgatgagaaaattttcctgttgctgaaggaaaacctggtatgtggattgaagtagttcacattctataagaagcaacataaggaacaggcaccaacacctaggcataacctggagatgtaagacgtgtaaggacaaaggtgggacacccagattgcttaaaaggaaaagcactcgggctaggtctaatatctgtcagttcctgtgggccttagttcctgctattttctcttcctgtaactctccctcctgtcacatgccacctgattctcttggcttgatgaactcttgttcattttcccaaaattccaaggggatcttcctgattccatataccagttaagtgtcttctgtgcatttttctgtatcaccctctactaaccctctgctggcactcaccactgcataatgtctatttaatttaattattcttactattaaaatgtgcacattttgaaggcaaaa

SEQ ID NO: 95612 - DNA, 327 bp, Homo Sapiens
atactccccaccgctcactaaatcagctcctatgctgggcagggttaaggcctccccatggcctggactgccaggttctctgatgggaatgtatatcccagaggcagtttattcccctgtcatactctcaggactcctagttttttgactggctcacggtgtaggctgcagcccactgcttctttcaaacgtgtgatttctttcagttttcctgttaagttcctgtgttgcttcttggaaaaaagttcacaatgtgaatctcttcttactattttgtctttccaagtgggagaggtatgctaacaatgacttcaatctgctgtcttg

SEQ ID NO: 95613 - DNA, 519 bp, Homo Sapiens
cctgctatttgcctacaaactgtgtatcagtcaggacatcaggacaccaagataaaggactagagtttggtaatcaactactggctcctccagcagctcagaatgtggcctgtatgcatcacttcacttaattcattcaagaaatgctgactgagttcctgctgtgtgttggacactttcttagaagtgggacacactgcagtgtgtgggacaaaggctgggccgctcattgcttatgttctagttgaagagagagtcaatcaacaacattctactttcagacattgataaatgctgtcatgaaaagacaaggaacatgaaaaggtaagaaaagggatggagaaagatgggatgaggggtgcctgggcagacaatgcaatgatctggcaaaaaagtaggacaatcatgagactgcatgtgttccagtttctgctgctgtaaaacagcatccacaggttacatctttactattctgttacatacatactattatttaaataaaaaatagtacaaattaaa

SEQ ID NO: 95614 - DNA, 328 bp, Homo Sapiens
  misc_feature (21)..(21): n is a, c, g, or t
caaataaccaagtaaccgggnagctgaatgtgagaggtgggctccaaaggattcggccaccaaggtggagaaggaaatatacattttctagagcccaatctgccaggagagatctaagagattacaaaggaaaaaacttgaaattctgaggacagagaaaagaaaaaggaagagttaatgactagtgagacaccatcatgtagactggtgccacatggaatctggggcaacagaacatgatctatccagatggacatacagggaaagctggtgctgggaagcaccttaagctacatgattgcaataaattttgctcaccagtgaaaaa

SEQ ID NO: 95615 - DNA, 570 bp, Homo Sapiens
  misc_feature (479)..(490): n is a, c, g, or t
ctaaaatgacaaattccactctcccacatcagtttgtttcttcctcacttatacttagaagaatagacctcataattttaactcagagttcagctgactctctcctgtcccttaagattagtgtgtgtccctaaaactgtaacctggggtagtagagaaccttctccaatgtctgcacagtcactaagggcttccttcttgggtcccttctggctgaaggctcctttgagcttttctggattctactttctatcacatcaccttctgccagtgcctttccacacatcattctgaggttaccaaatctaagggctactttaaaagacagaggtaaagttttaaatatacagatggaaggtgttttcacatgacaaaaatgtaaaccatttgtttctaaacatgaagaacctcttaagattttagttagcttcccactaccactaccaacagccctcacacaatatgatctcactgggtcnnnnnnnnnnnnccatgtctctctcacttatagtttttctcttatttggtataggaaagaaaacaataaaaagtcatctgatttcctcaaaa

SEQ ID NO: 95616 - DNA, 669 bp, Homo Sapiens
gatagtgaaattaatcttgacactcagaaccactagaaaaataattgctgattcactgcgtaaaatgtgtgtgtgaactaatcatgtagtcaagattagaataaaagtctatgctggttaagaagagattaaattttctttcaaatggggtctagttttatttgaaggagagaggggtaccatataaacaatttcaagaaaaatgtgacttagagattttggaggagtttggagatgatgatgggatccaaggtagaaggtagactctggtaatattgaaagcgtacccttggctggggaagaaggcaggagaaggtgtcttggtataatgtactcagtgacatttttagaaaatgtggtgtaagatctgttgtcccaatttagctagtgttgtaaaaggaccatatgtggctaaatcattttcgtttccctttaggaacctagaagaatgtggcatctgaagtttcttagggccagtgcccatgttttctgtatccctaaagcattgggcagagcagtgagcagctgctggacactccacacgtgtttgcatgagtgttttctcatgtgactttgctctcatttgatttggcttctctgtcagtctgcatgcatatgagaaggcttccccctaaagttttaagaaaataaatgcaaaaaaatgaaatg

SEQ ID NO: 95617 - DNA, 440 bp, Homo Sapiens
atgagcttgtcccggctatgaagcaatccttgctttctttgtgtcgttgttgctagtgtttatctccacactcccacccagttttcttcttgggattccacttattcgacagctaattatggagtccctcctccctctcactctgttctagaccctggagttcagcagtaaacctgacatgttggccctgccctcggagcttgctccctgcccctgcctttccccagggctgtctcaccctctctatgcttcccctgtgctgcccacaccggaccccacctgtgggcattctaggctccgatgaagtagggaaaagacactccccatggctctggatttatgatgtaagccaaacgtggatactgagccagacacggagcagtgactttccattttcctacgacacctcaataccaatgttttattaaattgaaaggact

SEQ ID NO: 95618 - DNA, 586 bp, Homo Sapiens
aatgctgagaaagcatttcagtgtgcggcatcatcatgcaagctctgtaagaggagagtaagatcagtactcctacttgtaaatgaaagagaagaaaacaaaaacaagcaaattccttctaaggtgtgaggaacacgagtaaacagagaaatcacctaaggagaaaacagcaagcagatttgaaactgtggccaccaacgacacgagggagcgcaaaacccagcccacttgccagggaggctggcagagcccacacccagtctggtgccctggtcggttacattctgctctccctgcagcattttttagaaggtaccaaataagaaaaacgtggatgaagatggagaaagcatacaaaacttttacacactggtttgaagggcaagccgttgtacattccttgaagtcaggtgctctgctcaacagaaggtgtgctgaataacgttacaggcctctgttcccgggagacgtggaagctgtcaccgcgcggaacataaagaacaggccaagaccagtgcaggcatcgacgactttctccattcagagcctccgcgcatcccaaataaataaacacatcaaaacgtgc

SEQ ID NO: 95619 - DNA, 398 bp, Homo Sapiens
ctcctgacccggcccacccggcctaaggcctaacactgcctcctcctgcgctttccgcccttcgccgtccctgactggaggaaacctgcaggctctcgtccgccgagctcagaagtgccaggcgctgccaacggccccggagatcctcgcgcattatagtggcctatgagcagaatttgccatgccttccatggagcgttctttttccaagtcaggtcaatccagcctgcagctgtggatgcgaccatcttggaagccatgttaaagaaggcagagccacaagatagatgcagccgggttctctaaatcaccactggggagaaacccacacaccaatgaggaatacccattttttggattttaagagcaagaaataaacttcaattgtgttcagcaaa

SEQ ID NO: 95620 - DNA, 501 bp, Homo Sapiens
agaactcacaaaggtttttaggtacaaagaccttcctcatggctttatctgagtggtggggaagtgagggcaacttaggtattcattatcacagatggagaagaaccatatgatagatgctcactctgggaagattggttagtggctcaccaagtctatctccttttcttccaagacacacaaatagactacattttccagtcttcattgcagttaggcacaaccatttgactgaggtctagtcaaagaatatgaatggaaatgatgttgctattccaggcccatgaaaacctctcacacaagatatttatgcctttcaccttctgccaatgcaatgcaggtggatgcgaccatcttggaagccatgttaaagaaggcagagccacaagatagatgcagccgggttctttaaatcaccactggggagaaacccacacaccaatgaggaatacccattttttggattttaagagcaagaaataaacttcaattgtgttcagc

SEQ ID NO: 95621 - DNA, 764 bp, Homo Sapiens
gctgggtttctgctgctcaattcaagcaagtctggaggcagtttatccgaaagctttgtatcaccttgaggcgggggtttagaagatgggccttcatctgaacccggtgggggcgggagaacttgagttttgaaaaccccacattctacacctttggagggcctaagggatcatggaaaattactggagaaaggaaactttgcccaacctcttaccttctggccggtgccaactcttcttactcctgagaattgggattcataatacataaaacaagaccacaaacatttattattgcatgtgctcactgacaaataatcctgtcatctaccctgagaggtaggcgtatcttatcacctgtcacagatgagggaactgagagcttaatttccccatggttgtggggctaataaatttccaggctacgatttaagcctaaacctgtttgacccaaaagttaggttcctaatgacattgctatgtgttctaccaaacccccagtaggacccttgtgataactaaatgacataacatttgggaaggtactttgctattggtaatataccgtacatgtgtacctcaattaaacaaatattattattaccataatgaataccacaggtttgtccttgggaagaggaatattctgattgtctttccttttgtcccttcactgaccatacagcatatacacgggaagcctttaaagcattgtggttaagcatatgggttttaatttaaataaatgggattcaacttcaaaa

SEQ ID NO: 95622 - DNA, 413 bp, Homo Sapiens
  misc_feature (21)..(21): n is a, c, g, or t
  misc_feature (88)..(88): n is a, c, g, or t
  misc_feature (100)..(100): n is a, c, g, or t
aaagtccttatattatccagnaaagaagatccatagatgagatgcatttgtacccataaaaatcaacatcatgtctaaagtagaccgnatgtttacattntatgcaaataaatttgggttgaagagaagattggaagctattctatacaggaagtataagaaaatggagtgaagaaatagagtagatactaaataaaaactgatgtttaatgtttatcaaaactattaaaaatatacataaaactgctttaggttctgagtttgattattttaaataggttttaacttacatgtatgtctagcagtacatttgaaagttgtgcaggaagttggtcaatttttcatggtccagaactagagcactgcaggatatctatccctctacctccactccactgttagcaatgattaaa

SEQ ID NO: 95623 - DNA, 419 bp, Homo Sapiens
  misc_feature (17)..(17): n is a, c, g, or t
tgaatataccacacagnaaacaaagctccgtgtctgctgtgaaggctttggaggagacagaccatgaccagacacaggccctgtttctgatgctgagaagagaggaactaaataaatcctggttaacaagtgcatcagaaagctcctctaactgtaaatgcagagccctagcatgaagtggtacctgcagcctgaatgcatcgcatctgagttatgggcaaaggcagcactgcctgatggcctccttcccatgtcatctcctcaccgatgatctgttacaggtctggtcttccattttcaaataaggtctatcatttttttgtccttaataagataaaaatgaatttatcgagttttattataagggaaaaactattcgccaaatgattattcttcgatgaataaatagaaagaaaaaa

SEQ ID NO: 95624 - DNA, 382 bp, Homo Sapiens
cttcctctctgcacatctcagctcagcctgctgacagagcagcacggtgactcaacgctcggtagtggcagcagctacacacagatgccagccgaaaacggctcgctggtgcacaccttggtaacagctgctcctccattttttgctgagaaaccacacagcatcacagcaggataggagagcttgagaagatcccagggatggctgagcagcaccttgtagccaggatagctggagtaagcctcagttcacctaccatctgttggcaggagaccagccgcatttttctacggtgtttttgtatatatttagatacacctgtaagtgtgattaagaagacagcacattgcacacccaggaataaacagaatgtggtttgggc

SEQ ID NO: 95625 - DNA, 291 bp, Homo Sapiens
ctcagtagggaggaggggtgtgccaggggtcactcagccaggaaggcaggacctcaaggctggttggaggctccaccctcatcaaaccagtgccacccgcctcactggcatcagggtctggtctagagcaaccggctcttgacacagcgcccgcggacattttctattttccaggttctggggccctccactacccctgattcctgcctctcccccaaatccaggcacttggatccccaatcttctgaatcctggacagcccacccccagatcaattctcctggatctttc

SEQ ID NO: 95626 - DNA, 297 bp, Homo Sapiens
ccaaagagaagctggatttcctattggagtcacctgtaacacacgtgtgacgaaattggcctgtgaggacaaggcagtgagcagagaggacagcagtccttatgagatcaagctctaaggtatcctagacacatttggagaattcacctgagctacaggatgtgaaaagttgctaaaactgctgtgagattccggctaagaaagtttcatgagaagttttacagaaaaatgtgaacggaagacagaactagatataaatttgaatggtaacctaaataaaaggcatttttcattaaa

SEQ ID NO: 95627 - DNA, 718 bp, Homo Sapiens
ctaagatcagtctacgcaaatgtgtttgggtgcaatgtacctggcaatttcatggggcagtcgggaggacagtgtggctgaagcacagtgagtgagaggaaaacagcaatgaagtgaatgcaactgatgcctcctcaaaagtttgctacctgccaagactttcaagcatgaaaatatctttatttttcccttttaaaattgatgggtaggccatatgggagagagggaaatactgacaaagagggcacctcaagaaaagcatgcctataaaaataatgtgacaaacaatgaaacaacacacaaacagtttgacagataagagagcaaaggatcaccacacgcccgtgattctagagcaagtggtgactttagtgtgtggctgtgctcatgcatatggaccttacacaactgcaatcagcatctgcatacctacacccagtaacctgctttctctacctaatatgatataatgagcatttttctatattgctacatagtctttataattactttaaatgactgtataatattccattcattatatcactgctgaatatttaggttgcttgtagtttttcctttgctcatttttatgaattaacaaatgtaaagtatttcacccactaccttcaaattatatataccttggtcggcacttttatttccttccccgttctttcccctttatataaataaagaaaagtatgaaagattcaaa

SEQ ID NO: 95628 - DNA, 857 bp, Homo Sapiens
  misc_feature (743)..(753): n is a, c, g, or t
tttttattcagctacaattcaccattcagccccccgacttaagcctattgcataagccaaaatctagcttcacttctactagacccagtttgactagaaaagtctataccaaaaaccatttcacgaacccaaacttcagcctccattactgtatctgaccaaaaaggcctaaactctactattaattatctaatctattaccctgagtaatttcaattgcgacaaaaatactaacaatgatcaaccagcaaccaccaaccaacacccataattatacaaggcagctgcacctacaaaatcctcatgaatcaacccctccccctcaaaaattaaatcaactccctatgctattaaaatcaaccgtgatcaccaccccatcatattcaactattcaccaaaccagtatcaactctattaataatcctaataataaggcccctcaaatatcagtacttggccctcatgtttcaggatactcctcaatagctatcactggagtataaccaaaaataaccattataccacccaagtaaataaaaaagactattaaccccatgaaagccccaccaaaattcaacacaataccacaacccacagcaccactaataattacccctaagcctcaataaataggagacagttttgaagaaaaacctacaatccctataaataagacaacacttaatagaaataaagcatatgccattttcccacgtggactataaccatgactataagacctnnnnnnnnnnngttaaatgtaagacttaaaagacttaaatgttcactgttactgtaaatatagaaatggcaaactattaaataacaataaagtttgaagtctgtgctctaaaaaa

SEQ ID NO: 95629 - DNA, 538 bp, Homo Sapiens
aatgctagctatgcagtgataaccacaggggaatattttctaaattaggacatggaatgtcttctgaattgtcaagaaagaaatgctatcttcaatgtacttttgtaattaaatgtatccttattgataatccaggtattaagtagaacattttattaattagggcactccagctctagccttacagaaaacaacctgttatatgtgatttcatctgtcagagtgtaaagagatgccattgatcgtcagatgctcaaaagctagtcctctggatggttccattgataccataccttttcattctcaggacaacattgacatacaaattaacatttcatctcaacatcctaatttggagaaaacaagattacatatcccctgtgaaaagaagagatggtactgaaattgagagggtctacagagatattttccattggaacagcaccttttattggaaaacaaagcaagaacagtaaaaactcatattttcattccttatttacccacatgaataaaaaaagaactagataaccagaaa

SEQ ID NO: 95630 - DNA, 625 bp, Homo Sapiens
agacctgaggtatcaggggtaggggttgctctgcttgtgtaagtcccatagtgtgaaggccagagaaccaagagatggtcaagaagagagagtaagtgtccaatgtcccagctcaagaagagagaaaacttttgtggatagctaagttactgctagccatctgattatagcaatggcttccaggagcatcacgacctgtgcagactccccagcatcataacaggaaggtcccacgatcacgagcacattgccttcagcatccagcactgaatatggtgaattgcactctgaagagcttcctaagcttgtaagaaagtgattctgaaaagctcaacattttggtagaatggagagatttgacattgcttctgctccaaaagcaaaagacttgggaagggcaccctgggagttgagaacatccaccacagagaggtaagttcctacttggcagtttgccgcagcaattaccacctcgtgctccatcactacctttccactccgtctcccacccttacaccaggcttgtgattcaaaggccttcaggccaggggtaacaaactatggcctgtgggccaaatctaacccactgactgttttccaaataaagttccactggaacacaggc

SEQ ID NO: 95631 - DNA, 402 bp, Homo Sapiens
tgcatacccgctagtggtctgtacaggcggcacggtttgatggcagagatattttctttccaaactgttcaaaatgatgaacgaagatgcagctcagaaaagcgacagtggagagaagttcaacggcagtagtcagaggagaaaaagacccaagaaggcatagggatttccagctttacaacatgctatgaattatcctcctctgtgttaacacttgtgttaacctcatccgaagtcctgggggatgtcctgttcaacctgccatttcacccatagtagagttggtccacagtgaaaagtggtgaaaagactgaagtctttataccacttgcatatattgttcctgatcctgcgtgtacatttcagagaactggtgaataaactctccgctccatgccaaaa

SEQ ID NO: 95632 - DNA, 468 bp, Homo Sapiens
agaaagaaaagaaaaaattcaggatatcctttatccaggtgcttggataaaagtttattgagttcaggccgggcgtgagccaccgggccaggtcagttactccttaagtatgcaaaagcactcaacaaaaaaacacctcaggggatcatgcctgctgggtggtctttaaaggaaatgggctactttcctatactggaaaaaaacacctgacagaaaaaaagacgctctagagtagctgaaaataaaatgcctggctaatgcagaacctgatgaagaaataggatgaagtgtaacattctactgagttcatgatatcccagcataaggcagagttttaaatcttgtttctcaacagggggaggagtgggggccaaggaaggagcatcggaatcactagagacatttaaaatacagtcggccctccttatccatgggttctgcatccatggattcaacaaactatggatc

SEQ ID NO: 95633 - DNA, 875 bp, Homo Sapiens
  misc_feature (657)..(728): n is a, c, g, or t
actgcggctagagtccggattgtcggcctgtggattgagtctgccaaatgaatagtgatgcaccctaaacctacctcaggttaaagtttgagtaatgggtctaagatatgattaaataacactgaagttaggaaaataattgggcctaggtcgattccacaagaagaggatgaagggctttggttattttgaaaactgcccaacttttaggtaagttaggacaagaaatacaccatttcctaactctaacttctcccattggactttagctgattcttttccctttggttcctccacccagagaggctgttctttacaaatttctgaatttcctcagatgagaaattcccgtttccaaacttcctcagaagtgtcctaaccatactaaaggcaaattccacagagggtgtgagtgtcctgggaagggccaggagtaatgacagtgacagtggccatttcaggtcagaatcccaggaaaatacatggagctggggcaaatagaagagcagtcagtaaggaaaagatctgggaataatgatgccagggaaactgtgctttcctaccacccatattttcttgaaatcataaattgttaaaccaagataaaactgtagtgatccccatgctcatctctttcacttagcaaatatagaatcnnnnnnnnnnnnnnnnnnnnnnnnnnnnnnnnnnnnnnnnnnnnnnnnnnnnnnnnnnnnnnnnnnnnnnnncttcctgggaatcctgagttaccacagttacgacaacagtttgcagcctggctacattatactggcctagaccacgggttggtatccccttggaccaaatcctgccacctgcattcttttgtaaataaagttttactggaacacaaa

SEQ ID NO: 95634 - DNA, 615 bp, Homo Sapiens
  misc_feature (595)..(595): n is a, c, g, or t
tttgatatcaagcacatttttattattttattgagtcttcataggaatatcattgggtaagcgttattagtctccattgtacagctgagagaaaggagttccaaaactcttcattctccctctactcaagtttacccaagttgtaaatgccaaggcaaggatctgaactcaggtctgtgctacgattcatttatatgggcacagatttcccctgaaagaataccatgttgacccaatctctcatgaaggatctctcatgttgggggttgttcaggattccacatcccaggaggggctaccacattccttcttcagatacttatttctgcccctaatcatttagacgactttaaaaaaatgttttttcaagagaagaacaatatggtaaaatagcaagcttgagaaaagaggagtaaagcaaatgaattgtcattctggtcaatacagttgctctgatataaaatctgtctataggcaccaagaaaaaaaggaaatagaaataagaagtagagaagaaactcatatttattgagactgtctgcacctggcactgtcctggcactaattaacataattcatataatgtcaaaacatnccctgtgaggtagctgagag

SEQ ID NO: 95635 - DNA, 520 bp, Homo Sapiens
gaatggcaggtttcagcaccagatcttccaggatgatggacccttcccttctgaaagcgttccgcccctcaagctccggtcatgtccctgtcttcttggctccacagggaggaaacgttggttccgagttatgattttcctcctttgtgcatgtccgggttacatgactttcagttttggctctgctatacctcctgttaccaacagaatagggtcagtttgggccagtcttgtggttacacctcagtgtcacaggatttcctctgccaaagggctgtgaagctcaggaccaaggtaatcaaaattcagctctactattggattgtcctggattgttttagcagttgacagggatcaagctctgtcccagcaaccttgatcccaacagagaactgatgctcctaggaccttcacctcagacctcagtgcatcctggtttttgtttttcttcctcctccacaacttttttattttgcaaatgttgatacattcataaaggttgaaagaataataaaaaaaa

SEQ ID NO: 95636 - DNA, 637 bp, Homo Sapiens
tttagtatccactgatgtgggctaccagaggaagggatgtgtccagaggtggccttgtctcagggcgaccatccacacagaatcactctgctgggctgctgcaggtctggttctgccattcagcatgagccctgggctcgctgcaccaccatctcctcatccgtttatgggatgagaataggaagaccctgccttttatgatgttgccctcaggattcgacaagtccaacaacttagccaagcgttgatttagtacttcctggcacacaggtggtagtcaacgttagctctcagcatcccctgacccaactcctccagcggtctccagctggaagagtccaactgctcttcattcctttatgaaatggggtggtcactgtgtaaataaatcacctgaaggatgccaatcatcttggaggagaggctagttcagatctgcaacggactcatcaccagtatttgcacttaaataatgtaatgtaataatgtgttcttcgaagtcacccctgaattgatcccatgtgtaaggaaaattgttcattctaggactacttgtaatagcacgaggtaggaaacaacctgaatttccttcaaaaaggaactggttaaataaattagactactaagacacgtaaaa

SEQ ID NO: 95637 - DNA, 749 bp, Homo Sapiens
cggggcaaaggccttcttccacctatagacagagtctacgcaggggtcttggaacccgggcacaccagtccccagctaacgaaatccccgagttgggggatttgagagggtcacgtttggcccaagaacccgcagtcctctttggtcttcggccctctatttctaagcgtgggcttctggcacggcggctctgggcacagcccatgctgctttcgggctgggtggtttcaacgacgacaacaattatcacagtgacggtgaccttcaccccaacaggactgctgtgtgtgaagcactcaagagggcccctacaaccaacctgccaggagtcggctcctgaaaacagggtcggaaaaggtcagtgcccatcagaatcgagctgtcggcaaaaagctggaaagggttaggagctttgtctatctcaagggcaacaaactgctttgaccctgagggcctctgaagacgactttccctcaccgcagctctcaagacaacagggatcagactcagaaagacactgcctgtataaggctcttgtttgtcttgtttttaattcctgccctctgcctccagatctcagtcctctatctgtgaaacggaattcggccttgcctgtccacgaaatgaagacaaggcatctcgtgtgtgttaagatgaaacaagatcttagcaagagagtaatgatttcttttttaaaacattttttactgtagtaaaatgtactataacgtaaaattcccatttcaatc

SEQ ID NO: 95638 - DNA, 791 bp, Homo Sapiens
  misc_feature (73)..(73): n is a, c, g, or t
  misc_feature (179)..(179): n is a, c, g, or t
  misc_feature (235)..(235): n is a, c, g, or t
  misc_feature (296)..(296): n is a, c, g, or t
  misc_feature (417)..(417): n is a, c, g, or t
gctgcccgtttagggttgtgacccaggagtcgctgtggttatcaactgcgagagctcaaacggaccacatganaagcagctttgtttagcgtccttgacataactaaccacatattaacaacagagccttgtggtatagaggctcctgtttgttcagaatcttaataggtgggctttgngcacatggatttctaatactgcttaccctgtattttaagtcaaagagggtctttgngtgaaggattctccacctccttttccctttctacgaaggaggcacaaagctgatcattcantggagtccattctcaccatgagaagaacattctactgtcagcaggcattagtgaggatggagacatcactgattcacttggctagttccatgtgggcattccatgtccatggatgaatggnataagtaactgatccacaagaggaggcaggacctattctatcaaggatcggtaattgggaataagcttctcatttcatcctaaaggattctgtcactccactgaaatcttaagagtctccagtgcttgttaggaaagtgtggaagatgaaccccttcttcatccacagatgctgagaatgctaattagaagacaggtatcaggaagcccacacagagacggttttgggattttgtcagcactgggcaagtggcttaaggtgagatagccattctggagtcacagccttactcctcctttaatgaagggaaaaaataaattttcctgtatcaaaacctagactggtctaaataaaaattccattaaaaaatcaaa

SEQ ID NO: 95639 - DNA, 700 bp, Homo Sapiens
cacacttatctacaaacagtcttcagagaggtgatcggatggaagatattaacatgattctggagtctgctaggagctgctctgactggtggctactgagataccagtgacgggaaggtgctacatcgttaacaacagtgcctttcaaaaatgatgaactataatctactgaaaacacaaggacaaaccctactgtgaagcagtggagactggagtcctgcatttgctgaactttctttttatgtgttggattctgattttatattcatttccattcatgtggactctgaagagttaaactcaccaaggacacttgaagaagtcacgtccagggatcactgtcatcacagatggagaaaaggccaatgtctttccatgctgcctcaccagaaaaggactgagttggtacagaccttcattccagcttaatgtccatgacctcgtcacactccaggcccaggcttgagctacatgttctagaaagcccttaacttctctaggtctcaagtctaatatctgcatctgcgccaggttccctgagactactctaaagcttgatgattcactaggattcacaggactcagaaaagcttacttttctgaattagatgtactgttctgatatattacagcaaaaggatatgagttcaaatcagaataaaataaaatgtacatggggcagagtccaggagaaaccaaa

SEQ ID NO: 95640 - DNA, 604 bp, Homo Sapiens
ggtctctccccaaaaatatagagagctggaggtttttcttagagatatgaataaagggtgtgagtgtgagtgtatgtgcaaaaatatggataaaaccttgaaagtgctgaatggcctgtagcaagaagtgatgtcttctcatagatgggtggcaggggctggtggccgggagagagagcagtgggacttgggagcactttttgtgggtatgtaatggagattccaccagcaacaagctaaaccactcacaagcgggcccagaggaagtaaatagaacactgtggttgaaccatccttggccttctgcagcaaggatctgcaacctggaaggggcacagaaacaaccaaagatgaaggctctcagagctgaggagaggccaggtcagaatatcagaagtcaagaaactgcagcacctctaacacaggggaggctatgaagttcatggttctggatgtctgctccctgggttcaaaccttggtcctgccacattagttgtgcaacttggaaagttacttggcttttttgtatctcagttttctcttctgttaaatggcactaataataaatgtctcacatgtccattgtgagaattaaatgaaaaa

SEQ ID NO: 95641 - DNA, 376 bp, Homo Sapiens
aatctactgttattctttgtgtcccatcaggcttctgcatgggccattcagggctgttgtatgggctgtgcactggccttatagtgcctgcccaggctaactcccatatagtctctgtgatttcatcatgtccccacccttgcaggtggtattgctcagcacctctactcacggcagggctggaaagtgtcctggtgtccattttgcattctctgatcacagggttcaccacctaactctccgtcagaattcccctgcagttgtttgtggggtcaggcctgataagttatctactcccaagatgtattctgggatgggagcaaactataattagtctacaaaatgttgaccatttaaataaaaaattttctaatgt

SEQ ID NO: 95642 - DNA, 469 bp, Homo Sapiens
caggactctttgggatgaagcagcaccacaattcacatctcctgagtttgacaccagagaatatctcagacttctcactagagctgagttcaaaacgactcaggctggcacgcttcaatcctctcgactttagatcaactttagatgtcattgcttccaggaaccaccacgtgaagacttgtcttcagattacccagtgaaaccacagaagaaatggagaggtcagagttccaacaagcaggatcatcaagaagagaggatattttctctgctgggttcataagatagttttgcaatcctaccaagtagggaggctggtgaattcaaagaagacaaatctatctatctttgtgctaattccgattttgaaaaaaacctatttagagacacatggcaatttaagaaagcaggaaaccaaagaacctggcattcttggaacaataaataaaaagctccttaaaagttaaaa

SEQ ID NO: 95643 - DNA, 707 bp, Homo Sapiens
cttcagctgtcttcagaataatgtcacccggcctcctctcctgtcttctgcagtcttaaaagacctagtccctaactgaggtctggcttttcctcagccctggatgaagtggagaagacctatttggagactgcttcctgtcaccataaaatcctgaacatttgtcttgaacatgaacactccaaaagaagaattccaggactggcccatagtcagaatagcagctcatttaccagacctcattgtctatggacatttctccccagagcgaccctttatggattattttgacggagtcctgatgtttgttgatatttcaggcaagtgcaaaagggatgtttgtttaatgtggatgagcaacaggctcgcgtgggaattcacatgcagagcttgattgcagagtagggaggccattctggagcccttgggctgtcacagcagatgtgctccactgagaacacaagagggaggaaatagcttgtggccctggctctctctcatcctcccttactcaggactgccagtcataggcatatcctttaacatgctcaagtcccattctttgcttccagtatctctgccccaacttcactgactcatcctctccagccccaagccccatacacatcccagtcaaaattgacctcaggaaatgatctccctagatgatgtttacatcttactaataaacttgccacctcttcaaa

SEQ ID NO: 95644 - DNA, 542 bp, Homo Sapiens
ggcaaatcattatattgctcccagccttaaaaatcttcaataagttaaagagaggactcaggcttaatggcaatcctgttatcttaccaatgaggagactaaacacctagttggagatcacctccttactggctcagagcttcaggaaatagctcaaggatgtgcaaatactaaacagtagagctgggatttagatccacatctacttaattttagtgcgtatgctctaactgctgccacagaagggatgcagaggaagacggtcagttacccagagggtgatatatttgacttaatgttcaccataaagacagctatcaacaaaagacttgaattctaacttgttatctattgcaggaaagtgcctgcaatatggtgactcctgcagagcatctgacaatcagagaagagttagaatacattaagctcagcatcacatatgtagtttgaatacaactccacctccttctctttctttctcttctttcctgcctttgttgccctacccaggattaaaaccttaggtcttatgttaaaagaaa

SEQ ID NO: 95645 - DNA, 707 bp, Homo Sapiens
  misc_feature (625)..(637): n is a, c, g, or t
ggggcacgagggactgatgaatgtatgtgattgccctctggaaaagtatgatatgcttggcaatttgaagtattcttagaataattctttaaattattcccaactaaactgtgtccaaaataggtccttgataagctaatccttacttggcccccttcatttccaaccctttgaaattcactctgctcctttctcctgatcttctggaagtttctttctgaatctagagaaactctcctcaccagagaggaatgatgtaagcaggctcaattaaatgcccgctatgtataatgaagcatattgttaggtgcagcatgggacatagaagttcaaagactatagctcttgaggatatctttatttagttggaaatacaagacagaaacattcaaagtaaagtaaatttattccttatatttaggtagcccttgttcatctacctcttctgaaattttgcaataattctgtgatgttggtaggaagggaatgtgatgttagataagaagtcagatggccggcacatccatctgacagccacaccactgatattaagggatttgttaatgtcatatggctcctaaagagctaggatatgcatccatatcttccagctccaagtacgagnnnnnnnnnnnnnaaaaaatattgtgtcacattataccctctaatgccaaattcatttaaaataaagaaaaagccatataaaa

SEQ ID NO: 95646 - DNA, 933 bp, Homo Sapiens
catccaaccaagctttgtcccttcaccacaacgcgtttcttcagaatgcccttcttagccacctaagactcccccaatgatgaggcagccgtaggtggagttcacaggtctcactgcagaatctgaaaccagatgcacctacatcttcgtagcacgaggcgtccattctctcccttgattttaggtcttacatatctgttttgtcatgaaattagtggttctcaaattgagcctgtggatcaccagaggccactagggcctaaatggtggtccacagattaatctccatcccatccccttcaccacagcccaccccactccagccatcctccctcaggcttccagtcccatggcaagatcaccacatgcagagctaatactagggcctcccaaccacttgctgtaaccagcagctgacaaccaaaaggtcctggggctacaggtcacaagaggagtgaggaacgggggccaagagatcttacaagaaggcacaggcactaatgaagcgggtggggtgcgagggcaaaggaatagaggaatggaaaattaaggtggtagagggctcttgggggcagtgatccactaaaaataaacctgtaataaagtatcccatgatgaagaaaaatttgagaaccactgctttgaaatgattaggttagtagtccagcaggaactgtggaatattctgaacagcacctgatacactattagcgttcaaaataaagttaaatcaccccttcaaaagcagcagtaacaatttttaaaataaccttataagttagtggctcttgagccacatttatacatttgccattttctcatgaatccagtccgtcttcagtgtccgccctggagcatatacacatagcaaatttacttggaactttggttagagtcactggtcttttcatgcagttttaataaacagtttcc

SEQ ID NO: 95647 - DNA, 601 bp, Homo Sapiens
tgaaattggataccaagcttaatggtttacctacagcgtcataggaaaatggcaatgataaaatgggagagaatggattgattattgctgcttgagcccatacagaaatagggccttggagttgctggatgccattgattgctatctattcattctcacaacaactttaaggaaaatgcagccaagaggagatatactcccaggatgaagttgttctttgaagtttccttatctgcctaaagactggacctgccaaaaagaaaacaattactgctggtctcttccctgagttttcaataactgaactcacatgacaggaggaaacactgaagtcagtaaacactcctggatagacttgtcacaaaccactgtaggttctgtgggcccagcagattttgtcccaggcctttgtatgttcttcaagcccattgacttcccctaaaaatcatttactatgcccctaaaatcatccagacttcctcatctcccttttcccctaagaagggtgtataacctgtaccccattgcatagtggggtaatcactctgtgatcttccctcatgcacatcaataaatttatatgcttttttcttttaaaaaa

SEQ ID NO: 95648 - DNA, 729 bp, Homo Sapiens
  misc_feature (240)..(341): n is a, c, g, or t
gcagattactcaacaaaatctccagataatagcccagtcccatcaatacctcgattttgtctttgtaggacaccagtcaagcctacctagttttcagacctgcagaaactatgtgttattttaagcccttgattgtagcaacttgtcactcagcagtagacaattaatacatagagtgctagctgtagggagactcaggattccactaaaatctaacttcatgtgagaaatcttcacgtnnnnnnnnnnnnnnnnnnnnnnnnnnnnnnnnnnnnnnnnnnnnnnnnnnnnnnnnnnnnnnnnnnnnnnnnnnnnnnnnnnnnnnnnnnnnnnnnnnnnnnccaagaaagaattattatttgatcaatgtgtatgttgaaggaagagagttagtagagacaagaggggaccataagaaaaaagtgataattaatgtccaaaaacctagacacaggacaggatgacatccaaagaaaaagataataaatgtataattgacatgctgtatgattgtcattggggaaagcagagaagaatgtgtgttgtttcagattgtggtttgcacattcagaataaggaattaaagagatcttagtggtgacactatattctatatgaaattgtatggtatacaattatctgataattaaagttggagaaagcaatttgctgggcttcttaagagtcataaaaaaatttttgaataaagtatcatataccaagaaaaaa

SEQ ID NO: 95649 - DNA, 658 bp, Homo Sapiens
catgagttattgatttaaaccttgcatctggtatagaattaaacatctcctgcctgatgagacaactgaaaggcgggcacggggattctctgccttcttaaaggggagcgtgtgctgtagacctgctgcttaatcgtgtccttcccggagataaagcagttgctcacctgaaaagccttggaagataaaaaaaccaaggcacagaacaagttagtggcagaacagagattccaatgaagacctctttgactctgatcctgtgttctcactgcctcttgtactgcctctccgaaactcaggatatgttgtccactccagaagtatgaggtgggactgcaggaatatgagctcctctccacatgcagggaccccaggtgcttatccagcctgttcgagatcatagccaccaagggggaactctctggacaacctggcagaagttcccctcactcagctgaaacctgcctccacctgaggccacagagcaagtctccctgggcttctgggtcttcagacatttggagacagttattatctctccctgccctcagatttaccatgtccaggctaaatggatgatttctcacttataaatgtaaggcatttaataattacatttcttgataataaaataaggaaaaatttagggtttttaaac

SEQ ID NO: 95650 - DNA, 519 bp, Homo Sapiens
  misc_feature (218)..(218): n is a, c, g, or t
  misc_feature (311)..(332): n is a, c, g, or t
aatttaagagactagtgtatttaaaagacttattaatttatgttttggggcacacagtatataaagatgtaatttgttcacatcaacaactaaaaggagtggtgatggagctgtaaaaaagcagatattttgtatgttattgaatctaagctactataaaatcaaattatagtcttacaactttaggatgttaagtgtaattcctatgggctatggcntgaatgtttgtgtccctcaaagttcatatgccaaaacctaatccctaatgtgacagtattaaaaaagttgggcctttgggggggtgataaacnnnnnnnnnnnnnnnnnnnnnnatgagattagtgcccttataaaataggcatgagggagcttgttcatccctttcaccatgtgaagatgcagtttgaaggcaccatctagcagacagcgagccctcacaagacaccatatctgttggtgccttgatcttggacttcccagcctctacaaatttaagaaataaatttctgctgttttcat

SEQ ID NO: 95651 - DNA, 557 bp, Homo Sapiens
cgctgtgatatgaaattccagatcatgggagggagagtttgaagaaggaagaaccaccaatagaaagcggtccccaaagaggtatcggggatggcacccagacaggagcacatgtaccactgcccagaatgtgcatttcactagacaagtgaccacaaaaggcaagtgggagctaaaccctgcctctactcgctcacagagccacaggtcctggcgctggctgcatctccctactcacctggttgatgaggcccctttttctaattcacacaaaagcaccctgagctaacagcagctccagacctgcagaataggtaagcagacagatgggcaaagggccaggcacttccacaccctaacccccagcactggcctccgggagagcaaaccaaagcccagaccctgacagaagagcctgaggaactggcaccgtggctgacagggagctggtcttccctgggacaccaggatgcagctaagagtttctcaaatctcaggagtttgagtccaaaagcctccctggagaatgaatgtccacaaaataaatcttacagaaa

SEQ ID NO: 95652 - DNA, 497 bp, Homo Sapiens
cgaccctggcagagctggcgcaaacagggcgagaggtcgctgggcagcgttcgaggaccagagggagctcggccacagaagaccccagtgatctgatcccgggatcccggctccaagctctcctcgcattttacagatttcacccccgcgactatctccccaaaacggagcctttatatcaaaagaaggtgcgggagctggggcaaccaggactttctcgggcacccaaaatgcgctccattaggaaaaggtggacgatctgcacaataagtctgctcctgatcttttataagacaaaagaaatagcaagaactgaggagcaccaggagacgcaactcatcgggtaaatgcaaagcttcatttcaggatatgacaaaaagtcaagccataaatgaaatgtgaatataaagggtagagtgatggttaggatagcatgtgtgtttgtttgagcttgcgcgtggttagtgtcatgaattaaataacaaaggctgttgttg

SEQ ID NO: 95653 - DNA, 940 bp, Homo Sapiens
  misc_feature (60)..(60): n is a, c, g, or t
ggtccggaattcccgggatgctgcagaagctgccgccacctccaatgcacaaggtgtctncatctggaaagaaacctgagccccagggaggcggcgcggagcgaccctggcagagctggcgcaaacagggcgagaggtcgctgggcagcgttcgaggaccagagggagctcggccacagaagaccccagtgatctgatcccgggatcccggctccaagctctcctcgcattttacagatttcacccccgcgactatctccccaaaacggagcctttatatcaagagaaggtgcgggagctggggcaaccaggactttctcgggcacccaagatgcgctccattaggaagaggtggacgatctgcacaataagtctgctcctgatcttttataagacaaaagaaatagcaagaactgaggagcaccaggagacgcaactcatcggagatggtgaattgtctttgagtcggtcacttgtcaatagctctgataaaatcattcgaaaggctggctcttcaatcttccagcacaatgtagaaggttggaaaatcaattcctctttggtcctagagataaggaagaacatacttcgtttcttagatgcagaacgagatgtgtcagtggtcaagagcagttttaagcctggtgatgtcatacactatgtgcttgacaggcgccggacactaaacatttctcatgatctacatagcctcctacctgaagtttcaccaatgaagaatcgcaggtttaagacctgtgcagttgttggaaattctggcattctgttagacagtgaatgtggaaaggagattgacagtcacaattttgtaataaggtgagctttcttctgctttttgagattgtaagtttttcaaagatattttacttgggggtggaaaactgttagaaaattttaaagtattactaaaacctcaaacaaa

SEQ ID NO: 95654 - DNA, 482 bp, Homo Sapiens
aagggctggaagtggcaggaagaggaacacaagtgactgctaacggataagacaagagctcactcactggagagcagtggcatgatcacaggtcaccgcatcctggaattcctgggctcatgagatcctcgcacctcagcttcccgagtagctgggactacaaggtgtttaacaccataccggctaatttttgttttgttttgtttcgttcgatgaagacgaactcctgggttcatgcaatcctcccacctcgcttcccaaagtgttaggagtatagacgtgatccactgactctggcaaaactatttttttaaaaaagtgacaatggcttaacacctacattagatgacaataaaaccagtgcagatggtcatgaaaagcaaacaaattcagggattatagactttataaccaagtatatctactggtctgtgaaaggaggagatgacagagtatgaacaataaaatactataacataaaa

SEQ ID NO: 95655 - DNA, 700 bp, Homo Sapiens
ccatgagtcacagcagctggctcaaggctgggaggggaagtaaaacactaaatctaaggaccactctattcaccctacagtgactgctctttttccctcctgccacagtccagggtaggagatacttctccaggctctcacttatgggggctttcctgctggctacatcactgaaatggaatctcctagtggcccttctccctctacagctctggtgttacactgaaaaactagaagtttcaaaacagacaagggaaaaagagaaacatcagaaagtctgattaaagtagaagcatcatatttctatcaacgtatccactgtgcttggacacaattgcaggcccttgacatcttttgcctggattatcgcaacagcctccaaaaggactcgtctgtctccatgatacccctccatcctcctctgcatcatcaccaagggaatctttgtaaagcaaaggcatgatcatgcttatcacctggtggaaacccttcagagactctccactccccagagcaggcaccacatcgttagagtctacagaaggcaggaggaaacagaaatgagtgccgggtccataggtaggcaatggggagcagtggggattgcggtgaaatggagattggctgtctaaaggcatccaaactcagaattctgtaaaaccttctatgggccaaataaagtttgtcctgagattccaaa

SEQ ID NO: 95656 - DNA, 554 bp, Homo Sapiens
cttggacatctctctgtctcccctgcctcattctgcttagagttttatcacatggctcccactaaatttattgaagcagtcccctgttggtagacatgttgtttccattttcagcataactaataatgtagcaatgaacttgtgcacgcagcctggctcactcagcaaggaaatctgtagtaaattcctagcggtcaaagtgctgagccaaagagtatgtgcattttcttttaggctattgctaaattgccctccaaaaaggtgtacacgaagcgtcgctgtcccaacagcatgaggaggtttgatttatttcagggcatctgctgactgcaggagtttagctgggaacagacgtgccctcagaaccacaaccaacataaacgcatttccttcccaattttagcctttcccagggccaaaagatgggctgggataccttgtcacagtgtcaacttcgccccaaagagctctgagaggtaaatggctgtggtctaaatgttgcctttccgctatttgtttgggaataaaggccgtttttgttttgctctacaaaa

SEQ ID NO: 95657 - DNA, 446 bp, Homo Sapiens
aagacacttccccttctccctttttgccctctctcccagaaagccaggcaaaaggcaggaatgaggagcagcggatagtgacaaaaaggggcttggaggaggggttttgcgcccctgcccttgaatgtccgtctgatgtacaaaacagtcgttttcttaatcttatgcaaaggactatgagcgtgcattttcaagccctactaccaccaatggctgtcgctaacccacccaccgctcactatagaaattttggatcctcgcttcatgtataagaaacaggttgacctttctctagtccagagggaagcaaagggccagtcttggcgcggcttaacctgaacaaagttcaaaagtatttccttgccctccaagaaacataaacttcctggtgttggaagtattgatacactcattataataggaataaaaattctgctccttcaaaa

SEQ ID NO: 95658 - DNA, 457 bp, Homo Sapiens
agaatcggcacgagcaattttccaaatgctttccgtgggccagcgtggaaacttaactctctcacacagacaacgagattacactctgacaccaagccctgcccttgtgggaagtatgataagcctcaaggcaaacaattcttccttcgcgattgcagtctgggcacctgatgatatagaatgactcattggactcctgcctcttctacttcattcttaccatgagctcccctagaagatgtagtcttccaccgttaccaaaatctgcaaccagaaagatcaagctctaggaagcagtacacactatactcctgtgtggaaacaaagtaatcctcatcagatcatctaacttgctgttgctgtaaggactgtgaattggtagcaataaataagccatgggaaataggagggaaaacaccatcaatgacaataaaaactgaatgtgaaatttgaaaaa

SEQ ID NO: 95659 - DNA, 440 bp, Homo Sapiens
ctccaagttggaactttgacaacaccaaaagaagatgaacactgaagtcttggaaccctgggaatgaacctggaaaaattcaaaatatggtctagtcttaggcaagtttccttgtccagctcagctgctgagaccacatatctggaccctcagtgccctggcaacagctctgtgcaggcaggatgaagcacaggcttaggtcaagcaatcagccgtcaaaatccacactctcacctactagtggaatatctgcaattactttgaccaaaagccagaagccggccagtttgagtgtagctgttacagctttgtgttctaaacctaagaaatggggacccctcacatgagagtggggaggcttctggatgtgctacaaattccatttcattttcatgaactccagtgttaattaataaaatctcaaggttctcccccctaaa

SEQ ID NO: 95660 - DNA, 658 bp, Homo Sapiens
  misc_feature (478)..(537): n is a, c, g, or t
acagtagccagacgtctgaatgtgactcaccaagaggagtgtttggtattcatattgatgatgactctgtagaggaagaatttaaaggtcaagcatgaagaaacagatttaggaagacttggtgtttttatctggatacccatcattctggcccttacaattagagattatggaaaagagccctctgtggccccctaagcctgtaggtctgtgtttttcagttttgctggccgagaaaaaagacccaagggagtaacatattattttctacaaggatgttctaaaactgctcaggcctgtgagtgaaatgatttgctgcactgcaagggagggtctttcacagacgaaaggttcttaatttgatgaagttcagtttatcaccttttcctttttattcatcatgcatttgatgtcaagtcaaagaactctgcctacccataaatctctaaggttttctcccgagtgttttcctaaaaannnnnnnnnnnnnnnnnnnnnnnnnnnnnnnnnnnnnnnnnnnnnnnnnnnnnnnnnnnnacttaggggggtgtgtgtgtatgcatgcacacatgagcacacctaggctatctctagtatcatgtgttcatttgttgaaaagatactctttcctccattaaattgtttttatgcctttgtc

SEQ ID NO: 95661 - DNA, 760 bp, Homo Sapiens
  misc_feature (25)..(25): n is a, c, g, or t
cactactaccgtcccctcactgagnagaatgacatcaggaaaattttgcaaatcaactgacactaaagggaaatgtagattccgtgctattgtgaggtctgtgctctttgtgtcacagatacaaattgaaagtatttttaatataaaaggttttgtggatatattgacatatatccataccatgaatgttatgatcacaaacaccaataatggttggaaatacttttgtcccatctgtggaaggctttttaacacttactctgaattaagacaacattcatgcagctcttctgggaattaagttaaattggggtaaattcattttaaaatataacttctaaaattcataattggactactaaagtaagacaaaattgcatgaacataaattttagtattattagagggagtagcagaaaggaacacaaactaatagtacctctcagtaagaaatacctatggggagtgaggaaacatctgtttatactttgcttttacaagtacatcattgaaatatcagacctgtcatctatattgagtcagcatttgaaccaagtaaatgttttcactgtcttaacatctatttctgtagatgtaaatattgttaacataaaagaatccaagttaacaggatcctgactaagatagcaaacatatattggaaggccaaagttccaccaagtgtttccagagattctgctacatgtattatctgaaatgttctccatatattcaataaaaaccaatttgaagacataaa

SEQ ID NO: 95662 - DNA, 711 bp, Homo Sapiens
  misc_feature (223)..(237): n is a, c, g, or t
ggtgctctgtaaaaatgcacacgtgatggggtgagagaacctctatctatcacaagcatcttgggagactcttatgatcagacaagtttggggaactccaagctttggggatgtagagacatcacttattctggcctaggatggttctgtgtcatagtctggatggtgggtggtactattgttcccatattacagaataggaaactgagtcacagagtgcttnnnnnnnnnnnnnnnatacatgctggcttccaaggctggtaagggggctggaactggaacgcaggtcttgggactgacctggcttcattgcaagtctgccagagaaacgcaaaaggacaagcagcattcccaagcatctggcatggtcatcggtgcaaacaccccgttcatgtaacacgggcctgaggtcagcagtagaggaccagtattggttttggccccagcactctgcgtggatggattgaacgcctgcatccctgcttttctctcaactctgctgtctcaaaggagaggtgggggtgggcctgagggattctctccctgcatggaacctacgggcttgatcatcgaggatatggggctagatatgtcccgaacctcagctcgtcctttcttccccgggaatggtcacggggagtcctgcgtgcatgtctggctttgttaataataaagaataaataataagatggtgagactcatcagctcaaa

SEQ ID NO: 95663 - DNA, 686 bp, Homo Sapiens
  misc_feature (146)..(168): n is a, c, g, or t
  misc_feature (455)..(464): n is a, c, g, or t
tttcaaatgcagtagaccttaggtctcataaattttattaatatgtaccacattaagaaaaacaagatccgctgtaccaatggtgaggatagggaatggtactgttcattgatatttcagttaaaatttccctattttaactgacnnnnnnnnnnnnnnnnnnnnnnntgtcataaaacctaagttatctttagttatgtgaccaaatatcttgactcataacttttgttgcctaggtcgaagatgtgagtatatcagtttttctttccccttaggactctttctgcaacccttttagttcttcggtttctccaggccctttcatttgaaaaccgtgaagaacaaagcctgacaaatctaggaaaactttgataatctatcattcatctatataagtgttcttctaaattttcatggaaaatatgtattataaaaaagtgtgtatgaatttcaannnnnnnnnngcaccagaataaactttttgtaacatgtctgaacaggatctagtgagggacactaactatgataagacatttagaaaagagctcttttatcagagaaacataaattctgctaaaattgaaggaagaacacacatcaaattatggtgaggtttgggtggaagaatggtgaaatcattgatgcttcacataaaggttatggagacaataccccaaggagatctg

SEQ ID NO: 95664 - DNA, 1245 bp, Homo Sapiens
  misc_feature (466)..(494): n is a, c, g, or t
  misc_feature (622)..(648): n is a, c, g, or t
agaagggtaaaattccctttcccccataatatccagtagggtataaataaggggaggtaagggtatatatattccatccattcggtcattcaggggagggttttaccccaaaaaggattagaaacggtatgggtaatagagtaaattccaggagtggtgcaggccaggctgtaggaaggcagagccagcattatagccatttttaaactgggcactgtcaaaacccagaaagctttattttaagggaaaatttatttcttattttgtatcaacaccagtatcactggtttgccattaaatagtggccctggaaaggcttgcttacgcagcctaggtccaaattctttactactaatggctacagctaaagactttgtaagtatacatttactccagttagtaaaagggtaaacttttggagttgagatttcatttcacaatggcatatttaccatttaagaatgtnnnnnnnnnnnnnnnnnnnnnnnnnnnnncccgattttgatacatagaaatgagttctaaactttgaaaccagcccagtaacaaagcaattttgattcttatgtaataaatactacataatttctaggctaaatcttgccaaatactatccaagacnnnnnnnnnnnnnnnnnnnnnnnnnnngtggacaccttttactcacacttaatactagtcaattttccaggaattttttgggcagggaatatccccaaatcagagaacagaaactttaccgaaccgatgacactatccccgactcccgcttgctgccacgtctttcttcttgcttggccgctgccgtccgtcgtcctcccagcagcagcagcactagcagaaaaccaagactgccagcgtcaaagatggcgcctggctacaggctccgctctaaggcccggccggtaaaagtgccagcacgacgcagggcgcgaggattctggaagatgtagttcctctatgaggcgatgcctaagatggctgctccgggtcacagggtcacgtgacgggggaggcgctgggtcggggagtcccttcccttcagaggaatgcctcgaagccggctttcataacgttttgtttttgtttttaaatcaaatgaggtaataagcgggagggccgcaggaactgagactgccattcagtaagcgctcaatttattcttaccaaagtgtttgcttaatgagtaaatcttcccaaaccatgtatacatttaatttagaaataaactgtacttttcctaaa

SEQ ID NO: 95665 - DNA, 708 bp, Homo Sapiens
attttatttagaatttgtgagtttaagcttccattttaaggtaaaatcagttagtttgaacacacaataaataaggttaataaagcttatttattgatcatttctgtccacctacaatcattgccttttgcagggtgcctgtgagatataaaatttataactgccacatcctttcttaggaatttttaaatttctattttcttgtaatatgaatacaagaatacattcttgtaaatgaatgtattgaacattagttatggagtatttttcttagctacttgatattagatattgatcagtggaataaagttattgaacagcttggaacaccatgtcctgaattcatgaagaaactgcaaccaacagtaaggacttacgttgaaaacagacctaaatatgctggatatagctttgagaaactcttccctgatgtccttttcccagctgactcagaacacaacaaacttaaagccagtcaggcaagggatttgttatccaaaatgctggtaatagatgcatctaaaaggatctctgtagatgaagctctccaacacccgtacatcaatgtctggtatgatccttctgaagcagaagctgtaagttattttcttaatgtttacagaacatattgcattcttagagttagaatgacagttaggtttggaggagaccttttaattttaaataaaaatgtagatacatgaaaaa

SEQ ID NO: 95666 - DNA, 1031 bp, Homo Sapiens
cggagccgcgagcagcgctgggtaacggccgcggcgaccaccccggacggcccctgtccccgctggcgggcttccctgtcgccgttcgctgcgctgccggactggccttatgggtttctagaaggaaaatcacagaggtaaagcatcatttcatcacatcctgtcaaggatgaagaaactaaggaatcagaagttgcctaggatcaaagaaacacttcttggtgaatttttggatgaagccattaaattaattgcttgccatcatgagcagaagcaagcgtgacaacaattttttatagtgtagagattggagatttctacattcaccagtcctgaaacgatatcagaatttaaaacctatagggctcaggagctcaaggaatagtatgcgcagcttatgatgccattcttgaaagaaatgttgcaatcaagaagctaagccgaccatttcagaatcagactcatgccaagcgggcctacagagagctagttcttatgaaatgtgttaatcacaaaaatataattggccttttgaatgttttcacaccacagaaatccctagaagaatttcaagatgtttacatagtcatggagctcatggatgcaaatctttgccaagtgattcagatggagctagatcatgaaagaatgtcctaccttctctatcagatgctgtgtggaatcaagcaccttcattctgctggaattattcatcgggacttaaagcccagtaatatagtagtaaaatctgattgcactttgaagattcttgacttcggtctggccaggactgcaggaacgagttttatgatgacgccttatgtagtgactcgctactacagagcacccgaggtcatccttggcatgggctacaaggaaaacggaggaagaatgggaaaaggcatattcacaaggttacaataaggtgcctgtgagatataaaatttataactgccacatcctttcttaggaatttttaaatttctattttcttgtaatatgaatacaagaatacattcttgtaaatgaaa

SEQ ID NO: 95667 - DNA, 557 bp, Homo Sapiens
aatttcttcctctctgctctcctacccactgggtgcaatgtataagcaaaggactgtatatgcaatgaatttttaatggatgaatggatggttgttatttattgtggcctgcatctgagatttgatcagccttgttagtttggattccatttccatgtgatggggctagaaagatcttgccaattcagaagtcaaataaaatgaataaatatcacttgataaagtggacaaatccttcacaaattaaagtgagactgttactgaagccagatgagcaaacgttggatacacatgtgtatagcaaaagccaactggaacttgaagttttgaatgtcttacaacaagcttggccagggtggttaaaacaaactgtcatccataatgacccgtgccagatccagttagctttaaatagattatgcctgcctataatgtgaaaaaaaattcactggtcagttgaagactacctgaatattgtctgtttggtccatcagattggaagattggttagaaggatgtaaagatcattgtgtaaataaaatgattgatatttttct

SEQ ID NO: 95668 - DNA, 530 bp, Homo Sapiens
cggcctcccaaagtgctgggatgaaatgttgttcttaatgttgttgtcactaagcagctcagtggctgcttaattggaaccaatgaacatttttcaggcaagtctccaagaagcagaagtaatacaaactcaggaagcacagccaggggataaacatgcctttggcaacctcgttgagtgtattttcccctgaggttcatttgtatcacacggaagtctttcaagtttgtgtagggtgacggcatatgacaatatttatgctttgtccttagtgggttcaaactgtaagaatcactttgtaaagactaggacagggttctttgccttttagggaaggactaggatggccacttaattatgctgtaagtcattattaaaacaagaggaaaaaaatctcttagtacaactaatatttgacatccactctatctatggatatgagacataattcacttccacccataatcctatcccacattcatgtatattacagttttataaaattaaataaaaagtttcttccagccagc

SEQ ID NO: 95669 - DNA, 529 bp, Homo Sapiens
cttgactctcaagccatatattaagttgtgaaactgtgatttaatatgaagtctgagcttcgcatataatataatttgtaaagcataggaattcctctttcaaaataatagaataaccacagatttgttagaatctattctctaaagatagctttcatttaaaagagatagatctgccagttacatgctaattttctgtttcttcagactgtcaaaatcattcctttacacaactgcacatgccatgtagctaaataatggccaaggagataacatcacaagtgttttgtgattcccagaattctcagaggaaaatggatatgcctactttttaccctcatttttcctactgtctactagtagatgtgatggctcaattttgaggcaccattttgtaccatgaggtgacatactaagaatggcgaagcagcaagataaggatcctgatgactcagacaacagattagtcctggattacgcatctctaggctactttcacatgaaagagaaataaactctatgttattgt

SEQ ID NO: 95670 - DNA, 330 bp, Homo Sapiens
ccagaaaagggcccagtttcctctcagcaatctttgaagaaccttcgagaaaggagaaacacagacctcccgcttctagacatgcacactgtaacccgggaagagggagaaggcatggagacaactgattacggagtctgtgtcttccgccagcacatacacacagtctttagagcagctgcttaattctcccgaaactaaacttggtctgttactctgtctaaatatgttcttcttctttaatttcactgtcttatttaattactattactctaaggtacatatgcttttttgggctgctccaataaaatttctttcaatattcccctt

SEQ ID NO: 95671 - DNA, 701 bp, Homo Sapiens
aatgaaatggaactcaaagcccattccccttccactgtcctggagtgggtgtgttgtgtgcctttgcatgtttttgtatctttactacatacatacttatcagggtttctcaacctaaacaccattgacattttgatccagaccattctttgttatagcggctgccctgtacattgtaggatgtttagcaacatccctgacctctacctactaaatgccgacagcaccaccatcctgtcccccctcccctccttcacataacaaccaaaactgtgagcagacattgccaaatatctcctggattgggggtaggagaacagagtcaccatgaccatatatccatctaaaaaagttaaaatagaccagacgcaatggtgcacatctatagtttcagctactcaggaggctgagatggaggattgcttgggtccgggagttcaggactgcagtgcgccatgattgtgcctgtgaatagccactgctctccagtctggacaatgtagcaagaccctcatccccaaaaaaagttaaaatagtatatatactcgtgttctgagtattttttaatttatgtaaatagtattacattttatttatattatttacataaactacatacaatttatgtaaatggtatatgtatatgttgtatatgcatattcttgtacaactttatttgttcattaaacattgtatatttg

SEQ ID NO: 95672 - DNA, 419 bp, Homo Sapiens
cctcaatcccacaccacagagctgctccccgcctgagccccgggggccgttggctgccagtggcccactctgatctgcggccccccagttgccgccagccccccacggcccgcacggaaatttttctaccgtttttcagcttccaggctctcctgaaagtgctcacaaggcaaatcgccatggaaagcgagttcaagtggccttttaaagtagaccaactaagcgaatggctttgtctccgaagacacagagaccttgggcagccagtcagggacacacccagaagtgtttacactgctctgggtctgcttttttaggggtttttgttttgcagattctgtgttatgcctggttaggtatgagcttcagaccttctgaaccggagcaggaagaaaaataaaagctttcctccaaacccc

SEQ ID NO: 95673 - DNA, 463 bp, Homo Sapiens
ttgggactattacccagccttattgcaatggaagccttgttcatacagcgttccagagaggacttctataatctcctgcctcagacataattaaggtaaggatcaagacgagatcacactggaaaaggtgggccctaaatccagtgagaggataggaaggccagcactcttattctgtcctaataagagacagagacgggcacgcagagacacagaagaaggccatgtgttgatggaggcagagactggagtgatgccgtcccaagccagggagtgcctggctccgccaggcactggaagaggcactgaatggatgcttctcgagagcctttggagggagcatgaccctgctgacaccttgattttgcacttctggcttctggaactatgagagggtaaatttttatggcagccctagaagacgaatcccagagccaataaagatccctcttcccctgaaaaa

SEQ ID NO: 95674 - DNA, 777 bp, Homo Sapiens
ccgctccgagcccgggtggtgggaccgatcctggagcccagatcaagccaagtccggccaaagctgtgtcgcaaaaatctcgagctattagaaaggcagttctgggaaatgatgcaaatacacagggtgatgtccttctccccatcatcccagtgtgaaacttgtggtctcttaggaagattccggggtaggaaaacaacagaaagaaaagtcgttctgatttctaacctcacattcaacaatactgggtgttggaattaagtttcgctgatttgcgccaagagagatgtgtcactgtcacccataagaagataaatacacctaaggagttattatttattgtcacaaaagcaactaaacaagtttcatgtgagagcattatttgtcttaaaataaggtgctaggaatcactccactctgaaggattcccttgtcttcatggcccagtttctctgacaccgtgtttattcttatgatgaccatggtgacatgaaaatccatgggctcatatctcctgctcaggggaacataatcaaccaggtgtcccagctgctgttcttatgggtccgccactgtgttcatgttaaggccacatttcccacaggctactcaagcagcaactgagcataacaggacaactaatgcaggtccatttctggaacacatggaactccacaaccaggggtcagaccttcatgacaggctgaagagttccttctcctcttctcccttttactttacaaacatttctccaataaatttcttacacatctaaaa

SEQ ID NO: 95675 - DNA, 717 bp, Homo Sapiens
agcaggcctgctctaacaatgtgacgtgatgtgtccttctagacaaggccaatattaatgatgacatatctgcacaggaagcacaaagctctggttaccactggaagccgtcttgcccccataaaccagccttaggatgccactgatgctgtatggcagaatggagtaacagagagaatttgcagaataaagaagggacaatgcagtcaccaggtcagcattaagggaaggcttggctgcatcatctgccactctgctgctgctgactctgccagtggggacagcacatgcttccttctacgcttgcctgagcagagttagccaggccctctgtcttgcatgagattgagtgtgattctgtggatgcaaatcaggatgtctctgggaagaattgcattgtgtaggttatttcaatttaagaagtagctgcaagaagattccaaacacattttgcctcaagtcacctcaagtttctaatcttcctgctggagctgcctttgcagtgaaaataagaactggcctaatgatgtgaagacaaaaccaacagaaatactgatgtcattgggacatattagcagaatggccttttaatttgtaaaattctccaaagctatgtctatttgactggatgtaaatatagacatgaagtagtttggagaatttgttgggggaaggatatgaagaaaatattctcattgggcagtcaatggtgttttt

SEQ ID NO: 95676 - DNA, 525 bp, Homo Sapiens
catttaaaaatgtaaaacccattcttagctttcaagccatacaaaaccaggctgcaagctggatttgaccctcaagctatagtttgccaactcctgctccatcctatgctatcttgccttacatctacatgaaagatgtaacatgtcagacagagtgtgcctgaacagtgaccagcgcagactaagtggtcagtaagtgttcattctcgttcccttccctaatctcgttcttcttcttcctccccacaaccagatcagatatctcattctgtgcccagcacaagagaggaagacgagggctttcgcaaggtctaatcagcaggcagagcctgagaaattatcccttcggaggagagaggctgtcattggagcaccataaacagcccctccaggtcccagcatgttccaatggagagtcagaagttcaaatcccagtgctaccactgacaagctctatgatcgtgggcaaaactgcttaacctaacaggccctaaatttcctgtacattaaaatgaatataatgat

SEQ ID NO: 95677 - DNA, 636 bp, Homo Sapiens
cagtggactcgggttataattaccaacagaggagagaataactataagttattttgatgtaaaaagcatattatcctaagccaacataataacacagtttttatgaagcacaataattactttgaagactcacagaagtgcatttttctaaaagaaggagattctcatacagaaacagattaacagaaacagaaacagcaacactagagaacagcaaaatagtaacatttcaaatagtaacatttcaagaaaatatatacaccttcacagtatgtggtggtatccacttactgtctactgcctccataactcctaaagtcttctgaagatttattaatgctttgaatatatgagccaccgtttcttttcacagccttttcacaactgggaattctttagagaaaggcaatcttacctcatttacttacttcatcagtaatgccattactatgcctacctaagaagaaaatatatcatgtggcagaggactagaaagaaaaaacaacaacaaaaggctgtgaagatttgatcatatgcctacgtgtgtggtgaatacaatatttctttaatcgcaatcaggaatataaatcttattttgatgctatgacataataaagtgcattattttcctgaaaa

SEQ ID NO: 95678 - DNA, 489 bp, Homo Sapiens
cagtggcctggcccatttctaggcctagcctttgccctacaggccgtgcacagcctccaacatggggtcacacctagcacctgggccctgtgcacctgagcttggaggtttgtgaggcagaagaagggcttgtgacctggaaaatgccatctcttgtgggtcacctgaacctgattggtgtcatctgtgtctgcttccagccagaaatatgtttgcgggagggagggagagagagcccctcctctagtgtctgatttgcactctgcccccaacctgtgccagctgggcacacggtgttcctcttcacatggtggtgactcccacagcccatgggaaggagtcggtgggagggtggagaggagcagaagttccagaagctccaagtgcagtgttcgcaagagaacattgtgactgtttatttccttcttcaaatgatactgatatttgataaataaactcaggaattttaaatttcatggattgagaaaa

SEQ ID NO: 95679 - DNA, 566 bp, Homo Sapiens
aaaaaacgtcttatatcacagcggtaaattatccagcttatatctgaaggaacacacaagtaacagctcttggtggtttctaagtagtctacccatttaaaaactaaaaagtaattgtccagaaaacacagaccaaacacagctaacaaagatctcaagtagcttcaccaggtagctgagcccgaatggacagaaagtgaaaagttcaactcggaaatacccccatgggatcgtgctgaagatccaatgggcgctatgagttcccaagaatcttaagaggcatagagttggcctctttatttgaagctcaactttccatctgagtgaagaggcaaggtataacatgcatcccagatgctcactccaacagctccgaggcacggaggcaggcactcctgccagctcccacgtttagcatccactgcactccgctgcagtcatgtggggacttaggcaccgtccctgcctgctcacccactggggcgagttcctcacttgtgtgtgtctggaacagccacggccaataaatagttgttaaaagaagaaataaaagaaccatcctgaaa

SEQ ID NO: 95680 - DNA, 405 bp, Homo Sapiens
ctcttgccaactggagagaggctggctcctgagggatcctctccaactaggtaactcgattccctgcagcccagcaccagcccagctctggccaccagagccggagctctgaagagtttacctccaacatggcagtgagcagttttcaaggtcaaggagggtggccaccaggagctcctgagccagggtgcatggggagaacacagggctggcaggccaggttctagctccagctcttcactaacttgctgtgtgtctttgaatgtatcacctcctcactccggacctcagttctcataaaagggagactgacagaaggtccctaagtgcttacagatggactggccagggtcgtcttggtctatagcatccctttcaaataaagatctgactattctgtgaaaa

SEQ ID NO: 95681 - DNA, 484 bp, Homo Sapiens
atggagaaaatgaaggtttctatgtcgtagtgtaattaggaagatccaatgatttaatgaatgtttagcccttagcatggtgcctggcaggaaccaagcacttgggaaacattagcagctgctaaaataggtaactgcctccccacctccccaccacgtcctgcaggatctcacagtggagtaataagtgctaggaccaaaggacaagcaacatctcatgaaagcagagataaatgtgccttcctcaaatactcaagggctctctggtgcaagaggagttaaatattgtatgaaatactaagcatttagccaaaccaatacagtaaagtcttttcctacaggcagaagaggccatagctagaaagggctacctcaataggtggttagttccccatcactgcagatgttcaaacagactctgcacagcacccttctaaaatgttgaagataagatccaagtactgtcatatggaaatatatgttc

SEQ ID NO: 95682 - DNA, 416 bp, Homo Sapiens
catgcagaacgattgcctgttttacttctcaccattgatttatgttgccaaaacaaagagctacctgaggaggtccgtattttatagcctttgtttaatatatgggaaaatgggagtcaaggaaaattagagtccttgccttggtaatacatccaggacacaggaaaattggaattggaacacctgcctgtgacaccagtgcatgcttttaacaacgaccttgataacttctcacttttactcccttccttgtttacccagtctgtccacctggaaatgctagttcattaagactcagatcaaaggtcatttcccatcagaatgtttctctgactattccagacacagtctaatgcatcatccttttctgatctgtagagaacattaaaaggttgtttaattttaagcttttaaaa

SEQ ID NO: 95683 - DNA, 430 bp, Homo Sapiens
tttcagatccattaaactcctaaaggaataagtttttattatttccgctcacaagatttttccactcttctctttgtgtgcaaaaaaccctgtgcctactcttgttatttcaatctcacagtgtattaattatcatttctgattaaagatctccttttaaggcagagcccttgcttcattcccctttgtgactgtcatgctagataacaggacgctctgatgcttagtaaattgaattgactcacatcacagctcctttttaaagaatataagaaaggttaggtttgcacactgaatacacacaaaatcagcataaatacaaaaaacaatcctgtaacccaaggctcatttgtaaaggtgcttaaaattgacttgtaagtcattttcaacttccagacctcagagtctatgagcctgagccccataagta

SEQ ID NO: 95684 - DNA, 678 bp, Homo Sapiens
tgtgaacacaggtgaaggactagcatttttcagccacggtcttatgtttacttaggaaacagcccagcccagtgaactgggctcaaactcaagactggctgattcaacaaggcacccctgcagacaaagctggcagagtagaagtttcaactcctttccatgggtaagaaaactttgtacagaataggaaaaaatggcctaggcagaaggatctgctggccatgggtagctacagaagatttgggagaggggaggagtattatattaatgccttgggagaggctgacccaatgatacccccaccacagtcaatttccaataggcatctggaattcagattccggaacccattgcccctcattcctttgcctccaacagcagcccaccaaaacctgatcttgaagatcttctgtttatgctgcagggactgtcaggagccctatgccatcaatgactccaaggttcccagtcaaacccaagagcacaagccatcgacccaaagtaggtatcagataaggacactctgcatggcctctctaaacctcactttgctcactctctgcctgctgggatacccccaaactgccttcatcactatcactgagtgataattccaatttaaaatgaggtgggtgttggatggctaagtactcaaaccaataaacaagagagcttaaa

SEQ ID NO: 95685 - DNA, 556 bp, Homo Sapiens
agccgaggcacctgctggtcacaccaccaaaacttgtctctctgaaaaatcagcagatggcatttgtcagaaattcctacttcttgattaatttgggaaaaagaagagtgtgtggcagtgctgatatcctttaacctggaccgggcgtgttggtgtttcagggaggatgtgaaaagctgtgcacagaccccatgaccttcttctgaagtggtgggtcatttagttttcccagagaggcaaagaagtttggtgatttggagcctagtaaatgaaaacaagagaaagaccatgatgttgcttttgtattaagaagagttgaaatttcaaggccagttctgaagaggcctataccccacttctagtaacttccatgagttctcaaatatgcctcaggttgggtccagcttttaattagagggacgtctttgaaatcacaagttagattcaaatcccagttctgccacctattaattgtgtgaacttggacaggtccctcagcccatctatacctcagtttcctcatctgttaaacagtgataataaaaacatttaaaaa

SEQ ID NO: 95686 - DNA, 425 bp, Homo Sapiens
  misc_feature (160)..(160): n is a, c, g, or t
tagcatctaccttataagaagacatactatattctggaccacatatctgataattcttacagccctttaaagataatcataactagaatattatcttattttgtagctcatagatgtcaaaagactagctcataattttattgcggatacatagcagaanccaagatttgaactcagacctgtctcattccacaactcattttccttgaagtcaatagatgccactgatctctaaatacctacaaaaggggctcggaggtggagaggggatgtctgaggagccttaggactaccacccaatgttctgtctttagatagagatgctatcaccaatctctctttcacacatactcctcctcttctcatttctgttcgtgtacttggttctcagtgtaagattttgttagaagaaagaggcatgttgg

SEQ ID NO: 95687 - DNA, 588 bp, Homo Sapiens
cagtacaggaatgataaacaccaaactcagcctggtgattacctccaaaaagagagtaaaaggtgattagggctttacctcaatctgcgctgtaattcttaaattcagagtaatgggttcccaggtatatcatgttagctgtattttttgtatgcctcaaatgttatttaagaaaagactaattacttgtcaatttaccagaattaaccatacccggatcactcccctttgtattttattgccatgtaatgggatgttctttaaattctctgttgaatgaatgagactaggtctgagtgtacaacaattaaagtgacatcaacattctttaaaccagagttgttttggagaaattcccagagaggctctttcttaagacatgaggctagggaactagatgtgatttagtgtagaagtcctatccccttggaaccaaagcagaacctattattcactaagggtggagtcgacaggagagcttacagcctggtggaagaattggaaatcttattactagaaataaaggtgagaataagatggaagtgatccccttaccacctcagagagaataaaggattatacaaaaaa

SEQ ID NO: 95688 - DNA, 421 bp, Homo Sapiens
  misc_feature (129)..(143): n is a, c, g, or t
tttgcttataacctatgcatgcccttccacatacaaaaagatcatctctagattgctggtaatacctcatacaatgtaaatgccatgtaaggagttgttatactgtaccgatttttaaatttgtattannnnnnnnnnnnnnnccccccaaattttctatctaagattagttgaatctgaagaagtggaacccacagatacggagggctgactgtagtaatttgacacttcatttttcttaaggtgtatgaaggtcctttcttctctgtttgtaaattatgtggtgaataacagtattaaaaaataagctggcttaaaagatgtcagactcacctagggaagtccttactggacataacgtttaatggcaatctgtgggtaataattacaaaataaaatgcatatttgtgaacaaggaaaa

SEQ ID NO: 95689 - DNA, 737 bp, Homo Sapiens
gatcccccatatgcgcagcgccatggtcctttgtaacctcataaagtgtccgatgagcagcaggggctggaggataatttagggccaatatcatttgttttttttacattatttcgccatttctcagaattctaaaatttgtttaatcgaaatatcagcttgagggatgctgaaaactgtacagagtaaaagaagaatctctgctgagggataaccaagagcctgtgaagctcccaaaaacgtccggccaacggcaccagtcccatctaatcagccaggaggaagtaggcgccgcaaagccccctgcgaaatgtagtttccaggaagacttctgggaaacagagtccgaggcaggcgacagagcgctcttgcagccaaatagagccgggctaggggcgcgtcacgtgacctgtgcagccaactgttccgagacgtggcctttgcctgagctgctgttaggagaggtgctcaggtctggggagtagctcctaccatcgcctggactcgacttctggactggcctccaaaagtcgacacagcccctgcgtctttcctattccccaaaccggcgctgacctcatatttgcatacactgaaacttgtggctctccttgacttggggtggtaggctctataggacctcaccatgttctcttacccatggtttctgcagcagccaaaatgatccattccatgtgctttagagccttagggaataaaccattaatcaagtcaaa

SEQ ID NO: 95690 - DNA, 472 bp, Homo Sapiens
ttagttctacatactaggcagaatagccgagtaaagccattgagatgttaccatccgaaagaatacaatcacagctctttctgagagggagtgggcggccctgaaaagggccattggaagaaaactgacgaaaagattaaccgccgaagccgtacagagtgcgtccttgacgcttgagcgcgtaaaccacatccatggcagtgacagtcttgcgcttggcgtgctccgtgtaggtcacggcgtcccggatcacgttctccagaaacaccttgagaacgccacgagtctcctcataaatcaaaccggaaattcgcttaaccccaccacgcctagcaaggcgccgaatggccggtttggtgatgccttggatgttatcccgcagcacttttcggtgacgcttggcacctcccttacccaaacctttaccgcctttgccgcgaccagacatgtctaaccagctgacaacaaaaac

SEQ ID NO: 95691 - DNA, 424 bp, Homo Sapiens
tgttctagagtatcccctgcggctctctgatgcatgctcacgtacttcccgctgtagtttcctcagattagaagggagagaaatgcacacacatgatccaccagcccgtgtgggattccctctgcccttctggcatctgaaggctgtgattcaaagatcccccctgcaaccttctccacaaatgaaccaactgattctcacaaccgaagggagaattgacacctcccattgagggactaacaaaagtcacactctggcctgctggcaagtcacctgtcatttccagctcatcttcattgttccatagttagtcctattctttagtagatatcaagactattagaagcttctatgaggtgcactatgtgtgtctctggggtccgtcttgtgcttgacacagcgaaagctccttttagttccgtgt

SEQ ID NO: 95692 - DNA, 496 bp, Homo Sapiens
tgcggtacctgcagctctctctgatggagttagttgtgatgacattggtgaggtctggtttttcacactgaactaaaatgagctttcgctgtgtcaagcacaagactgaccccagagacacacatagtgcacctcatagaagcttttaatagtctttatatttactaaagaataggactaactatggaactatgaagatgagctggaaatgacaggtgacttgccagcaggccagagtgtgactttttttggtccctcaatgggaggtgtcaattctcccttcggttgtgagaatcagttggttcatttgtgggaaggttgcaggggggatctttgaatcacagccttcagatgccagaagggcagagggaatcccacacgggctggtggatcatgtgtgtgcatttctctcccttctaatctgaggaaactaagcgtgaaagaatgtgagcatgcagaaaaggagagcagccatcagagagagctgcaggtccga

SEQ ID NO: 95693 - DNA, 340 bp, Homo Sapiens
tgttggagcttagagatgttctagtctaatctcagagctctgtacagaagaacaccaaatgccagaaagattaagtgatttgcccaagatcacacactgagttagtgaactaaaatcccagatgttcactccctgcccatttgcttttcactgacttacctgcttcccattttaaaagctcaccctgccccttctccaatgtatccttccccttccccccactggcagatacacatctgctatgaaagcgttctattcctgaaatactcctgatgtagattaagtgatgtctatgggtgttatttagtatccactgcaataaatgctagcagctagtaaa

SEQ ID NO: 95694 - DNA, 667 bp, Homo Sapiens
tgagtccgtgttgcatgatttcctttgtccacaaggcagtgaagtcaactctgaccagccttgcactattttcttgtctgttctggcaaaacaaggactatacatccacatttcaatgtgaaggtcctataaagaaggaaattgtcagaagagttctgcagggtttccagctccaggagccgatgtaagtagggagaagaacagtgccaaggagaaactgctgttgccaaagaggagggaggaagaagaggaaggaggaaagaggcaaacatacaaaacctcagacaaaacgcagctttgctagcacacagatggataatgggaagacaaagatatggagagttggatgcctttggcagtaagtatatcggaaaggctcattcaggcgacatcacccaagatctctgctctgggtaaaaagagaacatcagcttgaaaagcttaaaattctactggcagacactgtctgacatggaaatatctctaaccgcaagatgatttgcaattagcattctttctagtggcacagtaactgcctcatatgattgctaaggagattaaataaggtagagcttgagaaagaccccattaaactgtaatgggctattcaatgttagctattgtcattttcagagttaccaaataaaattcgacttgcataaaaaaa

SEQ ID NO: 95695 - DNA, 515 bp, Homo Sapiens
tcctcccacaccacccaggcaagagaactaacaattgatgactgctccaaatcagtcgccagtctacctaatacttctacctggtaggtagcctgatacccactaacatcaggtaggttctatatgattaatagttcataagataaatattaatcattagcaattttcaaagctgaggtacagctacttcaaaaatgaagaaggaatgcagatgaagagtctccagactcttcaagagactctctgcaagcaaagtctccagagttctgagggaaagaagcaaacaaagaatcacagccattctttgagggagcaacctactcattaaagaaatgcaatcatgattatgctgatcaaatgaaaatctcaaaaatagagaggccatgggaaaagggctagttatgagcactgaattcatttacatataaaacaaggcaaaataattgtcataatactttgtaatggttataaacaccaaataaatgttatatagaggtgaatcgcataaaaatagt

SEQ ID NO: 95696 - DNA, 661 bp, Homo Sapiens
tttaaattaaaaataaaatttcatgtattagcttgaaggctttcatttgcagttaacaaaacccgaaaggcataaacaatgtaaaattgtactagtcatagaaatgaaaagttgtaagctagattgagcttcaggcctccagttcccactttgagagggtctctacctcactctcatttgcattagctgtgccgtgaattcttttatgatggcaatatactgtcaccagtagcaacccacatgcttcttcctttacacctttccatgtggagaataataaatgcttagaagagcctgcaggcaaagttgttgaggcaaaaaacaggagtgtcattcaagaaacaattagatgccatccttggggaaatggagtactataaaggatatgctttgatggaccaagtgacctttattctctctccaaaaatctctcgtgttcttataattctaatcgtgaaatatttcagcaatctggcctccagcaatgtgaattcttacttgaattattcacctcaccagttcactgctgaggaagaacctttctcatagtgctacaaagattgcatattgaccagatgtaattcccaatgctgttgctcataggcattttattcacaaggatgccttaggtctgacactataaagtgattgcttatagaag

SEQ ID NO: 95697 - DNA, 429 bp, Homo Sapiens
  misc_feature (22)..(22): n is a, c, g, or t
ccctttaccctcccacttcagnagtctttgaatcactaactgccagaccataagactgccatcagccacccaggagaggggccgcaagcagtgggaaccctggtgccatcgggagctggcagccagcttattaacgaaccgtttgtggctgaactctcagcagggagtggccattcagcaatcctccagcaggccacggatcatcacaaggccctggcgcatctgggagctctgatccagcacagatatctcaacactcaatatgtaaactcaagattcaggacttcatggacatgacctatcagatcctaacaagaagcccaagatctggaaaaggaagacattggacattcactgggctcttatgatatgccagacacaaggtccattcatgtggattctctcattaaatcctcccagcaagtcaaa

SEQ ID NO: 95698 - DNA, 487 bp, Homo Sapiens
caggactccatcaaaagcacagagttctctcaaggacaatggctggggccctgaccaatgaggggagagaccgccatcctcaaatctctctcagtctgggacagcaccaactggaggatggatcagcttcttcccagtgggcaccaccctcccttgtgatcctacccccagcgcttgccttcccatagtcctcccttcgcccaccccaggaagggacttacctgccgctgcagtgagccgctgtgaggacccacctgtggtcaataaggacacccccgcagcgcaggctggtgccctcaaacagccccacctgccacggctgacttccttgcatatttgggtcaatatgtcaatcttaagtcaatagtacagactgcaaatgtcacctctcaagctgttacatgttgatttaccttgtccattgtgtcttttgatgaacagaaatctttaactttgatgtaatgaaattaaacattattttgccttt

SEQ ID NO: 95699 - DNA, 586 bp, Homo Sapiens
cagaagtctggcactttgtggctgagttctcttcccagggtatcacaatgctcagagaaacatcccataaattggttccagattgagaaggtatggtggataaagcgatgctgccttgggaaaatatccaaatgtaactcaaagaaccacaagaccctataactctcaatttgaagatggcgtgataattttataccctgaacctgttctctgcttgggacacagaacaaggatagatacaccattcggagccttgttttctgaccacaggagaatgaaccaacacattgaaaacaaacagatcaccagaaaatttctactctttaaaaaatagtcagcatacttccaaataatccacatcaaaatagaattaacaaaaaataatataagttagttggtctacaatcaaaaacaatattcccatggttatagacaggaggagccctcttccatccgccgctgcctctatgaaattccagcatcatttttctggttttcatttggaaacaaagccactgaagagtattttgaagagtctgaaatccataaaacagagagcaaataaactgaaaatagaaccggaaaa

SEQ ID NO: 95700 - DNA, 576 bp, Homo Sapiens
cagcttactggccgctcatttggggcagaggtggggccaggcaccaaccgtgtgcccatctgggttttgactcccaggttttctcgtatctcccctgtgcccaatgtcagtatctgaatcaataaagtcacagctttgccagagacccttctgttcagaatcccagggtggcagagaccacagctcaatggagccaaggccaacactgcaaccccaaggcactgcctggtccagactccccctcacacacccagggccagctacttttccggtctgtcttctgggatccccaggactacctcctgctcctagcttccctcacaccagggggcgcagtagagcaatcagcacccactccccatcccatttcatacccaagccttcagtctcatagacagttttgtgctcgacccaaatggcactagtggccacgaagactctggtatggtatagacctgagagttacccagctgatctaccaaccaacatctacacactcagctaagaacaaaggattcctcagactcagcacagagcattttaggtttattaaataaaaattataatttatacaag

SEQ ID NO: 95701 - DNA, 942 bp, Homo Sapiens
  misc_feature (113)..(113): n is a, c, g, or t
  misc_feature (481)..(481): n is a, c, g, or t
caaagggatgtgagatttctattcgccgcggaggcggcgacaattagaacgtctcggacccatggcggggcggccattggctcggaggatcacgtgggcgcctaactttgttnacttgacacaaatctccttggaccggctgttgggggaaaaaagtgttatccgtctctcccggatctgcaagggggaaaaaatttggaaccataaagttgaaaacttttttctctcagtttggaagaagcccttcgtcatgaatgggatctgcagagttcgggcgagaggaggcgagaggcgcaaaggagggaagatttgtcgcctgccgctcgctctggggctcgatgtgaatatatattatgtctgcctgttctcccctcgtcggtggctaaggcctcgggcgccctccaacccggagccctgctgagcaaagtcccgaagcggagtttctaaggcgccttttaattcggttacctccagctcccanaacttgctgccgcccgcggggctcggccctcgccgggctggtgtgctgggaacctgcctccgataaccgttttggtgtcctgatcgcttgctcttcttcgcctccttgggccatcgtaggtggctggtagcttgtcgccagtcgccgcggcagcagcgaccggctgaggcagcctggcagcagcagccagggactacccgggtgcacaaaccttcccagccctgtttgcaccaccggcggagtctccattctttcctatcgcgtctctggctccttcgctttccacactcgcctggcctccgtcccgcgatggtttggggtttattgcaaggggagcggcaggaatttcggccccaggcatctagttaaattattgttttattattattactatcatcatcatcgtcatcattattattgctgtaacaatcagactaaataaagccagggcctagccagcc

SEQ ID NO: 95702 - DNA, 559 bp, Homo Sapiens
  misc_feature (97)..(192): n is a, c, g, or t
gtggtatagaagaaagaaaataaaagtcagccaaaattctaacactcagaagtaactgctgttaatgttctgaaacttcctgaaggtcatataaggnnnnnnnnnnnnnnnnnnnnnnnnnnnnnnnnnnnnnnnnnnnnnnnnnnnnnnnnnnnnnnnnnnnnnnnnnnnnnnnnnnnnnnnnnnnnnnnntttagtgtttattcaatttaacaatgcaacattagcagacattccatagatatagaaaatacataccacatgcacatatatgtatatatgtatgtatgtgtatttacaaaacttccctctcaagaagataaatattgattcaaaaaggccctttactagctttgggagtgcagacttaagggaaggtagaagccacatgcttcatgatgcaacacactctatgagtcatcaaaactcatttactgtttaatcagaggtacatgttgaatttttaaaacatcttcccagtgttatttttgtttccttttaacaatatggtggattacattaacatctcctaataataaataattgtttcaaccctaaa

SEQ ID NO: 95703 - DNA, 413 bp, Homo Sapiens
cacctcttaatattgttacaatggcaatcaaatttctttttttaatcctgcaaactactgggatagtaattaaatttcagtgtgagtttgggagggaacaaacattcaaactgtagcagtgcttttccatgcacatttaccaatcgatacttcctcctattctcaccctgtattttccatgcctcaggcaagtctgaattatcttcagccaactgaacaatccataagtgtttattcgttaaaagctcactatgtacctagcactgtaaatagaaaaatagcaacatctctatatcaaaatacgtaggagtggaaattacttagtggagatatgttgatgtaatttctttaatttttaaaaacaaaactcttattccttggccaattaaatgcatttcctgcagtatctaaaa

SEQ ID NO: 95704 - DNA, 477 bp, Homo Sapiens
  misc_feature (182)..(278): n is a, c, g, or t
tacagctttaaggcatgaggagcttacagctttttaatataaattgttcccagaatccatgtcacagatccttatatggtgctgcttttttcctcttggttgctatgacaacagcagcactgcaccattcatcagctctggacctgggctgcactgctagccttccttgttactcctctggnnnnnnnnnnnnnnnnnnnnnnnnnnnnnnnnnnnnnnnnnnnnnnnnnnnnnnnnnnnnnnnnnnnnnnnnnnnnnnnnnnnnnnnnnnnnnnnnntgacagtatgagacccttaactcctgcaatatgatgtaatagttcagatcctgcgcttactagcagtgtgacgttgggcaagttgtataacttctctgtgcttcagtttcctcatcttgatatgcaaagacaccactaaaatccctggataataaacattttgtttttcaggaatccaaaaacaaagcacattaacttt

SEQ ID NO: 95705 - DNA, 551 bp, Homo Sapiens
acgctatctactgatgaaagaaaattcgggatggaactgctgagcactgctgaacacaaaagcctgccactgcagggccccttagcctgaagaacccaaatattacagtcacagtacgtcttcagggtgtttattacctaggtattataattcttgtgtgatggcagtcagagactgattataatcaggggagagagaagaacttcctggggacacagtgcttcactatagattccctgcctctaattctcaatacagaaatctttgcaagagtactttcatggatgtcaatgacaacaattaagcttgaagagcatgagaagacattttaatcagaagctaattaagaacaatgggggcatatgtatcactgattgtgtctcaagtactctgactgatctggaagattattccattaatatatggatgtaaacagacaccaacattttctcaggatgaggcaacttcactttgaaggttccacctccaaatctggcatttatttattagatgacaaataaaaatgagcaacattttcctgcctagggaag

SEQ ID NO: 95706 - DNA, 565 bp, Homo Sapiens
cttgacagattccttgcgaagctgagaggtgctgtatgtataacacctgatcctcctcagcagagggacctctgcaaaggcagactgacaccacttttcgaagcctcagcaaccgcatttaagcagttactggttttcactgttgcctgataagctcaatgccctccgggtgcaggaaagatctggaaagcaaaatatgaaatgcacccatgtactgcctgccgcggttagggtttctgactaaattagttcctgtggaagcagcaagcaatgcttccctctatgctggaagctgtctgtgatagtcaccataatcaatgagaaaagcccagggtttggggattgccccagaaaaccagccatccatccccaccaccctccaggatggggattcagaagcactcaggaaagtgcccaagatggcggcccatcaagaagtcagcaccaggccaaaggttttccccttgcgtggcctcgacggaatcctgaacagctagcagtcgggtgctgcctgatacatgaattgctgagcttaatgttcaaataaactagtaaaaatcctaaa

SEQ ID NO: 95707 - DNA, 579 bp, Homo Sapiens
ttaggctattcagcggtgggctgtgaatccccatttatttggaagaaccctattaaatttccccctttcatccttccccattaactaactaaagctttaaaggtggtggctgcggtccagggaaattcaggaaacaatggcattttcccagcctggccagtcctccgaggcccagtctgcttgagccccttgaactgctctgagatgccatgttctccagggccccctgggagtgggggatgctgacatcacaggcccaggcacaatagtactttaaatccagacccactgtgggcttggaattcctggccctggctgagaacttttgtctccaccttcaagatggtgctgagcatgagataatccataatcacaaaaccctgtgtgccccacagccttgcgtgtccattaatattgaccaggctcccctgggagtccaggccagctgctgacaaagaaagggggtaaaatcctttcactcccaacaagagtcatggtagtgggaagagctaggccaggggagggactggcacctggttccctctgtttctgacacacacagctcagcagacagtggtg

SEQ ID NO: 95708 - DNA, 571 bp, Homo Sapiens
cgttaaggtgggagcttctcttgtagctttgtatgttctaagcagaagcagaactgtaaatctgttttttcagaaaagttttggctctgaagtccttggtttattaaatcttatggggaagcttaatttaaattggtaaaaacatagagtcagctggagcctccctcttcccatggcttcccccaatacttgccttcttagaatactgaagaggttctgtagagcccaatttgaaaatcactggcttaagtcattcccgttgtattttctgattgtaaaatatataaactttatctccttgactagttgtttggcccaggcttgctcataccctgctttgtctttaatacaggtgcttatggaaactctgggtgctctgggggcccagtgccgatgggctgcctgcaacatctattccactctcaatgaagtggctgctgctctagcagaaagtggtaagagcttattctctgtgcctttggctaaagtaagtctatttggagacttactttatgtttcagcataaatctttaaagaaggttgacaataaaagaactatcttggaagaaaa

SEQ ID NO: 95709 - DNA, 471 bp, Homo Sapiens
gcagcatgagacttcttggcagaatttctcacttccaatatagaatattattattatcatcagcatttgttatgtaggaaggagctctgatggaaaatcttagtatcatgaaatgtcatcaaaattctccatttactctctgcttccccagttcagtttcttgttactagttatgtagttgctttagaaacaggatatgggctcagctcacttaagcaatgatgagctttatgattaaagctcgcagaaacggtgccaggtaaaattctgctccacagataaaacagccaacgtttagctggattagaagcagaacgtcctgctgtcaagagtaggattggcccttagcatgctgtgtagcttggcacccagaaggattcccaggacaaaaggaaaatctctaggtagatatatacagatattatctcaaacaccaaaaataacatttgtgaataaaaataatagaaaacc

SEQ ID NO: 95710 - DNA, 567 bp, Homo Sapiens
caaacaatggggaagcgtcttggcaaaagataaggagcaagaatgtgtttttgcactagaccttcttgttctttagatgatatcaacttctagcagaatgccaactaaagttgcaaagaaaacaaacagttctgcacatttcctgccatctaaggctgaccccccctctcccagttcttttttgcctgtttgtgattggagggcctactgtcctctcagactgaccaaagggttatgatttgcggtcatcgtcatcgtgagcagcacccaactactactcgagatacccaggcctagcttacaggaagcaggggacggagtcctgtattcaggcaccttggatgtgtgggttcccccagcagctgagcatcaccccagcctgctccttccaggtgacactaaggaagtgcaacccctcccagaagagcatgagcctggtgaagtcctcagtggaaccagaactgttcttctcgtcaagcagttatctatgttatctttcttggcccgattgtcttatggattagggagattaggggtaataaatgtctcgtttgagtgaccagctgg

SEQ ID NO: 95711 - DNA, 656 bp, Homo Sapiens
atatatgcatccatgtattcatgatcaaaattaagatatagaacatttccaccaactttgtttccttcccagtcaataattttccctccagttaatcactattctgacttacatcactgtgtctcacatttgcctattcttgaacttcatttaaatggaactataccttatgtctcatttgtgtctggcttctttaattcaacattatgttgacctgaaagttttaaagggtgaaattgttgaatatgtcacctgtctgcaaatagcaacttggtagaggactggcaaactgcctttcatccataaattcatccataaatccattatggaaaatctatccataaagataaatgaccatctttatgtggggttcttcaggaaaccttaagaaattcagcctagtaaaacctatttgtgtgcctggcaggctgctgagattcagtggtaaactgtcaggcaatatagttgtttttcaaaagaaatcaatctgactaaactaatgagagttctttcaaggaactaagtaaaagaaagcttctatttttttaacacatttttagaaaacttttctcaaaataaaaataactgttacagaatcaatacgtattactgtaagaaaaaattttcagaatatacttctgagtcctgagaggcat

SEQ ID NO: 95712 - DNA, 986 bp, Homo Sapiens
  misc_feature (494)..(541): n is a, c, g, or t
  misc_feature (642)..(650): n is a, c, g, or t
cccagttctgaacggaaaaaacaactttgctcattatccacgttccatatagctactgacgggataataagtgaccacagcggaatactacgccttctctgctgagaacacatggttgtaattcctttggcctgaaggagaatcactgaagccattttaaacattcttctgctgtttatagcctttgtctaagatgccatgactggtatcggccatgagtggcatatccaatccctctctaacatctgccgttatagttcccaaagaggattgagaagtctcaacataatctcacaggagaaatcttattgttcctccaaagaatattttgtattgaaagcaatgcctcatatttatgacattctagatgtttagagaaaggatttgactctgttggataacttcaatcaacgaggatagtctgggttaaagcaatcatgtttgccaactgaatctgggttgttttacagctcattccttaatatggccacagnnnnnnnnnnnnnnnnnnnnnnnnnnnnnnnnnnnnnnnnnnnnnnnntttgggacaggtgatgtagccacagtatcatgtgtattggtatgaacacaatgtaagacatgcccaaagaccttatgtatttactcatcattcggtgaaannnnnnnnnatcacagccctaactctgtgttaagtactatgctggcttctggggtacaagcatgagtggtaacagaccctaatgctgcctgtagtgcatccagcatagactgtcaggcagtgagatgcagcaggccccttgcaatagctgagatttggagctagggatgctgtgtcaatgtggatcaggcaatggtactttgaaaggtcatcattataattttattaagctgtgatgagagtgagaagataaatatagaaatgtgtttagtattggatacatattatctcacagaacaattatgaattgtgtttcttgtgtacattaaaatttggatatatgtgt

SEQ ID NO: 95713 - DNA, 740 bp, Homo Sapiens
  misc_feature (13)..(13): n is a, c, g, or t
  misc_feature (175)..(188): n is a, c, g, or t
  misc_feature (582)..(644): n is a, c, g, or t
taagttatcttcntctgtaaagtggttaggatcctgatagtctcaaaggtttgttttgaggtttcatgaagcagataaatattcttgtaaattgtagaatgttataccagtgttactcattattctaacaagagcagagtagtgaagagaggctccttcagaaattccttgggannnnnnnnnnnnnnggcttctgtttttttatatcacaaggtagtgtctctgaaaaatggtagatgatttcaatgtccacaaatatgcaggtgtagacattcaattgaggtactgtacccaaggcagccagcaaaatgctgaacatagaaaataactttgtaaacaaaatgcaatatttctagacagtgagttatcaccagtgtgctgcctatgaccctggccttaaggaaaaagtagcagagctgaagaagttctaaggatggaaattaaaaattattaaggagataatagacttcgtgttataggaaataaaaatagcaagggtcttcaatggtgagtgattttgagattaattacataactatgaattctgtaatattagaactaagctttacaaagcattccttnnnnnnnnnnnnnnnnnnnnnnnnnnnnnnnnnnnnnnnnnnnnnnnnnnnnnnnnnnnnnnnaagtgattaatgcttgggaatgtttcctccaatgttcatctagtcatggttttcacgaatcactcttgccaataaaaccgaaaatcaaagtaaaaa

SEQ ID NO: 95714 - DNA, 744 bp, Homo Sapiens
cttcattctttctcactgactgggactcagctggtaggtccgcagatcagtcctcctgggaatttagttgtgagtgaatgtgaaggggagccagcgggctttggacaggtcgtgcggcacagaaaccacagtccgtggcttctgagagaaaagggcctcgccgtcgacgtccggctcctcccaggtcgcgacgccccatgggcctttgtcgtcgtttctgggccaggacgacggaggaaggtggaccgtagaggggaggaatcacgtgaagatggggcgagtgctgggcgtgctgttggagagtgaaacatgagtggacatcaaagaacaagatccagatctagagaaagaagagatgatcaagactctaatcatccagtaggggctgtggttgcccaggagctgcccagtgatgaccagcttcaacaagaggaaccaccaattgaaagtcaggattatacacctggtcaagagagagacgagggagcactggacttccaagtgcctaggcctggcagcctatctctgggaactgactcggccaaagactgggggtgaacgtggagatggtcctaatgtcaagggagaatctctgccaaatctggagcctgttaaaataccagaagcaggtgaagggcaaccatcggtttaaatgaagacaagctgaaaaccatacatgcagtctttatgttggaaacttcaccagtaaaattctctcaataaagtttcacaactgtctgccaa

SEQ ID NO: 95715 - DNA, 618 bp, Homo Sapiens
cagaggagccagcagaagacagcaagcccttggtatagatagagaagccatggatgaaaagaagcaggccttaaagacagagcaaagtaacatagcattcctctctactatcatcctgtactggataggcccccacaaataatcctgtattttggtaaaccgatgcttgaggaagacatgctagagcaaaaactacaactctggtcctcttggatattttagataaggactttacccacataaagaaggtgttgccctggggactggctgagagaaattacagactgttactcacttcaaaagaaacggactgctacagtggtacttacgtcaccagaaagaaacacttccacaaagaatttgatttgatggcatcatgtggacatagaactctcatagtaatgacccaacctgtgtttccagtcatcctgatgaactctcaacaaaatcagattgttatactgttgttctcactttacaccgatattttctcttgctcctaaaaaaagtatctggtattaaatagaattctgtatcttaaaaaacttgccattgagaaaaatgagaagtaactgtacattttaatactaaggttttaataaaaaaagcagtgtaaaa

SEQ ID NO: 95716 - DNA, 475 bp, Homo Sapiens
  misc_feature (439)..(439): n is a, c, g, or t
atgttccaagttcatcttgttctttcctgtctctcacctttaagtcgccattttccaaggagccctcttctttcctttaggtattttggtactttcccaaatggcatttggaaaccacaatcaggttgttaggagtgcttcctgctcctggttggccatttttaagatatgtatgcattttaagccattctatagacattgctcaagtgccttcaggaagattatgcagctgtacatctacctacagtagaagagatcccaaagccacgctcatccaatcctggagaatcatttattttgaatatagaccattgaataggtgaaaaatggaaaagtcactttttgtacatttgcattccttcaataatgattaccatttgttcacatatttgttgaccattggaattgattttagcacagtgcctaaaatatagtaggngctcaataaatatttgttaattgaataaattacttg

SEQ ID NO: 95717 - DNA, 424 bp, Homo Sapiens
ttctccaagtccctactggacccaggaagtccagctggcttcacctctcactaccacatattattcttctcctttacttaatattacttgatgatcctcagttatgtgcaaggcattatattctcaggaaattcctttattcttgacctattccttttgctcccttttatgatatgccaagatacattgcctttataacatccatataggggctttgagaatctctatctggaagacggactacattatgtttaccaatgaatgttttggagagaaggaagaaaccatcttatttcaggagtgagtgggctcccctctgtgaataagcactgcttccaatgtgcacatacacagctaatgatccagcaggcaaaaataattttaataatttcattaacagtgggaataaaaaaattgctgaata

SEQ ID NO: 95718 - DNA, 297 bp, Homo Sapiens
cacctgcccgcggacaaggtcacagctttgcagggggttgacatgggctgtggcttcctggaaatgtcaccctcaccagagcctttaacatggatgtgaattttgagacatgaaggaggggctgcaccccatggacctgggttcctggagtctttgacggctttgtgtggtcgacttgttttgatactgaggacacccctgctggctgttaatttcagggcaagggatatgaggccattattttaagtgaaataactcaagaatggaaaataaaagactattatttttcacttataa

SEQ ID NO: 95719 - DNA, 707 bp, Homo Sapiens
tggatcaactccttcactttgcagatgaacaaactgaggctcaaaagatcaaaagattcacctaagttcactccattacactgagtccttgctcctgaaatggccctcttcctcacacagtacagcctcattcctcactatcttctgggcacatctgtgagctgcctgctgatgccatcggctctttgttccaggaagccatctaattcccatggtggggaaccacagccagctcccttacaggactctcgcagtggaatcagcatgatagtcagtctaaccctgttttcttaagatgtatccagctctctactttctccactttgaggttaacagtaagactttggatttagtcaatgagggtttggattcagttccctcacttactaggtgagagacctcaagcaagtcactaagcctctccaagcctcagtttccttgtatggaaaatgggtacaatactgcctacctctataaactagtgtgaggattaagatgatgtgtacagagccagcacagggctgggaaaagaataaacccctaataacccatagctaggaggataaggagaaggttaacgtcaacattagcagtactaccagaattttatcttctctaagacaggcaaaggaaattctcactggtccatctttgagttttgaacttcgtatcttttgcatttaataataaaatagaaaactgccaaa

SEQ ID NO: 95720 - DNA, 440 bp, Homo Sapiens
tgaagaaggacatgacacaggaagcccttgtagaactggaggaggaaatgaaacgctgccatatctggtcctggtgattgcaggagtagaggagagacacaggcaagatcaaaaggctgtcatctcagaaaagattgctaattgattgatcttcctgtctccagtttgcccttacaccaattcatctaccaaaagatgtctaaatttctctctctgaagaattgctgtgctaatgttggtcgcagtaaaactccaatggctcccaccacctaccaaggaaatttcaaagccctccatgacatagatcctttccaaaactttatgctgatgctgcagctcaactggaaaactcatttccttccctttccctttcttctgtatctccacatgtcaaggtcttggtgattattaaagcccaagaaaaagtaaatcttttaaaa

SEQ ID NO: 95721 - DNA, 381 bp, Homo Sapiens
acataacgggccttttattttgttcaatccacaacaaaaccttcttatgtacttttgatgaagcttgaaattaggtttgtaggtaccaaaagcagagcctcagaagagggtgaactgatgacagcaacttctactgagaagaaaacaccaaagctgagataacgctgacctcaaatgcaacactgtaggcaataaagaacaatggcattcgaacataaagctgtttccaaaatctacagttatgtatcggccgtacttgcatcttcagaactgttagagggaaatcaccaacacttgatgcctctaacctactcatacacgctaaatttcctttctcttaatcttaaggaataacagataaataaaaagagaaacagcaaa

SEQ ID NO: 95722 - DNA, 663 bp, Homo Sapiens
  misc_feature (377)..(387): n is a, c, g, or t
caaagggtactggaagatactgaaaaattcactactaatatcaaaataacatcccaaatacttggttgcttataaaggggcatttaaaatacagttacacgttccaccaggaaagatttttgccatgagttagaaatgatctaaggtgccatgaactgttttaacccagttagtacactggtactaactgaaactccaggaggtaaactttacaagtataacgtaattcaaaatgacttcagtctattttatacttgatgtaagtatagcttcccatagtgaaaatcacctttcttctcccctgctacatcctcatcacagagtgtaattcttatgctgaggttccaaacccccctccttgaacagtgacacagctnnnnnnnnnnngtctcctatcccaattatacctccttcctggcagcgaactctgaaataaaaccacaagattaatattctgatttctcctgcaatagtcaccaagaagctttgaaagggttagtggctgatttctgaaaaataacaagaaattgctaatgcctcgcccccaaaaatctatttccatttcaggagacaattctgcaattattttcattgttcatttgaatgtactgggaatttttaacttagagaaagagtgaaaataaattgttagttcattataaa

SEQ ID NO: 95723 - DNA, 486 bp, Homo Sapiens
  misc_feature (33)..(33): n is a, c, g, or t
  misc_feature (38)..(38): n is a, c, g, or t
gccacaagacagtggatccctgcacctgccccncaganagcatcctttatatagcaagctttttggtaaaaacatgtgcagctggtgatgtcttagactttcttgcaaaattcatgactgctggggaagttaggtagcatctttctgaggggttatcaatgctacaggccttgtgtgaagaccttggtatgcaggagtctaacatcggccaccacagtgattttgcttcgagatgacaccactcttgccaggcaacaggctcctttccttcagagacattgcagggacacctggtgacccttgaatgggggtctctgggaaggtgcactattcatgcaaccttttatctaagcttgaaattgtttcaagctaaattaacttacaaatgttgatcatagtaaggaaggagaccaccacttctcctactgccctcctctccccctgtcttgcctagtttataagacaggagaaatgggagaaaacaaa

SEQ ID NO: 95724 - DNA, 321 bp, Homo Sapiens
ccgaaacctcaggaataactggaaattttaagaagttactatctctgctatggggatggatagtcagacagcaatgttcacaaattactcttgaaacttgatgcaaacaacctgtttaaaaactgatgtaacgagaggaatttcatggatgcaaatgaacacctgtgaaaattcttcggcaagaactgtttcatttagcaacaccaggttagcagtttgagagaggatcttttttgggtctacatgcccaaatttacagactgttttgctacttgaatctgccataatgtttgttgaataaataatctctatctttgaaaa

SEQ ID NO: 95725 - DNA, 749 bp, Homo Sapiens
tgacttggacctagatcctagggagaacatctggactccagtttcctatttccaaccctgactcggagttagaggctaaatgggtttgagaacccaatcagcttaaaaaaggcaattcgaatatagataaaatagcaagcttatgctttacaggcgttctaaggactgagagagattgatgagcaatgcagattcacccaggttcagacacctcacattcaactagatcacatttcttataattgtgatgttagaaagtctggtcattctgttttgaaattcgttgtacaaaaggaagattcagggaataaagaaggcatgtgaaagtattacaaaggagaggtaataggaatataatttcttggcttgaaatgaattctggtgctagaccttggatatgcagagtgatggacagaatttcctaagaaataaataatcccctagcaagtcttgttctaaaattacactgatataaaaataacctgattagaataatgaaagtgtgaattaggttcacacattggtgcctttgctgggacaaaaaagagactttcctgagggttgtcttgttccagtttctcagccactcaccatgtgatacctctgacttgtcctcttggatcatttcctacctcttgcctttggcagtgttaatctggtgattttcaaagtaaagaaatgaacagctgatgacagaagaaatttggaaataaattgagggtgactcatcctcaagattaaaaacaaaa

SEQ ID NO: 95726 - DNA, 633 bp, Homo Sapiens
  misc_feature (14)..(14): n is a, c, g, or t
agagcggacccagnaccggtgggtgctatttgctccagactccccagcgcctatgcggctgaaccctaaggattcccacgcggctccagagggacgtttccaaacacacgcccaagtcctccagaaggtgacttgaagataaaagtcctaaatgaatgcagagcagtttcaacacatgagttcacatacatgctcccaactgtttctaaatgttaggggaaatcccaacctttgtctttgaaaaacaccagagtgtcttgtttgtgattttaaaacactcaaagacaaattgccagtttgccgtgtgtatttcaaatctactttccgtttatttaatttcttggcttctttaacttgaagcttcccaccagggctccaaacctctttcttactatcgaacagtgtgactacccaggctgctgaaggcaccgcttgtcatctatctagaaattaccttctctgcatgttgcctggaactgtggagggttcaccattataaattatagttcaaattacaaaacagggcccctattgatgatttcaggttctaagtgtgtaattatggtgcttttgctaatgacataatgaagagaggtgattatgtcattaaaatgtgatgttttttatatcccg

SEQ ID NO: 95727 - DNA, 547 bp, Homo Sapiens
  misc_feature (476)..(476): n is a, c, g, or t
gatgtccaagacatcactaaaatatttaagtttaaagataatatgtggtgttaatagattgtggtgcttttactatttaaagacaactttcatacttcagatgtttttgagaagaggggaatgtgaggggagggggcagaacagggaggagttgtttgaatgaattacattctttatatccatcctgctcatttggggcatgtctttaagagaaggctgaaagttgtgagagtatattgtataccgtaagagaatcaactcttcatcatggatgggattgtgaaggctgaactataaaattcagcattgacagcatcctcaattaataattcttggtgacagaataatacagctgggctgttttttaaaatataaacaataccatttttaattattacattaaaaattgtaaatatatctatgtgccatggcctgggaagcctgctttcttttttcataaaaattatttttactgnatgaaaagatcatggggtttagctcaaaatatctgtggtcctgataaaattggattggtaactctacctca

SEQ ID NO: 95728 - DNA, 525 bp, Homo Sapiens
gagctttcagagaagagctatagtttgtgcactaatgcaacatgggtttagcaattcaatgtgttaattttttaaacacaacataaccagaccaattagattctctgaagctggcaggaaggattcataaacacctgctgtgagctgggtgctttctttcccctcccctccttgcaacctggatctgaggctgttgtaaacagcacagccctaaaatgggaatgtagatggggaagttctctgaagtacagccatgtgctggctgctttagcaagcatggaaataaaagcagaggtcccagaagagcccttcatccaccatctcagtcacaggaagaagctgctcaggagatcctcacttctaaaaacttcgttcattccgcatttgataggcacagactcaccagcaggtaccaagccaagttctggagttggaaaggaacagctaccctccagggcttcaggagccaggaggagaaatggtcaatgaatacataaataaatgactaaaatcactgactaaaaa

SEQ ID NO: 95729 - DNA, 831 bp, Homo Sapiens
ttaataagaggcacagagaggtgatgtgacttattcaaggtcataggggtggtcagtaagcctgtcttctctccttccactgtgggcacccccagcactgtctcccttttgcacatttcaaaatagggccataccttccccagcagatgggttgaaccagaaagtaaagttaatcctctaaaactctgggaactagcatgatgaacactggcacgcagtggctgctgactgagagaccagtgttgtttctatgatcaattgtggtaatggactatatcttgggcctcctgtcagaatgacaaatctgagccagaaagagttaaatgaaatgggggtgtgaccaaattactttaagtcatgttcccaagttttcctgtacatttgttattccgaatgtcctgtgtaaccgacaggatgcctttgacttttttatgttgtacatttgttacagtcatagccttctgttaaataagaacagggctgcttacggatcgagccagcagttttcccagagaaagctgatagtaggcatatgctgaaaataataaagcaatttcattcatattggaagaaagagtagcaaaggtgctcagtagtgtacagtatttctctttggtttcccgtggttctgcacgaggaaaatggctgcatgtgataaaacgaatagagtattccttcagaaactagccatgaaaggaagcagacaggggaatgatttaagttaaagtcatgttcggcagtcgaagcagagatacaagagctatcctacagccccagagccatgctccaggaggatgctgacaccaaaataaagtgagttgtgaaaagaaa

SEQ ID NO: 95730 - DNA, 397 bp, Homo Sapiens
tttaatataatgtttgatatatacaaataagtcacatatatgaaaatcacaaagcacagtagaactaaatcaacactcatgaatccatgatacaaatcagagcactgccaacacactgaaccacctatgtggtcctttccctatcttaagtccctgcttcacccaaagtaaaccactctcctaaattgtgtgtttatactttgttttaaaaactttctttagtttttgtcacataaatatgcatctttaaatgatatattgtttaatgttgttggctttctctccaactttcaattttaaaaattttcaatcttatagcaaagctgacagaattaaacgaacgcccaaaaccttttaccaaccattaacatttcctgtaccagctttacctttctcc

SEQ ID NO: 95731 - DNA, 471 bp, Homo Sapiens
tggaaaatagcctcaaggatgagatgatgaggattttgaagatggcgcctaccttcggggtgtggaggtagagacaggagagaagctcaggatgctgctcagaacaacccatggctcagacttcccacctgcaagatgagcagacgggcagaagggtcctctccttgtctgccacccgcatggcgtgctgtgaggagcctgtgagaacctgcccatcaccatgagaagtgcaacaccaacctcaggtggaaggtcttaagagaaaacactgaggtccctcgaagatgaagaaatcctcatgaagatgaatccaaaggtggattcaatttcagctgtctttggactgaagactgcaacatcaacacttcccagggtctccagcctgcccgcctctcccgcaaatttcagatttgcaagtatccacagtcatgagcaattccttaaagtaaatatttctctgtttctttctgg

SEQ ID NO: 95732 - DNA, 529 bp, Homo Sapiens
ctggaaaaaatgaggcgagaagagacggatttgcaaaagcagaaagaaaatgagatagcagtaacaactggcaaccatatgttcatctgatgtatttgcaaatatttaagttctaggcttcctcaggaaatctggaaagtattggcactgattaggaaagccttttttattataatacatccatcactgtatgggaaagcaggaaaggatctgccaatgaaacgaaatagttttctggaaataaataacatctacagacaattgaaactattgactatagaatgacgcagttgtttcaagattccataggtaatctggaatggaggcatggaggtggaagttctggactcttcttctcaatgtctagctaacctggtcagaggcttgccagaaggggccccgataaaaggaagctacacccaagatatgagacaagaatatgggacagttagctttgatctctgaatgtgttgtgtattggtttcagtgcccatctcatagaaataaaatactgctttattctgcaaaa

SEQ ID NO: 95733 - DNA, 346 bp, Homo Sapiens
catgtacagaaattataaacaaatattcatccattatgctgctgaaatttaacagctgaagtactaacagtagctgaacttcaagccttgagtatcaattatttatgaacctaaaactgacaggactgtgtaggtgaattagctgcatatgtcaagctttgttataaatcccaacctactgtaaaactcattttcatagaatgtaggtacaaggctgacaatatatcaacagcacggcattaataatttagaagaatgagactgtcagggaacaccttgcaaactgtgctctgctccatagttgatattacaaataaaaaagtcaaataaaatgaatttcccataa

SEQ ID NO: 95734 - DNA, 672 bp, Homo Sapiens
  misc_feature (348)..(348): n is a, c, g, or t
attgttaacccaattaactaccatgtttcaaggggtgcaaatgttttaaagtacaatttgaaaacacaatatgcaaactctatcaaggaaaatatgaaatcctctaccaattacaatgtgacagtgtgcagcaaatgtttctgtgtaaatgttaaaattcagctctgcatcctacattactaagagtgggaggtaggggtagcagaaaatctggtggagtggtgtttggtttttgaaaagaacagtaagaattatcattggttcaaaaattgcttcttttattgttttgttcattattatttagaaggaatttggaatctgattgagcaaaataaaggacaggcagcntttccatttaaggctatggataatatccccccctgtgaatgaaaatgtattcctgcatacagatttgtcaggatggtgtttacctcagtatcatacaaagcacttctacaatgtgggtcaataaacatgtgcagaacacttagcttgacagattttatgtaaatccagaaagaaacactggatgtcttatttcactaaaaggaaattaaagcaactgttttatatgcccaaaacttgtgtgtaattgatagactcccaatacaaatattttcacttggaatcaatgtaaaattatgcaaaattgcaataaaaactttaaatgaa

SEQ ID NO: 95735 - DNA, 740 bp, Homo Sapiens
cagaacctttctgggctacttggagcatcacgaatagtctttcctgtacttaccagatttcaagtattcataacttgactccctaagtgtacaagttgggaatagtacagggccaagttcaagtcgcatatgctgtactgttcctcctgcaaatgtggggaaagaagagggagatactagaggaactgaggctccacccattcattcagttgctctaagcaccagaggacttgtttcagaaaaggggagtgggaacgccctcgactttgccctcctccggagcatctctgggacgcagggagtctggctagcgttaataggaaaggttgctcggcagagctgccctggagtactgacttgtctctccctcctttgtcaaggtccatgtttttctggctcttcctgcacactcatccctagattatgagcgttaatgtacgaaatgtgcagagcaaattgaggccaactgtggcatcaatactgcaacttaaacttgacaatcatggtttgctggtcctcaaacaggcactgaaatctcagtatgggtatacgatttaataatcggcccctcccttctatttgtcggttttatgtttctatccttcaatagctgcactgttttctaatgtgctgtagagtttttgaaataatttatgcaagtatttggtttccatgtttacaatttatacagctttcctagcattttaaatggaaatgtcaattaatgctatgaattggtg

SEQ ID NO: 95736 - DNA, 541 bp, Homo Sapiens
cttgaaccatggactgcagaatgaatgttgtgttagcaggcatgaaaacaatattaatctctttgaacatctccatcgaacttcttgggtgaccaggtgcattgccaataagcagtaatattttgagaggaatcttcatttctgggcatcgagtcccaatagtgggcttaaaatactcagcaaaccatgctgactatagaaaagtgacttgaaacagacatatgaaaatcacttgcacattgtgattacttacttcctcttgatgctcttggagccctacaactctgtgaagaagcccaagcaagcctgctggataacaaagggcatatggtccagatggctttgttgccctgatcaacagccaactagacactagacacatggaaaagacttcctggattatccaaccaccagccaacctaaaagcagactaaggatgcttgaaagagctccacagagattagctgagctcatgcagataagaactgcctagctgacccaaatcatagactaaataaagtgttgttgtttgaggccaaaa

SEQ ID NO: 95737 - DNA, 461 bp, Homo Sapiens
  misc_feature (107)..(120): n is a, c, g, or t
  misc_feature (252)..(275): n is a, c, g, or t
ttttctgcaaatacttgtttaattaccagtcgttctcaagaaatatttgtttcatgactcacaggaaaaaatgaggcaaagatgaggggaaaatttcacaatattgnnnnnnnnnnnnnncaactagatactcccttgcagataaggcagggtacctccttaagtcatgttcgtgtcctctaatactagtacagtttctgccaaagagtagttttaaaatgtgcacttgttggaaaagtagtctttgagtannnnnnnnnnnnnnnnnnnnnnnncacgcgcattggatgtgtttgtcttatatatatatttcccataggcaataataatgacaaatgcaaggatttatggagtggtgtactgataaatgtttaacaaccaagtctttgtaaaaagtagggtctgaggagagaatgttgctgttttatagggttttaaaacaaatttgcttcatatatgag

SEQ ID NO: 95738 - DNA, 549 bp, Homo Sapiens
  misc_feature (380)..(501): n is a, c, g, or t
caagcaaccccaggctcctctcctcaccagtgaaccccacctccacctttcctgccctctccccacactactttttttatagcacaattagctctggggttctcttccttacccgtgatatataaggctgtgatctagcataggaaaggccatcaccctgaccctgaacaagacttcgttctcagcaaaccaaaaacctgcaacctacctaggtatattttccttagaaggcatggaggaaattgtaaattttcttgtgattatggtagtatcattatataatttcagatctgaatttttgctatatatgagaaaaatgacttgatttttaaatcattgtacattacatagatgtcaaattacaatataaaatgattttnnnnnnnnnnnnnnnnnnnnnnnnnnnnnnnnnnnnnnnnnnnnnnnnnnnnnnnnnnnnnnnnnnnnnnnnnnnnnnnnnnnnnnnnnnnnnnnnnnnnnnnnnnnnnnnnnnnnnnnnnnttttaaattatgtacccagaaggaaaatattaatttgaagtcatattt

SEQ ID NO: 95739 - DNA, 577 bp, Homo Sapiens
  misc_feature (446)..(475): n is a, c, g, or t
ctccacattttgacggctttccctggttctgtgaattccttccaagttgctgccatctttccactaataagctgcccaatacactgtaccggtcacctccctggagcctctcacagcctcctggatgatcttcagcctctattctggaaaaaccaaggcttacacaccacccactacaatgctctttcagccctgtgctctccaggtggccttggctgttacatcttgtcgttcatcacccctaccacctttgcaagattaagattgttaataaagatgttaacacgttctctaggcctcactccaacctcgccatagctggcccgctatctggggccctctgctcaagaaaagaaactgcattttatcataagttctgttgtttaccgtctcctgatggcctggagcttttggctgtcttgcttaaatgtgactcaaagcagttnnnnnnnnnnnnnnnnnnnnnnnnnnnnnncaacaacggaaagaagaaaagggcaacctcagcctgatgaaagacttggaagagtgagacctctccctctccggaataaattgctagttgcctttcaaaaaa

SEQ ID NO: 95740 - DNA, 735 bp, Homo Sapiens
cgtggagctatctaaaagcagccggccatggtcattcacctatagttaccctttgctccagaaacttcgctgcagcttcccctgtgtttattttaaaccttaaatttgactgagcaagatgatgagaaaaatagcattgagtctaaccagggcttcataaatgtgttgccacggcttatctcactacatgaaccactgctgtgggatttggggtctggttagggaagattaaagcggtgggtggtgcagcattctttgcttaaaacctaaaatacaactccttctgcattaaatacacagaggtatttcaaagccaagtatgtgtgtaattaaagtaagaaagtgccagctttctgtgtgcacctcaagcttcagacagccacatgtgctctttgtcaagccttgggagggccaacaaatacactgagctgccaggaagatgtgaaaagaagcattagatgctggagttccagttgaatcctttggcagtgaacagccctgcaggctcatgcccgcacaaacttggttatgcatctccttccttttattcacagacacagagtgaagatacagctcctggtaatttcagcacaaggctctcaattcttaactggggcagcagggagctggcatccgcataagctggatatggcttacttgagtgaatggatcgcgtgcccggtattgacatcccagattctttagggttgtacctaaataaaaagatggaaaaaa

SEQ ID NO: 95741 - DNA, 363 bp, Homo Sapiens
ctgatgtctccatgtcttacaagcagaagcactgactgctgtttgtcctggactatcttttaaggcatatttacatagagatagtgtcttcacgggagcaaagagcacacatgcttactgcccagataatgtttctctgagagcaaaaagcagaaatgcttcctgctcattactaaagattcatgtttcttaagctcagtgtctctttcctgtggactacaacccactaaatgtgcatgtatcatctgtccctcctagtgtctccttatagaaatggggacctgggaacaggtgcaaaatatatgctgatacactggctactggaattagcttaaagtaataaactcccctttttctgtgaaa

SEQ ID NO: 95742 - DNA, 382 bp, Homo Sapiens
tgaaaccatcattttctaaagtagatatgtggtattgattataatggaagcctgctcaatgctgtgttatttctgctcccccttgccaaagctctgctgttcctttgcctggtgtgcctcaccttacttagctgaaggaacctggaaagttcctgacagtttaggattttaagactatgttaaagtcagaagattttccacaaagtagtgctcaagcggactatactcaactatacattatactacaggattcacttatttatgaattcaccagcagtcaggagatttaagttccaacggggcagactttctctatcttgttttcccctgaatccctagtgcttacatatattgagtactaaataaacctacttgccaactg

SEQ ID NO: 95743 - DNA, 333 bp, Homo Sapiens
ctgctagtggtcaccagaaatcttttcttctcctcttccctagtagtggaattttagctaggcatatggatattcagttttagcctccacttcccagcctactttgcaaccagttatggtcatgtgattagttctcatcaatggaaatggaagagcttgatctaatttcagccagttaaaatagcaccatagggattgaagaagcaacaagatggaagaaacaatgtcctcaaatgactaactgaagataggagagctgccccaccaacctggactactcactactagactgttacttgacagagaaataaatcggtatattatttaagtccc

SEQ ID NO: 95744 - DNA, 705 bp, Homo Sapiens
  misc_feature (38)..(38): n is a, c, g, or t
ccagaaacaagccctctccttttctggatcctcttttnactggctgccagcaacagcagtgaccttctggggcgggtcctgcctggctggggttcctctttctcgctcctgggtcgagcccccactcccaggctgcgcctccctcttttctggagaggtatggtgggttcccctttttctcctgccctggaaagggccagcccacctgagggcagggtcggaagccgcctgccaggaggagccccagggaagagggcagctccaggtactcaacagctccccagaccagaaacaaacatgctacaatcagggagtttggcaaatccagccagagcctctgagcccaggtgccaggcccgcctgggaccccagccttctggggaaggggtagtttcaggctgaagcaccccctctctgctctcctgctcagcgtctgggttaaaggcactgcctgaccctaacaggccccgcccctagttgggggagtcagctgctgcctttaggggttgggggacagaaaacagggaccaattaacaaagggagcgatttggggggctattacccccattctaggttgccaaataaaatacaaaataatatgccagttaaattggaattacaaataaacaaatactttttgggtataagtatgttccaacttctgcttgagacattattttaaaattgtttatctgaaattcaaa

SEQ ID NO: 95745 - DNA, 449 bp, Homo Sapiens
agggtgcctgggcccctggagactgcatggagcagaacaactcttcctcatcccccctttctgctgatcccatgtggtctgtgatgtgagcaagaaaaagacctttgctgtattaagccactgaggctggcggctggggaaatgcctgaggaggtgccactcctgcggggctgttttgaaggggctggaagtcttttctgtcaccacctttacctacctgtcatctgtgaacgtgactggagatgccaaggctttcctcgacttctgccactgcccatggttcatggccctctcaccctgctcctcttaaaggccatgtgagcacagtgagaaggtggccatctgtaagccaggaagagagctctcatcagaacctgaccatgctgacactctgatcttgacctttcagcctccagaactgtgagaaataaatgtttgtggtttaaaaa

SEQ ID NO: 95746 - DNA, 705 bp, Homo Sapiens
tcattgtcatagaacataaagttatgttattggtaagggatttttgggtgatcagctctttctttggaccttaactaagcagacacagccttgtggatggaattcctatctagtcctcattgaacctgagatgcccgcctggcaagttgatgaaaatgtacatacttgctccctcacctcattcttggctttgaagaaactagccctgttcagcactgtgccagtttccccatctgcagaatggctggctccatgctcccttaacatacctcccagtctcaacctcaaggcatcgtggtttgtttgtgtgaactgcgcttaatggccctgtcagcaaggaggtgatgatcaggacaggattcacttcagagagaagagctggtgctcccatgaaggaccaaatgctatgtgtggagagggccacaagaggaggacccaagagggacctctacaagctgagagttgagagtggtcccctgccaacagaaagtgagaaaacaggggccttgctaatatggtcacaagaaaatgaattcttccaacatccagagggagcttggaagttgatctttctctagtcaagcctccatatgaggacacacctggccaacaccttgatttcagacttgtgggatcccaagcagagaacccagatgtgcctagacttctgacttagagaattgtgagctaataaacaggtgctgt

SEQ ID NO: 95747 - DNA, 469 bp, Homo Sapiens
gagaaccaaggttagcactgggcattggcatttgcaaaaaaactctaagcattaagcaaaacttgtaggagtggaagatacagcgttctggacctccagtcctaatacccagccacaccccagcagctatgcatggttccatgggagagcaggcatagcccatcctgctggcatatagtccagccatatcttccaatgcccacctggagactaagccgagttctgcccagcaacaggagctcagagctccagagagcctctcctggggtgcagactcaggagatcttagctcaggagcagacttagcctgacttcctcttttataggaggagacagacttagttacagaggaaaccagagttgttataaatagcaaggaagggagaaaactgctatggattacaaacacgccatcaatcttaaaacaaactatttttagtttcaaataataacgagagtctaattaaaa

SEQ ID NO: 95748 - DNA, 514 bp, Homo Sapiens
  misc_feature (11)..(11): n is a, c, g, or t
tacaattcagnatttgcagtccttcattgggcttctacaccactctctgcatagaactgagtaaatgtttgctgatttgaacatttttagggctaaacaatcattttgttttcaaaaattttattttggaaaaaagttctcctacataactaatatcacatagctttattaattttgaatttaacccagattgttgtccaatatacttttttttcacaggtgttactaagtttctgttctatcacagccagtcttaagtaaggaaattagatttatttaataattaaacctctatgacaatggcccagggccaactgaattcagcacagcaacttagaataagattctactggactttctatacttttcagccacaactgagcacaccgttgttctatgatagcattattgtcattaatgaaatgtataaatggaatgcaactaaatagtgcctggttaaatagttcctggggcttggtaacaaaacaaataaatacccaaccatactctgaaa

SEQ ID NO: 95749 - DNA, 425 bp, Homo Sapiens
tttccggcagtcgacacgctcttcgcttctcggggcttgtctccgtgtcctccgtctcagttgtttctccctctctatcctcctctgtctcagtctccccagccttggggccggtgcctcttccgggcttcggcgaatgagacctgcggacctgcccccgcgccccatggaagaatccccggcgtccagctctgccccgacagagacggaggagccggggtccagtgcagcacctgatttgtgtgaaacgttttgggtggcaatgccagaatcaccatctatattacttctgtcatcaacacgatcagcataattacaaaaattaatggctctaattgttatagtgataataaagcataaatgaaattgtgaggacatcaaaatttataattaaagacacctattaaaacagcagtttaaaattt

SEQ ID NO: 95750 - DNA, 686 bp, Homo Sapiens
  misc_feature (98)..(98): n is a, c, g, or t
  misc_feature (186)..(186): n is a, c, g, or t
  misc_feature (245)..(245): n is a, c, g, or t
tcctaatgcttgcactacattatggaagggctgcttgatgcagcataaaaagtgtgagtttatctttcagaccacagtttttcaacagtggaactatngatatcttggataggataatcctgtgctgtgagaggctgtcctgtcattgtaagatgtttagctggatccttggcctctacccataanatgctggtatcatccctcttagttgtgacaaacaaaaatatctccaggcattgctaagngtctccttatggggacaaaattgcccacaggagaaccattggtctccaggacatggacttctggttctgttggacttttgatgagcatttcttcatctgtaaatgaaagataacaacacataaagtttcatttctgctctcccttttgtaggctagtttcagaagccaagttcaattttttagaatgtttttaagtgaaaaaaatatatgtattttctacatacaaggaaattggcagagggaaggatttaacatgtagaaaacacatttttaccttgtgaccaggttgtgactgtagggagaattgcccagccaacacatgcaacagagttctcattcatgggctaaagtaaaaatctatttaagaaattgtcatttgggtgtttaatcagctaaccttagctgcagtatgttaaaataaaataatgcttggaccagaaa

SEQ ID NO: 95751 - DNA, 676 bp, Homo Sapiens
caaatgaatatgctacaatttacttattctagtgttgatggatagttaagtattccagttttaggccattatgaattagagccattatgaacattattggatatatcacttagtaaacaaatgtacatgtagtgttgcagtgttttgtgcatacacgtaggttgggtatatcccaagaggtaggatttctgggtcataggttatgcctttgtctttagatattgccaaatgtgtttctatactggttgccacatttatgtcgcccccaaagtgatgtttcagttctctgcattcttaccaaagtataggtcatccattttcagtgatggcatcttaaaaaatgtttgcctgtaataacaatgtcatcatgccttttatttatgcagttgagtcttttaatctttaggacctgtttttccaggaatagtgtgggtaacagtgagccattcacactctgtctgtttctcctcatgatgaatactatgtaactgtgaattaagtgactaaaataagaaacgatctgatatgcagaaatagagttttccctgtttgatccatatgcagcttaaatatgtgatgttattctacattttatccagattcatttttcaaaccaatagtaatcattgttagcaaaaaccaataaataatcttttattctgttttaaaatttaaa

SEQ ID NO: 95752 - DNA, 457 bp, Homo Sapiens
tgaaatgttcagttatgagtcagacaccccactgggatcactgagactcagtcctgagacttatcggcacaagctcctctctgtcttctaaactcgaagctgaaaatgatgtggacccagtgttgctgcggtcaccacacacagagaggctgcctgagaacgagatctgagatgagagagaagagtaccaaatactgacggcacactgggatagcgccagggactggtccatgatacaagggagtaagttccactttttatgtaagccaatttgaggtgggttttttatcatctgaaaacctttcattatgatttcagtggactctgaaatcatgacgcctgagtttaaattgtggccccatgcttattaacagtggcactttgagtagattacttaatatctcaatgactcagcttcctcatctaataaatggataataatagtgccaacttcaaa

SEQ ID NO: 95753 - DNA, 772 bp, Homo Sapiens
tttgtctgtaggccaatttgaccacacatttattttgtttggctaatatggtggtttttgagaactaaatcggttgccaactgttgaacatcaggagatgtcatgtaaaaagcagcacttccaacttctcttgaaaggtatgaaggtctagcaacatttggtcgtcattcccccagggctggagctgggcagcagctacttcctctgaagggtgcagacaaagctcactgcagtccccaccaggccctgttgcctggggttcaccctgcttcgttaatttcatgccctgcccagtcactgtggacatctgggtgcatagtctgtgtgtcctgtgggtgctggttatggcaggggcaaaaggggtaaagtggagagagaagaaagctgggaaaggtgggcttaagtggctctctcttgctcttgtctgtcttgggtcgtgcaagataaagatgtactgagggcagagatgtggcggtgagcttctggcacgggcatctgtggttctgactgcccagcacggcaattcttctggaaattctcacttctcctgtgtgactacagagagtgctgccaggttccagatgatcctgctcctgtggccaaggcacacgggtccaaagagtgaccactggtccatactagtgatagagttttagaacttccaggagtggctgatgttgttggaagaaaggctcatgaagatttgaccgcattttctgtcatgtgggttgggaagcagaggcagttccgttgctctgacgctcccagaagc

SEQ ID NO: 95754 - DNA, 739 bp, Homo Sapiens
  misc_feature (289)..(320): n is a, c, g, or t
actgtggactctggatgataatgatatgtcaatctgtgcttttcctgcagggactgaacaagggcagtgtgtgcacatgtgggagtgccagaagcaccagcgcaatccagatgtgcccaggcccatctgtgcgtgaaaatgcagacacaccacactatttatcaattagtgtctgctgctgccagtgtcaccagttctctgcctgatgaatgatgctaggctggacaagccacaccccaagatatcccgctgcactcagatacaagactgaagaagcaagaacgttacnnnnnnnnnnnnnnnnnnnnnnnnnnnnnnnncaactaagcccagagatggatcccaaaactgaagaattggtttaattaaattgaaagctctggtgcttgtggtaattgctatgaaggaatccatatcccatcagaaccctctcccctggagtttgctccctctactttctctgcagcagcctgctagccagagtcaaagactgtgtgcatttgaaatctccaaccttttaaaacattactgtgaagttgaaagttcctggtgtcttttgattaaacatcgtgctagcaacaataatattgaccacgtttgagacagaagagccacaagagggaattagcctaaattcctaagcgcccacctggaaaggatcctccttggaagatctgtcagatccatagtaaactttgaatgaaagagaaataaaatgttatgtgttaaagttaaaaaa

SEQ ID NO: 95755 - DNA, 420 bp, Homo Sapiens
cctgcccttccaaggcccaagtggtctccaatgacctgcagaccttctcagaggtacctgtattaattgagctgcagtcatcctcctggcgggcaggcagccagcacggggcgtaccgccctgtggatacagttccttcaggctaccagaactatcgtcagatgtctatgcctacccatatcaactggaagtcccactgccctggaccaggcacccaggcagggcatgtggtttttgatgcccgtcagagacggttggcagtgggcaaggacaagtgtgaagctctgtctcctaggcgccttcatcaagaggcacccagcaactcggggaaaccagcaaggagtggggatatcagaatgtgatgagaaccttggacaaagaggggacaaaagtgcatcaggaataaaaaggcgagagaaa

SEQ ID NO: 95756 - DNA, 551 bp, Homo Sapiens
gtggggacacgaaagaaactaagagggccactgtttgtagcgagcacatttctaccccagccaggcctatctataagcaaataaagatgggatttcatgtcctcccatcagcttttctgcaccctcccttctaccttccagtggcacagtgcttaatgacagctgctgacaatacagtgtcacaggccttgcgccaaaattacccccaactccttccctcactcccaaatcacaactcttattatctaagtgagcaaccccagttgcaaaacacaaaggagtaataagtcctgtagaaattctcagctccaccccagcccctggttgccaatgaccctgtgaagaagctaaaactccttagctcggacattctgtcacagagagacctgcagcatgtgccagatgaacttgcatcaactgaaaaccaaggtcacctctggagaccagaaatggaagtgacagtcccaggcctattcataaagcttcagttttttacaaggagattgtaatcatgcaaaacttgcgtaattaaaaaaaataataaacagaaa

SEQ ID NO: 95757 - DNA, 626 bp, Homo Sapiens
tgttctcaatgccccagttctggggtttcctgccccactccacctttcctttcctgatcctcaagaaaactgacttcttttcctaagccccccgtctccactttgtgaggggcattctgagcatggaggctaatcaatatgttctcagtatccaatggaagcctaacgtgccacctcttccaagggcagtgcattttaactcagacccaacgccccaaccaaatgaaagatctctaatctggaattttcaacaatggggctggtgggtcagggtgcaccagatctcaggaggtttatccagaagactttcaagtgccccaagaggctgagtggtccgccaagtgcctgcatgtgtgcagtcaggaagcttgagtctgggttctgcctggggcaagtcactacaactcccagagcctcatttctgctattcgtaaaatggagaagacacctcctatgatatcaagtcactgacttgttcccaggtgctaaaaaatgaaattacattgcttagtcttgaaactgtgcaacctttcaactgctgatgaaaacaacctcagcaagatgaaaatttctccattttcctgaaactattctgcatcataaaattcattgcaggtggtaccttt

SEQ ID NO: 95758 - DNA, 460 bp, Homo Sapiens
gacgatgttccctagtctaatctgctctttccttccttcattcattaaatcaatcattcacgcagctggccagcagacactggatgaccacccctgggccaggccttgtggcaaatgctacagtaatgaccagacacatcacacccgccttctaaaagccctccctcacaaaccggatcaactgctatgataaagtgtccactaccattccttgagggcttacaatggcttctggttgggagaaagatgggaagaggaggacattcaagaagatcagagacgtctggggtgtgcagaagtatttttccttcttattttcctgtattcaataggtaacaccatggtgtgtggcttttctgggcagcctgcaaatgtcattgctagtgacaacatttttctgcaggaaaacatattccagcttttaatcatctttagaataaacccatttataagcagtaaa

SEQ ID NO: 95759 - DNA, 1470 bp, Homo Sapiens
  misc_feature (370)..(370): n is a, c, g, or t
  misc_feature (1281)..(1281): n is a, c, g, or t
  misc_feature (1353)..(1353): n is a, c, g, or t
aaaacaaccatcatttaattgcacttcaggattttgtggatcaagaattctggcagggctcagctgagtgattcttctgttccatgtgattgactggggtcacccactggtattcagctggtggctggtcttgtctggagagtccaagataatttcacctacatgactgttaattcgctaaagtcaagatcacacctattcagatcatcataaccatctagcagcttcagttgcaatatttcttctatctctcctgtggtccttaatatattcattgttgcttttcagtgatgggattctctctcatttagtggccctgcttaggctcagatgtccagaggtctctacgaatcacgtggaggaagatgantggagaagtcacgcccggctggcggctcgggtcgcctgtgggcgggacgcaaaggccgcgacttccgccttcctgcttccggtctggcggtgagtggggagtgggatccgatcccgtggggctatgtaggggaagttggtggctgcagctgccgtggttttctcctggtgtccagcagaaacggcggcggcgcaaggtgtggctgggccaacccaggatctcccaggaccctccgctctgcgcgacaaggggcccgcgcttgccaaggccgacgggcaggagtgaacgtggcctccgtgggtctgcagccccgataggccaattgtacagaatttaaaccgtctctcagatgtgtacagtagaactcaagaagacagactaccaagggtcatctgaagtcgtgattgggtcactaataacaccaggacaaagttaagggatcactactcaagcataagccccagttttcataagactgctgtgaagatgtttgatataaaggcttgggctgagtatgttgtggaatgggctgcaaaggacccctatggcttccttacaaccgttattttggcccttactccactgttcctagcaagtgctgtactgtcttggaaattggccaagatgattgaggccagggagaaggagcaaaagaagaagcaaaaacgccaagaaaacattgcaaaagctaaacgactaaaaaaggattgaaggactgaacaggcttttgcaaccagagggaaaatcatttggaaaattacacagcctttggaagaaatccactaaagtttcttcctttgagatttccttgacaggatgatttaggaaatggaaatctgaaccaaatggaaggaatcatgggtaggtctgaccgtcaatactaatagtaacttttatagcgtggggggganaagtttgataggggttctatttgaccggtgatttggaaagttaaccatgtactggggggaacaaatttcttntaataactggactttaactcatttgggccccgttgagcgagtgttgatataactgggaaatggaaagagcattccttggttggggggataaaaggggacctttttaaaatttatgga

SEQ ID NO: 95760 - DNA, 645 bp, Homo Sapiens
ggccagtccatgatggagaaggagggagggaaggattctctaggaggaaattgaagattttgctcctaaagaggaagcaacggataccaactcttaggcatgttgtgataacctccttgtctccatcccttccgcttgcaggtgaaggcagagtatgtgcatctcaaccacccgctcaccctcgtgaccagagagcgcgatttggccgtgaaggagaaacaccagctccaagccaagctggagaacctagaacaggtcctgaaggatgttaaacacagctgagctgtgcagtggcaggcacaccgctcctgaatggaaatggagtctgcctacgttaaagaccagaggtggctacagtgggtttcaaacttcaggaattttaagctgctcctcagacgtttaatgacctttgttataaagaggatagctaaaccagaaccttgctctatcagggggtacaggtaactggatgttcctcatgcattcctgatgagctgagctctccttcaatatttagccagtgggttgatttgctattgatgccactgagttaagctgaatgaattttttcaccaagtgttaaaatttgattggattatcattctggaaaacattttttacaaaaataagaaaatattcatctcc

SEQ ID NO: 95761 - DNA, 348 bp, Homo Sapiens
aactgttgcgccttgagttcttgttgtttcaagaagttccagaaagaagctcagcccagtggttgggtccagagatgactaaactggagatgaacttctggcaaactctcctcactaccatactaaaatccccacccaggaagtagtttatgtgccattttctatacatctgatgtatgtaaaagcatgataaatgtgcctgcactgcctttattccacctctaatacaatgactcagctaactagcccgggtgttcacctttgtttggggaggcactgcctttgggactatccctagtgtcctccttacttggtgcaagtaataaaatccccctgtgaaatcataaa

SEQ ID NO: 95762 - DNA, 535 bp, Homo Sapiens
cgtggcggttgagtcggggccgccagggggcgcccaggagccgccgccgagcccccagccctggaaacccaacctaggctcgcgggaccccagcatctctgggctgccctggctccactcgataacccagtcaccgggccaccgagtgtggaccccgcctcacttgaacgaccaagtctacaccgaccttatatccgccgcacacgcggaacttcccatccctattatctaaatccgcatccccatctcaccggacccgaccccccagctctgacacagaatcccccattcccacagcacattttacaaagaagtgcacaggtgggcctagcagaagattccaaagtctgaccaagcagttacagcaagccaaagaatctttgtcaccatcaatcatgaatctctcccatgatcatggccacatcgtcatacaacgggacaaccatggattggactctaaatgttctcattggttttactaaaatacctattttagcctcagctaaataaataacaaatatcataattttcaaaa

SEQ ID NO: 95763 - DNA, 437 bp, Homo Sapiens
cccaaccacaaccacaatccttacctcattctcaacccccagggctcctccaaccccattccctatcctctccctaatcccaaagccactcctacctgcctctctcttccccactctcaataccctgttcccaaacccattcattcccatccctgtcaccagtcccagctccacttctgcgcctcaaccctaacccaccctctttaccaacccctttctcctcattgcctgtgtacctcagcccatctttaatgtcctctgaatctacagccccaaagagctccatcctcaacctcagccacagccctgtgtccatccccacaaagaaccgcattggccccacatacccagacacctgtgactccccaccccactgcctgctcttcaggtagaaagccctggtttgaacaataaacgcatgactctccctgaaaaaa

SEQ ID NO: 95764 - DNA, 487 bp, Homo Sapiens
cttaaattatttatagaagacatgaacttacaaatctgttgtttcttctcccacccaaatagaataatatcttcaaagacagtctttttttaaaaaaggacatattgttccccttaggtagatactggcattttattgaaatatagttcaagagacatgcattcaggcaagatgagtgcacaccgtgctacctacttggaacccaaactcagaacagtagaattgaatcttccttggaagactcaggaggaagatcatctctctgtgcctcagggtcctcatgatgaacctattggtaattatactgtaaacatgagggtgtgcggattagtagcgatttcttatcactgaatcattagtgagcaaactatttattttgaggtggtgtcctcaatactaatatgattgtgcttcaatatagaacaaggaatatccctggatgttatagtccttctgaaaaagagtcattgattgcagatattgtttt

SEQ ID NO: 95765 - DNA, 390 bp, Homo Sapiens
  misc_feature (345)..(345): n is a, c, g, or t
gcggccgcagcacaatcagctctcaggcaggcccagagatgactgcagggacagggaggggctcagtctgcaactctctccagccagcctatcatgagagcccctgcgccacccaatctgaataccagttcttggtcgcgctttctcttctttggattggccattcccattctcctatcatgagagcccctggaccgcctgtctttagaagtctgggcctctacaaaaaccatccacattgcctacaattaggtccccttggactggcactgcccagacccctggaaagatgatggccaggtgtaggggaaacagccctgggcttggtgctgggctcctgggtgncactgtcttgcttcccttctctgggccatctgtaaaatgggaata

SEQ ID NO: 95766 - DNA, 347 bp, Homo Sapiens
ctgaaggattgtgttcctgttgaggagtctggacttgattctgaaggggtaggtacattaaaggattttattgaagagaggatcatgactggatttgtagtcatgctgaggaaatagtggtagttagaaatggatctgaataagagttatcagctttagggcctgacaagagttttaaacttgtctctctgtttcttccagaaacaaattgttcaaactctgttagcttccatttcaccatgagatagtagtaattctggtttgagaaagtagaaattctgacttgggtttattttgtaaggattttgtagatgttaattaaaaaaaatttattttagatggtaaaa

SEQ ID NO: 95767 - DNA, 706 bp, Homo Sapiens
  misc_feature (141)..(178): n is a, c, g, or t
cccgttgtgcatgtatcaaaattgctaatactattttaaatcatgttacacatatcattttcgctcattcataaatatcttactatgtgtctctaaaagataaagacgttttaacataaccacaataccaatgtcacaccnnnnnnnnnnnnnnnnnnnnnnnnnnnnnnnnnnnnnnggtagtaattccttactaccatcaaatacccttccagtgttcaaattttgaattgcctcataaaagatagattctccaccgttcttgagtacagaattcctgtttaatttgtcctgacaaccttcctctccccatagtagctgtcttgcacacaaaagatgctgtcatactacatttcactaataggtggcacgaataatcatgacatttgctaaatccagttggtatttacacaagaggaaacatcatttgcagaaagttggcaattataggtaaatatacaaacacagaaattgaaaatagcctgtttgctctatgtaacacgcataaaacctgaatacatcccaattctaagggataattattgatatcattcaaactttctattttgttttaaggagaacatggaaaacgtatttcttggtgttgacgtttatctctacaatgtcaacatttttagtgttaaataattgaggccagttatgtttatttattcttccgcttaataaaagaaaaagtaaatagaaa

SEQ ID NO: 95768 - DNA, 796 bp, Homo Sapiens
  misc_feature (235)..(247): n is a, c, g, or t
  misc_feature (465)..(508): n is a, c, g, or t
taaggggtgtgtggttggggtgaaggtttaggggaggagagctgaggggtaaggaaggtttgggataatgtgaggaggccagttccagactgtccctggcacacacccttcatgtaatctctgaaataaaagtgtgtgctgtttgtttgtaaaagcattagattaatttctaggggaattgaggagacctctgaggcatctctgaagcttctttaggtctaaatttcttgctagnnnnnnnnnnnnnattgtgtatatttttacatagtagaaatgactgtgaaactaactttttgaattaaagttttaacacagttactattttattataatgctaatagttttctagtagttacatattattcttttatatataatagttgtgacacaacttacctcactttcccctttgttgacctttattatgacattcaccaaaatttgaaaatgtatgtttctggttannnnnnnnnnnnnnnnnnnnnnnnnnnnnnnnnnnnnnnnnnnntttgacctatttattggccagttttaataactgctgtaagaattccctattgtatttggtagggaatggacaatgatctactgcctaatatctcgagggcttagtatttttctcagtgactttgtgggttctttgtactgtgagattattaacactttattgatatttgattcagcatttgctccagtttgtggtttgtatgttgattttgaaaattcttttccatgttaagaatttgaacatttttatataataaaatatgttgcaaaatttttattaatgatttac

SEQ ID NO: 95769 - DNA, 809 bp, Homo Sapiens
ttaaaaatcaatagccatatttaaggattttaacaaatagtatcatatatttaatagaagagtccatgcctcagggtgtattttctatatttgcttcttatttactgagatccagagtcagtaaatttatcgtttctccagatttggaacaaggaagagaatcagttgtgaaactgatcatggtatgtaaaattattaaactgcctcaactgaaactgacatacagctcaagttttatacttcacagcacctatgatccaaaagaaaaaggggactttccatgaaatcagattaaataaagacttcagccttggccctttcctcattctaaagttctgctatcagcttcataaatcacctaggtctaaaggaacaacagtgagcttctcttgatcgtcagctggatccaagaacaaggtactcaatttcatgttcagaaatccaaagagcccgaggaacacatttcacagacttctaccagcaaaggaagcttgcatatttactctgcgatttggcaatttgagtttatttctgtcacagtaagatgttacagggggaggagcaaactactagtgggttctccttttgaatctggaatgaatttactgatggttcatcatcttggccctgaaaaatactgttgtaacaatgaaactatatgtttttaaagtatttttaatggaaataacatagataaccataagaatatttttaaaaattaattttcatttttcttgcatacctttgcatttactttttatattcctagtagtggcaggagtattaataaagcaatgatgatttttaaa

SEQ ID NO: 95770 - DNA, 527 bp, Homo Sapiens
agaagattaatcctctttctttgtcctctgttagcgataaaagaagggaaaaagagaaagctgtcctggcaagaatttcatgggaggtaacatcattaataagaaagccaggctcacttatagaagagaggtagaaagagcatttgtgaaaaataaatcgaaaatataggaaagttttataaaaacaggggaaaataacagaataaccataggatctggtagcacaaaatggcaaaggctgcctctatgactcattagggttattcacaaatattctggtttacaaagcagatacaaacatggacttgcattagccaattgaacgtaatcaagtgacgtgtcatttccagtggtcgctttgcatgctatgcacagctcaccatgtctcttgacctaaggcaattctagaggcatgtgtcatatggagctttggtcatcagggtccctgagtgatgctgaagagcagaacccccttgccaacccaatatacacattttgcctgagtgaaaaataaacctttttaaaaa

SEQ ID NO: 95771 - DNA, 259 bp, Homo Sapiens
ctgaaatccagatcgggaacaccgagcaacacttagtgcataaatatgaatacacatggttcaaggaaaaataaaacttcatcatgttggaagtacacttggaaagctggttgttaaatatttgtaaatactgcaggatggcaggtcaaaaagataattaagaagaacctcagtagctggaagaacacacagaactttctagtcgtccttacctgaacaactatgggagaaataaactcctagactatttggatcaaaa

SEQ ID NO: 95772 - DNA, 535 bp, Homo Sapiens
ctctcttccatgcaggacccagccttagttatccaagatgttgagggcacctctcaccaaaataacaatccaagaaataaacccaggcatcactgccaagcccctccccaccccctcaacacaccatcctgctgcctgtgtctccagccttatgtggtctggcaaggttgggctacttccggcagccaccgtttgctccctaggatgcaatcttagcctccatggggctggcctgctggaatctgggaccacgtgagcctatgagcctcagggaggctgggatgccagggaggagccagcactcctggaggctctgtgatctgctctggccacattaaataaaggctttgatccctccaatggggagaagggagagctctcccttttcagcaccttctaatatccttcccccttgctgtgcccggccccactgtcacctcaccgaggaggagacaggatgtgtttccagcggggccttttttcttcccgatttagactgggagtgaatgaagctcattaaactgattgtggttgt

SEQ ID NO: 95773 - DNA, 509 bp, Homo Sapiens
agaaattataccaagggcagtaacatagtttcattactgagctaatgatatggccattggccttttcacatagaaatacagatagacccccattccatggaatccaatattcccagacattatcctcaatatgtgtcctccaaccacaacatattttttttataaggaagaatttgtaactgaagtgctgcccccatgcacacaatttcacctgtagtcctctaaagttgcttgaatattcttacagattccaggtgcctcagggatgaaatacagattgctgtccagggcaccagcgaatgctgcacccgttcttggcatatcatccttctcgtaaaaggcaatcatggcaggaaaactgagaccaatggctttttcattctccacctctcagctctccatagtaacggcactggttcttctcattgtgtattccttttcagatgcatactttctccctttaacaacttttttatatataatttaaaaaataaattattcccagaaaa

SEQ ID NO: 95774 - DNA, 554 bp, Homo Sapiens
tggcattaagatcaaaatggagatgaccaaggaaggtattaataccagcaaacatgaagatagttcaatggagaggatctggtctgaagagaagagagaaatatatttgaaaaagtgttggaaagaggctgaaaccaatgaggcaataccaaaagtgccaacttgtgcatagttggattcccagatggagggagtggaaagcgagaataagacagacaaaacataaataaataacataaacataaatgtaaaaacagcatagccaagtattcctccaaattattaaaagttgtatatttatatttcaagaatcccagcaaaactcacacagtgtaaatgtgaagaaatctatgcacaggcatatcatggtcatgcttatcaaaagcagaattaaacaaaatcttatatgtgtatagagagttacacatagaggaacaaatgggccaatattttcaaagtgttgacagaaaaatactaaagacttggaattccatactcagtgaaaattaatgtcctttaacaataaaagttaaataaaaacttcttcagacaaa

SEQ ID NO: 95775 - DNA, 441 bp, Homo Sapiens
ggcacgaggcaacctcaagggttggtggtgaactgttagtagcacagagttctgaactcatatatccaatgtgaatcaccccaaattagccaatcagtaccattctagtggcccagtattgttcaatgccataaaataaatactgtgctggtcagcagaagcaatctacttgtcaggttgccctggacaaccccataggcatgagccctgaactgcctcagggcatttggccaaccacacagatcaagaggtgggtcacagagtactctgaagagaaaccaactgggatgatcccagccactgaagagaacttagaatatttcaagaagagcactcaaaagtgtggggtcccctgagaatctggcctggggcctgagctagggaccctgcttgcctaggtcttagggcaaattgtgtaataaaatagagatgatctcaaaa

SEQ ID NO: 95776 - DNA, 308 bp, Homo Sapiens
cttttacaagaaagtgtcagctgcctctactctgttgttcctgaaccatcacttactttgtgtccaagtttgctctaggcattaggactagaacagacacaaaaacctctgccttcttgaagcttatattctcaaagtgtgtggtttacctacagaattctttagctagatgtctggggaatgtttcatgttttttgcttgggttttcggtttgggcttttgttaataaaatagaagggaatggaagatcatttctgaaattttatattattctcttacctaaaatttcaatagataacagaaaggcc

SEQ ID NO: 95777 - DNA, 754 bp, Homo Sapiens
  misc_feature (609)..(658): n is a, c, g, or t
ataatttttgacaaaaaagtacaacacatgcaaagaaacaggagactgtggcccatactatctgaagagcatacttaatagagaaaacttttaaatcagcttagtataaatgtgtttggaaaattaaagaaaaccacttttaaataatttaaaacaagtatgaaaacaatgcctcattagacagacaatatcaaaagaaagacagaaattaaagaaccaaagagaaactatggaattaaaaagtacagtaacaaatacaaaacttaatagaaggttcaacagcaagtttaggctgaaaaacggaatcagtgaacttgaagataggtcaatagatgttatccagtctaaagaaacaaacaaaagaactttaaaaaagtaacagagtgtcagaaacaatgaaaaacaactggcatgccaacatatgcaaaatagaagttccaaaaggagagaagggagaaagaagaaaaataaactactgaagatacagtagctgaaaatgtcccaagtttgctggaaaacattaatctacacatccaaaaagtttaaagaactccaagtagcctaaacataaagagatccacacctagacatatcatagtcaaaccatcnnnnnnnnnnnnnnnnnnnnnnnnnnnnnnnnnnnnnnnnnnnnnnnnnnattattcacatatgagaaatagtaagactaacaacttgcttcttatcagaaataatggagctcagaagtcaataaattgacatattcaaagtactg

SEQ ID NO: 95778 - DNA, 501 bp, Homo Sapiens
tgaaatagcacaggcatggaaaaggtctcccaggtcctccgtatgagatggcagccagcggtggaggcaggaatacaaataagatgaagttcactaagttctcagacccaggagtgactagggacatggaaaagagagcagtgataatcaaactctccatccctccacatctggtaaacctccctttccacaatgccatgattttgtgcaattagagaagcagaaacctgcaaattcactgtctgcagataaatggggccatttcaccttccctggtacctcacagatcaggtagcaagtgatggagcatttctacgtgtatccaaacctttgcaaaatgggttgccatcatttccttgtaatggatagacaaagtccaggcacttctttggcacccttatagctttgaaaagctgatgctgatgacttcagtgaagatagcattgttgcataatgtccacaaatcattgataataaaaatataaccaagaacatgacaaa

SEQ ID NO: 95779 - DNA, 612 bp, Homo Sapiens
ctcaaacatgtttcttgatcccccatatatgcaaggctctgaactagttactggacctctacccgtgaacaaggcagaccctgccttcttggaacttgtgctctggcagaacggacaagcatgaaacaagtaattgcaacatgatttactgtggtaagaatataagagaggggtgcttgccttaatctcaggtgtaatgtttgagttgagatctgagagaggagtagatgttaattaggcaaagagcaggcatagaatagggggcctggaaatctaccagatctaagtcacagaacagtcagtgtaaatacccagagacattccttgagacacagaggggcacagacacagcaagagaactgggcaggaggcaaagtccacatcatgattagctgtaatgcttcctcaggaagacaagaactcctcacagcagaaacgcagggcagagaaatttttctgcccaacagtttgaatggtcaccctgcttcaacatgacaaaacaagccaacgaaaatcctctctcaggacaagttttcaaaaagcatacactgccttttttaatggtttagacttttatttgaatacaaaataaagtctcttactggtgaataa

SEQ ID NO: 95780 - DNA, 587 bp, Homo Sapiens
cagcctggcctcagtttctaaacagggtgaagggccagcgatggttcctctgaggccctcggctgtccctgctgtctatgcgcctcctgctctcaggcctgggaggtgtgatttactctcctgacctccaggcagcccggctcctgctggtaaatgcactgaaaagtccatcttttccacctccagccctgctgggagtgcccaggtgccatcacctgggaacagctgatgacgcgagctaagaagttcagagttgcttttgctttacaaggcgcataggaacacactgtactaagaacgtgccagaagcctcaagatcactaaagatccccatttaccagaccggaaacaaaggagcaggggaaggaagcgcacacgtggggcttcgtgggctggaactgcgtgacctcggcaagtcacttccctcccagagccactctttcccaggttagctggagacagccacaacctacaggcaggcgtggtcggaattaaagacagcaggcaccaaatgcgtggtgaatgggagacattatagtaactgttttattaatcttagattaaactatttcttgcaactttgaaaa

SEQ ID NO: 95781 - DNA, 578 bp, Homo Sapiens
  misc_feature (382)..(382): n is a, c, g, or t
gcagtttgactccttaattataaagttggatgtcatttgagaaactctgggaattggaagtagaacaaattcatactttccctataacttttaatttcttgtcatacattcagaaaacaagagatgtaaaattcataaaactgcttgtataaattcagaaaacgggattataaaagcaaagacaaattgtcttacgattctttgttctacttgagagattcaagtgttggagtaataaaaaataccagggactttcttttttttaataggttaatgccacctaatgtgggcttctcagaatgtgatggcaaacttccaaatatgatgtgggagccaaaagagaccaactggttttacaaaatattaagaacacaaaatttcnccaactcatatattttgaatattcctaaaaaataataagtcaaaattgtgttggtgggctgggcacagtggctcacaactgtaataccagcactgtgggaggctgaggtgggaggattgcttaaggccaggagttcaagactagcctgggcaacttggtaagacctgatctctacaaaataaaaattttaaattta

SEQ ID NO: 95782 - DNA, 600 bp, Homo Sapiens
aattggcatctgctataaattagggcttcttttttctgcagagccaagagtttcatgaagagggtgcccagtcatgtggtcaacatagaaagagggagaggcatagaaagggtggggtgaggaggacgaggtggaggcaagtcagggaaaccacattctttagtatcctcggaaaagcaaactctaaacaatcacctttccttccttcctaactaggaaacatcttattccctctgcagctatatgttatttcttctctaaggaaagcagttattgtttcttgttctcagacctaaagtggagaaaactagagacagaactttggatcctatcatttctcagaagccatgagtcagagaaggaagaaccaacaaagggctctgaactatagactgaattctatatgcacatttatacatagcccagttctagttgtctctagagatttcttatgtagaaatatctatacaagacaacagctaactgtagagctcatcaaaatcagggattgtacctttcatttcttatataaccatggttgtacctggtaagatattaatgttacaacaggtaatgaataaaattttgttttattaattg

SEQ ID NO: 95783 - DNA, 538 bp, Homo Sapiens
ttgccttaaagaataatttaagtgcagcctatattttgttctttcagttgtttctggatagctgatcagagatttatacagaatgcttaagaattcattttcatataaattctaccaaagaatcaaaggaaacctaagcagattttaaaacatcacatctaccatacccatattctcactctgctggtacagcatgcagcattaaaccaataacactgaccactagggttgccatatgtgggacatacttatgctagggaaagaaagtatgtattattcatctgaaatttaagattaactgggggttctgtattttgtctaaaaaccctggtaacaacgcagttccttgaaatataatagtggtcaagttaaataactgttaatatttcttctgttttctctgccttaggatgaagtattcatttgtgatgagcagtgtgcaaacaataataaagccaaatccacatttttgtgacactcctgacaaactgctgctgtattaaagaaataaattacaagtcctctattgctcccctgc

SEQ ID NO: 95784 - DNA, 659 bp, Homo Sapiens
cccttcccagccctcaccagtctgtgaaagcactggggatgcggcgagttcacgtgcccgtggggaaggggccaggaaagacaccaaagtggtaaaccgcaggaacatgaagctgtgagggctggtgacgccgggcgggaagccaggtggggaggcaggctggtgcgtggcctgaccccacctcgcagccgggaaactgaggcacacagagatgtcttgcacatgtcagggccccaggtaggtggtggcaggagtctgggaccttgggtgggcctcaccagtcacacagccttggctgacctgtctgtcctcccatccagccagagggacacaaagacctctttgtctctccacccttccgcccagagcctccccagccagtgcagctctgagcgtgtcccccagggagggagacagcccctggtggggactggcagtcctggcagctgccctgaggcacaggccctgggggactcggtgctttgagggcaggggcaggtgatggagatcggctggggaaagggaggccgagaaggcggcagtgtggagcgtgtgaatttgttcatgaacttagctacaaaaatgtcttttccagtgtcacagctcttctagaatttgactagcaggttttccgatttttactggaaagccctttaaat

SEQ ID NO: 95785 - DNA, 760 bp, Homo Sapiens
gctcatgattccctcaatcacagatgaggacctgaggctcaggaaagatacatttgcatcttgtaggtctgggttcagcctggacccacggtttccatgcttgccctgacccttcattccctccattccctcccagcagccagtcagtggctgtccagacatgtgcaccagctgtgctgcacctccaccataaaaactcctccaatcacttcccactgctccccatgtgaaccccaagggggctcaccctgtcccaggaggttctgcctgatccacaccccccaccccttcctgcatccctgcaacctgctctccctacgtcctcagtcctggcgtcctctctgttccctggacttgtccagcccagtcctacctccaggccttggcacctgctgtgcccttgacctggcgtgatctcctgatggccgttactgggctggaaacttctcagtgctcagcttgagctcaaagcccacctcttcagagaggctgtccccatccactgtggcctttcttccctttgctctttcaattcccagtttatttcctgtagagcagtttcaccctcttcaccaatcttgtttatttccttgtttattgtgcctcctttaccagaacgttcaccctctgagggcctgggccaggtctgtctgttcacagctctagtgctcagagaagtcactgcataaataaacaaatactttgctcagaaaattgtggatatgtaaatgaaataggtctgaataaatgaattaaatac

SEQ ID NO: 95786 - DNA, 572 bp, Homo Sapiens
  misc_feature (16)..(16): n is a, c, g, or t
tgagaatacaacaagnaagttagcattctgcatcccagaagaggacactcactagaacccaactgtgctacatcctgatcctgatctcagatttccagttcccagtactcgttgtggacactatgagctgcccagctgccccttagaggaaaaatttattgttctagcttctaggaatgttattggcaggtggcatttaaatctcagccccttcagggtttacctgaactgcagagaacgagcctacctgaccaagtacaagatcctttccaagtcagcccaggagggatgactgacagagcagaggcagaaaggaccagccattctggagcaggataagtgttgatcccaagggctcgcatagaaaacacgtgcacattaaactcagtatcctaatctgcttgtagacaaatgttacctgcaacatccagtggaagagagtaggaattcgggaagattaaagttgccaccattgcagagaaaaatcattattgagccgggtctcaaatttattattattaccattttccacatactggtgtccgaaaataaacctgaaataaatgcttaag

SEQ ID NO: 95787 - DNA, 512 bp, Homo Sapiens
cactgttcattcactctgctcctcagttactttacggcaattaacaccaatctgttctcaaaacgtgaggtcctcttgctcagggctgtgttcctagcacgcggcccttgcctgacacacggctgacattcagcgcacatttaaacgagtagatcaactgctccatcttcccccagaagctctgtctgtccctccacaacttggctcatgccatctcttccataagcgccgtgtgctcttctctctcagaaaaaaactatttgtttcttgacagctcagctcaaatatcagcttctctcgaccccaggcacgagcgtgggtcccgaaaccctggttgccctccgcagtgtgtgttcagtaaatgactctacgtttatccctgtagctgccagtgttatcaactttggcctatgttttctgaattatttttgaatctttattttgtaatccaatctattagtgacccataacaggccgtgtcatccacaattaaataaatgtgcactctcaaa

SEQ ID NO: 95788 - DNA, 866 bp, Homo Sapiens
cagaatcatatggttccaagttgattaagctttgttaccagcagactatggtaggatcctgatgaacgacactatggaagaaacttgttaggataaacagtcttcaatgtgtgcatattgttgacagaatttgaaggcacaaatttaagagtaactagggtgtaaaagtcgagcaaagaaaagtcagcactactgggtaagcaggtgagggggcttattgataggagagtcggctatgtcaaatagggactcaaggcacaaagtcaatttctttactgacaactttcaatccaagtaataggaattttgtatttgtaaattactaggtagtggctctggctattcttgttttttcattgatttctgtgagcatttcttagtatgtattgtgtgattcagcatagattcagacattgtataatacctacaaatccacctatttcccttttcccttctccattaacctgccgccactgaaatctggagccaaatatatctggtaagtacccacagatttccttgagttgtatagactcttccatggaatagttctttaaatagctgtgagcaataaactctgtgtgactgtttttgttagaattggtttttgtatatgtatatgtttatttcaggcacaggagtgagagaagaggggatgagagatgagaagggataatcaagtgtgatggcaattgcatctccttccaaatacacccatggggctggctttagttgaacttgcccacctactaaaatagtgccacagacagaagcccaagattataagcttgaggttttaacaatttggtcttgtagatgcctagttacaaataaatttggctttagtaaaatggctcatctttaaa

SEQ ID NO: 95789 - DNA, 627 bp, Homo Sapiens
tcttcccgccggccggctccgagctgcagtgcatgtagggaaatgtaggcccaggtcctgggcggcaccgcagcgcgcagcgcgagcccattggtccaatttcccaggaaccgctctgagcccggcgaggcggcgctcagtaaaatgacccgaaaacgatccccgactaagcggctctttatcccacagcaaaacggctttcttaagacccatctggtattatctggatccctgggcctgaaatttttgagtgaggttagggttttgcatttctgaatcgaagcaactattgattagcctggaatcccgacctaaagcaaaggaaatcacaagtatgaaggcgtcgtcagtcggataaacactagtactctgcatgtgtaaagccactctcgtctcctgaaaaaggccatgtccaacgtcagtaaaacaagaataggaggaaaaggcacaggggaaaggtacaaggaaatctctgagagctttgttcttgtttaaagatgtttggcaaagtcatgaggcgttaaagggtaaagacgagggtttgtgcattcaattcaaggcttctttacatgcctttacgtgccaatgagaagaaatagatattaaaccagacttgaacccaaaaaa

SEQ ID NO: 95790 - DNA, 565 bp, Homo Sapiens
cttccaagctcattcaagtgatcgatggcagaatttggttcctcatgggctgttggactgaagactttagtttatcacagtatgctggctgcagtccccactcagttccttgccataagggcctctccatagagcagcttggcaacagagcagctggcttcatcagagtgaaggaataaactgagtcttggtcctagaagatagtgacttgtccgggagcaacctaaagagcagagatatcaatagaacgttcacggtgtgccaggcaatgtgctggatgttcgaggtgtttcattctagtcggctgtgtcccccacttcagtaattgtcaactccatcttcccagttgttaaactaagaagttgagagttatccatgactctgctctttctgcaatatgttacggcctatgcaccagaaaattctttcagcactgccttcaaaatatatcaagaatatgaaaaataacccaaatgtccatcaaaaggtaaatggataaacaaatgtattacctccatacaatggaacactactcgggaataaaaaggaacaaaaaaatggtaaa

SEQ ID NO: 95791 - DNA, 515 bp, Homo Sapiens
  misc_feature (166)..(166): n is a, c, g, or t
cagagaattgatacaaaaaatgatcatgtgaagaatttgcatcttctgcagaactaccggtatcagtcagcagtaggagattgtataaattcagcctgagattccagaatattctgtgtattgaccaccacagcaagaagaaaaagtccatgtaggactgaaatcntgtggtacttctgcggtggcacttcttacacaagtgagaagcagcgacaccgtgacacctgcacgccggagccctgcgttagtgagaagcagcgacaccgtgacacctgcacgccggagccctgcgttagtgagaagcagcgacaccgtgacacctgcacgccggagccctgcgttaggctgggtaagggcggggacctgggcatcacacagtcttagatgtgggcctgcctccaacagctccctcctgggtgtgatgctgaagggggtccttgacacctctgaagtctcagtctcctcaaggtcacacccagcttataggattgtgcttctgtggattaaacaagaca

SEQ ID NO: 95792 - DNA, 435 bp, Homo Sapiens
tttttgaagctcttgttacatttactacagtggaaaggtttttctcctgtatgcgttctctggtgtgtgaggaaatgggaacgctgattgaaggtcttgccacactcaggacatcgatagggcctgtctcctaagtggattcgctgatgggtaataaagtgggagctctgattgaagctcttcccacactctccacatttgtagggtctttctccggtgtggattcgttggtgcttaatgagggcggagctgtcggcgaatcctttcccacagttttcgcacttaaaaggtctctcacctgtgtgtgttctttggtgcgtgaccaaatgtgagctctgactgaagcttttgtggcagtcaggacaactgaaaggcctctctcctgaatgagtgctcatgtgagctacaaaatgagaactatctctgaagcccttc

SEQ ID NO: 95793 - DNA, 474 bp, Homo Sapiens
caaattccctggagctccaaaagggatcacagaaattcttccaatattacagaaaaatcctgtggaacagttactttttgcttataaacttcttgacagagcaatcggtggaataaatttgaattgcatgttaacctctttgccaaatggatcatcagtaattgaccactgctatgccaagcgtacccaccatatagatggagatacttacaaaccacttgcctcaaatagtttcatgatggatttgcatcttgaactaattcaagctcagcatcgaatagctgttgtgcttctggacaaattgcaaggtagtagtcactaaagcaagtaaccattctgaatcaattttaagccagactccagtacagaatcaatttaatttgaaaactgtgttcttgttgacttaagttttcagataaatttcatttttttctacttccctaattaatatcaataaaaacataattaaatctt

SEQ ID NO: 95794 - DNA, 737 bp, Homo Sapiens
  misc_feature (257)..(301): n is a, c, g, or t
ctctgaaatggctgcacccgatatctcagcaggttaccccatagagtgttgagtgggcaactcaattattccctcacctgaagaagtctgaaagcaagacgaagagagtccttttgcaagagtgatgtacaaagccctacggacatacagacttcgtgtgcaagtcctgtggaggagaggagatgagagagcaatcgagtcaaggtctcactaggatgtccaggctggcctcgaactcctgggctcaagcaatccannnnnnnnnnnnnnnnnnnnnnnnnnnnnnnnnnnnnnnnnnnnntgaggggtgagggaaatgtggtcgcctaaaacaccatcaaaggttgctgcttaaacacttccctcagccatatatgaaggctaaatcagataaagatcccaggaagtgtgcaacaggagaaccagtgacacaatccaccttggtatgagtgtcagccatcttgtctttcaactggaaagctagaagtgacagcatggtatattaagaggtctctgcttgaataaattgatgtcaagttttattacatatagaccaagctagaaggcacaagacaaccactcaacaactatgtattaaacaacgaaatcaacgaaatggcatacagcagtatttcaaattcttgaaatacagatagggacaggcaaaaactgtattctctagaaggctgaagtcagccaaagaaaatgcccaccaaacacaaatcgagatatttata

SEQ ID NO: 95795 - DNA, 434 bp, Homo Sapiens
taaaagctcaatggaagtcttgaatatagttactgaaataatcatgaatgtcttcttggggcccaaatgccaggatggggctgaactctcaatgattgccttgacttcagcagtgggctgcagcccaacagaggagagtgtctagcaagtattactctctgaccctttaaaatttttcctgaatctatatgggctattggcactagtaactatacatttgcttctggtaaacatggtccaaacacctccaacagaagtctgtcttctcttactgtttttcaaagtctgcaagcgatagcttgccatcattgtcataatcttaggaagatgtttcttggtaaatactagttttaaattttgcatggcaaatagctctctagactaaaaaaattttaccaaataaaagttcacacttctgtagacaccctaaaaaa

SEQ ID NO: 95796 - DNA, 510 bp, Homo Sapiens
aagtcctgtggaataagactgaagttgtccttgccttcaagcaacttgcaattgcctaagaacacagtttaaaaccacaaaactaagccttggaaatcacatgctgtcatttctgcgatcggtcataaccagtcctgattccatgttagaggagactacataaggacacaggtaccagaaggagactaaccagcatgggctacatcaaaaaggctgccatctactttctgctgggtaggggcaccagagagacttgtcagaaactagaaggaaggtagagtgcgaaatctgagtgttaattccctggcttcatcaaaggacactggtcttcacaaggaaacagactacatgattctccttttgggcttcagtaaaaaccccctcctttcatcccttagtctagggatggtaagaggtcagcagctaagaattctaggttctttgtggttttcccgtatacatgtctttgatgatagcccctttggaaataaattctcctagacttttaaa

SEQ ID NO: 95797 - DNA, 383 bp, Homo Sapiens
ccctgattgtaacaagtactgagacagtgaacaaatcctgtatgtcacatttgatgaccttagcaattatacagacagggaaaatgtttatcttgatttctgctacagcaacactgaagccagaggtgtctgagctttggctaatgtcacttgatgtaggtcagccctactgtgagtgtcaaccctggtttctaaatgtgctgctggaggaatcccacttcacttccagtttaagtgtcagctgaggcctcgcctgatcatttgattcagagtagccctagttctcacaacactatctgaattttctacatatcacatcacagactaatattgtttataccagtcttgtttcctcctaataaaatataagtgccatgaaaaag

SEQ ID NO: 95798 - DNA, 497 bp, Homo Sapiens
  misc_feature (148)..(156): n is a, c, g, or t
tttagaattgtcatatttcacctattctcattcattcatctatccatctgtccatccaaggaatatttagtgactaaaatatgcctagttacccttatggcacagacacttgtctccccagaatgttttcagttcattcctcagagannnnnnnnncagcctaataagaggtgaattataacttattaacccaactgatgccaaacttccattttctttaagacgcatcaatcagctggacatactatctctcataacaaccaataccacaaagttttacaacacgatgttttgaatctgcattaaaaagagttcaattaaatttactcaaaatattctgtatacatatgtgtgtttatgtgtaattttcccttaaaacatcattaaagacaaagtacagtccacaagtttcttaaaagtctgaaataaaaaagacaaagctcaaactataccagtcactgcctagttgaagaagaggtcaggcaggatgcacaatt

SEQ ID NO: 95799 - DNA, 675 bp, Homo Sapiens
gattatttggtttttatgttgacagtgtttgagaggtcttttagcaagtagttggtatcagctagactttgggtgccttggcagcattttctagcattttcctgttctgaagacagcagcacctgtatctgttctggaacatctggtggccatttgcacagctactgctggacttccatctttatctctccaggcagacgagtcgaaccttccaataggaaattttgggtaaatgacaaaaacttatgagggttgtcctttgtgagcagactttgaagcagtaggaatgtagcctattgaaaagatggccagaggttcagaaataagcgtgacggataaaaatcagcaagacatttaatacatctgcaaacttgccttctttcaaagaacattgattgaaacagattcgtttgttcataatgtgggtgtgaaaatagctctgaaaagccattctaaacaaacttatgtttttaaaaagagtagatgaaatctgtttgcggaggaaggaaaagatgacattcaggaagcaatgttctggttaattctgtgttcttcaaaagccagctcattttcttgaaaagaatgctggccccaatccccaggtatagagaatatggagagaaagcatctcacgcctgaagagtccaataaaacatttatagataagaatttaag

SEQ ID NO: 95800 - DNA, 299 bp, Homo Sapiens
caggcatgagccctgccaaatgttggcagttattaaactgtatagatttgttccttaaatattttgactattccatgagaaaggtttgtccagcatcttgatttctatctacaaaacaaaaacaagactaaagggttcagtaatttaacatcttggtcagatggcgtgaagaaattaaattttcttactcctatagtcgcgatgtagtgtacctcttaccttttaagtctcgtttcagtgaagttgaatgcatattctagcaactaataaaacaataccaatgaacatattttaaaaaa

SEQ ID NO: 95801 - DNA, 613 bp, Homo Sapiens
ctttcctaaaggatatagatttctctcttctttggctccaataatttgtgcccaaacttcagaccagtaattccccagatgagcctgctgctaccctacttgcgtcttacttttgcaagctgtttccattcttattaggctaataactgaagacaggatcaagatatctttctaacctatccaaaatacctgaatattctgtcacattcaacaatttacagtgaagaagaagaatcaagtgtacatcccaatctgaactactgcattcaaagaaaaattaccactgctagccactctacaagaatagcacaggattggtggaagcacggtgacattagaacggcatcataaacatatctgtagcatgggacaactgacctgcctagaagacgactgggccaggagcatgacataatttcaagtcagttgaagaaaatagaaaaggaactgctgagtagacgtactggtccaagaacagtgaaagacatgtaaagcagatgtaaccccaaacaacagctgaagaagagttgcccaactccgccagcctagatcaaactgcagtcaaatgtacacccttgagcatgggaataaattcatgtttttgtaaatcaaa

SEQ ID NO: 95802 - DNA, 641 bp, Homo Sapiens
tcagatttatctaacctaaatttatatagcctaagtaaataagtcattagtgcttttaaaaaagccattaacttgtctactgattggagtttatttcataaaacatttaattttccatgcgtatatcaagtatttctgaaaattttattaaaagaattatttttaaaccacttataaacgcacgttatttcctgtttcaactctaccttaataaccatacacaatttcctttttttattggtgcatgtgtatatgcatgtttgtaccttctacctctaaaaggcttattttcaagcggaaatgacagcatggcatggttctctgttgaactgctttgttgatcagaacctcatgataatgaacaaagctaagcttacaggttcaatactcatctggatcatttaactttgaaacaaagtgccctcttaaccagtcatctcacaactgtgtgcaggagactgagagaatgtgaattatgcagtgcaaatctataccactattacaaaagtttcaaaatgtaaatgagctaatattaacattatctttgtatatgaaaaactaaaaagcacataaaaactactgcttgtaatccccatacttcatgcacacaataaaagaaaaaatggacacttcatctgtct

SEQ ID NO: 95803 - DNA, 599 bp, Homo Sapiens
gccttaagattctaatttaaaatgcttaacagacttttagacttatgagtttcagttgaaaggtattttaaaatgttactaagtctgcaaaagtactgaaatgtttcagagaacttggaaagtcaccatatgtttaatttattatgtttatgagagttaagcacttgggaaggtttatgctaatggggtcaagcatttgcaatgctgcttaaaagaatcatttttttaaatgtataaatgctattaagttgtttaaaggaatttgaattgtaaatgggattgttaaaacaaatttagtctgttcaactcaatgagggcatttcattttctaggaacaaaataccctcttagacattaaaaagccgcatgcctgttccctcagctatagttaactggaccatggtggtacaactgactcaacccttctctaagcagggatttgtaattgggatttataatgaaattcctgatctgggaaaacgggaggctgggaatgctatgtctaggtcatcagcggagaaagttggtttgtagagaatgaacaagaatgaaacctaagtgcaaagaaaataaagattatcctgctttaatagttcaga

SEQ ID NO: 95804 - DNA, 539 bp, Homo Sapiens
  misc_feature (160)..(160): n is a, c, g, or t
aaactttggaaattaaccaaaggtttacaacaatgtaaagggcattaattcaagaaaagctgctgaacctctataagaacagcaaagtttgtggtgttttaacttgttctattccccactcttctctctccaggggaattgaaaacaaggaattccccanccaaacaggggcacaggctgtgtttgcagctcctgtaaaagctccatacccagagccgtgtctcccagctcccaggtgaagtcttatgtatacatggggcattggcccaggtgactccatactagtatcctaggccatctagtagctcctaggtctgggctcttgcaaaaagcttgcaattcatcaagggttgagctgcacattggggcttttagatgtgctgctgaggaagtgatttcctgcatttaatcatcttccgatgaatgctagagaaactgatctagagtggctcctcttggttagaactagctgaagcatactgtatatacttactacttttaaaaatttcatataaaggaatagaaaataatactggaaa

SEQ ID NO: 95805 - DNA, 377 bp, Homo Sapiens
catctgcttccgctgttttctgcacaagggaagggaaggtgaggctggcattccccccactcgccaacgatgaacttccctagctatctctctagggaaacagcttttcctcctgcccagggtggccatggctactgctcgtccctgtactcaagctgccctacagcatcactaccacctgaatccaataggacctgagcgtcgtggcagtgagctctggctctgcccagagagtagaacttcactgctttctagctatgcaaccccgggcaagttacttaagctcttcacgtttcactttcctcatctataagacagggtgatcatttatccattccaaagactattgaggattaaaagtatatgaaacattcaaa

SEQ ID NO: 95806 - DNA, 491 bp, Homo Sapiens
tttaactgtgattctttttattactacacactctgagcaaggcagagatactcttgcgatgttaatgcccaaggcttctctgtctccttcaatgagaaggaagctggttttctgtttctctgtggcttggcaaaaaatggggaggggtttttaaatgaaatctctgtgtatcagagttgtgattccccttaaatgttctttcagggattttcttggcagctaattcctaattttaacctgttttctcttaaggtagagaaattctccagcttctccaattgatctttatgtatttagttgccttgataaatattaaaaatcccttcacatgtgtgtgcgtctgtgtgtgcttctcatctaccacttttgtcaaagacctctcacgcttcaagtaacccacagcccttttccccataacattctgaaaagcatttaaacagaagacactctacttttgcttctttttctcttaaaaatatatttacatggcc

SEQ ID NO: 95807 - DNA, 764 bp, Homo Sapiens
  misc_feature (333)..(355): n is a, c, g, or t
acggatgtaacatgcacccagggcattgcttcagagactattttttccataaatatgtaaagtttttcttaaataccatatgtaggttaagtggttcttttaaatattaaactatacataaatacttttggggactatttgacctttgaattgactcctttttgagtcagattcagaggtgggatgggaggaaaagactagaattatttttggagatgggaagttggactgacctcagtagaaccgaaagtgagacgactgaatagaacggtagaaaaaaggaaataattagccaatattacatagaaacccctttaatttgatcttgatatnnnnnnnnnnnnnnnnnnnnnnnaaagcaataaagccgccagttttgctgataaggataagttcctgttttctcctctgaagacatttaatattcaatcaaggacagccacagagccaagcagatcatagcgtaactccaaagatatggcatgtcatcaccctgctgccctttgaaccaaatggggttttgcagtctctctcctttcttcctgaaaaccattcaacgtgtccccagaatctgagctcctcagcctgaaacactaatgtgtgtgaaaaggattggtttggcctatctttcccgtgcaaactggtatgaattttaaaacaaaaacataagaacaaaggaaatagtttttgaatttaatcagtctgaagttagcctttgaccatttgatacattccacaataaaaaggaaatataaggggaaggc

SEQ ID NO: 95808 - DNA, 702 bp, Homo Sapiens
aaataggtgctctgagaggttaaataacttttcttaaggttaatcagttaagtgatgaagctggaatttgaatccaattatgtctgactgccaaattgattcctttttggctatgccatgctgctctttaattcatagtgattgttacttcaaaatcaatctggctgcagtatatatggactgtgactagctccgtcatgctctttcagctggctatttacccgtattactttcactaggtactgtctagaagggtgtccagtagaaccagaagagttttctcagagaggaagcaacattttacaactgaatctacactacatatacagaagagtccaaagttggaaacctaagcaatccaagaaatcgctgtccctacagaagttaaacaataggatactttctctcctgctttaataaagggttgttatcttgctctgaagataattgaagcagtggacatctcaaatcctttcctacttatggggctagagtcagagtcaccctgactctgacttattttttaattgataagctcttcaagtcagagagaacttggtgcaactccaggctctcctaattatttatggaaataaataaatatggacaagtccattactaagtctgtaaaatcgagaaaatatgataaaccatgcatgattatattgagtatttaataaaggatctttggtaccaggcaaa

SEQ ID NO: 95809 - DNA, 465 bp, Homo Sapiens
tgcctgtgtgttggagctcagttaggagttgaagttttctgcacctgtgataacaagcccaccagccacatgcatttcttcttcctgccactgtgactcggtggctgtagagccacatggcatttgtcagccaatctgtttcaagtcttttctttccaccaatagctttcttacagattttcttggctaaatgaggccattacctagattgtcccttcagtaggagcctgaatccttcgcttaccaggctgagagctatttgccatgataatgctgattctctcactcctcatgcagaatgtgcacctgcagccctttgatgcgttttgatttgggggcgatttttcaggctttgattagcaggctgcttgcaatgcagaagatcacagttcctttctggggcagcagcaaccagagcctcttcctgtgtcctgtgtgtctggtatgtttacaccttgctctgag

SEQ ID NO: 95810 - DNA, 794 bp, Homo Sapiens
ttatcatcttggaactaaaggcagcttcagattggcccttcacatcagcttcactcctgtggccagagaatcagcttgaacatgttgccagttcctaagtatatctgttcccactatatattcagacattggggaaataaccacagaataagcccacagaccctctctgagacagactcaagccagtatgtcatctattacttgacttccataaggtcccattttgactagtctaccatatgggtatttctggtctctggttattagcaatcatttaaatccaataacaataatccctcaataatctagttatttcccttttcctagggcagtcaccctgataaatggtcaagttgcctctgggagaagtcttgagagaagaaaacatatacagagtcatatctcagttgatcctccaagcaaaaggctttatatccagaacctggcttagatctgtggctgaaaagctaaaggctctaatttgcagactcctttacagccaggattccagaagactcaggtctgatgaatgagatgcacgctcctgggtggcagagcagataggagagcagaagagtcagagtaaggggaaggtgatgtgaatgaagatggagcagaaaaatgtgagcacacaccttgcagggaagccagcaaccgccagaagcagaagcagcaaaggcagaatcttccagttgaacctccagagaaagtatggccctgacgacaaactaattttggacttctggcttcctgatacgtgagagaataaatttgtattgttttgagccaccaaa

SEQ ID NO: 95811 - DNA, 663 bp, Homo Sapiens
ctacgaacaggatacacacagttgtgtgattggtggagtgttggtgttattctttttgaaatgttggtgggacaacctcctttcttggcacaaacaccattagaaacacaaatgaaggttaccaactggcaaacatctcttcacattccaccacaagctaaactcagtcctgaagcttctgatcttattattaaactttgccgaggacccgaagatcgcttaggcaagaatggtgctgatgaaataaaagctcatccatttttttaaaacaattgacttctccagtgacctgagacagcagtctgcttcatacattcctaaaatcacacacccaacagatacatcaaattttgatcctgttgatcctgataaattatggagtgatgataacgaggaagaaaatgtaaatgacactctcaatggatggtataaaaatggaaagcatcctgaacatgcattctatgaatttaccttccgaaggttttttgatgacaatggctacccatataattatccgaagcctattgaatatgaatacattaattcacaaggctcagagcagcagtcggatgaagatgatcaaaacacaggctcagagattaaaaatcgcgatctagtatatgtttaacacactagtaaataaatgtaatgaggatttgtaaa

SEQ ID NO: 95812 - DNA, 629 bp, Homo Sapiens
tttgacaggatgatgtcatttatgattccaagaaatattctgtttgtctgccatttgtttccagtgaacagccacatcaaatctttaatttagatattttgataattaaatgcattaaaaatctgtctctatttctatgcttagttcaagtaatagcttacctcagtgattttaacagtcttacataccatatagtatcactgcccttacattacatccttcaataattatcccctcccgagtaaaatcataatacaagggctgacaaactcattcttgattgacacacatctcgactcctcactcatttcttctccacatattattattttctcattacttacctaaaatttaaccttatagataatgaaaagggttctgaacattaagaaataatagaatagttataaatggagaaaaaagtttgaataaaaaagtttcttaaaaggatagtgtcacttgcaaaaatagctctttgaaatacaggttcctataaacattttacacgcattaagatattactcttacacatactggtaacacagacactatacatatttgtctccattttaggaagaaatgaagcaaggctatttttaataatagacttagaaacaattcataatttc

SEQ ID NO: 95813 - DNA, 522 bp, Homo Sapiens
tttcactcccagctctgtcatttcctggctgcttgacctgtaaaatggagatatacagacaacacttccttcataaggtgaagaaactaagaatcagaggagttctaactgagccatgaggactcgattcctgaaaaccttatttataaaaaacaggaatgggaactaaaacaaggcaacctgtgcaagcccttacaagtttttcatgtattacagtaaaaggtaaagcaacttaaaaaccacttgacattttttaacatttgtaaaattttgtaatgcacagttgtctctcatttaccattccttgctagaaacttcttaggctcacccttcactgcatttccaacattattttgctgataatgtatacgcccaagtgacatgttttcatttggcttaactttcaatgcctttttgattttatgatctagtcctttattgctggacccttgaattgtatctagtcttctgctattacaaaaaatgctgaatcaaataaacctgaacatgtaacatcaaaaa

SEQ ID NO: 95814 - DNA, 358 bp, Homo Sapiens
actactactactaatagtactatcaacattattccagaaataaacttcaaacactgttttaaaataatattaaatatgctgcatttaatcagttgtgatcaagtcctgtatttatgttgaattggcaagtcaaacaatttgaacctacaaattgttccctctgctctttttccctgactctactgttcaatgtcaaactcatccattaatttcaagtacaccctcctctaagaatcctgttccatccctttcctcccctcaccctcccaaaataaggataattgttttgtctctgtgctcttcctagcacttactttaatttacaaaatatttcttctaggctgggcatggttcatgc

SEQ ID NO: 95815 - DNA, 636 bp, Homo Sapiens
ctgagtcgggcagacctggtgctcctggcacaccggccacgatgttacctgagggacctgcagctgctggaggcccatgccctactgccagcaggtgccaccgtgctggctgaccatgtgctcttccctggtgcaccccgcttcttgcagtatgctaagagctgtttggccgctaccgctgccgcctccaccacactggccttccagacttccctgccatcaaggatggaatagctcagctcacctatgctggaccaggctgaggtccaggcccaggggcttttacccagatctgagaaccacaactgctctgggtcagagacaggacattcagaattagagcagagcctcggtccactgcggcccccacacaggccccacctgctagagccactcacctctgaggctggcttgccaataggaaccaggttgttgtctttctccccgatgctttggagctgtgggcaaaggcacagaggaacaaggccagagcccaagtagggcaggtcaggggcatgggactggcccattctgcccagaagacaacccacacgtgttggggagaagcttcctcccagttctcagggagatacaatccctttcttgtcatctgccatttatgaacttgatccaaat

SEQ ID NO: 95816 - DNA, 798 bp, Homo Sapiens
  misc_feature (491)..(491): n is a, c, g, or t
agaaggcacatggacagcatgttcaggaaacttcaattaactctccacaattggaatgtagtagagattcttatccccactgtacggacaagaaaactgcagttgcaagaggttaattgtggtggtcatttgtcatgttgggagttacctgggccacaatagcttcatgcttggggaaatcatctgctgtaaacatcttggtgggagggagggtactatcaatcaatatggaaaccaaaggggctgaccccacctctgtcagagctaaatgatcccaattggacatttttgcccagaacttggaatattgaataatacaaagattgagcgttgaaaaattatccatagcatcagtgatggcattgggagtccagcaccactggaaatgagtgtccaggggcagcctctgaaccccccttgtcttgatctgggccctcttacctgctgtgtgatctttctggactcttgctaattttctgaatctgatcctncaggcttccagttaattctgtgaactatctaatactttgacaacaaatgcctttcctgattaagttagagtccatttctgttgtttgcagtcagtcagtactacaataagtaagaatttgtgctctttgccactatgtataacatttattttgagaacagtaggtagatggtaaagtgaaaatgaatccagacgaagactctagatacgtaagtgtgatatagatctttctgaacttgctcatcacaaaagggacatcacttaataagggaaaaatttaaattaccagctaacattttattaagtac

SEQ ID NO: 95817 - DNA, 902 bp, Homo Sapiens
agtggagagagtatgaagtcgacggcgcgccgaattcggcacgaggagaaatgtcgctgttcagtgcgttgatcgattctcacatctgaagccagctgtgtattcttgagtggagcctttcaggctggcatggagagcttaaggggcaactgaaggagacacactggccaagcgcggagttctgcttacttcagtcctgctgagatactctctcagtccgctcgcaccgaaggaagctgccttgggatcagagcagacataaagctagaaaaatttcaagatgaaattgaaatggccaatgagcacaccctcattcatccagcgagcattgaggaccccctagaggccaggcccatgagtgatgaagatcccgaggatgaagacgccttgccagccagctttgctgtgctctgagcatgactaaactaaaagtaatgaatccagaccttgaagactggtgtgtgtgtaaaaggcaagaagtgagaagattcacgtgtagatccaggacaatctgaatttacttctgttcagtagttcccaaaggctttttctacatggagggactcggagtgacacagcagctccctcttgtgggcagattcccccgtgtaaggtgctggaggctgaggttccagcctgcagccgcttgtgatcctgatatgtggagagttctggaagactgatgactgctgacccccttcttaacctacgccatcgccatgctggtggtggggatggggctcttggccattcctgccccttggctgcccttccttggtctgagggtacgtgggtggcccttcgggtgtgccaggagctttgtgctttagtgaccaacagtcccctgatgtgtgaaggcccatcaatccgatttaaaataaaacatttgaagtctcttcaaa

SEQ ID NO: 95818 - DNA, 317 bp, Homo Sapiens
caaaaatccaactcatctacaactttcaggagtctccgtgttgcatgaagtaatgtaaaaaggggccggaaacgatcattctcttggtgagcccagtggtttcctctacaattgagtccacaactttgacccctgagatccgttactctaatggtgaaccgacgtgctcctacgctgaagtgtgcagtaagcccaatccgtgcctggattttgaaaaaactattattgttatgtgtttggagtctcacagatgtgccaactccaggtgaaagcttcaaacggcatctcatgtaatattgtgtctgcaattggagggt

SEQ ID NO: 95819 - DNA, 464 bp, Homo Sapiens
gaagaacttaaccatttcatacatgaagaaattgaggtgaccaggattatgtaactcacctcaggtcgtgcaccagtcatggcagggacaggcttcacacagaatttgcagccttggcttagctcccaaacaacattgccttccctttctagtccccagggttgacattctccaaaggacactggaaagagccaggaataagaaagctgatggtgagatctctagagaaggcaaagagtcctgatcctcagcagtttccaaagcataggacacaatgaaagcttcatgactttgaaaagaacagagggctgaggatccagaaaggagacatgagtactggtgaaaagtcctctgtggatgcatctgaatgtccttctcattgaacctgtcactctccccactcaacagctggagggccactgatgtgttggagaaaagaataaataaaagagagaagctacaaa

SEQ ID NO: 95820 - DNA, 686 bp, Homo Sapiens
ccgtctttgtcatgtgctggctgccctatcatgtgaccctgctgctgctcacactgcatgggacccacatctccctccactgccacctggtccacctgctctacttcttctatgatgtcattgactgcttctccatgctgcactgtgtcatcaaccccatcctttacaactttctcagcccacacttccggggccggctcctgaatgctgtagtccattaccttcctaaggaccagaccaaggcgggcacatgcgcctcctcttcctcctgttccaccaagcattccatcatcatcaccaagggtgatagccagcctgctgcagcagccccccaccctgagccaagcctgagctttcaggcacaccatttgcttccaaatactccccccatctctcccactcagcctcttacacccagctgaggtagaggccagactcctccaacagtgaaggaaaaggcacaggtgagagtataggtgggagatttggggggatgtagaggggagggtcaaagcactcgtggtcaattttgaatctatcttaaaatactgaggtgtggagagagagacaggatcaggagcgatagagagcaggccctcagtgttgtactatttgtctcggtccttgtgtctaaggagcaatgcagaaaaaaaggtgaaataaatggaagagatagccatggaaaa

SEQ ID NO: 95821 - DNA, 553 bp, Homo Sapiens
cgaatgctcactgctggtcctgtcctgctctaaaatgttcagatatgtaatgggttatttttgttggtatttgggtgggtcaaatgctcactgctggtctcgtcctgctctaaaatgttcagatatgtaatgggttatttttgtcggtatttgggtggtatttttgctctatgacctcccatttctctgacgtctctagattcctttgttattcgtgatttctgcttctggtggtgacaacaaaatctgccattgctgtgcagccgcctcacccatggagcaggcttatcctctacaactattctacagaaaagacaagcaaggtctgcgtggagtgaaagcgccttctttccatatcggatgctggaagctgtgatgttggcaaacggctctttgcatgaagtactgtgtactgaaccaggaaagtgaggtgcagacgcggaagtcaggtgcagatgtgttgggcagatgagctatggtgatggcgggtggccattccctataagagagtggctcctctattattaacaaaataaaaattaaagaaggttaa

SEQ ID NO: 95822 - DNA, 800 bp, Homo Sapiens
atgaccaaccctagaggttcaataaacacctcaccctaaacttagatcccacaatttctttgtaatctgtaattaatttcccctcttctctcatgtcacgaggtctaatttttaacatcattttactgggatagtgagaatagagctggttaaggttctgattaatagtatgccatcactaggaaggctacaaaatcctacaccctccttagggtgtaggatgaatctggggtggggaagttcaatgtcttacccaagggcacagagtcaggagcagaatgcaggcccagtgttccagacttcattatctcagattttcttttacttgagctctaggcctgagaaatttggttttctaaactgcatgttttaaaattcttgtccttcttaggcattattttgttgttcttggatttttttagattactaaatcattgggctataaataatgataatcttaacatttgtttttttcttagctatccatctatattcagttcttttacaaatgtccaggtctggtcccctggacataaataggggccctaactagctaactccaaaggtgtggggaaaacaaagttgtttgtgaactttgttctgacagcagaggaaaagaagcagacacttctccatggagcctcctaactcagtgctacatgcagtgttaggccaatagggatcaattaccccctgggaggagattttccctggcttccttcctggtgactagcatcttattatgaggacctcactttagcctattgtctttagaaagattaaaagctgcagcttcaaaa

SEQ ID NO: 95823 - DNA, 623 bp, Homo Sapiens
atctgaagagctaacctgtctgtgaaaagggaattagataaaacacaggctaccagttcacagatgctagagagagcttgctgtcagcctagggggaattctcaccaactgaaaaattcctatcagtgttcaatgacatacgacattcatagagattctgaattgcccaaggagtttccaaattgtaattctaatccatgagttttgggcaatttagtggctttgtgataagaaaggggaaatgcaaaacttcccttgtaagactcgtggtgtgagctggtcctgaagttcttgatcattttgttagcacccaaactggtttgtcaacaaactttgagagtcaaaagcttgagagacatgcacatcaaagaccatgacaaaaagggaagaaaagcaacaacagcacagaagaccctctggccctctgcaggctgggttacagccttctcttcaccattgcatttagattatagccattgcaacagtacaatgatgctcctacaccctgtacagctgtatcatccaccagattgtcagcttactgagggcagggccagactaccccacagctggtctgtctctcacatatagcaggaactcaataaatatttgttgcactgaaa

SEQ ID NO: 95824 - DNA, 757 bp, Homo Sapiens
tttcaccaagccagaaaacattatctgatttatttagtgtaatgtagataacctgggacttgttcatgactcttagtactcattttacggtttgtaataggtaaccttagaacacaggcaggatcacattaggtctgtaggcaagtgcctaagctgctgcaccaggcacccctccaggatgttcacattttcagcagcaaactgaagagcagcagaatcatttatgttcatatttttttctgtcatttgacttagtgttgttttcccccaaaagtagcagtatcttggagaagtaaacaatccagttataaatgaataataaaagtaagtattcagattttcccctcaaatgaaaaatcggcggaacagtcattaccattgctttaaaatgttttccagtgcttgaaaagtaatagactattgaagatagaagcaagatataccaatatgtttcataattggtgggaaatagaaatgtgtttaagtagatcagtagatcaggcttgttctatgataccaaacagttaataattgtattttattagaaaaaaattctcatagagcgaaaagagcccagttagtcggtcccttacagtaatacaaaattagctacaaacagaaattgggaatatattttaacaacagagtaagtaaatgcaagcagattgtctgatggaattcacataaatccttctttatattcgtgtttggcagcctttcttataacaaggacttttttggctgggcatggggctca

SEQ ID NO: 95825 - DNA, 499 bp, Homo Sapiens
gagaatacttgaaattatttctggaagatatgggaacttttgcgtgaaaaagggctacagaattttgcctgtaaagttatgctaatctctgtacagaaatgtctgacaattcagaagctgaaactcagcaaaatctctactttaagtgtcagataaagcctaacgtcaaaagaaagggcaagagtctcaggaaagagtatgctgacttccagggccagttcttcagaatctgctttttctcctgaaatcaggccatgcgaaaagaagatgttgcctcctggcacagatcattcatcctgcctggtcctcagtcaagtctccagcagcttgggatgtctgaagaatgaaaagcctaagagacaaggcccggggatgcccaacatacattctataagtggggaaagtggataaaatgttttctgtgtggaaaggacaaataacagttaatttctactggaaaagtaaacaaaaaccgtaattaaaattgctcaaaagtaaa

SEQ ID NO: 95826 - DNA, 1127 bp, Homo Sapiens
attacatttccaaggcttggtagttgaaactaaagtgtggggctttttaattgaagagatatttttattactgccattctttgtgaggttagatgcttaataccaggctggctttccattacactaagaaagctgctgtgtgtcatctgcagaataactccaaaattgatttaattattaattttttactctctttcttccttttcccaaacaggtatctgggcaaagactcctgatcctcttgaaagaatgctagaaaatatgtgaagaatgggtacagcagagagaaactagggactatgccaacagatacgtgaggcattatattgtccacacaataaagtagcaagaaaaattagttcctgaagaacaatccttacagcttcctgaagaccaatcattatggccttttatttcccatttatttccccatattgcaatgtcagttatttcctcctctccttgtttccaaatgtgacctataaaattttgtttttctgaaggagaatcactctgagacgaattcattagatagttactgcaagcttcaaaatgcagtatttttaagcatggcttacatttcttgggcatgtgttctccgaatgtctttgaaacaaaagcagaaagtccctcaaatttttatatcttaaacttaaactacaattaattagctttatctctaaattttaaaaaatgcaccattaatataaagcatatcaacacaaattttaccaagaagtataatttcacatattagtataagacagactcatctatttaaaagactataattgacagaagcacttagtctgactaagcatattagcattcaatgcaagcaaatgttatgaaccagattttagcaaatttgaacaaatcacagcatattttacataatgataataacagcatttgagactctctgattaattttaagctctctacacagatcagactagtggatgtgtcattgttttgtggtatccaaagaaaggaaataagattttattttcacttataaaaagaaaaataatttgaaagtgtggtttattgatggctaaggctgtatgagcaggtatatttgatctaagcagttaacatggctatgaaatgtaattccataaaag

SEQ ID NO: 95827 - DNA, 609 bp, Homo Sapiens
gagacattcctccgcggatcagaccatgctccttccacattgaaagcctgtgctcacactttgaatatgttgactgaaagaccttcatgagccggacacgctccttggtgttacacttgcaggagttgccgatggaggcctgcagtactctcggagttgttggcagctttaaaggttctggaggctacctacattccttgactcatggccatgcataaatctcacctttgtttctgctgttccatctccttcttcaactgacctttctgcctccctcttataacgactctcatggttacattgggcccacccagatcgtcaagaataccctccccatctcaagatcagtaactcgagcacattggaaaagtctttttatgctatgtaaggatcatgaaagtggggccctaatctggtaggactgtgtcgttgtaacaagtggaagagacactacaagcatgtatacatggaagaaaaaccacgtgaggacacagccatctacaagccaaggaaagaggctttaagagaaatcaactagctaacaccttaatcttgaacttcccgtctccataattgtgaaaaaataaatttatgttcttgaagccaaaa

SEQ ID NO: 95828 - DNA, 673 bp, Homo Sapiens
ctgtactattcactgtcttcaacaaaagtcagctattccaggaaactctcgtccagaaagataaaaattgagaatgagacatcaatcaatacgcggaagatttacatggttcggtctggaagggtgggacaattcgaagggtgaggagagaagaggagcttccgggtcataggtggtcaggaagaagtcaaatcttctagaggaggtaggtcactcctgccccttaacgcctcagtccagctctcctctaggacctcagagactccacttcgcccatttgccagtcagttcttgcacttttccacggtggaaaatattcttatattgctgccagtgcagaatcaaccactgacctaccagaatccaccatggacctggagtcacccacagatgtgtacctggagaacacccaggcctttccaaaatgaagcaaattctccattagctgtgatgatcactgctatccactactttctaagaagattctatgcttttgagcatgcctacccctacactataggagatctattgtagaagactagaaaaacataggatgtgcccagctgaggcattgatcctggctgggtagggggaattgttcagggatggggaaggggcactttttagctgtgtctcatcgagtacgggctcaataaataattgaattttgaaa

SEQ ID NO: 95829 - DNA, 663 bp, Homo Sapiens
agtctgtctcagcacgcactcacacatgcacgctcatacccgtgctgagtgaatccagttaattcccagagaactgcaaataaagtgtcagcactttaggatgctgcatcaaataccattctacaaaagaggagagcttcagccagttctcttcaccacttccaaagcgaggatgaaaattccacctgctcgtcaaaactcagccagagctcagcctccctccaatgagaaaatgtcccctgtgctacaagctgaagccacaaagaccagtgtcaacggaggagaccctagtgcccacaaataaagcccagcactgtacatccacgtaaagtcctgtgaagtcagaagtaagggagaaattaaggatttagtagggtcccacaaagtctttggaaccagatctgattgtttcctttagttaaattcactcaaacatgcaagcatttgtataaacatcaatgtttttttcagtgattctgtgggattcctaaaatgtgcatctctttagtctaagatgaaacactggttataggatgaaaaaaattaaacatgcattcttcagctctcagacctcaaccacaaactgaagtcccagaaagagtcattaaatcacaatgtgtacttaaaataacaaatttgaaataaaaaatgttccaagacatt

SEQ ID NO: 95830 - DNA, 410 bp, Homo Sapiens
aaggggagagggtcagctgctgaggaccgtcctcccctgggggttcctggaatgtgtgagctgggaggacaggtgccccggcctctttctcggagaagaggagaaggagcctggggggaaggcaccccagtgacaaccgcagagggagggcaccaacccccaacacaaactcagggccaccaactctgggccacctccgtgtgaggaaggcaaagaaggcagtctgcccggtcactgaggctgaaacctcagagctgagctgtggcctccactcacccaccactggcccatcctccctccacggcaggggcgcctttcccagaaggctctggcgttgcttagaccacagcggaggccggtgctcaacttttagaattgctgttggaaataaataattcatatacgtaaaa

SEQ ID NO: 95831 - DNA, 541 bp, Homo Sapiens
atttcatttcaagccaattttcctgtaaatttagattttggataacagtcttaagtagctagttgtgtgcagtgggaaaaacaagatcaaagtagaagcaagaaactgaagtttaaaaatatttgtgatccagagtgattcagggatcagtacgatttaaactacacaaatgcaaagtaggaacgaaagattcttaaatgtggatagagtctccagtacaaggaatgcaacaaccccttccccctgaaaatagcatagagaccatctagtgtgtataccctggaaacacttcctggctatgtgggttaccggctttgtggtcttgagatggtcagtttctgcatctgtaaaacagaaagaataactgtgtgtgccatttagggttgctgtaaaagctaaatgaggtaatatatatagtgtgcttgtcatttagcaagtgctcaataaagtgtaactaataaagataaatccttttgtactcaacttttttaagagaaagaaggaaatactaacaaataaaactcatatgagtagtccgaaa

SEQ ID NO: 95832 - DNA, 596 bp, Homo Sapiens
ggtggtttaccccagttagactccactcacccaggctttctggcagatttcattccagctgccgctctgacttcaggccctaggaatacgcatacagcccggcagccagccatcccaccaaacagacgcattcatgtttggtctcctctgattcatgagcttcaggctgctttaatttcctgcgatttcttcataaaacattgaatattcaatgctcattttgatgttggggttttgagaggtttaggggtgggggtttagcttgcttttcctggagttaatttctccatttgatgtgagattaatggtcctgtggatgcttgtgagtaatcagagtttactagagagaagcacagagctttacaagccagaagggctttctttgcctctatttactgtttcctgagaaatcaacaacaccatattgtggaaagccaattaccaccctatacaaggttaagcttttcatccaggacagcttaattgttgaggtaaatatatcattgagaacttctgtcttataagaccaaagcatttcggagcacctcatatagcatcagagacaaaagacctcaataaaattttaatgaatcaaa

SEQ ID NO: 95833 - DNA, 566 bp, Homo Sapiens
aaaagggaacaggtgaggagccggacttaaaacttgttaagaatcaaacataaaaaattatgtcagacacaattacatattcttagatctagtttaactgcaactaacaatatagttgttacatatatatatgctttgaaagtgattatcatggacactgtagttgcaatcccaacatttattccactcttcccacattgtgcatagtacacctaagaaattgaggtgaaattaacctcacctttatctccaaagttagtccagttaagataacccaatcccaacctacgttgttcccctggccacaagatgttgttcagggttgagcaaattggcaccaattacaggactttagccccaaaattgtgggctgtggctcctttctctcccttgataaatgagaaagcatgtggttcttgttactgagggcagtcatcttgtaaccaagaaaataaaaaagctggaaccctgatcaaataagcaaagatttataactttgtatataagaagaaggacataaacagtaaactgtgaaggttttaaataaacacttttctgcctccttc

SEQ ID NO: 95834 - DNA, 708 bp, Homo Sapiens
  misc_feature (164)..(164): n is a, c, g, or t
ttctcttcctctgaagcggagcctcacattccaatggataggaggaggttgagtcattaatgtagccgtgctgccctatcccaatgatgggttacaagcacagggtcaccaaaacgtattacacagaagaggtgcactgggaggtggcggctcctccaactcanaagagatggaatcctcaaagcatgaggcaaggcaggaggggcagagggccagggaggtggcatagcattgcatgttctgcgtctgtatcgaccaaacacatgaaaaacctacagaatgcactgcattccatagtgctttggagacccgtctccattctctcccatcttgaatctgctggagccagaagaatgcctctcaagagctgaatggggcagggctgagcactgcaacctgtgtgcatgaaaacaactgaaaagcagttctcaggagggcaaaggctcagacactgcacgactattcctcgttcctgagtttctccaaacctgcactagaccatcaaggggcaaataaaaatcaaccacccccagatagcaagtcctcgtataggactagaggtggatattgaaattagtaagcattagagaggaaccggaaatacaccaaagcaaagcagaatataaaatggaaggacaaagatgaaaataacttgaaaagtgtactttacatgagaaaaatacttaataaaagtctgcgtatttaaaa

SEQ ID NO: 95835 - DNA, 716 bp, Homo Sapiens
gggggaggaggaagaggacacagaggccctgtagccaggcaccaagaatccctcccaggtggctgggtctgaggggaactccgagcagccctaggtcctcaaagtctggatttgtgtggaaaaggcagctctcacttggccttggcgaggcctcggttggttgataacctgaggaccatggatgctgatgagggtcaagacatgtcccaagtttcagggaaggaaagcccccctgtaagcgatactccagatgagggcgatgagcccatgccgatccccgaggacctctccaccacctcgggaggacagcaaagctccaagagtgacagagtcgtggttacatatggggctgatgactttagggatttccatgcaataattcccaaatctttctctctgttggaattgtgactatcttctcacacaagcggctacttggtcttgatgccttcccccgcaaaacagcaaccaaactgttctgggccaatatcaccaccttgtggtcatgatgaagaattgccccctttgccctcaacacctcttttcttcttgaaaattaaaaacaacccctttcaccccctctactgtccttattccagtttgtgtccgtagttgctggaggaaagaaaatgcctattgctcttttttttattctctttatctggttactcttctgcctttcttttctctccctgacttcatttccattaaaggct

SEQ ID NO: 95836 - DNA, 891 bp, Homo Sapiens
atagaaaatatctagtggcacttgaaagaataaataacacttagaaatgtttaaaataatacactgaactagaatagacttttgagataacatagttcaactcctttgttctagcaattaggaaactggggttgacaggtgatgtgacttgctgagggtcaagtgatattcatgaaactctaatcaattgactctactgctctttaccagagatctcctattgttcttttgtgtgtgttgcggtggggggtttaaaacataataagtaaacagtaataaagaaccgacatttaactaaatgtaaagttacaaataatggattgattcagttttagtcgttattatgaggtgttttatgtcacatatgtcaaatcatgtttaaagaaccaattgtaattacatagtgactgacattatcacagttatgcctagaatgaggaagaggctagttagaaaggacagagaatatctggggcttaaagtggtagtaaggagcttctatttcttgaaatccttctatccagtagagtgataaaagatctttctcacttcacttacttctgcatgatttattagattaatgtagaagggagtcacagaggctagcaaattccccacagtatgcccacagacgatattttgaaatgcatctaatgatcatattgtaatctcaaacatgccaaaagatgatgttccttatcctaacacactaacactaataccttcttccaactaatggtgtatttatatgttgtgtatgtttttgtctcaatttcatttttatttcccatttagagtacattagtttaggtccagtttaatgtgctcaaaaatccattaaattccttttaaatggccgtatgatagtaaaatcagtcgtgatctaagaaa

SEQ ID NO: 95837 - DNA, 480 bp, Homo Sapiens
ataacggataggctaatgtagccaaaactttgtttcgttttatgatttcgattaggcatttcattgctacggtttaataattgaatatacaagaaatactataaaccatcacatccccaacagcccccagccgcccagttcccccatctacttggcaaagattctctttttgaccaaactctaggcggcttcttctgagccctcttctggactaggtggccaccttggtctataaagacctgaacaaacccgaacatagttactaatagccccggtcttctcaagtgcctgcctgagaaaactcaattgatgccgccaaaggaatttactgtttgtttcagtcaacgtctgaagatagggccctcgtctcccaggctctggtaggagtggagcctgattttgatatgtgccagttatgaaacccagatggttccccactgtcagtggttactaaataaaatctgttttcgtcatttaaaa

SEQ ID NO: 95838 - DNA, 657 bp, Homo Sapiens
  misc_feature (110)..(110): n is a, c, g, or t
  misc_feature (367)..(380): n is a, c, g, or t
ccaggggtagtggcccgacaaacatatactccagcatgttgtagcctgacatcagatatcatgagattaccatttccaagtacccgagtattaaagacatcaatggattntgtgatctatttcaaagagaatacttcagtttaaacaatgtaacaaataacctgaaattatgtcaaaagaccactatccaagcaatcaatcatgaaaagtataaaattaagtataaaattctccatgttaagaccttttctctactcactgaaatgccaaaaaaattaagacattcaacagccaaacctgtgtttttgtatataaaataaacattttataaatttcattagaatgaacaaaatttaaggaaaagacnnnnnnnnnnnnnncctgagaagacttaccaaggcggctccaagaaatgattggtttgggatttcctgtggccatgcattccaaaactacagtctgatgaagagatgttgttatgttctgtggacctgctataattgttgccttaaaggatatgttagaaaccagtatctcttgtgaagaataaacatttatgtgaagttcaacaatgtcttcagtccaggttttcttctactacatttaaacaaacttaacctttgaaataaaaactatcatctattgcattttaaaaaa

SEQ ID NO: 95839 - DNA, 649 bp, Homo Sapiens
ctagtatggaaaacataacctcaagtatctttgatgtaatctccaagggaaaagttgctccaactttttcttactaggaggaagctgaggcacatggagctgaaaaacttgatccaggccagaaatgcttgaatccatgagtcacaaacttaggctcaagttctggctccattgccttctaagtgcccttgaataaatggctaaggaagaccagactgagtttctttacgtgatggcagaagtgttgaaagagaacgagagcggaagctgcaacacctcttgaagttgaggcctagaagtcacacagcatctcttctgctctactggattggtcaaagcaagtcatgggctagttcagactgagggggtagcaaaatagaccctacctcttggtgggaaaaaaggcagtcacattgtaaaggagtgggcacataaggatagaaggacttgatttggctatcttataaacaacctaccacagaaggacttctgtttttctgatcctcccttaagtttgaactacatgttccctgaggaattcctgcctgtggagatcaaattagaatttggattctcagcaggtggtttaataactgcaagcagttgccttcagagtccctgaataaaatcatcctcctggggtcctggg

SEQ ID NO: 95840 - DNA, 700 bp, Homo Sapiens
  misc_feature (239)..(247): n is a, c, g, or t
tagcacaacatttacttggcaaagccaagactgcccacatagaataaaaaacaatagacttttcattagccaaagctatccatggctaagaaaaagtggttctgatctaaccagaattagcaagggctcttagaatgttgctagttacaacataactgttctctgtgcatctggcagactttggtttctaaacctggattcattaatgaattgtatctcagtcacttgctgaggcagannnnnnnnngtatcgtataaaatctaaatttccttggagtaaataaggtacatagaatatttaccaaaactcttttagcctatactgctgggtggcatttgtaataactcattttagcaaatgtaggtctaagcaccatggtgtagggtctgtactctttgcaaacgagctgtgtgcctttgggcaggcaccttatttgcttgcaggttttggttttcttatgagtaaatcaaaggctttaggttagataatctccaaatccccacttcttaaggtaccacaaggtgtttttggagcttgataattccccatagcctcataaaatttctgactcattccctaaatagcatatttacctgtgttttgccctttgcagcttcactctctttgaggagaaaatcaagaaaagtacttgcttctatacatccttctgttattaaaataaaactttgaaatagaaaa

SEQ ID NO: 95841 - DNA, 446 bp, Homo Sapiens
aatgtagacagaaacaaacaggcaaccctgcagtggtagtagtggtgacagcagcagcggcaatgatggaagcctgcaggagccaagagtgtaagaaatggaaaccgctttctctattttctctggagctatagattcagacggttatcttaacagtctgcaacaatatactgagagaagcactaacgaaactgcatttctctgtcatgctgtgccagctgtagtatgtgggaaaccttgtctctcccaagtaccttctgtctctggcagctccatgtaaacttcaggaatggtcagtgctgagcttttagttgctgtatccaccatctccacagaccaagacccagtgacttgcatttcttgcctccatgtccatggcttattttctccctactcagttatgttatcctacttcattcaccgatgttgtagacactgttctgaat

SEQ ID NO: 95842 - DNA, 342 bp, Homo Sapiens
ttccaacagggcagaaagtacgggcgtgcctgatttattccattatagtttgagcattctgttacaggcatttagttgaatataagcctcagtggaggctgaggataactagtcgaactaaccgaaatctctatccttggggcaaaggagtaatataattgagaatgacaaatataaccaagagtgaaaagacaaactctaatgctgagcacccaaagagtttctgttatgtctttgaaataagaacgcagggtttcatgttgtctgagcttcattgcaggccagagcagcaactaaaatagcattggtttctcttccatttaaaaagatatcagaatgcag

SEQ ID NO: 95843 - DNA, 540 bp, Homo Sapiens
caattctctgcctacccctagaaactgtgattgagtagatctggggaggggcctatggatctgctctccaactacagcccagaagttttccctgaaaatttttcccccaaagtgggggaaaaacttgcagtgaggaccaccacagaagaagctggttggactcagtctccttcctgcctgcaaccttgagaggaggcccaagaccttcgtggggtcaaaggctggagactgctactgtcctggaagaggactgtcaggacagggctgtctgtttcgctgtgttttcctttggttctaaggaacttttttcccctgtggaagcaaacccaacagtctgcatcctgagcttgagaagttaaaggcaaagtgtgtttttggcatgatcaggcttacagataaagactggtgagtaacgtgtgggcattcatacaaatgaccactcacatgaaggtggaggagatacactgttctgggactgccatgtgaggttttaaaagatgaaatgtcagaaacattaaaaaatatgtacttaaaaacaaa

SEQ ID NO: 95844 - DNA, 468 bp, Homo Sapiens
ggctgtaataaggtactcgataattggtagctgcattctaaaccatcaagtttactgttagccacttctctcttcagaggttcacttaagatgactgcaaggtgagaagattcacaacctgagttacgagcttaagcaccttaaaatcctttaggagcaaaggactgactttagttactcttctcccagtagttggccccattcccttgctttccatcactgtataaagaagctcaattctggcatgatatgaaacaaaccatattttacttgactcaaaaacttctcctaatggaggaataaacactattgttaggttggaaactgaatgttagtcacagatacggtctgtaattttctaatcatgagagatgttacctggatgctgaaaaatgccaaatctcaaaatcctgaggggaggattcattactaaataaagaatggctagcacaaggaatgggaaagaaa

SEQ ID NO: 95845 - DNA, 586 bp, Homo Sapiens
ccaggagaaagtggagcggctgttagaggtgtcacgtgaacctgacaagggctggcggggactggcagaccatctgggctaccaagctgaggctgtagaaatcatggcccaaggccaggtgtgagcctacacactgctgagggactgggctatccaagaagacagtggtgccacccacaaggtgctatagaatgccctggttgccatgggccaggaagatgtggtccaggtcctgggcccccaagctgagggctgttctgtggtgtgagtgctgtctccatagcctgcactctcggagactgctccggtgctcccctacccccatctcatatatctttccctttgtgggcttcctggggttgctgggctcagcctgctctgttctggggaagaaaaccgaagatccagccaccattcacttccccttatccacccatcccctccagaagagggcccaggatatggtggggagtgggcagtgaggagtggttctgccctttggatccctactccacctcctcttattaagcctcagctggttttgctacttttgtaacccatattaaaggtgattcagacttttaaa

SEQ ID NO: 95846 - DNA, 553 bp, Homo Sapiens
ctggtttgaatcagttagcagcaattctttgctggacatacacttctatcaaaatgctactcgcatgttgaagcaaaaataactggagcacgtgtgtgtgcagaatatcatcctatgtgaagagctctgaacaagggcattggcaagttttaatttaatacctccaagagtcagcctctgaacttacaatattaaagttagcttttcaggctttagacttatctgtggggggatgacttttaaaaaatgaaagtataaaccagatctcagagaaaaggaattgctatttatggagtcaagactttgtgttcccactaagaatacatttttctcctacctaaacttcatatggtttgaatgacttaatatcatgtattatcatttctttcttcagatatgataaatcaaaaattatttgttataatcatcttaaggggaaattagcctttgagtgtaatagaaaaattcaaaatacaacacccaagcaccacaaactggcatgggtttctattatggagcgaaggcatttacaactatatttatgtcaataaaa

SEQ ID NO: 95847 - DNA, 605 bp, Homo Sapiens
tttcaagtacaacatttaatatttatgtttagtgatatagacctgatgccaatagttggtcttacatattgaaatatttcagaaacaaaacagaaagaatacatatgaacaacaaacaaaacaaaatctttgcatacattgggttttttaaagttatctgtggcacacgactaagttttatgtagactgacaaaaaccttagtaatcgtcatgaatgggatgacttagaatctcctcaattttctaggatagtctaaaaggcagtagagcaaatgcaatcctgactgaaagggaagcagtggaaatggtagagggaccagtctggtactgatggcaaagcttaacatggattcatacaaaaatccagattatgtttcattttttctttttaaatttaaaatcttctaccagtaaaattaactggtattaattttacccactgcatgagtattaaataaaatcattattgaaaatatgtgaaacccaaagacaacagtaattctcaagagttgaatatcaaataaaagcagtattggacaatatctctatgccaagaagaatgagtgatgtaatcaagctggccttcataaaattattaactcttg

SEQ ID NO: 95848 - DNA, 532 bp, Homo Sapiens
tgacagggaaacaatgcccgacaccgggcccttcccacatgccctgctgaggaccgacctgagtttctgaggcgcctctgccgggccctgtgtggagggaggaggcagagaatgggtgacgggaccctggacaagccaaagcggcaggagaagaccctgcctgaacccagctatgtggagaggcccacgggatggaggttgaggtggagcatgagctgcccctgagcagacagaacaacacaaaggggctgggaattgagagtggcggtgcccacagggagcccacaggcaggaagacccaggctggaggatcagggcccccacggaggaagactttggactaaaagtcacaagaccttgcttttagtgccagctttgtcactaactggcaatttaccgtaatgaaatcaccgatactggcccaaccttcatttcttcatctgtaaaacatattgccagggacgaagtttgcaatttcgttgacttcaaaaggtggctgtgggaataaactaagatactggaagagaaaaaa

SEQ ID NO: 95849 - DNA, 543 bp, Homo Sapiens
tttcatgcaatataactgacatgcatcactcattaatgtcaaaaatgcctggtctaggtgggtacagatattttcataacaggtattcagaaaaattagctatttttaacagtgttttattagtttttgtctcgttttctcagtgctattactgttttgcaattcagaattatcatttatgtatcttacttattccgtaagtttgttgtggcttagttaccattatgatatattgtgtagtacttttttcatttatatgggcacagtaaatatgctgtggctaggtaaaatgtaatatttatttcaataatgagacagccatgtattttctgccaattggtgtgtactttgctgtcaaggtgaaaaaatactcctttcagggctaacgtaggtttgtacaatgtgttttggtcataggatgtttgaatctgtccttccctagaatttatttgaatgccatgtaatcaccctttttttactaaagaatgtgattcctttgtgttcgtaaaaattaaagatcatgattgggaagttttataaaaa

SEQ ID NO: 95850 - DNA, 550 bp, Homo Sapiens
  misc_feature (111)..(111): n is a, c, g, or t
cggggtgcctgaagtagggtgcagggaggcagaatccaaggaagagatccccgtcaagcatagcacccctcaattgccggtccagttcacatctccatccccagaaaaganggcaaaacttcgctctttgggaagccacaatgttgaaaggaaatgattaattcccaataagcaatataaggacaccaacatttgggagaatcgcggcagcgtggcagcaagggacacaggaaaccaaactgtgctgttctccctcaggatggaaaggccctgaggaaaggaaggggtaacacagggagaaagctgagggagaggagaacagagccctttccctccaggagctgcggaagggaggaaagtgaaggacaaaatcacacggtctcattcaagggacagttggtgtcagtgtcctggttgtgacatggtactgtaatagtgccagatgttacccttgggggaaactgggtaaaggtagacagagttcctctattatttctgaaactctctgtgaatctataattctcaaaataaagaggttttttaagtaaaa

SEQ ID NO: 95851 - DNA, 560 bp, Homo Sapiens
tgttgatggggccccgccaaagctgacatagacaggtccagcctccaggtgcccccacaccgttttcttgcattatgaagctgagcggcttctttctactctctgtgaacatcctcctttgcctctgaatgacccagcctggagtcttgaggagtgcagctgcacggaaaccgggatattgcccagagtttgatcttgactgccctttcactctcttacctatgcgctggcgtgataagagttgcagggggtcaagaagtgttgctactacaactgtcggcatcagtgtatggagccctggtggactttggattgagagaggagctaccctctctgcaagagcttcgaagagagaagctaccctttctgcgagagcttcaaagaccagcagacatcccgaacaccctgcctgcagagaggagccacccctctccagggccccctctctgttgagagctgaatactcaagggatgatgtgcctacagagagtaacaacccactacaggtctcctctgagctcttctaacactaaataaagctcttcttcatcgtcttcaaa

SEQ ID NO: 95852 - DNA, 461 bp, Homo Sapiens
  misc_feature (42)..(50): n is a, c, g, or t
  misc_feature (225)..(233): n is a, c, g, or t
tgccactgtactccagcctaggtgcagagctagactatctcnnnnnnnnnttagttttagagcagatagcatcatagttactcctgttagtctttttgttctgttttgttcatttaatttctctgaaactgccagtgtcattatcttttaccacccagttcatgatcagcttggatccagtcaagcaactgatgtatttgagactgtttgagtacattttcttannnnnnnnncttgtggtatcacacttgtcatcgttaaaaacagtagatcttctggtgtcactcttgtcaccattgaaaacaatgcttctttttcaataaactttgaattggaatattttcatttcactgagatatctaatatgtataaaataaatagtaattaatcaaaaagtactgatatgaataaattatttgtatatacacccgaagacttagtaggtactaaaaggaagctac

SEQ ID NO: 95853 - DNA, 1067 bp, Homo Sapiens
ctgcgagggaataaacagtctcatcagcccatctgcagctgtgcctttgccaccttctgcccccaaggaggcctttgtacaactgtcaccctcaggaacctatgaaaagcatttttcatcccagacttggccccaggtggacgcacctgttcccttatatttcacctcatggaactcctctccctctggtccagggcaggaccttcgcacagtccattctgccacacaagcacctttatgaagccagaaggaaaagccaggatgcgcgtgatgagtagctatcacagccattggttttagagaaatagagaagaggaaaactttgaagaaattctgcccattaactacatctgctaattgagaaaagtccagttttcaactgtagctgtgagactcctcaatcttgcttgggaaaaaataatggcctgtgagaggaaggtccccatcggcttcagttaatctaatgttctatgtttttactgtatttctgctgtccaacaatagttagccttactccacacttcaatggggtcgaagagccacagtggcccatacttcaatggcctctgagagccaaaagcactttctatatcatctagtcaaatacctaatttccagataaagcaagccaggcctagagaggttccaggattttcctaaactcacctagctacttagtggccaggccatggttagaacctgggtctcctggtgtactctgtgtttttcaatcctacatggttgcctgacaataaatgcacacatagttaattctctagtaatgtgctatattcattcataacttagtcaataattatttcttcagttggaaatttgacattagacaactcatcactgatacataggattcttataagtcaagatttaattaaaatccattttgttctttttaagctgtaagagatggaaaaataaatatgcaaagcagtggattctattatgaatcaattaggccactattctatgtgttttgttatccatggtgggtttcattcattcttgttcagtttgtgagctgtaataaagtgtgtgttttgtcattgaaa

SEQ ID NO: 95854 - DNA, 651 bp, Homo Sapiens
gctgcccaaggaggcggtgggcgccgagcaaccgccctctcctgcatccaccagcagccaggaatccaagctccagaaactaaaacgatcactttctttcaagaccaagagtttacggagcaaaagtgctgacaacttcttccagcgaaccaacagcgaagacatgaaactgcaagcacacatggtggctgagatcagccccagctccagcccactccctgctccaggaagcctgacgtccacacccgccagggctggtctgcatccaggtggcaaggctcatgcctttcaggaatacatcttcaagaagcccactttctgtgatgtctgcaaccacatgatagtggatgcttcatatatacagattatcctggtaaataattggggatacacataaaaacacctgaaccaaagcatatacaaagtactagggaaagccacaagtggaaacaatagttctacctcaggaggaagtgtcttatgaaagttccatgaagaatgttttatttgagttggttattgaaggatgaataggagttaatgactctctaccaaactatctacagttcttagcagcaatatcctgttgtgtaccaagaatcaaaacatcccatattttctttaaaataaaagcatgacagaatcaaaaaa

SEQ ID NO: 95855 - DNA, 337 bp, Homo Sapiens
cttcagcaggaacatggacagctcatccacagtaatgggagggggcagggggatgattgtcctgttgggaaatgtggaacttcttcctgacccatcctggtttattcattaaatgtgcctcaaggtcatcggatgaaagagaagattggaagaagctactgaaggtaaagcagaaatataagggataattcctcaactacagtggacagagctggaatctgagccaagcggagcagtcatgctgagttcaggaagcctcactgctaaatgccacctatcaaagtggcctcccctgaccatcctgtgtaaaataatccctccttcctctctaaaaaaa

SEQ ID NO: 95856 - DNA, 454 bp, Homo Sapiens
cagaaagcctggcacaagattcaggtatgatgcaaagaagacacctgagagggaggcctggagagaacactaaatgaatccagcctggaggctgcagtgggcctggaatcgccacctccatctctatgttgaaaagacgaggacaccattgtttcctgatcaacttcccatttcatcccagcagagggcaccagtgtaattctgttcccagctgtggaggctgagtggaaggcaggcgtgtcaggcgtcactctccaggaagaaatgaccccaggcaaactgcatagcagtgcaataggaacaactattgtgattgggtcctattttgaagttaatcctaaatcaattttgattttttggtccttcgaatatgaccaaaaactcagtctacaagtagattgttaagtcactttaacaggtatgctgaaataatattaatatctttgaactgaaa

SEQ ID NO: 95857 - DNA, 697 bp, Homo Sapiens
cattacctcaaaggccagtttggagtgaccgaggtgtaaattgcccacagcactgttctgcctttctttaggacggagccttcagtattccagtgcagttaagttctgagccaccattctatatataggattaccttgcttgtactaatgagcaaaataatttttccaaatgctgatggatctttaattctgcaaaaatgtcacaggaagtattttgccttcttggaaaaaggtcctgccttgatagaataactgtccactttatgattctcagcataggtcaagttctggtgggtatttaagttcattatcacaccactccagagccataataaaggactacttttaatttctgctctaattactgagaaataatttacttaaatcattatagttggcatttgacatggaacacagatactggtttttgttttgctttgatttacacccccccacttggagaaaggaatctgaagaaattaaaactcattttccatataccccttcttccttggtccaggaacatttgagattatccttaatgttgggccatttctaactcagccagtgcaattgttgaatttgtggttttcagcagatttgcaatttgccttttgatttgactaatgattgctttttaagcctttgtggcatattcgttttcctaatattttaaataaatagtgaaatgtcatgg

SEQ ID NO: 95858 - DNA, 690 bp, Homo Sapiens
ggactccagccctgccccaggctcctgtgtgagagctcccttgcaaggcagctctgagggctgtggacggccactcggtggaagtgtcgccacccacgcctttctggtttgactggaaaacaaggcccatcccacctatcaggatgcctgagagaaggatctggccggattctgcaggccgccaggctcccaggctgagccttccacctgctcaggcgagagtgggggtggggcaggtatctccaggtgacaagcaggcctccctcaggggagggagagagaggtcacctcggcctctcacaggcatctcagctaagcaggtgcagcctgggctgatggcagggtggacaaggatgggcttccgagagtctggccttgcttgcccccagtgacgggaagctcagcccctccactgtcgtcatgaagcttcctcttggaacctgggctcgggctgtagtctgggcttcctggcccatgacatctcagagtgtgggaacagggtgggcctcagtcccacccatgagttgggcgtcagatgggatccccctggcctcctcatcgctgcccccatccccgctgtcacacttcccactgggtccccacggccttcctgcctctggccctttaaggcccaggcaggaagcccctccccatttagggcaataaatggacacgtaaaatggcaaaaaa

SEQ ID NO: 95859 - DNA, 586 bp, Homo Sapiens
  misc_feature (387)..(387): n is a, c, g, or t
ccttgctaaacaggacccatgggggagagatttgaagaagccatcagggttttgactagaaggcaggggtcctcaaagctgtgaaagtctgatctatcagaggtggctgccaagctgtgctttcttctgcagatggcaaaagaaaaagatgtgaaacaagacatgtttaaatggaagagagaggaatgagagaggaaggcaagaatacaaatatttaagaaagctttattttcctgaagcaaagaatgacacttgaaaccgagggaatctcaatgtccaccttgcatttccatgaccagcaagagaggggaacccctacaggaatgttcatcctctgcctctgacctgggaagtctcagtcatcccccgaggaccaattccaaatgntcaattcattcaccaccattgcccttgtcattgcatccactcctcctctctctctgacttgtgttaatggtaggtaactgtgtatgaatctaggctgggggtttgtctttgaggtcaaggactatttctgattcactgtgtgtctccctaaatccttcttccacccagcaaagatgctcaaaatatatatacaaatgat

SEQ ID NO: 95860 - DNA, 584 bp, Homo Sapiens
ttttctcggagtagaacttcccggcctatttatacaaatcccacttgccccatggacttagaagccagtgctctgaaattgttccagtgttatacatgctaaattataaggatggataaagtaatctgactgaaaaatcaccaaggtgatcagagcaagacatccaaaggaaactatagaaatctatcatctgagtggccagtttggggttagatgtggcaaatttaagactgtcgccattagtgtaaattgacctttgttaaagattcctgcgccagggccttctgaatctgaaggactggaaataggtaccaagagtgtgtatttattgtaaagctcccaaggtgattcttatgcagccaatcctacaattgtccttggattaaagtttgggaatgatattatctaaaattaatataatcaactcaaggtggcagaggggaaatcaatcaaaccaattatttaaagttaatatataaagagatacactggttttggatgaatttcttttttaaaaaatattagctttgttggtattatttatacaaaaagggccctttcttcttccttaaataaaaacaatc

SEQ ID NO: 95861 - DNA, 867 bp, Homo Sapiens
aaacaaaaagtgtggtttttaaaaaaattcatagagataataccattgacatatactttgagtaattttttattagtaatgatgagtttcaccagctcttttatcctaatctgctttacgaccacagaaggatttctttaaatcccttaagtattctgagtactaaagacagagacaatatgttatatttgtgtaacactttacaaatttcaaagtgctttcacacctattatctgatttaatcttcacagcaaacccaggggggatgggtaaggcatgtatgatgaccctgtcttcacacaggaggatactgtgtcttaaagctatctgagggtaacactgtacttgcctcctaaagatttatcccacctctgccccaccatgatcactaccacacccagacaccacctgagaagctataaaatttggatgagattggccccaccctcatctctgagagagttatagttggtctaccttaccaagaaagaagtggagaggggaatgatcaggatgaggaatcctggtagaagactctgctatatggcacctttgactcaaaaacattgatgacgtgaaaataagtcaactgctaaagttcacattttaatcctaggcaggctctcctcaacccatcaaaatgctggaccacttctttccacaatcagttaatctgcattcaagaatggaaaattaactttattattagcttaggaggaacataattaagaaagaaaaatgatgtagggaattataaggatttccaatgccaagtataaattatttttgaattagctattttaagtttttaatacctcagatccctcttcattcatatatataaattaaaggttaattgcatttaaa

SEQ ID NO: 95862 - DNA, 665 bp, Homo Sapiens
ttacagtaggacacataactggaagttactcttgcacatagaaacaaaaaatggcagaaaagcacaaaacttactatagttgtaacagggaaaggaaacactagggcctacaacgtactaatgtcttgggtcatctatgggctcatgaggctctaggttatggaagtaaataccactgaaaagcaaatattaattacacatgaggcaagcctttttgagttctgtatgtcattttgtagattttgagttcattctagtggcaccatttgagatcattttcatgtaattaaaggaacacagcaacctggcactgtgttattgcccttagaatggaatgaatatatgtttagcacaaggtaggaagtgatgcgttaagttggaaggctttgccgatcatggtgtgtatgttgactaacctttattgtgcctttaaaaaatatactcaagaactaccttaaccaagtaattaaagtcaagattaccagttgtgggacaaatgacatgtacttcctggtgtgatatagaaggaaggacacagtatcacctatatagtattcttgaccagaatatttaacctgattttaaacaagaagtaaaaattcaaataaatttagattgtggtgcattcaaggcctgaactttaataaatgtccatgtcacggcag

SEQ ID NO: 95863 - DNA, 571 bp, Homo Sapiens
cctcgtgccggtacatgctgaaaaacgttcgggtcctgggccactttgagaagccgctgttcctggagctttgcaaacacatcgtctttgtgcagctgcaggaagggaagcacgtcttccagcccagggagccggaccccagcatctgtgtggtgcaggacgggcggctggaggtctgcatccaggacactgacggcaccgaggtggtggtgaaagaggttctggcgggagacagcgtccacagcctgctcagcatcctggacatcatcaccggccatgctgcaccttacaaaacggtctccgtccgcgcggccatcccgtccaccatcctccggcttccagctgcggcttttcatggagtttttgagaaatatccggaaactctggtgagggtggtgcagatcatcatggtgcggctgcagagggtgacctttctggctctgcacaactacctcggcctgaccacagagctcttcaacgctgagagccaggccatccctctcgtgtctgtagccagtgtggctgccgggaaggccaagaagcaggtgttctatggcgaagaagagcggct

SEQ ID NO: 95864 - DNA, 389 bp, Homo Sapiens
  misc_feature (144)..(158): n is a, c, g, or t
tatgggacggctccattgaaaagaaacataatatatggaaaaattactagaaaatctaggaaaactgactgaatgctttggaaagacacagtcaagattaacatgctgagactcgggaggtggtgatttgcctagggacacagnnnnnnnnnnnnnnntgtgtcacaagaaagtttacagaacctactcaaactcaaagagaaatcagagactaaattctcaaaactggaagctccctacagcatccacactcttcagccttgtactatgtgatgtgtattacgaatggagccaccggcagtatttgtatgaacatgagacaatgtgtggcagatgcttggtgctttgtaatatttagtaaaataaaacaataataatgtaactataaa

SEQ ID NO: 95865 - DNA, 725 bp, Homo Sapiens
  misc_feature (671)..(680): n is a, c, g, or t
ggatttaataccttagacagtacatgtttattttagtacaacaaaggcatgcacaaatcagaaaaatattcaaatatatttgaaaatgtattatgtaatttgtgaaaatctcagtatctcttatgcaataagctgcatttttacttacagcattattattttttcttgctattcttagaatatcttcagatccccttccaagccacctagtaaatgttctccaggtaccttttgattctctcaaaagaaaagcgcatgccttctggtccactgtaccagaattttaaggctcatgatcaataactaattgattagtgcaattcaccgaagactatcataaacaaagagtagctgacatagctctgtacataaacacagagtagctgacaaagctccatttttgcatacagattggcaaaattcccaaggggcattataatgttgcatttagttagctaccactgaagtcacaatatcaccctatttctctcccaacagaacccaaccacagatgttcccatcctctgttaccagcctagcaccccttctttttgtcactcccagttgaattgctagtcggcttcatccacagtcaattttcggaacccaagaaattgtttcaaaatatttctaagttccatagtagcaattagatcttctaggctcatctnnnnnnnnnncttgtattattatgtaatatttgataactattaaaaatacatgat

SEQ ID NO: 95866 - DNA, 623 bp, Homo Sapiens
gcagctataatcttggcggaatgaatacctactaggagcaaccttcatccaatgactaacaggagctggggtatcaattccccagctcccagtgctcaggggaacaccaagacctattctcctcgtgggagcaagaagatgaagtggagaggaaggtttgagtcctttctctctatgtatctgtcaggctatgctgcagtaacaaacagcccccaattcttggtggttgaaaacaacgaaacttatttctcactcatgaaagatgtctagtgctggtcagcggggggcttttctctacagagtcactcagggacccaggctggtgtgggctctgccattttgcaatgttgccatctcaggacagcagaagagaagagagcactagaaagtgtggctcctgtaataagatgatttcacctggaaattacaccagtcatgtttgttcagaatccactgaccagaatgagtcacatgacaccccctaattttaagaagacccagtgataacccgctcactaatataccctgaattgcctgccttcctttctctggctcgcttccccactccctacttcctgatgccctctgggatcactttccaaataaattatatgcacctgaaa

SEQ ID NO: 95867 - DNA, 854 bp, Homo Sapiens
aagagggtatttcaaattaatgcagtaaaatgattaatttaacaaatacctattgagtattatgcattgggcagtcttctaggccttcgaggttacagaagtaaaaatgaacacaaatcttttctttcatggaacttacactaatgatggtaacagacaaaaaataaacaggttaaaatttatagtgttagaagaaaaagtaaaatagataaatagaatagttttgataagatagccaagagaagccctctttgaggtggtggattgttgatcaaaagaaattgagagacgttgctatgtgaatatctgaggtagagcactgaagcctgaggcaacacactgcaaaggccctgagaattgattatgtctggttatttgagaattgcaaggaggccagtggggctggagcacgacagtgcagatctagtagggcttatttttaattaattatactgagactgggtggggaattcaattctacctcacattttatatcagtataggtttatgatggcttaaaatggtaaatattttaaatgatactataaaagatcaagaagaaaatatagttgaagaactgatctcagagtggggatggcctttcacgttgtacctaaaaaaattgaattgactattaatattaaaagcacatggcaaaaatatcataaaatatatttgcaatgtatgatagaaaaaggtttaatgttattaatacataaagaattcatacaaatatgtaagaaaaagctcagcttttcataaaaatgagcaaaggacatgatcaggcaagatacacaagaaggaaacacaatgggctaataaacatataaaaatgattaactttcttagcagtc

SEQ ID NO: 95868 - DNA, 343 bp, Homo Sapiens
agttggcttgggtccattggattaattttggtcaacaggctctgaagaaaaatgacatttcagggaattaagagcacgtgttcctccctctaccttctctttcttcccccagtgaccttggaggctacttgttgataagttggttgaatctgaagagcccttggatacggaaggctgactgtgtatggctactctgaagaatgcaagaaacagtgtgtgatacgcttagggcttagcacattttgccatctatggagcatgtggtatgagtcagaaatggtgtttttgcccaattcagagactagtgcagaagacagacaaataaaaagacaactcaggtcta

SEQ ID NO: 95869 - DNA, 580 bp, Homo Sapiens
caggctgcttctgccatgctcaatctcaccttactcttgaaggaaataaaaggctaggaagccagaagaaatactcacactgagggcactggcccaccagggatggcattagcaaaagagactcaatgaggatgagaaaacagagatgacagagacccaaataacatttgaattggactctacctgcaagtggagctttaccatccaggttcttcttggtactccactcccatttgcacattaaagattgtaagagagttggaactttggacatggatggacctctcccagtaaatctagaaggcattcattccaacagcatacaaaacaatactggtgggtgcccacgccacaacactatggcaccataaatatactgctataggaaaagtttgatttccagccattgaacttgacattgaaattccagcctgggtgcagtagggtgagcctgtagtcccagctactctggagactgaggcaggaagagcacttgagtccaggagttcaaatccagtctgagcagtataatgagacccccttctctaaaaaacaaataaatacatacataggcatcaaa

SEQ ID NO: 95870 - DNA, 452 bp, Homo Sapiens
ataaattggagtgtttctgcaaattctaagaggttcttaacattatccagaatggtgccctggtggacgatcatgcaccttgctggcgaggcgctttcttcaggtccataaatgcttgctgtgagtgaagaactgaagaactgtcctatttgcattctaaccacaaaaaagctagaggactcaggagttagagttgctttgatctacacatattcttgttgcttctatccctttctaatgctacagattgcactgatgcagtgaagcactgccaaatcaacgtggttaggaaagcagaagagcaaattaacagaagtctccttacagtatgaccacacaacaggagaaattgcaaaacattaactaaagttaaaaagtggtcgaactagcatgtgcacataaacatcttattatttaacaaaaaataaatttacccctaggaatacctaaaa

SEQ ID NO: 95871 - DNA, 1438 bp, Homo Sapiens
  misc_feature (483)..(483): n is a, c, g, or t
  misc_feature (494)..(494): n is a, c, g, or t
cgtgaccccgctgctgctgtgtggagagggaggctgctgaacccgagctggtgtgagcttctcttgccgtaagtccacgggtggccaggagcacgtgttagtctggttaagagctctgctcagaagtagccgctgcagctgaaggttttcaggcgggctgaaggctgggccgcttcttcattcatttcagaaacttgaacagtgggccttctacacacgctgtctttgtcagcctcaggcagttcctccatggatgagacacaggggcctctggccatgactgtccatcttcttgccaactctgggcacggctcccttctgcagaggactctggaccagctcctggattgcatttgcccagaggtccggctctttcaggtgtctgaacgggccagtcctgtgaaatactgtgaaaagtcccattccaagcggtcccggtttccagggatgtccgtgttgctcttcctgcacgaaagccccggnagaggataganctatttcgcgtcctggactctctccagcattcgccatggcagtgctaccccacccaggacactcggggaaggctgtgtccctacttttttgccaatcaggagttctacagcctggacagtcagctgcccatctggggggtgaggcaggtgcactgtggctccgagatcctgagggtgacgctgtactgcagttttgataactatgaagacgccatcagactctacgagatgatcctgcagagagaagcgaccttgcaaaagagcaattttgtttcttcgtgctctatgcctccaagagctttgctctgcagctctccctgaagcagctgcccccgggaatgtcagtggaccccaaagagtcttcggtgctgcagtttaaggttcaagagatcggccagttagtgcctctgctacccaatccatgcatgcctatcagcagcaccaggtggcagactcaggactacgatggcaacaagattctgcttcaggttcagctgaatccagaacttggtgttaagaatggcatcttgggagctggcatgcttcccctgggctccaggctgacttctgtctctgcaaagaggacctcagaacccaggagccagaggaaccaggcaagaggtcccaggggcattctctggagcttcctgagcccagtgggagccccacatcagacaggtgtgctggcacttcgtggaaaagccctggccggtcattccaggtcagcagcccagctatgggtgcccacctgcacctgtcttctcatcaccttgaatccggggccagaatgaaggtcctcaaccgggaaaacagctttcagaagcttgaggccgagcacgaatgttgacaccggcttgaccatcataaattctgaacccaggcagacttattttggcggattccaaggggatttacaagaccagccagccaccattctgcttgca

SEQ ID NO: 95872 - DNA, 481 bp, Homo Sapiens
tttaattgaaggttaaacagcagtaggtgaaaatagcagtgagggaaacagggaagagtgaaagaaaataaaagtatggaaaagcaataaatccagctgcaatgttctcaggatcataaaataaatgaaacatttacgattaaatgcttctctgtatttcacatatatgaagtaaacaggcaagtcatctagtcaaattcatttgatggctaatcaacctctcttctccaagcacagtcattattcagtgcccccttaggggtcaatagcagctttctgaaatacgtactcaaattggcaactgaatttaccactcagctcattctaagacatggtgatactccccagatttataaaatatattcagaagtaaattttccaaggaaattaactctaggagctttggaggaaaaatgtacgaaaaaccatcatggcaacagtgaacaattccaccatcccctccgtccacagcataatctga

SEQ ID NO: 95873 - DNA, 509 bp, Homo Sapiens
  misc_feature (81)..(142): n is a, c, g, or t
  misc_feature (169)..(398): n is a, c, g, or t
tagagtgcacaagatggctcaaaagggattaaggatgaatggagagatgggagattttgaccagaaactaaaatactggannnnnnnnnnnnnnnnnnnnnnnnnnnnnnnnnnnnnnnnnnnnnnnnnnnnnnnnnnnnnnaatggggatgaagtctggattagcgannnnnnnnnnnnnnnnnnnnnnnnnnnnnnnnnnnnnnnnnnnnnnnnnnnnnnnnnnnnnnnnnnnnnnnnnnnnnnnnnnnnnnnnnnnnnnnnnnnnnnnnnnnnnnnnnnnnnnnnnnnnnnnnnnnnnnnnnnnnnnnnnnnnnnnnnnnnnnnnnnnnnnnnnnnnnnnnnnnnnnnnnnnnnnnnnnnnnnnnnnnnnnnnnnnnnnnnnnnnnnnnnnnnnncctgccttttctatatgaactttactcctggaaaacaaaacagtagatgagagaatgtgtgtttttatgaaagtattccaactcaaataaaacagaaatgatagaaaaaaa

SEQ ID NO: 95874 - DNA, 333 bp, Homo Sapiens
  misc_feature (30)..(30): n is a, c, g, or t
actatagggaatttggccctcgaggccagnaattcggcacgaggcggcacgagggacaattccggggcccgcccgcccagtcaccaaccaaccgcctgccccgcctcctcgggtccgacggacggcccggaaggccaataaaaaccaccggtaaacccctgtcggccaatcccagggcccgctgaggcaaaactgactctaaaacccgcccctttgaaggacggaaaaatgcgccaatcattatagtgtctgggtccccggctgagcctatcaaaaaaaatttaaataaaggcttataaataggccctataaatataacatcctttttttcgg

SEQ ID NO: 95875 - DNA, 307 bp, Homo Sapiens
  misc_feature (80)..(80): n is a, c, g, or t
  misc_feature (95)..(95): n is a, c, g, or t
  misc_feature (163)..(163): n is a, c, g, or t
ccctacatgtggttcctgcagtggtctggggaggtaagatgctgagcagttctgccacctctctcttcccccctccccantagaccccattccanagcccatcacctggggcttgcttggccatactgtcccacaccatggtaagggaacgtttcatccttgntccccttcgcagaaagcggcagcccctacccatagtgccttctttcgactcaaactcagcctcataggaaagatttgagctgcgctttagagaaggagtagggttttaaaaagaaatttctagtccaggcatggtagttggcag

SEQ ID NO: 95876 - DNA, 647 bp, Homo Sapiens
atgaaaaaggagttcccaggggacatagtaggaacagtggacgagggtagcagaagaggagtttggagcaaaagactcacaagcagctgcataatctgttggtgcttggcagttcatttgtaaaaatgatgcctcttcctgccctaaaatacctaccttacccccgcttcaacttgatgagatttccatcagtcactcccaatgtgtcacagcttctgcagccctaaaattaaaaggtgagtgagtctctgaggcccctctccacttctcggatgctgagtttagccttcatgtgaatgtggaaagactaggaatacggctgttatcacacaagctggcccaatagtggttcagttgagagagccccatccttcagagtcagctccagctaggagtgactggtggccttgagcatggtgctgggcttagtgttgccatctgtggaatgggtgtgggtctgttgccctgcctcctcccagagctattctgaggctcagaaggggtgatggatgtgatggtgctcccaacactagaaagcatcttaagaatgtaagattttcatgatgactgttgctcagagtggctattatagttttgctttattgttctataacctatgattaaaatttttaccttaaactatgaaa

SEQ ID NO: 95877 - DNA, 657 bp, Homo Sapiens
  misc_feature (450)..(572): n is a, c, g, or t
ttgttcatcagctcctgaatctaactgcaaatggtgacacatccccaccatcaatacatttataattcacactgtttcagagccctttaacgaacatgttctcatttgtctgttctcgtttctaacggcaaaacacgatacgtaaccatcatgcacagaatactaacacaagtgactccttgcgtgagtttagtttgcaacactgtccaacacacagcattcaacagactaagcacttattttcaagttactaatttttaatttacgaagcccttatgtgcaacatgacagtgagcaagagaggtacaaagctgtacccccagtctcttgaatatgaggggaagctgggaagatatcaacaggtgataaaaatatgctacaattaactgtggtgatgttgcacaactctgtaaatacactaaaaatcactgacttgtacactttcaattnnnnnnnnnnnnnnnnnnnnnnnnnnnnnnnnnnnnnnnnnnnnnnnnnnnnnnnnnnnnnnnnnnnnnnnnnnnnnnnnnnnnnnnnnnnnnnnnnnnnnnnnnnnnnnnnnnnnnnnnnnnactaaagaagcatcaacatcaacaggaaacactttaacactacctaatgtccaacaacaaggattgattaaacacattccagaat

SEQ ID NO: 95878 - DNA, 359 bp, Homo Sapiens
tgcccttgttcctttgtgtgtggcaaagtgaagttgctttgggatgcccggggggactgtttctgacatgtggtccccctgtgagcctgtgtgtgcaggtgtgagggaaccgtcagctctgtccctctgtgttctccatgtccatgacctcatcccgtctctgtctctcatcctggcttctaacaaccttttcacagctgattcctttggagcatttgtcaccgcgtcagggccaagaaccccatcctccccctgctgcttgatttaatttctgaaatggacagcacatcagtaggggcacccacggggcgggagcagagctgtccagagacaaaagattaaatcactgccatctttgg

SEQ ID NO: 95879 - DNA, 535 bp, Homo Sapiens
tgactgattagtgacccttcataaaagggtgcagacttgaggtgccatgggtagaggctgctccagcccctctggcagaaggcaggacagaaacaagttcctgagggtttcagggacccagttgtgtgctccgagcctagctggtgtggtggtgtctggtcctatgaccagcacttgaggtgccagtggatgcttcagttgctgcagggctggccggccctccctgcgtcactcagctgccacctgtgggcattcaccctgtgccaggtggagctgcgctgtcacgatctgaggaagttcatgttcccccatttcacagagggagagtccgagactgaggactgccgaaataacaaaggtggtagaagcagatgcaaaccaggccgtccaactccagcgtgctttccatcaggttactaatccaaagcacacactaagaggaaaaaacggtagatccccccaaccccacccttagactgcagctgtactcagggctgagagacccacattaaaggttaaatgctgtcactccaaa

SEQ ID NO: 95880 - DNA, 335 bp, Homo Sapiens
tgctgttgctcccctttctctgtggccaaagccccactctggaaatttccatcatcggtggtcgtgtgtcgatcacagcacactgggttcactccatggcctcatccttgggtagtgagttcccacccgtccagtgctcctctccagcctcagtcaccagcatctcctacttggattattgcaacggctcctaagcatcagcattaagcaccaacacagatgaatcctcctcctacagacattagatcatgtcacacctctgcccagacctcccagtggcttccagtatcatgttgaataaaagaaaagtctttcccttgaagtaataaacgttt

SEQ ID NO: 95881 - DNA, 595 bp, Homo Sapiens
aaaagagagaatctgaagtattctgcagatcagggatttgagaggatcatggtggaatcacttgtttctgttccatgatgtctggggcctcaaatggggagatacagaggttggggatggcttcgtgggtgagggctagaattattaagagggttatcacttacatgcctggcagttgatgtaagtcatcagctgagatgtcagctggggacatccactgaaatacctactcatggcctgtccatgtggtgccttaggcctcgtcacagcatggtggctgggtcccaagagtgagcatctcaagagagcaaggtgaaagtgcatgacattttaatgagtcagccttgaaagtcacataatgttagttctgcactattcttggtcaaggcagacactgagatctgcccagcttcaaggggacgtggcaaagaccccatcatttgataggaggatcgtcgaggccacattgtagtgaaaccctgtgagacgagtggtgatgtttctgccatgttggaaaatgcaatctgctacactgctcttttcatttaacatatcataccattaaaataatccatcaactctgtgaatacaaaaa

SEQ ID NO: 95882 - DNA, 605 bp, Homo Sapiens
aaggaattgaattcttggaagatgaggctggaaaatttcatcgtcattacgtcaacatgctaacagatggtctgcaaagcacttctcaggtttcattcagtatttctgtgaagaagccaggggatcatgatgttctactgtgagaatgacagaaagagcaaacaagaacacctgggttacacgagctgacttgcttctcttcaatggacagtatgaacacagagaaaagaattctacaaaaaagaacaacagagaacaagacagagatcttggagaacaagaatatgaccatcaatagaaggatgggaagataacggccaaacggtagacgaacacaacatgggattccattcttgtcctgagaaactccctaggcattggaatatagaagatgagctagcctatcctgactgaaacagcatctcttggaattcagggactttcttcatccctgactacatgcatcagacttaattagatgcacaaaatctggatgactttcacaacactaaagtaattttactttctaattcataatatttgctgattcatattattacttttgttataatagaaataaattgaatactgcatcctgtaaaaaa

SEQ ID NO: 95883 - DNA, 459 bp, Homo Sapiens
tttatgtcataactgatttattgggaataacacatgaagagttagattttctcattgcccagcttgttttagattctccagacttgtgatgtggaccagaagggagcagcaaaagtattgcttaggatccccccaaaagaggtctgagctccagttctgctacctggaatcccaggcaaaataggaagaagtttatctctatgaacccttcatctcctgctttgttttccatctttgcttccaacgataccacagcacctgcagtccagacaccagatctttgtcctttactgacccaaatataacagtcctgtgttctgtttgaatggagttctggtgactatcaggttaatctgataaagtaactcaggattgggtcccaagagcagatagcatttgatgagtttccccttcccaggtaaaaggtacttgctctcaatttcttaaaagaggaaatac

SEQ ID NO: 95884 - DNA, 473 bp, Homo Sapiens
gatttgaaggcatgcaaagaggcaggctcattttggagaggagatggtgaagcaggagggagccattcacccagaggaagaaagtgaaataaggggactggaaacagctgaggacatccacagttaagcacatctctctataaatagcagttggggctgccctagagagagaggtgagaggataggaagagagggcaggaagcattggccaaggacacttgtgggctataaaagcctcttgcatgaaagatgggccagttgggactttcatattatctgtgagtaataaaaaggttgacaaaaagatcattattacccaaaactcaagtatcagcagggtgggctgaaatcaatagggccatagttgtgaataagatgtgtagcaatctgtacttgggaaatgcattttttaaaaaaccacttataaactgatcttcattacttaaagataaagctgctaatgtatacacaag

SEQ ID NO: 95885 - DNA, 517 bp, Homo Sapiens
gacaaggtctttgaaattattgagccacccatgcctagccaccaactttgtactaggggtgctgtatctttccctttacgccttcaaatagactgctagcctctgtccttatcagcactttccagttgaaattagaaggcagtaaaggcgaaatgacacaaacaacatggaattagcgtggctgacacacagagatcacagcaggtaatggagacaggtgaggacccagtgaggggcatggggaaggggctgtggagctctgaagtgcatttcccacatttagccttgcactggatgtacaaatgtccacatctctaaaattaaattatgtaccttatggagcaatttgcataaaacaattttgtatctgttgtgtgtttcataacctgcggtacatctgtacatttatagattttaaaaaatagtatatatcctgctttgtaacatgctttttttgttggcacatgcctctttatgtccataaataaatacagacgtcataattgccgatgaaaaa

SEQ ID NO: 95886 - DNA, 501 bp, Homo Sapiens
  misc_feature (210)..(210): n is a, c, g, or t
gctgatcaccatgcaatagaaataatgtgcatctataagtatggatctatgtctatgtcttttgaagctcatcatctcacagttcaagctattagatggcttggtcttctcccttctgatcttaaaagattaaatgtacctaaagatagtttgattccactgacaaaaagggaccaaatgaaacttgacagtatcctgaggagaccttantgttacctgccaaccattttggagaaaagaaatggaaataatggcagactctaaaatgaaggcagaaattcaagctttgactttcctatcatcagattatctttccagagtgtacttacctaacaaattaaaatttggaggatggatataaaaataaatcagaagaacttctgattgccagaggcttttcattagttttgttttgattggcaaatactattgtggaaagaacatatattatattcttaattctgtaaaagtgaaataaaataactttccgttaattataaa

SEQ ID NO: 95887 - DNA, 301 bp, Homo Sapiens
ctcttctgtgcccaacttaaaggcagaggagaaggggaaggaagacacctgccaaatgctggaggctgcagcctgcggcaccgcggctcgcctcactgtgggtggtggccgagatggcgactgcagtgcgaccggagtgatgctgtcctcacagtatattcaaggcatctgatggcattgatgagcaactgaggaatcatttaattaatcaccaagttcttcatccttacttaaaaatgtagagtcacaaaatcatgcatcaaaacacactctttttttaataaaatatggtcttttaaaa

SEQ ID NO: 95888 - DNA, 511 bp, Homo Sapiens
ctaaggtgaccctttggctcctgagcaaccatgacacccttggctacaccaaagctcattgaaaatcattacagatggactccatgaaccagtgtttagaaagcgctgctatatgtttttaggaatacatagggaatttggtaggaagattactctgcctcaggcatattcggagtctcatgggggtatctgtgaagaagacgagcacaagaaagcctaagttcagtacacacagtaggactgaatcagaattcttatggtcacaaaagcctcttctgagggtaagaaatcagcaaaaactccaaatcagcaaaggaaacagacttaaaatacatgctcatttccaaaaggtctgactccattcttctttttgccaatttttagatcccatataatcttggatagaaaaatgatctatactgcatcagaatcatggaacctattggcaaagggcattctgtcccttcaattgtagcttcaacctcattgtctaataaataataactaccaa

SEQ ID NO: 95889 - DNA, 586 bp, Homo Sapiens
ctctttgatgacagggcccatgtccattttcatgataaagttcatattaagtaggatttaaaaataagtattcaattaatttttattaaatagttcccttctggcagagaaagactgtaattcaaatagtcacagtatttcccttcctctgcttgcagaggagaaacagtctgccctcctctgacctctcctagggagagagccttgccaggtgggttccagagtcaattgtgtatgattgtggctgttgaagagactcggagaagttgtgagagaccacccagttttacatggaaaatatcagagagctatggacaagagaaaagtaacagatatagacacggggaagagaggcagagaaaaaaatcttgtttgagagatctgtggagcataggagggagaggagaggctttggcggcaggtgcagtgacaattgaatgcacacacacatgcacaaataagatattaatgtagagagaaagtggcaggaggaatggtttcaataagttttgctgtgtgttatgagtgggatctctttgggtaaatttcaatagatttcaataaagatataatttgcttattggct

SEQ ID NO: 95890 - DNA, 769 bp, Homo Sapiens
aatgaactggggccaaactgtagagagcttggatgaatagtttagtgcaaagatgaatactgtagtcaatctctccttactccttaacttcgctcctcttcattgtcccccatgcttcgtgctctggtaccagacatttcacaattggccaactgttatccactttctccatccctaccttacatgtggaagaatggaactaaccccaacaagcttcatcagccacctttgattttcctaagccaatcagcagggcttatctacctattcacaggaattggttcagggacagacctagccgactgctggagccagctcccaggggcttcagagagtccactgcaggcccctctaccgcacgctgggtccagggacatcgcattggtagtttgaaatcagccatgacagggagagagcattgctagacattcatctgtacactacctggatgaacaagacctaatttaggtccatgagacgtgaggagatatttaatcagggtttggagaaaccatggaagaagagtctattcttttgtgtagggagagttataaagaaattggatgtgagactactaaagccattttggccatcaaaggacctaaccagaggacagagttgacacacagagaagagatgctctgaaaggatcaaagaggtctggagtcagagcgctgagggtgtggacttctgaatccacccccaaagcccgtatgcctcttcactcttcagttaaatgagccaataaagtccctgttttaaaaccaaa

SEQ ID NO: 95891 - DNA, 561 bp, Homo Sapiens
tgaagatagcttgcaccaaactgacctgtttgatagtcacatgctgtggttccttatgcatcacctgagacagagacgccatcaccgggtaagctagggttggaaatgaattcccaagggagtgacccttttaagagggctaaaaagttccagagtagtgacttcaagcagtaatcaggtgatcttggtcggatttcctatccactgtcctctgtccccatcagatccctgatatagccttggaagagacatcagcagaaaagggtggtatctacttttgtccattgccgtccatgtgtaatgctatcttcataaaggcaaaagctggagggtggaggagggaattgagaagaaataacaagtctcagtgtgacccttctatttttcctcttatgccaaaagaggcctagttcaggggttggcaaactggcagttggcctgctgctggtttttgtaaataaagtttcattggcttgcagccataccccattctgtgtattgtctgtggcggccttcacgcctacaatgagttgaatagttgcaataaagaccatatagacc

SEQ ID NO: 95892 - DNA, 349 bp, Homo Sapiens
aacaaactttaaaagaaagaaagaagtattggccccttccatgccaccttccagttctggctagagtaactgccacaactgaaaatctgatcctatcactcttctgccagagctgccccacatctaaccttaggaaggaagcccaagccctggacagggctcttgggccctcactggcaggaggcttctgcctcatcccccttgtggcccctcctctcagtgtctcagtgtctgatggcgccaccaacagaaatgtgcatttatttaccggatacatattcttatttacaagttatatatgtgctctactgaactcattgtatgtttataataaaaaattcaaaacaaa

SEQ ID NO: 95893 - DNA, 1298 bp, Homo Sapiens
  misc_feature (49)..(49): n is a, c, g, or t
  misc_feature (985)..(985): n is a, c, g, or t
  misc_feature (1261)..(1261): n is a, c, g, or t
cacaaccacacacaacccatggggcttcccctccccaaacacaacccgnaaagaggcctgggtggcgaattcccgcacgagggcaaaagagctgggtcatgtcaatggactggtggacaaatctggcaaacggactacatcccccagcagtgacactgacttgttggacagatcggccagcaaaactgaactaaaggccattgcccatgcccggatcctggaaaggagagccagcaggcctggcacacccacatccagcgccagcacagagactcccacctctgagcagaatgatgtcgacgaagacatcattgacgtggatgaggaaccagtaacagcggagccagactatgtgcagccccagctgaggcggacctttgagctgctgattgctgccgccatggagcggaaccccacccaatttcagttgcccaatgaactgacttgtaccactgcactaccaggttctagcaagaggagaagaaaggaggaaaccacagggaaaaatgttaagaagacacagcatgaattagatcacaatggtctcgttcccttacccgtcaaagtctgcttcacgtgtaacaggagttgccgtgtgggctcctctcatccaagtgtgactattgccctcctcctggttcaccatggattgcgctcaagcccgccgctcactgccatgcccctgggcagatggatgtgtccgaatcacatcgaacatgtggtgctgaaccagaagaatatgacactgagcaatcggtgccaggtgtttgatcgtttccaggacaccgtttcgcagcatgtcgtcaaagtggacttcctgaaccgaatccacaagaagcacccccctaaccggcgtgtgctccagtcggtcaaaagaagaagcttgaaggttcctgatgctataaaatctcagtaccagtttccaccccctctcattgcacccgcggccattcgggacggggagctgatctgcaatgggatcccntgagaatcacagatgcaccttttgaactctgagcacttagccacccaagcagagcagcaagagtggctctgtagtgttgttgcgctccagtgcagcatattgaaacatttatctgctaagcagatgccttcgcattgggactctgaacagacagagaaggctggatattagccctgttattgtgactgacagctcagtcaccacctccctgcaaacagcttgacaagacacctaacaccttcccactacccccttgtctgccccctcaggaattanccacccaaaatttccctgagctggctctccaacccaa

SEQ ID NO: 95894 - DNA, 766 bp, Homo Sapiens
  misc_feature (663)..(663): n is a, c, g, or t
aggccaggtcccccccgccccagcagcactgcccttgtcacattaagatggggcagctgggaggtcagaggttctgtctcaggaactgaggtctggccttctgcgatcccaggctgagccgtgagtggtccacgtattcagaagacagccccctgcagccccggccttagaaggctgtcccaggtcacacatcgagtcagggtgaggctgtggtggatggcattcccatctgccctcttcaaacctctcaccccctggcttctgcagggtggaggcctgggtcacacaggcaagaggaaaggggtcaacctggtggctcactcgggtttccatgacagtgggaaggggggaggtgggcagtgaggtaggcacgcagccctcgcatctgctctcccccatgggtagaaccttcctgattggctgtgggttgtatcaaaagacctttgactgggtgaggctgagatgggtgtggtggttccagtgagtcagccaggttcccttccccagccctggtccctgagggagatgaggaccgaaaggcttaggtgacttgatggggagcaccctttcaggggccctggaagaaatgtttgtaattgttctgctttttccatgagctctggagagcacccaccaccaagccccctgaaacccaccagtccntacagcctggtctttctccccaccttcccactcccaaacacatttccacagcaaactccttgggaaggggcttttatatattaaaaaagaagagctttaaaaa

SEQ ID NO: 95895 - DNA, 620 bp, Homo Sapiens
aatattcaaaaggattaggaaaactgttactctacaatttcacacacagttaaactgtaatacaagaaaaagagaaaaatgaaaatgttttcaaacaaagtctaaggaaaattacctcccttaggtcttcaacagaattattaataaatatattggatagaaaaaaagatgaaaacagaataaaagtatatagggtacatgcgaagcatacgagttgataaagaataatagtaaatataattgttgaatgtaaacaaaatagctttttatatgaaataataaaagctcttagcagctgtaacaggttgatgtaaataataccaatgaataattaaatcacggtaaagctcttgacttgactagaaaggtgaaaatgctgaataattgtagattgcattagaaaaatttataatttagtgtgtgttaaaaattcaaaagtagatcacatttgccatctttgagccccccacctctgctgcagttgtagcaggcaatacgtctgtcatccatcctcagtggcttcaccagcctttcagccagatacaaggctgttgtcctagtgattacagccacatgagtcactggtcagctcagcggctatcccgacctgctgcctgact

SEQ ID NO: 95896 - DNA, 520 bp, Homo Sapiens
  misc_feature (51)..(51): n is a, c, g, or t
tagccttttcagctatcaagatgagagtcaacgctaagaatctaccccagnatgtcaagaaagaccctgggcataatcaatgctgaagtgaaaaggatcaacactggagagagaagaggggaagagaagcagacttctaaaaataatattgaaaagaagaagcccaaatttagaaaaaggaaaaggaaagcaattttaaaatgctcttttgaaaatgtttattctgatgatgccttatcaaaggagaacagggttgtctgtgagacggaagttttactaaaagagctggagcaaatgctgcagcaagcactgcaacccacagccacacctgatgaatcagaagaaggacatggagaggaaataaatatgggagaaaagttatctaaatgcagcccagaagctcctgcaggcagtctgtttgaaaaccactatgaagaggactatcttgtaattgatgggataaaattaaaagctggagaatgtattgaggatataactaataaatttaaagaaatagaaa

SEQ ID NO: 95897 - DNA, 643 bp, Homo Sapiens
ccccacctttggcacattgtggcacctggcaaaaacttgttggatgaaggaatgacttccccaacagttgaccccctgtttacagtgccagcgccaccaccgccgatttccagcagtctcacgcctcagattctaccctcctacttttccccatcttcatccaatattgcagcaccggttgaacagcttttggttcggactcgttcagtgggtgtcaatacatgtgaagttggagtagtgacagagccagagtgtcttgggccctgtgaacctgggaccagtgtgaatttggaagggatcgtgtggcatgaaacagaagaagtatttcagctagtacaagggaagtgcctattagaagcaatgggccgcttgaggacatggattgcatccagtagtggcgcattcaccaaaaggcagatgaaaataatctgtaccaacaaggatcacaacaggaaacatcatctgaattttccactattgacaatcttgactatctagcctgggatttgcattgccaagcaacacgttaaataattttgtatctctttgaaatcaatttctggtgatcacacatgcagattgaaaactatggctttaagatttacgttcagtaaataaaatttacgttccctgaaaggcaaaa

SEQ ID NO: 95898 - DNA, 457 bp, Homo Sapiens
gcggccgcccggagcacagaggcagcggtcgggtagaggtgagcgtggcggaggcaaagggacgcatcccccacggcgcgctggccgtgcggggctagagggccgcctgcgctgctcggctccctcggtgcacgcgggacacaggctcattcgcactaacgagtccggccgtgcagtgaaagcttcggtctgcgtgaccgtgctgcgctccccgcgccacgcggctccacacaacacgccggcccacgcagaaccctcagaacgaaattcaccgtctcaatacaggctcaagggaaacctggagtcttcttctgtttcatgccacacgatcccttccaaattcacactggtcccaggttcacagggcccaagacactctggctctgtcactactccaacttcacatgtattgacacccacagaacgagtccgaaccaaaagctgttcaaccggtgct

SEQ ID NO: 95899 - DNA, 671 bp, Homo Sapiens
ttgccccatccaccactctgtatagtgattctggaatttgctatttgatacaagcaaacgaagagatggaaggggctgttcaccactcagtctgcaagcaagcctgtcgtgcccatctgccaagaggagtccttgtgtgcctccaaaatggcctggtccttaacttgatctgcttggactgattgcaaacagtggcttagcttcctctagaccagagtacattctgtgctcccaaaacagaatgctacacatgggaacaagggaaagggaggctttgagaggtcagccagcaaggcccctgcttcaagcctaaaaccaacgtaattaggtgaagattgagcaggataaggctttgcaaggaacatccctgccacgtcaaggtgatcccagcattgcaagttctcccctgaggcgcagagcccagaagacatcagcgtggaatgaaaagagtcaaggatggagcccccacaggacttagcaagaatgccaagtacatcgtgctgtctcctcccgcctccatgctggtgcatatgccgcccttcctccctggaatgccctcgtcttccagaggctgcttcatttgagagccttctctgattcatccaggcaaattaacagataataactgttttagctactaaatattaaactctctcaaggcagggtcaaaa

SEQ ID NO: 95900 - DNA, 643 bp, Homo Sapiens
tgcattttcagacccagaaccgtggcctgcctcagtgccacccacatgggagctgtggttaccagtctgcaggcagctccgggagaggctgacagagtgggcccccatgtggaagaaagaagctccaaaatgaatcacaactggcgggtctgacttcgggcctttgcagatgctgttcccctgcctggagcgcacttatcacaaggcccccatccctgtggccggaatgtcaaaggacaatgactactttgtgggtttccgtatagctctcctttcccacccattccctgggatgctcactggggaaagagaccaggcctctctgctgaagcagcagtgcctggagcacaggaggccctccatttagtgatgagatgcctcagcagcccccacacacctgggatgagtatcagcccatgcagaagagtccccatggaaaggaactgaggccccagctgacagccaacatcgaccaccagacacgtgaatgaatgagtcctcggataattccagctcccagcctttgaattttccagctgaggcccagacatcctggagcagagacaggccttccatgctgtgccctgtgaattcctgacccatggaatccatgagcaaaataaatggttgttttacaccaaaa

SEQ ID NO: 95901 - DNA, 838 bp, Homo Sapiens
ctatagggaatttggccctcgaggccaagaattcggcacgaggcggcacgaggtgcaaatgaggaaactgtggctgagcaaggtggagtgacaccttgatacgatgaggaagtcaagggcagagctgaggtcttcagccaactgtttgatcctgcagtgttcacacaatgccctctacacctgaatcccctaaacatggccagctttgggcacaccccatcagcattgtttccaacagccacaatatccacttagtaacagagctgccatttcagctgcagaccccttccctctccccacgcatggagagcttgatgctggccaagcactctctaaggcaggaaaggctgccacagaagctggagccaacggagggagttggatccagcctgccctggagctgtaggtgggggcccaggaccacagctggagctcctggctcactgggctgcctgattgctggccccaggtgccagtgaccacgtggtctcagcatgctgagcctcaaacacctgccagttcaggcgggctggggaggcggctcctgtggcaggtgcagtagtgcgggagttgccatcagcttcccaaggagctgcatctcacaccaactacactgcatgcacctgctttctagaaagatcagggagacagccaggagcagcacccgaaggacatggaacgggagtcagttgctcgggcattgaagccaagctctatgggtcctcttcgcactgggcacattgtcacctctctgggcctcagtttcctgcaggtgaaatgaaaaggctagaccatgtttaactgtgggaccttgaggctctattaaatttttaactag

SEQ ID NO: 95902 - DNA, 296 bp, Homo Sapiens
aaaaactgcatggcttttcatgatttagctttagaattattatagcatttttattagttgaattagtcacaaaccattctagatttaaggacagagtacacagactcctaagatatcaatagaagaagtgccaaaatgatgttcatccttccttttgtggaaacactggcttccattcttctcttaatcctctccttatggagccacaccaggcagatgaagctacatggtatttattccagggatcccagcacagaagcccatgtaaaacctataaaagctataatttcatttct

SEQ ID NO: 95903 - DNA, 459 bp, Homo Sapiens
tttcttcccaacaccaatttcatggttgttaatgggttgtgacctttagttaaaaaaatgctgacagacatcaaggaccaaagaattttaattagaagactttcaaaacagaagataccaggccacttaagataaagtctactgtttaaatgtgggggaaaaaaagcacaaaataactgccactaaaaaattattaatttttagctagcaatatttgtaatatgcctttcatttggattatagtttataggccatttaggattctacaagttttaagatatctaatgttaaataaaatttagaaccttcaacatggtttgattataataaaattattctgggaaagttgagtctgtctagttgaagattcagtcaaactctagttttataaaaacttcatagtttaggcatctgtggaactctagatgattagttatttaagcctaaacattcaaaata

SEQ ID NO: 95904 - DNA, 847 bp, Homo Sapiens
  misc_feature (17)..(17): n is a, c, g, or t
  misc_feature (55)..(55): n is a, c, g, or t
tgcatgtgtgtcagccntgaatcccactgcggagaccttgctggcacgacctgcnggcaccacccttgtcccccaggccagggggtacagtcccaggggaaattcagttttggcttccagtgtatcgactgtgcctcggggaccttctccgggggccacgaaggccactgcaaaccttggacagactgcacccagtccgggtttctcacagtgttccctgggaacaagacccacaacgctgtgtgagtcccagggtccccgccgacagagccgcttgggtgactgaccgtcgtcatcctggccgtggccgcctgagtcctcctcatgacctcggcccagcttggactgcacatctggcagctgaggagtcagtgcatgtggccccgagagacccagctgctgctggaggtgccgccgtcgaccgaagacgccagaagctgccagttccccgaggaagagcggggcgagcgatcggcagaggagaaggggcggctgggagacctgtgggtgtgagcctggccgtcctccggggccaccgaccgcagccagcccctccccaggagctccccaggccgcaggggctctgcgttctgctctgggccgggccctgctcccctggcagcagaagtgggtgcaggaaggtggcagtgaccagcgccctggaccatgcagttcggcggccgcggctgggccctgcaggagggagagagagacacagtcatggcccccttcctcccttgctggccctgatggggtggggtcttaggacgggaggctgtgtccgtgggtgtgcagtgcccagcacgggacccggctgcaggggaccttcaataaacacttgtccagc

SEQ ID NO: 95905 - DNA, 986 bp, Homo Sapiens
ccaataaagtgatttgtatataactggtggcagggggaggggggcggttggagactgaattgcccattcaaatcattagactttttaaaaaaacatttcctcgatggaaatttccagttccacaaaagaaagtaatcaaacagatgttcctccttaagtcttaaaccacgacattcagatgatctatgtgcaaattaataaggttatgacataattcaattatgtgacaaagccgagggagagttgacaaagaaccagactggcatcattgacttctcaatgaagtggagctcggtaaaaaatctagatgaatcacaggttgtctgaccagaagatccctgacaatgggctgtttactttagagaaaggagctgaaccctgaaaactgaatgtgcgaaattctaattatcaaaaaacccacggcgcatcaggtagacatgatcatctgcatttcttttccacgctgcaaatcaccgcgatcccagattagtccagccggccgggtgcctccctcccgtccgcctgggcagttgaggccaatcagcagtttaggcgcacaggtgcgggctcagaaagcagcagcaatctccggcgtgttctggaatcagaagttgaggtccacgtctgattagttcccttcgtttcattagacttggctgaatgtgtgccagtcccactagagcttcgatttcagacttcctatgacaggtttgttcacagaaaactctggccaccaggatgcccgctccaacaccttgctttcctgcaggacagcgccccagaggtttttgtagagctcgccgtcggctctgccaatcggtgagtccagaacaaagtcaggaggagcgatcacgtctaccagggcaactgcatcgtctttcagctgggaacacaaagccaggacggcgctctccaacacttctcccgcctgctcaccagagaagtatcctcctcggtagagcagggccgcgtgccctcgtccgagt

SEQ ID NO: 95906 - DNA, 977 bp, Homo Sapiens
tggaccggtccggaattcccgggatctggctggcagtcgccacccggtcccagagtaaataagggagagacactcccgagcgccgtaaatagagtccaagtgggcggagagccgtcccgcgccgcccgctcatgtctctacagagccgactgtccggccgcctggcacagctgcgcgcggcggggcagctgctcgtccccccgcgcccccggcccggacacttggcgggtgccacgaggacccgcagcagcacgtgcggtcccccggcgttcctgggcgtgttcggccgccgtgcgcggacctcggcgggagttggggcgtggggggcggcggcggtggggcggacagccggggtgcgcacttgggcccccctggccatggcggcgaaggtggacctgagcacctccaccgactggaaggaggcgaaatcctttctgaagggcctgagtgacaagcagcgggaggaacattacttctgcaaggactttgtcaggctgaagaagatcccgacatggaaggagatggcgaaaggggtggctgtgaaggtggaggagcccaggtataaaaaggacaagcagctcaatgagaaaatctccctgctccgcagcgacatcaccaagctggaggtggacgccatcgtcaacgccgccaacagctccctgctcggaggcggtggcgtggacggctgcattcatcgggccgccggccccctgcttaccgacgagtgccggaccctgcagagctgtaagactggcaaggccaagatcaccggcggctatcggctcccgggcaagtacgtcatccacacagtggggcccatcgcctacggggagccaggcgccagccaggctgcgaggctccgagctgctatctgagcaggtctggacctgttgttgagcaacgggtccgctcggtgggtcccttgttcacgggtgttggtaccctgtgagcggcggcgaacggctggcattgcaatg

SEQ ID NO: 95907 - DNA, 755 bp, Homo Sapiens
  misc_feature (151)..(168): n is a, c, g, or t
  misc_feature (447)..(478): n is a, c, g, or t
  misc_feature (480)..(566): n is a, c, g, or t
tttaggaaatggctgtcctactggccatgaagtggtatctcactgcagtttcaatttgcacttctctaacgattcatgatgctgatcatcttttcatgtgcttgttggcacctgccactctttggaatgtctattcaagtcctatgtccannnnnnnnnnnnnnnnnnggtcttggcttcttcacaggacaagttctaccatgcccattttctgagttgtcttttcattgagttgtaaaagttctttctatattgtgctactagaatgtcttagtccatttgggctgctcttacaaaataccacagactgggtagctaataaacatcagaaattctcactgttctggaggctgggaagtccaagatcaaggtgttggcagactctgtctggtgaaggcccacttcctctaatggcagaaagggtagggggtttctctcttgggcctnnnnnnnnnnnnnnnnnnnnnnnnnnnnnnnntnnnnnnnnnnnnnnnnnnnnnnnnnnnnnnnnnnnnnnnnnnnnnnnnnnnnnnnnnnnnnnnnnnnnnnnnnnnnnnnnnnnnnnncggcatgagccaccacacatggccacaagggcctccatccttatccttatgcactaatcccatcaccttgcggttgaggccttcacatatgaattgggtggggggagacataaacatttagacagcagcatagattcttatcaggtatatgattaacaaatatctcccattctgtgggttgtcttctca

SEQ ID NO: 95908 - DNA, 824 bp, Homo Sapiens
ccacgcgtccggtcgggttacaagatggcggatctgtagtagttaccgcggcggcgggagagcaagcgagccctggggggcaaagagacgggagagtgggtgtatgcgcgggtgaagtgagaggtaacggggcctccgggcggagaggcctcagtggctcttgtcaccccttctcgcggctgaacctttggagccatggtgaattcgggcctctccgaagccgccgccgccgccaccgccactactgcctttaccgtctcctaagagtgaggagcgcggacgaggtaagcgaggaggcggcggctagagcggtggagacagcagccaccatgtcggatacgcggcggcgagtgaaggtctataccctgaacgaagaccggcaatgggacgaccgaggcaccgggcacgtctcctccacttacgtggaggagctcaaggggatgtcgctgctggttcgggcagagtccgacggatcactactcttggaatcaaagataaatccaaatactgcatatcacaaaacaacaggatacatttaattgtttgggtcagaaaccgaaaaactatggatttgggctcctgagttttccaggagaaagcttggctgtgaaggagatccggggaaaaaattttggccgggttccaagggaaaagaaccccctcacgggggaaattcccaccagggaccctcatttggaggaattctggaaaaaagaacctgaatttgaaaagaaaatgccctcgaaaaacttaagtccattctgggatttggaaccttgcccgccaaaatggggggggaaactcccaaatttaaaaacctttgg

SEQ ID NO: 95909 - DNA, 314 bp, Homo Sapiens
ctaggagccaccatgcctggctgattgtacctcttcctgcaggagatgacctctggcctatctacagccttcccgtacccacactaaggaagggactgtatgcaccttgggcaggccacatccaccatctgatccccaagggctcctgcacagcccaggtgcctcaccagttgctgcctcagccaatcgcagagaaagcccagactagtggatttctgtggggctaggaatgcatggtatgggaagagctgatttccccaagggaagcaatgtggtcttgaggacagaggtgaagtccaaaaccaccacttcct

SEQ ID NO: 95910 - DNA, 465 bp, Homo Sapiens
ggctcacggctggagcccccatcctgccgttcggaccagtgcgggcctcggaggagtgtcccgcagcggacccccgcccaggaacccctgcaggcagcgagacgggcgcccgggccagctctctgcccctcgccccccgcggggaccctgcccgccccgctgaccggccccacgttgccaaatagctcaaatgcttgtcatatttgcggtcgcgcggctccgcgggctgtgcacgcgctgcactcgccgccgcctttgtcaccagccgcttcgtcattcgcctgagcacttctagagtgtgtagggggcgttactagtggcagtggtggtcctcgggccggagtgtctccttctgtctcccctcctctttcagcccgtccttacgagaaaatcaggggcgcgccggcccggcagggagctgggggcggcgctgccaccaggcgcccactgcgccccgccgcccct

SEQ ID NO: 95911 - DNA, 930 bp, Homo Sapiens
cccgccgcccttcccttgccccccaccccgacccccgtgagggagaggctggtaccggtccggaatttccgggatatcgtcgacccacgcgtccggatgtatccaatgactttgaaataaatattgaagtttacagcttggtgcaaaagaaagatccctcaggccttgataagaagaaaaaaacatccaagtccaaggctattactccaaagcgactcctcacatctataaccacaaaaagcaacattcattcttcagtcatggccagtccaggaggtcttagtgctgtgcgaaccagcaacttcgcccttgttggatcttacacattatcattgtcttcagtaggaaatactaagtttgttctggacaagggcccctttttatcttctttggaaggtcatatttatttaaaaataaaatgtcaagtgaattccagtgttgaagaaagaggttttctaaccatatttgaagatgttagtggttttggtgcctggcatcgaagatggtgtgttctttctggaaactgtatatcttattggacttatccagatgatgagaaacggcaagaatcccataggaaggataaatctggctaattgtaccagtcgtcagatagaaccagccaacagagaattttgtgcaagacgcaacacttttgaattaattactgtccgaccacaaagagaagatgaccgagagactcttgtcagccaatgcagggacacactctgtgttaccaagaactggctgtctgcagatactaaagaagagcgggatctctggatgcaaaaactcaatcaagttcttgttgatattcgcctctggcaacctgatgcttgctacaaacctattggaaagccttaaaccgggaaatttccatgctatctagaggtttttgatgtcatcttaagaaacacacttaagagcaaa

SEQ ID NO: 95912 - DNA, 310 bp, Homo Sapiens
cagtcttgcagtgtggggctgccagcatttcatggcctccaagctcagctgggctgaatgaacgctgccatccagcgcttggctcattttctgtcccattttcctgagtgcttttgccagacttacacttttctgaaagctactccaccctaccccagacacaccctctctcctcggatgacctgcctcctaatttcctgagaaaactggacatggccacctttccccagtgtctgaggcccaggttgacccgtggtcatggtcgctgtcaccacccacctgcctgtatgacagagtgagaccctgtctc

SEQ ID NO: 95913 - DNA, 553 bp, Homo Sapiens
  misc_feature (70)..(70): n is a, c, g, or t
  misc_feature (417)..(425): n is a, c, g, or t
aaatgccaaggttcgataaaagtgtgcagaccaagggtaggaccttgccctgtggcaccgttcttgactncaagaaggaatggctcactggagaggggagagaggaaatgagaggagtcggctggggcgagtgtggaccgcaagcccagagttagtcttggctgcagtgcaactcttttctaaaatgttattctcacgcccctttctttgacctggacatgttgtctcctggtaaatatttgatggtcagcacacttaactaattgcagagtgaacaggaccctaatgaaatctaaggtgcagatggggcagttacgtcgttcagcgttcccatctggatcacattagcagagggaaacgaggattgtggcatgagtggctctttcaaattttacaccaagtttatgcagctacgannnnnnnnnccaaaaaccccaagcccatagaggaaatgtgaatgattaagctgtcttaggctgtcctcactagtattgtgtgaaatttctgttttgtaacaattgttttgaagataaaaatatttggttaatgtaaa

SEQ ID NO: 95914 - DNA, 465 bp, Homo Sapiens
  misc_feature (70)..(70): n is a, c, g, or t
  misc_feature (142)..(142): n is a, c, g, or t
ggcattgtccttagggatgaacaccttctttatggtgacataatccgacaagattttttgacacatatanataacctgaccttgaaaaccattatggcattcaggtgggtaactgaggtttgccccaatgccaagtacgtanatgaagacagacactgatgttttcatcaatactggcaatttagtgaagtatcttttaaacctaaaccactcagagaagtttttcacaggttatcctctaattgataattattcctatagaggattttaccaaaaaacccatatttcttaccaggagtatcctttcaaggtgttccctccatactgcagtgggttgggttatataatgtccagagatttggtgccaaggatctatgaaatgatgggtcacgtaaaacccatcaagtttgaagatgtttatgtcgggatctgtttgaatttattaaaagtgaacattcatattcc

SEQ ID NO: 95915 - DNA, 687 bp, Homo Sapiens
  misc_feature (408)..(408): n is a, c, g, or t
  misc_feature (526)..(546): n is a, c, g, or t
  misc_feature (657)..(658): n is a, c, g, or t
tttgggggtgaggaaaggagtgaataaataataatcaggcggaaggcctgcagagtttcacctgccaggctctcgggacccagctcctgctgcacccagtggaaggaccaacatggaccttggtcccacagcctccccaaccctgggaagcctggagttttgcagcagggcctgattcagccccagggaagaggcgccagggcaggaattcacatgagggcagagctcttagtacagtactactaacttcagcaagggcaggatgacctctcacgctaggatcacacgtgtgagaaagaggggctgcaagctgcatgcctttaggaggagccctcctctcctgagggtccataagtggggtggataaggccaggtgagccttgccagccacagaagagaggacataangacctgctttccgtggcttccacatgtcttctttgtctcaccccagagggactgagcttgggggatcgataaagggggttggggaaaagccttttagcaacaagtcacttactgtctnnnnnnnnnnnnnnnnnnnnnactgactgctacaacgcagatgctgatgctgggcacttccttttctgaccaaaaaggaggaaccagacaaattcactccacacagatgcccttcgccggggggaaccctgnnttaaaagtgaaggggcagggctggtgggg

SEQ ID NO: 95916 - DNA, 471 bp, Homo Sapiens
tcgaactgtcagccttatcagtgtaaccctgtccttctctatcaccacctccaccttaactaactctagacctgccctcagtcgcttctgtggtatggggattgacataaatggaaaagaccccctaggtattttttaaatacgcattattcccccatctcccccttcttcagtagcctcagttatagatctcacaccggttgcttctacatctaataataaaactagggtgtctattgtaaaaataagagatctaaaacagaccttagccatcgagagagtatcaagatgcaaatccctggctgaaatggattaaatattccgttcgcactttaaataaaagcgattgttacgcatcaggttataaatgagcctgtctcctttgttcggtgtactctcatggcaaagctgctggcgagtgtaccctttctgcaggaagtaaaaatggccttgctgaggtaattaaaaaaa

SEQ ID NO: 95917 - DNA, 448 bp, Homo Sapiens
gcccgggcgacgccggagttgcagttggaggctgcgggaatacaaagtgacactgactgccgggtaactgtctctcaggacatttgtgctttgagtctctgcaactctggaccatctctgcaggctaaaagatgtgcctgttgctaagaggaggagccctgcagcaggaatccggtgccagctgacctggaacaacctgatctccagaaagcatccctgttatactcaaatgggccttccagatgagccctggatccagcctttctttgactatgaacctaaacgtaagaaagagaagtttcttgactccctaaaaacgagtcataatgctttctgaaactgagtctcttctgcttctggaaactgagtcttagtgcaaagaaatccctctgtattttcttgatttccatcttgattctctattttaaagataaaatagctgttaaaa

SEQ ID NO: 95918 - DNA, 443 bp, Homo Sapiens
agtgtgagaatgtgcatgtaatctacgcctatgcagcatatccaggcacgccagcttcaactcgcttcatcatgagagaccaaaaataaacataatgaaatagaggacattctcgcgcctcaaaaaattgaactatcttaaaagtttacttttgagaaatgtgagtcacaaaaaagtaaaacaacggtactcaaggtcacacccgctgagaagtgtgttaggtgagacatcttgaagctcttccttctcatgctggaaaggctgtcagaaagttcaagtcctcctcttgacatagtacatgcctatttgctcattgggataggctaaccttttcaagcaatgtgcggcaccccttagcttcaataaagtgttcaatgtaagaagaatatgctctgtatccataataaaatcaccacaaatcaaataaatgaccaagttgcaaa

SEQ ID NO: 95919 - DNA, 610 bp, Homo Sapiens
  misc_feature (17)..(17): n is a, c, g, or t
  misc_feature (25)..(25): n is a, c, g, or t
  misc_feature (491)..(517): n is a, c, g, or t
caccggcaagttgtcgnagacgcgnatgcatgagtagaccgagcagaagccgccgctgcccagtagcgggcccacctggtactgcgactccaggggctccttctccttgccgggcgccagcttggtggcgtgcaggtcgttgcagggcgcggcgcgcaggtgggcaagcgagttgattttggacaagagcatcccaacctccaggatgtcggcgcagggacggtgcccagaggagctgccgcaggagccggagccggggctgtgccgaaggctatgcctggggctgtggctgtggctgtggctgcgggtggcgttgcggctgtcgctgcggctggcgcggaaggccgagggcgagtcggaggacaactgagggcgctgccgggactggcggcgggagggcgcgccagcggggtcgggcagcgctgagaacggcggggtgagcggctcgtggggctcgtgcggcagcgccgcggggcaggaggctagtggtnnnnnnnnnnnnnnnnnnnnnnnnnnncggtcccgccgccgccgctgccaccgactcctctcgggcctcctcagccaccgcggccgctgcagcagacgcccggctcgccccgcagccagg

SEQ ID NO: 95920 - DNA, 547 bp, Homo Sapiens
ccagtcaaaggcaatcaatgctgcccacaaaacagaacaagtgctgccagccaaaaggcagtcaatgctgcccaccaaaacacaatcactgctgccagccaaaacccccatgctgcattcaggccaggtgctgtggtttggagaccaagcctgaagtctcaccccttaacatggagtctgagcccaactcaccgcaaactcaggacaagggctgtcaaacccagcagcagccccatagcccacaaaatgagtccaggccaagcaaatgagagcagaagaagtcaaacaaagaagaagtccctggggccatgcctttcactttgtagggtgggggattactgagagtcaggctagacctgtgtttagagaagcagttttcacagtgactaccatttccacccaatgagaggctcctatttcccatcatagctccctaccctagggaggcctccatctggaaatgggaggatgaagaggctagaatcatctttcctagtgatcctgacatttagacagcacagaaataaagagcaataaaaagaaaaaa

SEQ ID NO: 95921 - DNA, 497 bp, Homo Sapiens
cttcccagcagcaaatgtcaaagccagtagaaaacaaaggaagaataccttcattgtactaggagaaaatgctgtcaacctagaactctttcaagaccagggtgaaacataaaagctgactgtatgctgggaataaagttagcctcaacaaatttccaggtacagtattgattttaattaggctccctgatcacaatgcaatcaagttagaaatcaccaacaagaaagagaaaaacccaatacatttggaaattaaagacaattctgacaacttgtaggttaaagacaactctttaaagtctcagaaatatgaagcttgttccaactaccttaaaacatcaggcaatttctcatgtaatcattagtaaaattgattatgttttaaaaaatataattgccaatacctaagctgcagatgtaaattttgtgttgtacctgtatacacttttaacaaatacactaaaacacatgattaaaagaacaaaagcttaaaaaaa

SEQ ID NO: 95922 - DNA, 416 bp, Homo Sapiens
ggggtcagacagcacctactcactctctaagaatcccaaggtctgttatggaaaaatgatcaagaaatcccatttcacccacttacacaatgtgtggccttggccaattaattcatttgagcctcaatgttacgtgggccacttctgtcatggggttgttgtgagtcaaagacaatatctatttgtgaagcattttgtagaagccaaaaacctgtaagatgttgttttgagctctaagaactttctgtaggcgcataagatcttttgaccccaaagactgttgaaggaacaggaagcttctctgggctttcagatcaactctctgtcctggatagaattttggccctaaaatggtaaacaagaggtcggttaagtgtgtacaagatgtaaaaggtcatgtgccatgaaatctcaaa

SEQ ID NO: 95923 - DNA, 452 bp, Homo Sapiens
gcggccgcaaaatgaggtgtggcgagtcaggcgcgggcccgggtaagtaacgccggcatgtggagtcacagtccccggccgcgcgcaggagctaggtcttcagggaagtgatgttgctcgggtctctcctccccttgctctggaaatctggcgtccgtcttaccttttagtgtccaagaacaactttttcaaaaagttcatatattagcttgaatttacaaactgctggcctatttttttaagtagaaaacggccaaacatcagcattcagcagttacacatggttcaacttaacagatgtgttttttcaaaaatgttcttgaaaggaataggtaaagctgtagacccaaataattttgcaccccactggttggaaatgctggggtactttccctctagccctgtaggaaaaaaccctatactgaaacccaaaaagcacaaaacacgggtct

SEQ ID NO: 95924 - DNA, 669 bp, Homo Sapiens
gaaacacttatttagatctttgttaaagttattgattgtcagatcagagaaattgcaatcccaagtttattcataaaataaaaaaagttgttactttggaaatttcaaaatggcaattttatctcagagtcataattacaaggggaaaaatactctcttagccaagatcaagaatttcggcagcactgcaattctgtttacatccacgttacacaaaagcacatgcatttggcaaagagagtgcatacattcttattgcatcatttttcgttatgtgctcaattgccttatggtcccctagagggtctacttaacatgaattcaacaatgatgataatggggtcaccagtcatttccttacatatatagctctgatgtattcaattacatgtttttgatgttgtgctggtagtatatagatcccaattaaggagaaacttgggcctatataaacaatatatatggaatatacatggatatgtaaagacttgaggttgatgacctgacatccattaatgttaaaaatagtaaagtaaaaattccagtggcttagaaagatggtattttcttaaggacacactgctgaacacatggccacctacctgctctctaaagcaatatgtataatttaaccaccaaataaagaactgaggaataccaggagacaaa

SEQ ID NO: 95925 - DNA, 1043 bp, Homo Sapiens
  misc_feature (835)..(885): n is a, c, g, or t
cagaacagcataacaaagggcaggtctgactgcaaggctgggactgggaggcagagccgccgccaagggggcctcggttaaacactggtcgttcaatcacctgcaagacgaaggaggcaaggatgctgttggcctgggtacaagcattcctcgtcagcaacatgctcctagcagaagcctatggatctggaggctgtttctgggacaacggccacctgtaccgggaggaccagacctcccccgcgccgggcctccgctgcctcaactggctggacgcgcagagcgggctggcctcggcccccgtgtcgggggccggcaatcacagttactgccgaaacccggacgaggacccgcgcgggccctggtgctacgtcagtggcgaggccggcgtccctgagaaacggccttgcgaggacctgcgctgtccagagaccacctcccaggccctgccagccttcacgacagaaatccaggaagcgtctgaagggccaggtgcagatgaggtgcaggtgttcgctcctgccaacgccctgcccgctcggagtgaggcggcagctgtgcagccagtgattgggatcagccagcgggtgcggatgaactccaaggagaaaaaggacctgggaactctgggctacgtgctgggcattaccatgatggtgatcatcattgccatcggagctggcatcatcttgggctactcctacaagagggggaaggatttgacagaacagcatgatcagaaagtatgtgagagggagatgcagcgaatcacttctgcccttgtctgccttccacaacccccactgtgagattgtggatgagaaaactgtcgtgnnnnnnnnnnnnnnnnnnnnnnnnnnnnnnnnnnnnnnnnnnnnnnnnnnnttatgggccagggccgggacatcttggggcctggaccccccccagggggcaaggaacccctggcaaaaactgtgtggaagggagagcccacccctccctacaggttggggaaggaataccccccttttggggtcctggttttaaaaacttataaattt

SEQ ID NO: 95926 - DNA, 484 bp, Homo Sapiens
gcatccatcagagactgcacctctgtgtggcaggcagggcatgggttttagtcctggccactgaccagctgtgtggccctggccgagtcgtagccccctggagcccagcttccatttctataaaatggttgtttcgggagagaggggcaggctttctgtgtgactcgggagttcttccgtgagggctgccagggggtggtgtgccaggacctcaggctgggcctttgtgctggccttgcagtgggtgtgtggggaagtcactgtcccactatgggtctccactacccagtcactgaccctgggagaccccttctgtgtgggagggagcgggggctggctagcgggccccccagccagggatcccagaggctgagggttggggagaggaagccatcatctcattacctctgtcagtgcaggggtggctgctgcttcccttgtgcacttgggtcgctgtgattgtgaataaaagtgatttcgtacc

SEQ ID NO: 95927 - DNA, 353 bp, Homo Sapiens
ctataaaaacagacaatcagcgtgacatttaatggagttagttattattgcttctatttagtatcatcacagattactcatcgctgccatgaagtccataaaatgtgtgactacctgattcctgggcatctaggacagggtcttttaacctgtcaagtcagcttcattatggccaattttctagcagtggttggggatggggagaggagagctttgattcttttgtgtgtagaagaactttccataagcctgtttggctcatggacatattttacaatgtaacctccctcagtcactcagaggggatcaagaagggccccctaaaaccaggaggacagatctagttgggcagc

SEQ ID NO: 95928 - DNA, 421 bp, Homo Sapiens
gctttgacttggactggttctgtcctttattctctgagacactagcaatctcaccatggaaagtctcctcacagaaacagatcattttacagcccccaggccaagggtctcacccccatctgagggaacataatataccagcatgctgggtagagcctcacaatctgcccaagggcaaaagtcagtcagccaactctctgcctctggagaaaatgtaagggatcacagaaccaccaggagcttggttaagtgcagcttttaggaagagttctcaaggtgtctcccaaacatcctggagtggacactggatgtctgtgcccaaccaaaactccttctcctggtaacctcgtgttgcaggatggctctccacccctactccagaggcaggctgcccaggcctggccaaacagagcttagcatt

SEQ ID NO: 95929 - DNA, 474 bp, Homo Sapiens
cggggttttgcttcatcattgagcttgtcctgccagcctccaccagttcctgaagagaacaggccaaagtgtggaacatacaggatgaagcgattacaacctgggcgcagtatactggctggctttgctgctcactcccttacgaatagctgtgatgggatatgaaatccaagggaactgttagccccccagagcagctgctcccaccgaccctgctccaagagtgctgggatgtccgctggcctcgaggcaagacaagagctccaatcactctgctgcaagcgccaccattaaagtcaagatcactgtggtggggggagttgaagtgtgcattccagcatgctcatgatcttactgaccttctccactgatgaattagaacacccctcttcccaggcacaggacgagttcagtgcctctctgtttcttgatggaccccaataaaaaaacgcctgcactgtttttcacctaaaa

SEQ ID NO: 95930 - DNA, 520 bp, Homo Sapiens
ggggcctgtgcagcccaggacctaggcgcggtagctggggctggcttttgaggggcgcgggaagccttctgactgggtcggaggcctgcgggcccgaagcctctgtccctcctgttcttgtccggcgctgcttagcccctccgcgtagtcatcatggatctgattttaaaccgaatggattatctgcaggtgggagtaacatctcagaagactatgaagctaattcctgcctcaagacacagagctacacaaaaggtggttattggagatcatgatggggtagttatgtgctttggcatgaagaaaggagaagcagcagcagtgttcaagactttacccgggccgaagattgcaaggctggaactgggaggggttatcaacacacctcaggagaaaatttttattgctgcagcatctgagattagaggcttcacaaaaagaggaaaacagttcctctcctttgaaacaaacctcactgaaagcattaaagctatgtatgtcttttgttctcttttgtaaa

SEQ ID NO: 95931 - DNA, 646 bp, Homo Sapiens
ggggcttccgttgagcaccaagcaagatggcagcttccgagacggttaggctacggcttcaatttgattacccgccgccagctaccccgcactgtacggccttctggcttctggtcgacttgaacagatgccgagtcgtcacagatctcattagtctcatccgccagcgcttcggcttcagttctggggccttcctaggcctctacctggagggggggctcttgccccccgccgagagcgcgcgccttgtgagagacaacgactgcctcagagctaaattagaagagagaggagttgctgagaattctgtagtcatcagtaatggtgacattaatttatctcttagaaaaccaaagaagcgggcatttcagttagaggagggtgaagaaactggaaccagattgcaaatatacaaagaagcatgtggaagaagcgagagaacaataacaataatcgacaaggtcttggatcctggaacaaaaagcttggctctaatccgaatggcttggaactcaaaaagcacacggaccatacaccgcacatagcaggccagcctcaccccctcagaacactcaccaaaacccttgcgctggggggcgcggggcccaatattatagatcacgaacccctcccaaccgggacagcc

SEQ ID NO: 95932 - DNA, 544 bp, Homo Sapiens
catctacctgggacacatctctctttgattaaatatattctttttctttgtactttttaggtagacagagaatgtagatcattgaaagcattatttattcctaagattggcaggcacagaatcatttttaagaaccaaatacccagtcctgccttaaaggccacatctatgatcatcagctctgttagaaataacagcctggcataattcctaaatacaagtctgtagatatatccaggagatagggttacactgttttctaaccttttttaaatcccttaatcttgaggtaaactgcatgcatttagtcaaacaagcatcataaaatttgtttcctcactgtttgggcttaacctcctgatagcctgttttactgaataacttgaccctaacctgtagagaataagagcattcaaattaggaaggcaggactatccatctttagtgcttttcctgccgttaaacaacaatgtgaacttggtcaagtcatttctgttctttatctgtgacatgaggtaactgtattaaataaaacggactcaaa

SEQ ID NO: 95933 - DNA, 532 bp, Homo Sapiens
  misc_feature (19)..(19): n is a, c, g, or t
  misc_feature (51)..(51): n is a, c, g, or t
cgattatcttggaaattanagagtcaaagcaaagaaatgaagggctggtanaatgaattttgtaatatcctcaggatacttttatcttaaaagtatgttgttaaagattttgtaaattgtatttcaacaatgttaaatgtgttgagcaagttgcagtgcaaacactgtcattatgtagagagtttatatgcacataataacctgtacctataaatcgtgcaataaccatatgcgactattttgccatggagaaatctgacagcattgcaaacaatagtattgtttgatgtagttaaccttaagttatttttcagtaatttcttcacaaatcaagattcaaacagctttaaacacttccaatgagataaaatatttactattatgcttattagaacaaaaggtgtttaaggatgaactaaatattttaattgagcatttatatggataatcatacattatgtaagcccatatgtatttacatccagagtcataatattttaaataaacaatcatacaaaaactttaaaaaaaa

SEQ ID NO: 95934 - DNA, 409 bp, Homo Sapiens
ttctcatggaacatcctctgatggtccctctcggtgctgggttctggcaggagaaagagaagtcagggaacagaagagctgctctgccaaagtcatacccttcttggagacacagggaactccatctctcattctcactagcaatttgctgtggcaactcaaatgtttttccagatggaacataagcagacgtgatgtgtttgccttccaggtctaacccatgcaaagcctcctgggaacacacctcacgctattttctattccatcaggtggatatggatgatgattaggaactagggtgaggtggagccagaaaacacaaggagcctggatccctgaatgaccacatggacatacacatgctgaagactgccttgtaagcaggaaataaacatctactgtattgaaa

SEQ ID NO: 95935 - DNA, 238 bp, Homo Sapiens
tttgaagagcgaagcacggaggctttaatggcagagggcccggtggcggggaagggaggcaggcgcgggccccgtgggcctcgggtcacagcgtgtggaggtcatgactgcgacggctcagcttatccgggtcgtctgacgccatgagggacaagtcgcggaagatgtcaagatacgtctaatctcctgcctgcccctgggccgcttcagcctacctcatctttgccagccgtagcct

SEQ ID NO: 95936 - DNA, 151 bp, Homo Sapiens
cagctttgtgcttgcctatttggaagacaatttcctgatctcatttagcaatagctaaaagtgctatctctttttttcacaaatcttttttaagtaaactgcatacaatactgaaaataaaaataaaatacgaatccatcatgacaataaa

SEQ ID NO: 95937 - DNA, 454 bp, Homo Sapiens
ttaacaattcttaatatcttttattgtaaaagccatcagactttcaaatgaattttaaaatctttcaatattatttaatgaaaaagtctcacactgtcatgtataggatatatcaacatttactactcatctgtcatgttaggaaaaacatcattattacacgcttggaaaatcctcaaacccatctctagtggatgtccgtcataatttaaagggtattttccccattcaaataaaacaatctcttgtaaagctacaatagttatataccaaagcaatacctagttacatgctttacacagtcccgtgaaaaaataatttaattgctcctaatccctgatgcaaggcacttcaaagcacccgcacaaaacgtccatgtaaacagcagtacagtacatcatttaaataacataaatgacttttacacagcttgacctaggaaaaaataaaatcc

SEQ ID NO: 95938 - DNA, 448 bp, Homo Sapiens
  misc_feature (321)..(381): n is a, c, g, or t
gcggccgcgactcactttaccaatctccagccggtggccgtggggcaccttaccacccctgaacgccagttacagctggacaactcaatcctgaccgtgacctttgataccgtcagcggctctgccatgttgcacaaccgccaaaatgacgtccacatccacccccagccggaagcctcgaacccacagtctgtggcccatttcatcaacctgacgaccctggtcaactccatcacgcccctggggagccagcttagtgaccagcacccgctcacgtggcgggcagtgccccagactgacgtcttgccacccccgcagccnnnnnnnnnnnnnnnnnnnnnnnnnnnnnnnnnnnnnnnnnnnnnnnnnnnnnnnnnnnnnatgtacagctactgagctgcgttccgggagactcggggcaagaactgccgaaggatgtttgggattt

SEQ ID NO: 95939 - DNA, 646 bp, Homo Sapiens
tcccgatgtttaccctcaggaccccaaacagaaggaggatgaactgacggccttgaatgtaaaacaaggtttcaataaccagcctgctgtctctggggatgagcatggcagtgccaagaacgtcagcttcaatcctgccaagatcagttccaacttcagcagcattattgcagagaaattacgttgtaatacccttcctgacactggtcgcaggaagccccaagtgaaccagaaggataacttctggctggtgactgcacgatcccagagtgccattaacacttggttcactgacttggctggcaccaagccactcacgcaactagccaaaaaggtccccattttcagtaagaaggaagaggtgtttgggtacttagccaaatacacagtgcctgtgatgcgggctgcctggctcattaagatgacctgtgcctactatgcagcaatctctgagaccaaggttaagaagagacatgttgaccctttcatggaatggactcagatcatcaccaagtacttatgggagcagttacagaagatggactgatactacctgccagtgcctgcatgaagtggtggctgttgtttcacgatagtgccgttgatccatgatgtagaagtgggcattctgcagtggcatactacg

SEQ ID NO: 95940 - DNA, 1155 bp, Homo Sapiens
  misc_feature (1029)..(1029): n is a, c, g, or t
ccctcaaatggcggtgtgaagagagttcgcctgagccagatcccaggtttcactgaagaaacttcttagagattcatggcacttctgagatttaatgtttacaacttggagttgtcgaccttcttataagatacattttggaagtcaaaatgaaagttttctgtgaagttttagaagagttatacaagaaggtacttcttggagccacacttgaaaatgacagccatgattacatcttttatctcaacccagcagtttcagatcaagattgttctacagccacctccttagaatgggcaaacacctgtggtatccagggcaggcatcagcccatctctgttggtgtggctcccattgctgtagcacctgtgtgtttgaagaccaactctcagatgagcggttccagagaagtaatgctccttcagttaacagtgatcaaagtgatgacaacccggatattgtctgtcaaaaccgagttccatgcaaaggagcagtacagagatgtaattaaaattctcttagaatcagccaaagtcgattctaaattaatctgcatgttccaaaattcagataaattgttatctcacatggctgcacagtgccttgcattgcttctatatttccaattgagagaaaagataaccttaagtaattcctggaattgctttttgccagaaaaatctttctgaatactctgagagtaataaagcaatatactgcctctggactcttacagcaataataaaaccgaaatctttaacagattcatgttcacagaaaacagaaattctaaagcagttcctgactcatttcgacaccatttttgaagtgttttacaattccttattctctcagcattttgaaaactgccgggatacttctaaaatagtaaacatcctgatgtgtttcctggatttgcttgagcttctcatcgcctccagaatccacctgaagttacatttcacttgccagaggattttatttttgaaaccatcttgcatgctagaagttattacctggcctattcanggcttttggtaaaaggaagtcatcatattcctcaaaaagtggccttctctggtaaagtgggggagacctctgtccggggatctgtggcctgcctttaatggcgccaggaccatcctgttaccgggg

SEQ ID NO: 95941 - DNA, 482 bp, Homo Sapiens
agactaatccattgactgtttattaagcacctactgtgtgccaagcgcttttacgtggcttctccctcagccagccttgagaaggctggaggtggtgtcatcacctccattttacagacaaagcagctgagaccccagcgaggggcggagacctgtcccacgatcacccagcaggagtcgtggcagaacggagcatcagccagaccctgttgtgggcgttgtcatcaagggagcttgaatggagggtctggtgtcagatacagccgactccagccccagctcatcccccatgatgctgtgtgacccactgggcactctggtgagggagctttccagacatcaacagcccactctgcttccctttctgagtcccctgtccagcactgcctagtgttggagggtagaccaaggctgtgcatgattcaccccctccttccatcctggagctggcagtgaataaaagcccgtatttacaaagaaaa

SEQ ID NO: 95942 - DNA, 285 bp, Homo Sapiens
tgagccactacccccagcagggacccatattttcattttgcactgggccccgtgagttatatggctggttctgggagtggctctggacatttttggactcaaataaaggagaagttgagttgtgaatatttgtgtggttcatagacacatccgtgtctagtgaagtcattaccagctcttccagtgcaggaacggctcccaggagtactcctcttgccctctgtgatggctcactcagtgctgtgactcacaaagcagggccagaggaccatcacaggtgagtgt

SEQ ID NO: 95943 - DNA, 607 bp, Homo Sapiens
ccaatgtccaggaccgtggaaatggattccagaaatacagcacgtcctccacatttgccagcgaatgcaacaaggaagtggtcgcaccattattgccagtcaatggtcattgtgccgtatcggtccatgctgtgcaaaattttctcagcctgctccagcgagatggaaatgcccagagctcggaaactctgttggatctcagagacatcaatgtgaccatcctggttccggtcaagactgtgaaacatgagcagcagacgctgttcccgctcctgcagatagcgggaaaattcctccaggtcgagcccgccatctgggtcagcatcaccctcagaggagataccctgttgggcgccggggtctgggttgcccccgcccagcctggccagcccctggcgcaactcgtgcacgtccacgcggccatccttgttactgtccagctcctcgaacaggcgaccccagcgctgccgccgctccgcgtcgcccgggctcccccgcatggcgcccgcccgggggggaggggaggcccggcagcggcggcctcagtgggggcttcgcggcaccccatccccccccgggaccccgcagggtcagctcccgcggccgc

SEQ ID NO: 95944 - DNA, 470 bp, Homo Sapiens
  misc_feature (63)..(63): n is a, c, g, or t
acagcagagctgttcaaagaataagaggaaaaaagccgtgtgtgcatgcccacccaaaaggcntctgtgctgttgttctacattggaacaaaatctatctttgcaacaagtggatggaaatgcgtattaacgtatttgagccctcttgaggggttggaatatcagccttgccagccacagggcagtggtggacttgagcagagggaggaggaggaggaagagggctgagccactctctggcatcctcaggtcactcttcagctgccgttttgaggacattttgcaaggattagctcagggagagccccacagggtgcaagtccacactgccgagcaggacttgaatgctacgagttgtctgccttgggtctgggaccccagggtcaacgggacccagagaggcgcctgtcatctgtccctggaatcgcttctgattttttttaataaagttcatacaaatagaaaaaaaa

SEQ ID NO: 95945 - DNA, 435 bp, Homo Sapiens
taactatggaggatgacacatcaaaactttttcttaaaaaagcatttaatgctttaagtctatttctgtatttatttaggctcatctaaagggtcttgtgtgttatggggagagggtcagaaatgaaaacaaaattataaaaggtgaaataaagaaaaatcaaagaaaggttgcagaacacagggtggaaggaaaggaggtgggtggggtaaggactggtaaattgaaaaaagttaggcggctttttcctttggcaaagaactagtttgaggaacagtagacaaaagttaatttcataaactaaaaatgaaatgagagatgaagggctgaacttccacctaaggaagatgtttcttaggcatctgatttctggacataaaacacactcagttgagtagatacaaatgcgtaaggtatgcaaataactattgattg

SEQ ID NO: 95946 - DNA, 960 bp, Homo Sapiens
agtgtgtggatacctcagtggtcttcccctttcccgtgaacaagcgcgagccagcgcccgtgcccgcagccccggccagtgccccggcggcgggccctgcggtcgcctcgggggcggatattgccgccccagccggggccccgggggtcacccctccgcgcccaggcggccgccagaccagcggcggcgaccacaaggccctcagtacctccggagaggacaccctgagcgattcagatgatgaagatgatgaagaggaagatgaagaggaagaaatcgacgtggtcactgtggagaagcggcgttcctcctccaacaccaaggctgtcaccacattcaccatcactgtgctgtcccaagaacgcagccctgggtcccgggagggctcagatccagcgagctgatcctcaaacgatgccttcccatccaccagcagcacaactatgccgccccctctccctacgtggagatgttgaggatgcacccccacagaagaagataagagagctgaggctgtcgcccacgtccgcgtcgaagagtgtcatccccccaaaggctaagagcttgagcccccgaaactctgatctcgtgatggacatgtgagcgtctgcatgaaaccacaacatcctggagcgccagcgccgcaacgatccttcggtccagctttctcactgctcagggaccacgtgccggagttggtaaagaatgagaaggccgccaaggtggtcattttgaaaaaggccactgagtatgtccactccctccaggccgaggagcaccagcttttgctggaaaaggaaaaattgcaggcaagacagcagcagttgctaacagaacaattgaacacgcctcggacttgctagacgcttctcaaaactggacagtcactgccacttgcacatttgattttttttaacaaacattgtgttgacttagaatgtggttacttcaaatcggtcc

SEQ ID NO: 95947 - DNA, 807 bp, Homo Sapiens
catagatcagaagactacaaaaatgaagctgctctgaaatctcctttagccatcaccccaaccccccaaaattagttgtgttacttatggaagatagttttctccttttacttcacttcaaaagctttttactcaaagagtatatgttccctccaggtcagctgcccccaaaccccctccttacgctttgtcacacaaaaagtgtctctgccttgagtcatctattcaagcacttacagctctggccacaacagggcattttacaggtgcgaatgacagtagcattatgagtagtgtggaattcaggtagtaaatatgaaactagggtttgaaattgataatgctttcacaacatttgcagatgttttagaaggaaaaaagttccttcctaaaataatttctctacaattggaagattggaagattcagctagttaggagcccaccttttttcctaatctgtgtgtgccctgtaacctgactggttaacagcagtcctttgtaaacagtgttttaaactctcctagtcaatatccaccccatccaatttatcaaggaagaaatggttcagaaaatattttcagcctacagttatgttcagtcacacacacatacaaaatgttccttttgcttttaaagtaatttttgactcccagatcagtcagagcccctacagcattgttaagaaagtatttgatttttgtctcaatgaaaataaaactatattcatttccactctattatgctctcaaatacccctaagcatctatactagcctggtatgggtatgaaagatacaaggatacat

SEQ ID NO: 95948 - DNA, 481 bp, Homo Sapiens
ccgaatggtaatttctgcatgatacacttctgtacgttgtcttctgactgttacagactttctactacctctcccgatctgctgtttccttgtttcttaacaggattttttacagtgttgcgtctaatgtaacttagacaataaagggtttggttgtctacactgcagcttctcggtgtctctcccctgctttccgctcgctgcttcccgctctgcccctgctggggcctggctgcaccctggcctgccttcctatactctcctgtttcccgctcaaatctcttcctcatttttgcgttcaaataacacacagctaatgagcttctaaaaatcttttcaggttgttcacttgtattccttaatttgaagaatgaatatttaaattctctcaaaagtcagatattgaggatcttctctgggaaattggccactgtacctgcccacctttctgcctggttccctggaaggtcttattgtcatc

SEQ ID NO: 95949 - DNA, 696 bp, Homo Sapiens
  misc_feature (512)..(631): n is a, c, g, or t
atattgtcacatggctcttgcaagtgatgataatagtgatgcttataataatgaggattagctgcactcatcagcctgtagaaagtaaaaagtttccttttcgaaatttcctttcttgttaaagaataaatcataagtgttagaaataatagtttcttttaaagactaacttccttcaagccttctctgctctgtgctaataactcttcgttaagccctatcctatgtagctgttagatataagggaataagtatattctatgtccttgtactttagccaagatatttgtgctggacatgctcacaggcacgttccagctggcagcctatgccccttccttatttggaaatattattacttttctaagtctttttgcaagcaacttcttcttttcctttgttctctgttgcctttccctatataggaaagttttaagttattagccagtcgggtttaatttaaattgtgaggtccagctccagccaatggagacaggacacaagctgcatannnnnnnnnnnnnnnnnnnnnnnnnnnnnnnnnnnnnnnnnnnnnnnnnnnnnnnnnnnnnnnnnnnnnnnnnnnnnnnnnnnnnnnnnnnnnnnnnnnnnnnnnnnnnnnnnnnnnnnnctggtttttccttgcagtacctaggagcaagcattctgtttctaaataaacattttacttgtaaa

SEQ ID NO: 95950 - DNA, 255 bp, Homo Sapiens
gttctctattgcctttccctatataggaaagttttaagttattagccagtcgggtttaatttaaattgtgaggtccagctccagccaatggagacaggacacaagctgcataagggataaaaactgcttccctcctttgttcgggtgtgctgtcaccattgtttcatctgtgaggagcaccctttctgcagaaagtaaaattgccttgctgaaaaaactttttgtctaaatgctggtttttccttgcagtaccta

SEQ ID NO: 95951 - DNA, 464 bp, Homo Sapiens
aaagagggaactgaatccagagaggaagagtctatagtcatcaagttgtatccatgccagcctccctccacagaggtggcagcagcgtggctcaatctgatccacctcaatggcacccactgggtaggtgcttcataaagctttaccgagttaaatgtgaacaaggcctaccactttgccttgggcagctgcaccaaattagaatttccagatgtgactcatctcatattccaacagctggagtgggtcatcctttacccctgtggctccttcctacagctctcctgatctcagcacaagcaggggagcagctgggggaacacagctttatgtaattacctctgttcaatatttagcaagttgcattgtaacattgtaactgtttgtttctccttggatgatgagctacccccaagaaggggtcatatcagattgggtctcattaaaatgtctgatgaatgaaa

SEQ ID NO: 95952 - DNA, 864 bp, Homo Sapiens
aatttagctgtttataggaaggtgggatgtgagactcatcaaaggtaggatgtgtgacacaaaataccacaggaacattttacaaggctaggtggaaatacaaagctcaaatccttaaggaaaccatcaaatacttgcctagaactttctatatgaagttttgttcttctatgacactatttctctttggtaaagctagcttgtttctatctacaaagacacagtgagtacaggattagaagtgagctctcagccaaattccttttgcaagttctacctgttctgttaggcttcagggactcccagggtttggtgctggctttgggccactcaggtaggaaaaatgatacagattcattcgttaccacatggcttcataaaacaccaaaaggggaaaaatactgactagacattcagaaagaaagtggttggggctgctgatatcaagatcagaaccctaagagccatgaaggcagaggctcaaagaagtcttttcatgggcagaagactgagagccctctaagccctctctaagataccaagtagaggcagctaaaggaggacctcttctccttcatgattttctcttaaggctattctgactgccccatggactcaattctctgagacacctcatccctcagagacacctcatcccctcatccacagttaggaaatcccaccctgcattggtcacagcctgaaacaccagctgtgtgatgaggagggtcctgccctttctctattcctcactgaagaaatttcaatcaaccctcagaggaaaagcaacctaagcctacctttcctcctaaagcatttcggacgcgtgggtcgacgatatcccgggaattccggaccggtcca

SEQ ID NO: 95953 - DNA, 478 bp, Homo Sapiens
ggactgaacctgatgggggctttttctggatggctgggccatcctgatcaagcctgatcagtaagtctgtggaaagattgcagaccaggtggctaactgggcactggagcctctgaaccatcaggctgtctgccagcaagttcttttctccatggcagactgtatgatctgaagtccccccaaccctctccaagtaaagtagtttattagaagctcttaagtctttaatagacctgcatatttccttcccttatgatttcctataaaatatagtttatggtgttatatttttaactgaaatactgtacatatgtaaataactcttgacaggaagaaaatatattaatgtagtatttgccccctatcagtgagctgaacaaatacatcatttaaatctatgctgcactttgagttgctacaaatatggttcgatttgtttatttttgaaaaatgtgataaagaaatctaaagaatgaaa

SEQ ID NO: 95954 - DNA, 532 bp, Homo Sapiens
atgcagtggaaaagaaacagatcatcctaaatgaggaggtaacagggaaagcactggggttcggtttctgcatcttctggatcaattcacggaacagagatcgtggattacatgggctccttcttggtttttgctgctgggcaggacttgacttagcattatccaagcaccagtccaagtggggttccctgttgccagttagagaggtgagaatgtttggactctaactcaccgattgctttgcagacaaaggtcttttatttctcctgtcctatcttaagagtccaaatgtctctggtgatgttcctaagacccttgtcccagatactctaaatgtgaatgtatgagctgggggagtcaacccagcccaccatgccttggctgatgataccagaggcagagagtgctggtctgtctgggaagcttagcaatgtatcttcaaatttatttttgtttttaaaaatatttcttaaacatgctgtcccaacatttgtgagttgtgtcacaagtgagtcattatcaatggtagata

SEQ ID NO: 95955 - DNA, 482 bp, Homo Sapiens
  misc_feature (32)..(32): n is a, c, g, or t
atcctgaacatattgatgaacatagacacganaatcctcggcaaaatactagcaaatctaattcagcagcatatcaaaaagttaatttacgatgattaagtagccttctttcctgggatgcaaggttgttccaacatacataaatcaaaaaatgtgattcactgcatgaacagaatcaaaagcaaaatccacatgatcatctcaatcgagacagaaaaagctttagataaaatccagtatcccttcatgacaaaaaccctcaccaaactaggcatcaaaggaacatacctcaaaataatgagtcatctatgccagactcatagccaacatcatactgagtgggcaaaagctagaacctttctccttgagaactggaacaagacaagaatgtctactcttaacactcttattcaacacagaactgaaagtcctagccagagcaatcaggcaagggaaaaataaaaggcatccagatagggaaa

SEQ ID NO: 95956 - DNA, 416 bp, Homo Sapiens
catttgatgatatttggttgtaagatagagaagaaggagcacactggttgttttggctcctgtaccctactggttattaaggatttttcatagtatccctggtggttagattcccaagccaggccatgaaagatagtattttaccctgtgctatatctgaagaccagactaacagtatcacacaccctaaccacactgaagaaaatatctcttttaaaaatgtattcagtggctgagccaccgctcccggctgggtgtttatttatgtatttgttgtaaagttctacctacatttaatggaggtatagtttctgctggttatttagaaataaggagcaacttctagatgaatccaggacaggtcatcaagttacagcccacagctgaataaggccaatgcctgcttttgtaaaaaa

SEQ ID NO: 95957 - DNA, 481 bp, Homo Sapiens
gcagcattcccgctgagactggatttgaaacaaagttacagttccttagagccactacagatttctttcctcaatggatacctttagcttaggataaccactaataggaattaatttgaatttacttgaaattatttatgactcttgaccatttgggatacccatttgtcatcttttctactaaaggaaactaaaatattgctctctcaaatactgggtattgttgagctgaagacagagtgcaggggctctctctacctctcctttgtttgcctaaaggtaggacataaatccttttttactgaagacagctactccgcagcccacagatggtgccagtggggcagaggaatctgtgagcagactttaaaccccaaaagactttctaaaaatgaagtctcagttcaggccgaagtgaagtggcttgatcacagttcattgctgggactacagatgcgccaccatgcctagctaattaaaa

SEQ ID NO: 95958 - DNA, 1461 bp, Homo Sapiens
gagagtatgaagtcgacggcgcgccgaattcggcacgaggctgcaagaggtcactgctgggcagactgtcttcacatcttgcctggtggcttggatctgatgactttgaagggcaacattgacatgagccgtgtggctgtgatgggacattcatttggaggggccacagctattctggctttggccaaggagacccaatttcggtgtgcggtggctctggatgcttggatgtttcctctggaacgtgacttttaccccaaggcccgaggacctgtgttctttatcaatactgagaaattccagacaatggagagtgtcaatttgatgaagaagatatgtgcccagcatgaacagtctaggatcataaccggtcttggttctgttcatcggagtcaaactgactttgcttttgtgactggcaacttgattggtaaattcttctccactgaaacccgtgggagcctggacccctatgaagggcaggaggttatggtacgggccatgttggccttcctgcagaagcacctcgacctgaaagaagactataatcaatggaacaaccttattgaaggcattggaccgtcgctcaccccaggggccccccaccatctgtccagcctgtaggcacaactggccatttgtaaagtcacttcagccaagttttcatttgggagctacccaagggcacccatgagctcctatcaagaagtgatcaacgtgacccctttccacagattgaaaggtgtaatcacactgctgcttggataactgggtactttgatcttagatttgatcttaaaatcactttgggactgggatcccttgctgattgacaaacagactttctgggaccttgatggagtggggaacaagcagtagagtgggactgggggagacccaggccccgggctgagcactgtgaggcctggatgtgaagactcagcccagcgaagctcattcccttacccccggccagtgctgctgcttcagtggaagagatgaagccaaaggacagaatgaaaatccctaccttcagagactctagcccagcccaacaccatctcttcctacctctcagccttctccctccccagggccacttgttgaagtctgagcactttatgtaaatttctaggtgtgagccgtgatcacattttctatttatttccaagtcttctcattgtatggaacatagtactacttatacttacagtagtaagttatacttgtgagcccacagagtggcagacagcatggctctcacagcacagggagaaaaactgaggtacacagaggtacctcagaagctctggatgtctttgggggttttgctaagtgtatcttgataggaaacaacaaaagcaggttgagatggggaagatgacagaacaacagtgttaaatggccatttgcacaggcctttgccacaacagagaagtagtttggtcagctaaaactcag

SEQ ID NO: 95959 - DNA, 406 bp, Homo Sapiens
tttaacgatataataatgctttatgtaattaataacagcttctgcattttgagccacttggtacatgacaggccaattacctcatttactctcacaacagtcctctgaagttgaaatgttattgccccgtctgccaacaagtcaccttcttaggttgtgaacattcagactcacagatgaccgtgggccacatagggcactgggtctgttcagaggatggaggacaagtcgccttctgcaggcacccttgcagcagtgcacgtgggagtctgttcaggtgcagagaggtaggagtggaagctatcctggtagaagagcctcacgccccacaggagccaaagctcttgaaacacgctctgggcatagctccccattctgtgcaagggccatgcccagctacaagatc

SEQ ID NO: 95960 - DNA, 475 bp, Homo Sapiens
cagctaatttccattttgaaaattaaaagaaaacagcacagagaagttaaatgcggtgtagcaaagttatggggtctgcttgagggcactaacctcaacagattattcctcctctccttagaataaccatgaaaatacaaatttacttagcacatttttgctttttaagtagctggttcattttctgaatttctcacattcagagttccagtcattattgttacatcatgtttgcagaaaccttgtcttatttagtgtctatttgcatataaccctgaaaacattattatttgaaaacttttctatatctcaaattaatatacattttcataacctacctttgtattaagacttgcaattttatcaatctattatttcttagaaacaatttactagcttagaatagaaagcaatgttatcgtcatataattttcatgtacaaatgccacaaataaattgaatgtttaaagctaaa

SEQ ID NO: 95961 - DNA, 477 bp, Homo Sapiens
  misc_feature (65)..(66): n is a, c, g, or t
  misc_feature (141)..(142): n is a, c, g, or t
  misc_feature (167)..(169): n is a, c, g, or t
  misc_feature (187)..(188): n is a, c, g, or t
  misc_feature (196)..(198): n is a, c, g, or t
ctcggttcgctttattttagaacgctttggcacagctttcggcttttcaccgcgttcaaaacaanntcccacttgccacttgcacgtctcgttccacgtctcggttgcttttgacaatctgcaccttttctgcgcattccnnggtacgctgagcgcactttacttcnnncagcaagaaaagcctgcnnagcatctnnngctgacataacactggctgactgtccacgcgttcagtgcgttccctgcttgtgggactctgtgttttcactaggctgtggcgttagatccattagttcccgaagagcctccagtgcttcctaatgcccccaagccaggagtaaaccctgggatgaggaccggggcttccgttgctaatgtctgtaaaacctgctgaatctgtaacaaggcctgcattgctctagggtttgacattgctgatagtgtatcaggattctgcattcgttggaggacacgtgg

SEQ ID NO: 95962 - DNA, 473 bp, Homo Sapiens
tcttagttgtatgaattccagattaggccttatggatacttgtctactaatatatctgaagtttgaaaacaatccctgacaatattgtaggtgcaataaatattagtcaaataaacatttaagtgccaaggtggggtggtagtggttgggggagctttttttgattaaacagaaattccttcaagtagaacttgagaaaggacactaaatacagtcatcttaacccaggccagaacctaaatttattggtttgcctaacagtcttattgtcatggcaatatttgctaagatgagccttctttagataaaaatgaactctcatttagtggtggatgaaaaaagagaaattgctttatcatatagtttaatttggctcggtctactaagaccaccagggttgatgtattcctccatttttggtgtgatctttttcttcattcaataaagttattaaatatatggcaaaacttaaa

SEQ ID NO: 95963 - DNA, 237 bp, Homo Sapiens
agcacttagtatttagcatttattaacaggtactctaagaatgatgaagcattgtttttaatcttaagactatgaaggtttttcttagttcttctgcttttgcaattgtgtttgtgaaatttgaatacttgcaggctttgtatgtgaataattctagcgggggacctgggagataattcctacggggaattcttaaaactgtgctcaactattaaaatgaatgagctttaaaaaaaa

SEQ ID NO: 95964 - DNA, 466 bp, Homo Sapiens
ccaaaaactacaaaacttagttttcccaagtcccagaattctatctgtccaaacaatctgtaccactccacctatatccctacctttgcatgtctgtccaacctcaaagtccaggtctatacacacgggtaagactagagcagttcaagtttcagaaaatgagaaagaggaactgagttgtgctgaacccatacaaaataaacacattctttgtatagattcttggaacctcgagaggaattcacctaactcataggtatttgatggtatgaatccatggctgggctcggcttttaaaaagccttatctgggattccttctatggaaccaagttccatcaaagcccatttaaaagcctacattaaaaacaaaattcttgctgcattgtatacaaataatgatgtcatgatcaaataatcagatgccattatcaagtggaattacaaaatggtatacccactccaaa

SEQ ID NO: 95965 - DNA, 469 bp, Homo Sapiens
cattcattgtgtctaatacttgacctgtcctgctgtttattatgtggggtggctccatattttaaaaactgtattcataaaaagatatttctcatcctgctgagtctcaggcccattgttgtaggtgaggtggtttcttttgtttgatatataacgttttgctgactttcgacttgggaattgcaaaggcttacccaaaaccctgaaggaaaagctaagaattcatacttattaagcacttggtaggtgtctgacactgtagtagatatatgcgagagcccagaacaagctgatgtccatgtacatatctttaaaaaatataatgatctagtcttatctgtggaaactgcttcagatactgatcttactctttcctgttacatcagaaattctggaaggtaatatcctgaaagatttatcctcaagaataacaatacattaaaatcttctgctttgaaaatgcaaaaaa

SEQ ID NO: 95966 - DNA, 439 bp, Homo Sapiens
ccaaagaaccagcttaatcctattggttcattacaggtaagttgtacagttctttgcctactgatgaaatatataataagtttgtaatgtcagaggggctaacacaaggaattaatattttaaagacaagatagtgatatattttgttttccaacttacgatcattagattaacagagctaacttgaaattattttcctatttatgttctgggttttctttcatatacagtattcgcctttggcttatagaattctcatttaagatcaacaggccctcagtgcacatgggtaaagtgttttatactttaagaatagttcttgctactcttgtgacaaatctctttctacttctgttgagacagaagactttatagagagcctaaatcaaatcagtgaacctaactgaagaaaaggagtctatttgcttattctaccaaa

SEQ ID NO: 95967 - DNA, 499 bp, Homo Sapiens
tttatggctggacggtactccactgtgtacatacatactacattttctttatctattcatctgttgataggcacctagactgatacattggctactgtgaacagtgctgcagtcaacatgggggtgcagatctctctgatataataacttctctttgctttggataaaggccctatagtgagactactggactatattgtggttctatttgtagttttttgaggaacctttgtactgttctccacagcagctatattagtttacgttctcaccaatagtgtacaaaagttcctttttttccacatcctcaccagcatttgctattttttgtctttttgataatggccttcctaagtggggtgagatgatactttattgtggttttaatttgcatttgcctgatgattagtaatgttgagtaccttttcatgtatttgttgactgtgtgtcttcctttgagaaatgtctcttcagatcatttgctcatgtattaattgga

SEQ ID NO: 95968 - DNA, 531 bp, Homo Sapiens
  misc_feature (493)..(493): n is a, c, g, or t
gcacgagaagagagagcagcgtgcatccgaggacgcggacaagggtcccaaagagccgctggaaaacggcaaggccaaactgagcttccagtgctgtgagtgtgggaaggccttccagcggcacgaccacctggctcggcaccgcagccactttcacctgaaggacaaagcccggcccttccagtgccggtactgcgtcaagagcttcacgcagaactatgacctcctccgccacgagcgcctgcacatgaagcgccgttccaagcaggctctgaactcctactgagcctctccgcctggggcggcctcaccctggctggtgctgccccctcaccttggtactgatcagcgcccccacccaggacataccttccccaggatagagagcacacctccctcctgtccttgctctcaggtagtgagcgttcgggtggtgccatgggagcactctccctcccccaggtaatgaaagagtggccaagtgagtgttctngttctgctgtgccaaaaaacgggggggatgtgccatca

SEQ ID NO: 95969 - DNA, 386 bp, Homo Sapiens
gatccttctgtggctgattcaactcaaatctgagtgatgttggatcaagcgcagccctcttgtcaccatgaagtaataagcttgataaggcactcactgaggatgactaagaagaaattcaagaggaaatcattgtctcttgaagattcctggacctgtgaatcttggttatgggaggaaaagcatcacatactggactttgatgaagagaatgcacagccttccagagaaggcaataccttgccccagccctgcaaggtattcctacccatctggaactgtgatggagtcttcaaaatgccattgcattgttctaccaagccagcggcttcaggatgatggctaatatagtaagaccagtaaaatccacgaccaagggcaaaaaa

SEQ ID NO: 95970 - DNA, 511 bp, Homo Sapiens
  misc_feature (162)..(170): n is a, c, g, or t
  misc_feature (412)..(456): n is a, c, g, or t
cagaaggcagatacactttcactcctcctggaagactctcagatagaagaaacatagtactagcctagacattgctacaattattacattatctctaatcaaaggaaaggagtattttagaatccgtctttccttgaaagagagatgaaagattaagggatnnnnnnnnntagggcggatatgctttcacttctctggtaacttctggatacatgagataactatgatacacattcaaaaccaagtgatactacatgtacagcatcatttaattacacctacagaaagaaaagaatggtttacctaaaaaaattagtgttgccacaactggtcactcagcagaaaacaaattaggtccctcatctcacttgccaattacaaaaatattccaggccaagtgcagtggctcatnnnnnnnnnnnnnnnnnnnnnnnnnnnnnnnnnnnnnnnnnnnnnaaggccaggggtttgaacccagcctgggcaaaattgtgagaccaaatctcttaaa

SEQ ID NO: 95971 - DNA, 403 bp, Homo Sapiens
tctgcagtcacaagtactttaatttttaaaaacaaatcacttattaaaaaataaacaaatggccatgctactctaaagttgatacaagtaaaataaattaagaggtagtgtctcatgagacaatgtgctgaaagtcagtgcccaactagacaatctgagctactacatacacttggcttatctgtaaagttagatttaagacactactctcaaaagtaacatttcactgtcacagctatttcactttaaaaggttaaacaacccaaagagtttaaacagttttatttccaaaaacaacattacagagcataatttctacattaaaaattcttacagtaccaagagaagtattacagtacaattttccacaacaaaattgtagcacacaaatccacgcgactcc

SEQ ID NO: 95972 - DNA, 403 bp, Homo Sapiens
tgcggccgccgcgctttcccgcttcgcggagaccgacgcaggcgcccgcccccgaggccgaagggcactgggcggcgagggctgcggtagctggcgactccgggggcgtctgcgcggcgcgcgctagacgaggctgccccggcggccaccccgcgaccccgcgtcgccgggatttgcgcgcggagaacgccggttctggagggagcacgcctccccaaagtgcagaggagggtccggcggcgcgtctccgcggaaaccctctccactgtagttaccccggatgccgacttagtagtttgttttccgagaaaagagaggggatctgggcagaagggccccgtttgccccaaaagaaggtgcaaggatcagaagataacgaaacgtccacttcctgaagggtggg

SEQ ID NO: 95973 - DNA, 308 bp, Homo Sapiens
  misc_feature (1)..(1): n is a, c, g, or t
ntgagccaccatgcccagcctataccacaaccctcattcagctggtctcccccggggaggcttcatctaacagagccaagactgtcctctccatacacttaggtttgtgtttgctacttggtttttatattaatcacctttcacatccatttatatgcaaaattaatagaaataaaggatgcaatttgtcatcaatggagggttcataataatcatttaggcacttgtagaatgaaaactactaaggtttctaggactaagaagaaatactaaagtaatacacttattaccaccaaagccactacatt

SEQ ID NO: 95974 - DNA, 529 bp, Homo Sapiens
  misc_feature (142)..(142): n is a, c, g, or t
tctcagctctttaccccacaagacccaggtcaaaatctgtaccagaacgaaggactaggcgaagagctgcaggaggcagaactggaatagctgacaatggctgcaaacgatatgctgccatcaagcttcagtctccctatcnccatcagctcgccactgcaggcagcgtccatatatggagcatcctacccgttccatagacctgtgcttcccatcccgcccgtgggactctatgccacgccagtgggatatggcatgtaccacctgtcctaaggaagaccagatcaatagactccatgatggatgcttgtttcaaagggtttcctctccctctccaagaaggcaggaccagccaatactcctgctctgcaaaccctgagtgcaccaccctaagcggctaggccggcagggccacacgacacagctgaagtttgttctttaggcggaggcaccaagccttgttttcttggtgtaatcttccaggtgcccccttctcctttcacaaagattggctctgatggtttttatg

SEQ ID NO: 95975 - DNA, 281 bp, Homo Sapiens
gactcaagctccccctcctccatccctcgcctgtcccaccttctacccaatcctgcgagactctggccactcctcacacctagagttcccaagggactataggttttgctgttatgtgttgacatacccccacttgaagaactgcattcagcctaggtgcccttttcctgcctcgacggaagctgagtcaggttgttaatgagaaagttctacttatcccaaaggcagttgcactaatttaaaattgaaatatacacaaatctgtttgatccagattaaaa

SEQ ID NO: 95976 - DNA, 683 bp, Homo Sapiens
cgccgcacctgcggccgaggagccggggaacccgggcggccccccgcgcaggaagaagtcccgctccggcgcgtccggcctccgccgcgccttcagctggctgcggggcaagcggcgcaagaagaaggcggcgggggccgagggcgccgaaccggccgccccccgggccaagaaggcggaggacaaggccaagagggccaagggcaaaggccgaggctctgccaaggctgagaatgacaaacatctaagtgtagggcctggccaggggccagggtctgcagtggatgagcaccaggacaacgtcttctttcccagtgggcgacccccccacctggaagagctgcacactcaggcccaggaggggctccgctccctacaacaccaagagaaacagaaactgaacaagggtggctgggaccatggagacacccagagtatccagtcctcccggacggggccggatgaagacaacatctccttctgcagtcagaccacatcctacgtggctgagagctccacagcagaggacgcgctctccatccgctcggagatgatccagcgcaaaggctccaccttccgaccccatgactcatttcccaaatctggaaagtcagggcggcgtcggcgggagcggcggagcactgtgctgggactcccgcagcatgtgcagaaggagcttggca

SEQ ID NO: 95977 - DNA, 451 bp, Homo Sapiens
ctccccacgcctccacgatagaaagaacaaaagctctctgagggcaggatttttttatggtgttcactgggccagggaccaggcgagccactcaaaactgcggggtgaacgagtgagtgactctccacccaggctgaagagcagcagcagagaacacccacatctggggcccagcaaccctctttaagcgcctgcaggagaaggggaatgtgcaggtcacttgagaggctcttttgagaaatggctgaatccaagatcggggcagaagaagtacaagacatgtctgaactatctttttgtgccacaaaagtaatgaaatgttcaaagaatcccgacaacatgtccaaaggacccaggagctcccactggccaaacctgggacaatctgagcaccaaaataaatcataagtgtaatggattcaaatctaataaataaaattattcataagtc

SEQ ID NO: 95978 - DNA, 378 bp, Homo Sapiens
tcccgtgatgccttcgtgggtgccggccagagaagagctccggaggccggggcggccggcgggcgtgcgaatgtcatctttcccaacaagttgttcccagcagaatcctctctcctggcacaaaacaagcagatgaagagcagccctgagaggtagacacagcggagatttttttcacccgcattgtacagaagagaaaatgaagctttgcccaacctgcaggagatcccctcaccttgcaaaagagccaagctgtggctaaactgggatcttcagtccctggaccatttagcttgactaagagaacaggaatggaggccaaaagatctacaaaatgctcacacagagaagatgacagcttctacaaataaatgtcaa

SEQ ID NO: 95979 - DNA, 458 bp, Homo Sapiens
  misc_feature (353)..(353): n is a, c, g, or t
  misc_feature (371)..(371): n is a, c, g, or t
cagaaaactctcggatggcaacattaagtcctacctctgttctcgctgcgctttttatttttaaaacacacgaatgaccaaggcttgttccagggaataatgctctgtctgaaagcgtttttccaaaaaaagaatttttcgttttgtgttttggttgggaccccagacgtgtcaagacttttaacccgacagccccaagcactgctgagtaaagtcatcagatgagtagtcccacgctgttgttgagctgactctgtgcccgaatggtggtgcaggcgccctgtcctggttgtgttgttacgtgtttgaccagcacaggggtccggtggggaaaatgtatgggttgttctcanttgttgctaatgctgaantttaaatctcaaggggaagggcccacctgcattgttgagtgtctgctgctgaaacacatgattgtgtttaagtttgaaattgctcaa

SEQ ID NO: 95980 - DNA, 357 bp, Homo Sapiens
  misc_feature (248)..(257): n is a, c, g, or t
actgcgcccggtctccactgctttctaattccaagggatgcgatctgtttagagcctcatctggtgactctaatccttatgaccagaatgtgcagggattctgactgcatccacactgtggaaatgtaacagctttagcctgggcacagaaggcttttctctttcctgttctttcctgaaccagcaaacttcaggaccctgactggactcccgctggaggaatgaagcccagctcctaggacttattnnnnnnnnnntgacattagatttatggaggctgagcgggaagatctctgaactaaaacaattactgaaaagagaggagcattctgatgtgctgttctttggaatttctat

SEQ ID NO: 95981 - DNA, 466 bp, Homo Sapiens
  misc_feature (48)..(48): n is a, c, g, or t
  misc_feature (329)..(329): n is a, c, g, or t
ggcccgagtctgagtggggcggtgagattcttggaagaatgaaggtgnagggcttttggctttatcccccctcaaatggctttggctttccttgtgtgctgaagtctactgtttgagttttcagaatgatttcagcacagaaaattggaatggcaccaaccactaaacacaccaggaagcatcatatcggtcccgtgttgctcacatcctgggaatctttttattccaaaagcagtcggtacatccagacctgcgctggggctgtgaacgcggggacccgggctgggaacgcggagacgcggcacgggcgttccaaaatggaactttgntggctccccccacccactccccactccccaccgggcgcccggctcgggctccgtgggaaagagggggaaagccagcctgccagccagacagacagacagaaaaagcccccgtacggagaacggtggccaaaattttt

SEQ ID NO: 95982 - DNA, 455 bp, Homo Sapiens
ttcttgggggactaaaaatagcctggccattcatcctcaaatagaaacctttgcctacacctaaaatgacaaagttcagcattgtgtacatagtgactttgggcattattccagttgtagatttgaactctggtttcaggaagagtacttttaagtggcactggcactatcttctgaaaatggaaaaagtgatttgcatattgctcctcccactgtgagctatatctgacattatgcagatttcccttgtattcataggcagtatttaatatgtaggtagtgatttagaaagatgaggaaaggatgagggggtgaaaatgtaaaactctagagaccatgcttaacagagatgcatctggcagatgtgatttaatcagaggtcatgacaacttgtcatgaattctgatttcattataaataaatactgcaatgtcgacatatggttcttaaaagtg

SEQ ID NO: 95983 - DNA, 450 bp, Homo Sapiens
aatagataaaaataatcctgtattgtagttatacaacatattagttatctatctagcccaaaatttaacagcttaaaacaaaaacatttattttcccaacgtttctgttgattagtaatccaaacatgacttagctgggtacctttggctcagggtatctcataaggctgtcatcaaggtgttagctggtgctgtcatcatctcagggcccaattgagaaaagatccacttccaagttcatgcacgtggcttttggcaggccttgggttgctggcttttggctacagacatcagtgccttgccacttgggcatcttaataaagcagctcacagcatggcagctggatatttctatggcatacaaggtccaccattcctcagacttgagtttctgtaattcaagtttgctcttgaatccaaagcgggaatgttttagtggttgaaccacta

SEQ ID NO: 95984 - DNA, 400 bp, Homo Sapiens
agggatcgcctgctcccacagtggattccattgttagctgagtgtcctgccatcactcgaatgtatgaagagagcgctctcctgcgagaccgcatgactgtcaactcccttatccgaattctgcagaccattcaggacttcaccatagtcctagaaggatcactcatcaaaggagtggatgtgtaacccaactggctagaaactctcagtccaaaccttgctccttccccaactaggggaccgatttggacttgtctgacagtagtgagtcactgcaggggcagccaaacatatgccccatttggaacaatcctcactctacagacaaggcaaaatgttgtattgtagttcatttgaacctggaatttagtataaaatagagtattttcatgtgttaaaa

SEQ ID NO: 95985 - DNA, 478 bp, Homo Sapiens
  misc_feature (217)..(245): n is a, c, g, or t
tttattaggattatttttcatagttgtatatgcaaaacagttcagaaactcttgtaggattgaggaaatgagtaaatgtctcaatgttcttgggagccaagattctcactatagaagaagatatacgcaggtacggaacagggcaaagtgagaaagaatcctgtggcaatgggtttgaattggaggcattggtgtgaattcaagctttgtaaagtannnnnnnnnnnnnnnnnnnnnnnnnnnnnatatacgtgtgtctgtacttgcatatatttctcagctttgtccactgaatggcctgaaagcaaagaaaccccaataatgacatgccttgtatccagataatggtctctaataccattccccactaaagggaagcagagctcctttgagaaatggttgattccagggcttgggcagggaaaatataaggggaatcttgaatattatgttcctttgccagaaggaaaagatactt

SEQ ID NO: 95986 - DNA, 914 bp, Homo Sapiens
  misc_feature (756)..(756): n is a, c, g, or t
  misc_feature (770)..(770): n is a, c, g, or t
  misc_feature (786)..(786): n is a, c, g, or t
  misc_feature (789)..(789): n is a, c, g, or t
attcccgggatatcgtcgacccacgcgtccgcccacgcgtccgcgatgattatgtttcagaaccccagcaagaaccttgcccatatgcttgtgtcattagcttgggagacgactctgagacggacaccgaaggagacagtgaatcctgttcagccagagaacaagaatgtgaggtaaaactgccattcaatgcacaacggataatttcactgtctcgaaatgattttcagtccttgttgaaaatgcacaagcttactccagaacagctggattgtatccatgatattcgaagaagaagtaaaaacagaattgctgcacagcgctgtcgcaagagaaaacttgactgtatacagaatcttgaatcagaaattgagaagctgcaaagtgaaaaggagagcttgttgaaggaaagagatcacattttgtcaactctgggcgagacaaagcagaacctaactggactttgccagaaagtttgtaaagaagcagctctgagtcaagaacaaatacagatactcgccaagtactcagctgcagattgcccactttcatttttaatttctgaaaaagataaaagtactcctgatggtgaactggcgttaccatcaattttcagtttatctgaccggcctccagcagtgctgcctccctgtgccagaggaaacagtgagcctggctacgcgcgagggcaggagtcccagcagatgtccacagccacctctgagcaagctgggcctgcgggaacagtgtcgtcangagtggtggggatnctcagatttctgtcancanaatgactgggataatggactactggatgaggtaacctggcatttcacttccttcaaaaccatctaatttttctccctgaaagttttgggcagcggcctttggaaagcctaaatatggaccattcc

SEQ ID NO: 95987 - DNA, 424 bp, Homo Sapiens
  misc_feature (381)..(381): n is a, c, g, or t
cagagaaaaattatctgtaatactgagaaagagccatctgtcatggctggaggctcaagcagagaagggataagtggagaggccccaggaacagatggagaggcttgaacccccacacagagcagagcgtccaacagctgggactgattaatccagacggccgactattacgtcatgtgttggattacaaccaaatgagtggctaaaagctcctagcaagttcaggccaacacgaagtcgcttcacagatggcgtccaccttggaattccgtgagggatgaagacactgctcagtcctgcctcattgtcctctgtggaaagagcaagaggaatgaggataggcctttcccacccctttattcttctttattctcagggtanaatggaagtagagaaggagagtaagtgagattttaaagaagct

SEQ ID NO: 95988 - DNA, 542 bp, Homo Sapiens
taaaaaagggtcctatgtggaaatgagtgggacaatgataaaaataaacaaataattaaaattccaaatcaaaacataactcctggccctgagatccccagttaatcctctaagaccacaatctccacattgtgaacttgatgctggtgttcttccatctcagccacaactttctcctcagtcctcagctctgtctccaagatgactgctttgccctcagtatcttcagcttctgggtccggggctggatcaatctcaatgatggtctgcccatcctctgaggtgctttcaacagcctgaattgccgaggttaggccggactccatggccaccaattccacagggctaaccatggtggtcatgttgcccagtgtactcccatcctgcatggcagtagagctcagcagcgccaagctagatgaagggtgaatggtcactgtgtctggtgagctgctcttggcagaggagaccactgtggcatagcggaagagctgagggccagaaggcagtgtgtggacagtcacaggactggagccctggct

SEQ ID NO: 95989 - DNA, 502 bp, Homo Sapiens
tttgtggagatgaggtctcactcctggactcaagggatcctcctgcctcagcatcccaaagtatgccactgtgcctgtgccattgctcttaggaaaacagtcctggctacctgggtgagaggatttgggaaaactgaggtcagactccaacagacagtggcagcaaacctaagcctagcccactcaaaggaaccaaagctggccgaccctggtatcgtatgagtgaatgtggagaaaatcagtgtctacctattctggctctactgagaatccccctcaacccactgcatgggtaggaaaactgaggcccagaccagaaccatgccttaagaaggccacagggccaagggacccaggattaggtcactaggatgtggttacctgtataatgtcacagggttggtctcacctactagccagcccaactcctgcctccttcaatttcccagaaatctggaccccggctccctaagaatctaaagacctactccatttgggaaaa

SEQ ID NO: 95990 - DNA, 461 bp, Homo Sapiens
  misc_feature (437)..(437): n is a, c, g, or t
gcggccgcactagtaccccggagcccatgggcgcgccgagccgggcgcgggggcgctgaacggcggagcgggagcggccggaggagccatggactgcagcctcgtgcggacgctcgtgcacagatactgtgcaggagaagagaattgggtggacagcaggaccatctacgtgggacacagggagccacctccgggcgcagaggcctacatcccacagagatacccagacaacaggatcgtctcgtccaagtacacattttggaactttatacccaagaatttatttgaacaattcagaagagtagccaactgttatatccttatcatatgtctggtgcaggtgattattgatacacccacaagtccagtgacaagcggacttccactcttctttgcattactggacggctatcaaacagggtatgaagactggcttnatataaagcagacaatgccatgaa

SEQ ID NO: 95991 - DNA, 394 bp, Homo Sapiens
cgttaaaggcataaagtcttcagattgcatttctaaaatttaaagaccgtttcgtaactataagattaacatacaaaataaaaattgtatgtgtacaaaattataaatgttttatatacagtactgaattgtatcaactgctgcttatttaagacagattgctatcagcatacaaaatatatttgatgtttagtaggtgtgtctttgagtttattaacctatacgaactgcttacttctttaatatttatgtacgcgcccggcctgtaatcatattttcaaaggtgcctttgactcttaaaaagtcaattgtttggggcaacccactcgggtccccttccaccctgtgtaagctttgttctttcgctcttcacaataaatgcttgctgctgctc

SEQ ID NO: 95992 - DNA, 539 bp, Homo Sapiens
gcggccgccgagctctccccgcccggcccagcccctccgccgcagccgcggggcagccccgagccacggccccggctggcgggcgggctgcgggcaggatcctggcgctcgggctctggcaaggggaaaggacagaaacggcgcatcgggagggaccctgcctcaccgcttgtatatggcaaagtttctcgccgagctcctgggctgcacgttgccgagcaagggcgcctctcccatgtttgagtctaaaagtcattcccgagttggcctgaaatcaagcaccaagcaaaagaccaccattttcagcacattggccagtgagaagtccttatctgactgcaaaaaggaacagcaatggaaaccttccatgtacagcagcataactccagtttgctttccaagccctctgattgagaagccaataggcaaagtaagaatgaacctacttttatcagacactatgattcgagccagttggctgttatttctttttgccttgagctatttcggtgaaataataaaattgatcttataaaaaa

SEQ ID NO: 95993 - DNA, 498 bp, Homo Sapiens
gcggccgccgagctctccccgcccggcccagcccctccgccgcagccgcggggcagccccgagccacggccccggctggcgggcgggctgcgggcaggatcctggcgctcgggctctggcaaggggaaaggacagaaacggcgcatcgggagggaccctgcctcaccgcttgtatatggcaaagtttctcgccgagctcctgggctgcacgttgccgagcaagggcgcctctcccatgtttgagtctaaaagtcattcccgagttggcctgaaatcaagcaccaagcaaaagaccaccattttcagcacattggccagtgagaagtccttatctgactgcaaaaagaggctgtgttccctgtcacgtggggtgagccaatgggctgaagaagcatgaggaaaaggagactcgagtatggcaggtggctgtgtggagaggacacttggaacagcaatggaaaccttccatgtacagcagcataactccagtttgctttc

SEQ ID NO: 95994 - DNA, 674 bp, Homo Sapiens
ggagcgggtggggttgtatttggaagcctctgaagagaccatgtctttttaaaatctaactcttgagagtgcagcaggggcatggctctgctgggagttgtgttttgctttggcagtctctcttccccccacgaagaaggctgtttaggttttgtgatagaatgggatttgatgaaaaagacaaccaaaggaaaatggggaggcttgggatttcatttaaataatctaagccaagatgataaaaaaaaccttcaactgaaggtactttgtttcttaccaacataatttaggcttcagcatctcaccagcccctccctctgaagaagtattatgttcagaagccaacaaaacagtttgttgccagaccaatgtttgatgggaaaacgtggcactcatagttgaatgtatacttctgtaccaaaacttgaacataaaaagactagaatttgtgagttttagcaaacgctaaaattgatcactgtaactaaccccttctgtccttcctgcctgtttctctgagatgaggaatagcattctttttgtggggatggtgagctttgaatcataaaatgaagttggtgcttgtatggtgtttccttagcctaaagaatgatctgttgtttgaaacctttgtaacttgtttgtatgagtaaagaaaaagggccatggcggaa

SEQ ID NO: 95995 - DNA, 361 bp, Homo Sapiens
ttggctctcatatttaaaaatgaaattgtctgtaatactttcccactctccggcacctgagtccatggctttggcagccatagtgatcatgaacttccggctatgtcctagagtcatttatctccgaggatgtcaggaggaaccccaaaatgtcatcaagacactggctacaggtctaaactccaataaaatccagctgggttacatcaattcagacatctggataaaaggatgaatgaaaccatgtacataatacagaattatgcatgccaggaaaaaaaattatactgcctaaaagctgcaaccttcatgacatcaaatctattttaacactggctggttatgtgaggaaaaggctaat

SEQ ID NO: 95996 - DNA, 958 bp, Homo Sapiens
  misc_feature (194)..(194): n is a, c, g, or t
aaataccctgttccaggcacagcgcatcaattcttccaaattgctcttctattgcaggcacagcattccccccttggcaaggtcggtctccccaagaagcggattacgcagccttaagtgccacaaccaatactccgtctcggattttgagctctcgttctccttcttgattggagccagctctgaaaggttgnagatagattcactggcagtttttgtaaggttgctgatcgaaggcgtagctgaaagttcctttgctgctggctgtgatggtttctgaggactgttgaaggggtggaggggaaggaagacaccatgctgcccgtagaagtgcacagcggtgaagtagctcgggaggcgggcgttgtctgcaggccattagcttcatcttctgcttgcacctcccttgttactttgaaggtcgggtaaatatgcctttaagggttcacactggaaatacggacgtcttgcccccaacccatcgttctcgcttatgggttcatctatggcaattccagcactcgggcctggtgcaaactgggattctccaagaaactggataaatccaggcttagttccattcacccaaactcgctccccaactcgaaagtcatccacaaattcatcatgagtctcagatgatggagtgcttgatgctttttcactggatatgggtatatatactggagcaacaacaccagtaggtgtcttcagagctgtgcttccaggcttcaggatcagtggtgggggccttaagcccacttggcttcagcatactcatgttctctgtatgacagagctgtgtctcctcagcatgttgccactatctttccccaaccattgatacaacggtgggttatatagtgaagccagtctctggattaaatctcctcggacgccgccggtcgccgccacctgtcccactgcaaccgcatcacccgctcggggagcctctata

SEQ ID NO: 95997 - DNA, 446 bp, Homo Sapiens
gagcagtgttagcttcagaatgtctgcagttatttgtgcctatatgtcatataggcacatataacacttttgtgaattttgttgtgtaagctttaaatccggtactgtttttcaaaatgaatatggagtagtcattggagaaattggttgaattctttgcagtagcaaataaattttaatcatttttaagtttgataactttggtaaactgaattctgaaaagtttacacatgttttaggatgtcctcaaaatgtacagggcattgtgttttgcaaattagccatttagccatcagattcttctgtagaattttgatctttttgcccatatgagaggtagttcttatttgtatggaggttaagtacctgcggatgggatgtgttcatcaccactttacagtatgaatttgaatttgaaactgaaatgaaaacttcctaacctgtca

SEQ ID NO: 95998 - DNA, 377 bp, Homo Sapiens
  misc_feature (225)..(239): n is a, c, g, or t
gggcttatattaacctgtgatccttgaaaacataccatcattttttgcttcttgtaggttagatggccttgtcactttgtgccttggcaggatgtgcagggtgtgttctgagctgaacagctcctcttaaaggaccaaacagagaaggcattagtatacttcttttacattgtcaacaccatacccgcctccgccccccaccgactattattaaatggtggcgannnnnnnnnnnnnnnctgatgttgttctttgccagtgaccagatgagtctgcaacttactaacaaggtattgagtgaactacttctgtatgggccccacagtggggtgaccaagccaccaaaccagagataagctcaacagtggtctcacact

SEQ ID NO: 95999 - DNA, 496 bp, Homo Sapiens
ctctctctgctgtaaggactggttccagaatgagagaatttaaaagacattccccccccaaaatgttcataatgtcaccccggaaacctgcgaatatgttatattacatgaccagggagaagtaaggttgcagatggcagtaaggttgctaatgggctgaccttaagataaggagatgatcctggattatctgggtggacccaatgtaatcacaagggtccttaactgtggaatagtgaggtggctgagtcagaggcagagtgatgcaatgactgaaagacttaaccagccatcaccggctttgaatacggaagacggtcatgagccagggaatgcaggcaggctctgggagctgaaaaaagcaagaaaatggattctcccctggagcctccagaagggatgcggtcctgccaaccccttgtcagtgagccatttcagatttctgacttccaggactgtaagaaaataaacttgtcttgttttcagccaaaaaaaa

SEQ ID NO: 96000 - DNA, 490 bp, Homo Sapiens
gcagacccagcgactttggagttcccgcgtctcttccccatgtctgcagtcggagggcgcgggtgggctcctggtcgcggcccggcgctcttcgtcctcgcccttctccgcccggggcgcttgctgaccctagagtcttggacagtggcgttgggagtccccagcggcctgggaaccagatgaggctggaaggaggaagtggctgagcgaccagaccgttgctgtgtgcagaccgagagcggggcagaggcggtcgagcgctcgttttccgggcgacttggctgaggggcgagatggtcccttggagagaacagccacgggccctgggccgaggggctccaaacagcagtcgctaggctgttttggtcgtcgggctttatcagtaaacaattcgagcccatggttcgaatgattatttaattaaattcctcagtaatacatcaagtgcattgtgaaaatatgcgaaataaaatttaaaaaatgagataaa

SEQ ID NO: 96001 - DNA, 598 bp, Homo Sapiens
gtaagaactgatattgaagcacaactcagtgaagttaatcctgtcaggctaggttcacacaagaaaacttctgacaaaatcctagaattccggcaaatgcaggcatggaatgagagattcctattccatctgcctcgttgtgcctggggccaggcctgagtgttgaagacagcttgttccaatgtaagatcaaatgagattgttcataacaggagtctgcaggaatatggcacctctgatttgaaatgatggatgattttcatcagccgtgtatctgcttccttggcagcaccccaagtgcagaccccaggctgtttcagtgtgtcatctggcaggcccaaacagaggatgtctcaattgtgcatgtgtaacacagctttaattcataatttcatttctggatggaattttgagcagatgggcattgctgtcctttttaatggtaaaaaatcaatgaaagacaccgtggttttgaaattaatgagcacttgaaaaataccagctttgtttggctttgcgttttcttttttcctctcctcctaagttgtttgcagcaaaatattcaattgaaaactcaacatgtccactgcctcccaaa

SEQ ID NO: 96002 - DNA, 211 bp, Homo Sapiens
gagacagagtctccctctgttgctcaggctggagcacagcgttcacaactcactggttatggagccttacctgggcatgccccccgctgacacctgtggaaaggcatgggacagccccggcccatcccctgctgcctgagccctcccctcctctgaccttcctccttccatgaccctgctgccaggggggctcccaaaacaaagatcttga

SEQ ID NO: 96003 - DNA, 406 bp, Homo Sapiens
gaatccgccttctctgggtagggtgctccctgatcctcgtgaagcatgtggtagctcaagttatgtggcatctatagtagatggtggggagagtcgatctgaaaaaggagactcgagcagatattaaagcaagcattgaaaataatagttattgcataccaatccttgtttgcaaatcaaaaattgaaatgttatttctgcattgttacctgcatattactgaaagaaacatgttggttttgtggagagaggtagatactaacttcctccatgaattttttgaggtattcaaaggaaaaggaattgttttcaaagtaatttcatacttgttgatgctatttgaaaagtgtttagatgtaatatctaccttaaaattttcacaataaaatttgacatgtactgcaaa

SEQ ID NO: 96004 - DNA, 263 bp, Homo Sapiens
gaaggtagctgcatataaactagccaaattaacagactgtggtttttagatggctttccatatctacaagaactatttagttctcaaaactgggaagaaatgtttcagaggcatcattaattcataatctaaaaatttatcttgggtttccttttttcccccagattctgtatcctccatagtcctattcatgacatgggtcgttcatctctgtattctaaaccctcaatgaactgtagacagtaataaatatttattggatg

SEQ ID NO: 96005 - DNA, 426 bp, Homo Sapiens
gaaactcttttttgtctaccatcatttcatatttttcttgctatttcaaacctataatttttaaagaagcgactaacgtaatcattcatagaatatgctgtcagtaacttaacaatataaatgttaacatggaggcatttagttcagcatttgctttacttaatagagtgcagaaaatgtggcccttttctcagttagggtgtatgtgaagataaatttagaatttctagactagtaaatacttctctgataataacttaattatagctatttcaaaccaaattgtttaattgtggtgaatcatatgtaaattgttcagatgtaggtcaacacccacgcccacattctagcacctctttcctaattcaagacaactttgcagtgcctaaaagagctgaacagtgcagattagagacataagacaaa

SEQ ID NO: 96006 - DNA, 386 bp, Homo Sapiens
aaccgttggaagacatgagtctgagttgaagttaaagagaagcttctgattctaagtcaagtctctctctgttgccttcctccgggcaggagggctgtgatgtatcctggcgagcctgggggcgatccagtcttaggaggtgggaggcctgcattgcagagagcagaggtgaatgggcctcccaggttgagcttgtgatgggcaagtagactggcacgggatgaggttggcagtggggagaggtaggatgcagtgcggggaaatgggcctttccacctgagaaaggcgagtgtgtctgcgtttgataatcctttgatatttgcgtatctgttattttcaagaatcacatttcacatagaaagccatgtgacagtttttaaattaaa

SEQ ID NO: 96007 - DNA, 367 bp, Homo Sapiens
cagatctcctccgggagtggtgggcagctactgtgaaaggcctggttcaaaaacctcacagcggttgttttcagagttgtccctcctgtgtactctcaaagccccagaatgaagcaaagcatcctcccttttcaaactggcactcttccccaaccttgaggaccactaggcactttgtttttaaagccacagttacttttatggagaagtattgttatgaaaaaagggaggcatctgaggagtggaaacagagaaatgagtgactgagatcagtgtcttattttgaccatcttttccaagtgctgcatcctcccaaacacaacatgaactcaacacttaataaagctgcagtcctacgtgaaaaaaa

SEQ ID NO: 96008 - DNA, 362 bp, Homo Sapiens
cggggctggtctcacccagtgccaacccgagagctccttttggaacctgcacagcccgccgacctgttgccacctgcacccaccgctggaccatgcagcctcgcctcctggatgctgtcccagcctggccgagggtcccaggtgaagactggagggaccccaacagccaccgcccaggacgctgaggctcccttgcctgactgtgacttgtgcctctctcctgcccccgtggggacatggcagcccagagccaaggctgggtgggcaggtgacccaaggaacctttctgggaacaccttctcgccgggctgggaacaataaatgcagccatgtctctgcagctggtgctgaccccatgccaa

SEQ ID NO: 96009 - DNA, 378 bp, Homo Sapiens
caactggctatttcccaaggatcatgtaagagaagctgggcagaaagataaaaagattacatcagtcatgattcatgaaccagtcatgaatcagttgacaacaaatttattgcacagaatatttctgtattttgtcaagctacttttaatatttaattcttttacttgataaaatgcaagtatattaagaaataagtatactgtgatgaattaatctatatatatgaacaaacctggtataaaatgaatgtaatctatgaacctttagagcttagactgtatttcacacaaataattgtcatgttttgttgctattgtgaattataaaaatgcagcatttaaaatttttaaggcaaaatttaataaaggatatacagt

SEQ ID NO: 96010 - DNA, 1014 bp, Homo Sapiens
agcagtactcctagggttataggtagcgaggcctgggtggcgaattcggcacgaggctgccagctgccgaggcggttcggtcctgctgttgcggccgctgccccaggctgcggggacgctcccggagccctgcctgttccctgtccatccaggccagcagctgaaggagcctcacctgcctcccttctctgagtagcacggatttgaggagaagcagcgaagatgtccagcgagcctccccctccttatcctgggggccccacagccccacttctggaagagaaaagtggagccccgtccactcccaggcccgtgtcctctcccagctgtgaatgcgagcccctatccgggagccctggcactgctcggatcatggcactagggaactgcattcttctcatcacgcgggatcacacgtgtggccacccgatgcagtcactatcactcctggccgtgactgtgaggccgtattaataggcggccgctcaatcgtcgcatcatgtgctgcaacctacacggacagcatacggaggtcgtcagacgtagggcgtcgcacccgacgcgccttcccgggctcggggcccctgggccctccctgtccgagtgggccctcttgcccttcctatggtgtcccctgtgtccccccatctggttctctccacggagcggaagatcctgatacggctgacatttcgccccaagatcgagccaacattctggggtgccgaggggtgcatgcgttgcaggtgcccttcgctacgggcccccacacacgaacggggaggtgtaaggcaagacagacgccctccaggccaagtcaggatccacgcccgccccccgatgctgctccactgacgaccccagcccgcgaccaccatgggcccacccacgcgagacagcaaccggagcgaccgcaagcacacgcgcctcagccacaacggatcaagcacagccccctccaaacgaccccacgtcccagcgccacaggcagacccaggcgcggacaacagcacg

SEQ ID NO: 96011 - DNA, 1057 bp, Homo Sapiens
ggctggaccggtccggaattcccgggattgagggtcttgttctgccaggcgcctgtccggacccgggcccctctccgctttcggccggcctcgggcaccgggcttctggagctcccggagccctgcctgttccctgtccatccaggccagcagctgaaggagcctcacctgcctcccttctctgagtagcacggatttgaggagaagcagcgaagatgtccagcgagcctccccctccttatcctgggggccccacagccccacttctggaagagaaaagtggagccccgcccaccccaggccgttcctccccagctgtgatgcagccccctccaggcatgccactgccccctgcggacattggccccccaccctatgagccgccgggtcacccaatgccccagcctggcttcatcccaccacacatgagtgcagatggcacctacatgcctccgggtttctaccctcctccaggcccccacccacccatgggctactaccccccagggccctacacgccagggccctaccctggccctgggggccacacagccacagtcctggtcccttcaggagctgccaccacggtgacagtgctgcagggagagatctttgagggagcgcctgtgcagacggtgtgtccccactgccagcaggccatcaccaccaagatctcctacgagattggcttgatgaatttcgtgctgggtttcttctgttgcttcatgggatgtgatctgggctgctgcctgatcccctgcctcatcaatgacttcaaggatgtgacgcacacatgcccccagctgcaaagcctacatctacacgtacaagcgccctgtgctaacggagcctgggactcgggactcccccgccctggcagttctggccccctggtgctttgctccctgcgctcagtggtcacttttccgctcccaactgggggctgggagccgtggccaccattcccctagaaagtcctggccctcttcaccctggcccctacctgaccccgctgactctttcgggcaaaaattcctgcttggggatttaaggccca

SEQ ID NO: 96012 - DNA, 476 bp, Homo Sapiens
  misc_feature (63)..(113): n is a, c, g, or t
  misc_feature (306)..(336): n is a, c, g, or t
gggggcagcggcaccatcctcacacctctgcattctgatagaagtctgaacagttgtttgtgnnnnnnnnnnnnnnnnnnnnnnnnnnnnnnnnnnnnnnnnnnnnnnnnnnncatgcatgcattctcaagaggtcgtgccaatcagccactgaaaggaaaggcatcactatggactttctctattttaaaatggtaacaatcagaggaactataagaacacctttagaaataaaaatactgggatcaaactggcctgcaaaaccatagtcagttaattctttttttcatccttcctctgaggggnnnnnnnnnnnnnnnnnnnnnnnnnnnnnnncaacattctatttatttattgaggacccatggtaaaatgcaaatagatccggtgtctaaatgcattcatatttttatgattgttttgtaaatatctttgtatatttttctgcaataaataaatataaaaaatttagagaa

SEQ ID NO: 96013 - DNA, 375 bp, Homo Sapiens
aagaaaagatcttttaagaaggaggcttcgatgaagaaagtggtgcggccccggacccccctatttgcgccctgcgtggccacccccaacagctgcaagccgccggcacccgcctgctgcgacccgtgcgcctcctgccagtgccgcttcttccgcagcgcctgctcctgccgcgtgctcagcctcaactgctgagcgcccccactcccggccgcgagcaggcagggcttcggggacgcggggcgcttctcgggcgggtgatccctaacagggcggcttcccagggctgcaggcgggcggaggttccaggagatgggacttcagggagacctggcttgggctaaaatcgaaatacaatatatataggctgaaaaa

SEQ ID NO: 96014 - DNA, 571 bp, Homo Sapiens
  misc_feature (172)..(172): n is a, c, g, or t
ctgtggcttaatccttgtcatgttttcggctcatggacacaaggacacattttcatgccttctctcacagggctctgcggctccggttcacttctgtgtctttacactcccttcacagagacacttgctcccccttctctcgttcttggcatcccctaggaacttgcacacncaggtctctcgacttctggacctgcttcttaccatgccgtcttaagcagtcaggagtcgctgcctgggttcgagtcctagttaaattacttagtgctgagaccttggggtaggtaaacttttccaagccaggtttatctcagtttcaaaatagggttaatcgtctttatctggcaggtcaggtgggatgtctcacaggtaagcaccagatgccatttgaaaggcttgaagcaaagtcaataaagcattcatgggaaaatacaactggaggcaccactagattttcgtatacattaggttcccacggggaggaccgaagagagaagaaagaagtggaaagggaggagcgtgcaggagagacaggagaagagaataactaaacaaagacattaaagacaaa

SEQ ID NO: 96015 - DNA, 381 bp, Homo Sapiens
tttaaacaaatccacaaggaaaattctatgttctggattctagctcttgtacatttatcagaatgtactatgctcactccaataagcaactagagggcagactgtatattttacactattgtttgcccaaggccaagtacagagcctattctttattagcaatttggtaaacatttattcaactgaaatgtttaatttatcccattgctcatggttttcctctttccagcaaacactaagaacagtcagttttcttcctttcattcatccatcaaatctgattgggataagttctatgctcactttctaattaagcagtcaccaacctttttggcaccagggactggctttgtgaaagacagtttttccatgaatgggaag

SEQ ID NO: 96016 - DNA, 311 bp, Homo Sapiens
accacagagtccactgaaccggattaatcttttatccctcagggcttctcaggccctgcatggaggaatccaggagctggacaaagaccaactgaaactagacttgccaaagatgctatttgtggtcacagaaacatagagctggacatgaccttaagaagtcacctgagcagacactgtgatgggcactgtagtagctctattgctcagacttggtttttgtttgacttttgctgctctgaactttaattcctaaaaacactgcatttttaaggaaaaacacaaaatattagcagttataataaataggt

SEQ ID NO: 96017 - DNA, 398 bp, Homo Sapiens
ccatcccgcctggagccatcactgcctggcctcgtgctaacatctctttcttcagaaattccaccagactaaacagaggaagctgccctgtctctaagtctagcctgctgtggctgctgagagtacttgcagcctacatgcatctccaaactggcccccactgctgggatttggagactgttttggcaaaaagtaagaggccagaaagtcaagttatctctaacctctcctccagagagtagaatacccccagtgtagtccccagtgactgcatcctattccatcaaagccgggtatcacagctcacttaacctttccctattgttaagcaatttgctttattccaagttttgctctcataagtaatgctgggataaatatttttggtttattgaaaa

SEQ ID NO: 96018 - DNA, 477 bp, Homo Sapiens
  misc_feature (33)..(33): n is a, c, g, or t
  misc_feature (76)..(76): n is a, c, g, or t
gttgtgctgtgcccaaagtgttgcttcttctangacctgaatcaagtgttctgcattattccaatgtcagacctgncagagggcaaattaccaaaacaacagtctccttggatgataaatctcgagctcttcagcagaacagcaaaccagctgctattctctgagctgcctcatggaagggcccaactggcaagcaactgagacaagcaatcgtcagagaagaatggatgtaccccatccaaagtcctgcaatgaacttgaatgatcctgcaatctcagaattgaaagaatcctatcaaaaacaaagaacttatgagcacatactgtacagtagaacttgagatgactgcagctcttgtctgcaccttgaagatttgcaagagtccctgaactggaagaccgcactaagctatgctcagtttcctaacccactgtaactgtaagataataaatgttattcttttaagcttctaaaaa

SEQ ID NO: 96019 - DNA, 728 bp, Homo Sapiens
  misc_feature (126)..(226): n is a, c, g, or t
agctcggtcccttccaccagcaagacgaaatcagtttataatttggtacattactagagtagctttatacattatgaaatgcatttatgtaaagtataacttttcgcattaaaatttagtacacgnnnnnnnnnnnnnnnnnnnnnnnnnnnnnnnnnnnnnnnnnnnnnnnnnnnnnnnnnnnnnnnnnnnnnnnnnnnnnnnnnnnnnnnnnnnnnnnnnnnnncctttgtttagtaccagtcactcttttactttccaattgttctaaggctgatgtatatgtcatagttgatcttcgtgcttaaaacaacaagtccagaagcactggaaatccatggatcattcacatggcttggacaaacacagtataaacttcaacttaaaagccaggagattcacagtctgcagctgaaagcatgctttgttcatacaggtgtttataaccttggaactcctagggtatttgccaagttatcggaccaagttacagtgtttgaaacaagtcagcagaattccatgcctgccctgatcatcatcagtaatgtgtgacaacttggaaatttgtactgaaatccacaataatcagtttttgctggatgggttttacagcagtatttgatatacctaacttgttatggaggttgattgatatctgatccctgcaaaatactttgacttgtcattttgttgatgatgcaaagcacgttggactgagaataaaaaaa

SEQ ID NO: 96020 - DNA, 750 bp, Homo Sapiens
tttggagaccagaggcaaagtccttgccatttaaattatgtctctcatttgttctacaggaatgtgtatagctgaattattgtaggttaaacatatgagtcatggattccaccagaggagctgtataaggggttggagcttgatagatgataagctggtttttctggaaggacatgccagggtttgtatgtgattgtccaatgcagccaacacgtgaacacactcagagagtgtcggccatcttccttggcaaacgtgaatggcaggctctggggacagccatgctatgtcacacgatggtacagccacagcaataccgctcaggatagtccaccgcatacacctggtggtcagtgccatagatgtagtagacataagtctttccttggtaccaatagtgaacttctgtgagggggatcagctcaatggtctggcgctctacgtcctcatccttccgctccgacgttctcaggaaagagggctcagcagcccaggaagagacgtcagagccagatggcccctccgccctggcatcaccttgctgcaggacgcgggcacgggaggccaaggcagcgctgtgctctgcaatgcccctctgggaggcaagagagatgtctcgcagagggaagtccacgatggggtacaccaccgagtttacatccttaaagaggttttctcctttggctttaggcaaggagctccctggggcagttgagccggtgctcagacacaaactcaaaacaagctgtt

SEQ ID NO: 96021 - DNA, 371 bp, Homo Sapiens
  misc_feature (18)..(18): n is a, c, g, or t
  misc_feature (41)..(41): n is a, c, g, or t
  misc_feature (265)..(285): n is a, c, g, or t
gcacgaggcaacaccgcntgggccacagctaggccctcccnccggctcgctgcagagccgggcccagcgcgccctgtccccgtgccagggaaccggggttgaccgcccccgcccagcccgcgctatatattttgtacaataggactgtttactgcccacctccgcctgccagcccaccccagcctggggagaggtcgcggcggcgggtttgcttcctgcgctctgagatgagctgccctccgctccctccggggtggcgcgcccnnnnnnnnnnnnnnnnnnnnnctggatagcttcccagcaccctcagagcccccgcccggctgtgccccgtctgaccaaagttataataaaaacattttcaccccgaa

SEQ ID NO: 96022 - DNA, 380 bp, Homo Sapiens
caggcaaagagacttaagaagtttatagaccaatttgcatcgaagtttggtttgtcaagacctctcgtggcctttgtgttcctcagagcatcctctgtgctttggcttctgaggccaattgcctgttcgtttcctacctccttttgcgttcctgagagataattggattggcccaggtcctcttttttgttctaggctgtaggtcagaggtcagccggtggactacctggtttgatcatatgtcctcctttgacttactcagctggaggtaaagggccaaggggacctcatgaggaaggggtgatgtgtgcagctgctcaacaccctgaaaggcaatttggggaccaagagggagagttaataaactgacctaactagct

SEQ ID NO: 96023 - DNA, 402 bp, Homo Sapiens
agcattaacatctaacttaatgacaaggaggaaggagattcttagaggcagtagaaaatggtcaagtgttcagaagatggcctttcattatatatctttagttctttctggcagatttggttatactgtcttaatcaggttgggtaagtagcccagggtgtcttctccattctttctgtatgccttatctcagcattaccatcttcctaggcttcaggataggaactcggtcatctttgacttcttttcttcaaagtcagtaagttatcaagtcctcctgattctacctttctgtgaatggtttcctgaattcatcccctgctgcttcagtcagaccctcataatcctctgcctttagccgtctgtttggtttctactttgtctcttctcaccttctcacct

SEQ ID NO: 96024 - DNA, 994 bp, Homo Sapiens
  misc_feature (428)..(442): n is a, c, g, or t
  misc_feature (947)..(947): n is a, c, g, or t
tttattccaaattgctccctggtgtataaataaatgtgtccatgaaatccatacctccagttaaccaaacttcttccaagccaggccagccatatgccagcttagatttgaaccaccacttgatgaccacctttaagaattgtgtgataatatgtgaccctttaggagacctttaaatactctcgtaagtaatttgtcccaataatgtccaccacccaccagaagttaaggttcccttccaccaaagatccccaagcttagccagttttccccagtccacgaccgttgttaaaacgaccggcccgtgcctatggcttataaaatcgagactcacctataagggacccctcttgtgaacacagaaaaacttgggtaacgcgtaaagcttgggccccttcgaagggataactttagagcggccgccctcnnnnnnnnnnnnnnncccgtacatagtaatattttattttcttcccaatgtggtaactaaaatacatttaaacgaaggctagaatttaaaacaaaattcttttactgataagcacacttgcaaagtaatgaaaatgttacatgcattgctttgcatataaacgtccaagaagtatttgttgaccaaatgtctgaaaatgaagtatttttatctgttccgaaacgccataatattgcaaagaagcatttcaaattattgttgtgtgaaatgttcaaatttagcattcaaatttagcgttttcccacattttacccttcaatttacacaatttggaagaagagtagatgagttggtcattgttacttaaaacaatgcgtcaccttgttagggaaagaaattaacataatggtcaaggagtgataattaaacagaacatgacatttgctgtccattcaatgttaaagttctaagcaaattagcatggagaaaagggatgggtagaaataataacagagcactngttgattagtccgcctccacatccacgctgcaggcgttggacagatc

SEQ ID NO: 96025 - DNA, 635 bp, Homo Sapiens
  misc_feature (345)..(401): n is a, c, g, or t
  misc_feature (428)..(452): n is a, c, g, or t
atggggttttgagggtgctgtgcgtcacaggtagcggcccggcaccgaggccagttcccttccagtagtgggcagctcagtgaggctggatagaaagtctgggcaggcagtgggtatgcaattgaagcaagaagagaaaggagatgttcagagaaccaaaggcgcccttgtgaaggttccatctgtctcacaggaggttctgaccgacagctgtgggctccagattgtaccgcactcccatctcagctctgggccagcctggctccactcagctcatccaggctaccttcccttgctcaaaacccacctcgtggatgtgggaaggtcctcttcttcgagagagtnnnnnnnnnnnnnnnnnnnnnnnnnnnnnnnnnnnnnnnnnnnnnnnnnnnnnnnnncaatgcttccctcaaggaataaagttnnnnnnnnnnnnnnnnnnnnnnnnnggtgagtgggctccggggagtgtttatgtctacatttctaaaagcagaaagaatgcatttagcaaaaggaagtttatccctgagaatcttaagcaacgtaagccgtattttatgccaaatatataacaaaatctggaagatatacatcttcttctaaatattaacacaactgcttctgtaact

SEQ ID NO: 96026 - DNA, 353 bp, Homo Sapiens
agtcgactgttggaagtaatgtaggttttgatagtgaagtgtgtggagaggaagaaggaagcacacctataggatgtggagaagggatttcccctagagaaatttttaaaggttgagcatgtatgttttgaaacttcccaaagatccattgaaaagtaaaccttccatccctaataccctgtatctcggtgatccccagtagtcactactgttaatactctcttaggttttcttccaaatcttattaatacctttgcatattatgtttttatttatggtagagattttcatccattcaacagaagcttatggactgcctttttagtttattttaaaagaatttttctagcttt

SEQ ID NO: 96027 - DNA, 351 bp, Homo Sapiens
ccgggcacccagccttttagctttcatccagcacgagggaacttgccttcagatgtgacacgtacaagtcaaaaaagctcagagtcagctccaacgtctattggatcccactctatcgcctttaaaaaggaaaagaaaatcgaattcacagaaccgaggctaaatacgaccgttaagaacggactgcattcaccatatttccatgagagtggcaaagagaacaaagataaatgccaggctacatcttggatcctttgccagcttgtggaagaacttagcagaaaaagatgtgaactctactgtttaggaataaaataacttttaaaaataaattattgaaaagtgaaaaaa

SEQ ID NO: 96028 - DNA, 868 bp, Homo Sapiens
atccttcaaaacccatttggtgccagatgagcatgccatccaatgagggacattccaatcatgccccagccttccccctgttttcaagaaaaggccgatgttcccaaagatgtgggttcagtttaagcaatatagatgtgacaggattggacccagtccatgatgctgagccagcacggaaggaaatcgttatggccatgatgatgacggctgtgatctttcagccatcacaaacccctgggaggtgcagagccaagtagctctgctggtggctgctgaattctggggacaaaggtgacctgaagcgcacggtgctgcacagaatcccatttcccatgatggacagaaacaaggcagatgacgtccctaagcttcaagtggcttcattgactttgttgcaccttcgtctacaaggaattctcccgtttccagcaggagatcaccccaatttggacgggatcaccaacaatcgcaaggagtggaaggcgcttgctgatgagtacgatgccaagatgaaggtgcaggaggagaagaagcagaaacagcagtcggccaagtcagcagccgcaggaaatcagccggggggaaaccccagcccagggggtgcaactacatccaagtcctgctgcatccagtaacaccactggggatgtgctggctggacggcaccaccctttcctgggaagagatgactcaagccagtggaagaccacacaccttgagaagtagaagagtcataggatttgaaagctgttagagaatttagcttccaggactgttcaatcttttggcttccctgggccacattggaagaattgtcttgggtcacacataaaatacagtaacactaatgatagctgttgaactt

SEQ ID NO: 96029 - DNA, 448 bp, Homo Sapiens
atgctaaacatatagattcttaagtttattaataacagcagtttaggttaaacaaacattcctggataatgcgttaaatttctgtatctgtcgccctgagctgattttgaaagatggtataagctaggggttagtatagttgtttaagttagaaaaaacatgctgttgtctgcccctcattcccttcatgaccttgggcaagtcacgtaatgtttttgtgcctcaacaattcactttttaaaaacatgatcgtatgatgaatgatattattttgttatttatatttactgtgattgataactgttgaaccaaaataataaaataattaatttaaacaatgtcaaaatcctttagcagttatgtatatattttctccattgtgtgtttaaattgtcatgtccagttgccaagcacaatgaaaaagatgtattattttttaaattgaata

SEQ ID NO: 96030 - DNA, 1076 bp, Homo Sapiens
taggctaggtacgagggctgggtgtgtgaatctggcacgaggccctgcactgctcctgatccctgctgccctcgcctctttcatcctggcctttggcaccggagtggagttcgtgcgctttacctcccttcgcgtccacttcttggagggatcccggagtctggtggtccgggtatactacgcatgtgctggggctgggcgagcctctggccctgaagtctccccgggctctcagactcttctcccacctgcgccacccagtgtgtgtggagctgctgacagtgctgtgggtggtgcctaccctgggcacggaccgtctcctccttgctttcctccttagccctctacctgggcctggtctcacagggcttgatcagcaagacctccgctacctccgggcccagctacaaagaaaactccacctgctctctcggccccaggatggggaggcacgagtgatggagctcactctggttaccaagccctgttcttcctctcccactgaagttctaaatccttagacatccaggcccttggctgcgttcatgccatgaggcccaaatccatggactgataggagatgccccttctactacttgagactttattctctgggtccagctccataccctaaattctgagtttcagccactgaactccaaggtccacttctcaacagcaaggaagagtggggtatggaagtcatctgtcccttcactgtttagagcatgacactctccccctcaacagcctcctgagaaggaaaggatctgccctgaccactcccctggcactgttacttgcctctgcgcctcaggggtccccttctgcaccgctggcttccactccaagaaggtggaccagggtctgcaagttcaacggtcatagctgtccctccaggccccaaccttgcctcaccactcccggccctagtctctgcacctccttaggccctgcctctgggctcagaccccaacctagtcaaggggattctcctgctcttaactcgatgacttggggctccctgctctcccgaggaagatgctctgcaggaaaataaaagtcagcctttttct

SEQ ID NO: 96031 - DNA, 1109 bp, Homo Sapiens
cctgggtggcgaattcggcacgagggctgccctcgcctctttcatcctggcctttggcaccggagtggagttcgtgcgctttacctcccttcggccacttcttggagggatcccggagtctggtggtccggatgcccgccagggatggctggctgccctgcaggaccgcagcatccttgcccccctggcatgggatctggggctcctgcttctatttgttgggcagcacagcctcatggcagctgaaagagtgaaggcatggacatcccggtactttggggtccttcagaggtcactgtatgtggcctgcactgccctggccttgcagctggtgatgcggtactgggagcccatacccaaaggccctgtgttgtgggaggctcgggctgagccatgggccacctgggtgccgctcctctgctttgtgctccatgtcatctcctggctcctcatctttagcatccttctcgtctttgactatgctgagctcatgggcctcaaacaggtatactaccatgtgctggggctgggcgagcctctggccctgaagtctccccgggctctcagactcttctcccacctgcgccacccagtgtgtgtggagctgctgacagtgctgtgggtggtgcctaccctgggcacggaccgtctcctccttgctttcctccttaccctctacctgggcctggctcacgggcttgatcagcaagacctccgctacctccgggcccagctacaaagaaaactccacctgctctctcggccccaggatggggaggcagagtgaggagctccactctggttacaagcccctgttcttcctctcccactgaaatctaaatccttaacatccaggcccctggcttgcttcatgccagaagccccaaatccatggactgaaaggaaatgccccttctactacttgaaaactttattcctctggggtccagctcccttaccctaaatttctgaggtttcaggccactggaacttccagggtccaacttcttccccattcaaggaaaaaatggggggaatgggaaagccttctggtcccctttccctggttagaagaaatgaaaattcttcccccttaaaaagcctccttg

SEQ ID NO: 96032 - DNA, 751 bp, Homo Sapiens
ggcatatatggtaaacaattcaccacactggacagagataaagatatgtatgcagtatactgcgcccactttcataaaggaggctggtggtacaatgcctgtgcacattctaacctaaatggagtatggtacagaggatgccattacagaagcaagcaccaagatggaattttctgggccgaatacagaggcgggtcatactccttaagagcagttcagatgatgatcaagcctattgactgaagagagacactcgccaattctaaatgacacagaactttgtacttttcagctcttaaaaatgtaaatgttacatgtatattacttggcacaatttatttctacacataaagtttttaaaatgaattttaccgtaacgtataaaagggaacctataaatgtagtttcatctgtcgtcaattactgcagaaaattatgtgtatccacaacctagttattttaaaaattatgttgactaaatacaaagtttgttttctaaaatgtaaatatttgccacaatgtaaagcaaatcttagctatattttaaatcataaataacatgttcaagatacttaacaatttatttaaaatctaagattgctctaacgtctagtgaaaaaaatatttttaaaatttcagccaaataatgcattttatttataaaaatacagacagaaaattagggagaaacctctagttttgccaatagaaaatgcttcttccattgaataaaagttatttcaaattgaaa

SEQ ID NO: 96033 - DNA, 560 bp, Homo Sapiens
  misc_feature (65)..(128): n is a, c, g, or t
  misc_feature (511)..(512): n is a, c, g, or t
ccgaacgcgcgcgcccggcgtgtagcggccccaagacccgcgccgccgctgccgcgtgcgggggnnnnnnnnnnnnnnnnnnnnnnnnnnnnnnnnnnnnnnnnnnnnnnnnnnnnnnnnnnnnnnnnggctcggcttggccgccgccgccttctacggctccgccgcgggggtcgcagcggctgccgcgccgtcctcgagtttccagcgtgaggaggaggctgagggcggagaggcgcatcgtgttcgaggcggagaccgagggggagccccgcgcgcggcgtcgctcattgctatggacagtgctatcaccctgggggcagttccttcttcagctcctgcagaagcctcagaacaagcacatgatctgttggacctctaatgatgggcacgttaagctcttgcaggcagaagaggtggctcgtctctgggggattcgcaagacaagcctaacatgaattatgacaaactcagccgagccctcagatactattatgtaaagatatcatcnnaacagtgaatggtcagacttgtgtaccagttgctcttatcagagattt

SEQ ID NO: 96034 - DNA, 360 bp, Homo Sapiens
catatagaggtgccagcccttcactcaatgcctaatcaaaacagttccgatgacagagcctctcctcataggctttacatttgcaaaatgatttgctaagaccaagtagagttgatgcacgtgcccatgacctagcaattccactcccaggtattcaccgaagacgctctcccaactgtgcaccaggaagcacctgccaggatgttccaagcattatttgcacggaaaaacctgaaaacaatccaaatacacaccaaaaggaaagtgggcaaatcgtggtaatgccacataatagtgaaaaatgcatgaaccacagtccacatcatcatggatgaatttcagaaatgtaatactgagtcc

SEQ ID NO: 96035 - DNA, 596 bp, Homo Sapiens
  misc_feature (33)..(33): n is a, c, g, or t
  misc_feature (107)..(165): n is a, c, g, or t
taaatggtagtttaatactacatggatcatatntatggaatatatcttatttgtcacaacagggcagtaaagagggcgttgctaccttgacatttacaaatgccatnnnnnnnnnnnnnnnnnnnnnnnnnnnnnnnnnnnnnnnnnnnnnnnnnnnnnnnnnnnttggagcttcaatggcaagcctgcctactttccatcatgtgtgctatcacccgagctcgagggaccaactttaaggggttccaatgggctagggacagaaaatggggatgtttgaggggccgtactaatctcggaggcaccatgatgtccctgggtctgtctccccatgataagaattagctgtgtgaccttccctgagctggactttggtatcttttcaggtaaaaaaagaagaagctgcatttgacacccctcttagcttccttctatttccaaaattctgtacactacaaatttgctgatagtatgcaaattggcatagactaatttatgcaaattcaccttggtccctagcaagattcaacccaattgaatattgttaacaacagatactttcaaaaggcaaaaaggccaggcgcagtggctcatac

SEQ ID NO: 96036 - DNA, 499 bp, Homo Sapiens
gaattggagccttctaattgccatcttaccttttctatcacattctcctggtctcaagaaagctggtggagtgggggttgtggggctcaagagccactagggcagtataaaaaaatccacaattgcctactaagtgtgtagcacagagccccgtgatgttttctcagaagaaatcaatgcccaacattcacatccaggttgactgggcatacactgatcctgactaagaccatttctgcccatatctgactgtcagccttctccaaaagaggcggtgcttccacaaaagccttgatgagataggtgtatcacttctcttctcccattgttgggccctcagatttacagtactgtacttgacttcttagtcttcaagaacctcaatagaacaactggaaatggaaaggtgggcaaggggtattcactctccctacctggctacatacagctaccccaaacacaagtggggctgtttgcttgatgccttggcagggaacag

SEQ ID NO: 96037 - DNA, 1227 bp, Homo Sapiens
agctcactgaaggaggtggtcgccggggccccccggcccggcttgctcagcctggccaagcccttggatgcccctgctgtcaacaaagccatcaagtcgcctcccggcttctcggccaagggcctgggccacccgcccagctctccactcctcaaaaagacaccactggccctggcgggctcccctacccctaagaatcctgaggacaagagcccccagctgtccctgagcccccggccggcctccccaaaggcacagtggcctcagtctgaggatgaggggcccttgaacctctcctcaggcccagagccagcacgagacatccgctgcgagttctgtggtgagttcttcgagaaccgcaagggcctctcgagccacgcgcgctcccatctgcggcaaatgggcgtgaccgagtggtacgtcaatggctcgcccatcgacacgctgcgggagatcctgaagagacggacccagtctcggcctggtggacctcccaacccaccagggccaagcccaaaagccctggccaagatgatgggcggcgcaggtcctggcagctcactggaagcccgcagcccctcggaccttcacatctcacccttggccaagaagttgccaccaccaccgggcagccccctgggccactcaccaactgcctctcctcctcctacggcccgaaagatgttcccaggcctggctgcaccctccttgcccaagaagctgaagcctgaacaaatacgggtggagatcaagcgggagatgctgccgggggcccctcatggggaactgcacccatctgagggtccctggggggcaccacggaaagaaatggacacccctgaacctgtcgtcccgggcagagccggtgcgcgacatccgctgtgagttctgcggcgagttcttcgagaaccgcaagggcctgtcgagtcacgcgcgctcacacctgcggcagatgggtgtgaccgagtggtccgtcaatggttcgcccatcgacacactgcgagagatcctcaagaaaagtccaagccgtgcctcatcagaatgagcaccggctggagactgaccctgcctgtctgagtaggtctcccatcgtgcccctggccgtgcatcccactgctcttcaccctggtgccttatctaactgtgatgccatcaaattctagatttgttatctatatgactatctaacttgataataatgtttataggcttaaaatttatatattg

SEQ ID NO: 96038 - DNA, 389 bp, Homo Sapiens
cattatgaatggatttactagaagaacattgctgctccttatttattgtagtgtgctgcatggaacgtatttatttgaaagcattaaaataaatgatcctagagcatgtgcataatgagaggactgtattctctctgctgctgttgaggttatattaagttccacatagcaattacagtatgccagttccactgaagacatgaaatctttagaggtttcttgcagtgaacgaaatgaattttaatgcctattatttatgggtactttaacaatatttcaaatatcattgaccactaatacttctcactgaagctaacacagtctgacaaaagtctatggttcctaaatatgacatcagaagttgccaataaaatgtttcaaccccaaaa

SEQ ID NO: 96039 - DNA, 579 bp, Homo Sapiens
  misc_feature (562)..(562): n is a, c, g, or t
ttttgttgatcatctggcaacatggcaaaccggatgggttcattataaaacaggaagtgcagcattacaacatggggggaaagggcaaggacagggaaggggtcactagtgaagagcccatgttaagttgattttaaaaaagaaagcaagcaagcttcacacgatcttcttaatgctattacgtttgaaactgccagcgcttctttgcttctgcacttggcttgcggatccgtggcgagttcgtccactgttacagtggccagtggtaggggagagttcaacgttctccttgtcgattcctggggaatgctgggaagttgcaagtgaggtcatggaattagaaaggttaaggttggcagtgatactaagctggctctgcagtgcaggagggtaaggagatgtgggagtcaggagggattcttcactggtttcttcatcaattccaggcaggtacgtgtcaatcaaggcatcaagaaacttaacaaataagctcagcatagtctgggatctgtgtttgctttgaaaacggtccttgcaaccggcacaaggcattaaaaccaanactttgcagggtagatg

SEQ ID NO: 96040 - DNA, 439 bp, Homo Sapiens
gccctcaagattcccgtctttggcacccctatccatttttgtgggtgggatctgtgactataatgggatcactgctcccttgattaggtgctgttatatgagactccatctgagcagactgtctagtaattcacagctggccccaaagaagcaaatggccttgttatgaactacttacctcaggtcctagccgcatggcccccttcaaaggctaagagtgactctcaccaaccagcaaagacaaaataggatgtcatttctacagctacaaggaactggtttctgcccacaaccccaagctccagaaggaattcagcccagcaaacacccggatttcagtctgtaagactctgagcagagaccccagccacactatgcctggattcctgactccttgtaactgtgagataataaaaggctaatgttttatgtcaataaa

SEQ ID NO: 96041 - DNA, 437 bp, Homo Sapiens
atttatcagatgctctgctttcagcagcctgaaactttcagcaggaacacgatagccgaaatcccatgccacttcttctattgaggcttccgtttaaatcagtccaccttttttttagcatctccttcatgccaggcactgtgtggagagatggtgctacagaggtaaactaatccagctacagtccttgccttcatgggctttcagcaaagtaatctactcctcacacttaattctcctgagaaggcttcctggatacacttgagaatgaactccactttggttatacagacacatggaactccatcactgctgttgctgagaaaatatcaatggctacattattttcaactgctgcctatgagttatatcagagattaattgatcagctaaatgagaaaatgcagagaatacacaaggaataaatcgatgaagga

SEQ ID NO: 96042 - DNA, 1333 bp, Homo Sapiens
  misc_feature (1275)..(1275): n is a, c, g, or t
  misc_feature (1310)..(1310): n is a, c, g, or t
tgagatttttcatcagccagtttcaaggtagctgaccaaggagataactgaatgcaaatcacaaaagagataatctggattaccgactcctgaaccaattgcagtaggttttaaatcatgggttttgactttgccaacattggttgtgcaccttctgtactaggccctatagttcttctatctacatggaaatcctgcagtgtgccctacaggaaggaatttacacaggagcatctttttgttctgttagacagacatacactctctaagtagagttaagacatcatcacttcatcacataacaaaataagattgtctgcttgtaatttatcactacaggggaagctgccttataaatctaagtactttatctcacctattacaaaaacaaggaaatctttttcagttaaattttcagagcccaaactttgtttttacactatagcttaagacaaacaggtgtgggtatgttcaactgtggtttaaggttctcagtgcagacactcactgtcctctgctctgcacgggccatggacagctgggcggcacaaggtcgctagctggctccaggcctgtgggcatcacaacgttattgctttggttctgtctcagacaccagagagtgtgtctcagagcctagggtttccacatcacagaaggtcaggacaggaattcagatttttcacaaagaaaaagcattttttctctctctaggttaagtgcagaacaacaaatttctaagtgctccatttataagaggttccagatatatatcttgatttaatcctgatcatccacattaaaattatgaatgtaaaaattacataataggcttttcggctgggaaagaaaagtgtctagcagcatgcacaaagaccatgcattgtcacatcatcaggcgaacaaatggaaaggtaataaataattgctcctaacgcccactttaaaatagtaaaaccaaatggaacagtgaagtgagccggtcttcactgctctgagcaggaagcgtgctagcggccagatggggccacagtcagatgacatggcaacagctggctgggctggatgcgcacagcagcccctccttagggttccgctggatgttcacagagatggtcttttcgcacagaggtagctgcagcacgttatttttcaggttcttgctctttatccgttccaattcagtggtggtatctgcccatgtgtcagagaaaaactttatgccgcccactgcagggacctgccctgcattccctgtggagctaatgcacattntccacgtagatttctcttggactttcacactgganaatgacaagccattctgtgattc

SEQ ID NO: 96043 - DNA, 505 bp, Homo Sapiens
tttttgttaatagattgcatacagagataagtgatttattgaagaatcatacactagaataggaagttactcctttggtggagttacaacatttagccgaacatcttcagggaacatcggaacaggaaagaaaccacggggttatgcaaattaagtgagccttgcaattacaattgcaggagtcctgcccctaactttaaaagacttttataactcttttgataaagacacttacggttatcacaaacagaaagtaatttggaaaaagtatttaaacagcagtatggaccatgtgacatagcacaaaagggagaccctcaacctcccacctctggtgataattgtccatgttgatagagctccaaggaatctccatgtaagcaactttcaataattcctttaaatcaacaaggagaaactaacttaaaataaatagagaaacgtgtaccgtgttggcagttactagagtaattctttattcttaatcccactatgatacatcaag

SEQ ID NO: 96044 - DNA, 502 bp, Homo Sapiens
ctgcagaaacgtggcatctcatcggaagaggaggaaggagaggtagacagtgaagtagagctgacatcaagccagaggtggcctcagagcctgaacatgcgccagtcactatctaccttcagctcagagaatccatcagatggggaggaaggcacagctagtgaaccttcccccagtggcacacctgaagttggcagcaccaacactgatgagcggccagatgagcggtctgatgacatgtgctcccagggctcagaaatcccactggacccacctccttcagaggtcatccctggccctgaacccagctccctgcccattccacaccaggaacttctcagagagcggggccctcccaattctgaggactcagactgtgacagcactgaattggacaactccaacagcgttgatgccttgcggcccccagcttccctccctccatgaaagccactcgtattccttgtacatagagaaatatttatataaattatatatatat

SEQ ID NO: 96045 - DNA, 463 bp, Homo Sapiens
ttcactataactgatttaataacggaaacattccaagaattaccaaaatgtgagagagacatgaagtgagcacatactgttagaaagatggtgctgacagacttgctccatgcagggctgccacaaacctccactttgtaagaaacatatgatacctttcgcagggaacagctgattctgtttttccttcccagccaatggtgatcaaaagcttcaggacgctggtgagtcactgcggaggagccgaacactgaccgcgccgtccccgccaggctcccgcgcggccggcaccacggccctgagcgcaggcggccccgggtctcaggcctcaggcggaccgcgccccgggctcgcagccctcccgccccggctgccgggctacggggcagatggactcggagcgccccgccggtgagtagctacgacacccgaggccacctcccgcgaaccgctcggcggccgc

SEQ ID NO: 96046 - DNA, 512 bp, Homo Sapiens
taaatgtcagtttgataggtgagctctttccatttttatagatttttagtacaattcttgggccctgattgcccattgattcttttttagctatggatcttgggatccttcaaatgtcttggttagctcaaaatatttttctatctatgatgcttatcctcctgcttgcagctccatcctttatgcaaaattgctctggctccttgaaattggtttgtttttgctgttgttggtagttatttgtcttatggttctgtcttatgcatgcattagatttttctgtcacttgctcctcttttattcagaaagtggcctgcttataggaaggtcgccagagaacatagataggcttctactctattctttcactactctattaacatgccagtattcaatgctcaccatcttgcgcacaacattctaggaaagtacagggtctgcccccacactcattcagtttattgttcaaggccctctgaataggaaaaatacaatatgattattttggtcaa

SEQ ID NO: 96047 - DNA, 454 bp, Homo Sapiens
  misc_feature (233)..(301): n is a, c, g, or t
  misc_feature (387)..(387): n is a, c, g, or t
gctgtcttaaaaaagtgaactcaggggttgcaaatgaccacacatctgagctttagtccccattcatcaggggcataacctgtggagaaaaatcagggaattatgcagtatatgggttagacaggaaaacattctaggaagaacgagattctatgtataatcttaagggcaataaagcatcatggaaggttttaagcagtatataatcagatctacactttagaaaccccccnnnnnnnnnnnnnnnnnnnnnnnnnnnnnnnnnnnnnnnnnnnnnnnnnnnnnnnnnnnnnnnnnnnnntaacaaaaaaatccctttgggagcttgaggaggataaactggagggcatcaactgggggaggttgtagtgtaggagtttgggtgangggggcccgagcccatctgtttggacttgagggaaagtggcttggggttagagtcgggggaggatca

SEQ ID NO: 96048 - DNA, 383 bp, Homo Sapiens
tcagagaagccccagagtagaaagaagacaaaataagccccagttcttcgattctgggctgaagtgagattttcttgaatggcagccattgttttgcctcttaggtaagtgagtgcagtaaagaccggtaaggcccacgcagaagaaacactgaggaaagaagacacttccaaagtaacaaatgggaggaagcagccaacgcccgaggacaacatggcaagaaggagcctttggattccggactgggatggaaagagaggtagattcagctaccatatgccattactgtagttagtacagttgtctctatatccgtgggattggttcccagactctggattttctaagatgttcaagtctcttacataaaaatggtgtatttc

SEQ ID NO: 96049 - DNA, 563 bp, Homo Sapiens
  misc_feature (74)..(120): n is a, c, g, or t
gaggaagcagccaacgcccgaggacaacatggcaagaaggagcctttggattccggactgggatggaaagagannnnnnnnnnnnnnnnnnnnnnnnnnnnnnnnnnnnnnnnnnnnnnnggtacaaccggagctgtcaggtggatttccaaggctttgcattggctgtacctgaaacttatggtggcctagactccccagtatccactcttccttatcttggtaaacaagcccagttctgagtcacatccctgctctgcctacttacaggggcatgtggtcccaatctaagcaacgtagcataattccaacctaaatcagcagaatcccattccctgccacagttattggctggcaatgagcgtaacatatttgggccaatgagaggagcaatttcctggtctttgttgggaaaagtttttctttcattttctgagagcgcttcagaggtaacccattctttctgcatgtcctcaaaaaaacgggtcccctggatggtgggtagccatcttccaaatacaagtctagccgggttaaaataaagaagacatcaagaaaacaaa

SEQ ID NO: 96050 - DNA, 530 bp, Homo Sapiens
  misc_feature (48)..(93): n is a, c, g, or t
acatggcaagaaggagcctttggattccggactgggatggaaagagannnnnnnnnnnnnnnnnnnnnnnnnnnnnnnnnnnnnnnnnnnnnnggtacaaccggagctgtcaggtggatttccaaggctttgcattggctgtacctgaaacttatggtggcctagactccccagtatccactcttccttatcttggtaaacaagcccagttctgagtcacatccctgctctgcctacttacaggggcatgtggtcccaatctaagcaacgtagcataattccaacctaaatcagcagaatcccattccctgccacagttattggctggcaatgagcgtaacatatttgggccaatgagaggagcaatttcctggtctttgttgggaaaagtttttctttcattttctgagagcgcttcagaggtaacccattctttctgcatgtcctcaaaaaaacgggtcccctggatggtgggtagccatcttccaaatacaagtctagccgggttaaaataaagaagacatcaagaa

SEQ ID NO: 96051 - DNA, 408 bp, Homo Sapiens
ttttggggtttcggcccttttattttgattctctgattccaaaaaggaacccactgggctgcaggagcatggcgaccacctctgtctctttacagcagccccttactcgtgggtggtgctgtgaaggtcctctttccagccactccatcttcaattttgtcactgcccattctctcactcctccttctgggtgtctgacaacatgttcattagatgtttaaaatatgttttctaagtcttttttctattccgctgcacatcctatctttttgtctcttggaaatgaggtaggagactggcaggacttgtcttctggtcacagtcctgctgaccaaaagatggtccacacaggatgaagtgaagaaaccggtggaaaccagcagatggcgacaaaagcaatccctagcc

SEQ ID NO: 96052 - DNA, 493 bp, Homo Sapiens
  misc_feature (302)..(302): n is a, c, g, or t
  misc_feature (366)..(421): n is a, c, g, or t
caatcagcagtatgaccctttaaggatgagtttagatctacaccacattgaggagctcaaggcatagcttgtcaaacttttcaggagtaagcttatttagtatgcctcttactttcctgaagattgcatcatgtcgttctttttcgtttgcggagttgtttgctgcggagttgtcatctccttctgcaatcgcactctccacttggcggcttgacaacgaagaatcttcaaaagaataatattaatagatggggtggggaggggaggggacaggagaaatgaaataccttcaccgagaactncagcagctgccaccgcagctgcctcctcaggatccggtcgtcggggatagggaagggaggggannnnnnnnnnnnnnnnnnnnnnnnnnnnnnnnnnnnnnnnnnnnnnnnnnnnnnnncggcctcaaactcagctcagaggagtcgctgctgcagccgccactcggtacccgctgccacctccatagagc

SEQ ID NO: 96053 - DNA, 950 bp, Homo Sapiens
  misc_feature (156)..(217): n is a, c, g, or t
  misc_feature (898)..(898): n is a, c, g, or t
  misc_feature (907)..(907): n is a, c, g, or t
cagtcgacggtaccggacatatgcccgggaattcggccattacggccgggggccagcagtgagtcggagctctatggaggtggcagcgggtaccgagtggcggctgcagcagcgactcctctgagctgagtttgaggccgtccccgactccttccnnnnnnnnnnnnnnnnnnnnnnnnnnnnnnnnnnnnnnnnnnnnnnnnnnnnnnnnnnnnnngacgaccggatcctgaggaggcagctgcggtggcagctgctgagttctcggtgaaggtatttcatttctcctgtcccctcccctccccaccccatctattaatattattcttttgaagattcttcgttgtcaagccgccaaagtggagagtgcgattgcagaagggggtgcttctcgtttcagtgcttcttcgggcggaggaggaagtaggggtgcacctcagcactatcccaagactgctggcaacagcgagttcctggggaaaaccccagggcaaaacggtcagaaatggattcctgcacgaagcactagacgagatgacaactccccagcaaacaactcccccaacgaaaaagaacgaccatgactgcatcttcacgaaagtaagacgcatcccaaataaccttacctccttgaaagttttgaccagctatgccctttgagctcctcaatgtggggggcagaagtctaaccttcgtccccttaaaggggggccactacggctgaattggcggaacccaaccccttcccaaaaactcacagttaccatctccctggtatgcctcatctcatgcttgcgcaattggtgatcaagaacgtaccccaaacctttgaatggcccccaccaccccgtaaggggtcatccccttgtatccgaatcctaagctccccccgtttctngcaacgccntctcctaatttttcaactttacgcagatgctaaatcttcgcat

SEQ ID NO: 96054 - DNA, 323 bp, Homo Sapiens
caaactgttcatcaggaagaaaccaggttatccagaatagtgttgtcttttaaaacaatgccaaaatttgaaatgattaaactttgtacaagtttaaaactctgttcctaccttgtaaccacaatggatttccagctcttactgtcaccttcaagctgtggacctctgctttctgcaaactgcaatctcttaccagtctcttctagttgaactgtcatcttctcatttaatatctctaaattattctttgctatccgtaatttctctgcagcatcagtttcctatcattaaatgctaattagtattttatgagaaaacataaa

SEQ ID NO: 96055 - DNA, 397 bp, Homo Sapiens
cgccaagtacaagaacatgacctgcttcctgcatctgttgatgtgtttctttcctttcccattcctatgctgcctcccttgcatacatggccactttaagatttgttattccattgcttattctgtaggaagattcaggtttttttcataaatataggctattcagatgttctgtttttgtttgtccgttttggtaatttgagtaatgtaaaatatttgcctactttatctttgtcttcccattactttttaagattgtttcatctcataatggtaaattttgtattttatcacaataaaaagtcagaaaaatatatttaacatatctacatatctttttataatgccatttaaaactgataaacctcaaaaaaataaaaggttgttacattgtaaa

SEQ ID NO: 96056 - DNA, 717 bp, Homo Sapiens
  misc_feature (194)..(244): n is a, c, g, or t
  misc_feature (365)..(454): n is a, c, g, or t
actgtatgagcatggcagtgccactcaagaaaatgtatctccaaagtatcttcaaagaatatatattaatggcagatatgcgagttctgggtgcactctctgagatactttctataaccaaccaactgataaaaagtagatgagagatctccaagctgcttcacaagcacactaaccgagaaactgtaaatatnnnnnnnnnnnnnnnnnnnnnnnnnnnnnnnnnnnnnnnnnnnnnnnnnnnaaggaagatcatcaatggctgcggtagcctagtaggaatggactatataataatatagcaggtgctcaataactgtttgttgcatttcagtaaaagcagaataacctttcaaaataataannnnnnnnnnnnnnnnnnnnnnnnnnnnnnnnnnnnnnnnnnnnnnnnnnnnnnnnnnnnnnnnnnnnnnnnnnnnnnnnnnnnnnnnnnatgcatgtcaagcacattggaaagttcttacaacaattctgatggaggattttctctcccatcaaccaaacaccacttaagattaacctgtggctcagtctacttaaataaatgccatatttattttacttatcatttagaatttgccattctcaggaacaaaactttttgtacattggaaatggaaaacattgcagtttggtcttaatttccacatgaatatcaagtgtaatttttaataaattatttggagaaaaatgtaa

SEQ ID NO: 96057 - DNA, 573 bp, Homo Sapiens
gcggccgcagcccacccccactgctgttcgaatcaagcaggaacccctggactaggccctgcttcagtgcccacctgggcccccccagggacctggaaacagtgctggggagttctgcctgtgtatacttggccgtgggcatgagaccgagggtgaggctggagggtccaaagctggcccagcgagcaccagggtcccaggtgtcatggcaacagaacgtgggatgctggaggcatgcctgcagaaggactgttgatgcgacccaaagatacagcggtgggatctctgctgccagctctcccagcccctcagcttcgcagcctggcgcagcatcctctgaggccccggggcctgttggggcggggttggaagagccgtctgcagctacttcagaggagctgtttatccctctccacgcggggcagactctggcgggtctcctagcgtccgagagatggcttatttttctacagtatttaaaatggatgcagccctaactgcaaaagtcagagaggctgacaaggaccaatgcttctttatctggtgctcagttctcagtcagacgtgcagcat

SEQ ID NO: 96058 - DNA, 952 bp, Homo Sapiens
  misc_feature (29)..(29): n is a, c, g, or t
  misc_feature (828)..(885): n is a, c, g, or t
aggcgtgcccacactgggggtggcgctgnacttgagcacatgcagaccagtgaaggcgtacatctctggcaggctcttcttcaccttggcatacatatagttggtccgcagtgggaatgtgagctggaacttgtctccagggcggttgtctttctgacctttctcgagctcgctgatccgctggtgcagggaggtcagggcggtctcgatcttgaccctctcctcggtgtcgttcctggggccccccttgccctcctccagggtgttcacccgggacagcacctgcctctccagctcatcgatcctgctctgcagcagatccttgaggctgttggtctggctggaggaattgaggcggctgtactgctcgaggttctccaggcgggttttgagcgattgcaaagtttgcccgagttggctgagcgtctcggcggccggtgtccgggacaggtcgcccatggtgttcttgcccgagccgggctgcttgcggccgccgcccgcccgggcctcgccggctccggggtccagcgtgctctggctctcgcagcggcccagcttggcggtcagctcgcggatggtctccttctggctcaggatggtctccttctgctgcagcaccgtctcgcggagctgcagcacgctgctccggagctcctcggcgccgccggcggccacggacgcggcgcacatgtcggcgtccacgggcaccgaggtgcagatgaagcgcgtcggcccgaaatcctgggccccggcgcccaggaggcagagggcgagcagcgcacaggtgcgcgcggcgcggccggccggcatggctgcgggcaccgggcnnnnnnnnnnnnnnnnnnnnnnnnnnnnnnnnnnnnnnnnnnnnnnnnnnnnnnnnnntgtggctccgcgagcggcccgcgctctgggcgccgcgctcttcggccgcacggtccacaccgccgcg

SEQ ID NO: 96059 - DNA, 1151 bp, Homo Sapiens
cagaattacagttctcatttcactacttaccagttgtatactcttgggaaagtcactcctagtatctatttcaccatctacagaagagaaatacttcacagaattattgtggggattaagttagataatgtgttttaaaatataaagctacatccaaagaaatgccaatatgtgacattagtatgaaatttactacagttccatttaacattccaactggttgctgtgtggaatatggcataattgtaataaattatttaggaaagcaagcaaagatgtaagtttttttaatttagggggaaaaaatgggagccttgctctccaaatccttaaaacatcctattaagcaacctttctgaatattctgtggtgccaagtagaaagtttaactgaaattaataagccaatggaaagaaagaaatattaataactgctggtggaaagactagctagatgtcagtgtggaaagattagatccactttacatgtgatattccaaatgaattaaaatgttaagtataaaaagaaaaatactacaagtctcacaccaatagtggtataaaggaacttcatggcaattggcaaggtagatcaactaagagaaaaagttttaaatgtgtagtaaataggaaaaagacaaaacaagatggaatttaaaagaagctatttgcattacacatggatgcactcagtttttgtaaaactatatgcatatcccataagggtttgtactcttaggcaaatttataaagcgaatccggggataaatgatataaaaaatcatttttgaatggtattccaatttcctaatatttaaaaaatggcaactttgacttaattcatgcctattggatttaaccaaaacctgtttttaaatttgcatggtggtcccttataaccagccggcatttgggggaatttagtaagcccttttttaagaaaaaactggggttagaaagaactataaaaaaaggggcttttaataaactggaaccttttgggacattacttcaacttttgaggtggggaattatggcgcccgggaaaaaatatttttcacaaagaaaaggaaaaggcctattttttgtaacaaaaggtttcattctaagaaggtttccaacttccaagaatttacctctttaagggggggg

SEQ ID NO: 96060 - DNA, 371 bp, Homo Sapiens
tttgctgctaatcttgttttattgtggtctttcatccatcagcaagcatccctgcacgcaagatcagagttgggtaaatacatccagaccctgccaggattagggcaagagggagtgctctgggccggcagatctttttcggaaattctcacttcttggagcactaaagggttgttagtctatctgggcaagcctcgtttccctggagaaaatggagtctcagagattagtgactggtcctagagctaatgagtgaccaaagtgtgaccagagcccaggtctgcttctcaacccagggcactttgattccagattgagatgtaaggtgacaggtgccttaatagtggcgcaaaagatgtgcattcccctct

SEQ ID NO: 96061 - DNA, 500 bp, Homo Sapiens
ctccaaggacctctactgagcttcagctagctcaccgaaaacggcgcggccccctctacccgggatgtcggagcccaggagaccctgagagcccccagctctttccgtaattgcaggagaaggggcaagcgggtccgtagccgggggccctccagtggcattatcctgaaccgccacgcccgcacgtggcccggctagagctccctggcgaaggatcacctgttcctacagtgacaactggacctggcccgaacccctggcatctggcaacattattacctgtcgaaacagaagtagagatttgaaatagaggatgccagttcccatttcctcctgctgtctggaaggaagtctggctttccagcccaactctaagctcatctttacatacaaaataagggtatgtttacatggaaagcaaaaatagaaccatggatttacagaaggttccatagcagcaaataacagtgcttatgaaataaacattttaaatattaaaa

SEQ ID NO: 96062 - DNA, 434 bp, Homo Sapiens
  misc_feature (24)..(24): n is a, c, g, or t
tggtgcaatgttataaactttatntgtggaatgtgctagacaggaactcagattttctgacacctactctgatggtgtctctaaaataatctttctaactttatagtttatcaagggtaaccccattctatcacatgccttttgagaatttgggttcaatatttggagtactctggactcatcagacatctttaataaattgtaatacattgccactgtcattcaaggtcctatgtgtgtctttttgcctattcataccaaaaatatcttttgatccctgactctgggtcgggcatagtattaagggcaggggacacaaagatgtatgagagcacattttctgtgaataaaaagctcagagtttggagttctgtatgtagcatattcaaatggaaggccttctatgcaataaaggctaaataataccaaaaaaa

SEQ ID NO: 96063 - DNA, 166 bp, Homo Sapiens
atgtgtactgtggtttattttgatgactgcatgtccatacatcagtgtaaaatatcctgtgagtccatgggagcatccaaatatcgctggtttcataatgcctgctgcgagtgcattggtccaaaatgtattgactatggtagtaaaactgtcaaatgtatgaact

SEQ ID NO: 96064 - DNA, 668 bp, Homo Sapiens
tcagcttcgtccagcaaccccagctccagtcatgatgacgacagcagcaaggactctggcttcaccattgtgagtcccctggacatctgaccacagtgcccagtcctgccccacagggatctagccacccttcagtggccccaaggccagactgaggctcatccagtggagaaccttcttaaaccactgcttccttcccggcatgcattttgcattggtccagccctttgaaaccccttagagagaagcatatatggccacaaagcacagaggcttaggtttgccacatgcagacagggctttctgggcccttacctaatccccacccgactcttgctctgagttagagctgagttacgtacccagtatcacactcacagttagaaaagaccgaatcacaatttagaatcacttttcctctgtccccttctccccagctaagaatgtgtggcacctccatcagttatacttagaaggagcagaaatagttattttcgtatcttctatccctcaaagcatcagacatgggaaaattggtttataccaagaaagcttcctctgtggaaatctgtctcagcctactttattcctgcattgggaagccatatcgcagagctaaatgcaatagaatgaaccagaactagtggattccagggcaggaggaaaaa

SEQ ID NO: 96065 - DNA, 340 bp, Homo Sapiens
ctctttctacacctcaatcattgtatcattagcctgagctgcccatagtccttattctgcccaaccctgaccaacctcctcctttaacataacttccatctcaatatcatggggcctgctgggcactgcaaacagcctaaggaaagcagaaactttacttaaccttaaattctattacaaagtccacattgaacgtaatttatatttgaactataaaaattttctgtaagttgaaacatgacctataaaggaccctacacccctgaagcacgttttagaaagaaattaattggtcctttctgcagaaaccattaaccataggagagataaaggaaaaact

SEQ ID NO: 96066 - DNA, 490 bp, Homo Sapiens
ggtcctcacctacaactgcctcacgaatgacacagacctgtacagcgactgtctccgaaccttctggacctgcccccactgtggcctgcatgcgcccctcacacccctggagcgcatagcccatgagaacacctgcccccaggccccacaggatgggcccccaggggctgaggaagctgccctcgaaaccctccagaagacatctgtcctgcagaggccctaccactgcgaggcctgcgggaaggacttcctctttacacccacagaggtgctgcgccaccggaagcagcacgtgtgagctgggccaggagccctgcccacctccgtgcagctgacctgccctccagcccaggactaggggcaggactcttgcctgaacccccagcctgggcttagccctgtggtcctgtcccagtgcagagggcctggagcacggattgtgaataaagcctcacatgctgagaaatttctgcccacatgaaagccatca

SEQ ID NO: 96067 - DNA, 378 bp, Homo Sapiens
tcgaactgtctctttctcattcctttgactccgctggacttgccgcccccgtgacctggtgttgggtctcatcatcccaacagattcccattctaaagatgagggaaccaagaggtggaagttcatgccgtggaggaagtggtgaaggaggtggtgggacatgccaaggagactggagagaaagccattgctgaagccataaagaaagcccaggagtcaggggacaaaaagatgaaggaaatcaccgagacagtgaccaacacagtcacaaatgccatcacccatgcagcaaaaagtctggacaaacttggacagtgagtgcacctgctaccacggcccttccccagtctcaataaaaagccatgacatgtgtaaaaa

SEQ ID NO: 96068 - DNA, 315 bp, Homo Sapiens
tgccacgttatccattgttcgattgtaaaatgatgcagccactttggaaaacaatttatcagttgcttaaaatgtaaaaaatagaatcgccatgtaacctagcaattctactcctagtgtctacccaagagagttgaaaacatgtccatacagaaacttgtacactcaagtttgtagcagcatggtttaatagctaaatagccaaaaagtggagataacccacacatctatgatctaatggatggctaagtagaatctggtctattcatacaatggaatattattcagcaacaagagtgaaactctgtcaccaaa

SEQ ID NO: 96069 - DNA, 385 bp, Homo Sapiens
gcttgttttagattgaggttaacttagagttgggagttgatttattaagtacagtatacctctcaacagtttataaataatatgttgaattatgtcagtgtgggcagcagtagaatactaaaaggaaaatgtcatgttaagcaatttcagaacattaactgaactattttcaaagcagaaaaattgacattgctgcctttaagaataccatgaatgtaagaaattgaaagaaattgtaaaatatcacataatatagaaatggcagttcaaagagaattgtggcagatgttgtgtgtgaactgttgtttctttgccacatgtgttgtatttgaaagttttacagtaagtttaaaataaaacattctatggcattctactgctgtcg

SEQ ID NO: 96070 - DNA, 590 bp, Homo Sapiens
ggcacgagggcgtcaccgaccggtgcggacaggaagaggctctgggctggcacatgtgtatggcgtgatgatgacagcctcttcatctatgactgcagtgctgcagaaaagaagtcacaagaaaataaaggggaggacgcgcccttggaccaggggagcggtgcgattctggcgtccaccttctccaactctggcagctattttgctttaaccgatgacagaccgtggcaaggaggtgtacagccctgactttcatagcctcggaggagaaggtcttggtggccgacaagtctggagacgtctactccttttcggtgctggagccacacgggtgtggccgtctagagctggggcacctgtctatgctgttagatgtggctgtgagtcctgatgaccgcttcatcctcactgccgaccgggacgagaagatccgagtcagctgggccgcggcgccccatagcatcgagtccttctgcttggggcacacagagtttgtgagccgaatctccgtggtgccaactcagcccgggctgcttctgtcctcctctggggacggcaccctgaggctctgggagtacaggagcggccgc

SEQ ID NO: 96071 - DNA, 752 bp, Homo Sapiens
ccaccacccaaaacaaaaaaggaggctgtgtacaacaagcaggtgttaaaacgaggcagtaactataacggtcctaaggtagcgaggctgggtggcgaattcggcacgaggggcgggtacatggcgggctctgtgggactggcgctgtgcgggcagacgttggtgtgtgcggggcggcatgccgattcctggccacctccatagcaagcagtgatgatgacagcctcttcatctatgactgcagtgctgcagaaaagaagtcacaagaaaataaaggggaggacgcgcccttggaccaggggagcggtgcgattctggcgtccaccttctccaagtctggcagctattttgctttaaccgatgacagtaagcgtctgattcttttccgtacaaaaccatggcaatgtctgagtgtcaggaccgtggcaaggaggtgtacagccctgactttcatagcctcggaggagaaggtcttggtggccgacaagtctggagacgtctactccttttcggtgctggagccacacgggtgtggccgtctagagctggggcacctgtctatgctgttagatgtggctgtgagtcctgatgaccgcttcatcctcactgccgaccgggacgagaagatccgagtcagctgggccgcggcgccccatagcatcgagtccttctgcttggggcacacagagtttgtgagccgtatctccgtggcgccaactcagcccgggctgcttctgtcatcatctggggac

SEQ ID NO: 96072 - DNA, 387 bp, Homo Sapiens
cgggccggctccgccctcacctcccggccgcggctgccctctgcccgggttgtccaagatggagggcgctccaccggggtcgctcgccctccggctcctgctgttcgtggcgctacccgcctccggctggctgacgacgggcgcccccgagccgccgccgctgtccggagccccacaggacggcatcagaattaatgtaactacactgaaagatgatggggacatatctaaacagcaggttgttcttaacataacctatgagagtggacaggtgtatgtaaatgacttacctgtaaatagtggtgtaacccgaataagctgtcagactttgatagtgaagaatgaaaatcttgaaaatttggaggataaagaatattttggaattgt

SEQ ID NO: 96073 - DNA, 736 bp, Homo Sapiens
  misc_feature (268)..(268): n is a, c, g, or t
  misc_feature (273)..(273): n is a, c, g, or t
  misc_feature (279)..(279): n is a, c, g, or t
  misc_feature (712)..(724): n is a, c, g, or t
cgaatttgaacttggtcagagccttgcactttccggagccccagagcatggcaattcgctgcagcagagtggacttgcctttgccagattccccttcaatgatgcaggggctctgaagagcctgcaggaggccattcagggtcagctgctccacgcggtgatggtgttggtccttcctccacaggacaggttctgtgaaggtgcttttcaagttaaaaataatgtcaatatcttcaccaaggggataaaagttcagaaaagatggggnatggnacaagncctttaaatcctgagccaaatcgtccaagtctccttctgatgtctgatgaaaaagacctattagagaagaggtgatgttaaagaagacccaattctgtgtctcctcaaaacctagagttcaggaggatgaacgggggggtgaggctgagaatctgccattggtgaatgtaatgtcctttcccagtttctgagctggcacaaagggttctgtctgctccccctttccccagcatcctttaccccactcccctttttgctttctgtttcctcctttccacaaccaaatcttatagcagctggttggaaaagggaggagcttgtttttgggttaaggaaagtaaagaatttggcagagaaagatggttagggataattgtcagcatagtaggccttcactctgagtaaaatctgtcatgaccttatttactaattnnnnnnnnnnnnncaatattttatg

SEQ ID NO: 96074 - DNA, 569 bp, Homo Sapiens
  misc_feature (199)..(218): n is a, c, g, or t
gcctctaacaccttccaaggaagcattacttccctctttatttctccaatgggtgtccatcccctcaagcatttagcccttgagttacaaacaatccagttaacgctcttatatgttattttaaaatacacaatgcagttactattgactacagttaccctattgtgctgtcagatagatagtaggtcttatccattcnnnnnnnnnnnnnnnnnnnnggtacccattaaccacttctacctccctgccagccccccacaacccttcccagcctctggtaaccgtcgttctactctgtgtccatgagctcaattgttctgatttttagatcccacaagtgagagagaacatgtgatgtttgtctttgtatgcttatttcacttaacatcatgaccccagttccatccacgtgtttgcaaatgacaggatctcattcttttttgtggctgaatagtactccgttgtgtatgtagcacatattctttatccattcatctgttgatggacacaagccttagctatagtaaatggggttgcgttaaatatgggagtgtggacaccgtttcaat

SEQ ID NO: 96075 - DNA, 562 bp, Homo Sapiens
aaaggttttcagcgcgccgacctacggggctaagagggctgaaataagaaccagtgactgagcgccgggaggtttaaggtttatggaagatgttcatcgcgccgtaccctactagaggtttggggacgtgggacacagcccctgcgttcccgccgcggaccccgtgataaatacacagacacacaaaatcactaccgccttgaatctggacagctacctcaggtggttaatatctaacaggagcagagtggagctcagaaagactcagcgtgggtgctgggttccggcgcgaccagcctgatacctaggtcagcatctcagccacacaagcaggcggcagttctgtcaggaattactacatctggtgattccacttctcatagctcaccgctgggagaataattcctcaggattaacaagatctattccagaggatcctcactgctgaagcgattttagaagacagtgtggtctgttgacagtatggaatattctttacccatcagatatgatctgtatgtgattggaaggaaataaaccaactgctaccccccaaaaaaaa

SEQ ID NO: 96076 - DNA, 443 bp, Homo Sapiens
taagtagagacaaagtctcactatgttgcccaggctggaattagggcctttctaatcttcactgtctgggtgacccagctgagcacctcttcagctcattttgatcttaaagagagctttccttctccaaaatctcccagtggatgaaatatgcataaaaccccagccagctttttgaaatgtgatcagctacctacagatggcaaacagatgtgacttggcaaaaaagaaagcagaaatcaccaggaagtggaggctgccgccagcagggcatttgaatgcacagccaaatggcgcgtgatctctggtccacccaagacagatgttcagctcacaggagaagtattttgcagctaacatcccagtggcacttcctgaggctccgatgtgctcagggcttagccctgagcctggggttccaggctgctcaggaaggagagggc

SEQ ID NO: 96077 - DNA, 492 bp, Homo Sapiens
gcaagaccaagaggagcccgaagtccaagggccccctgatccaggccggcggactgccccccctgaagcccaagaggacacggcgggcacagtcctgtgacaagctggaacctgatagaagacggcctcctgaccccacaggaaccagtgagccaggaacagactgacaactgccacaacaccctcctcagccctcgacatgtgcctcgcaaggactcagacccctatccacccccagtccccagggccccctgccagcccctgtcctacaggggcaagacggcaggaccaggcatgggggagctggaggcagggactagaacagagggagccacctggagagacggaggctgtcagtgcctgcctcgatacctctctctgcagagagcttctgggtgggggcttatctcctcccccaggagggtggatctctgtccctctatccccagggactctctcccctcttgtatagaataaaaaaacaaaatcatc

SEQ ID NO: 96078 - DNA, 411 bp, Homo Sapiens
agcccaactcccagtacccagaatgtgactgtacctggagacagggtctcccgagagatcattaagccaaaaggaggccattagggtgggccctcttccaatccgattggggtccttaccagaagagatcaggatgcagacgtgcacagaagggccaccctgtgaggacacagagggccaagggccatcgatcagcaaagggaagtagcctgggacacagtagtcctgcagagccactgaggaaccagccccgcctacaccttgaccttggccttccagactgcagagtgcgagacgctcaatctcttgtttaagctgcccagtctgtgggatgttgttctggcagccctgcgaaaggaattcagaccctcttagccaaggggaataaatgctctaaggtttcatattaaa

SEQ ID NO: 96079 - DNA, 1301 bp, Homo Sapiens
cctgcgtcctcgcttcgttcctcgtgcgtttcttgctcgcctgttcttccctctttctgtctgtgttccttatgggctatgtgcctgttgttctctgcttctcctcttccctccgttctcttctatgcttcgtgttgtgccctcttcttgtgctttccttcctctttcttggtgtttctgtcgcgttttcctcctgcttcctgtggccccctccttttcccccttgcttcggcgtcccccccttacagcgtttttgcctcctgttcctctctcgtttcttcttctcttgtttcgttgtttccctttgggtattctcctttctggcctttctttcctgttgtcattctgtgcgcgctttcggtctttgtgtcattgactgggtcttcgtttgtgtcctgcgttgccccctgtcatccttcttcggctcccctttctctttgctcatttcgtcctctccccttgtccctttctttctgtgcgcccttctgtgtcagtaccgtcgctttccccctcttcctctgtttccccgcttgcgtcctactcactcggcgtatcgtgcgtctcggctcaggttatgttcctctggggtcttagggtcgtggagtgatgtcccctggggttctcatccctcgggcacatctcgctggccatcgccggcgtccatttcttctgtcttgtgcatcgctaaggagatacgtcatcagtagcccagggccttctgtcagctcgtttgtagccttctgcggctggccttgtgggcgggatctggggatgctgggtctctaccatccctcccattagtagctttatccagtccccgtttttgctgcttctcagggcctctgctcttcaaggcccccatggggctgtccatccatgtgctctgcctacggaaggggcttaatgcatgtgcctgcccctcccccagctgtttttaatgaaactgaaaaaatagacttgatcccggcaggactgtgatacagagccctagcctgcccagccagccccaagatctcaggagctttagggagaagacttggtggggctggagcacaccttgggcctcagtggtttctgtgtccctgtggtgccagtgcttctgggcagtgcaggcggctgccaggcccagccctgacttccactctggctcagcaacctggttatttatgtggggccgtgcaggcatgggcccactgcctgtccatcctgtttctcttatttattgaaactcaccattgccctatccttgtgtctccacccccttccatgtgttgaataataaaaggtgggaaagtgctgtc

SEQ ID NO: 96080 - DNA, 445 bp, Homo Sapiens
gctaattagtgtttgatattaagcctttggttacttttcagtcaggccctctcaggctaacactttcctttaatcagggcgattaaagatgcctactcactttccattcaagcacatactgtcttcaagtcggggtggtgatgtgggcgggaaggaaaagcgcatttttccatgcttttgtacttaaggtaagaaaacaacccttttaagattgtcactatcaatgatggggaaatataataaggttcaaaggctcccttctaaaatatcccatactctctttttccgcttcccaattggaaagggaatgctgtacccatatactaaccagtttggggcacataaatgttacaagggagaaaaaaagatttagactagcatgtgaatttcatcaagcagagacaccttggttaaaaagcaaaacttgtggggtggagaggaagga

SEQ ID NO: 96081 - DNA, 430 bp, Homo Sapiens
taaatactgttaagtgtcagcttaatcagcccttaatgatccagcctaatcagtaatcaacaatctggtttcaaagattatgtgatctgtgtcttattattattcacaagttaccaatattaatgctcagatttcaagaggagataattttaaaaaatcaaatcaagccacatgatatattcttaaaattacaatggaaatcaggccaaaaaaacccccaagcctaagttaagagtaaattaccttaaaatcagaagttccaacataatggtagtttgaagttggagaaagttacgagaggaaaaataaataatgaatgggttgccagaatacactcaagtttattaaggagatgttaatattgtgattaactgattgcatatgtctacatatgtctaatcaattttagacatatgtaaagctgagaaat

SEQ ID NO: 96082 - DNA, 1039 bp, Homo Sapiens
  misc_feature (20)..(20): n is a, c, g, or t
  misc_feature (90)..(90): n is a, c, g, or t
  misc_feature (390)..(398): n is a, c, g, or t
  misc_feature (652)..(662): n is a, c, g, or t
  misc_feature (694)..(708): n is a, c, g, or t
cttgtgggggctcagtccancccagtgagtacgcgattggcctaatattgcagatgatccagacatgtctcgctaatcgttgccaagtangtgttggttaatatgaagactctatagcaggcgtctggcagagagagtcctctcggttaaatttttggaacgcccattgagagtatcctaaagcgttggaagtacagcgtcaaggctcccttttcaggagtggaagccaaggttcatccgcttgcggttcatccttgcttccggggtgggccgccaggtttttaggggcccccctgtttcgtggtcctggggggtcccagttccccctcgtggatctccccaaaaaagttggtttttcaaggcacattctttagaatgctgtttctttcnnnnnnnnnggccgtccactccgtttggcctagtgaaaaaatgggaaaagtattttgaaagttttccaaaagcccaaaacacctatcggagactcacggaagcctgcggagacgtccaccagataccaaggggttcgaggcgtttctcagagcctgtgtttggaactgaccgtcaggaagcaatcggagccgaagccgctgctcccaaacctggccgcccatcggcctggccttcccggagcaggtggcaacacggagaaccnnnnnnnnnnnaaaaaaaggcatcttaaattgtggtttgggannnnnnnnnnnnnnnatatcatgaaaaaagatttagagaattacaagagtttaggttaataggaaacacaaatggaggtggaaatttaaaaacaaaggaatggaactcaactctccacagattgaacccacacaggtgtcactgtttactgaattagcaccacttttgtgcagtgaagacacccgtggatgagatttcttaaatctcactttttccatgcttttcttctgacaaactgaccacggagggagagctctcctcccccctccctatcccagactgctgctgctttcctgcaattctggtggtctttttgttgcctcatctgattgagactttggggaaa

SEQ ID NO: 96083 - DNA, 426 bp, Homo Sapiens
tttgatggtaactactctggggcttgttgagtgcaatgaaaacagcagggtggttttagctaatttcaggttttcgtaggaagtgtggccaaaatactggttaatgatgatttgggggaaatacattgttattccttgtatcttcctgaaattgactgtgttcctctggcaagtgatgaaatgtacccctactcggagtgtcctcccacacagactcacacttttctggggcttcccttactccttacctcctttttaggaatatttataggaagaaattgaggctgtggttatctcttggatccttaatagaatcttttaagtaggaaattatcctcagtccaatttgcagtagaaacgtactttctgttccttctcgtgcatgggtccgttcacctggcctgtgcagatttaactactgtgagt

SEQ ID NO: 96084 - DNA, 1180 bp, Homo Sapiens
  misc_feature (129)..(211): n is a, c, g, or t
gaattcggcacgaggcttccctcacccactggcaatagcacccccttgggttccagcaaggagacccggaagcaggagaaggagcggcagaaacaggagaaggagcggcagaaacaggagaaggagcgnnnnnnnnnnnnnnnnnnnnnnnnnnnnnnnnnnnnnnnnnnnnnnnnnnnnnnnnnnnnnnnnnnnnnnnnnnnnnnnnnnnaggagaagaaggctcaaggccggaagctttcgctgcgtcgaaaggcagatgggcccccaggcccccatgatggtggggacaggccctcagccgaggcccggcaggacgcttacttctgacctctgccctggggctggactgcatggcccccctctttccctcagccaagaacaggcctggcccaaggtgccaccccctagcaccttgtcaggctgtcccttgctggggaaagtggcttggttccccatctcctcgccagctgctgatccctacacgggcaggacagatgggcagctgcaaatgagtctggagcctctcatctcccatgaggctcagctggggtctctgtcgctcctgccccagttccctctgggtcccctcctaggtgctgtccctgaatggcccgttgtcatcccaagggttgactcctggtgatgggagtcagcaagttcagattcttacactccatagctcccccttaccatgagggggaactggcttccttttccctgtcttcaaccctccctgtctcccccaacttcctggccaagggctctcattctggacctgtgttgtaattgtgtacagaggatggcgttggcctggggtgggggtgctcgctttgtcttctgtcctttggttctccttccataatgctcctgtacccagtttatttaaggggacatgcactggaataggaaatgtcccccatctcccttcctgcaccctgctgtgctccctccaaacccaccttgctctgtgttctcaggcccccctgcttttgtctcaccaggacccatacctttcaccttgttcccttccacccctccagttagtccctatctgggtaagggtcttcccttgagctccagggggtggaacccaatgtttacattctcttctgtctctgcccccaccccatgcagcgctttgaggaattggaaaagaacctgctgttgtacctggaaa

SEQ ID NO: 96085 - DNA, 479 bp, Homo Sapiens
caataagaataaattagaacaactataataatatactgtaataaaagttgtatgaatgtggtctctctttctctcaaaataatcttattgtatcatagtcacccttcttgtgatctgtcgatctgataattgaggtgactactaagcgactaatgggtggatcatgtcaacagcatggatacactggacaaaagcatgagtcatgtcccgagcaggatggagcaagatggtgtgagatttcatcactatactcaaaatggcccacaatttaaaatttacaaattatttatttatggaattttccatttaatattttcagaccacagttgactgcagctaactgaaactgggaaaagagaaactggataagggggactactgtagtatgaaggcaagaaaatttcaggggaaaacaagtggttattttctggccaaatgtgatacattttctctcttaactggatacagttaaaaatagg

SEQ ID NO: 96086 - DNA, 615 bp, Homo Sapiens
ggatggcagactgattgggagtggatattgatagcattataaaagtcagttattagagggatacttctttaacctgactgaagaactgatctaatggctttagtacagtgcatgattatgtgcgatgttttgagacagagtagtacatttgtgaatgaaattttatggcttttttttcacttagtaggaaccattgtgtgtggaaaagtgagaaaatggctttctgctgtagggtctggcattcattgtagatgtaagcttatttttctgtgagcaaatcttattcaataaaatactactctttatactaaaaaacaaaaacagtggtgatgtgtggtcattatcgtcagcaaactaatccagggaaagaaaaccaaacgccaccttctcacttataatgggagctgaaaagtgagatcccatggacacaggaaggggaacaacacacactggggcctttcgggaggcagagcgttaagaaaaacagctactgcatgctgggcttaatacctaggtgacgggttgacaggtgcagcaaaccaccatggcacacgtttaccttagtaacaaatctgcacatcctgcacatataccccagaacttagaaacgaaacg

SEQ ID NO: 96087 - DNA, 554 bp, Homo Sapiens
  misc_feature (189)..(231): n is a, c, g, or t
ttcacagtagatgatccagatatttaatcaaataagtacaatacaatgtgagccatgagatggtagagaactatacaaaaggctatgagaacacagatttcacataaaagacatttaatataagcagagatgttccagccaatgggaatgggaggttgaggtgtataacatgggaacatttgctattannnnnnnnnnnnnnnnnnnnnnnnnnnnnnnnnnnnnnnnnnnaactttttgagtactgacatgatgccacaaatggaaaattccacacctgacttcatgtgataggtcacagtcaaaatgtaggtgcacaacatatagtctattcagtgttcccaagggaaaaataaattaccttcaggttatgtgtataaggtatatatgaaacataaatgaattttgtttagacttgggtcccaactctaagagtatctcattatacatgtacaaatattccaaaatccaaacatatctgaaatctgaaacttgtagtcccaaacattttagataagggatattcaacctgtatttgtgaaacagctgtaaca

SEQ ID NO: 96088 - DNA, 558 bp, Homo Sapiens
ctcaaaggctgctgagctctctctgtcccacagaatgccgagtacaggaagcagacaaagcaaatatgagcaactttaattgaacatgtggaagacccttttagttatggagaggtttctcaggggaaactcaaatctctgtccgtggaaattttcaagaagggaaggatcttaccaacagtatcattacagctgtgttcctttcagtagttgccatcttggccatgcaagaaaagaaaagaaggcatttactctatgtcggggggcggtaatcgtgtgttgcatcgatgcgtttgtggtcaccacgaagatgaggaccaacttgaaaagattcctgggagtcgaagttgaaaggaagctttcccccgccaaggacgcctaccccgaaaccggccccgacgccccgcagaggcccgcctgaagccagcccggcgccctagcagatgcacgtgtctgtcgaatcgctgcctccgagcccacccccgagctcgcatgctgtcacccattccagcctaaatgtgaccataaaattagggctgctgcttttatcgagaaaaa

SEQ ID NO: 96089 - DNA, 745 bp, Homo Sapiens
cggctaggtacgaggctgggtgtggaattcggcacgaggggcgcgcctgcctctgtcctgctggaggctccatcaatgaggagaagtttgcccgcgtagaagctgagttgcaccagctgcttctagcctcaggccgtgcccatgtgctctggaccacggacatctacgggcgactggctgcggactacttcagcctatgatgaagtagctctgggtgagacacaggccgccctgcagtctctttaggtaggcagggcctttgctgggacccctggtggaggccttcacaaaagcactggttactggtttcctgctgggtctaccttgcttctgggcacacctcaagcctcccctgctttctgcagtgccccacgcggttttccctgcacttgctccataattggctgatcatctgtgggccccggggctggatgtcaggcctccattgccctgctcagtttggctgcatttggctgccgtctggggtcctggtcctttgtgcaaatgctttgggattccagttgtgagctgagagagatgatggcctctctgggcctttcctctccctttactgagagctcagtgcttctggggttgaagttggacagaggcctgcttcagggaagctgggagtccccaggcactcacgcctcttacgtgttccctaccctgccacccagccaccccactgggctgggctcgggctggagggggtcatcaaggtacacatgtgcctggaaaaaaa

SEQ ID NO: 96090 - DNA, 331 bp, Homo Sapiens
  misc_feature (168)..(168): n is a, c, g, or t
ctaaacagtgccagtgttttaaggttctgtcacactcagtaacccacttctggtccctcattccgtgtcagtgatcagcagtagactgaagaatctaccttagatttgctccatactattaattagcttacaaaatgtctaagaggagctaagctgggatgccacatnagccagaagccaggaaaaatgaccaaccacagaaccaagtggttccagtggaaactcagcagctgctggtgcctgctactggactgccaccccccattgaagagactggaccaccaggaaggtcgtttcacattctgtagtaaaaatacccctacaataaaaa

SEQ ID NO: 96091 - DNA, 927 bp, Homo Sapiens
caggctggtacgcgtcggattaccgggatatcgtcgacccacgcgtccggtgattgaatagccatcctaacttggatttgtattaggttatgaatgaatactgttgttagtccaagctatttgaatgtaaagttaaaattctccagcaatccagaatgacttgtaacccttcagtggaatgggaaatttctggtatgcaaatagggtggtgttccagacatttgttttattggtggtgtttgggccttgaaacacatttctaatagaatgacatatggcaaagggtatttagatggtcctatgggatcacagaagcccatatgatttaaaatatagataaaataacacaaaattgggtacataagggtttaaccaggctttcctgggttagactaagcctctaacctctgttcctatcctgttcttatgggaggaaaaaaaatgttccatgggcatgaacacagaaaatgcatttgaccttcgtagtcattatattctcctagaccgcacttcgggtatatccagcacggcaagcaggaaatgccacagaggaagcaagatgtccatagatcttctgctccagctcggtgcacttgaggtgtacataaatgttacacttatgtcaggttatctaaaatgggaacacctgacacagtgtctgacctgatgaaccatccaatttgaacagtatacgaataacagaattacccatgatagaaaatcgagattcccatataattatggaacgaatccaccgattgtagtaatgacaacatggctattcaggtccggattcactgacagtccagtagcaatgagctaaaatggatgacataggcgcggatcaatacagcacgagaacacgcctaacaatatagaccaataaagacatataagggagacaagactcttccaagacacaggaac

SEQ ID NO: 96092 - DNA, 1023 bp, Homo Sapiens
  misc_feature (753)..(814): n is a, c, g, or t
gccccactaatgcttaacctaaaccataattgtaaccagtgcctttcctccccactggaggcaagcccccccacccacccaggatgtcctggctcactccgcaagccccccagcctcccaccctggtcccagtttcccgcaaagtgcctctggggaccccccagcctcccaccctggtcccaggttccacaagtgcctctggagggccctgggctctggcagatggtcctggtgcccagacgggggccgaggcctgagcccccccatccctcctctgccagggtttcttagcggtttctctgtggatgttttggcatctttagacacctggaaagtctcttatgtttgccgtttattcccttcacagaaggcttggaatgtatttatttatatttattttttcaaaatccgaaatcatttgcgagccgcaatcgtcgtctgcctgtgtgggggggcccagggcctgccttgcacgttgcagcctctctggccattgcagagctgctggcctcctgcccaggtggagggtcctggggacggcagaggataaagccccctcctcacatccctctattgcggatccacagtggccttactcttaacttggatgagagcaaaaacctgggagaatgatgtgcttctgtagtcggctgacaaaggaagaggcattgctactttatttggtgcacttttggtttccaagaaggcctttgggatcatttgtaacttctcggcaactccgggactgtcggnnnnnnnnnnnnnnnnnnnnnnnnnnnnnnnnnnnnnnnnnnnnnnnnnnnnnnnnnnnnnntgcgactggcgataaatgggcgctcccgcgagtaccacgcgggctgcaccggcgggcgctataggagaatgggcgcgacgatgcggtcgggtgcgtcccgggcgggccgaaacacccgcgatgagcggggcggaggtcggcctgcggcgagaggcatagcggagcgggatcggacggcgaagcgcgagcaggaggggtgaaagaggggc

SEQ ID NO: 96093 - DNA, 391 bp, Homo Sapiens
catagaaaagtccattgccaacaaagataaaagatggatacactggctttctcagtgatctcgatcaccaacatgattgcccttcttggtttaaaatggagagatatatttatctgcaagccggtcaaagataaagagggtggttttccaaacatatgccttatgctctcttagttaaagaaattcttgggtataaatacaatttggacaattgctttgatacagtttcagtgtgtttatgttaaaagagtttcataattgttttttcttgcaagataaaaatctttccatatggctttcttcacttttactcatgaaaatagtaatcacataaactgtaacccttctgagggcagggatctagactgttttgttcatggcttagtcccca

SEQ ID NO: 96094 - DNA, 991 bp, Homo Sapiens
  misc_feature (143)..(306): n is a, c, g, or t
ggaacttctatacctttgaaaatgttctagaactagaatcatcctgctactgggaactacccacagctctatcttcaatgccaggtgaaaacacagatcacaagtcagatgaatcaggccaaagcaacttttatgtatatctnnnnnnnnnnnnnnnnnnnnnnnnnnnnnnnnnnnnnnnnnnnnnnnnnnnnnnnnnnnnnnnnnnnnnnnnnnnnnnnnnnnnnnnnnnnnnnnnnnnnnnnnnnnnnnnnnnnnnnnnnnnnnnnnnnnnnnnnnnnnnnnnnnnnnnnnnnnnnnnnnnnnactgtgtgggtctgaatgatggctttggtgttcagtttagcacacgcggtctaccacgtctgcatgagtggtaaatgtagtgcctgggtcaaaatgttccttctgttcaaatcgaaatacctcatctctatggctctatggctgtacattaggacctagaacagtggcccattgctcttagactggaaccatgtccactaaaataaacctaagcagatgttgtagacctagccccacacgactgcatttagctgcttcagtgacactttgatgaaagtatggagaagtggagacattatagataaaatatatcaattcccagagaaaactcttgacttaaaaacttaactgtagtaaatatatctttttcaggtgatgaattatttttttaaaaaaggttacatataagaaatctgcagtataattgggaagctatttagtgctatattaatggaaaataattatttttttaagtaagtccaaaaaataatctagaaagtaagtttccagagcaaatctgacctagcatttggtatgctaggctctgcttttcatgattttgaaataaatcataattagacttaacaatatggagaaaataaacttgtatttttaagtgttctgttggcttccctcccgtttcatccaactcaataattctgataaataaatttggttctagttt

SEQ ID NO: 96095 - DNA, 1070 bp, Homo Sapiens
  misc_feature (64)..(83): n is a, c, g, or t
  misc_feature (905)..(905): n is a, c, g, or t
  misc_feature (968)..(968): n is a, c, g, or t
acgaggcagtgcatgctaaataacctcactaaagggaataagcttgcggccgcatacgcggtcnnnnnnnnnnnnnnnnnnnnggagactgggctgccatttcatgtgaatggccactttgcactggattcagccagaaggaacctgtggcgtgatgataatggagttggtgttcgaagtgactggaataacagtttaatgacagcattaatagctcctgcatatgttgaattgctaatacagttaaaaaaacggtatttccctggttctgatccaacattatcagtgttacagaacacccctattcatgttgtaaaggacactttaaagaagtttttatcgtttttcccagttaaccgtcttgatctacagccagatttatattgtctagtgaaagcactttacaattgcattcacgaagacatgaaacgtcttttacctgttgtgcgggctccaaatattgatggctctgacttgcactctgcagttataattacttggatcaatatgtctacttctaataaaactagaccattttttgacaatttactacaggatgaattacaacaccttaaaaatgcagattataatatcaccacacgcaaaacagtagcagagaatgtctataggctgaaacatctccttttagaaattggtttcaacttggtttataactgtgatgaaactgctaatctttaccactgtcttatagatgcagatattcctgttagttatgtgacccctgctgatatcagatcttttttaatgacattttcctctcctgacactaatttgcatattgggaagctgccttgtcgtctgcagcagactaatcctaaactttttcatagtttaaactttttagtgattattgttttaaagatgcagaagaaaatgagattgangttgagggattgcccctctcatcaactggacagtgttttgcaacttttgatgcaaccgacccngttttctacaaatatcatgaattgattcatccccgcaagactgtttatgatacataatattgaatatagtatatttattgactgtacagtgcaagtgtttgc

SEQ ID NO: 96096 - DNA, 375 bp, Homo Sapiens
  misc_feature (204)..(221): n is a, c, g, or t
  misc_feature (238)..(294): n is a, c, g, or t
acaagatgccgatagtagctggcttattaatgtacattattctttgatatttcaggaagccacagtgttcaactgtgaactacagagtcctgtaagtttaaaataactttgtttctcaactatgtgatatccaggattttttacaattactttgagatttttcctcatcagtaatgcaaagaaaattgcaatatgattatacannnnnnnnnnnnnnnnnnagacaggttatcactcnnnnnnnnnnnnnnnnnnnnnnnnnnnnnnnnnnnnnnnnnnnnnnnnnnnnnnnnntgggctcagacgatcctccttcagcttcccaagtagctgagattacaggcacgtgccaccatgcctggccaatttattttt

SEQ ID NO: 96097 - DNA, 557 bp, Homo Sapiens
tggaaatgggattccttcgctaggaagagcactcggaataacctgctggaaatgggattccttccctaggaagagcactcggaataacctgctggaaatgagattccttccctaggaagagcactcggaataacctgctggaaatgggattccttcgctaggaagagcactcagaacaacctgcctgcttgagggtgacagcaagtgtctcacacttctcgtctactccaagtcagattcctaaaaataaaatagagctccaatgggcaatttaagcaaaagccttagaaacatggacacctgaaatgctggcctacatgaagggtacgatgacattttatatattaaataaaaattcccagtcctgttttagtattcatcagaatagcctcttggaccctcgaagttctacacctttgggagatataaatttccttaaaataaagggattgcttctttgtgtaaatagctttcattttctccatctggaagtgatttctgcctgcatgttggagcacaaaatactgcagttaattaaagcattactggatgtcaaa

SEQ ID NO: 96098 - DNA, 1125 bp, Homo Sapiens
caattacggtctaggtcgaggctgggtttgaattcggcacgagggcttgtcgagcttagtccgcgctcccgcccaggcggcggctgacgcgacgccccgagcgcccggccccgccgccgcggcccggcagactgcctctgtcaccgggtccctccacccttgtctcctgtgcggccagcatcagagccatggcgacggaggagaagaagcccgagaccgaggccgccagagcacagccaaccccttcgtcatccgccactcagagcaagcctacacctgtgaagccaaactatgctctaaagttcacccttgctggccacaccaaagcagtgtcctccgtgaaattcagcccgaatggagagtggctggcaagttcatctgctgataaacttattaaaatttggggcgcgtatgatgggaaatttgagaaaaccatatctggtcacaagctgggaatatccgatgtagcctggtcgtcagattctaaccttcttgtttctgcctcagatgacaaaaccttgaagatatgggacgtgagctcgggcaagtgtctgaaaaccctgaagggacacagtaattatgtcttttgctgcaacttcaatccccagtccaaccttattgtctcaggatcctttgacgaaagcgtgaggatatgggatgtgaaaacagggaagtgcctcaagactttgccagctcactcggatccagtctcggccgttcattttaatcgtgatggatccttgatagtttcaagtagctatgatggtctctgtcgcatctgggacaccgcctcaggccagtgcctgaagacgctcatcgatgacgacaacccccccgtgtcttttgtgaagttctccccgaacggcaaatacatcctggccgccacgctggacaacactctgaagctctgggactacagcaaagggaagtgcctgaagacgtacactggccacaagaatgagaaatactgcatatttgccaatttctctggtactggtgggagtggatgtgtctggctcagagatacttgttactctgggactcaacgaagaatgtacgaactacagcaccgatgctgtctcacagctgtcacacagaatctcctcgtgctgaagaaacatactg

SEQ ID NO: 96099 - DNA, 1171 bp, Homo Sapiens
  misc_feature (604)..(770): n is a, c, g, or t
  misc_feature (779)..(793): n is a, c, g, or t
  misc_feature (818)..(827): n is a, c, g, or t
  misc_feature (837)..(1002): n is a, c, g, or t
  misc_feature (1013)..(1022): n is a, c, g, or t
  misc_feature (1067)..(1129): n is a, c, g, or t
aacactctgaagctctgggactacagcaagggcaagtgcctgaagacgtacactggccacaagaatgagaaatactgcatatttgccaatttctctgttactggtgggaagtggattgtgtctggctcagaggataaccttgtttacatctggaaccttcagacgaaagagattgtacagaaactacaaggccacacagatgtcgtgatctcaacagcttgtcacccaacagaaaacatcatcgcctctgctgcgctagaaaatgacaaaacaattaaactgtggaagagtgactgctaagtccctttgctcctgcccgcgagagactgtcgggaagttgacccggattggcaagaaacagggtgtcttggaggtggtcccccagatctgcgcctgggggtcaggacagggcctgatttgagcctcctctctgaagatgatttggccgagcggaaggtgtggaccaccggaaagttcttaaaagttgctggtgacatttcttgccaattctaacactgtctagggaagagttcctagtctattgtgttcaaacagagtcaacaaaagtttttaattttttattacagaagggtgaagttcaatnnnnnnnnnnnnnnnnnnnnnnnnnnnnnnnnnnnnnnnnnnnnnnnnnnnnnnnnnnnnnnnnnnnnnnnnnnnnnnnnnnnnnnnnnnnnnnnnnnnnnnnnnnnnnnnnnnnnnnnnnnnnnnnnnnnnnnnnnnnnnnnnnnnnnnnnnnnnnnnnnnnnnnntttttggcnnnnnnnnnnnnnnnaaaaaattttttaaaactttttttnnnnnnnnnncccccaaagnnnnnnnnnnnnnnnnnnnnnnnnnnnnnnnnnnnnnnnnnnnnnnnnnnnnnnnnnnnnnnnnnnnnnnnnnnnnnnnnnnnnnnnnnnnnnnnnnnnnnnnnnnnnnnnnnnnnnnnnnnnnnnnnnnnnnnnnnnnnnnnnnnnnnnnnnnnnnnnnnnnnnnttttaaatttnnnnnnnnnngcgccctttttgggaaaggggggaaaatttaaaaaaatttctgcnnnnnnnnnnnnnnnnnnnnnnnnnnnnnnnnnnnnnnnnnnnnnnnnnnnnnnnnnnnnnnncgccgtggaaaaaaatttttcccccgggggaaaaacgggggg

SEQ ID NO: 96100 - DNA, 172 bp, Homo Sapiens
aaataattgcatcagttcattgacctcatcattaataagtgaagaatacatcagaaaataaaatattcactctccattagaaaattttgtaaaacaatgccatgaacaaattctttagtactcaatgtttctggacattctctttgataacaaaaaataaattttaaaaagg

SEQ ID NO: 96101 - DNA, 423 bp, Homo Sapiens
agagggtgcctggcccataggggcagcacggtgactggttatgcttccttcatttgttcacccaacaaacactgactcaagcacctactaagagccaggctgaggaccttaagaatcaggacaaagtacacaggcatagtttaaacatcgtcacagcagatgatgactcagaaaatgcatttgagaaagtgataacagaagactcatttgtgtccttggcccatgtaaagaagaaaattcagagccctccgaaccaaccgaattcaataaacaccttcaaaattacagatttttatatgacatgtgttggtcacaagtaaaacctcttaaacaaagtgtggtaataatttttaaagcgcatactgctgggcacagtgaaccaacccactttatgaaggcactttaacattaaaatagcttaaa

SEQ ID NO: 96102 - DNA, 490 bp, Homo Sapiens
  misc_feature (152)..(254): n is a, c, g, or t
tatggcatgagaatttgattgtaacctgtggagaagggagaaaatgtatttataagtagtctgaggttgtttcttatcataatggcaagcattggctggcattgtattaagggcttttacatgcatagtttggctttaaaagaatacaccgnnnnnnnnnnnnnnnnnnnnnnnnnnnnnnnnnnnnnnnnnnnnnnnnnnnnnnnnnnnnnnnnnnnnnnnnnnnnnnnnnnnnnnnnnnnnnnnnnnnnnnnaattctaggttgtggagcaagaatttgagacgagaaagactgattctagaacctttgtgacattttgtaagttggcctatttccattcagctacaaagtgggaacaattaaaagcattgtttgatttgtattgaatcataaagcttataaaatatgcttatcttatttaattttttgaataggtaatacattcacatggttaaaagaaacaaacaatataaaaagttattcagtga

SEQ ID NO: 96103 - DNA, 364 bp, Homo Sapiens
agatgctactactagacttgaggaccactgtgttgaatgatggaaccagaattcaagaagaccttaacaggcttgagcaatgtgccaaaaaagacaagatacatttagaatctttctaagttcgatccccatttttcaccctgctccatggctggaggctgatctttatggatttcatcaatggtgtccctcaccctctggtatccagtaggccaaggaagagtcccctcaggagagtggaggaagagaaaagagagcaatctgggtaatgatgattgaatgagttatcacctataaagagcatccctagaacaaaataagtatgttttaaataaatacaaataaaaattccaatcctcactgt

SEQ ID NO: 96104 - DNA, 377 bp, Homo Sapiens
ctgacctcggggactcgagaggtgagtgcttagttctcccagaggtacagagattacgaaggcttatggagacaagtaagttgccagacatcacacagccagtgtcctggtgtcttaacctcagcttgtaggtgccatcctgctgagacatccagcttagagctgccatcctcagctctaagcatcagacatgcatctcgtttctcctgaaggatttcctccatccttgatgtgtgcttgtggggagggaggattttccacatgaaacttggctttcctagtaagcattgtcccccgtccccagtttaactaaaactgcaatttgtgttctaatcaattcagattaggaggaagccattaaggatttaaaaaccaaa

SEQ ID NO: 96105 - DNA, 327 bp, Homo Sapiens
ggggacaaggaccacagtcagctgccaaactcatgccaggagagtggccacctacttgccaattatatgtcataatgagtctccaattatgggaggccaaggctcattttggccactatattaaaatcgtgctctcctggacggccgtgcgggaaagagcagtggtggccacaaaacaagagaagaatcctgagaagatgttgctgatcccaaaggcaatgaattcctaaggaagagactggatgacaacgatcctacaaattgaatctttgcaagaccttcgctgagtatttcaggaagtacattaagaatgaaaactcccatgcc

SEQ ID NO: 96106 - DNA, 460 bp, Homo Sapiens
tttgagctagaacttcaatctaggtttaattttagggtatagtatgtgctctttcgacgattccacagggctgcagagaaagacaattacttgcttttcttgctacatgctctagaatcttcctggcaacagaaagggaggtacattttgtaaaagcataaagccaactaaatatcaggtaatattaacattgctaatgattagtatctcactggctttctcttctgttccagtaaaacctgacggtgagaaaagggacatcttcaataacagctgcaggcagacagggcaccccctgggctcagcaccccctggctttgctgctcactgctgggtggcattcccttgctggccctcagtttcctcatctgtggaatgggaacaataacagcacctcccttctcagagtgttgctgagaagaccaaatgaaatcatgcaaataaagcacttcacacaggg

SEQ ID NO: 96107 - DNA, 608 bp, Homo Sapiens
aattttataaactgaagtagttccttgaatgtctgttgatgaaatagtcactgtttaaggaaaaaagtaattatgaggtgtagcagattgcagaaaaacaggattagaaacacacttaaaaagaacacacatttagagtctctcttcctcctcagcgaaccactaggccccctttttaaaaacacctttagagcctaattactccaataaaagtaactagaggtttggagtctggttaaataaattctgagtaaaattcttaagccaaatggaaattcttaatgcaatcatgaggacttctattgtctcttactgttgtattagatcctataaattgaactgatttttccataaggaaaatgcttcttttgagattaattctaataacgtatttgctattgcagtgcagagcccactgcaactgctaggactgaaagcagaggctgggtgccagagcacgtgattcttaacatcatttccacagacccctctgccctgaccctctgcattggatgcaggaagctgggaaagactgatgttgatttggaaacatgggctgaaaatgaaggccccatagtgcataggaacagtaaagccagggtgctgac

SEQ ID NO: 96108 - DNA, 522 bp, Homo Sapiens
acctaatgtcttgcttgatcaaagactcttacatcaaagagaaaagaacaaagggtaggacagaagtctacatctactttaattttccactggattccatccactgagagaagagttcagcagctttctggatgcaaggagcatggttcaggtcacaggccagcttcaagagagccgagcggagcatcctgtcccagactgaacccttgtcactccagctttgcctgtcaatcactggcttaaaatactgaagaaggtaacgctgcagaaaatatgagatggttaacagagaggctaaatttagtccttaacacagttcttgcccatctaaagggctcaactctaaactttctgcatctttcccaatctttccccaaacagtgtatcttcgtatttctcttatctttttctggctgttacccaccatacttaggaaacagtttttgcatttaaacatggtttaatttcctatctgaaaggggaatatcaatggatataaaataaaatcacctttagtagaaa

SEQ ID NO: 96109 - DNA, 1106 bp, Homo Sapiens
aatttggtcttcttggttctactgagtgggcagaggagaattcaagactccttcaagagcgtggcgtggcttatattaatgctgactcatctatagaaggaaactacactctgagagttgattgtacaccgctgatgtacagcttggtacacaacctaacaaaagagctgaaaagccctgatgaaggctttgaaggcaaatctctttatgaaagttggactaaaaaaagtccttccccagagttcagtggcatgcccaggataagcaaattgggatctggaaatgattttgaggtgttcttccaacgacttggaattgcttcaggcagagcacggtatactaaaaattgggaaacaaacaaattcagcggctatccactgtatcacagtgtctatgaaacatatgagttggtggaaaagttttatgatccaatgtttaaatatcacctcactgtggcccaggttcgaggagggatggtgtttgagctagccaattccatagtgctcccttttgattgtcgagattatgctgtagttttaagaaagtatgctgacaaaatctacagtatttctatgaaacatccacaggaaatgaagacatacagtgtatcatttgattcacttttttctgcagtaaagaattttacagaaattgcttccaagttcagtgagagaactccaggactttgacaaaagcaacccaatagtattaagaatgatgaatgatcaactcatgtttctggaaagagcatttattgatccattaaggttaccagacaggcctttttataggcatgtcatctatgctccaagcagccacaacaagtaatgcagggggagtcattcccaggaatttatgatgctctgttttgatattggaaagcaaagtggacccttccaaggcctggggagaagtgaagagacagatttatgttgcagccttcacagtgcaggcagctgcagagactttgagtgaagtagcctaagaggattctttagagaatccgtattgaatttgtgtggtatgtcactcagaaagaatcgtaatgggtatattgataaattttaaaattggtatatttgaaataaagttgaatattatatatt

SEQ ID NO: 96110 - DNA, 726 bp, Homo Sapiens
  misc_feature (651)..(661): n is a, c, g, or t
gggggagcaggtgcttgtggacaaggctccacaagcgttgagccttggaaaggtagacaagcgttgagccactaagcacaggaccttgggttcccaatacaaaaatacctactgctgagagggctgctgaccatttggtcaggattcctgttgcctttatatccaaaataaactcccctttcttgaggttgtctgagtcttgggtctatgccttgaaaaaagctgaattattggacagtctcacctcctgccatagggtcctgaatgtttcagaccacaaggggctccacacctttgctgtgtgttctggggcaacctactaatcctctttgcaagtcggtctccttatccccccaaatggaaattgtatttgccttctccactttgggaggctcccacttcttgggagggttacattttttaagtcttaatcatttgtgacatatgtatctatacatccgtatcttttaatgatccgtgtgtaccatctttgtgattatttccttaatattttttctttaagtcagttcattttcgttgaaatacatttatttaaagaaaaatctttgttactctgtaaatgaaaaaacccattttcgctataaataaaaggtaactgtacaaaataagtacaatgccacccccttttannnnnnnnnnntctatggcttaccccattttcccctctttgcctcccacgttaaccgcaaagccgacacattcgca

SEQ ID NO: 96111 - DNA, 364 bp, Homo Sapiens
caccccgtccgggagggaggtgggggggtcagccccccgcccggccagccgccccgtccgggagcttactctgagggaggtctgaatgccatattgtgagcggccctgctgaaagacccatgtggcaaggatctgagatcattggccaacaggctgcaaagagtcctaccaacagccaggctggtgttcttggaagtggatcttctcctactctcctacttgagatgactgcagccccagctaacacttcgattgcagccttgttaagatatcacgggccagacacacccagctaagttatgcctgagttactagcccacagaaatgataagataataaatatttgctgttttaagctgctaaa

SEQ ID NO: 96112 - DNA, 300 bp, Homo Sapiens
tttggttaactgaccaaaaagctgatagggaaatcatctttggaacacataagaaacaggctgtactctcatctggggagcaataaaggcagatgtccctgaaaatgttttacttggaaaattattaattgctctttactgtcagccatttatgccttccagtcaagaacgaacgtgaaggaaatgtcataaaccttaaatgtcagcaaggattcacttgaggcctactaataaacatcagatttgaacactttaatgctaatatactttatcacagagtatcttattttactcaatggc

SEQ ID NO: 96113 - DNA, 378 bp, Homo Sapiens
aaaataaattcttagtagaagcaatatttgggtcacactacatcaaaataaaattcatcatttatctgaaatttgtgctgggccgagtgcccgtgtcttatccggcagccctaccaggtcctttggccatggacactgcagtgcagttcttgggaggcggtgctggccccaaggctccagagggaagcaagctgggcacacgcctcttaggaggggccggagcacgccaaggagatgttctggggacattaggatgatctcaggaagctgagggggaaagctggccctggaatggtccagaaagcaggcaagggttcttcatgagtcagggccccctggaagggaagggacagaaaacagcccgggtgttagttcaaa

SEQ ID NO: 96114 - DNA, 691 bp, Homo Sapiens
aagagtataaggtttacacaatcattctcataatgtgacgcaagccagcaaggccaaaaatgctagagaaaataacgggatctcttccttgtaaacttgtacagtatgtggtgactttttcaaaatacagctttttgtacatgatttagagacaaattttgtacatgaaaccccagatagactataaataattctaaacaaacaagtaggtagatatgtatgtaattgcttttaaatcatttaaatgcctttgtttttggactgtgcaaaggttggaagtgggtttgcatttctaaaatggtgacttttattctgcaagagttcttagtaacttcttgagtgtggtagactttggaacatgtaaattttttgcttgtaatgttatcctgtggtaggattttggcaggtacacacactgccctatgttattgtgagtctaagttaaatgttttctgaaaagagatacatgcactgaactctttccactgcgaatcaagatgtggtaatataaaaggatcaagacaaatgagatctaatactactgtcagttttaatgtccactgtgttttatacagtatctttttttgttcactttggaaatttttactaaaaattgcaaaaaataaagtattgtgcaaagatgtaaggttttttgaaacttgaaatgcattaataaatagacgattaaatc

SEQ ID NO: 96115 - DNA, 322 bp, Homo Sapiens
  misc_feature (60)..(60): n is a, c, g, or t
taatttccaaacgttaaaggtgtcttagaatcgattagacacaggcattaccttacacantggttaattttcagctttacctttaaatatcattttggggagattatttatcccaggcctgcatcccaagtcatttaaatttttacaaaggacactaggactttctgaagacccagcctatgcctgagacccatggggtcttggaggcggaggatataacactgaagaccagcgacaggctaccctctgagtgtggtgtgtgcacaagcctttcagggggcacattcacaagtacctgttgtgtccccttcagatgcaaaaa

SEQ ID NO: 96116 - DNA, 908 bp, Homo Sapiens
tctcgggctcggtgatgacagcttccctatcgccgggatctatgacacaaccacagacaacaagtgcagcatcaagacggccgtggccaagaacatgctggaccccatcactgggcagaagctactggaggcccaggcggccacagggggcatcgtggacctgctcagccgtgagcgctactctgtgcacaaggcgatggagaggggcctgatcgagaacacctccacacagaggctgcttaacgcccagaaggccttcaccggcatcgaggaccccgtcaccaagaagaggctctcggtgggcgaggccgtccagaagggctggatgccccgggagagcgtgctcccacacctgcaggtgcagcacctgaccggggggctcatcgaccccaagaggacaggccgcatccccatccagcaggccctcctctccgggatgatcagtgaagagctggcccagctcctgcaggacgagtccagctacgagaaggatttgacagaccccatctccaaggaacggctgagctacaaggaggccatgggccgctgccgcaaagaccccctgagcggcctgctgctcctgccagcggcactggaggggtaccgctgctaccgctccgcctcccccaccgtcccgcgctcccttcgctgacacgggccaaggagccagtggggaagtgcgtgtgttgggccaggtaggatacgtacacctcttgcctcagagcagcctcatcccaggcagtgggtcttccctctgtccaaccactgttttattattttactaacatggtgatgggctccctcccctaaccttggtgcctgatccatccccagaccaggacagcagccactcagttcttcctccacctccacccagtgatcccaataaacgaattctgtctccctgt

SEQ ID NO: 96117 - DNA, 545 bp, Homo Sapiens
  misc_feature (27)..(27): n is a, c, g, or t
  misc_feature (30)..(30): n is a, c, g, or t
acatgtcatcattccgtttgtgatggnttnctttaggaatcagaaaaactcaggattttattagcatatatttattttataacttcacatttataacattttactttgtataccgccaataaatgacaatgaaactattttcataaatacaaaaacacatgaaattagggtgtcatggtaaccactgcatcactttggtggaacagtattaaaaatagaatttagaaagataaatgatcacaagtgataccttttaaaaaatgcttttcttacaatctcaggatattcttcagttaaactgaaccacaatcagaaaaaataagtaattatttaaaagtcaaacctctaacaattgtcaacaactgctggaagagtcatcacaaatataaaaaacaacaagcactcaaatttacaataagagatgaaacggtttctaacaccagggtagactggaagtcaactggaagcatattagcttgttaccacacaactgtcagaacaataaagaaagcatgcattgagcagacaggaacatcgtgaaaatc

SEQ ID NO: 96118 - DNA, 253 bp, Homo Sapiens
gccaggccagcccagcccagagcacaggctccagcaatatgtctgcattgaaaagaaccaaaaaaatgcaaactatgatgccatttaaaactcatacacatgggaggaaaaccttatatactgagcattgtgcaggactgatagctcttctttattgacttaaagaagattcttgtgaagtttccccagcaccccttccctgcatgtgttccattgtgacttctctgataaagcgtctgatctaatcccaaaa

SEQ ID NO: 96119 - DNA, 644 bp, Homo Sapiens
gagtgtcggccgcatctcgaccctgccgccgagggagctgagctgtgtgacagtattagtgagtgggtacggcggcagacaaaaagactgcagtgacattgtcggcgggacggtcacagtcctgaaagggtcctgtatcaaaagcccactgaagcaatacttctacgagaccaagtgcaatcccatgggttacacaaaagaagggctgcagcggcatagacaaaaggcattggaactcccagtgccgaactacccagtcgtacgtgcgggcccttaccatggatagcaaaaagagaattggctggcgattcataaggatagacacttcttgtgtatgtacattgaccattaaaaggggaagatagtggatttatgttgtatagattagattatattgagacaaaaattatctatttgtatatatacataacagggtaaattattcagttaagaaaaaaataattttatgaactgcatgtataaatgaagtttatacagtacagtggttctacaatctatttattggacatgtccatgaccagaagggaaacagtcatttgcgcacaacttaaaaagtctgcattacattccttgataatgttgtggtttgttgccgttgccaagaactgaaaacataaaaagtt

SEQ ID NO: 96120 - DNA, 698 bp, Homo Sapiens
agtagagccaggagaaccagcacagaagaaaaagtagaaacaaatgaccagaatttctgtactgctaaacttgttgaaatgtttctttggacagattaagttgatattgtgggttattatgccacatctccatgaaaatgcatacgttaatgaactaataagtattgcctcaagaactttccactatagaattctttttttatttaaaacatgtatgtatttaaaactcaactggtgacttgtgattgtgaaattgataacacttggatgcattcttgctctcacagaattggtgacatgctttgagagttttgtcacatgttgacatgccaatgttcttataaaccttttataaaggaatatatttttaaagtaaatatattgtaatgtactgtgaacttgtagggtgcttttcaacagtctttgtacagtgtaaatagatcatggaaataaaattacttattcaatattactattactgtataacattaacatttgaatgtttgtctgtgacaagtaccctatttgtcgtgtgacattttaagttgtaataagaagtattaccatttaaagagtgcctcctgtgttccaggtgctttgtgcatatattttctctgatccttaaacaacctagcgcaaggtattattagtattctcattttataataaagagtgcttgagtagcttaaatgatatta

SEQ ID NO: 96121 - DNA, 427 bp, Homo Sapiens
aatctaggaacatttcataaaatatcttagagaagtacataattttagcacccaaaagactttaagacaataataaagtagatcaaaactaacataagacacagatcagaaggaacacctggggttttaaaaataatttttgccaagtatttgccatttactagttggctgcttcacttcatttaatcctcagaaaaatgttgtgagacgaactgactcacaaaattttattatctccctcaaattcacatgaaaaacagaactaagagacaaatgaagatttggttcaaagctcatgtttcaatgacaacaaacaaaccctaaatattttgcaaaacttctaaaataattttcttctcagaagatccacgtttgttattatataataattattgaaaagaaataggaactttatactaaattacag

SEQ ID NO: 96122 - DNA, 401 bp, Homo Sapiens
cttggcagaaaaaacaatgttgtctcaccatctatttgagattttctcaggaatattgtgcttgcctctggatggtcagaagggttggactccaaaggtaaatatttgagaactcagtccctggagtgtggtcattggctctgctttcagaaaacatcaaggtactttcggcagctcaggaacccgcagacaggagagcagaaagcctcccaggggtccattactgcactttctgggaagctttatcagatggccagccctaggacagcattgtcttatcctcatccagcacaaactgccatcaccctctgatgtgagagctggcctcctcagcagaacctctgtcagataaatttcttttttttaaatcatgagggggaaacttcagacagtgtcttgat

SEQ ID NO: 96123 - DNA, 486 bp, Homo Sapiens
ccttccacccaaactggaagcctttaggtgctatcaattatttatatccatcgtttacatccatgaaattgggtgaataattactcctctgcctggggtaaacatgcgctttgggaaaaaaacgagtttataatcctataatgaaaaatactggcacaggcaatgctcactcgaaaacttcaagtaatttctagttggttttggaaagcttgataaagttcctttacagctttatttttcccgatttgttttggtttagatcaaagttcaaattaattttaacttagctaatgaactcatcaccaggacagttggagggggtaggccgaggttaaatggtccacgtttcaaaaatgttaatggctaatccataattaaaaaaggtttaactgttactgaagtttacaagttttattgtcatgaacatgaaatacaaacacgatggcttcgaaatgtctttcaataaatgtttctgcatttatatgg

SEQ ID NO: 96124 - DNA, 393 bp, Homo Sapiens
acggctgcgagaagacgacagaaggggttttacttttgtaaatgaaatcccttcggtatgagacaagtatgttttttgctgctctgcctaagccactgaaaagggagatgtatgtggatgttagtgtgtgagtatgtgtgtactgttcatgtaggcacatctaaaaactgctgtgcactatggctgatgaccaacaagagacctaaaataaaaagagaaaaaagatgctcattggctttggaaaggaagcaattataaatacagtttaaaagattaacctattttccatttctccactcacctattttcaagaaatgtaataaaacaccaagctctttaccatatgtttacaacatttctaagtaaatataagtcttttaaatgacagacaaa

SEQ ID NO: 96125 - DNA, 570 bp, Homo Sapiens
ccccttggggacatttggctgtgtctgggaatacttctggttgtcacaactaggacaaactaactctctagaaaaaacgtgtgtgtgtacacatatataagtttattataaattttaccaataaaaacaatgcttagtacacaatttacaaataaaaatatataattttattgtgaattccgtacagcaaatggatttttctcagaatgctttcagtgattttttccatactcttgtatccacaactgattaacaaagggggttgttctaacatgtgtgctggttgacatttttgtttatggtaatgagtaagatgagaagacatttgtcgaaactttactggtccatgttgtcagctacttctttgctagatcggatagtagttttctattgagaatatttgagaatattctattaagaatatttttgcaattttttgttctatttacaatgtaatggttatagatgtgagatacttctaagtttaatctgcattattagcattttcttatcacttgcttaagtctagacaatcaacaaaacaataaatcaagccctgatgtgtaaaaa

SEQ ID NO: 96126 - DNA, 320 bp, Homo Sapiens
ggggccgccccttcacctgcggcaggcggacgggtatcaccggccgcctggatgagctcgcagcccaccacgcggaggtcggtctctgtgtcggtgtcgaggccgctcgacatggacggcgtgaaacggagcttgtcgtcaggcaggaggcagttctccaaggtgatgagcaccccggagtacagcctgtccccgatcagcaccccctgcgaccctgagggtgcgcccccagatcccggggcgccggccgctgccgcgggagctgccgaccctgcagcaccagccgccgccgccgccagccgccattttgtgccgccgac

SEQ ID NO: 96127 - DNA, 861 bp, Homo Sapiens
cagcctttcaggaaagatgcagccactcctgcttctgctggcctttctcctacccactggggctgaggcagggagatcatcggaggccgggagagcaggccccactcccgcccctacatggcgtatcttcagatccagagtccagcaggtcagagcagatgtggagggttcctggtgcgagaagactttgtgctgacagcagctcattgctggggaagcaatataaatgtcaccctgggcgcccacaatatccagagacgggaaaacacccagcaacacatcactgcgcgcagagccatccgccaccctcaatataatcagcggaccatccagaatgacatcatgttattgcagctgagcagaagagtcagacggaatcgaaacgtgagcccagtggctctgcctagagcccaggagggactgagacccgggacgctgtccactgtggcccggctggggcagggtcagcatgaggaggggaacagatacactccgagaggtgcagctgagagtgcagagggataggcagtgcctccgcatcttcggttcctacgaaccccgaaggcagatctgtgtgggggaccggcgggaacggaaggctgccttcaagggggatcccggaggccccctgctgtgtaacaatgtggcccacggcatcgtctcctatggaaagtcgtcaggggttcctccagaagtcttcaccagggtctcaagtttcctgccctggataaggacaacaatgagaagcttcaaactgctggatcagatggagacccccctgtgactgactcttcttctcggggacacaggccagctccacagtgttgccagagccttaataaacgtccacagagtataaat

SEQ ID NO: 96128 - DNA, 547 bp, Homo Sapiens
  misc_feature (27)..(27): n is a, c, g, or t
atgcattctccatttaaatggaatganagcttatctctttattgtgccttgatgtcaagtcggcaataaatatggatatcagactatgcaaaattattcctgaattcctgtcattatacccaatcaaaattctaaacactttaactcgatgttcaatgatcagttaggattgttcacatacgtggctagctgtttataattcttcatgtttttcgtcaatgaaaatatttggcttaatctcaaaatcatcaaaaagactagacgtaggttagtccaaaccactcattctttttgtagcaagtactttccaccaagaggatgcccacccagctggaaggaagctgaaagagtgaaagaatttttgccttgattgatgccaggaatgactctgagttattttttccccactggattgatcaaatcaagcctttctgcccttaaaaatataaacagtactatgtccctcagcatgatgagggcaatgacagatctactatggatgaggaacatcagacactctcaaataacatcaaatttaagaaccaag

SEQ ID NO: 96129 - DNA, 460 bp, Homo Sapiens
atgtgacagcgttgcagctatgagtggaattttaaaggggaagtttgaagaagtcaacggctcctcaccctgctcttcagtgcaggaatcagatgatgaagttttcagctgtgacagtactgagagtgttgatagtgtcaatcgttcagttttaatgattttaccagaaaaaatgaggaaatatcaacagactgaaaatatgttttcagaggcatagaatcttcaggaaaatactggagttcctgagatctcaagatggagagccacttagcttgcagactgccatctccctaacgtatcagaacaatgaacttggttccaagagtatagaactcagtgaatgtaaaatggatgaatgtatgaattaatgcataaatcaataaatgaacccagatgaataatatgccaaagttgtttctgtatatctctgtgatacaaataaacatatgctaattctatt

SEQ ID NO: 96130 - DNA, 457 bp, Homo Sapiens
aattgtaacaagagagagaactctggctgcctgagagggcatgactctagtcacagcaggaggggcttggacaggccctggttgttggcatgaagtgaaggatgaagagtcatcttctgaacagagcatttctatagcagtgtcacatgttaatacttccaaggcaggtttgcccgcacagacggctctcccttgtgacatatgtggccccatcttgaaagatattttgcacctggatgaacaccagggtacacaccatggactgaaacttcacacatgtggggcatgtgggagacaattctggttcagtgcaaaccttcatcagtaccagaagtgttacagtatagagcaacccttaagaagggataaaagtgaggcctcaattgtgaagaactgcacagttagcaaagaacctcatccgtcagagaagccctttacgtgtaaggaggagcagaaa

SEQ ID NO: 96131 - DNA, 905 bp, Homo Sapiens
tttcaaggataagaacatttaatattaacatgtagattacagaaagagatcaacatattttaaagcgtgttctgctgctttatcttgcttaacatatctcgatatttttggcagtcaagagtacatgtttaaactggaggtaattccatggtgggttatcactcttttcttgaaaggagcatgtgcatatttctcttatacataaggaattctgatatgtccagtttgataaaaatcaatctgcttaagagcccattacgctgctttgtcaccataatgttccaccgaaggaaatcttgtataatagaggactttgctcatcttgttcacttggtagttgttccttaaagacacaattaccttggtatagttctatgcaattattatctaaatagctgtttatacagtacttaataaaatgttttccaagtgtgtttgtagtgtactttttctaaaaggtatttgctgacaaagaaattgatcttgtgtgtgaactgaaaaaaattggctgaagccagttagtcaacaaggtgtccctgtaggcccaaagaactaaactgtactttaggactttgattatcaacctacatggcagattggtagccgagcagaaaagttctgaagcattctgtgcatgtaaaatatgtttccccttccctgagtcaacaaaacattttgaagaattaccagctaagtaaaattttccattcagatgggatgaacagaaatagggctatgtatactttttggagccattttttgttaggtgttaagttgtacccatgttgactggcctccactgtagaaaagttttggaacataatgcaggtttttttcataacctctatcccaaacgacgtcatcatcccataaaattcaacccccccagggatagttttgggggg

SEQ ID NO: 96132 - DNA, 250 bp, Homo Sapiens
tgctttgttcttctgtcatcctgaccccacccctttctgggctactcttgacatccacagtcatatacacatgggagaggccacagagcctcgaatgccatacctaggattcatcatactctagataaaaagtttgcacacagagatggtgaattctgaaccctctaagactgcgaagtttatgcctgtctggctttcatgggtttcttaaagatgtccaaacacacaataaaagtaaataaacactgtt

SEQ ID NO: 96133 - DNA, 532 bp, Homo Sapiens
gaaagaaggcctgcaaacacaaggctaaggttccaactcactccctggaggatgctacgtctcacaggaagattacagaggcgattgcagtatgaaggcaaccagccatgtcgttgctgtctgacaaatgggatgcgattttcttgtgctttacacttggggctcagattattttcgtggaaaatttttagcactttgagatgttataacactggcatcctagagaccgaaatatgaaataacttagtacaaaataggtcctcgtgggaagccaatgtgcacgttttcccaccatattctgccaacggtgcactattctcaactactccatttatctctacggggcaaataatggatgtgttccagcacccactcaatttctgtgttttcgtctagctgaaataataatagatgtaaaatatggctctctgtctaaaattagcctctggttagacactatcagctaccactcaacacaaggaaattttacacagaaataaaatgattacataggtagaatgaaacatgaaaa

SEQ ID NO: 96134 - DNA, 677 bp, Homo Sapiens
  misc_feature (226)..(234): n is a, c, g, or t
gtgacacaaggacctaaggtctctctcttctcatcttggcacttcagaagtctccccaatcttgacaaagccctggagaaagggccgggcctcccgttgataagaatatcactgcagataaatggaggtttcaaattgaaagaaaggaggagggcctcctgttgataagattattgtcactgcaggtaaatggaggcttcaaatagaaatacatttcagttacagnnnnnnnnnttatctttgttacacatttgagtttgcaggcctaaggttactcccgctacactatcatctgtaaccataacgcactcaacattttaagctaactataaggattgttgcttcactcaaagatcctgaggttttattcactaacatttttatttggtgactatagttgacaagaacaaagctgtggggaaccaacaaacactgcaatgcctggcattgtcacctcactagattgtgaattcctctgggacagggtccgtacattttcttagaatccctcacttagccattagcctgcacagtgcttgtacttagtaagtgctcagtaaatgtttgtggaatgaatgcatgatgaacaaaatacatactgaggactcttggtgttgattcttgttgataatgtaatagttaagatatgttataaatatgttataaatattgtatca

SEQ ID NO: 96135 - DNA, 817 bp, Homo Sapiens
  misc_feature (181)..(189): n is a, c, g, or t
  misc_feature (568)..(602): n is a, c, g, or t
actggcatactgttatacctcatttttaaaaatcaactgaatccaatatttcctgtggcaaataacactttcctcatttcataccttttctcctctcttccatgccaacatttctccacccacaacgtacactttttatttctccatcaatatttgaaagcgagtgatttgtgaccaggannnnnnnnncttagggttgcatttataatttacagattgccttccttgggaacaagtatttttttgtatgatctgtctaaaaacctctcacctgaattttgtggtagaaagtctgtatttgttgttgtgagcgtgttaaattgataacaaaccaaactacttgatagctaaagcagattgtttcgggtggggagaaaaagccctaaatcagaatgtttatatttgcctaaagatgtccttaataatacaatatgctttagatcttgcttatttagtgattgtataccaggaaaacaattagactcaaatcagtgatgttcttgttcttggtgttcatgaacatatatcaaagattaaaattgtcctgtgtttcttgtttcaaggtacnnnnnnnnnnnnnnnnnnnnnnnnnnnnnnnnnnnaagtcttaaatgttttattagtctacagctaatcagtttattgtaatattgtatgtacagtgagattaatgtcttgcgttttcatcctttgtgaattaaaaattctcacttgttttgtaataacaaagctagtaatattttcctgtcttgacagcttggttttatagtagaaaatatattaaaagctgaaataaattatcagtggaattttaaaa

SEQ ID NO: 96136 - DNA, 641 bp, Homo Sapiens
  misc_feature (31)..(31): n is a, c, g, or t
  misc_feature (576)..(576): n is a, c, g, or t
cctcctccccaaagagcagctggagacagtngtgaggatcatgacgacagtgatatcgaaaatttgattgaccctacagagccttctaatagtgaatactcacattcaaaggattctcgacccatggcacatcccgacgaggaccccaggaacactcagacctcccagatttaactaaacaaaagaaactctccacctagcactgtttttcttcattgcttactgagagggtttttgagaacttaatctggggggagaactgctttctcagataccttaactcccgagaagagagtccttgtgcacagaacttgtgggagcctccatccgctgctctttacctttggatacagtgtgcaagtttcatgacagaatcattaagataatcaaattgtcctaattctggtgcgattcatggatatactggtaaatttaggcaaagtgaaacttatcagcgtagtttctgttctttaaaataaattggaaattagagactaagcacaattagtctataaatgttctataaatcaaaaacttacctcttgcactatcatgccttgaaatttactttttcanagggaaacaagtttagcagcagccttcaaagaacttctttctatgatgagccaaattcatctttg

SEQ ID NO: 96137 - DNA, 1118 bp, Homo Sapiens
  misc_feature (982)..(1056): n is a, c, g, or t
gcatagtgacactatagaaccagctttgtcaaaaagcaggctggttacgggtccggaattcccgggatatcgtcgacccacgcgatcgcgtgacgcgctgggcgcagccgggcgccactcgctttgaagtgcagacgaggaggcgcgggcgcgagcgtgtgtgtctgtggggctgctgtgggactgtctgtgctaggagatgcggggaaaacccggcgtggagcgcctgcagtccgccgtccggggtcgcgcccgccgcggggctcaggagggaccggcacgcaggcgcgcacgggcgcgcacctgtctcgctagaaccccgcgcgccccgccgagccacttgccctccaggttgcccagaccgctggagcctctgcgatccacgaccggctgcttcctgcgaagtttcacaaacaagatttgattgaaaatggcccatggagtacaaccaccttgggaacatatcctcgagacagacagttgaggcttattgcctaaaccacaggctactgaaaacttggccaaaggcgactactctagactggtgacttcaaaagtgctgatgaatacagtgaaccatgaaagatgcattatcggtatgggaacattttactatgattgatgacccagattgggcaaggtagttcactcccagtggagattgaaagtttcactggccttctttctttcaacattcttgtcgagacagaattccacttttatttggccaagtggtactaacaaatcactttgcatttgcagcataatgaattcattagcaacactggggatcaatgctatacataatattcctgagtcaacattaactcttagtaaaactgccgtcagtaatagcagagacagaagaaagagacaaaaagcacagagagacagagaacggagggggagcaaaagaaagagaccccagaggaggcccaaaaagaagacagaacgccaaacatatgaacaaacgggaggcccnnnnnnnnnnnnnnnnnnnnnnnnnnnnnnnnnnnnnnnnnnnnnnnnnnnnnnnnnnnnnnnnnnnnnnnnnnngacaatagagcagacacaagtaggagagagaaaagaggaaaccacgaaggacggacagagca

SEQ ID NO: 96138 - DNA, 467 bp, Homo Sapiens
ggactcgcttcctccaatgccaaaggaaaatgtctataatctcactcttcagcgggaagcgttggactccgcggtggtccttgactacacacaccgcagtgcacaccgggaacgtattccatatctctgagcgcctggtggggaatgtggactgtgaccctgactgaatgaaatgtatcatcagcatggattctgtgataaattacaagatacaaactcaaaaggaactgctttctatgtgcctcatattttaatgtttctcccctttgtgaatgcttaggtgagactgtagtcatgaaaactgagtaaagactttattacacacattactgaggcttctctccaatgtggacattctgaagttgaagacttgaggcctgaatgaagcacataccaccctcctcatacttccgtagtttctctcccgtgtggagcttctgaagcataataaaattcaagtgatccag

SEQ ID NO: 96139 - DNA, 876 bp, Homo Sapiens
  misc_feature (286)..(318): n is a, c, g, or t
tatcagaaattctctcaccgtgatcaactggtttctgaaggtttttcttggttcattaaacttgcataataaacatgcaatgaatggtttctttttgaaaagtgtattttttgcagtctttttgttttcatacaagatttcataaagttgcaatgttgcatcagagcattaccaaaataatagcaggagcatatgggggaggaaacagctcttccgaaacagagcttcgatgctcccagaaaacacacaacgctggcaattcacaaaatcagcaaaatgtttccannnnnnnnnnnnnnnnnnnnnnnnnnnnnnnnngggtagggttttggtttttagaggtgattgggtctgagtttaatttagctggtcttcatactgtttccggaagcaatcccctgctgggaaaaattcccaacacctttcttgatacatcttccagacataagattcctgtcctgtgtgttctgtttcatctttgtttataagatacatcagaaaaaacaagtaattagccaagttgtgctcctgtaaagtgtgggtttcaaagccatgtggaactgtgtcgaagtaatcattgcctatcccacaagatgaagcatttggtctccatgtcttctttgacttggtccagttggtcccttagttctccaaaagcatcaagaattagaccctgaattatggccaagagaatgacaataacaagaagaagaaagtgatgtcaaagatgattcgatagatctcatattcatctcctgctgggtcttcgatttcatccccgatccctcctccagcacgaactccaacatacatgtggaacatatagcatgttagcatatcgtcacatttcatattctggtgtatcaccatcttcaa

SEQ ID NO: 96140 - DNA, 446 bp, Homo Sapiens
gggtgccatgagactctgcccactactgccctgctggctgcagagcggctcagatacggctgtcatccaagccagggagcctttgagccagtgctgctgagaaaattgggaaaaagcccactgcccggttcccagcacatcttcactgttcctcgggctccctccatgtctgtttccctctgagtgtagtagattggggactcagaaccttctagaacagaagttatggttttgtaaggggaagaaatatggtcaagtgcacatctataatttagagtattaaatttccttgtacccttatgatttattctagaaggtcagcacattgattacaaagctaatgttggctaacattaatccttcaggtatgaggtaagaaataaaaaattactttcatgcttcatttctgcacaaaatttcactctggaaagatatttcatttgaaa

SEQ ID NO: 96141 - DNA, 530 bp, Homo Sapiens
gccaccacggaaaccgttagtttcacattttcctagaaggaattgaggggagtggggtggaccgcgatgcattttaaaggttgggaaagagctaagccattggattccttttcttgaaggaaggagtggaattgtgtaagataattgatacagataactttttcaccctaaaaaattctaacacttctttcagcagttaaatgccaaatttagtgtgtacctgttttacttcattctttagctgtaggttggagtggtgtgagcgatctgcagaactggcattagaggggcagaagaagtagacctgataattaaagtttatgccttaacattttagatctggtttctgatatgctctcttagtaaatctgagtgtgtctttaaaaacgtaaacccaaagcaatttaaagtttctctttaaactttgcaactcgcgaatgagaagattgaaattatttgtaggtaattgcactattccgattttttaatgtatgaggcaaacaaataaattctatgtacagtgtgctgtg

SEQ ID NO: 96142 - DNA, 574 bp, Homo Sapiens
  misc_feature (35)..(35): n is a, c, g, or t
acaccatgtcagtcaagatctactttctgtgtaanaatgaataagtcttgcacataatccattcgtgttgcataaggttgcaaaaacaattaagtgggaaatgactcctaacttatgtgtctactctgcctagaaagaaagttttgaaggcatctatatatatttcataacaatgtctgttctttatggatttgatccataaatatttatctatctgaaaactttgatacttggaatgttttccttagagcatttggtgctccaagaaaaaacatttggtgctaagagttgcagcactgatgcctttccctaagttaattctattttaaaaatttatatttccttcccaatgagatgcagagtaaaatttgagaccctccattgactagggagcagcatctgtcatctatggttaattactattttgacaaaaatatagaaggtttaaacccccatgtatttcagattgttagagaaagaagtagtttgcttatatttcccttgaactttattctaaccatttaaataataaattattcaatatttgttataataaatccttactagatacaaa

SEQ ID NO: 96143 - DNA, 414 bp, Homo Sapiens
atgacacattgccatcttttagaattttttactattcaacagaataagctgatgtttggtggcagaggagttattagttgcgtgaactgtcaagagattgcagtgcaggagggcaacagaaactgtacaaggtgcagacttgagtcatgtaagatctatgtgaatgaaccaaagtaactagagtcagtcaagcacaaagctgtgaaaagtagtgtgtggaaagaatcatactgaattttaggaacaagtacctgactatgatactttttacagagtgactacaagttgtaggacagtctttgtgtgtgctgagtgtcaacagctgcctgcctatgtgttgatgttttcatcctttctttgttgaatgagggtataaccatcaaaaataaaatacctttcaaatagtcaaaaaaa

SEQ ID NO: 96144 - DNA, 1011 bp, Homo Sapiens
  misc_feature (49)..(49): n is a, c, g, or t
  misc_feature (973)..(973): n is a, c, g, or t
aagaaaaacatttgtgtcaggtattcagacatttaggttacaatatatnatcagtgatctgcttctgcaagaattatgaacaagatgctgtagtacttcagaatggctctcttctgtgtataacagcagtggtttgctatgctgcgggcagaacaggacagtgaggtggggcctcaagaaatcaataaagaagaactagagggaaacagcatgaggtgtggtagaaagcttgccaaagatggtgaatactgctggcgttggacaggttttaacttcggcttcgacctacttgtaacttacaccaatcgatacatcattttcaaacgcaatacactgaatcagccatgtagcggatctgtcagtttacagcctcgaaggagcatagcatttagattacgtttggcttcttttgatagtagtggaaaactaatatgtagtagaacaactggctatcaaatacttacacttgaaaaggatcaggaacaagtggtgatgaacttggacagcaggcttctgatcttccctttatatatctgctgtaacttcttgtatatatcaccagaaaaaaagaattgaaaataatcgtcacccagaaaatccagaaaactgaagatttcatcagttggaaacagtagcactttgaaaactttttaggccagctttaatttaatggccctactgatattcacatcgaaggtgactaacaatgacaaaggccttatgaactgtacagacaatacagaagattattcttatcctcattgcatttctatgcatatgcgtaagaacattttaaagccaagaaaatatctgtcaaaccatttctgttagaacgatgtcaattcatgcttttaatttagcatcaatagaaaattgctgtaggtaaatctcacatttatctgcaacaaaatatagattttattttttagcttaaaactttggttcctaccctaatggttagtgggacctcagnttaatccatctggaaaaatttccttttttattttggcc

SEQ ID NO: 96145 - DNA, 608 bp, Homo Sapiens
gagagctcctgggcaggctcggcagggcaggcagctccaggagggcttcgaacctgtggccaacagttccagtggactgcgtggacccgtgagctcaggagcctcagacgcctccctggagagccaagctggtgttcgaggtggcgcctccagggtccaccctgctgcccaacagccccgcggccaccagagggccgtccctggcccggctgtgtgccctggtggacctgtgtctgggctgctcccgctgcacccagcggctcaatgaaagcacctacgtcctccgtagggtggagcatgactgctcccgcgagatcctgctggcccgctttaagcaggccaccaagagcaaggtctggcgcgtggtgggctgccggcccaccttcccaaggcccctgtgctaccaagtctgccactactacagccctgggctcggctgccggcgccaccgaaaccggtgcacctttgcccgcagtcgcgaggaggccctggtctggaccttcgagcgtcagcacaacctccagcgcctatggctgaaggcggaggtgcagggcagcggggcccagggaggggcaggccgggcggccgacgccatccttacggagttt

SEQ ID NO: 96146 - DNA, 537 bp, Homo Sapiens
  misc_feature (20)..(20): n is a, c, g, or t
  misc_feature (35)..(35): n is a, c, g, or t
  misc_feature (71)..(71): n is a, c, g, or t
cagagagaccatttggtctntgtgcggatttctanctggtttatcaatgctcgcagacgcattctccggantatgcttcaacagcgtagaaacgaccccatcattggccacaaaacgggcaaagatgcccatgccacccacctgcagagcaccgaggcgtctgtgccggccaagtcagggccagtggtccagacaatgtacaaagcctgcccctgtggcccttgccaaagggccagatgtcaagagagaagcaaccagatccggagtcggcccctagccagaagctcaccggaatagcccagccaaagaaaaaggtcaagatttctatcacttccccgtcttctccagaacttgtgtctccagaggagtacgccgacttcagcagcttcctgctgctagtcgatgcagcagtacaaacggctgccgagctggagctagagaagaagcaagagcctaatccatgattgatgatgttccaaaaacccaagtagtcagtcccttgtgtactgtggtaaacctgtttatgttcaccccaaa

SEQ ID NO: 96147 - DNA, 571 bp, Homo Sapiens
  misc_feature (59)..(67): n is a, c, g, or t
  misc_feature (510)..(510): n is a, c, g, or t
catatattataaaatatttccaaatattgtaaaatctctcttcaaggctgattgccagnnnnnnnnngtaaacaaagcagagagcctgtgtgagaagatgtcatggagggaggggatgtaaagtgaatgtgcacaggggagaagagaactgaacagatacgagtccttcctctcctttctcatctccctgggaggtcccacactaagaggcaggcagaagcagcaaaggagagcgccttggcctagacaaactttccgaggctgcagtggcacctggcaggctggggacaatgtgacaggcctgctttgccttcttctccatgacctctgggagaggagttcactctctttgctccattgagttccagggctctttgcccaggctcctacaagaatgccaggctgtgccaggtgcggaggtggtatttaccatgcagatacctctgtacctggatggaaataaattgagaatcttctgggtcactttgagtccagcagcataaaacattntgataggttactgattcaaactgaaatctgatgaactcaagtggtggtatttggggggaca

SEQ ID NO: 96148 - DNA, 519 bp, Homo Sapiens
aattcccaccactgagaccactgttagtcttcagggggctgcagccatcgcccccaactcctcggaggagcaacgcgcgacaaaatggctggcagccatcttgcggcactacaaaagatgcgcatgcgccagatccagtgagccattcactacgcagactccgacaccaaaccgtatttattgctgcccatagaagataacattcacagccgcttgaccatttaggttacaggaaaaggaaataaatgaggaagtgaaaggaaattttcctcataaaatttttcgaggcgaaaaaagaatggcaagatgtgacctcattttcgccagctatgatacaatcttaaaattgcataatacattacagttttcaagagtcttacgtaactattatatgaaccttatacgaaccattttatcgcaggtatctatgtaaatcctctgagctaatttaaaggctcctgtgttcccactaaacatatacagttttaattcttttaacgtctcctcactgcggccgca

SEQ ID NO: 96149 - DNA, 567 bp, Homo Sapiens
actaagtactatttacttctgttactctctaatttgttgatccttctactgtttgtaattttttaaaagtccttgtttttataatctatagtagactatgactttataagtatcaaaacctataaatctttagtagtttgtagagaaaacccactaaaatccttcatttaagttagttgcctctgcagactagaaaagtaccattctgtttcctgatatcctgtcttagagtcggtatgtggagagcaccattaactatttgtataattaaaatgaatgtgctaagttattttccacatttttgtttttggtgctgtaatatcaagtgctttgttttgtgttctgatgtatctgcatttacccttcagatgcaaataatggacctaaataggcttttattttaatatcagagggaactttatgctctaaggatacattctttttcttgctatatatagttttggtaaatactgaataagtgtgattagtacttaatagatctattcataatagctgtctgtaaatgacatagtatttgtaatgaataaaactatccttattttaaaa

SEQ ID NO: 96150 - DNA, 434 bp, Homo Sapiens
  misc_feature (16)..(16): n is a, c, g, or t
tggttgccctagagtntgcagtatatgtttcactaacccaagaccacttcaaattacactacaccttgcaggcagtgaattagagaataaaatcccagcacgatgttcctcactggagacaccagtccagctgaggacaatagagaagccacccttcctcaatgttcagaaaacaattcatgaatctaagggatctggaatggagatattttaaggggcttgcgaagtggaggcgcactactgcaatttcattcggagacataaaatacaacactgagaagagatttgtagagagccaggacatgcctgacgttattttcccccctatagttcgcaagtctttggtcatttatcctcaaattgattatcaaaatgaaggaagttattctcttaaatggaatatgtagtgtattaaaatattttggacgtagaaa

SEQ ID NO: 96151 - DNA, 369 bp, Homo Sapiens
caggttgtatggcagatgcacctgacagcaataacttaagcatcccctgagaatgaccttatggcctcaaaacaatgtatgtttggagttccaaatctgcaagtggccaacctagagattcactccttatctatgaagaacatctgagcccctagcccatcctgtggaacacatgctgtccaggggatcaaggccctttgttttgggttaaatgaagtttgccaggtggaggtgattagggggaggatgctaagtgaaaatgctataaaaactgcatggtttttacaaaggggaatggttctccagtgcagccccccgccactggagtgccctgcatggaagtccccttaataaaccatccgtctcctt

SEQ ID NO: 96152 - DNA, 284 bp, Homo Sapiens
gaacggtttactgccctttataatcagaggatagaatttggggcaaaaatacctactggaaagtagaaatcccagacagagaaggagaaaggagtagcccaaattctgtatataattgtctaaatatctggctggcttctggaccatgtatatattcgtaggtcagactccaagcagctcagctaaggctaaataagctgaacgaagatttgagctgcaatgggtgtaggggtaggagattttgcatttgactccagcctgggtgatagagtgagactgtctcc

SEQ ID NO: 96153 - DNA, 673 bp, Homo Sapiens
  misc_feature (85)..(110): n is a, c, g, or t
gtcatcaaagatatgtgcgttttttataaaaacactttcttgtcccctgctgactacctctggaagcttcttgttgacctctggnnnnnnnnnnnnnnnnnnnnnnnnnncatttcttagggtggtggtggtggtagtgaaggagagagggtcttctggcggcccctgcataagcactccccctcaacatgagcatgattaactggaaccactgttatttctgtggtgtagacaaaatgagccatgtagctattaacatctccctgatttaaaaagaaacacggaactttctttttcctgctgtccttagggaggaaaggtgtaaatataagagactgtagctagtatcttggaagtccccaggagacaggcgtttcctcttggtcactgactctctgggtcactgacgctccttgaacagcagggccaccgtgtctccctttgaagcaagtgatccttaaggaattttccaggtttagtaacttctgtctagctccgaacagacgtaatggctgcaaaagtgcttcgttgaagaagataagatatattcatttttaataaacatacttatgggcgagaaacatcggactggactgaatcaattacaggaaatctattggctcttacggagcaaataatccacgctgcctgaaagaattaactatataaatta

SEQ ID NO: 96154 - DNA, 554 bp, Homo Sapiens
ggcttgggctcagcatgggtccccagccatcggcgggtgaacccacccacactgcgcatgaagaagctgaactggcagaagctgccatccaacgtggcacgtgagcacaactctatgtgggcgtccctgagcagccccgacgccgaggctgtggagcccgacttctccagcatcgagcgactattctccttccctgcagccaagcccaaggagcccaccatggtggccccccgggccaggaaggagcccaaggagatcactttcctcgatgccaagaagagcctgaacctcaacatcttcctgaagcaatttaagtgctccaacgaggaggtcgctgctatgatccgggctggagataccaccaagtttgatgtggaggttctcaaacaactccttaagctccttcccgagaagcacgagattgaaaacctgcgggcattcacagaggagcgagccaagctggccagcgccgaccacttctacctcctcctgctggccattccctgctaccagctgcgaatcgagtgcatgctgctgtgtgagggcgcggccgc

SEQ ID NO: 96155 - DNA, 749 bp, Homo Sapiens
  misc_feature (739)..(739): n is a, c, g, or t
ctgtctggaatgatgacacacagtcctatgtactcaacttccatgggcgcgtcacacaggcctccgtgaagaacttccagatcatccatggcaatgaccaaacccagagatgtgatacaattttgatctgacagaacaaatactggaatattttgggcttttctaataatcataggagcacagacttgtaaaagaacaaatgccacagaaaatgaggttaaaggacacaaactgggagtgcattgaattgtatcactcactggattaagaaccaaaagatccatgttcaagtcctagttctgccttgttagttgtgaattttggggcaaaacacttaaacattgagtaaacatttcttatgtgaaactgaaataatggctatcctaagtacctcatgaagaggaggcaggatttaaagagatgatggatttgaaataattttatgaactataagaagttttaatgtagacaatgatttttattgccatattagattttcattgatgtaatatgattaggatgattctacttaccttaaatagaatgtacagtatatataaaaaaatcccaaaaccgtagattggaataatctgccccatcagacctcttccactacctcctcctccagcacctccacctgatcctttggcctttgcaaatgcctcggcaaggtgagacctctggaaacgagccccaggagtctggccatctgagggtgcctggtgatgatgcatcatangtggaaatcg

SEQ ID NO: 96156 - DNA, 1024 bp, Homo Sapiens
catccttcagctattcttcagcagaaagttcttttggtcaggggtaatccacccaagattgtttcttgcctacgcttgatacagtctgaaaggtcataaattgggtaagtctcttcagggtaaccttcccagtcctccatgtaaggggcctcctcagcttctttctctggagaaaatctgtcaatgaattttccttctgttcatgaccctggtgatttctcggagctgatgtagcaaccgtttctcttggtcagaagtcacagtctgtgctctctcaccattaggtcccactctgttgattaatttttccatggctgcttctgtctccttcagtttttcttgcagttgagcaagctcaaaactggtaattttcctgtgggtgtttccaggcatggcagtatagcatttcccatcctctgcagttgttttcccctttgatagcttaaatagaatgtacagtatatataaaaaaatcccaaaaccgtagattggaataatctgccccatcagacctcttccactacctcctcctccagcacctccacctgatcctttggcctttgcaaatgcctcggcaaggtgagacctctggaaacgagccccaggagtctggccatctgagggtgcctggtgatgatgcatcataggtggaaatcggcccaattttccttcaggtgtcggcggcggctcctgccgcttcccgcgggacaggaaggccttgggcagcagcagcgacagagccaggacaagcccagaagccagagcgactctctgcactgtggagtacgccatgactgctcacggtggtcgcaggtgcagacgccagccggaaccggaaccggaaccggagcactggctgccgctcccgaccgaaccgcgggcggccggacgcgtcgcgcgagggacatagctgcgaggcgcacgcatcttcacctccactgtcgggagttgacctgctcctcccgcgtggttacccgtcgctgtaaatggtaccctcgccttcccgttcatactaactaaaaac

SEQ ID NO: 96157 - DNA, 419 bp, Homo Sapiens
caaacgctgtctagcatactaagaggatgttagcaaacctgttccatggacactaaatggcagttgtacatctcccctcatcagtcatagtgacaaccagaaatgccctccatattttccagtgatcccagtcttcaatgcgtctgtctcataatttgtaaacgtttattatcttgaagtcattgttaatctgtggtgaaaagtaattgctaaatagaaattctgagaagaaaaaggcctcatccttttcacatgatgtaggaaggtctgttgcatgagcaatgggaaatccagaaaacatagaagatgcatatgttgctgttattcgtccaaagaatactgccagtctcaattctcgggaatacagagctaagtcatatgaaattttgttgcatgaagttcccattgaaggacagaaa

SEQ ID NO: 96158 - DNA, 656 bp, Homo Sapiens
aaatgttaaatgaaataagccaggcacagaaagacaaacaccacatgatctcactcatatgtggaattttaaaaagttgatctcactcatatgtggaattttaaaaagttgatctcacacaagtagagggtagaatcgtggttaccaggggctagggagagaaagaaggcagaggcactgaaagatgttggtcaatgggtataaagttacacctaggaagaataaattttggtattcaccacagtagggtgactatagcaaataataatgtagcatgtatttcaagatagctagaaaagcaggtttttaaatgtcaccacaaagaaataacaaatgtttatagtggtggatatggtaattacgcctatttgatcattatactgtgtgtacatgcattgaaacaccacattgtatcccatatatatgtacaattatgtgcccattatacatttaaaaaataaattttaaaaaccttcaattaactcttggtttaaaagaaaaatataaaccaaaactacatgatctctaaaacaaataatgatgatgtaaacacttcatatcagaatccatgggataaatataaagcagtgatcagaggaaattttataactaaacactgctattagtaaaaataaaagattgaaaataaattgatt

SEQ ID NO: 96159 - DNA, 480 bp, Homo Sapiens
  misc_feature (238)..(380): n is a, c, g, or t
  misc_feature (382)..(385): n is a, c, g, or t
  misc_feature (395)..(408): n is a, c, g, or t
gtaaagcaagcttaaaatgtttatgtatacatacccagcaacttttataaatgtgttaaacaattttactgatttttataataaatattttggtaagattttgaataatatgaattcaggcagatatactaaactgcttttatttacttgtttagaaaattgtatatatatgtttgtgtatcctaacagctgctatgaaattataaaattacctaataaaaataatttgaaaatcttnnnnnnnnnnnnnnnnnnnnnnnnnnnnnnnnnnnnnnnnnnnnnnnnnnnnnnnnnnnnnnnnnnnnnnnnnnnnnnnnnnnnnnnnnnnnnnnnnnnnnnnnnnnnnnnnnnnnnnnnnnnnnnnnnnnnnnnnnnnnnnnannnntttggtgcgnnnnnnnnnnnnnnaaaaaattttcaaaaacatttttggggcgcgcgggccccgaaggaaaaggaaaaggggccaaatggggttcc

SEQ ID NO: 96160 - DNA, 911 bp, Homo Sapiens
  misc_feature (25)..(25): n is a, c, g, or t
  misc_feature (98)..(98): n is a, c, g, or t
  misc_feature (773)..(781): n is a, c, g, or t
gctccatacttctttcactactcanatggcattgggctgagtaagtaaccatatcacctctcttcttagtaaaaagccctatgtgaaaagatccaagnatggagaggaagaaacgctaattcagcatgtgttcattctgcattgagaaggaactgatacatctgatgcatgctttgagaccagaagaaaagacttacctgaataattactacattagggaagctactgtctacgttaagataaagggtattgccttggctctatttggcatggatggagcccagttggaaaattcccaaatattacaacaagtccttgaacccaggccatgtggttagacgttggtgttaaggttagaccttatgttagagtcatttctgatgttccagcttctagccatgtagtgctctcagtcttcataccccagaaattattggtatatttgtagataccgagaatgatccctcagtctgagaggttagaatgatcatctgtaatctgagggttaatttctaggcaggtggagagagtggtaaaaaagaaatgaaattgacaagctaggaaagaggaggcagaaagatttggaaaattcacagagtttcacccttaagctgtagagagtgggtcacatttgttagccacggaaacatagaaacatacacaaggccagaaaaagaagaaggagctcaactaaaagtggcatagagaatacacatataaaaacaatatatttgtcatatgctcctagagaggagaaaggggtgattgaaagnnnnnnnnntacttaaatatttgtaattgtgaggggtttcttttggaaataattacttttgaaccatgtatgtggtatgtatattttcagtgggttaattataccccatgatacctattaaaggaaaaccagtgggaaa

SEQ ID NO: 96161 - DNA, 432 bp, Homo Sapiens
ggaatatttcaatccatgttggttgaatccacggatatggaacccatggatatggagggctgaccgtatagttggaattgcagttaacagtcaatgactgcagaactttctggcatctagttcgtggggtctccgggggcttttcatgtttaacttccaatctgtgaagaattgttgcaggtgatcacctgccttcctaccccacacaccaagcacaggagacccctgattaacaacaaaccaaaagtgcatgctgctttaaggaagtaaggatagaactcaggaatgcagtttcaaaagatcacaggaacttcaagagaatcttcctaccatatttagtgctttctccaattttcggagaatcttcaacagaatggtaggaagtaaggcaaatacatttgattaggcttatgaggagaaattagaggaaag

SEQ ID NO: 96162 - DNA, 777 bp, Homo Sapiens
ccgctgccacttgcacgggggctcttggcctcagctgctggccccaccactgccgacacggctgcagccacctcggccaggcccaggagcggggcctccggggcctctgattctgtctggtagatggacagtccgtggtcccactgggcgtgacgcagcagcttccaggccactgtgaactgtttgccacagcgcaggcagctcaaggccttcagctcctctcgttctgagccctggccgcggctggggcctctgaagagctgacagcccagcttcttgtggtccatgaaggcagtgatggcctccaacgggaaggtctgcaggcagcggccgcaggtcaacagatctgggtgtttgtcggtccagggctggcaggtcgggatagttcggggtcaacggcgtccacagggtccacgggttccgcgggccgagggcgaggagggcggccccggcgggcatggggccaggggagtggtggggttcgccgccgaaccgccccgccgaggacacctccttcggggagaagggccccagccttggggcctgttggggctgcgcgtctggctcgggcttgagttcgatgacgaggtcctgcatttccatctcgtcgtctgggttggcggcgggcgcgggctctactcggcggggcgcgctgccggccttgcggcggacatgagtcgcgggccgggcgagcgagcgggcgggcaggcagcagacgggcgggcgaggcctcgtgccgaattcacacacccagcctcgtacctagccgtatattct

SEQ ID NO: 96163 - DNA, 1027 bp, Homo Sapiens
acttcattaaacctcagtttctcatatgtaaaatgagaatccaaacagtattattaacatttactacccacttgctatttgccacatactgtattaaacagcatagcaggcagttcttgcaacaactgcttgagttgggtgcttgctctattttacaaataaggtaaaagaggcacagcacaatgtaatatattccacaacatagaataaagggcagaatcaagatctgaacccaagcagtctcacttcacaaatggctgtgcatttaactcctactcacatggtctccttattgccttggcaataaagcttcccgggaaatgggatgctgtgctaaaactcagaagcattatcttaaaaagtgaatttattctcccttttgcctggtccttcctctggtggaaatatcaataaacaaaggaaaggtgggcgaacaggaagaagccagttggtttctttagtagacattgctacaacaaaataacttgcttcttcagaaggctgtttatcttttctcttgtaatacttcatcaaaaagtttgctcttcttgggtctgaacaataaagttctaatgaacactgaagggtctaccagcactcaggaatgcaaactaaaaacaaaattctaagctccaaaaccgtctgaatggacccctcctctcaactaagggcattctaaagtaattcaggccatgatgggaagagggggtcagacatgtctcattacacattcctccctttggaactcaggaacaattgagcagcattaacattaaaacagatcttaaggctttttgtaacaataagacaccaaattccagctttactctagtatggcatcacaggacagatagcgggatctgaaagaaataaaagcattttactctaaaatatatttctttacatattttgaattggccctgcaaagatgtctcttaaggggaaaatctatattctgtagagaaccctcttccctgtccaggcggacgcgtgggtcgacgatatcccgggaattccggaccggtcc

SEQ ID NO: 96164 - DNA, 491 bp, Homo Sapiens
gcctctagaactgtaaacagccctgggacaaagaacagactacgggtattgccttcttaatcaacaataaagtattagttggcttccaggcagacaccactgactttcaagagaaaggcacgggagtaaggaagtaaagaattcagggcaaacgtcgagctttcctctgggctccaatgtaaaagaagtggatagcggctgactagtgtacatattatgtatgcagactttgaaggaatcccccttgtttttagctgttcttccattgctcctggagactctgagctcagagattttctaggctctgatgggcagagtggctcgtttcctccctgaagtttccttcatgccacattctggattacaacctcctccaaagagtgtcatctgtcaatataatgtcatctcttgatttctctgttttcttttcttcactataataggtaattctatgttttagcagagctaaatacatcgccttcatcttcaaa

SEQ ID NO: 96165 - DNA, 383 bp, Homo Sapiens
gcatgcaccaccatgcctggctaatttcagaataatattttcatacacataaaatatgtaggattacaaagtaagctagttatatttatatacagttgtcaaaatatttttaaaatgtataacgtgatactatgtgtataggtttctttattaacatattgaataaaaagatcgagggtaggcctattaaacaatggtaaactgaagagagatgagtgtaaacaatattttaagatacctgtggcaaactgtaaagggatatgaaaaactctgtaatttctattggcactgctgatacaactgcactttgctacctttgttcataaccaaggaaatagaaatgactgaaaataaagttgtattctattccaatccaaaaaaaa

SEQ ID NO: 96166 - DNA, 521 bp, Homo Sapiens
gaaaaatcaaagatgggatgaagaaaggaattaatgaaagaatcagaaaaaagggcggatgtgcaatcttcacctgtttattcggtagagggtgccatcttcaggtagcccttcacgttgtacagaaaacaatggagacttctcctcctggggcagtggtgtcacccttcctaagctacagagatgttgcttcaacttacagctcagataacaagtgccacttccaggctaaaggaatccactcagcaaactcccagtatgaatgtttctgctctcggctggagaaacagaagaagcattaatgaaggagagggattctacagccgcacagtccaataaaactttctgtggggatggaaatgatccattatctgtgctccccaatatgccagttgctagctccaattagctaccaagcacctaaaatgtggctagcgcagctgagaaacagagcctttcattttatttcactttaattaaagagttctagagctcttgcctctagagcagtgctttttagt

SEQ ID NO: 96167 - DNA, 437 bp, Homo Sapiens
ctccataatcatgtaagccactttcttgtagtactggtaaaagatatattagaccaatctataaaacagatagctatgaaagagaaaggtgacaggcacaagcctaggcaaatagagaagggttcctggagagcctctgacttgcctaggtcattgtgcacacgtggcttgcctgaatgaacatgcccactgtgaaagattccatttctcaacacatgtgcagtaagggaaataaatcaatgtggctcagactaagcgcccacacatggggtggagccacgaggagtttgctccttatgcaggggagaagccgtgcctcttcagctcgtgtgtggtggcctggcattcaatttgtgaggtgtaaaacctgcatgaaggacccctctttttgtggagagctttccttttgcctaataaattctgccctcctcgccaaa

SEQ ID NO: 96168 - DNA, 545 bp, Homo Sapiens
  misc_feature (397)..(406): n is a, c, g, or t
atcaaaaagaaggaaaaaatgcttaatgagtgaagatagcactgaaacatgttgacttttactctaggtttgtttttagatggggttagtattttcccctacgtaatgtacatgtctttaggccacagtattaggagtttgatttttccctgccccaccctcaggtaggtggcagtggtcattgtagcttaatcagacccctgttaagttcctgggcatttcaaggtaaattcacgtcttccttctcacagaaattgaatagacctctcacacacttatttacctcccccaacaacctgtatccttggccctttctgattttctctgcttggtctctttctactcttgacagctattcttacctacttcccactaaacatgcccaattttttaattnnnnnnnnnngaattcctatatttccttccctattagaatcaaagtgtcactcactcagagtgtgaacatcctgatttacaccaaatccactggtcaaagaaatgaataaagggaaaaggaaaaatgtggaaggcatgcagggaaaaaa

SEQ ID NO: 96169 - DNA, 479 bp, Homo Sapiens
  misc_feature (58)..(76): n is a, c, g, or t
ggcacgaggggcagcaagctcagttcagcaagacgcttccagttacttcctgctcttnnnnnnnnnnnnnnnnnnngaataaatctctcatgactctatatccttcttgacacctaaccaagagaaattgagatgacagttaattgcaaattaataaagaaggccatcatctactcagcctttacctaagtggaatcctgtcttttgcgcatttaacttacaagaatttacctgcatcagtcagttatgtgaagaagaaaagggaatatatttcagcgtacacaaggcccttgtgctttttaggaggagttctttggagctgaagtgggtctgagaagagacattctcatgatagtggagacagtattatagaagctggaagtgatcatttttctctgttatttatttcacttattacctcacacacatattgatataaaactgatcaataaagttagaatttctacattatctagaaa

SEQ ID NO: 96170 - DNA, 770 bp, Homo Sapiens
  misc_feature (134)..(216): n is a, c, g, or t
ggggggaatccaaccccttttcctgccccggttttctttggaaaccgttttggcccggttcccttccctatggggccccggcgccaaacgaaaggttttaaaagttttttgagggccgaggcgccccccaagannnnnnnnnnnnnnnnnnnnnnnnnnnnnnnnnnnnnnnnnnnnnnnnnnnnnnnnnnnnnnnnnnnnnnnnnnnnnnnnnnncaatgctaaggaaaaatttaatgatggaaatatcgacaaatattcaacatcatttaaaaacaaagtagcttctcttatttcacatagcttagtttgggatagaaatagaactaatgtttacaatgattcttacatttagcattaatcagaaacgagggtttgttaagtgcccttgctgggtcccaacccccagagattccgattcagcaagtctgggatgcggcttgagaatttgcatttctaacaagtttctaggtgatgctgatgccaatagtctgtgtaccgtttgagaaccgctggattgattctttgacagtttttgaagtccgctgctcaccatatcacttcatcctcttataaactttcactatgtgattgcctaagagcccctgcttgttggctgctccacattttcacacagttgtactatttctttctgaaatgacattgtttgaggggacagtgggtggaacgtgtgagctcctcactgaaggctgcctccagaattccctgaatggactgcctggctttctcctaaaatctttcccaagagg

SEQ ID NO: 96171 - DNA, 854 bp, Homo Sapiens
  misc_feature (37)..(37): n is a, c, g, or t
  misc_feature (42)..(42): n is a, c, g, or t
  misc_feature (54)..(54): n is a, c, g, or t
atcctgttggaccagaaggtgacagctggttaccagnaatcnaatgcaccaatnttccctcctgctggagtgatgggaagatgttcaatgcactcattcaccgataccgacccgatctagtagacatggagagggtgcaaatccaaagtaaccgagagaatctggaacaagcttttgaagtggcagaaagactgggggtcactcgcctgctggatgcagaagatgtggatgtgccatctccagatgaaaagtctgtaatcacttatgtgtcttcgatttatgatgccttccctaaagttcctgagggtggagaagggatcagtgctacggaagtggactccaggtggcaagaataccaaagccgagtggactccctcattccctggatcaaacagcatacaatactgatgtcagataaaacttttccccaaaaccctgttgaactaaaggtaaagtcaaggacttaaatttttttggtaaaatctttctagggagtaagtctccaagcttatcactgctggcttctaggtgaggtggtatgaaaaattgggtcctatagtttgtgtccatttattcaccaaatattaattttataggcactttataaccaatatatacacttcaaagaaacagaaattctggccaaggagagagaaaaaggaagaattgaggaattatataaattactagaggtgtggattgaatttggccgaattaaactgcctcaaggttatcaccctaatgatgtggaagaagagtggggaaagctcatcatagagatgctggaacgagagaaatcacttcggccggctgtggagaggctggaattgctgctacagattgcaaacaaaatc

SEQ ID NO: 96172 - DNA, 156 bp, Homo Sapiens
ctttgtcctttgcataatgcatggcaaaatgagcctaaaacctatatggccatcttaattttgcttttgtaataccaagcccagtttctttcaacttgagagatgagctatttattcttttacttaatgaagatgtaagaaatgatcttctgttct

SEQ ID NO: 96173 - DNA, 564 bp, Homo Sapiens
atttctaggaaatcctgggaatcgttttctagaaaaaacgcctctgtccatatgatgacttttccatttgctttgtattctgatccgtggaatatcttcacatttgttatagtctccatggacttcccatctataggacttagacacccttgctaacgttcttgtcatcatccacccaccggatgtgcatgcgctcctggggatcctccgcgtctgccttcccacaggtgatgctgaagtccctcgtctctagcagtgcctgcctcgaggaatccatgttctctgcagtgatctggaccataacgccatcttccacaatactggacttggcaaggtatccagaagaggatttcagagcgccaccgaacacaaaaaaactgctttgagtttgcatatagttacagtagtactgaaaaatcctcgcaatttaggtttttgttttcagttttctctgttttctagtgcataatgacttaataaatattcatttaacaaaaattgaaatctcaaaggtacatataaataaacaatataaataaccatccttattacagttaactttgt

SEQ ID NO: 96174 - DNA, 504 bp, Homo Sapiens
gaatttggtaccaggtgctagaaagaatcctacttcccctcttatctacagggaaatagaataagggcccctgtccccaacatcccccaaaccttgtggcagtttttgcatctgtagactggttgggtttgtaggtccggccacagctggggcttgggtccaagctgggtgatgtagttattggaggggcattaatcctggaactcagatcgccactcagaaagttctttgcataggaggcgaggttcggcacgctgaccacgcggctgggcacgtcctccaccttctttttctgtttgtattaatggacaggttagtgcaatgcaatgcaaaaaacaaaataaagcattattgtaaaagcaaataatgctcacccaatcaaaattgtatcggagaagaagcaacaatttcatttatacacttacatgctattttttaaagcacttttccctccaatcttcattttgtattataaataaatatgtatgttcacaacctcttaaa

SEQ ID NO: 96175 - DNA, 501 bp, Homo Sapiens
gataacaaccttgcaggacagttaacagatgcatgtgaagtgcctacctcatgccagacacacagtaagccacctacagaaaccccttatcttgacatgggaggtgttccacaaggtggcccagccaatctctgtggtcctaactctcattcctcacccacacattggccatccacttactattccccaaaaatgcctctgtgtactttccaaactcagcattttacttgtggctttcccccctgccacaatactccccccaacatccctgatgaaggttttcccaacccttgcaagatgggcttgaagaacccatccttcacaaaatgtgcccttcatcacatactctgagatccttccccaccaggccttaagtggcttgggagtgacactggtctgaatcatctccatccagaacattgccccatatagtgcctggcacagcacagatggcactaaaattttgttgatcaaatgaatgaatgaatgaatggttctaaa

SEQ ID NO: 96176 - DNA, 667 bp, Homo Sapiens
  misc_feature (176)..(176): n is a, c, g, or t
  misc_feature (241)..(241): n is a, c, g, or t
  misc_feature (298)..(298): n is a, c, g, or t
gtagacagatctgagctagatcactcccaaacccctggctgtcattcagctttggacagtccgccatctttctcctgggtggtcttcaaagggatgaggcccccacggccatgtttatgcacagtggtgacatcatgataatgtcgggtttcagccgcctcttgaaccacgcagtnccctcgtgtcctccaaaaccagaaaggggaaggcctgcctcactgcctagagggcacctctcccntgctgtcctcccgagagattcaatggtagagccttgttctatggaggactggcaggntgtgtgccagctacttgaagaccgctcgtgttaacatgactgtccgacaggtcctggccacagaccagaatttccctctagaacccatcgaggatgaaaaaagagacatcagtacagaaggtttctgccatctggatgaccagaatagcgaagtaaaacgggccaggataaaccctgacagctgagacttggagatcccatcctttttactcaggcacctgcttaccgtaaatgatcatgttattgtgtattgccgtggacttcagcacccagacaagccaaaaacagagacagggaagaactcattgttgatcacactgttgccttggaacccacgcagaagtaaactcagccactttgctcagaaaa

SEQ ID NO: 96177 - DNA, 282 bp, Homo Sapiens
  misc_feature (217)..(238): n is a, c, g, or t
tacatactttcgcctaagacagttctgtatattcttctgttaacggggtagcaaaagcatatagaaaggttttggggggatgcagtgcattgctcttctgtaatgacagtaatttacttcaagacattgcaggagaaggggttaaaggagtaaaggggaggaagagaaggattcatttcatgcctacctgtacagagacactttcttgctttctacnnnnnnnnnnnnnnnnnnnnnngagacggaatctcactctgtgcccaggctggagatgccgtctcc

SEQ ID NO: 96178 - DNA, 536 bp, Homo Sapiens
  misc_feature (18)..(18): n is a, c, g, or t
  misc_feature (43)..(43): n is a, c, g, or t
  misc_feature (67)..(67): n is a, c, g, or t
tgtgtgagtctggaaccntaggggcaagcagcccaagcccgcntgaccggtgtcctcctcacggctnccaccctaaagtccattccgaccagcctgcttggggcctcttctttcgccctatcattggagatgttgacatcgctggccttcttggggacatgcttttgctcaggtgacctgttccagcccaggcagagatcaggtgggcagaggctggcagtgctgattcagcctggccatccccagaggtgacccaatgctcctggagggggcaagcctgtatagacagcacttggctccttaggaacagctcttcactcagccacaccccacattggacttccttggtttggacacagtgctccagctgcctgggaggcttttggtggtccccacagcctctgggccaagactcctgtcccttcttgggatgagaatgaaagcttaggctgcttattggaccagaagtcctatcgactttatacagaactgaattaagttattgatttttgtaataaaaggtatgaaacacaaaa

SEQ ID NO: 96179 - DNA, 785 bp, Homo Sapiens
  misc_feature (303)..(315): n is a, c, g, or t
ctatctgcagtcctggctcaggccccggcaggcggtgagtgccacgtcccggctgggtgtgaacgttgggtgcgcgtgcaagaatgcaggcttcgcgctggcggccttgggagggggcagacaccctgcccaggaggccctgccagagcaggctttattccctctggtcgtgcaggaggtggtggcctcaataacactttgtgtcgtgttctcctgcgctctggtacgggcctggtcccaagctgcgtagcctcgctgtggggccatggtcataaatgactctaaggttcatttcatacctgnnnnnnnnnnnnnaaatgaaactgacaagaagggtgaagagaagagttcactgtatttttgcgaccatccagaagtaataataatactcatttaccaagcacaccggcctaaacctttgggtatgctaggccttctgtctcttcttatacctgtttggtgttttgtagatgggcaaactggacattggatgatgacagtcacattttaacaaagcaaccaccagtaaaggcttctggtgcatttagtgagggcgcctatgcacagacaggcccctcagggtggatgaaaccagagctggctgagccgtgcctgaatcctgtgggcggaggagcccggaaaagccagggagctgccccccactgaggggcagcttctcaaaggaggggacaaggccccgggtcttgagaactgaatcggaggccgcctgggaagaggtgctgcaaggggctgtcctggaggagggtgggaatgtcaagggccaa

SEQ ID NO: 96180 - DNA, 864 bp, Homo Sapiens
tttctaatggtgggagggcaggccaatagttggagaaactagaggcctgacagtcggtgatggaagagatgtctactaagcacggttgtcagatcttttgcggagagatgctggtgtgcgtgtgtctgtcagagtgtaacaggatccagccctctgggaaggggctgaccagaaccaggcagggggtttctgtctaggacaagtagggtccattttcaggggagctgaaatatttgcagggggtgctctgagacccacagccaataaatagggaagcaacatgcttttggtcagggtccatgtggttagggttgattttgatggggctggggggcttagagttagaccccctgccctggtcaggccccactccctggctggtgggggcgggaggcctctgaagctgcagctggaggggccggggcagtgttgcatggtgtgattaacctactaacccagggctcagccgggacgctgtggcgtgtgacgaggtgcctggccttctgccaaccaactaacccactaaccaggcccgagcatgccctactaaccacccccccgcagccagatcctactaactgtgcagctcatgggcctttcaaggggctgggatatgggggcagccaaggctccagaaggctctgcctatgggctgggatctttgtgcagacccacgttccaggacagagaatgcaaataagactcaccagctctgccacttcctgttgagtgagtttgagtaagtcacctcacttctctcaacctcagtttcctcagtggtagaatgcgagttctgataccttacaggttgcagtgaggattcccgtcaatataagggtctcagcacatggcagacacctaaaa

SEQ ID NO: 96181 - DNA, 794 bp, Homo Sapiens
aatataaccagtctgaagggttcccctactcacagaccccttcatttactgggagttaagcctcactgctaaataatatattttgaaactggaaaactgggcatgctgccttccacaatacaccactatactcatgattgcaggagggtggcttggggactaggggcaatgacacgggaaggatacaatcattgcccttacttatctttgatcttcttcccatcctcacactgaataatcacttgttcctaccttccctgtgaacctctcttgcctggctgcaaaattttaagacaccaaagacaaaattacattatgctctgagtgattacttacaagtacatcagaatatttacttacatagaaaagcactggaaaggaggaacacaaaatatgaaagacaattgatatggtactgaaatttttcttttttaactgttagatatttgtgcaataaataaaaaaggagggaaaaccatatcagagcaataggcaaggaggtggcaaactagataagtctccttggagaacaaaaaatatatttaaaatacaatagccctactacaactgatttatggctcaggtgactaaacacaatttgaagcagtaacaacactcataagctgaaaataaaatacttttagcccttttattcttcttgcctctttcccaaagaatatgccaatgaagctgttcttgatgtcacaatattcatatatcgcagaatttctgcatttaaactaccttgcctactgaaaataagataatcatttcatctctaggaaccagtaacc

SEQ ID NO: 96182 - DNA, 549 bp, Homo Sapiens
gtctggaaagctgctctggggagacctcagttttctgcccacctcctctgtgtgtggccctcaaactaaagacaagccccttaaggatcaccactcccatgccttgcccctaccacgggtacctcaaccgcttctaaaatttttagatcatctctgctatattcaacggccatggaagtttcaaaagtttccaaagcaaaatgttttgtctgaaacaagctgctttggattttgtctacatgatacaggcaccttcctctgggccccataattgtctcctctgtcacttgcttggtgttatgacatgtaacaaatcagagtgggaaggtcttagttttctctttgtcagcattctgggatgccctggtggtaacaggaaatgcacccacagctccatgcagctctcttgtaggtgcttttcttacctgtgggccagatcctgtcctatgtaatgttgatgtttgtagagtttattttttggtttagggcatgaaatgataatcggcttaagcagcaccagaattgaagcagagaaggtgaggacacaga

SEQ ID NO: 96183 - DNA, 845 bp, Homo Sapiens
  misc_feature (20)..(20): n is a, c, g, or t
atggtagaagagatgaagtnacggcgcgccgaattcggcacgaggcgaggagcgggatgttgcgggctgggtggctccggggcgcggcggcgctggcgctgctgctggcggcccgagtggtggcggcgttcgagcccatcaccgtgggcctagccatcggggccgcgtcggccatcaccggctacctgtcctacaatgacatctactgccgcttcgccgagtgctgccgcgaggagcggccgctcaacgcttcggctctcaagctggatttggaggagaagctgtttggacagcatctagccacggaagtgattttcaaggcgctgactggcttcaggaacaacaaaaatcccaagaaaccactgaccctttccttacacggctgggctggcacaggcaagaattttgtcagtcaaattgtggctgaaaatcttcacccaaaaggtctgaagagtaactttgtccacctgtttgtatcgactctgcacttccctcatgagcagaagataaaactgtaccaggaccagttacagaagtggatccgcggtaatgtgagtgcattgtgcgaactctgtctccatatttgacgagatggatacaattgcaccccgggatcattgcacgcaatcaagccgtcctaggcctactacgagccaggtctaccggacgtgtcttacccgcaacagcccatcttcatctctctcacgcactgcccgccggggaccttatacctacgacgggctcttgaccttctgccgggcccgacgacccccaccccccaccttcagcctacaccgaccctacccccttctccgccctgcccgcaccctccatcactcaccacg

SEQ ID NO: 96184 - DNA, 737 bp, Homo Sapiens
attttcaacacccagcgttgcaaggtcacgaagaggatgaagctgtcttggtttatccatgtgctcaccatagaccccatcaggcaggaggacgctggggagtatcagtgtgaggtctccaacccagtcagctccaacaggagcgaccccctcaagctgactgtaaaatcagatgacaacactctaggcatcctgatcggggtcctggttgggagtcttctggtggctgcacttgtgtgtttcctgctcctccgaaaaactggcagggccagcgatcagagtgacttcagggagcagcagcccccagcctccacccccggccatggaccctctgacagctccatctcctaggaattgctacactctgacacaaacatttactgccagatcgaccacaaagcagatgtggcctcttaggttcctctgggagctgctcctgtgggttgatggagcgtccccaaagcccccagccctggggacggggaaggacatggagcctgagccagagaaccagctctgagtcctgaggagacacaggcctggggacaggaagggatgggagtccctgctgaatatatagagaccccaacagactgccccgggctctgggtgggccaagacaaaggcctcccatcaccacaggaagcgggggcttgcaaggaaagtgaatgggcctatggcccacccggggtcaccaggaaaggatctgaataaaggggaaacttcctcaaaaaaaa

SEQ ID NO: 96185 - DNA, 717 bp, Homo Sapiens
  misc_feature (304)..(361): n is a, c, g, or t
actcgacccaggaagttcagctggcctcacctctcaattcatcaagaaagacatctgagatgtatgaatatcctgtaagactgacccaaatcctgctggcttggtgagctcatctcccagttgcctgattatcttagaacattgaagagctccagtgaagatgaagacagggacttgctatggtacccaggctggacttgaactctggggctcaagcattcctcccacctcagcctcccaagtagctgggcctacaagtcttcttggcttcaagtcttcttcctcagcggtctcactctgtcannnnnnnnnnnnnnnnnnnnnnnnnnnnnnnnnnnnnnnnnnnnnnnnnnnnnnnnnngcccaagcgatcctcccaccacagcctcctgagtggctgggactagaggaaacattcaaatcagttgacaaagaatggctgatgctgaaatgacttgctgtctcggtgtggagtggaaacaatcctgctaaatttcatattcagtgacaccaaagcaaaggacagatctcaagacaacttttattgaaatggaaaacagtaattttaactaaagaataagagaaatgccaacagaaataaaagatccagaaatcagaggacaatgtgcgaaactctatatactgagacacacaaattgaaacaacccaaataaatgccaaatgcacaagaaaataaatgtaacttatcagagaaaa

SEQ ID NO: 96186 - DNA, 215 bp, Homo Sapiens
gatcatggttctctttgtacgatagttgggcatctgtatttccacttgtgtgaatttgcctttaaattttggttatgggtttcaccttttaaaataatcaaacatatttatcttttcctgtgtgataggtttttttctgtatcttttcctgttaaacacacagacccctccccaatttggacattgaataaatattcattttcctttgcattgtt

SEQ ID NO: 96187 - DNA, 488 bp, Homo Sapiens
tctccactcaatctccatttcttacccatgatttggaacttgaatgttgggaggccgagagggaaagcagcctgagtctgtggtggagagggagggaggagagtgcctggaatttcgccagaaagtaagcatgtggaagcactttgcctgtcttctcgaggacacctgtggacagcctacacacgaggcacgcggtgaggtccatgagatcttactcttgagtgacgcattcagctcatcttcagagacaagttggatttgccctttctcaagcctaaagcttggaaattttgttatcttaggctctttaatactctcgatgaataaaagaagaaacattgaatatgactgcttttttccccccaactctaaatggccttgtcttacttcgccagtctcattttctcctttcctcccccatttccttcagacacttgtaccctcagacatgtgaaattaattttggatcgatcactttcgaaaaaaaa

SEQ ID NO: 96188 - DNA, 480 bp, Homo Sapiens
acagcaggaacaggaaactaatgcatctgtctataattaaattctgccagcacctcaccttccccaaaggactccgtgcaatgcctaaatgcctatattctatcttaagtaactgaacaggagaagcaggtattggaaaggagcttcagaacttttagcagattatgttctaaaactatttaacaggattcaaatggatgtttaatagagatcctttacctttgcagagaagttcaaaattagatatactttatatcttactacattatagtcagaaacttaaacatattacagatgttaaacaaacaccttaaatttactcaagacagtgaagatggcaaggtaagatttcatgaatgagtgaacatgatggtaactatctttcagttactactgtgttattttgctatatgaactttgatcaatgctaacaacataaacaaatgagtcttttatcaactgaggaactacagtggaact

SEQ ID NO: 96189 - DNA, 468 bp, Homo Sapiens
gcggccgcctctcggtgatgggctgctatgtactcaaagctgtcagcgactattttgggggcagctgcgtcccgggggcaggagagaccagttactctgagtccctctgtcgcctctgcaggggtgacagctctggggaaggggtgtgtgacaagagccccctggagagatactacgactacagcggggccttccggtgcctggcggaaggggcaggggacgtggcttttgtgaagcacagcacggtactggagaacacggatgaaagtccatcacgaaggcaaacatggaccagatctgaggaggaggaaggcgagtgccctgcacacgaggaagcacgtaggacgatgcgctctagtgctgggcaagcctggaaatgggctcccgttcacaggccccaggacgagtctgacaaaggagaatttggaaaacgggcaaagagtagggatatgttgggttaagaattat

SEQ ID NO: 96190 - DNA, 400 bp, Homo Sapiens
ggaatatattatcgggaacaaagtatttcctgctgccttaactctttgggatgcataggataaaatgataaagaccattttaatatcagaaagggttgtcttattaatttttaaataaaacttcacatttcttaatggggagctcattcagaaactaaataatggtttctcaaagtgtggtcaggatacgatctgcatcagaatccttggaatgcttgttaaaaataccaattgctatgacaaaaccaagtctgctggaaactgcatttcagcaggtttcccatgttattctgatgtattttaacatttgagagccactaccaatcatctgtacagttcctactgttatgatcacaataagactaacatgaatttaataatctgaataatttttaaaatt

SEQ ID NO: 96191 - DNA, 465 bp, Homo Sapiens
caactacatgtgtaaagttcctgcagggcggcataaccggaggcccatccttccatcatcacactggaagactccagtggtaatctactgggacggaacagctttgaggtgcgtgtttgtgcctgtcctgggagagaccggcgcacagaggaagagaatctccgcaagaaaggggagcctcaccacgagctgcccccagggagcactaagcgagcactgcccaacaacaccagctcctctccccagccaaagaagaaaccactggatggagaatatttcacccttcagatccgtgggcgtgagcgcttcgagatgttccgagagctgaatgaggccttggaactcaaggatgcccaggctgggaaggagccaggggggagcagggctcactccagccacctgaagtccaaaaagggtcagtctacctcccgccataaaaaactcatgttcaagacagaagaaaaa

SEQ ID NO: 96192 - DNA, 457 bp, Homo Sapiens
tttaatcatataacgatcttggttgggaatagaagactcttatcaaaaaagggggaagaggtacactgtgctataaatttaaccaatgatgtgtaacactgacaaccccttttaattagtcattgacatatcaactagtgattcaaggtatattgtcctaaaatacacatcctgtatattatctgccatataatgatgttagatttctgatcgaaatctctaaaatattccttttcacagggcttatttgcttcgtgtgttctttcatattttgatgaagatgttctagttacattttcatagttttatttctatatgattccctctgaggataaggcagaatgtaccactagcaaccctgccacattcatagccttcaaaggtcttccaaaagtttctctcctgtgtaaaccccctgatacctaccggcgtactgtttctgaacaaggacttttcc

SEQ ID NO: 96193 - DNA, 486 bp, Homo Sapiens
cgtgattttggaatcagggctgctccaagcattggcacggtgtgtctgaggcaccaacatccccatgcccgtggccttacggtccaggacaagagtgacccacctgcttgagacccagtgagtactgctgcccatccccacccccttttcattttattctttccctttgaagctgagatgaaagcccccgagggtgtcatttggtcaccaagaccccctctccgcctcccactttcttgccccttctttgcggcccgacacttgcctggctttgcagggcagggctcttttcagcctgggcttcaggtgagaagttgacacattcccactaaagctgcctcataaaagctggaactatattgagcaaaggattccatctcctgtcctccgccagcggcagtgtgtacccggctttcattcctggccaagtactccagggaggtagcactgcaaaccatgtttctgaataaatgtttgccccgtaaa

SEQ ID NO: 96194 - DNA, 441 bp, Homo Sapiens
aaataaaactgggctttatgcaggattctctttgaaaattcttgtatgtccagaacaaaagataaaactaattgtattcctcacattcacaatccccattggtctgaagtcacgtagcacagagcatctatagcacatagtgtttaaagactaatgaatgcaaaaagataaaatcttcaactaatttttgaattgtttctcatatatgctactagaaaatgccttgttgatgaagcacattttgggtagttgaggtcttttgttttcgcctttagctttctaagctttcttacaatgtggactgattactgtaacatttcacgtgtaaaataactggatattctttatatactggaaataacctgtgaatccaatatttcactaagtgttttaacttttgtgtatatatctctcatcaataaatgtggatttcaatttaaa

SEQ ID NO: 96195 - DNA, 749 bp, Homo Sapiens
  misc_feature (401)..(409): n is a, c, g, or t
agagttattttaaattgacggtaagcttgaaatttaagaaatcttcaaatagcttttaatatctgactgtagtgtttttcttcttctttttttgaatgagatcatttgttcccaaactcaattgattattagagttctttttaataaaattaaagcaataatgcttggctttactctaaacaaacaaaaagaattaacccaggaacctctgtagcaaggtgagcagtgccctacccccagccccacagtccacctgatggtgttgaggccgccaccaggccaccgtggtccctagcgaagcttccatccattggcacctcacacactcatctgcacattggtttttgtttagcttccatgtaaatgggataaaacaattcctttttccctaccaagtgttnnnnnnnnngaggtttatctcaaaataaagaaattgatgacaaccagtgctgtgttttccctaatacgactacatactttttaacctaccacagtcctggcagaaacattgctaacctgtagaaggtttattcaggatgctggtactttgtcttacagtggttatgttcctgacattctgcactctgcactcttgttgaactgtttcccattgtaattataagatctcatgggaaatttactggagtagaatttaagaaattctattttttaacactacaaagttgtttatgatatatattacagttaatgtctttttaaaaataaagtctaatcacgcctggctttta

SEQ ID NO: 96196 - DNA, 1047 bp, Homo Sapiens
gggatggccctacccaccctagctcaggccggcagagccagcgctcgcggatgcggctggtgcgcagtagcgggcctggccagcggctcggggcttgcagggagggcggatctcgtggtcggacccgcagccccagacgccgggcttgggggttccccccgccccggcctcctgccagtcactaccaccccatagcctctccaactgagctcggcgccgggagaggattaagttttgtacatcaggaagaagaagaggctggagaagctacgccaccagctcatgcccatgtacaacttcgaccccacggaggaacaagatgagttggagcaggagctgctggagcatgggcgggacgccgcctctgtacaggctgctacttctgtgcaggccatgcagggcaagactactctgccctcccagggcccactgcagagacccagccggctggtgtttaccgatgtggccaatgccatccatgtgtgagtggcctgggacaagcctggacttctgatagagacccatcacggtgcctacagagctccccactccctgattgtcaagacctactctgaagatcttccctgccaagacacaagagggctgagccaggtcctagctgttctccagacccacctgctgactttagactctaagagagggccctagccaggctggacttctgaccactgacttctcctgacctgagggccctggcacagagggcatccctcatgctgagaaggtcaagagcctctgctggcttcctcatcccctgtccagatccctcacatcagggtctgccccgctaatgtggaggaaatgagggagatacggagtgggagggatgggggaaggaaaaggggaaggggtccggccggttgaggaaaaaacctgttttttgggaagcgggaggcccccccgggggaggggcaatagggaacgggcgcaggtcagtgggtagaggagaaggcaacacttggttatgggaccctggagaagcccccaagttggagcctgaaacatccccagaattgaaaggggcgc

SEQ ID NO: 96197 - DNA, 473 bp, Homo Sapiens
gcggccgccaggaggagagaggcagctctccagcaagaggaggcagatgggaaagtggtggtgatatggtgaggacctgggccagggtgacaaattgagaatggaaagggggcttatttaatgataacaggtagccctggtgaccccagacagagtgggaggtgggaggggaggagtcccagccagctaaagttttgagactggttcagatatgtgagatgagcctgagggtttagtaaccagaggatatttgggagtggcgctaggagaggaatcggaaaagatggctctagagtagaactgtttgccaaggaaaagaaaaaggggagaaaagaaatgaagtgcaaggagaaacttgagaagagggtgctcagagctaaaaactgcagtggccattagtttgctggcagagaaattcaaggtgcagtagaaagtcctactcctttcacccttgcaaaatactgacttctggg

SEQ ID NO: 96198 - DNA, 806 bp, Homo Sapiens
ttaaaaatcccataccaaaaatgttaaaccaaaagggtggtttagagttgcaagggcattataaaatatgtaattttagttaaggattaataataatattttggtgccctttaaaaagggttagtgtaatcttgtaagtacaaagcggggttctcagtgagcagcaaaaggtgttagatgcatcaccacacttcacaggacctcctgaaatgactgcagatgtgctgtgtaccttcttaaggggctttggctgaccttatgagagcaggagctcaccatgcttatgggtgactatatcaaaaagatctgcaataaggctcacctgggagatgctctagcattcaaattcctatactcctcttttatctacgctgtcagatgaaaactgcttactgcttttaaaagatataataaacaatataaattctgatagtaaagcactataaaaattaggtatgatatttttggcacaaagcactttttaaacccaagctcattttgcaaaatatatgtctagagtttatcatttgaaaataaaaacatatacacaatatgtaaatggttttataagtgaattaattagaatgtacattttcttaaatactgcacataccttcagcttactccagtaccagacatctgcatgcacaccccacattctacattacacagatattgcacaagtttcaatgccaaaatactaatgcagtctggcaagatttagggtttacctttcagtattattttgtgaaagtattcagattcaatactatttcgcagaaaagctacatgaccaatttcaggac

SEQ ID NO: 96199 - DNA, 464 bp, Homo Sapiens
actgaactatgaccaatcccagcacggaggcccagaaaactttaagatttgagtattaatgtctcaaggtcaggagcaacctcaaggctaaaactcagatctcaggactcaatttcacagaagttccactataaaggcaataatctaaagctttaaatgatatgaaaattttgtaataagagttcagtatttctgccaacattggcgcatggattgcaaagttcacaggattgaaaacaccatcgacataatggaaattgaacagcatctgattactgagtgctatatcagcaagttaaaaggatcttttgcataccttttaatggtatatatcctaaaactgaagtgttcaatatagacatccagattgaaactcaggcagtgaattacatacacaacaaatcagttgaacatggcagagcttgtcagacttatgaaagattaaatacattttacatttcaaa

SEQ ID NO: 96200 - DNA, 917 bp, Homo Sapiens
ggacgcgtgggctggcttgaggatgctcaggtcttcatccaaatagaccctgtgtacagctgtcaaggagcctaatgtacagttgactccattggtaactcgatagtgtgaagactgtctggttgtcccagggaaggaaccaaggttctacactgcccctcagctatagcttcgtctcagtacaggacctcaagactcaccagcgtctcccatgctgcagccacctgtcgtggagcagtagtgcataccaggcctgggcccaagaggctggaccaaatgggaaccccctgccccgagagcagctgttacttttagggacactaacagacctatcggcagacttggaacaagagtgcaggaacggaagcctctatgtgagagataacactggcgtcctgagctgtgcagctcatagacctggaccttacttggtcgggccatctttttctgttcccccgttggagttacctccctcctgccaggtggaattcctcaggggaagggcacttggagctgtgggatgcccctgtgccagtgtttcctttgaccatcagtcctggccccgtcacgcctatccctgtcctctacccagagagtgcttcctgcctgctcaggctcaggtaatttccccctctaggcatggcaggggcgctgtaaaactgaaggatgatgctgggtcagtggagggagagaaagaaaagggcattgatagtaatatagactgaatgttccaaatcaagggaatggtgggctttgaatattaagaaggtaaagagaagggttgttcaagggatctgtgccttacctaagggaaagagaattttgaaggtttttagcatagcttgctttgggctatggacattttgtatcattaccaggttattctttactgtggaagggacagcatttatagggaa

SEQ ID NO: 96201 - DNA, 424 bp, Homo Sapiens
caaggaaatagatgttcccctagtgcctccagagggaatacaagtctgctgctaccttgattttggtccacaaaacccatttcagacttctggcctctagaattattaaaaaaataagttgtgatgtaataggaaactaatacttgcctatgggaaaccgcagcaggagatcaaagggagggagggaagaaagtcaagtcattcatatcaggctggttgtatccctcatctcacagtcactgctcctttcaaggtggccttctctactccttcccaaattcagtaaccatgccctcctcccctcatgccttctactgctactctgctgttaccagcccatattactgtgctatcttttttaataccccctacacccaaacctttgtaaacaattttatttgaaaataaattcttaaattatcct

SEQ ID NO: 96202 - DNA, 795 bp, Homo Sapiens
cagtcgacggtaccggacatatgcccgggaattcggccattacggccgggggttccttgcaggttggaggcggggttgcatctggcttggtggtagcatttaatctattgcattggtgtttttcagatgaaagagaaatccatataccattatgtttgaatttcctgatatatacaggatttaaagtgaaaactttattccaagagttaacagagtctctgggaagctttaggacatctgctacgttatttatcaaaatattgggatctctgccttgtgcctacaatgtcgtgggcctgctcgctagcagaagtcagaaaaggcgataggcttggctttaaggatttcgtgcccttgcctgaattcagtacaactccactgcctcacgttagcgggagcgcacctgaagagtacggggggagccctctctcccttaccctctcactctccaccagatgtttactaaacagggcatggtactgaaatcttcctttgcgactttctcggacatatcaactgcctttctcatgaagaattttcacatgggttacagtcatgaaatcacgttaagataaagctgcattgtatataagtgcaatatatttttgaaggtctgtaaaatgtgtacatacattgtcttcatttaactcatctaatatataccatatgggtgtctgtgtacataatagtgaagatatgccagtaagagctaccttcaaagactttccctaaacaaaggttcaagtattttgaatcggtataccaagcagcactagaatactgtgctcagtggac

SEQ ID NO: 96203 - DNA, 554 bp, Homo Sapiens
cttgtgaaggaaataatgtatacggtggtccatttccaagacaaagtgccttgaatcggtttaggacagcaaactacagaagaaacaggataaactaggcccctgcttgcgtagtcaatgccggcttcttgtcccctccccgccaccccgccgcttaatggccctcacccgatccaaagaagtttagtctgagatgaaagtttactagcctgcagaatagcttgctttgtctgttcttatcagccttcccagctacttaggtcataaatcaaattcttaaagagcccccgagctgactaggattgcaatgcattgtgggctgcaacaaaatgtagcaagacaaccctaaaaaaaacacctacagcctctgcataacaatcaataggtgacatctgggaagactgtgaccccctagtactcagcctatgaggaactgggggagggacctgcacactaggggataaattgcttgttgtgactgtgctgggtgtgcctgcctactagacacccgaccttgcaaggccatcattaaaagtctcactttcgcaatacaa

SEQ ID NO: 96204 - DNA, 510 bp, Homo Sapiens
tgctagctctctaaaggaatgaaaataaccttgggttctcactaagcatcaattctgtgactggctctgtggggtagagatgaaaaggctcactcagttccagcccctgcagatcccccaggaccctggcagcagcagatctatgagcccacatttccccctgcttgtgaggatcacaccaagagagacattcacatcctggcctcacaaagaagagatggcaaagtggaaaaaggccggagtccccaaccctgagccctttaccctgtctcagtcttttataacgaggtgtgtgtgcttgggcaatgcctctctcttctgggactcagtgtacccatctctgctgtggggaggttggactaaatgagagtttcccaaactccagttgtttctttccctccctccacacctggagatcagaacacctgtactaaaaagtactgaaaatctttattcaaatgagctcacatttctccaaccaaaattaacttattttagagtgattcaaaa

SEQ ID NO: 96205 - DNA, 482 bp, Homo Sapiens
ggctgcccccacccccctgcccatgaatccagcactcttagagaagaggcagcagcacagggagtcagggaacccagatgctgggaagccgggtgacctgatggccacctcggaaaatgacagcctggcagatttgtgtgtaagagctcttccacccttgctggttggtacttgggaactctgatggcactatgcatggcatctctggcatactcacaccaagccctgtaaagctgtcagaggtggggtttatgggcctcatgctgcctcctagagcaactgtggccatagctagctgccctttatgagtttacaaagggctgtccccctcctcctccagggagcatgtttgagctggcgggcagcgggccaggggccaaggctggcgtgcaatgtttgggctgcctaacttttgccccacactcctatccaagctactgtggactcttctgccataaatgacagtttgtttcccaaaaaca

SEQ ID NO: 96206 - DNA, 304 bp, Homo Sapiens
taaactgctggagatttctagaagctgatagcaggctctggacagcagccagcaataacttgggacctcagcccttcaactgtaaggagagttctgcaaacatcctgagtgcacttacagaaggatttacctccagttgagtttccagatgagaaccctgccctagtcagtcaacatgttgaagataccttttcagaggagcaagataagttgtgtccagactttttgacccacaaagactgtgagatagtaaatgttatttgatttaaaatgctaagattttggtaatgtgctacacagcaat

SEQ ID NO: 96207 - DNA, 869 bp, Homo Sapiens
  misc_feature (850)..(850): n is a, c, g, or t
atgatcctccggccgcagtcctcccaaagtactaagattacaggcatgagcaactgctcccagccatacacaatcatctttatcttagtagaaaacttttagaatgccccggcaatggctgtatctaaaagaaacaggtatttgccctccataaatcaaatagatgtggccaaatcaatatatcccttgcctatatagttatatcgaacacatccctatatggttacatatcaaatattgaatattcagctaatgatcaaaaaagattaacacagtcataaatatcccctcccctcatattcagccttcaaccaaaagtctttctaaggcagcatataacagtgctaacagcaaactgacaaattaaaggggcatactaggaaaaatggagaaataatgccatttgctctgaaaaatacttcagttttatcttcagaatcagatatgtttaatatctgcatataacttaatatgcatttcttccattacaatttttaagtataatccaaggctttaaaaggtatcttttttttacagtaatttaaaattatagaagatgcctttcctataattgaagttattgatcaattgaaggtataaccagactgaaatatacagcaacttcttgaagaatggcaaaaataaagtgaaagttctaaattcttctctgaattttttcagctattgctaatggaaggtgctgccatataataggcaacacaggttcgtctaacacaggtcggtctaaccactggtccagtatcatcatcattctccggacgcgtggtcgacatatccgggattccggaccggtacagcctgctttttgtcaaactgtgctataggggtncctaaataggctaaggcaa

SEQ ID NO: 96208 - DNA, 472 bp, Homo Sapiens
catcttaagaaagttgagagtctactctgtatattgttttttaatgtgtgctgtttctagtccgccgaccctccatcttttaaatttatattgactgtttcatatagaaatcttagcaaatgattcattgtctggaataatttcatagatttttagttgtttaattaagccaaattgtgcattagcaacagacttttaggatgctaatgtgtccagtagttaggtcctgaggaatgtttgaaagataagagtagctcttttcacatggaagagaaatggattttccttttgttacagcgtagtatggacctaaagaccatagatgaaagttacagagagctcagttaaaacacatgcacacaaacttcctagcaattagagagctatttacagattgagtaaactcactttcagaacagttaagtcctaaacagtgggaattgtaaaagcagaggctggttgcccttttttt

SEQ ID NO: 96209 - DNA, 519 bp, Homo Sapiens
  misc_feature (447)..(456): n is a, c, g, or t
gcgtcgacacgtgtccagaaggtattgaggtattgacacggatgcctacacctaggtttatttattaaaagcgcttttttacattccttgcaatactgatggtgatgatgcgcaggtctcattggtttcattcttgcagttgccatacagtgcctttccatttatttaacccccacctgaacggcataaactgagtgttcagctggtgttttttactgtaaacaataaggagactttgctcttcatttaaaccaaaatcatatttcatattttacgctcgagggtttttaccggttcctttttacactccttaaaacagtttttaagtcgtttggaacaagatattttttctttcctggcagcttttaacattatagcaaatttgtgtctgggggactgctggtcactgtttctcacagttgcaaatcaaggcatttgcaaccaagnnnnnnnnnnttttttgttttatttgaaactggaccggataaacggtgtttgagcggctgctgtatatagttt

SEQ ID NO: 96210 - DNA, 991 bp, Homo Sapiens
aacaaaaagaacgccacagtgagagcaatcacgtcgggtgttctgtcatcggtattcccaagcaaacggtccacctgagtggataaatagatcatgaaagagtcctagtatatactgtgtcgggacaagccaagatttgcgacgaccgaagttcttaacgtagaccgcatcaaccaacggggcccagagtaatttgagactgaagggccaaaagacaaaactgaagaaagcttggtctgtatagctaacatttttgctttgcaaaatgagtgggatgcttcccgccaagcccaggggaataccctgaagcacgtaaagaaagagtagtagcaaaatgctgcttagttcggcccggaagctctgtggggcttttaagaagtcgccagtgccggtatcccccagaagagcttctctgtccccttcccggcccgctgagtccaaatgactgtcatcccaaccgcctggcggcaggggaccgctcttcatatccagagagtgactgaaattccctggccgccgttgccggctgctgtccttgtgggagatggtgggtgacatatcagagacgatgcagagccccgtctgtggggggccgaggctgagcgttttggatccgtccagtcccaggtccaaggctgtcgcgctggaccagggtttcggtggttcacgggatggtggcagggctcagagcgataagggcacttcttactgcagcccggagtgctgaagccgggagccagtcctctggctagaggcccagaggatgcctggataggtgccccctggaacggcgtcaaagagcctgaaggagacccccgggcagcagcgccgggctcgaggctggaggtgtgtgccgtggtgccaggatggaaaccagctcctacctgcggcgggatcgaacggctggtctcccgacccaacacctccagctctcgctgctatcaatgcggcagagagcactttctctacaggactccagaaaaagcatccc

SEQ ID NO: 96211 - DNA, 700 bp, Homo Sapiens
  misc_feature (586)..(611): n is a, c, g, or t
ccagccttcacgccggagaaccgtttactcgctgctgtgcccatctatcagcaggctccgggctgaagattgcttctcttctctcctccaaggtctagtgacggagcccgcgcgcggcgccaccatgcggcagaaggcggtatcgcttttcttgtgctacctgctgctcttcacttgcagtggggtggaggcaggtaagaaaaagtgctcggagagctcggacagcggctccgggttctggaaggccctgaccttcatggccgtcggaggaggactcgcagtcgccgggctgcccgcgctgggcttcaccggcgccggcatcgcggccaactcggtggctgcctcgctgatgagctggtctgcgatcctgaatgggggcggcgtgcccgccggggggctagtggccacgctgcagagcctcggggctggtggcagcagcgtcgtcataggtaatattggtgccctgatgggctacgccacccacaagtatctcgatagtgaggaggatgaggagtagccagcagctcccagaacctcttcttccttcttggcctaactcttccagttaggatctagaactttgccnnnnnnnnnnnnnnnnnnnnnnnnnngagatgggttctcactatattgtccaggctagagtgcagtggctattcacagatgcgaacatagtacactgcagcctccaactcctaac

SEQ ID NO: 96212 - DNA, 439 bp, Homo Sapiens
aacttccatggacttttgtggacaaggtgctgctttttctcatgaccctgtagaattgctatcgaccacatcttctgtagcactgacctgtgtgaactcagggaagaatttgtgcatacaaatgagtggaaacagagcaggattcatgaatatgaatgagaatgtgaatcattttggagaatgccctgggcacacgggtcaactggaaatttcatttctctaagaaagtagccctaccagcggcacggactgttcctgttcctcatacctgtggggattcctccatattggaactgtttcatgtatcttttttgcattgtaactagccaaacctgaagtcagtaaataaaatgagattagcactttttttagggaccagttgtatcactgagtaatgcaccccaatagagcaagaaagtataaaatgttttttaggccc

SEQ ID NO: 96213 - DNA, 728 bp, Homo Sapiens
gcggccgccaaagcgcccaatgtggtgctggtcgtgagcgactccttcgatggaaggttaacatttcatccaggaagtcaggtagtgaaacttccttttatcaactttatgaagacacgtgggacttcctttctgaatgcctacacaaactctccaatttgttgcccatcacgcgcagcaatgtggagtggcctcttcactcacttaacagaatcttggaataattttaagggtctagatccaaattatacaacatggatggatgtcatggagaggcatggctaccgaacacagaaatttgggaaactggactatacttcaggacatcactccattagtaatcgtgtggaagcgtggacaagagatgttgctttcttactcagacaagaaggcaggcccatggttaatcttatccgtaacaggactaaagtcagagtgatggaaagggattggcagaatacagacaaagcagtaaactggttaagaaaggaagcaattaattacactgaaccatttgttatttacttgggattaaatttaccacacccttacccttcaccatcttctggagaaaattttggatcttcaacatttcacacatctctttattggcttgaaaaagtgtctcatgatgccatcaaaatcccaaagtggtcacctttgtcagaaatgcaccctgtagattattactcttcttatacaaaaaactgcactggaagatttacaaa

SEQ ID NO: 96214 - DNA, 434 bp, Homo Sapiens
acccgctaatctgtgacaccgggcaagcactactgggattggactttcctagcattgtccaattgaaggttgagacaacaaagccctacggactgggacagttattgggaccaaactctcctgagagctggcacgagtggacaaagagaatgccgcttgtcactgcatcgtgggcttccagcctatttgactggctggctgacacaggctgacacttgcacccttcagctggcagaggccagagtgttctcactgatggaaaagccaagctctgaggacataaaacaagacccaaggagcacctcatctggtttttgtcttggggacccacagcaaaattagtctgaacagacattggtttgcagagaactgtgaactcaccagtctttgaggcctgtgttcttgccctatgattctcttctgtatgacacaac

SEQ ID NO: 96215 - DNA, 836 bp, Homo Sapiens
aaagattacagagatataatttaatgcaagatctctgactggatcctagactgcaggaaaaagtctgctataaagaacatttggatcacttgtagtagctgggaaataaaacaaaacattatttgtaaaaggggggaaatctgaacatgggtcttgcagtatttatgacagtttttgcggggcagagatttctagattgacagctgttttagtactttcaaggtgatgctctgtctgctggtttgcattgtttctgtctgagttaagagactggcagaacacagagttgcagtagccaaacactggagaaagctgggccctacagaaacctaacgctgaagaaacctcaggagccaaactggtggagaaaacaaagagtcctccctctctcccttttcaaataatgatcatacatcttcaagctgtctgaaatggttaaggagttcagtctgtcgtcaggcacacaccagagccagctagcccacacagaccccatcagagcaaaacagacaagagaatttaattcatatccacatagaaaggacttctaggtaggaggtagaccctttagctcccttccaattaaaggagtccccaattctggcacctgagagtcccctgggtctaacagctatgatatttatgtagtgtgttgcttacctaaatgaatacaatttccttccagacacgtgacactgatattaaagtgctaatgagagggatctatttcttcttgtacgctaaaagagaaacagcagttcagatttcccatcagaagtccgaggactttgttcttgataactactaccaataaaaattgagtatttgaaaaattc

SEQ ID NO: 96216 - DNA, 412 bp, Homo Sapiens
  misc_feature (58)..(232): n is a, c, g, or t
ccaatctaaatgcagggagacatttgatatggactctctcaggtgttttgcaaaacgnnnnnnnnnnnnnnnnnnnnnnnnnnnnnnnnnnnnnnnnnnnnnnnnnnnnnnnnnnnnnnnnnnnnnnnnnnnnnnnnnnnnnnnnnnnnnnnnnnnnnnnnnnnnnnnnnnnnnnnnnnnnnnnnnnnnnnnnnnnnnnnnnnnnnnnnnnnnnnnnnnnnnnnnnnnnnnncaacacttccaggacatcatgtggaattggtctctctgagatggtggagatgctgagtagcgggatttcctcattccacggtgcacacatctatcgaatcctcacattgtaccccataagtgtacaagcatgatttgccaattaaaataatactaataaagacataataaataccataaa

SEQ ID NO: 96217 - DNA, 316 bp, Homo Sapiens
tttccagaaagcagaaaactaacagcttatcctcagatttttgtgccaaattccaatccaactgcaattcatctaaggatccagaaagccagacagaggccatgacattgacacctcttgtcctgctcagacctccaggacttgccccgaccaggcttccagggaagtggaagaggaaatgccctctcatgcatcccagctggttttccactgatttcaacccactggccatctggtcccttctccccgctatgcacacagtttggtctggggagtggaaactttctgcgggattcagcatttttaatttttctac

SEQ ID NO: 96218 - DNA, 1507 bp, Homo Sapiens
acaggcaggaaggtagctaagccagggattcaggggggggagggctcccccaggatctgaagtccagagaacaggagcctggaacccatatttccaggtgccccaatgtgcttgtgtgctggagaaaaggggcatgcctccagggggttgttagtaaggccagagatagccagctagaccctactctctgccccttgtcctccccctcccatctccatatctcttatcttccctgaggctttggtcttcctcacagcacaagggcccacttatttgggagatggggcgaagataagctcctggagagcgggagacagtgaaggctggggtcacctgagcctctgtccagctgaactgagggtgcgatggagtcattacctgccctcacccccaaagtgcatctgtgtcccctggggctgagctggagcaacaccacctttgttatgcttaggagggagggccggccgcccaagtcctagaaagcaaaagggccactagctcccagcctcggttttttggggatccaggcgccttttttggtattaaattatgtactattaaaataaaagctaagtgttttacccttcccggtggaatgcggggagacccgcagaaactcaagtaggagttggagtatagctccctgctaggaagcggctgtgcagtgagtcctccatctttctcccacattggctcagcctcttggaataagccaggcctgggagggggaaggctgcatcctgtgtgcctccagagcctcctctctgccccctgggacttcacatgaaggaccagcaagctggagcgcttcttctgggacttctacatagtctcggaatctggaagctgggctcatccgcctgatgcccggcccggtattcaagttccctggcgatgccaagaaaagcctaactccacattcatgccaagtcttggcactggtctcccaggaagggaacaccgtactacctgcccaaggtctctccgtcttcggaacggatcactctttcgctgctcatatccgccttgttgcctagcagcatgatcaaccacgtccctctgggcatactcatgaatctcagtgagccaggccctgatgttgtcgaaagaagatttgttggtgatgtcatacagcagaagcaaggcctgagcatctctgtaataagcatgggtgacgcttcggaaccgttcctgcccagcggtgtcccagatctgcagcttcactctcacgccatccacagtcaccaccttgttcctgaagtctatgccgacggtggctatgaaggttccggacaggaaggccccgtctttgaattggatcaggaaacatgttttgccgacgcctgtgtctcccagaagcatcaccttgcccgtgaggtcgtagctcaggactgcagggcggggagcgctcgggggcctcgccatcccgggtggcaacggcgcctggcgtgcccgtcatgtccctggacgagaggtgagcagtgccggcccgcaggcgatcccggga

SEQ ID NO: 96219 - DNA, 359 bp, Homo Sapiens
agcgatgcaagaatgatgggagctttccgagagcgttcagtgtttcactgaagacaggacccatagccttcatgtctggctctgtgtctcctctggcatatggacacatttcctggcatttgcctgagtctacaccactttttgagaacctgaaatagaagggaatcttctgtggcccacagtctccatattggccctagaagactggcctggcggaggaatttgcgttggcttgctttcaggggttagctacaagattcagctttatatctctgttgcttcttggccagtgtagtcaataagggtcttctttaacatctaagatagaggtttggttggccgggcgtggtcgcttactc

SEQ ID NO: 96220 - DNA, 341 bp, Homo Sapiens
gcctggcctaaaatgggaaatttcatgtaaattttatctaaaacaatttttagattcatagagaaaaaaataatcagagtaatttgtccaaatgttatagtgattgtgttatggctgtcactgaatccaaggcaacctgtggaaagaagaattcagatgtcagtgggagcctccaggtgggaggagagcatgcctaaaccctggtggccattgttctgtactaaggaacaacattccctttgaaaggacattatttgcctgttgtatttaacttcacagtgccttgcaaagagttgtttaacttgcatggtgacacccaataaatatctgtacaattgaaa

SEQ ID NO: 96221 - DNA, 594 bp, Homo Sapiens
  misc_feature (92)..(93): n is a, c, g, or t
tgtgtatttcaagtatcactggatccccagtctttcaccgttttataaacgtataagattaggatgactttttgaatttacttggtaggaannaaagtaggacattattgccatattgtatgtcttaatatttaacttattcggaaatatattccacactgttacatacattttccatggtagaaaggaagttcagtcagtcctgtggaatgaaaccatctcctaaaattcagcatttgcagcattctaaaagcctgtgtaggtacaaggacattgattttgtattcagaattcaagttaactatcttttaaattcgtggttgatgtaagtaataaaaaacattcttaaagttgagggttataagagagattatttctgtggtctaaaggttaaaaagccaacaacctgttaccaattatttcagctttttttgttttaataagtgtgacaacttaaaacttgtttctatttaaagtgaaatgtatctttcaactgtttagttacccagctgtttaatattccagtcttcccaaagtgaaaagatttgtatacaaatgttttctatgatttaataaaaatatatggcccaaaaa

SEQ ID NO: 96222 - DNA, 907 bp, Homo Sapiens
  misc_feature (662)..(662): n is a, c, g, or t
  misc_feature (700)..(700): n is a, c, g, or t
  misc_feature (769)..(769): n is a, c, g, or t
  misc_feature (848)..(848): n is a, c, g, or t
atgagtggaacaagaatgatgaccggctactgcaggccgtggagaatggagatgcggagaaggtggcctcactgctcggcaagaaggggaccagtgccaccaaacacgacagtgagggcaagaccgctttccatcttgatgctgcaaaagaacacgtggaatgcctcagggtcatgattacacatggtgtggatgtgaaagcccaagatactaccggacacagcgccttacatctcgcagccaagaacagccaccatgaatgcatcaggaagctgcttcagtctaaatgcccagccgaaagtgtcgacagctctgggaaaacagctttacattatgcagcggctcagggctgccttcaagctgtgcagattctctgcgaacacaagagccccataaacctcaaagatttggatgggaatataccgctgcttcttgctgtacaaaatggtcacagtgagatctgtcactttctcctggatcatggagcagatgtcaattccaggaacaaaagtggaagaactgctctcatgctggcctgtgagattggcagctctaacgctgtggaagccttaattaaaaagggtgcagacctaaaccttgtagattctcttggatacaatgccttacattattccaaactctcagaaaatgcaggaattcanagccttctattatcaaaatctctcaggatgctgatttnaagacccccacaaaaccaaagcagcatgaccaagtctctaaaataagctcagaaagaagtggaactccnaaaaaacgcaaagctccaccacctcctatcagtcctaccccagttgagtgatgtctcttccccaagaatcaataacttncgactccactatccgggaaaaggaatcggggattttttttgctggaaccaccctttcaa

SEQ ID NO: 96223 - DNA, 502 bp, Homo Sapiens
gggccgcctcgatggggtgttgaaaagtctcctctagagctttggaaggctgaatgcactaaacatgaagagcttgaaagcgaagttcaggaagagtgacaccaatgagtggaacaagaatgatgaccggctactgcaggccgtggagaatggagatgcggagaaggtggcctcactgctcggcaagaagggggccagtgccaccaaacacgacagtgagggcaagaccgcgtaagctgagaacactggtttgcagatatgctggttctgggtttttggggtgttctctggaatccttagtatccataggggaatttcacacgtgctccctctccactcccatgttgaaatatgtaagaagatattttaatctagtgcctttctctccaaattccaagtcacatatggagctctaccttgaatgggtatacatgttcccaagtataagcaaaggttttacctcacaagattgcaaccaattgtagatgagacatgaattctc

SEQ ID NO: 96224 - DNA, 134 bp, Homo Sapiens
cctatacatacatacctatgataaagctaggcacagtaagagattaacagtaattactaatgataaacagaacgattgccacaatatactgctgtaataaagttagtgtgtgtgatctctctttcacaataaaa

SEQ ID NO: 96225 - DNA, 904 bp, Homo Sapiens
  misc_feature (482)..(482): n is a, c, g, or t
ttttgcagaataactgtgaaatttttattcatgaaatatgtacttacactttgggccacgtgatgtcactctttgccgcgatgttctctctgaatccagacaaatacagcccttttcccatgggaaagaggctcaattctttttcactctctctgtgctgaacgatggcgaacacagcagaatgggactgacgaaatcagatgatttcttctaatttggaggcaattttcactaattagaagaagactgagtatttgaaatgttatactcaagtcgaggagatccagagggtcagcctctactgctctcgcttctgatcctcgcaatgtgggtggtggggagcggccagctccactactccgtcccggaggaagccaaacacggaaccttcgtgggccgcatcgcgcaggacctagggctggagctggcggagctggtgccgcgcctgttccaggtggagtccaaaggccgcggggaccttnctggaggtaaatctgcagaatggcataacgtcagtgaattctcggatcgaccgggaggagctgtgccggcggagggcggagtgcagcatccacctggaggtgatcgtggacaggccgctgcaaggtttccatgtggaggtggcagtgaacggacatcactgacaatccgaccaggtactccagacaagaacacagattatcattccagaagtcaaggaatgccagaaaacgcgggaacccgctagaagggcgcgtccggaatcgggataatcggagacaacatgcacacatgaggatacagggttcaaatccaaagcgacatatatggaccttagcatggttaaagccacatgacgacagaaacgaaacttgtaagcacctggtgtgaggaaatcctaagaataggagcaagaaaacaagga

SEQ ID NO: 96226 - DNA, 353 bp, Homo Sapiens
tttgaagagggaaagctggtgacatttgactcaggcaaaaatccaacaatgacttagttacacatatactggcacaatggttttacaaactgccctctaatcttaggaggaatgaacaagaattaagatttcatttcagtaaatattttatggctacaagtttaaaatcatgacaaggattctcagcagtcttcctccatttagtacatttaacaacatgaacacatgaaaacattaatccaatctatgggaaggctgcaaaatgccactgtgaaccaaacatttgtctctactttcagaaggaattccttatccttaaatggttactattaaaaaacatttctgaagtaatt

SEQ ID NO: 96227 - DNA, 617 bp, Homo Sapiens
gtcagcgataaagtgcacaaatgacaccgggaatgcgcctttgcgaccaggatctccatcaatgtggccaatctgaaatggagaaaagtgtaggttgttattaaaattccaaatgttggtggaaactttgaagagcattacatagagcgtttggtgaagaaaagcaagattggttcagaagactcttccgacaaggaattacttaggtaaaacatcaaaatgatttttgtccgtttttcctcaccacatttcaaatagtgcaggcctctcccgtgtaaggagctcttcccagccatgtcccagatgttcgctcgtggggatggccacccccacctgttcttgggaggcacacaggtcagctgtctgaccactacttcccacttgccatttttcaatgaatgaatgaatgaatgaactgagtgtcacaagtttgtgagctgcaacgtcacctaaagtggcaaaggtataagttggccccatttcaatgagttaagtacttgtggaaggcttcactctatccacttatgttccctcttgggtagatacataaattatatccaaatatgatctcaagagtgtaaatgatgtaggcaaataaaaggcataaaaacagcaaa

SEQ ID NO: 96228 - DNA, 586 bp, Homo Sapiens
  misc_feature (137)..(255): n is a, c, g, or t
cttgagacaaggtcttgctctgtcacccaggctggcaatatcatggctcactgcagtctcaaacttctgggctcaggcaagcctcctgagtagctgggactacaggtgtatgccaccacacctggctaattaaaaannnnnnnnnnnnnnnnnnnnnnnnnnnnnnnnnnnnnnnnnnnnnnnnnnnnnnnnnnnnnnnnnnnnnnnnnnnnnnnnnnnnnnnnnnnnnnnnnnnnnnnnnnnnnnnnnnnnnnntaccatgtctggcttccaaaatatgaagtttgggaggacataaacatttagtctataacatatattaagttggtacactacaaagtaagcaaaagtatatacatccaaatagctgggaaaaggtgagagcattaaggacaagcaaacatgtgactgtttctagccatttgccagatttacctatgagcttaacaatgaagctagaactgaaccaagctactgttttctgactaaagagatgtcttcgtaagcagtaatgtggggtaacccataatgaggaaaacttagtcataaaggagaaaagcaagagaaacagagaattagcaggatc

SEQ ID NO: 96229 - DNA, 544 bp, Homo Sapiens
aggattaactggaggcccaaggagtagtctggactttggggcagtaactttaggggggccctgagggagagctggtcgcgaggacagggacagcaggcagaggttgtggcccacagggcaatcgcaggagaggttgtgaataattcccaggtgatgagtgtgcagctttgaggaatttcaaagggttgcttggcgtcttttcctgaagacacttctataaggtatttagaaatctatcaggagtgagaatcagtccagtcagaaaattttaggcatttgggcaactgcattcagaaaacagctatttatttggaatgcataataaaagccatgagactgaatctccatgcctctttgccccctagtagccttcaagaagtctctaaaacagggttaccacagatttagccaggatgatgtgtagcagcttttcttggaacaggttgatggattaaaataactttttttcagctctaatgtttttttcttgaatttgccagtcacatgataattttcttcaaaaataaaactttataattgtaaa

SEQ ID NO: 96230 - DNA, 443 bp, Homo Sapiens
gcggccgcattcctgcaggggatgactgtgaatggcttcatcaacacagtcatcacctccctggagcgccgctatgacctgcacagctaccagagcgggctcatcgccagctcctacgacattgccgcctgcctctgcctcaccttcgtcagctacttcgggggctcagggcacaagccgcgctggctgggctggggcgtgctgcttatgggcacggggtcgctggtgttcgcgctgccccacttcacggctggccgctatgaggtggagttggacgcgggtgtcaggacgtgccctgccaaccccggcgcggtgtgtgcggacagcacctcgggcctgtcccgctaccagctggtcttcatgctgggccagttcctgcatggcgtggtgccacacccctctacacgctgggcgtcacctacctggatgagaacgtcaagtcc

SEQ ID NO: 96231 - DNA, 388 bp, Homo Sapiens
catttaagaaaaaatgaaatttactgaaaggatacaaagagttgacaggaaaactgcagcatcggatatggaaaatgggctgtaacctaggcaggctcggcaacgggaaccacagccaagtctgtgtctaaggtacagcctggcatggccaccctcataatggcagggccacccccctcaaaccccaccagggccccactgctgttgcatacctactgtctctgttgctatgaataattctaaaattgtctctatgttttcatgtcacttgctgaagatgccaagctcagagaatagtggccaggtggctgagcctgggtcatgtgtcacgtcctaactgttagggggcagggagaagaatatcccttcaggttcagcttccctagcc

SEQ ID NO: 96232 - DNA, 567 bp, Homo Sapiens
gaattgctgaattttcttcttcctctggcctccttctgtgcccctttccccaagcccaagactgcttaacttccaaagcaaattctagatagacactgtatttattggtatgggagtgggctctatggggtggtctgcaccaatctgggactcttttccctaaatcctgcaccaaatgagtcaggaggcagggtgcacagcattagtttcaatgtggttatgcatcataagcttaacatcagaatgaaaatgaaactcgattttgatgtttctttaaaacccttcccctgtccaatccactcgccgcccccaccttgaatagctaaagtctcttatgaaacagagaagagttgttgacgtctaactccttccattaaattaataagtactgacctcctaatatttaagtgtttactatctattgctgtaaagttttgtatattttgtaaacttttttccccaaatagtagatgtctaaaatcattgtacatctgattcttttatattccattgttcagcacaaagtgtggtttttatttagaataaaaaaagaaatttgaaatgaaa

SEQ ID NO: 96233 - DNA, 499 bp, Homo Sapiens
cggcaactcttcggatgccctccaggaccccgttgcagcgaagctggtccagcaccagccgtggctccagcttcccggccctcttctcgtggttggggacaatgcaccggacaaaactggggttggtgttgctgagtgtggccatgaggcggctcagggactccttgtagagctgtcccactgtccggaacataccccgacgggggcggccacctggtgggccgtcgcccaggctgctcacctgttccagccccacgatgccctccacgtctttccagatctctgccgtcagccggtctgtgctctggtggagcaaggcttgcgacgttgtcattcagagggtccatgtttttcatcagccactcgttggccttgtagtcgaccttgcccgcgtagtggagaacactgaagtcggcctgatcccgcaggtgcctcggccgcttggaacttgggtggccgccctgctcctgggctaccttctccacaaacgacatgtctg

SEQ ID NO: 96234 - DNA, 609 bp, Homo Sapiens
  misc_feature (454)..(467): n is a, c, g, or t
aggtggtgctggggcactgaggaatcagggggatggaccccactggagcttgtctcatgctggcagcaagtcccaggcctcaaacacatacctgggccacctcaggagagagactgcagggaagaaatgagttgcaatgctccagcctaaccaactccccttttgttaatccaatcccagaaggtactgggtagggtcagttaacagacagctgcctgtctcctggcagagtctgaccaagccccagtgggcgcttctcttcctaagtcctctggtgtaccccattcttcaagggaaacggtccccctaagaaactatgtgaaagggttctgaaattgctgtaccagttaatgaattatttactctaaacaatgtcttgataaagggggaggatgaagttagctgatgttgactaaggagagacggagttgccaagggaaattcttctaaatgnnnnnnnnnnnnnngtaaaagcagtcagccggttttgtctgactatgaaacgtgtcacagagcatgcacctttggccatcttttgcatttatgatttggaagagagatgtagcagtgagtgtgggccagggaggggaatccaacaaagccattctc

SEQ ID NO: 96235 - DNA, 422 bp, Homo Sapiens
tttccaaagtggaaagttttattcagtgatagaaaacatccaaacctgtcacagagcccatctgaacacagcatgggaccgccaacaagaagaaagcccgcccggaagcagctcaatcaggaggctgggctggaatgacagcgcagcggggcctgaaactatttatatcccaaagctcctctcagataaacacaaatgactgcgttctgcctgcactcgggctattgcgaggacagagagctggtgctccattggcgtgaagtctccagggccagaaaggggcctttgtcgcttcctcacaaggcacaagttccccttctgcttccccgagaaaggtttggtagggggggtggtttagtgcctatagaacaaggcatttcgcttcctagacggtgaaatgaaagggaaaaaaaggacaccta

SEQ ID NO: 96236 - DNA, 495 bp, Homo Sapiens
cgacatacgtgacagctcacttttcagttcattatatgtacgagggtagcagtgtgtgggatgaggttcgatacagcgtatttattgcttgtcatgtaaattaaaaaccttgtatttaactcttttcaatccttttagataaaattgttctttgcaagaatgattggtgcttattttttcaaaaatttgctgtgaacaacgtgatgacaacaagcaacatttatctaatgaactacagctatcttaatttggttcttcaagttttctgttgcacttgtaaaatgctacaaggaatattaaaaaaatctattcactttaacttataatagtttatgaaataaaaacatgagtcacagcttttgttctgtggtaacctataaaaaaagtttgtctttgagattcaatgtaaagaactgaaaacaatgtatatgttgtaaatatttgtgtgttgtgagaaatttttgtcataagaaattaaaagaacttaccaggaaa

SEQ ID NO: 96237 - DNA, 352 bp, Homo Sapiens
aggtcctgtacagtgatgtgcgacagggtcgggggcctgcttacagaaccattctggccatgatttggtaaagcagctatgctgtgctgtgggatctcttctgccccttgtcggtatatactctccaaagccctcaggctggaatgactaagttgcctgaacaggaaagatggcggcctgccccatctattctctcagagttcatcttgtttgatggagcttaatttttagcctgttaattttactgtcgacattagacttcttcggaaagaatctgctatattttaggttagatatatgagaattcattgttttctgtaaataaacctgttcatgtcttgttctctggaaa

SEQ ID NO: 96238 - DNA, 413 bp, Homo Sapiens
ggtcaagcgggaggacctgctaaataatgcagcccatgccgggaaggccctgctcacaggactgctggacctccaggcccggtacccccagttcatcagcagggtgagaggacgaggcaccttttgctccttcgatactcccgatgattccatacggaataagctcattttaattgccagaaacaaaggtgtggtgttgggtggctgtggtgacaaatccattcgtttccgtcccacgctggtcttcagggatcaccacgctcacctgttcctcaatattttcagtgacatcttagcagacttcaagtaaagaagccatttccactacagtgagaaagcccggatcccaacagttgtcaaattgattagtttgcctaattcatgttttcacttaaaagtatcagaggtgaaaa

SEQ ID NO: 96239 - DNA, 398 bp, Homo Sapiens
tttgtagattgaattttctttatttacaaaacaataaaggaagtacagaagcattaagtgatttgcttgaggctgcttcactaacaggtgccagagttaagattcagacctcgtccaattagtcctagagccagagcttcttgcactaccctgcactgccctctgttgcctctgtccttgggtcatctttgtatgagagctgaaacaaggaggcccagggtcaccttatttgaccttagcttggaacgtgcataaggagtgacagatttttcactactgtgtgtatgtccatgaatcaccttgaaagctccacaagtattaatttggagattacaaacacattttagcaagtaagcaaatttgcaaatataggatccacaaataatgaggatcaactg

SEQ ID NO: 96240 - DNA, 454 bp, Homo Sapiens
  misc_feature (253)..(365): n is a, c, g, or t
cgcatgaggcactgcacctggccagacttttccaattttaaacttctactgcaaaatcctttttaaccattcctgtcattaaagcagctatgaaaatttgatgagtaacaccgtgggatatacaatgacagactggagtaacatttttaaagttttccatgtataataaatatatcagaactaacattagatgtcagccttggtaatgcttatgaaagaatgtgttagcattctaccttgaaagtgtattgcnnnnnnnnnnnnnnnnnnnnnnnnnnnnnnnnnnnnnnnnnnnnnnnnnnnnnnnnnnnnnnnnnnnnnnnnnnnnnnnnnnnnnnnnnnnnnnnnnnnnnnnnnnnnnnnnnttaaataagatattttattaattcattgctagttacgtttgaaaatgttttctgctgatctgcatattatgtttttatttatggtatct

SEQ ID NO: 96241 - DNA, 665 bp, Homo Sapiens
  misc_feature (108)..(125): n is a, c, g, or t
cacagaaaacctgatgtcaagaggtgggcaatagaaatggaaacaaattgtcttcctcaataattaagctactttctctttttcccttcttgttttaatctagtgggnnnnnnnnnnnnnnnnnncttagaaatatgtaggtaaggtttatcttgaatcttaattgccttaattttaaggacgtcaaaggctctcgaggcaagctgtcaacgtcttgttgaaaacaaaaatcaagaaagaattgaaatactgtgccggctttcactggcacagaagtttaagactatgagtttttagggtgaagaaaaaactgtacagtttaaatgaaaatgtttttcttcatttgaagaaaatttgttgataaaccatggcaactgcaagaattggaaaaatgctgggacttttcatgaactttgtcttaagtgttgacatgaatcattctaaaaggctaaaacattttacagtaaagttattaaggttggtttaaaaacaactgcattagaaataatgcgtgtttggggggcagaatgcagatttttttaatttacaaagcgtgatcgctagcaaaagcattagtgctttttatctgcagtcttttttatgagctttacaaagtttttagtcagctttgcttgtcacattgcaaaacctagcttaagagcatt

SEQ ID NO: 96242 - DNA, 1173 bp, Homo Sapiens
  misc_feature (904)..(904): n is a, c, g, or t
  misc_feature (939)..(939): n is a, c, g, or t
  misc_feature (1026)..(1026): n is a, c, g, or t
ttctccggatatcgtcgaccacgcgtccggtgtccgcttctctctgctcttcgactgcaccgcactcgcgcgtgaccctgactccccctagtcagctcagcggtgctgccatggcgtggcggcggcgcgaagccagcgtcggggctcgcggcgtgttggctctggcgttgctcgccctggccctgtgcgtgcccggggcccggggccgggctctcgagtggttctcggccgtggtaaacatcgagtacgtggacccgcagaccaacctgacggtgtggagcgtctcggagagtggccgcttcggcgacagctcgcccaaggagggcgcgcatggcctggtgggcgtcccgtgggcgcccggcggagacctcgagggctgcgcgcccgacacgcgcttcttcgtgcccgagcccggcggccgaggggccgcgccctgggtcgccctggtggctcgtgggggctgcaccttcaaggacaaggtgctggtggcggcgcggaggaacgcctcggccgtcctcctctacaatgaggagcgctacgggaacatcaccttgcccatgtctcacgcggcaacaggaaatatagtggtcattatgattagctatccaaaaggaagagaaattttggagctggtgcaaaaaggaattccagtaacgatgaccataggggttggcacccggccatgtccaggagctcatcaacggccaaagcctggggccgttagtggccatttgcccttcattcacgacgtgagaaccatcccccccacacccgggccttaaccctcctatctacactcacgcgcggcctctcccacttatactcgggcgctctcccaaacatgacaacctctaacacccctcccacaaacacacaccaccctcccaacaaaaaattatttcgntaacgagcatgtattcaactccaaacaagccggtncaatgcgccacgcatctcgcgaccctgcgctataatgtctcctcggctccctcaaccgcccgcaattcatccccacctcccaacgcngccctctcccttcgccatcatacacaccgttcggcccataccattgctcccaccccacacatatacccttcgaaccccacccgccgttccgcgacccactataatttgcgcataccctacaggtcggcaccttcctacccacaattc

SEQ ID NO: 96243 - DNA, 685 bp, Homo Sapiens
  misc_feature (492)..(542): n is a, c, g, or t
tttcaccatgacatgtgtttactatatgtcaaaccttcacgtgtgcccccaaacctgtaagttggttgtagggaggaccagcggtagagcagagatggcagggatgcactgagctgggctgtcagcagaccatgggggtgggacgaggagagagctgaagaccaccggcagtggaccacagcgggaggcatgcaggcaagagacgggtcagctgccggcttgctggagtcattcctcccacgcagtcccctcctgaggggctggagctggggctggagcgtttcagcagtcagggctggagataagagtctgtgctggagccagagggaactgggctagagaatcaggaggacacgacagggtgaggggacttcgggctaccttcatgctgtcagttatgagataaagataggagtacaaaggggaatttttcgggtgaggtacacgcggtgaaatgagttttcagggcctcatcctgtgtgttcaccttcnnnnnnnnnnnnnnnnnnnnnnnnnnnnnnnnnnnnnnnnnnnnnnnnnnnaggtcctggacagtcacagcttaagttagcagcaagagaacttgaggttaaaggtatagcacgcaatatgaggctggagccaactgagtagaggcttgagggcatctccacagtccaaagctgggctgcagacagggaaggtc

SEQ ID NO: 96244 - DNA, 349 bp, Homo Sapiens
tagcttaatgtcacacaactacttggttgctcactgtaaattttctctctcctcacttcccacctccatagaaatgcgtaaatggcgacagtagagccagctcttcatgaatccagaaatgtgagccacattttgaggatagcagagtcactgcagaagcctggacccttgcataaccttgtcgagtgggaaaatctacccatacttgtccaaccacctaactgggggctctacatctgaaagaaatgattttttatcttatttaagccactgtagttaggagtcagtttattacaggacattgcctggtgttccaacaaataaactaccttatttgtttcaataaaaa

SEQ ID NO: 96245 - DNA, 570 bp, Homo Sapiens
ataccattccagagatctcataaaaacagacacagacttctccctctttatatggttatcttacgacttacctagtccttgagtctggtcattaactccttggtgaggagagaacccataagcttaggaagtgctctgcgagaaagagactgctaagaagtagaggcattagcttggccagtgctctagagttgggtaaaatgtaaatgttatggcggggggaaggatggggtagagggtatgcatgtatggggaatgggaccattatttagcagcaaaaaggaaagtttgaagacattaacaggaactggttaattgtagtccttatctgaaaaggacagattgaatgcagccaaattatggcaaagaaatcagtaggacaacccctataaagggtagttcttttaaaaaaaatttctttattggcaacaacataaaagatatgaaagaatcactcataatttatcagcgtaacatagctattctcatttttgcaattgactttttagttcttgaccaaatgtaatttttattagttgtgattaactgattttgtgcttttttttaaaa

SEQ ID NO: 96246 - DNA, 1021 bp, Homo Sapiens
caaggtagcgaggcctgggtggcgaattccgcacgagggactcggcggccgcacctgcccaacccaacccgcacggtccggaagtcgccgaggggccgggagcgggaggggacgtcgtcctagagggccggagcgggcgggcggccgacggacccggctcccgcgcaggacggagccgtggctcaggtcggcccctccccaacaccaccccgggcctccgccccttcctgggcctctcggtggagcagggacccgaaccggtgcccatccagtccggtgccatctgaagcccccttcccagaaaatgagccacagagcaagctgaccccagcgacacagccccccagccctactgtatttccgttcctatcaaaaaatggatgactcggagacaggtttcaatctgaaagtcgtcctggtcagtttcaagcagtgtctcgatgagaaggaagaggtcttgctggacccctacattgccagctggaagggcctggtcaggtttctgaacagcctgggcaccatcttctcattcatctccaaggacgtggtctccaagctgcggatcatggagcgcctcaggggcggcccgcagagcgagcactaccgcagcctgcaggccatggtggcccacgagctgagcaaccggctggtggacctggagcgccgctcccaccacccggagtctggctgccggacggtgctgcgcctgcaccgcgccctgcactggctgcagctgttcctggaagggcctgcctaccagccccgaaggacgcacgcacctccgcgctctgcgccgactcctacaacgcctcgctggccgcctaccacccctgggtcgtgcgccgtgccgtcaccgtggccttctgcacgctgcccacacgcgaggtcttcctggaggccatgaacgtggggcccccggagcaggccgtgcagatgctaggcgaggccctccccttcatccagcgtgtctacaacgtctcccagaagctctacgccgaacactccctgctggacctgccct

SEQ ID NO: 96247 - DNA, 451 bp, Homo Sapiens
cagtgtagtatgagaattatatcagctatgatcataagtacatctgtgtgaagtcaaggaaaaatttcagcattaagcaatcttgaaatgcggatttttctatattatcctagaattttgtgcattatccacaaaccacaactagaaaaacgatagagttgccaaatcacctacttttgaaatctttaagaatttatgtaattatgccttcaggtgtttgctaagaaattacacagtattttaaaaatttatctgtgagaataattattttaaaatatacatttcaggcttgaaaaagataatgccaagttaaaagttacaatcaaaaagcaaatggacaaaattgaggagcttcagaaaaacctgttaaatgcaaatttgtctgaagatgaaaaggaacaattaaagaaacttatggaattaaaacagtcactggaatgtaatttggatc

SEQ ID NO: 96248 - DNA, 919 bp, Homo Sapiens
ggatgttacaatccggaaagggcctcatgaaaaagaactattacaatcaaaaacagctttatctagtgtcaaaaccagttcttatcaaggtataataagaaataagactctatcaagatccatagcatctgaagttgtagccaggcctgcttcattgtctaatgataaactgatggaaaagtcagagcccgttgaccagcgaagacatactgcaggaaaagcaattgttgatagtagatcagctcagcccaaagaaacctcggaagagagaaaagctcgtctgagtgagtggaaagctggcaaaggaagagtgctaaaaaggccccctaattcagtagttactcagcatgagcctgcaggacaaaatgaaaaaccagttgggtctttttggactaccatggcagaagaagatgaacaaagattatttactgaaaaagtaaacaacacattttctgaatgcctgaacttgattaatgagggatgtccaaaagaagatatactggtcacactgaatgacctgattaaaaatattccagatgccaaaaagcttgttaagtattggatatgtcttgcacttattgacccatcacagtcctattgaaaatattattgcaatctatgagaaagcccattctggcaggggctcaccctattgaagagatgcgacacacgattgtagatatttctaacatgaagagtcaagaaaagctaatttaagagaaaaatatggaaaagtcttgggcaagcaagggaagaagtcaaaagaagtcagaattgaagatacccgttggttgatgtgagatcccgaaaaaactggaaaagggaaaggtaaacctccttaggaaatttggcttatttcaagaatgggggaaaaaagagcgcaggacccccaaaaccaaaggtccccacccccttgagt

SEQ ID NO: 96249 - DNA, 219 bp, Homo Sapiens
agttgattcagctctgcaagaattgaagcaggactaaatgtctagttgtaacaccatgattaaccacttcagctgacttttctgtccgagctttgaaaattcagtggtgttagtggttactccagttaactctcaagttatcaaggtatttccagagtggggatatgatttaaatcagccgtgtaaccatggacccaaaatttaccagaccacaaaact

SEQ ID NO: 96250 - DNA, 1080 bp, Homo Sapiens
gagtatgaagtcgacggcgcgccgaattcggcacgaggcctctcacagctccattatccaccggctgccgggctctgacaacctatatgatgacccctaccagccagagataacccccagccctctccagccgcctgcagccccagctcccacttccaccacctcttccgcccgccgccgggcctactgccgtaaccgagaccactttgccaccatccgaaccgcctccctggtcagccgtcagatccaggagcatgagcaggactctgcgctgcgggagcagctgagcggctataagcggatgcgacgacagcaccagaagcagctgctggccctggagtcacggctgaggggtgaacgggaggagcacagtgcacggctgcagcgggagcttgaggcgcagcgggctggctttggggcagaggcagaaaagctggcccggcggcaccaggccataggtgagaaggaggcacgagctgcccaggccgaggagcggaagttccagcagcacatccttgggcagcagaagaaggagctggctgccctgctggaggcacagaagcggacctacaaacttcgcaaggaacagctgaaggaggagctccaggagaaccccagcactcccaagcgggagaaggccgagtggctgctgcggcagaaggagcagctccagcagtgccaggcggaggaggaagcagggctgctgcggcggcagcgccagtactttgagctgcagtgtcgccagtacaagcgcaagatgttgctggctccgcacagcctggaccaggacctgctgcgggaggacctgaacaagaagcagacccagaaggacttggagtgtgcactgctgcttcggcagcacgaggccacgcgggagctggagctgcggcagctcccaggccctgcagcgcacgcgggctgagctcacccgcctgcagcaccagacggagctgggcaaccagctggagtacaacaagcggcgtgagcaagagttgcggcagaagcatgcggcccaggttcgccagcagcccaagagcctcaaaaaaaagacaaacacaaataaaatatctgagcggaaaa

SEQ ID NO: 96251 - DNA, 1193 bp, Homo Sapiens
agaagaggacaggaaagaaacttcagtctgagggttgaggacacgtcccggagcagaggaggaccaagctcccaagccccctgtcaccttgacacgcagacggttccccaggactgcgaagaggggggcaaccagcgccccgccccgtccccgctgcgccgcccgccattggccggtccgaaagacgcggggcgttgtcggtttgaatgagagcgcctggagccggggcgcaggcgcagaggagggcggtgttgagaccggcggagcggcgggacccctaggtggcggagggacgctccgggaaagcgaggggcgctacgagctctggcccacgtgacctgccgggggcgggagcagggggcgcgccggcctcctgcggtgcccctgccttggggaggggccgtgaccacccgtctgtcgcccgaggcggccgccgctgcaccttcaccgcgtacccgggacccgcccgcccgcgggagaaatgttgctgaagtgctgctgaaagggccagagatgcaaggatttgggatacattttgaacctttaagctgtctgacattgacctcctttcattattaataaagaagaatcaggagcttaggatgtattaacaccaactcattaatatactaaccggacaatgttctacaaacaattctacattgtaaaggactggattggcacaaaataaaataattttattttattcagcttataatatgactcgatggaggaaaatttgataagcatgagagaagaccattcttttcatgttcgttacagaatggaagcttcttgcctagagctggccttggaaggggaacgtctatgtaaatcaggagactgccgcgctggcgtgtcattctttggaagctgcagttcaagttggaactgaagacctaaaaacacttagcgctatttacagccagttgggcaatgcttatttctatttgcatgattatgcccaagcattagaatatcaccatcatgatttaaccccttgcaaggactattgggagacccgctgggggaaagcgaaagctagtgggaatctgggaaacccccttaaaggtcttggggaattttgaccaaagcccataatttggttggccaccgaccccctaaatatttcccggagagctttaattggacaggggggggaaaaacccaggagccccttttaccaatctttt

SEQ ID NO: 96252 - DNA, 1011 bp, Homo Sapiens
gggctgagaaccccactgggcagagctcaagacaccttccagacaattgaaggtatcattcgaagtctcgcaggtcacacattaaaccctgatcaggatgttagtcagtggacaactgcagacagtgatgaaggccatggtaacaaccaacttagacttgttcttcttctgcagtatctggaaaatctggagaaattaatgtataatgcatacgagggatgtgctaatgccttaacttcacctcccaaggtcattagaacttttttctataccaatcgccaaacttgtcaggactggctaacgcggattcgactctccatcatgagggtaggattgttggcaggccagcctgcagtgacagtgagacatggctttgacttgcttacagagatgaaaacaaccagcctatctcaggggaatgaattggaagtaaccattatgatggtggtagaagcactatgtgaacttcattgtcctgaagctatacagggaattgctgtctggtcatcatctattgttggaaaaaatcttctgtggattaactcagtggctcaacaggctgaagggaggtttgaaaaggcctctgtggagtaccaggaacacctgtgtgccatgacaggtgttgattgctgcatctccagctttgacaaatcggtgctcaccttagccaatgctgggtgtaacagtgccagcccgaaacattgtctgaatgggtgaatccagaaaaactgtgctgtccaaaccgactgactcttcccctgaagttataaattatttaagaaataaagcatgtgagtgctacatctcaattgccgattgggctgctgtgcaggaatggcagaacgctatccatgacttgaaaaagagtaccagtagcacttccctcaacctgaaagctgacttcaactatataaaatcattaagcagctttgagtctggaaaatttgttgaatgtaccgagcagttagaattgttaccaggagaaaatatcaatctacttgctggaggatc

SEQ ID NO: 96253 - DNA, 560 bp, Homo Sapiens
ccataggaaaaacatcatagttattggaaatttgttttataactggaaacagaaagccttactttatatagttgaagtcagcctttcaggttgagggaagtgctactggtactctttttcaagtcatggatagcattctgccattcctgcacagcagcccaatcggcaattgagatgtagcactcacacatgctttatttcctaaataatttataacctcaggggaagagtcagtcggtttggacagcacactttttctggattcacctgaaagtattttataaaataagaagagagagattcagatcaattagaaatatttcaaagagcacagaaacctaaaaacatgataagatcatcagtacgaaatatattactataacttttgctttatttaaaaatgctgaacgctcaccattcagacaatgtttcaggctggcactcttacacccagcactggctaaggtgagcaccgatttgtcaaagctggagatgcagcaatcaacacctgtcatggcacacaggtgttcctggtactccacagaggccttttcaaacct

SEQ ID NO: 96254 - DNA, 455 bp, Homo Sapiens
tttaagcagcgatcgtactttccttcctgagccttgagagcctcacccagattctcaacccttcctcccgccctgaaggtcacacagcaagtcatgggactccccaaaagcgagggcgggaaggaaagttggagatctcccagccaagtctccctgctctgcaaggggctgtcccaaggcccccagcaagtcaggcaaagcaatgccctgccctgggccgttcagggccctgcagttccacactcactcacttctaggagggtggggagaaaggcaagggtgagggcagggagctgggggcacagaccctatgcccactcagacactcccctgagggaaggtccagggatgtgggtaaatagggggcagttgttttgagttggcacagtcagagatggctctcaggagggaagcagaggttctgaattctgaactaaatataagagcgcaaccat

SEQ ID NO: 96255 - DNA, 1401 bp, Homo Sapiens
  misc_feature (1196)..(1196): n is a, c, g, or t
  misc_feature (1239)..(1239): n is a, c, g, or t
  misc_feature (1242)..(1262): n is a, c, g, or t
cagtcgacggtaccggacatatgcccgggaattcggccattacggccgggaaaggaagaagaactggggaggtcaggaggacagggagccagcaggaaggtggaaggagggcaggccaagggtggaggagtcggggagcaagaaggagggcaagcgacagggcccgaaggaacccccaaggaaaagtggtagcttccactcctctggagaaaagcagaagcaacctcggtggagggaagggactaaggacagccatgaccccctgccatcctgggcagagctgttgaggcccaagtaccgggcaccccagggctgctcaggtgtggacgagtgtgcccggcaggagggcctgactttctttggcacagagctagccccagtgcggcaacaggagctggcctctctgctaagaacatacttggcacggctgccctgggctgggcagctgaccaaggagctacccctctcacctgctttctttggtgaggatggcatcttccgtcatgaccgcctccgcttccgggattttgtggatgccctggaggacagcttggaggaggtggctgtgcaacagacaggtgatgatgatgaagtagatgactttgaggacttcatcttcagccacttctttggagacaaagcactgaagaagaggtcagggaagaaggacaagcactcacagagcccaagagctgcggggcccagggaggggcacagccatagccaccaacaccaacaccggggctgaacaccctgacccacagggaatggccttggcctggaccagcccaagatcccagcgttatctaactcctggagggtggactctgtcctggcttgtttggtgtcctcagatatctttcacacagtagagcaaaatcaccagccctgcactgatgtcactttatgtagaaaaaggccttagctggacctgcgttgccgtctatgcaaatgcatgcaaatactccaggccctgggatgtgggcttgtgttttgtcactgtgaagggggagatgggagaggagcctgttttggggtggggtctggggaaggcaatctgattctgaagctaaagagctttcatcctcttgagtgtatgtccccatagtgggccccttgacccacatgctgaccggtgccttgggatttgactagagttgctggctcgaggcccagcacgaggacttacccctggnggttttgttaggtttggaagcactgtcccttaagggggtgaangtnnnnnnnnnnnnnnnnnnnnnacccctggcttctccccacggcttccacctccctatgtgaaactggtagactcagattcccaattaaagtggctgtttggcacctaatgatggctaaggtgggttttcttaagccaccggggggacaccccccacaccc

SEQ ID NO: 96256 - DNA, 236 bp, Homo Sapiens
tttaaaacagagggataatatctttaataggcaaagacatatgtaaaaacgaagcagaaaagtaggtgtatgaatgacaattcatagatgaggaaattcaagagccaataaatgcatagaacactttcaccactaataaaagaaatgcaataagtatctgcatatgatacataatgttgcagatgtttgtaatttacataaaagatactgaactagggctgggctcagtggcttat

SEQ ID NO: 96257 - DNA, 566 bp, Homo Sapiens
ggatgtgggagcaatgagagttgaaccgttgtttttgttggagatgcagactgtgtcttgaaaatgatgattatatatgcaaattctgccctaccctcaccctcttccaagtttccccccaaaaaggtcacacagtgcggcttcctgtgggaaacaggagcagagctggcctgcagagcccctggggctgtgatgaagctcatatcttatctctgttctattaacaaaatgggagtttgtgggttttaaaaaattccgtttctaaatggaggaatagatgactttctttcttttggtgggggttgggacttgtggctttaaagaaatcacttctgagtaggatgtatattttcgttggatttttgttgttatttctttagaaccctccacagcaacatgcaagaccatggagttaaagaaacccagagacctttatcaattaattgtactgtttgtgaatttgtataaataataacaaagatcctcttaaaacgtttatattcttacagtaaaaggttaaactgatatttatataataaaagaggaaatatgaagtatgtttttgg

SEQ ID NO: 96258 - DNA, 727 bp, Homo Sapiens
acatccgggtgttaagacacctgatggcactgttggtttgtcccctataccccagaaaatctatcctgcaaggtagctacttcaatcttgtcattaaaatgtgtcaagtcacagctcgcaatgccaaaggaatgctggggcagtaagtgaggtggataagtgagcagggcctggtggtgaaagcggccagggaccagaatgctccagacctacagagctggtcaaggttaagtgccttaaacttaccaatcctgggctcagttctcctttgaaaggagaaagtctttgtcctctacttaggcagctgggctagaagtgccttttgacttctaatgttaactaccctccaaagcctcctgggtcaagaaggctctcccaaactccacccctgttcttcctggtcagagaaccagtcagtcattctagtcttctagtccttaaactgatctgatgacttggaacataggatttcactgcaagtctggctttttagtctggaaatacatttgaggtctgttttcgcacagctggatcacctgtttcctggttttattacacaattcagaaggctagaagaggagtttgggggcttggcacctgaaaatttagaccgcattcttattaagtaaaggaagaggtagggaggccgaggcgggcggatcatgaaatcaggagatccagaccgtcctggctaacacagaaaccccgtctctactaaaaatacaaa

SEQ ID NO: 96259 - DNA, 681 bp, Homo Sapiens
  misc_feature (215)..(224): n is a, c, g, or t
ttttttttcaagttatcaaaacatcagactttactgattaaaaactcagattctcactaaaacacacacatgaaaatatctgaacaagacaaagaagagaaccctcttacaaaatcacaaataaatgggggatagcatgtctgttatgtgtcctccattgacctcctttcctatgtccattatctattcatgaatccttccatccatgaggtacnnnnnnnnnngtaaatgacaatcccccttcatacactcttgcagcagacattctttcctatctacatccccagttgtttcatatatgaacttcaatcctgacccctgcccatgaatgaacagaacacccatttcaagaaattgggggttttcaagaatatatcattcactttgacaggagagagaaatacaaacagtgagacatgtccagaggccaaattagaaaaccacctgtgattagttgctgaattctgagtcctcagattctccacatctatcaagtgttttccctaaacttaatctcatgtttcccaagacattagtattcttcaagtttttctttctgaagattcttttagaatgacatggaaaaatattgtagaatctgcacatttataagcacaagtatagttaacctttataaattatctgaattttctagcctttgttatccaacactttggtata

SEQ ID NO: 96260 - DNA, 556 bp, Homo Sapiens
cttggagtcgcagtgtgtctgtaaaatgatgatgacagtgacatcatagaggacatagtgcaagtgaacagtttgatactgagcttggagcctcagtagttctggataagtgagagctgtacgggaggttgtaaccatgagctaccctggttggcagttgacatccgaggaccagcactggtcatcgcacagaaagaaaactttacaccttgagatccctccattcttcttaaacttccaagtgtatgtttgatgggagaagaggggaagggatcaacatttaaaggctctggaaggagtcagataactgtttttggcttcaaatgtagaatgaatccctagattttcctctactgagagaatgaaatcttaacccattccgttcccttgttggtactcagaaacggataccccaaagatgcattttgacatgctgaaaggccttagaagctgccttagaagatctgtctaaccttgtcttgttggtgtgtggaagtgggaatgcccacaggtgcacagggagggagtttctgaaattatctgaccgagaaagcaa

SEQ ID NO: 96261 - DNA, 450 bp, Homo Sapiens
gcaaatcattggccccgggcccagattcctgcaaaccagtgttccgcagggacctgggctgtctcatcaatccaattgtggcaaatctcaaagaccgtctaacaaaaccagctcctgcccactcccttcctttatgtcctggaaagggtgggaaacccagccctgccatgtggcatcgagagaaagacatgagcttgggtcagacacaggctacacctccagccatgtgtgatgtctttggaaagtcaccagcctccctaagcctccaccttgagagctattatgcaagaagaactatataaagactgctaagcgatatgtatggtgcctggtacacagaaggtgcttagtgagtttgaatttccttctttgcctccttgcctttattaaggcagatttaaatgtactctgtaacaatataaattataaattcagagttctagaaagaaa

SEQ ID NO: 96262 - DNA, 600 bp, Homo Sapiens
tttgtcgtatattcaaatttatttagatgaatgtccagccacagtcctctgtggatttgtgtacattcactttttaaaaaaatggtttccataaaaggatttttggtaattgcctaatttttaatacagtatttatatacaaaacccacttcaaactacttactgtacaagagaaaagagaagcatcagattgcatgattttagcaaataatggaaatgtacgacacctatgaactttgaccacagttggcagattaaagggaatgtaacatcacatcaatgagatcttcaagacaaatttatttctatttttcctcctggcctttgctaaaatgatgtttctcttggtgcttgagaaatttcagagagttgtttagtatcattgctgcaaatttagatcactcatatcatttatgagacttggttttatacacttttaaaataattgtccaacagtgacattcctgtgagtaaaaatatagagaagtgttaccaaaatataagcctttattaataaaaatctttggtagtaacagtattttaaattcctctcaacgatatttggttaactaataaactccctccacctttgagctacag

SEQ ID NO: 96263 - DNA, 347 bp, Homo Sapiens
tttttctttctgctttgttttgtaggacttgttctaacatggaaaacaagtccagaagactctcctctgactgttacctttgccccaagccaccccaaacttttatgctcatgttttattaaagcaggtgctccctggaatctctgggacatttttgaggcatttgaagcagaatatagagtggtctcatctccttccttaatcttcctggtggttgggatgttccacttgtatcatagatttttttattacagatatgctccactgtttttaaatgtgaacttgtgcgcaaatgtgcagattcaatgttcttgttacagattgaataaatttttattttgaagatg

SEQ ID NO: 96264 - DNA, 402 bp, Homo Sapiens
ctcccttttgatggtggcctctgggtactcgggcagagtccttgggacaccagcctctctggggttctcaggccattcccgttagggctgtcgcccaggcctaagtgagtcgtgtgcctctattggaggatggctgttcccctggtggctgcatccaagtatctgtctttctttatggaccacgaagggaagcccaccttcctggaggcaggaccttcggcctaagaaacacacgccctggtgctatctgacctggggtccagcgaggtgggaatcccagtgtgtgagcgacaggccttcttctattgacttacaatattctagaaggacctacgtgtggggacacagttttccaaactgaggaaaatgttgcaataaaagaatatgttgtaagaaaaaaaa

SEQ ID NO: 96265 - DNA, 433 bp, Homo Sapiens
gactagttgaaacatttgagctggagaggcttatgggcaatatgaagtgggccaaattcttgcaatacaccctattcaattgaaagtacagtgtctaaggataagaatacttctttaaagaccaacaattgttttaatgcaatcttaattagtaaatggtttacattttttctattgttattggttttaaaatttgctaccctgaattctgaaatattataagagttaataccaaaaatacttttaatgtctgacatctcttacatttcacatggttctttttattcattgtaaataaaagtaaacttggataaatttgagaataaactttgaattgttgcaaactatgattatcaatttgtaaatttaccctttgacataataatgtacatttttaaatgtagccattaaattctctatatttaacccaggg

SEQ ID NO: 96266 - DNA, 395 bp, Homo Sapiens
ctctgggctgtgagctccccaagccctgggatgtcttcgtttgcctccgaggcaaacctatatccttagggcctgtgtccacagtccattccatactaatgactatttgtagactaagcgatgaatgaggtgggctgttcttcctgtcttcctgtgactgccccccagtcgttctcacacatgctggaaatccaggggcacctctgactcttcccagccctccatcctgagctggtcacaagctcatgttgactctatctccaaatccatcaatgtctctctgtttcttgcaccatatctgacatagtacaagtaactttcatcctgccctggaacactcctttagcactccctgtcccttctccatacagctttcagagtgacatattttaatt

SEQ ID NO: 96267 - DNA, 113 bp, Homo Sapiens
aaataaaacttatgttttgttgttttatgacttgaacaagttttgatattttaaaagcgctcagcatttaatctggttgtttgggggaaaagaaaagaaacaaagaaaggaaa

SEQ ID NO: 96268 - DNA, 1229 bp, Homo Sapiens
gcgaccaaaaccctccctctggagccacccccgcggctgggaaccaccaaaccaggggtcccgtgagaacagacgccaggtccccgagttcgccgagactccggggcaccccaccgaggcccagctttcaagaccacttgggggggattggcacaggccacttgcctggaacaggcatcaagaaaattggtatagctgactgaacacagtcttcgtcttctgagctccagaggagcataggcgccggcgtgtcatgagttccgccagctcagttcccccttggctgtatagtgcagctcatcaatcacttccaacaagaaagtacaccctccccttccccaaacactggaaactctctgatgtgcccttctgactgcagggtaggaatcagcaaaagtatgttcagaaacttaattgcccaagcatcttctttagtggtgactgggacagtcacaagatcatgaagttctagttctctagctaggtgtatgctggcaccagtgtccaacacagctgccttctcaggtgccaagaaaccaggaagctccttcccatatgctgtttgcagttcacaccagttctgagtagccaggtcagtgacatataaatatttaagctggaatctctccatgggtgataatatatccagtcctcttttccagttttgtaagcttatgggcttgtcatccttcccaagggattcagaagatgggccaggcatgttaactaaagcctttgactcttgggcatcttctaggtccagaaactccaggaactctgagtcactcaagtctgagaaccctgaggcttctgctgacactgtctcctcttctcttgtctctgccatggtacagctctggattgggctagaagggccctgtgacttcgttgatcttcctcctcatagggaaggccagaatgctgaaatgacaaggctgaccattccctcacgttgggtgttttctcctctcacattgacactgcacagactgttacccaccccagatcctaggttacataacgctcgcctctctcctggggcaaactctctccatgatttcttcgttcccccgtactctagatgcaatgacttgatccaatccctgctccctctgatactcctccgaacctcggactccacctggtttcgccgcggcctcggagctgctcccggacgctcccggcgaggagactgaggaagccgggcagagcgcgctgccggagcggac

SEQ ID NO: 96269 - DNA, 479 bp, Homo Sapiens
  misc_feature (239)..(316): n is a, c, g, or t
  misc_feature (341)..(406): n is a, c, g, or t
acattatttgattggtagtttgacatttagataagttgcgtgaaggtttgtagaaagatataataggactttaagataaatcaaacaagcaatttcagtatatagaaaatttaatatgaaatcacttaaaatatttcaacattaagaagtcttaattcagtgccttggcatgagacatttaaaagcatgtttgggtctaatctcaaattagttcaggggaacagaaatagctgaaaatnnnnnnnnnnnnnnnnnnnnnnnnnnnnnnnnnnnnnnnnnnnnnnnnnnnnnnnnnnnnnnnnnnnnnnnnnnnnnntataaagatatttgtagattcaagnnnnnnnnnnnnnnnnnnnnnnnnnnnnnnnnnnnnnnnnnnnnnnnnnnnnnnnnnnnnnnnnnntcatctttctgtgtgtgtgtgtatatatatccacacacacatataaaatctattgttgcttagtggtggaatt

SEQ ID NO: 96270 - DNA, 586 bp, Homo Sapiens
  misc_feature (130)..(159): n is a, c, g, or t
  misc_feature (481)..(481): n is a, c, g, or t
  misc_feature (537)..(537): n is a, c, g, or t
gcagatgggaccacaggtacaagccacaacgcccggctaatttttatatattttttggtagagacggagtctcatcacgttgcccaggctagtctcgaactcctgagttcaagccatcttcccgtctcannnnnnnnnnnnnnnnnnnnnnnnnnnnnngtgtgagccaccatgcccagcctaaaaaagggagaaatttctaggtgcatactgcctgctggactgtatagcccattacaacatctggtcactaagaacctcctattaattccttacttgcattctcaggatcaacacaaaaaatatgagcaagcaaaaacttatcatcaagcaaaaaggtatctatctattaaaatagctagatatttcccaaacacccctcctaggatatctgctgccaataaaaagtttggggctagtgaaaactcttggcattaaataaaagtaggaatctatttcattggctttctctgtggctcanactatggccatggaaaattatgctctggatataattgtgaatatagaggtctttanactgtgtcattgacactattcctatatcacataaagttttatgttacaa

SEQ ID NO: 96271 - DNA, 546 bp, Homo Sapiens
cacactatgctcccatttatacaacattcttgaaatgacaaaataagaagagatgaacgattagtggttaccaggagttagggaaggtggggagggagatccttgtggggatgggacttctttatcctgattgcagtggtagttacacagatgtacatgtgacaaatgatttggactgtccacccacatcgcaccagtgtcagagtctttgttggaatactgcattacaaccatataagatgtaaccatggagggaaactagatgaagggtgcgtggggcccttacctttacaacttcctatcatctgaaattatttcaaaatataaagttaggaaaaaagaaagcaacagctctaagtgcagtatggcatcctggattggccgctgcagcagaaaagggacattgggaaaaatggtaaaatccaaataaactctagctattagtatgattgcacctttagttttgataaatgtaccaaggttatatgtaagctgttaacattaggggaacctgggtgaaaggtgtatgaaacttctgtgaatctg

SEQ ID NO: 96272 - DNA, 469 bp, Homo Sapiens
  misc_feature (56)..(203): n is a, c, g, or t
gcctggtctgctgaggaaagtgtctgatggatgcggaaatggccaccatgcccagnnnnnnnnnnnnnnnnnnnnnnnnnnnnnnnnnnnnnnnnnnnnnnnnnnnnnnnnnnnnnnnnnnnnnnnnnnnnnnnnnnnnnnnnnnnnnnnnnnnnnnnnnnnnnnnnnnnnnnnnnnnnnnnnnnnnnnnnnnnnnnnnnnnncctacttgttaacagcgttatggggctggaaggaggctctcagatttccctgccctcctcacatcccccaaccctccctgggcgtgggggtgtcaagcatgagtcaggctgagcctgactctgaagctgttcccagctctttagtctaaacttcaaatcttcaaccctgttccctaatccaacacattccccaaatgaagggactggacagtgagatatcgggaaaccccatgaaaatagatgcataataaaggtgaaaatcattt

SEQ ID NO: 96273 - DNA, 469 bp, Homo Sapiens
tttcctcccctctacatgacagggaaactgagaagacctctttcaccgcaggcacaatggggttttgtaggcaagcctcagcagtgtacagggcaggccttcctgacaggcagagccccttctcactaaagagagtctcccccacatctcgcacatttgcagacatatgtgtggtaccaacagaaacagaaataactgagcaaccgaaccaccaatagagctcttagattaagaaccttggttcaaggaaggagttttgagcaggtgctggacagaaagactgagaactctatgatgtaaatgagagccctgtgataagccaatcagcctgctgtggcctggaactgattgatcatgggccaggaaggagcacagaggggtaacctggcaaagaacaaaggaagaggtagccactggcggagaatgactaggacagaagaggcccagaagagagctaggactgggaatc

SEQ ID NO: 96274 - DNA, 581 bp, Homo Sapiens
tgctgagcagctggcaggtctgagcaaacgggcataaactgggacaggaacaagggcatgaattgcagccggagctgaatgctggagtgggtcgaggcctaggtgctgccctgggaactcgctccctggcaggactgcagcggggtggtgtggtggtgctgcgagtttgatgggcggatatgacaggagtgtggtttgccccttgagtctcagcccgggctccacgaagacgctcactgacacgagtccccggcctctcaggggctttggcctttttactgcgccggtgggtgcctccaccagtcccacaggaactctcatccccagcccccggcccctcctcctcctcttggggtaggcggaacacctcctccttggcttggtccaggtctttgcgggcagcttccacttgctcttctgcctgtttgagctcctctcggctcaccacctctcagtgaagcctccaggaatttcatggcatagcgctcaatgggggtcagctgttctacgagggcagcaatttcctgctcagcccgggacatctcctcatccgtcagccccaggcctgacgcttgctcaga

SEQ ID NO: 96275 - DNA, 635 bp, Homo Sapiens; identical to SEQ ID NO: 5574
  misc_feature (369)..(501): n is a, c, g, or t
  misc_feature (512)..(526): n is a, c, g, or t

SEQ ID NO: 96276 - DNA, 1009 bp, Homo Sapiens
gggtccggaattctcgggatatcgtcgacccacgcgtccgcgacttccttgttgtgagccccggcccggcagtgtcccgactcgtagccccgctgttcttaatccgggccgctagcctgagtctaggtcgcagccgcagccccaccccgtcggtcaccttttcagcgcaggtcctttccccgcacgccctgcgctccctaacatgcccaaccccagcagcacctcctctccctaccccctccctgaggaaattaggaacctgttggcagatgttgaaacatttgtagcagatatactgaaaggagaaaatttatccaagaaagcaaaggaaaagagagaatcccttattaagaagataaaagatgtaaagtctatctatcttcaggaatttcaagacaaaggtgatgcagaagatggggaagaatatgatgacccttttgctgggcctccagacactatttcattagcctcagaacgatatgataaagacgatgaagccccctctgatggagcccagtttcctccaattgcagcacaagaccttccttttgttctaaaggctggctaccttgaaaaacgcagaaaagatcacagctttctgggatttgaatggcagaaacggtggtgtgctctcagtaaaacggtattctattattatggaagtgataaagacaaacaacagaaaggtgaatttgcaatagatggctacagtgtcagaatgaataaaactctaagaaaggatggaaagaaagattgctgtttttgaatctctgctcctgataaacgaatatatcagtttacagcagcttctcccaaagatgctgaaaaaatgggtacagccagctgaaaatttgtattgcaaagatatggaaatctggatattaattcctggagggattattgatggaaaaaaggaggaaattatttggagtgatggttggaatcaatccctcctataccaattaaagccgattccccacctaaacaaggccaggttcaaacccaaaat

SEQ ID NO: 96277 - DNA, 780 bp, Homo Sapiens
gtgggcatcccagcactgagttctgcccgggagaagccgacccctcccgcaatgcccgccccgccgtgcgcctcctgccatgctgcacgcgccgccctccgccgtccgctctcgggccaagcgctgtgcggtgcctgcttctgcgccgccttcgaggccgaggtgctgcacacggtgctcgccggccgcctgctgccgcccggcgcggtggtggccgtgggcgcctcgggcggcaaggactccacggtgctggcgcacgtgctgcgcgcgctggtgccgcccgctgcagttcgcctcgcagaagaaggtggtgctgtacgcgcacttccgccgcctcgactacttctccgaggagtgcgtctacgcgccagaggccttccgcggccacgcccgggacctgctcaagcgcctggaggcggcgcggccgtccgcggtgctggacctcgtgcactcggccgagcgcctggcgctggccccggccgcgcggcccccgcgccccggcgcctgctcccgctgtggggcgctggccagccgcgcgctctgccaggcctgcgcgctcctggacggcctgaaccgcggccggccccgcctggccatcggcaagggccgccggggtctggacgaggaggcgacgccggggacgcccggggatccggcccggccccccgcctccaaggccgtccccaccttctagcgacttcgggcctcccgccgggatctgatgccgcggggtgggggctgcctgtaaatgacactgtgaataaacccgttaccttaaaa

SEQ ID NO: 96278 - DNA, 669 bp, Homo Sapiens
  misc_feature (557)..(557): n is a, c, g, or t
  misc_feature (616)..(616): n is a, c, g, or t
cacgggggctcctgccgccccgcgccgctcgcgcccttcttccgctgcgcttgcgcgcagggctggaccgggccgcgctgcgaggcgcccgccgcggcacccgaggtctcggaggagccgcggtgcccgcgcgccgcctgccaggccaagcgcggggaccagcgctgcgaccgcgagtgcaacagcccaggctgcggctgggacggcggcgactgctcgctgagcgtgggcgacccctggcggcaatgcgaggcgctgcagtgctggcgcctcttcaacaacagccgctgcgaccccgcctgcagctcgcccgcctgcctctacgacaacttcgactgccacgccggtggccgcgagcgcacttgcaacccggtgtacgagaagtactgcgccgaccactttgccgacggccgctgcgaccagggctgcaacacggaggagtgcggctgggatgggctggattgtgccagcgaggtgccggccctgctggcccgcggcgtgctggtgctcacagtgctgctgccgccggaggagctactgcgttccagcgccgactntctgcagcggctcagcgccatcctgcgcacctcgctgcgcttgcgcctggacgcgcacngccaggccatggtcgttccttaccaccagcctagtgctggctacgaaccccgg

SEQ ID NO: 96279 - DNA, 319 bp, Homo Sapiens
ttgcccgggcttggggcgccgcgctggggaaagccgggggcccggacacattggcgtgagacctgggagtacgttgtgccaaatcattgccacttgccacatgagtgtaaatgatggcggatgccaagtatgtcctctgccgatgggaaaagcgattatggcctgcgaaggttttggcccgaaccgcgacttcaacaaaaaataagagaagaaaggaatattttctagctgtgcaaatcctctccctagaggaaaaaattaaggtgaaaagcactgaagttgagatcctagagaagtctcaaattgaagccattgcttc

SEQ ID NO: 96280 - DNA, 462 bp, Homo Sapiens
  misc_feature (41)..(54): n is a, c, g, or t
  misc_feature (359)..(367): n is a, c, g, or t
tcaattcttccttttttattactatttcaaacacacacacnnnnnnnnnnnnnntaaacttagatgataatcaaaatcaaaaagtcaacgtaaaaactggtttcttggtttggttgggtcttatttgagttagtttgtttctcagtttctcgtatggattctttggggtactttggtagcctgagtggtctttttcatctctttcgcgtccattactcaaggagacagcataacagatgcagaacaagtcatatttgaagaatgttttgtactaaacttcatttaattattcagtttttaaagggaaaaagggcgtgagctcacacagtgagctgtttatttaaatatcattaaggagnnnnnnnnntatggtgagaagctcgctcctttcaacttgtttggtactgacagctgatagaagctattttctaataataaacatccagtgtgtgaaagacaaaa

SEQ ID NO: 96281 - DNA, 474 bp, Homo Sapiens
  misc_feature (310)..(330): n is a, c, g, or t
tagtggcctttccttgaaattgctggagcttgtgcatcatcaaaataatggcataaaccaaggaagaagaaaacaaaattgaggaaatgggatccaacacaaaagagagacaacaggattaattgagtgttggtgaaaagccacagcctgtaaataatgcagttcgaactgaaatagaccaggaggctcaaggagagacttcttcaagaagataaaattgatagaatgcctaaggagtttgagtgcattgagaatagattcatatcagttttggagaactgggtggatacattaatgttaagtacatagnnnnnnnnnnnnnnnnnnnnnttctcaattttagggaaaataatcatagtaaactacatgttttagttaccaatagtgtttatgtagtcaatataaacaatgggcattgatataaataatgtatgttgatctgctataacaaggtaaaatgctattggggaaccc

SEQ ID NO: 96282 - DNA, 492 bp, Homo Sapiens
atggtggataacttataagcaaataattaaagatctacaaaagtaaattcattgattgattgaattgggttgtgcacaaaaaaggaaaataaaagaatttaagggtgttttcctgactttcctgatggatgaccttgctaaaaattccaggcgacgctggtatccagagagggttctgtgtgaaaagagattccatgagacaaatggaagaacaaggagaggcgaaaggaacaatagaggtctttcagaagcaggtcaacaaacattgatgcagcattttctttgtgcgtgttgaagtaacaatgagcctcagaacttctaataagcagcataattgccatgtggagaaggctacattatacaacaccaatttctctctgaagatccaccacctccggatgaatgttactgattcccactgtctatttcatagatcttcaactcttgttcttttgtttaaagatatgagtctaagcttagacataaaaaaaa

SEQ ID NO: 96283 - DNA, 565 bp, Homo Sapiens
caattcccaggttggaaaaacttaagctaatgctagctcaagagactctgcaactcatgagagcgaaagaattgtatttaaatcgcaaaagagctgaaattcagggaaagatggaagatcttccagaacaagaaaaaaatataaatgttgtagatgaattagaaatacaattttatgaaattcagttagaactatatgaagttaaatttgagatattaaaaaacaaagaaatactgcttactacacagttggactctcttgaaagacttataaaagaaaaacaggatgaagttgtctattacgatccatgtgaaagtccagaggaacttagtcattgactgtggtggggctgcaggacgataagaattcggaagtgaaagaactcagaaggcagtgccagcagctggagtctattaaacggggcaggatctgtgtcaaaagagcttctctccagagtagaaaggatcagtgcaaagaaaatcattggctcagattgcaacaggctgaagaaagcataagatattctcgtcagcatcacagtattcagatgaaaagagacaagata

SEQ ID NO: 96284 - DNA, 148 bp, Homo Sapiens
caataaagggacaaaatgggtgtatgaacaggttaatgcagacaactgccaaaaaaacacagacagtggtttttccaatagaacttaacaaagaccagaaacaaatacaataaaaagccaggttgtaatgacctttggtcatctaaat

SEQ ID NO: 96285 - DNA, 692 bp, Homo Sapiens
  misc_feature (373)..(386): n is a, c, g, or t
cacatgtgcacacacacaacctctgcggaaacactatatgaagttcgaatccctgaatatcaataaaaggaactgagaaatattttggtgcaagaacaatgaggaagttgatcctgtaacatgaaggaagtgtaactgtttcacgtagactaaatatttaaaaatgggtttcatgttttttatactgtttttaactaaagttataaaaatgtttccaacaagttctctctccttatgttttaagaatcccaactatctcagtaaattgaaataagggtattagcagttttctaattagtaacacaaatctgtctaaacaagaggacatcctagtacacaaaataatgtcactgtttcacaccagtctagaccnnnnnnnnnnnnnnttgaaatgttcagagtcaaaaaggaacttctgaagataaattaattcatccctaaaaattaaagtgtgttcaaaatagaaaaactattgtcaaaatcatttcatagtttaattgcaacacgtcactaacagatggtgattcttctcttggaaagattcaagtaaaaactctgatacaaaagcaaggtaaaacgcacagggttcccttatgtagatgtacacatggcattgcatatagagattaaattattatacttgtcgttaagttctttattaatttttaaataaaaaaatcaaagatgaaaaa

SEQ ID NO: 96286 - DNA, 784 bp, Homo Sapiens
tggtggtgggagacgcagagtgcggcaagacggcgctgctgcaggtgttcgccaaggacgcctatcccgggagttatgtccccaccgtgtttgagaactacactgcgagctttgagatcgacaagcgccgcattgagctcaacatgtggaacacttcagggtcctcttactatgataatgtccggcctctggccctatcctgattctgatgctgtgctcatctgcttcgacattagccgaccagaaacactggacagtgttctcaagaagtggcaaggagagactcaagagttctgccccaatgccaaggttgtgctggttggctgtaaactggacatgcggactgacctggccacactgagggagctgtccaagcagaggcttatccctgttacacatgagcagggcactgtgctggccaagcaggtgggggctgtgtcctatgttgagtgctcctcccggtcctctgagcgcagcgtcagggatgtcttccatgtggctacagtggcctcccttggccgtggccataggcagctgcgccgaactgactcacgccggggaatgcagcgatccgctcagctgtcaggacggccagaccgggggaatgagggcgagatacacaaggatcgagccaaaagctgcaacctcatctattctcacacatctaacctctaggcaacatgcactaaattcaaaagcaaggagaagcccttgccccccatcagtccaccagccctagaacctcccttgcctcaacagtcacctaataaagcccaactccatg

SEQ ID NO: 96287 - DNA, 474 bp, Homo Sapiens
cgagtcatccaagcccgggcaccagacgtaagtgatgaggcttccagatgattcctgccccagctgttcagggctcccagcagagaagagctgtacccacagagccctgcttggcttcttgacctgcggaatccatgaccctgttacacccctaagttctgggatggttcattataacaacagatcaccggaccacggaaattacttctcctcttctactctttaggctaactcgtttttatataaacaactcatccccacccagacacacacacaaggccctagagcagcagtttccgaacagtgccgtatcccccggggatctctaaaaaatactgacacccagacaataggggggaatcctaaaaatacctgaccaagactattcaagattgtcaggctcatgaaaaacaaagaaaagtctgatactacatcctggatggaacataacattaaaactgagaaaatcggaaa

SEQ ID NO: 96288 - DNA, 592 bp, Homo Sapiens
gccagcccaatggtagtttctgaacctattgacattgttcaaaatggatcatgtgccatattttgttagttgacatctgagttttcagtaaaatgattatggaattaatcagcaaatgtagaagaatatattcaaagttaaaattcagtggcagcacagattatttttatcagagctgtaaagaaaacaactgtccttttctccccaccacccctcctgccccactttggcccagaaaccaaatgtgaacttcctgtctcccacctcagcactagtccatgccaggacaccagctgacaatttcttggttttactgtcaataattgtaccatgtgatcaattactgtcctcacttagaacaaagcctgagtccgagaatatttatattttaccaatatatgcctgttacaagagaaggaaatatgagttatttaagtttaacttttttatgtgaattcagagtttatttatcgagggaaatatgtacaaagaagcttcaaatggaatatttaccgacattccttatacatgacagacacttggctacatgggaagatgatgttaataataaaatgatttttaaatggaaaaa

SEQ ID NO: 96289 - DNA, 768 bp, Homo Sapiens
gtaaaataaatcagtttgatatataaacaagaattttcatagtatttgctaacgtgaggcattctcagtaatgtttcacccatatttatccattcttgggtaagttttctcaacatggcaccaagcactttagcagttcagcagatggcagtgatctgtgctgtcatgtaggagcttctaaatatattgcaactaatctcaatcccaaacctgaagtgaactatttattgaaatgtaaacactaaaatggtgataaatttcaaaaagtattttcccttgagaatattttttcccttaagttgcaaaaagaagagtgaccttagggtctttataaagaaacgtaatgttctgataactataaaatcgtaatgatttgtattgcaagtcaaagccgcatgctatcaatcactacttacaaggaagccagtagacatcactcaaaattttaagtattcttttctctgtgtcaatataaaacttcactaggaaaagaagtatttccaggcacgcatttccccttaaatatatatttaaagtgcatttctattgctagtccgacactagtaaacatccagttgcctaatattgtttatagttgttttatctgcaaaatacattagagcatttcaaattacatttaattataagataaacatttaagatagttatataatttatttgtaataacgtgaattaagcttggaagcttagctatcacttaaaatccactggcaggtttataatactttaggaagtagttaaaagtaa

SEQ ID NO: 96290 - DNA, 601 bp, Homo Sapiens
tcactatctcacctgtagctgcatctatatatgacagtcacaattccaagtctggattgcatttgagtgtgagatttaggacctcaccagtgagaactgtctatgtgtgagggtgacaattctatcagatggatgtgcatatgagagtcacaatctcaccttcgttctgggtcctgttatgacactgtatcatttgagggctttatacaatatgccttgatatcataatacactatgacctttatttaagtaggagacccaggaccttatctgttgccctaagcctagatatcagagtcaaaatctgttctcttagctggatccaggtatgagagtcatcatctcacctgtgagctgtgaccatgtatatgtcgcaatttcacctgtcatcaggaagcagacatgagagtcctatcacctgggtgctggatgaaaaaagatgcaaagaagacatatttgctttttatccacacatcatttccaatcactatgctgagcaaagtcaatgtgagcagagctgagaatagcagttttctggcaggacggccacttctgagcaaaaaatgacacaataaaagtataaatatttaatagtaaaaaa

SEQ ID NO: 96291 - DNA, 574 bp, Homo Sapiens
tccttcaacctctctctgactacagaacattctggaatctactcctgtgaggcagacaatggtctggaggcccagcgcagtgagatggtgacactgaaagttgcaggtgagtgggccctgcccaccagcagcacatctgagaactgactgtgcctgttctccctgcagctgaaaatggagccacagagctcctcagggctgtttgcttgtgtggcatcccagcacacttcctgcctgcagaacctccctgtgaaagtctcggatcctttgtggtatggttccaggaatctgatgtttcccagcagtcttcttgaagatgatcaaagcacctcactaaaaatgcaaataagacttttttagaacataaactatattctgaactgaaattattacatgaaaatgaaaccaaagaattctgagcatatgtttctctgccgtagaaaggattaagctgtttcttgtccggattcttctctcattgacttctaagaagcctctactcttgagtctctttcattactggggatgtaaatgttccttacatttccacattaaaaatcctatgttaacataa

SEQ ID NO: 96292 - DNA, 632 bp, Homo Sapiens
tggactatttttttatttgtagcagagattactctggggtgtttaaagtaagaaagagagtagtttagacacttagagaaatgtctttgtttgaaaaaaagtgcactatgaaagcgtcacgtggtctagccccatactagttctctttttggagacccaggattcagtgtgggctctgcccagagttcacagatccagttaaaagacagagactaaatttagaactacctatctaaataaaattggtttccttatacaattctatgatagatttctgtaattttatgtttgacttggcatccatttttaatctccctgtagtaccaccagactctttctctctgtaccttgagatataaatttcactatctgatttttcacaagagttggccctttaatatgcaaatttagggctatgtagctgacatctgcctggagtaataaaacaggttatcaagaaattggaagtctaaaataggaggaaaaaaaagaggtgttatgaatctataagatctatttctatgtgtctagtatatctatgtatttgtgtcacgtatatgtttcactactaaaaatacataaaagctctaattaattggcttaaaggaaaaagtgcttaaatcaaacacttt

SEQ ID NO: 96293 - DNA, 483 bp, Homo Sapiens
tatctctgtttctgtcttcatctcttattattatatctctcgtgatttctgcctttgcctttctgtctcctttttttcccccagttttcccaaatggtaaaaaccaggagttactaaacaacaaagggtaatcaatcccttaccatagagtagaaagcttttggggtttttgtttgttttacttttgaggtctacttatagatatgtaatttaaatataatcaaaagagaattttattaacagatgaatatcaatagcaatgaagtttatttgtagactcaccaaacaaaagtaacctccaaatggtatattgtacatgtaatgtttattcattaaattacaatttcatttttttcttcttttgaaactttctaataaaatcagcagtttattagtgatcattccctctttgctaaaagtctcatcttttttgttccatctgttccattataataaaattctgtttataatccttaaaaaaaa

SEQ ID NO: 96294 - DNA, 675 bp, Homo Sapiens
gaaccgctggttaattgcgacgggcacggctgcagcgtcgcggtgcatcaagcttgctatggcattgttcaagtacccactggaccgtggtttgccaggaaatgtgaatctcaggagagagcagccagagtgatggtatgcaattcctgttggttagcctcatctgaaaacgtcactcctggatacatagaacatcactgcgcatgtgcatctccccacccccgatgcctggtgtctaacgttcctccagtttctggtgctctgatgcattgcttttgggcttgtcttactacagcagctttcttcggtcctcagtcatttaccacttgtcatatgtcctttctagtttccagggatattcttttttatatttatggctttatgccatttatctcagttgtcattggcgtttcaagaaggagaggtggtagtgtttaagtggaattaactacttgtgtttctgatgtggtcttttatatttcttacagggttttgttttaccaagtactagtcttcagtctatcctgtttacttgattttttcccactcaactcacaaacatttttgaatcatctcatgaattctgctttccatttacatttttgcccttttgtcttttcctcttcgctgttaaacttcctgaaaaaataaaactagttgattcacttcttaaaa

SEQ ID NO: 96295 - DNA, 409 bp, Homo Sapiens
  misc_feature (1)..(1): n is a, c, g, or t
  misc_feature (136)..(159): n is a, c, g, or t
ngcattacatagtgcaaacaccaaaaagacagagctattaacttagtggtgcttataaggaaaactaggcaagaatgcagaaaatgccttcctctttcctcatctagtgagctggccacattcaataagttgttgnnnnnnnnnnnnnnnnnnnnnnnngcgaaagactgaagttttattattactcaattcagtctcccaaaaagttattttaaattgctgctttcttcccacttgatgaaaccacatttgctgctcttgtgattctctgatcggaaatatttggaaaatttcatgttttctatatattgacagtgcattttatgccacctactcaagtgtatgtagaaagagatgttttgggccaggagcagttgctcacgcctggtataccaattctcttgggaag

SEQ ID NO: 96296 - DNA, 842 bp, Homo Sapiens
  misc_feature (100)..(100): n is a, c, g, or t
  misc_feature (127)..(127): n is a, c, g, or t
  misc_feature (157)..(157): n is a, c, g, or t
aagaagagcagtttccaggatctgcataaagggaccttaggtcagatgtctggagactaagcaaagaatggtgacctgatagtcagcatgcgatttctgngcagaaagagaactaagactgccacanaggcaccctattgccatccagacagttggnccagggaagaaatacaaggtgaaatttgacaacaaaggaaagagtctactgtcggggaaccatattgcctatgattaccaccctcctgctgacaagctgtatgtggccagtcgggtggtcgccaaatacaaagatgggaatcaggtctggctctatgctggcattgtagctgagacaccaaacgtcaaaaacaagctcaggtttctcattttctttgatgatggctatgcttcctatgtcacacagtcggaactgtatcccatttgccggccactgaaaaagacttgggaggacatagaagacatctcctgccgtgacttcatagaggagtatgtcactgcctaccccaaccgccccatggtactgctcaagagtggccagcttatcaagactgagtgggaaggcacgtggtggaagtcccgagttgaggaggtggatggcagcctagtcaggatcctcttcctggtactgttcttctctacaattttggaggcagaggttggtggggggggaacttaagaaacagtaatgaggatggttttatagctattccatagccttcctctttcttatcctcgtatgtgttctcactgttttttggtcaaattttactttgccctttttgttgttcctctgcaggtcattgttgaaaataaattatctgaattataacttccccacactt

SEQ ID NO: 96297 - DNA, 1022 bp, Homo Sapiens
  misc_feature (878)..(976): n is a, c, g, or t
ggtggcatccagaaaaaaaaggggtgtactacaggtggcgttccccaccaggggtgcgtttaaagaccaagttctagtttgccccggggcgtaaattagccgggggtgctctctcaaaggtggagtatagttaaaccgattctcgccctcgaggagaaattatgactagggtttttcttggccaagagtgaaaatgaaggtggggccccctacctttttcctaatggggtccgtttggggatcttgagcttgtggggcccccattcttggccggcagcccctgaaatctcccgggcccgttttactttcaagctcttcagggacagttctctgccctggcacacaaaaggcccctcttgaccccagccgacccagacacaccccctccaaagatcccatcggagcccaccatcctgggagcatcacccaaaacccttcctctggcttctcggatttgcatccgaccttcgaataccctccatcccgcaatttccaaatgagtacagtcaccccaacactgaggtcccttctctgatgggcagcccctccccagaccctcattccccctctccacaatcttcctcttccaagatgtgacctctccctctctgtgttcctttctctccatcagtatcacctggctatggtcatagtgtatttcagccgggccggcctcccctcctggcaataccaacgcattcatttcttcctggctctgtgagtggtttgctgcctcctatccgtcaatatccaatgccctgggacagcgggggaagtgggattccagcctttcatttattctttcacctatttgtcctctttactctgtgtacaaaaaagagaggattatactatcatagactgttgtttctaaacannnnnnnnnnnnnnnnnnnnnnnnnnnnnnnnnnnnnnnnnnnnnnnnnnnnnnnnnnnnnnnnnnnnnnnnnnnnnnnnnnnnnnnnnnnnnnnnnnnctcctcgtgcggaattcgccacccaggcctcgctaccttaggaccg

SEQ ID NO: 96298 - DNA, 548 bp, Homo Sapiens
tttttttagattagtgaaattttatttatagccataattcatctcgaccaatgatttcacaagtatttgaaagtgtaatgggtaaaagatgcagacagaattcaagagatacaaataagcacacataaaaatatgtcattttctctctagtcccctcccccataaaaatatgttgtcatgtgttaaagaaatgtcagttaaagcaaccttgagatacttcctttatatctattaaattggcaaacatgtttagaaatgttctttcttgactcgggcagtggttagacaagtgttcacttcataactattcgacaaaactgtgtgttgtatgcactcttctgtacctgtaacagaaaatactaagaaaaaattccactgcttttgcgagtaagtcttctactggaacttgttctaaggaaatatgcacaaagaagttctctgtagtatcttctaaaaagcagaactggaaactacctaattatctaccaaaacagaaatggtttagcaaattacagtaatgaaggaaaattacaaaatattatggtagt

SEQ ID NO: 96299 - DNA, 1034 bp, Homo Sapiens
  misc_feature (951)..(951): n is a, c, g, or t
acggcagtaactcataacggtcttaaggtagcgaggcctgggtggcgaattcggcacgaggcgggaacacaacgttgttcagttgctcacacaatttctggctggccatagacatgtctttgaaccaccagagtttgagattgtggttttaccaaccacattaatgtgatggtgaaatttccatctatgttgaggaagaattacagttgatttatctctcgtcattgaagaacagtcagagggaattgttaagaagcattaaacccgaaataaaaggaaacatgagtggaaatttcacctatatcattgacaagttaattccaaacacgaactactgtgtatctgtttatttagagcacagtgatgagcaagcagtaataaagtctcccttaaaatgcaccctccttccacctggccaggaatcagaatcagcagaatctgccaaaataggaggaataattactgtgtttttgatagcattggtcttgacaagcaccatagtgacactgaaatggattggttatatatgcttaagaaatagcctccccaaagtcttgacattttcataactttttagcctggccatttcctaacctgccaccgttggaagccatggatatggtggaggtcatgtacatcaacagaacagaagaaagtgtgggattatacattatgatgatgaaagtgatagcgatactgaggcagcgcccaggacaagtggcggtggctataccatgcatggactgactgtcaggcctctgggtcaggcctctgccacctctacagaatcccagttgatagacccggagtccgaggaggagcctgacctgcctgaggttgatgtggagctccccacgatgccaaaggacagccctcagcagttggaactcttgagtgggccctgtgagaggagaaagagtccactccaggacccttttccgagagataagntccggaagggtggggaaatactcagtggctaaccgggttaacttaaagatgcctaaccttgttctagcataatgcactacgtt

SEQ ID NO: 96300 - DNA, 467 bp, Homo Sapiens
  misc_feature (336)..(361): n is a, c, g, or t
acagtgacctgcgcaatgtttatatgctttgacctactaactttctcctaactaaatatttgattttaggagagtgtttaaataaattacagtatgtctatatgatgaaatgttattttgccattaaaattttgtttacaaagataatttttattgacataaaaataactttaatgtaatttatgttgaaaaagctgaatacaagtctttatatagagtaatatttgagctgtgttcaaaaatacataggaaaagactgataaaatgaaatatggcaaaatgttaatagttttccctggaataggataataggcaattttaaaacagactcctttnnnnnnnnnnnnnnnnnnnnnnnnnntagacttctttatatcttttgagctccctcccttttattatgtaatgaatatgtgttgcttttgtaataggaaaataataaagttaaaatttcaactgcaaaaaaa

SEQ ID NO: 96301 - DNA, 440 bp, Homo Sapiens
gagacccatctgagcagtcgccacccgctccccagtgcctctgtatggccctatccagggacacccatgggcatgcgcacatggcaatcctgaccaccacctgagcacaggtgccccctcgggaccaccccccttctctttgtttccatcagaataaccaaaagcatttaaacgtgttacctttctccatccatctagactccagaaacaaaaatcaacacaaatctttattttttgatttaaaagatataacaaaaaattatggggagagtattcattatggcaggtgtctgtctgtaagaaaaaaatatatatctctatgtcatatagcgtgttagcaggtttattttttaaatgaaaggtaagaaagaaattgatttgaaatatataccacaagaagtcccgtgtcctgtcaaactgtcagtattttataaataaac

SEQ ID NO: 96302 - DNA, 941 bp, Homo Sapiens
  misc_feature (709)..(721): n is a, c, g, or t
cagtcgacggtaccggacatatgcccgggaattcggccattacggccgggcagtgaggatcttcatgtacctgctcttctgtttgcacacccagcatagcctccttgcaggcagaaggcagtagggcccctgcacactcagtttctctcgttttccttagttatcagtcctgtcctgtcccactcaggtctgtacttagggcagctggcctggatgggcttcactggggccctgtctgtgtgctgagccagtttcccctgctggctgcaagctgtgggttctttctcctctgtgcccctcatgctgatcttctagatgccacccccaaatccccttcatacccaccaggatgtgtgcccagccaggcctccagcacccccagtgcagctcgtgattggaaactcaccatcggcaggcagtggttcggtttaagagatggcattagagggagcccagtctggatgtggacttggatgccctgtgggtatcagttctgctgacactttggcccgaaatagatccagtgctgagcaagcaatgtacaccagagcctcagtgagcccatctgcacagtggggaccatggacggatgggtttggcctgtgcttccgcttattcagtccttcacctcacggaacggatgctagtccgtgaaagtgacctcacagaactgggtaattaaactttattgctcactgtcctgaaacannnnnnnnnnnnnatttatacaaattttgtcggtcggcctcgggccctgaagaaacttttcagaaccattcctttggccccccgggcccaccaaggaaagggaaacttggccctaacctggttctcctaagagaaaccctgggtcacgaaccacggggttggccttctctcccaattaaaaaaagcgcccgcggttaacccgcacgcttttaaatacctccccgacggggtgt

SEQ ID NO: 96303 - DNA, 441 bp, Homo Sapiens
tgaacagccttcagccctagaccttccctctgacagagcctacccaaatgaacaaaccctggtaatatgacaaaacaagacgcttcaacaccccccaaaaaacatactagttcactggcaatggatccaaaccaagaagaaatacctgatttacctgaaaaagaattcaggaggttagttatataatcagggaaggaccagagaaaggtgaagcccaatgtaaggaaatccaaaaaatgatacaagaagtgaagggagaaatcactcagggaaatagatagcttaaagaaaaaacaatcaaaaattcaggaaactttggacacatttttagaaatgcaaaatgctctggaaagtctcagcaatagaattcaacaagtagaataaagaaattcagagctcgaagacaaggtcttcaaattaacccaatccaacaaagacaaa

SEQ ID NO: 96304 - DNA, 505 bp, Homo Sapiens
aaggcttagcaaacaatttttgttcaatgcccaccgagacatatagaattgggaactgatacatgtgtcccttataggctcaaaaattatatcttacaatttcttatttagggggaaattatttgaatcagattctatttagtcaaaccaccttttatgttttattatttttgaattcatggagccatcataaaaatatttttaaaatcagaattattgataccctgtagtgcaaaatgtcaatttttaatgtataatcagaagtctgaattttcataaaacatatagcataaaaacctccagtactttggttgacccttgtatgtcacagctctgctctatttattattattttgcaaaataaccattttaacatttgataaagcatatttatgaacatatttcttaataagaaaaatatccattttattaccattttctatctttttcaaaatatgcaagtttttacctatatgtcttataataaaagaaataaaatatttga

SEQ ID NO: 96305 - DNA, 485 bp, Homo Sapiens
ctatttgcaacagtttataaaggcaaacaaacacctgcaattgaggtagcaaagccaaattcacaaactttggatcaagaaaaatacccttcctatgttttaacagcatcttctatacaatagtgaatgaattctaattgttccaaaatttttaattcacattactttacaaaattttatttaaaatactgaaaatgttttgttaaaaagacagttagtcctgacaatcatctcacattcaaaatactgtacaaaaaaatctgaagtcaccatatattacaaaaaactaagctatgtatttacattttcaatgtagttttagaagttgaggttaagccaactgctacaaatggtctcctttaagcagtgtctgctaataatgtcatcacttttcactttcagcatttaatataggcccttctttttgctttcaaattatataattagtaaaggatttaaagaaaaacaaatgaaaattctattct

SEQ ID NO: 96306 - DNA, 495 bp, Homo Sapiens
ttctcataatcgagaagtccagagtggtaaaatcacatcatggagccattgggccaatgttacttctgtacttttgcccaatcatccttaccctgtgggtatcatcctcattcttgtcacctcagggtcataagatggctgttacctcctctatcacatccgcatttcagacagggtagaagggaagagaaaatggcaaaccatacttgccagctcagtcagcccttgtttttatgaacttttcaggaagccccacccagtagcttctgcctacacttcattacctagaaccatattatattacttggccacttctccctccaaggaacactgagaaatgaagttctttatctgggcacattgttgtcctgaacaaatcagggttctgttagaagaacaaattggagagtagataggtgaacgatacagtaaaatttcattaaacaacattattcacgtttcctaaatgcaggtgatttgcctgcctcggccttc

SEQ ID NO: 96307 - DNA, 998 bp, Homo Sapiens
ggcacgagggggcggccaggctccctggctggccggtttgggcgtctgggccgtgaaggtgggacctcctgttccgggccgcaagtttccctctccagccgcccgccgttcgtagcatgtcccccagaactcggggagcgcaggcaggacaggcttagagaagacgcggtccccagcgcttgggccacggacgtcccaccccgctcctctgtcgctggagaaccgccgggccgagccactgggagaagcaggccagagccttccagggcctccggcccgtggacccgaggaggatgagctggctttttcccctgaccaagagcgcctcctcctccgcggctgggtcccccggtggcctcaccagcctccagcagcagaagcagcgcctgatcgagtccctccggaactcacactccagtatagccgaaatacagaaagatgtggaatacagattgccattcaccataaacaacctgacaattaacattaatatactgcttcctccacagtttcctcaggaaaaaccagtgatcagtgtttatccaccaatacgacatcacttaatggataaacaaggagtgtatgttacctctccattagtaaacaatgtatgtatactgggataatttatttcagggtaatataataggtgtattacttttctactaaatattttacgaactctgaaatgcatttaacagtttcatcttgtcatgagtacttcttctacacacaattgaatatttaagacctacgcctttaaagttcttacaatatgatatggttgattgtgacagacttatcacttccatatactctagtatttacctttgaaccctcaaattattcgctaaactagtcaagtaaacgcacctatttcggctccattctctactccatggaccttaaccccgtttactactcaccgaatattatgcgcatcactctacagacacatccatacctcccacactgcaataatctttcccctaacaccg

SEQ ID NO: 96308 - DNA, 152 bp, Homo Sapiens
aaaacttattccaattgctaaattggtagtttttcagtctttataaatacaggattaaaaatatatatacagttatatgaaatgtttattttctatgtgtgtgcatatagttcaatattatgaaataaatttggtgttttaacttaaaaaaa

SEQ ID NO: 96309 - DNA, 513 bp, Homo Sapiens
  misc_feature (94)..(200): n is a, c, g, or t
gctccagcgattctcctgcctccctgcctcagcctgggacctgagtagctgggaccacaggcatgcgccaccactcctggccaatttttaaaannnnnnnnnnnnnnnnnnnnnnnnnnnnnnnnnnnnnnnnnnnnnnnnnnnnnnnnnnnnnnnnnnnnnnnnnnnnnnnnnnnnnnnnnnnnnnnnnnnnnnnnnnnatgagccaccacacccagctcctccccctcaaacttctgtgcacaaagtgctcccttcccagaggaggggccccatcggtgtgtaaggtggcctattcctctgtgtgttctctggatcttttcagccctgtggtccagtgtccatcacagccatgctgactgagtgactggagacagggatgatgatagagttcaggaagggctgggcagaggaggctggggccacctctgcagggtgtcctgctgttcctgttggccccagctgcactcgcagggccttcctgtggcccctttccccatgcaggggcggccg

SEQ ID NO: 96310 - DNA, 562 bp, Homo Sapiens
gcggccgcgcctttagccacagcttctacctcacccagcaccagctcctgcacacgggcgagcggcccttccgctgcgtggactgtggcaaggccttcgccaagggcgccgtgctgctcagccaccggcgcattcacacgggcgagaagcccttcgtgtgtacgcagtgtggccgcgccttccgtgagcgcccggccctcttccaccaccagaggatccataccggcgagaagaccgtccggcgatccagggccagcctgcacccccaggccaggtctgttgccggggcatcatcagaaggtgcgccagcgaaggaaaccgagcccactcccgcctcgggcccagccgccgtctcgcagccagcggaggtctgaggtcacaggttgcagccctggccttctgtgaatcccttccacagctaaagggcatatgtcctctgcagatccacagcagagaaaaagtcccgtgcttgctagtcagggacaagggaggccctttggctgtgatttcatttgcacgtggggacaggatttgccagttcacccacagatcacacctccat

SEQ ID NO: 96311 - DNA, 888 bp, Homo Sapiens
aacctaggctaggtacgaggctgggtgttaatcggcacgagggacaaggacaggaggcacgcgcccagatcgcgctccgagtcgacgagggggctcgtgcaggtccggcgcgcgcgtggggagcggcccgggggcgccgagggagccggcggcagcgaggatgccggcacggggacgcggctgcctgctgggggtgtgagcgagaggctgagcgctgcccgctcggcgcatccattccgcaccgccccctccctgcgggcctcggaggaagccccccgcgctgtgcggaggcgcctcggctgccgggctgcggagccccggcccagcaagagggaaaagatgccgttccaccatgtgaccgccggcttgttgtacaaggggaattacctcaaccgatcgctctctgctggcagtgacagcgaacagctggctaatatctccgtggaggagctcgatgaaatccgagaggcctttcgggttctggaccgggatgggaacggcttcatctccaagcaggagctgggcatggccatgcgctctttggggtacatgccaagcgagatggagctggccatcatcatgcagcgcttggacatggacggggatggccaggtggattttgatgaattcatgaccattcttggccccaaactggtgtcttcagaaggtcgcgatggttttcttgggaacacgatagacagcatattctggcagtttgacatgcaaaggataactctggaagagttgaagcacattctctatcattgccttccgagaccacctaacgatgaacgaccttggcacctctttatcctgacgaagagagcctgaatgaactcgggacttgcaacagagttgaggagtgcttccagagcgaaagacagactg

SEQ ID NO: 96312 - DNA, 1049 bp, Homo Sapiens
  misc_feature (1006)..(1006): n is a, c, g, or t
  misc_feature (1020)..(1020): n is a, c, g, or t
cctgcccggttataaaagaatggtttggaagatccttcacagcccaccactctcacacaaagtttgcctgacaaattttctggccaaaatggaaggcactctgaagaagcaatatagttccatttattagttggcattgagccatcagatgcaatctcgccaacttctagttctaatgatgacttgtttgcaatggtacaaaagggagtcagggtaactattcgtgaaaggttgaaactgctcattttgatgctaacaccaaccaggtactccatattgttggcaggacacttcacacacccataacttcccactgtatccaatgagaaactactggaccaggcactggttgaaatttttaattgtaccttatttttagtaaaaatgttcttcttcttgaaagaaaataaaataatatccctgaaatcagctggatgtttcacatgaatatcttctgaacgatactggagaacccgggtagtcttgttgattaaccaatagggactaaagacagacagcaccatccggctgccaattctcctgacgtggactgacaggtcgactgtcgtcacttctgtggagtcagaagaaaaacacacaggaaagaattctggtagtgtatcacgtatgcggaaatgtccattccagttttggccctggtatttcaccaggactaattccattatttcaccactgattctcgaatgcagaacatcagcagtactgccttctgccagctcatgagtttctgctgttccctcaagtaaatatcttagggaatatgggagaagattccgcaaagtgagagaaggataaagatgaataatgtaagctacatcccagtcttccccatgtgtacatatgtagctcaattcatcaggcagagcaactgtattcactatgagaggtaagaagctgacttctactgatggacactgcaacatgcatctgacttccctgctcctatgaagttcttccttccaggaaatataaggagcagcagtgncgagaggctgtgtngtagatatgggctgccttcctcttctctt

SEQ ID NO: 96313 - DNA, 768 bp, Homo Sapiens
  misc_feature (21)..(21): n is a, c, g, or t
  misc_feature (29)..(29): n is a, c, g, or t
  misc_feature (138)..(138): n is a, c, g, or t
  misc_feature (161)..(161): n is a, c, g, or t
acacacaaagaaaaattagcnctcagatnagggaaagaatttgagcagattgaccagctgaaatcagatgatagcaatggtatagaaaataatgtccccaggcatagaaaaaatgagtctctgggccagtgaatacanaacatcatgtcgagaatcattgnaagatatacagagttcgtatttcagctttgtttatccttcctgttaagagcctctgagtttttagttttaaaaggatgaaaagcttatgcaacatgctcagcaggagcttcatcaacgatatatgtcagatctaaaggtatattttcattctgtaattatgttacataaaagcaatgtaaatcagaataaatatgttagaccagaataaaattaattatattctggtcttcaaaggacacacagaacagatatcagcagaatcacttaatacttcatagaacaaaaatcactcaaaacctgtttataaccaaagaattcatgaaaaagaaagcctttgccatttgtcttagaaagttatttttttaaaaaaaatcatacttactattagtatctatggaagtatatgtaacaatttttatgtaaaggtcatctttctgtgatagtgaaaaaatatgtctttactaagttgaaatgaatactttctgcctttgctcatgatagttattctacaatctccacaagaaaaatataccttttatccggaaatattggtttaaggcaaataaataaaactgtgcttgctctaaagctctgcaatacaaaaaa

SEQ ID NO: 96314 - DNA, 1058 bp, Homo Sapiens
  misc_feature (33)..(33): n is a, c, g, or t
ggtatctgacttctcactgacgatttcaaaaancaactttcggtaggagttgttatgagggatgcggacatcgacagggccctgcagattctgctggggcacttgaagcggacataggagcagagctgaagcatttcactcatctcttctggggtagacgggatcaagggaatcttctccacggcggcagagccatgcagttctgtgagccgttgtacaaattgattgtcagttgagtactgcaggccagcaggacacacgagacacaggctggagacatccgatgggtagtaagcagcatacaccccagccacctggccacccatggaggtgcctaccaggtggaaaggttttttgttcagcttcaggcattctacaaactggtgtatcctcttaacttgcccatctatggacaggtcatccagggaggagcgggtggtgccctcatgtcctggcatgtccacgcagaccaagtgcaggttctttggaaggaacttgaccacactgagccacatatccttgtgggcagagaatccgtggagcatgaggatggagggtttgtgcccaggcctgccccggaaggaataacagaactgatagtcttcatggtgaacatagcggacttgcatgcccaatgtcctccgccagtaccaataatagattcttatcagtgctgaaggccacagaagaaatgaagccacaaatgccaggattgggatggccagcgtgccgcccgcaatcacaaacatgttaaccacatcaagatccatcctgctctttcaggctggctgactctcttcaaagagcacagccttctttcccaactgctactggctctggcaaaagctgaaaatgagattctgaccagcctcaaccgcctgggtcccgccgccgggcccggaccccggccctcggtctctagccccgggctgggacctgccgccgggctcctacccgcgcggctcccagctccggcgcccagcccagccggactccttaaaggcgcagcgtgccggttcgcgtcctccgacagaaaagccgccccgccccgacccggc

SEQ ID NO: 96315 - DNA, 938 bp, Homo Sapiens
  misc_feature (542)..(550): n is a, c, g, or t
  misc_feature (570)..(775): n is a, c, g, or t
caacccagagtgtctctatgtattcccctgccagtggaactaccgtcccgatcactgcatgtacggaagcaactgcagagaggctgagcatgaaggtgtgtctgttctgcatggaaaccgaggcgtctaccatgacgataagcaaccaacgttcagagcactctatgaagcaatacgggattttccctttcaagacaatctctttcaatccatgtattacccccttcagctgaagtttttggagactgtgcacactttatgtggacgaatcccgcaagtttttctgaagcaaattgagaaaacaatgaaaagggcttatgagaaacacgtcatcatccatgttggccccaaccagatgcactgaatattttgtcttgttgcaagtcaattaggtgtcttgtgaacaaggaaatactaatctctaagctgcctgggtctttttgtgtgaatatttaatggtgctccatgactgttgagttttaaaaacctcgttaaattttgccaaatcagttgcccccaaaagggaatatgcttttccttannnnnnnnnctcctcgtgccgaattcttnnnnnnnnnnnnnnnnnnnnnnnnnnnnnnnnnnnnnnnnnnnnnnnnnnnnnnnnnnnnnnnnnnnnnnnnnnnnnnnnnnnnnnnnnnnnnnnnnnnnnnnnnnnnnnnnnnnnnnnnnnnnnnnnnnnnnnnnnnnnnnnnnnnnnnnnnnnnnnnnnnnnnnnnnnnnnnnnnnnnnnnnnnnnnnnnnnnnnnnnnnnnnntgcagctgcataatgaatcggcacgcgcgggagaggcgttgcgtatgggcgctctcgcttctcctcatgatcgctggccggtcgtcggctgcgcgacgtacactcactcaagcgtatacgtatcaagatcagggaacgcagaagacattacaaggcacaaggc

SEQ ID NO: 96316 - DNA, 446 bp, Homo Sapiens
gtgggggcgcgggtggccgcggcacacggactcgccctcgagactgaagccccggcggatctgagcgtcatggggggctcggtcataaagccgggccgcagcgtgggagctgcacctcggggacatcagggcgcccccacccgcgggatccctgagcgacttggggcactggggctgcaatacagaagaggaagccgaggtagagaggagagaaaccactcgacacagacaatattcaccccagagctgagaagggaggggctgcgtaatcccagcgatggagcccaaggttcaggagccagcaaaccagtcctgctctgtccatcaccctcggggacgggcgctaggggcgagcgctctttggaacaacatattgcgggttcccccaactggacccccgccgagaatggtagtaagtggggatccacgtggtgagcgcggccgca

SEQ ID NO: 96317 - DNA, 514 bp, Homo Sapiens
  misc_feature (104)..(104): n is a, c, g, or t
acttcaggcagggcttgccaccagcctggcagagccccgaactcggaacccagcaatggccttccagacgcacgtcagctaccgcgcgctcacactgcagggcnccacaagaggcctcccagtgtgcgcgggcctcttgaagaagtaactctactcagaggcccgaatgacccaaactgggctctgggaggctggggacggccttccaggccaagtggggcgcgcgcagggctcagcggggcccaagagaagggctgagggcactgggtcctgagccacccaccgaaggacgccgcgggacagcaaggcccgaagcaggaggagagaagggagcagattcctgggcctcctggggcccggtcgctccgggatgtctgagctctgggaggggcgtgcccggggcgcctccctcgcggggtattgtgggatcacgagtcactggcgacggtgggtcaggactacacttcccaggaggctgtgcgcgccgcgtggcgcctgggagttgtggtccaga

SEQ ID NO: 96318 - DNA, 395 bp, Homo Sapiens
catcatttggtttaagtcattacaaaaggcattgaaggtctgtctacctgtccatgacagataaaagagattagctcctgtctgaaaatgtttgcaaagtagtgtaattctcctagtccttcctgaagctttcccaaagaagcaaaaatattcagacataaagctaccaggaactccaacctgtttgatcactattcccttgctcaccaacctagtcatctttcagctactccatgcatgacttgtgctgagctattagctcccacatgaatacaagcaattcttatacctgcctaattcagatgatctttcttagggtttgaagtccctggggatccgaagctgtcctaggtatacacttctctcaacccagtccagcacaaaaggagacgact

SEQ ID NO: 96319 - DNA, 1018 bp, Homo Sapiens
  misc_feature (589)..(589): n is a, c, g, or t
  misc_feature (935)..(935): n is a, c, g, or t
gggctaggaaggctgacacatgatgagaagagtcagtggtcctgaggtacagtacttaagataaccctgtgaaggctgagattgatatttgaaattcacaactgatcttggagcctggtacagcagtcatggagccatattggattgtgaaaggaactcagttgacctggcctattgcagatttattctgagaatttcaattcagtctttgctgctgtttggaaatctttcatgaatcttttaataacttccttacatacatcttgttccattaaagccccaaatttggctttgtcagctctctttcttcataatctttaggatttgttcatgtgtggatgtgatggaactgaagtcgctaggttcatgctacctggaacatgagactgtcaaatagaggagcactgagtcaaatgaatctcggagaaatggagctggaagaaaactggagtaagcctgtccctgaaagggcactacatttggatatccagcagtgggactcaatattttttcttgttgtttaatctcatttctgttacttgcagccaaaggctcttaatgagaaaatggctctacctagttttctganattgcctcagtctctccactcttccctattacaaaggtcatctctttaattcacatccaataactgatagtctcttgactaatctacatcctctcattctctcctaactcacctttcatactggtgccaggtgacttttcctaaaagacaactttcatgatgtcactctacttcataaattcttataatgggttcctttttgcttttaggccaaactccctcaggttcgttttcaaggcttttcataattgaatttcttttatatacctaaaatgatttctttgtgttccccaatggaccattgacagtccttcccccctgatgttctctccagtaggaaaatgtntgctctatgtaaattcagtatagcttttagtctctattcaagttctaccttcttcataaacttctcctgaatagaatcaaaaa

SEQ ID NO: 96320 - DNA, 1015 bp, Homo Sapiens
aatcaaggtaactggctcccttctgcctacaggccttggtcttggcttgtcctcacccagtcggaactccctaccactttcaggagagtggttttaggcccgtggggctgttctgttccaagcagtgtgagaacatggctggtagaggctctagctgtgtgcggggcctgaaggggagtgggttctcgcccaaagagcatctgcccatttcccaccttcccttctcccaccagaagcttgcctgagctgtttggacaaaaatccaaaccccacttggctactctggcctggcttcagcttggaacccaatacctaggcttacaggccatcctgagccagggcctctggaaattctcttcctgatggtcctttaggttttgggcacaaaatataattgcctctcccctctcccattttctctcttgggagcaatggtcacagtccctggtacctgaaaaggtacctaggtctaggcccttcttccctttcccttcctctcccctaccccagaactttggctccctttcccttctctctctggtagctccaggaggcctgtgatccagctccctgcctagcatccatgacctgttggatgttacctccaatcagtttcctgtcctacctgcctctttggcttggacctatatggccatgctctggctctacccttgggaagcctgatcccggtgtgtggcccagcttgttcaggccctgggatgctgcatctccaggcaactatgcactttcccggggagagaaccagtatgagaagtgggggcagggcacacattcatctttgtaggaaggtctggcctggggtcgggtgaaggagggcccaggtcagttctggggtcccagtgacctgctttgccattctcctggtgccgctgctgctccctgtttttggagctggatgttccccagctggcagttgagctgcctgagccaatgtgtctgtctttggtaactgagtgaaccataataaaggggaacatttggccctgtgaaaaaa

SEQ ID NO: 96321 - DNA, 492 bp, Homo Sapiens
cctcactcttccagcaggaccagaccaggggcctccttcctgtccccaggcgttcccggcccctcgcaggccccacccatgcccttggcctcagggtccaacaactgggggagctaccagggctctgccttcaggagcccacagctgggcaccccccttgccccccaggagaccggggcgcaggcggggcaccggcctcacctggttctccaacaccgctgcctgcggtctgttttgcttttgtcctccccagcccagaattttcctttgtataaacagaactcctagtcaggaagcaatatcatttcaggtctaaagaaagggacgtgcatctggccgagggcagttcagtctcactgcagagcccgcagcccgctgcgcagctcggcccctcccgcccgcacgggcagctgaaggccgctgttttctaatatttgtattctaatttaattgtttttaaaaaatgcaaataaaaaaggtcgaggtgaaaaa

SEQ ID NO: 96322 - DNA, 519 bp, Homo Sapiens
ctacttatgctatctgtggatgcctcaagcctgcccaaagctgccaccagaggggaaaatcatttttctttctcttatacctttcatatatttcatatatcatggttatatatagtctggtgtactactggcaatggatcctgcaaaatgtaggcttgtcttcacagaagggagtatatgaatacatgaaaatgatgttcattaacagataatagagcacagcctacccctttgtcaactcagcacccatatgcacttacacaaccaaacaacagtagcaacaatatcatgcttctgcctgatgtaatacaactagctcctgcaccagtatgtgttgcatttgccctttccccatatttgggagacccaaagtcccaccagtcactatacctatttctaaatgatgttcataaatcttttagttcagagagtatagtcacacttttccctgttatggtctgtaatctaaagaatgaacagtaacgttaaccaccaccaatataccttatagtagtcaaa

SEQ ID NO: 96323 - DNA, 444 bp, Homo Sapiens
  misc_feature (191)..(192): n is a, c, g, or t
gggaaagttctgtttcttctttgatacctttgttctgtcccctgccccatccccagcactcatgatcttgaagcccctatcacactctagttcagtcctgtgaaccatgtcctgagggccttgcagggaagtagggaaatagaaactcccccacaaagagccgaggatcagagaagacccctgagatgaanntcagggccctgccctgcccaccaactcttttctagcaatcatgtcctgcccaggctgcaggcttcattaggctcctgctgtcctccatgatgtgactagcacaaggtgtatatatgttttgtaccttctgccgatggctgtacatagtgtatgaaagttatttaagccccatgttgtacatttctgttcctagattggatgtgtgtgttctaagaagttgtcataaataaaacctgaatgaccaatgtcaaa

SEQ ID NO: 96324 - DNA, 392 bp, Homo Sapiens
gatcttgaaggaacatgacttattctctcattcattatacaaacatatagactgccaaagagctatcagatacacagcaatttaacagttaccacatctgacttcaatgaatacacagtctggtagagtcttctaaaatgataattaccaaactacatagaaagcgagcactatttgtggtctaacgttaagaggaaaacaaatcagattataaaaccatctgtacattacgattgcaactctaaacatgtgagagtgtgaacaaggtctggacgggtgaatacaggaatgacaatattgatgtggttagattggatgactttttctttagcattattacaattgttttcgagctctaaagttctagattgttccaaacgtttctagggggg

SEQ ID NO: 96325 - DNA, 540 bp, Homo Sapiens
gaatgggaatagaagtggtgatgaggcaagtattctttggagcaggaaactaccatttagtggatgaaaacttcgatcctttacctgattattggctatctcttctgttcaagaaattggtgggcaccaaggtgttaatggcaagcgtgcaaggttcaaagagaaggaagcttcgagtataccttcattgcacaaacactgacaatccaaggtataaagaaggagatttaactctgtatgccataaacctccataatgtcaccaagtacttgcggttaccctatcctttttctaacaagcaagtggataaataccttctaagacctttgggacctcatggattactttccaaatctgtccaactcaatggtctaactctaaagatggtggatgatcaaaccttgccacctttaatggaaaaacctctccggccaggaagttcactgggcttgccagctttctcatatagtttttttgtgataagaaatgcaaaagttgctgcttgcatctgaaaataaaatatactagtcctgacactga

SEQ ID NO: 96326 - DNA, 747 bp, Homo Sapiens
cctctcactttcagatttaagattgtgttctggaacattatagttgcgcctcaattacagaaaagtaagaacctctgctgaaaatacctggtcttagtccctaaaaaagtaaaattattagacagctttttgggatttgaggtttcaaaagacaggaacctgctaagaaggctcagtcagactcaattagcccaaaagctgagcccagtaggcattgtcatatgcttttctttcataattgggggtgggaagcgagggggggaggatttatagtttaatgccacaactttttaaaacagtgatttttgccatactatttgactaggaaaatgatcgttgctcactctataaatacttgaaatcttttctaggacttagaagtttgtagttaattgcaaaggagcaaaacaaacggaatattacacaagaatttaaaaggagaactctgcagaacatgtcttatttttattcgcccaagtcaaccaccaggaaacttggaccaggcacacggatacccatcatttcacaccggcgtttataaaaggactaatgagccctggagttcggttatttttttgatcacattttgaaaggccaggctcctccttcactgcccccgccaaaaggcaataagcaaggaaaaggtttcacatgctagcaagagcggctctaaaatttcaatttctgaggaagatggtttcaaatggaaatagtcataattgtaggctgggcatggtggctcacacc

SEQ ID NO: 96327 - DNA, 513 bp, Homo Sapiens
gtaatcaacaaaacttgaagccaaccaagtaattggaaaatgcaaaattatgatatattcattcactgtgattgacagctacccaatcacagaagaaaaacccagtggggtacagcaagaggtactgatacgagatgtcataaaacactgaactgctaagtgactaataatcaagatgcagaactgtatgcagagtatgatacaatttccggaaaaatatgtacatgaaattcttactagtagttacctctagtgaatgggattgttggggggatgaggacttttattttttactttaactcttctgcacattgcatatcgattgaagcttgctttgtaggcaaatgtggcttatttacgcttttccaaactctgcaattcatccaggaaggtctcttcatatgacacccacattcccacttctgtgccttgggctcaggtcctactcttccattttctttgcacatttaagtcttgtccattcttcaaggacccgctcaaatgccaacaatt

SEQ ID NO: 96328 - DNA, 679 bp, Homo Sapiens
caactgcccgcaggtccccatggaggagcgcatctccaacctgcgcctggaccccaccctcgcatcctgccagtactactttgagaagatccacccaccgggggtacgcagggctccccagtacacgtttggctaccggcgcccatacagagtgatggacctcaacccggctcccaaccagtaccagatgccactcttgctggggcccaacacccctgtcagccgagctgctccctgctacagtctggcctccagggacaagaactggttctacaaggaggatgtggcaggaggcactggacctaccacgtacgcccgacctgagccatccatctatcagaaccgcagccctacttacagcatggccaagcgcttcgcctaccctctggacctcacgccacggcctggccccggctcccacgaggtccagcaggtcactgtgcacaagccccacatccctgctttcaccatgggcatcaagcactcactccacctgtgcccactggtcatcgacattcgtgactgaggcccctcttggggcactcactgcccctcatccccagaaattatttttctacaccaaattgagcaatttgaccaagatttctagtagcagagccggtacctgctgagtgtccggcacacagaagacattagagatacattttcatgtaaaaaa

SEQ ID NO: 96329 - DNA, 314 bp, Homo Sapiens
taaatcccaacagcccagggtggggaccacattgcaaggaactgtgggcagcctcttgaagctgagagcagaattcagccaatggcaagaagccaggcacctcaatcctgcagccacaaggaaatgaatcctgctagcaacccgagaaggcttagaaatggatccttccccagtcgagcctctgatgagaccatagtcctggttgacaccaaaactgtaaccttgtaagaaaccctaatgcaggggccccagctaagccatgctcagattcccaatccatgggaactgtgagataataaatgtgttacttgaaa

SEQ ID NO: 96330 - DNA, 1056 bp, Homo Sapiens
aacggctaggtacgaggctgggggtgaatcggcacgagggcctcaatgccagcggacgaaggacacccccaaattgtgctgctgaggatatcaaagccagcccttcctccaccaacaaaaggaaaaacaagcctccaatggagctggacctgaactccagctctgaggacaataagcctggaaagcgtgtccgcacaaattccagaagcactcccactacccctcaagggaaaccagagactacttttttggaccaaggctgctcttctccagtgttaatcgactgtccccacccaaactgcaacaaaaagtacaagcacattaacggcctgaggtaccaccaggctcatgcacacttagacccagaaaacaagctggagttcgagcctgacagtgaggacaagatctcggactgtgaggaaggattgagtaatgtggcacttgaatgcagtgagccaagcacaagtgtatctgcttatgaccagttgaaggcaccggcatcccctggtgctggaaacccacctgggaccccaaagggaaagagagagctgatgagcaatggcccaggttccattattggtgctaaagctgggaagaattctggcaaaaagaagggccttaacaatgaactgaacaaccttccagtaatctccaacatgacggctgcgttagacagttgctcggcagcagacggcagtttggctgctgagatgcctaaactggaagcagaaggattaattgacaagaaaaatttaggagataaagaaaagggcaaaaaagctaacaactgcaaaacggacaaaaacctctctaaactgaaaagtgcccggcccattgcccctgccccagcccccactcccccgcagctaatcgctatacccactgcaacctttacaacgaccaccactgggacaatacccggactgccctccctcacaacaactgttgttcaggctacaccaaagagtcctccgttaaaacccattcaaccaaagcccacaattatgggagagcccatcaccgtgaacaaagctctggtgtcactcaaagacaaaa

SEQ ID NO: 96331 - DNA, 223 bp, Homo Sapiens
gcaatgcagcattttaaaattttgtgtacatttttagacataatgctattgcagttaatagattataatatagtgtaaacataacttttatatgctttattgcaatttttgctttatggtggtggtctggaactgaatacacaatatctctgaggtatctctgtatacagttgagagttgcatacaaatataagaaaaaaattatgttttgtactattttaaa

SEQ ID NO: 96332 - DNA, 250 bp, Homo Sapiens
gcacttagggaaatgtttgtcttcccttacctgaatttgcattgtcccagcactgaaaaatgtttgtccttggagagtgtgtgtgcgcttggttcagtaagttaccagaaaactataagaagaatgaagatgaacattttctttgcatactgttgtagagacttgagggacctagacttgaggtgccaaatgggaccgttttcctgaaccacctcctacggaaaaaatcagatttattatgtattgcaaa

SEQ ID NO: 96333 - DNA, 2423 bp, Homo Sapiens
gggaacgcacaacatagctagtaggcctggggttaatcgggacgaggagcacactgtcagtggaaaccgcaggacaggtctgtggtgggactctggccctgggcggattcgatcctgttcccccaggaccatccacggatggcttcttccttacatgtaggtagggccgatgaagacaccgagggaaggttatatgttagttgttcaaaaagccccaagctcccagcgattcagagccgtggactctcctcaggcaggattctgactcggatgtggtggacatagaggaagccgagcacgatttcatgggtgaggcccatccgtgtggttttcagcagatacattggggaggaagagtcggccaaactgcaggaggacagtgaaggtgaaggaacatgaagacaaggatgacagccagcgggcgcgtcgagcccctgcctgagcgacagcctctcagatgagcagtgtctccatggcgagctgggagcgtcgaagatgaccagctttgcggagaggaagctccagagactcaacagcgtgtgagaccaagtccagcaacagcagctcccagaagaccacgccagatgcggtctaggagagctgcccagcccctctgacgacgtggaggcacgaagagggagcaggagtaccgagccagcatggcaaggatcccggccagcctcctggcatctgagctggtacagctgcacatgcagctggaggagaagcgcagggccatcgaggcccagaagaagaagatggaggcgctgtcggcaaggcagcgcctgaagctcggcaaggctgcattcctgcatgtggtgaagaagggcaaggccgaggctgccccacccctcaggccggagcactttgcaaaggagtactctcagcacaacggggaggactgtggggacgctgtttccaaaaccgaagactttctcgtgaaggaggagcagagagaggagctccttcacgagccacaggatgtggacaaagagagcctggcctttgctcagcaacataaagcaaaagaccctgtggctctgcacgagctggagagaaataaggtgatctccgctgccctcctggaggacactgttggggaggttgtcgacgtgaatgaatgtgacctttccatcgagaagcttaacgaaaccatcagtacgctgcagcaggccatcctgaaaatctctcagcagcaagagcagcttctgatgaagtcccccacagtcccagtgccaggctctaagaataactcgcaggaccacaaagtgaaggcaccagtccacttcgtggagccactctctcccacgggcgtggctggccaccgcaaagccccccggctgggtcaaggccggaattcccgttccggaaggccggcggagctgaaggtcccaaaagacaggccacagggctcctcccgaagtaaaaccccaacgcccagtgtagagacgctcccgcacttgagacccttccctgccagcagccaccctcggacgcccacggaccctggcctggacagtgccctggagcccagtggtgacccacatgggaagtgtctcttcgacagttacaggctccatgatgaaagcaatcagcggacacttactctgtcctcttccaaagatgccaacattctttcggagcagatgagcctcaaagaagttctggatgcgagtgtgaaggaggtggggtccagctcctccagaattttctgcggaaaagaaaacgtctcccgctgtgagaggagagctctgagagagagacagcgcagactctcagttgaaggtggcatctctccgcatcgctgagaggccgccgacgaggatggggagctggtaagcctcgatggctcggcggaccttgtcagcgaaggcgaccagaagccgggggtcggcgttcttcttcaaggatgaacagaaagcggaagatgagctcgccaagaagcgggcgagcttcctcctgaagcagcagcgcaagcgcgaggaggcccgcgtgcgcaagcagcagctggaagcggaggtggagctcaagcgtgacggaagcccggcgcaaagctgaggaagaccgggtgcggaaggaggaggagaaggcgcggcgcgagctcatcaagcaggagtacctgcggaggaagcagcagcagatcctagaggagcaggggctcggcaagcccaagtcaaagccgaagaagccgcggccgaagtcggtgcaccgggaagagtcgtgcagcgactccggcaccaagtgctcctccacccctgataacttgagccgggctcagtcaggctccagcctgtccttggcctctgcggcgacgacagaacccgagagcgttcattccgggggcacaccctctcagcgaatagttgcaatcatgtcatcaggaataccaggccttcacacgggctccccagcaggtataccag

SEQ ID NO: 96334 - DNA, 787 bp, Homo Sapiens
  misc_feature (254)..(263): n is a, c, g, or t
caacttgaattatggaggacactagaaatagtgtttcctacagaatcagggcttcctaccaacatagtcacttctagggttttcgacctgaaaagttctgtggcatattgtttctttgctatccacttttttttccctgtttttccccctctttctctcctctactttatctcctagagatctaggtagttcccaaaggaataatgctttacggagtctaatgttgatttattaggtaaaaacagaaaatgacnnnnnnnnnnacccacaagttccataccaaaaaatgaatgtaaacttcttatgcagtttcacacattgaaaatgcaggttattttaattccattgcatttttcagaattctcaatcgcaatcctctgacaactgttgaagatccgtatctctttaaattactggcattaaaatatctgtaagtactatagtactcttgggagtcatgagatgatttatactctttttaaatttttcatcaaagattaagtattttgcatttaggctaaaatgtcataatttaaattttaactgagttattgaaaaacattattggcaaaggaaaggatgtgtaatggtcaagatagccagcaggggaaagagaacagtgttgaagaacccatatagatttggaacatgtagacacatggaggaatattacttaaccaagaaagcaaaggggaaaaggtgttcattattctaaaaaggaagaaaagagtaaataatcaagatgggtgaatgcaatatgaaaatgagaagtaagataatggtaaaa

SEQ ID NO: 96335 - DNA, 394 bp, Homo Sapiens
caaaactgttaaatcaactttgccgatttcccttgggaatccctggaggccactctaagtggtaatcccaagtttaagaaggaaatggggaaattttgctgagagtaaagatgtcgccgaactttttgaagggatttgcttcattcattcatttagtcattcaacagacacctgttgaacccgactgggtgccagaggggccagtcacaggacttattccagatgaacttttcttttgaaattagaatgcccttgtggaagccaaaggaggagcagaggcctaaaataatgtcaagtgtcaaagcaaaaagaagtgccattggctactacagtgtgtgatgataacaagagaggtgcgaattaggaattaaaaacgtttgaaaaactacaggcc

SEQ ID NO: 96336 - DNA, 1504 bp, Homo Sapiens
tgcggccgccttccactcgggctgtccggcggcggctgcctccgcccgcgtgtccgtcaagggtgccgcgggatgtgtgtcagtttacgcctctgagatcacacagctgcctgggggccgtgtgatgcccaaggcaagtcttggttttaattattattattatcattattgttacgcttggctttcgggaaatactcgtgatatttgtaggataaaggaaatgacactttgaggaactggagagaacatatatgcgttttgtttttaagaggaaaaccgtgttctcttcccggcttgttccctctttgctgatttcaggagctactctcctcctggtgaggtggaaattccagcaagaatagaggtgaagacaagccaccaggactcaggagggaaacgctgaccattagaaacctctgcataagacgttgtaaggaggaaaataaaagagagaaaaacacaaagatttaaacaagaaacctacgaacccagctctggaaagagccaccttctccaaaatggatatgtttcctctcacctgggttttcttagccctctacttttcaagacaccaagtgagaggccaaccagacccaccgtgcggaggtcgtttgaattccaaagatgctggctatatcacctctcccggttacccccaggactacccctcccaccagaactgcgagtggattgtttacgcccccgaacccaaccagaagattgtcctcaacttcaaccctcactttgaaatcgagaagcacgactgcaagtatgactttatcgagattcgggatggggacagtgaatccgcagacctcctgggcaaacactgtgggaacatcgccccgcccaccatcatctcctcgggctccatgctctacatcaagttcacctccgactacgcccggcagggggcaggcttctctctgcgctacgagatcttcaagacaggctctgaagactgctcaaaaaacttcacaagccccaacgggaccatcgaatctcctgggtttcctgagaagtatccacacaacttggacttgaacctttaccatcctggcaaaacccaagatggagatcatcctgcaagttcctgatctttgacctggagcatgaacctttgcaggtgggagaaggggactgcaagtacgattggctggacatctgggatggcattccacatgttggccccctgattggcaagtactgtgggaccaaaacacctctgaacttcgttcatcgacggggatcctctccctgacctttcacacggacatggcggtggccaaggatgggttctctgcgcgttactacctggtccaccaagagccactagagaactttcagtgcaatgttcctctggggcatggagtctggcggaattgctaatgaacagatcagtgcttccatctaactatccgatggggagtgggccctcaaaaacgccggcccaggtgaagtaccaggctggcccccatggtttccacaagggtttcccgcggcc

SEQ ID NO: 96337 - DNA, 584 bp, Homo Sapiens
  misc_feature (449)..(449): n is a, c, g, or t
  misc_feature (532)..(532): n is a, c, g, or t
  misc_feature (545)..(545): n is a, c, g, or t
  misc_feature (564)..(564): n is a, c, g, or t
cagtgctcaaactagaataagcactaattaaaggaattgttgggggtccttcatgtgttcccactcctactggaagacccatgtcggtttccggaaccccaccagtttacccataagcaagactaaacctgatccttgggcaaaagttccctaacccctactttaccctcccaccctcacttttaaatccaccatactgaatgccacactatggaatgcagctacctgccaagcaaggcaatagaaggcaaaaaatggaagtgaattaagatgaactcatctgaaatacacaaatgcattactatctgaagataccagcaagagtttagtctacgtgtataaggctcccagtaggatttagctaggctactagaagttagactgctttcgcattaaacagctaacttcatccacagcaaattgactcaatcaggaaccttcatttgaangtgtgttagaggatggggtaaatacccgatagctgtctttttggtgaaagaaaaggtgcatttcaagaacttggggggcaggnggaaagcacaatntttcttagcccaggaaagnccaaataatccaacggtgct

SEQ ID NO: 96338 - DNA, 457 bp, Homo Sapiens
tctttcacgacatccatcatttgcactgctgttcgtacacagaaacaggactgctcaaatgatcctatttgtattttctgatgctatcagactctaatgtttttttccctaaaatattattgccatcatgctttaggaattttatatttttacacaatcatattttagtatggtgtctgtttatgtaactctgacttgctggaaaagttgaaactccaaataatctgaaactagaaaagaaatagcacataattactaccttccccttggcggctctcctccccaacccccaccccacaattttatgacttccatttggcaattgttgaattataactgcgactgaaacaaacaggttcatagagatgaattttctgagaaacatatatctacatgttgtataattggattttttttccatgtaagtgaacataaaaacatcttttccggcaaaaaa

SEQ ID NO: 96339 - DNA, 448 bp, Homo Sapiens
tttaaaatacaaaagtcatttagtatacattattactccccattgtaattccagatctggtacagtatctttttcatttcctgacataaaccattaagacagcacaggctgtagtacttcattgtgaggtggctacaactctataatatgcacagtgattttaaaataggctttttgcatgcctcgcatgaaaggtgctacactacaaacctgcttttgtgaactctttggtaaccaccaatttaaaaatttggactgaaagcatttccacatggacagatctagacagcacattattggagctctgagccaaagctattaccctgctatactgattcttcagtttccttgaggggttaggtgttgatttagaatacagccagataatttaaagcatgtcaggccccggttaggaaaatgaaaatggctccgattcgtttccagttgg

SEQ ID NO: 96340 - DNA, 1016 bp, Homo Sapiens
  misc_feature (488)..(615): n is a, c, g, or t
tgggacgaaaggagaggaccgggaccggaccggcttcctgagaaacgagctggtgtctggaagagcggctggagtaggaggctgtaggatgaagaccggggatcgcgaccgggaggagccggagccagagtaggacgatgacccgcgaagacgacctggaggaattagaggcagaggctgacgaggctgatgttttccgacgccttcgagcccggctcggggagaccgacaccccgagtttcttcttgggagacttggatcggcgccaagggtccttccactcatctgctctcgttcacctgcggccccgtggtggcagcctccttctttggtggctcagcttggcggcttggcggctgcggggagcggggcttgggcttccccgttctccttctcccgctccttctcccggtcgcggtcacggtgctgccggtccttctcgtcccgcttggctcgctcacgctcccactcctccttcctccgctgcnnnnnnnnnnnnnnnnnnnnnnnnnnnnnnnnnnnnnnnnnnnnnnnnnnnnnnnnnnnnnnnnnnnnnnnnnnnnnnnnnnnnnnnnnnnnnnnnnnnnnnnnnnnnnnnnnnnnnnnnnnnnnnnnttctcggtaattatgatacggctctgtttctgtatactgcaccctgaaattctcatactgtccgccacgccaaaaccgctcaatttcatagtcataataagggtctgcgtaaggctcgagtactgtgtctctgacatctctcgggatccgagaattccaatctcgaaaaacttcattttctttgtcaaattcccgttcgtcttcgccaatggtcaccgtaaaccttttctcttcaaaatcaggctcctgttcttttcgaatagttgctttttttaaaacctcctttgcatgccggagtcctcgttcccaggcactctctgttgggggctctggagggggtggaggcaaaatttcatcaactaccggcccaccccaagggttggcgggcatcagcgggtgag

SEQ ID NO: 96341 - DNA, 714 bp, Homo Sapiens
  misc_feature (525)..(525): n is a, c, g, or t
  misc_feature (545)..(545): n is a, c, g, or t
gggaccagatggtgaggaaaggaatggcctcttcccttctagagggggctggctggagtgagacctggggcttggcctggaacccaccacacagccccaaagtcaggaagcctggggaaaccagagctgagacctcttcaacagggtttctttgagatcctacacctccattgggccctttttcagtcttcaatgggggcccagttggctctagaaggagaagaggtgaagcaggatcctttgccctgggggagtctgagggcgcggtccttggactcattcaggccgtctttgtagttgggggagttccactgggcgatcccagcccctccccacccaccctctaatggacctcctcatagaagccccatttcacttttgttttatctacctcttagcaaaacaatagataaattaggtagtggcagctccacttgcttaggttaggggggggaaaaagatttctttttaccaaaggaaaaaaatatttaccttgagaatacttttccaaaaagccgggggggnggaaagggaaaaagaaaaangaaacatgttcggcccgcccttcggccctccaagaaagcttttctaaaacccattcgttttgggcgcgcggggccccagttagggaaagggaaacctggggccatagcttgttttccctaaggaaatccctgggccatgaaataagggcttgggatttcctcccccaat

SEQ ID NO: 96342 - DNA, 341 bp, Homo Sapiens
ttgcggccgcgccgctgggccaggcggagagaggcggacggacttcaggggaggcccgggccacgccgcggaaactacccgactccctggaggcggccaggaccgaccctgtcccgacaaaatggagttccccgtgtggcttcagctcgcggcgcgttcccagagctcctcagtgatccggctttcggattgttcgcctttcatctcatttgccgttgtccaaattctaatttaaaactcatgtgttacttgctgtaaggttaacaaacgtacaccgcaaactggataaagggataacttttatgttgtgtatgttttaccacaataaaaataaattttgt

SEQ ID NO: 96343 - DNA, 861 bp, Homo Sapiens
  misc_feature (434)..(437): n is a, c, g, or t
  misc_feature (444)..(444): n is a, c, g, or t
  misc_feature (449)..(449): n is a, c, g, or t
  misc_feature (456)..(456): n is a, c, g, or t
ggggttttagggagggagagcggcctgggtcctgggtgttgtgtgcggagctgtggcgtcgcgtgtgaggcgcgtgcagggtgagtgtgagtggacgcgtgagtgtgtgagtgtgcgcgcttggagcgtgttaggcgagtgcgtgcgcccacccctgcgcccctcctcccgcttacactttgatcttatttgatcggatcgtgaccccagccccgccgggccgacccgaaatgaaaagctctcctcctgcgaagccccctcggggcgctgtgcagcgaggccccttaggcggcggccacgctgtggtccccgaggtcccggagctggccctgcggggcccggcgctcagaagtgatgaattgatcagatagacgaggccgggcttgtccccggccactgattatcgaggcgattctgatctgggcacggtcccnnnnccccgcnccccnttaaaancctccttgtcgggccgccctcggccccctcgaagaagcttttctagaccatttcgttttggccccgcggggcccacttaggtccagtgaaacatgggtcaataccgtgttcccctagggagatccctgggccatggacctaggggctttggcattcctcaccaaattaaaaaacccccccggggggcaacccagagccgtttctgaaaaccaactccaaaaggggggtttcctgaaggtcctttttctgggtatcctttccaaagggaagccccaggccgaaccctcaatttattaaatttagcgcccccggcccttggccactttaattggcaagaacctgggttgccaaatttcacttaaagcctttcctgtccggaaatgtgggaaaacctcttccccaaac

SEQ ID NO: 96344 - DNA, 579 bp, Homo Sapiens
  misc_feature (461)..(461): n is a, c, g, or t
catggccatacagagcagtagctgtctatcgacagacctcaaagacacagtgagcctttgagtttcttcaaatcccttaagaaatggagaacagtagtctttcttcaggggggttctggaaatgaaagagctgactgtctgctctgagatgtgcttattagtggccaggatccagtttaaggtaaggggtagacaaccctgattgaaaagatctcatttcttctcccgttgctgtactcctttttctaacaaaatctataactggataagcataatccatcttccttcttgtttacttccacagctttacatgataacccttagacataaaattaataccggctttcttactgattaaatatttttctctggtcaggcatcttttactgtttaatttctggaaatgattaaaatgtgtgaagctgatgtatccaactataatgcccatcgttagctcctgngtacctatgcaaaatatgctgtaaagagctggggctagaaggattatattccgtttagattgtagtagggcatttgttatttgttagtgaccccttctgggttggaatgtttatttga

SEQ ID NO: 96345 - DNA, 523 bp, Homo Sapiens
cacaaagaaggtgacaattaagctttccctagaagagtgaatcagatttcttcagagggagacagtgaaggtaaaagatcattttggttagcatgaggaaaggcatggaggtgtaacggtataagatgtttgggatgttgtgacattacattgcatcaagtctaccaataacaatatataaacatatctgtttcatactttgtaatgaaaccatctgttaattgagaccttacctcactttttattgattttccccttagtttagtttctttacagtcagatttttttaaaactgtaggtcataaaacaaatttagcagctctctaatagcatttctttaaaattgaatagcatagaagagactataataatgtcaagtagaaaaatatcagagtgcaatataatagtaaagtacgtaatgtttttgtgaaacatacttagtttatttgtgtctaagtgttctatgtgtctgttccataatgtatttcatattgtgggtcacaataaaaatttagtggccaaa

SEQ ID NO: 96346 - DNA, 423 bp, Homo Sapiens
gatgtggataagagtgaagagatcatgtgagatgagctgaaacaggagataagcatgatggtaggagtaaaatcttaagatgaccagctgggcagcatcgcagacaggaccattaagaaggcagatcaggatggggacagacccatatctatcacaaaatatgttaaggggttggaaaaggtggatgtagaacagaaaatgagcatccgatttcttcactaaaggagaacaaactgttccttgcaggtcgaggatgtaagaactggaacgtgaaagtcctccttctaccaactccacctccaccccctcattccccttctcccaaagtactactgctgttgcatgacaaccccaaatatgttctgtcaacacaaacctgcctttggtgtataaacagggcattacagaatggtacaccctaaa

SEQ ID NO: 96347 - DNA, 480 bp, Homo Sapiens
gatctggactctagaagtgctagtttgaaatatatccattactgtcatttccttttgagcttgtggacaagctgaatgtcaggactgacttctccagctcccagccctgcgggggtgtccttggcatcccatcagcagaggagatgcgtccctgttgcattttggcgtttggggctttgggtttatccacatgagctctgaacgtccgttatagttagggtgattggaaggtctccatcactgggtgttttaaaggtgattcaccaccatttgtgaaaggaccaacgtgctgataaacaggaccgatccgagtgctacatgactgtgcgtttgctatttcaatgggcctgaacgactacaaagccagctaggtctggaaggggaagccagctctggccacgacatctggtcggagggaagtggggatgtggcatggtagcgtctgttcatccatggaataaaacattattttaccaaaaa

SEQ ID NO: 96348 - DNA, 488 bp, Homo Sapiens
tgggtcggtaccggcacatcgacccagtaggatggaattcaagtgactgtaattcactgtagtaatagaaaatgattcaccacgtgatcatctcaagagctgccaaaaaggaaactgccaaaatccaacatccattcttgataaaaacacaccaatcctggagcagatggacactgcctgccttctggggaagggggccttgcactgctaggagaaatttttgccacattaaacctgcttctaatcaggcttctaccagcagtccagtgtacaggaaacccagagagtggagaagcaggttaaatgcaagaggaagcatttcgtctgatagatcaagagcagggcattctataaaattagaatgccctggactctacaaaagtcaatgccacaataaatgttggggactgtttcagaagcaaagagaccaaagtaaccaattgtagtacatgaacttggactggatccttacttataaagcaacaatt

SEQ ID NO: 96349 - DNA, 467 bp, Homo Sapiens
gtcctgagtgaagaactctcctctcatcccagagatgggaaacctggatctgagactgccagctagctgcggcctcctagtctgtaaagcgaagggagaccaggacgctcccaaggacccggcttatcgcccctccctttccttcccggggacccagaacagaccacaagacggagggtggccgctggaggtcgccgtggccccgcgataccaccaaccgacagaaatggagaacagttgattcagattcagctgatattctcaggtctggagcgggcctgagcgctttaattagcccggggctaatgtcctcacccatctttgtttatagaacgttgaaactccagtactgttggtaagttccaggaagacaggaactttgcactacttgaactccagggtctagaacagcctgcaatctagcagatgctgtaaattttttaattaaatactgaactcctgtaaaa

SEQ ID NO: 96350 - DNA, 439 bp, Homo Sapiens
caggcagaaggtgacaattgacacgatttcctgcacgcgtcctcctctaccttggaagcagttagaatctaccaggcacagatgaggccgcccttgcctgacggagcttgatgagcagcccttggtctccggttccaggactgagagcccagctgcctctgcccacccttccccaggcctctgccagcctctggctgcacggtcaggccctgccccatggcaggcctgccagagcttggctggggacccctcccgcctctggctccctgatgggctggatgtaacttgtgtcttctagccccttaaggagcccaggtgttttaaggaatgaattggtcactgcatcttgtatcgattatggttctgagaaaagcaaatatcacttttggctgcattaaaagaagcatcatatataaaataaagaagatgaaggtctaaa

SEQ ID NO: 96351 - DNA, 629 bp, Homo Sapiens
gcaatatttgaattctgtaattggatgaatgcattttctagatttatcaaatattaacatttcgaagactagggttggggatgaactgtggctatacataaagtctatatatcatcaccattttggttccccagcatcaaaagagtgactatgcaggtgaaggcagtaatgatgcaaatggaaatgtggctgtgagcaagcagctggctctacaaagcacacaggcctggactcagcctgtgaagcggcgggtactcagaaagtgacactagtattttaaataaacacccaagagcttttgcatctgattgttcccttcaaagtagcctgctgggagcctagatcatcagaggatgttcatcagagggggaacagatcatcctagatcacagaggagttcagtgctaagaatgtgtcaaaaccttctgtctggaccttcagagtggtgacaggagttactcattcgtggcaaatatttatccgcagaggcagaatttgaattttggaaacggtcaaatatcttttggccccaagtttggttaaagagatgaaaaatcaagttaggcaattactcttatagtaacaaccaagccatagaatcagagcaggctgcggctctggtgtccctt

SEQ ID NO: 96352 - DNA, 715 bp, Homo Sapiens
ggcacgaggctgctcaggaggtgcagactgccccgtgctctgggccttgcagctctgtcgctagacggttgttagaggggcagctctaggctggggcttgcgctgggccgtggtgggaggcacagtgtttacaggctctggtggcagagcagttggcacacctgtgggtgaatctgcctgatcccctggcatttggtcagagtacctcagagcaccccactgctcaggggctccttctggctgcagtaagctccctggatggtcacagtgccgccccatccccaggctgtgtgctcaaagcggacaaaactcaggccagagccacagctgggagacctgcactgtccctgcgaaatactaagaacacctagggtgtgctcactgtgggggccagtttctcctcggaacatgacaatgaagctcttttagagaaaagacctttgtagattcaacaattatgataggatttttacagacacctattttgggctcagttttcatcattaccattaaatgcattggatagaaggggactgttcttcacacatcatattataggaagacataattccagtgcctttatggtggagcagaattcgacaacacatgtccattcagccctctgaatggatctgagacgaagacctttttaaagatatgtctgtattgaacgagaaagccagttttgagttttttacacttgcacatcattatc

SEQ ID NO: 96353 - DNA, 440 bp, Homo Sapiens
  misc_feature (29)..(29): n is a, c, g, or t
gtaggcacaggcgaaggactggcactcgncgatgttgatgcggcagtcaggccccgcgaagccaggtgcacactcgcagcggaaccagttgacgccgtcaacacagatgccaccattgtagcaaggcagagggttgcagtcgttggtattgtgagtgcaagtacgaccctcccagccgtcccggcagatgcaggagaaggaggccccgctgcccacgcaggtgccaccattcacacaggggttgggcaggcagctgctgttcttggcgacggcgcaggtgctgcccttccagccgggggggcaggcgcagcggaaggtgtcgccgctgtcgtagcaggtgccaccgttgctgcaggtgtaggcatcgcactggaactcgcgtgagtggcaggtcttgcccttccagccgtcgtcgcacgcacagtagaagtcattgacca

SEQ ID NO: 96354 - DNA, 514 bp, Homo Sapiens
gcggccgccctgagactgggacccatggcaactctctcacccccacacatccagttatctcccaaaagatctgccaaccacagctgggccctcatctgtggccaagaagagtatttgaggaggtggcctcagggagaagaaaggtgctgtggtcagggtggcaccacacctccaattctccactttactcacaggctcccccacctctggctggtctgagtgcccggcatagcagggctctgtggggggtgaggggagtgcttctctgccgggaatgaatgagggagtccagcatgttttgttcgacaggtgctgcagagggaagaaaggtccttcctgttgctggaagagcctgggctctggcccccaagggttgctcctgctgaggccccttggcacagcccagcgcaactgaagcgttcctttggccccggcctctcctgcaagaaacgctcaaatgcatgcacggataactcggtcagaggcttgtggatggcgtagaggggcatggaca

SEQ ID NO: 96355 - DNA, 698 bp, Homo Sapiens
  misc_feature (237)..(237): n is a, c, g, or t
caaatgaccaattcttaagatttgtgtaaaaccattcagttgtagcaaacatcatacaccatagactttgtttgacatcagataaatcacacgggttagagaactttttggtttttagaggtcaaggaatcattcatcatgagcttccatattttgcacatatttctgaaaaatattcctgaagtggaaaagttttgttatacaacacatagttcctggtacatgagggaacccacngaaaaaaggtatcagtaaacagtgttacagaacttccaatttaatatatatatgttttagtcaaacagaattcaaacccaaggacagtttaggtggtggtcagacccagtgaaggtgctgggagtggtatacttactcacttacctcttaaacatgcaatgaaaatattctacagccaaacccttatcataaactccagccctggtcattcagcttctaaatgcagtaggaaatgtcaagagatggtggatgttaacaagttattgagtactgtcccatgttgggagacagttctgtcaagatgttgacctttttctggagtactacagagcgtgcattcctgaaaacctctaggggttagggacaggttgtgaatttgtcaattgtgaatacgcacatggtggcactataaaaagaattgaaagtaaatcccctatccctaacatcaggtcatgctctgc

SEQ ID NO: 96356 - DNA, 914 bp, Homo Sapiens
tgcggccgccgagtccgcatgcgcaggctgcaaaggcccttttgggccggtcccgccgcgctaggttggcgagtgggactatttgatcctttccaggttcgccagcgtggtgttacgagaggaaagcgcagccgcagcgtacgaatgggaaggccaaacacggtcccggggagtctgagggaagctgcagggcgcctggaattggggtctcgagtgagccggtaaaaaccgcctcccgctgagcgtcccggaacaaatactgtctgaactgagccgtaagcaagaaacggtcaggagaagctggggcgatctgatgattagaacatttcagggactaccagagagaagtgcgtaattgctctaaggcaggtaggtaattggcctggaaacttgggaacgccccgccccccaccccgactttcagcaaaccaccgtgcccaggaaaaagagcgattgtggaagaccctgtgaagaagagaccaggaaggcactgtggcttaagagagcaaggcgttcctgaatgcagccaacatcaactggtaaacaaaaaactgtgagaacggatcctgaatcttgcgcttaccaggggaaattcaggagagatatgaacctgagcaagatgaggttgaagttactcaatgcggcattaagcctgttcacggccacttcctccggcgtcaccaacacacacactgtacaccagcagtatttttacacggggtatgtgtgttaagtactatcaggtggataattattacttcacctgtatttgctgccttgataccattagagaaactcatgaattataaatagcatagtgaatttgtgattccctgaagatatactaaggtggacttttaaaaaggcttctattccaaagggaactaatatgggaggaaatggtttcgagaaag

SEQ ID NO: 96357 - DNA, 734 bp, Homo Sapiens
gtgggatctcctgtcaactggtggaagatattcctgaggctttgggggtccctgggtgctttttccttaagtcactattgaggctgctctggtttgttgtgcgtctttggcttttgtcagccttttctgggctatgcagtgatgttcttgtgcctgctcgtgagtcagagggcctctgagcctgtgtctgtggctgactgtggctttcactgcagagacacctggctgggccatttccttacagcacccttgtcagcttctttggggttcttcagattccccagagaaatatcttgtagccctttgcctggctgagtggccaagtgaggagagaggcctgggagcacagcagtaaccataaaagagcttacttccctcttttcagaattgtttccctcctctgtaactggtgtccccagtccaaagattctacttccctttgcagacagaaaagcgatacctttttgccaggataggagagggactgtgcaggttggctctgtgtggctgtgcagagttgtggggtgcatcttagggatcttcgtgccttttaaacctatcagccaactctgtttttaattcaggtctcctggcttccagtcatattgccagttggccttccccattgccgatacaggattcagcccttttaggtctgtttccagtttctagcctccagtattttaatgttcttatctctattcttattctttgctttcgtgatttgtatctta

SEQ ID NO: 96358 - DNA, 508 bp, Homo Sapiens
  misc_feature (291)..(308): n is a, c, g, or t
actggatgagtcttccgttttattacaaaaatgaagatcagtttgatcaaaatgaaagcttgttcacaagttttacatgaatattctaaatacaaagtctcctgaaacaacatacttttgatatgattttcatttttaaagggatgcaaacattccattttctcatttataacctatcccaaggcaaagtattttaataatgtatcctttctgcagttagatcacaattcacaagtataactgaaacagacaaaaccttgtcagcaaaggttaaaagtccttttttctttnnnnnnnnnnnnnnnnnnggaggtaaataaccagcccttatgtgttttcagaattttgtactacactgacatgatttgcagtcaggtttttcttcctaccccttaaggctacaaaattctgttgcaaatgcattgcaaaagaattctagaccacttaatgcaaaaatcaaaaaatagtttttcaataaaaagtaaattttataaatggtaggaaacag

SEQ ID NO: 96359 - DNA, 465 bp, Homo Sapiens
attcatttagctccgttggtaaaagtaacttagtaataatgctggaattgtaaggaaaattatggtttactataaatgtctttttgaagttatattgtaggtaatcattaagacctaattattagatgatactaatctttaaagtgaccagttttcttacaatttagtttcttgagttcttcaagggaatttaattgttgagcaccattatctatagacacatatactcttacatattgtgctatattatgtagattcagccataaatagtgcttaatcttattaatataaatgtatgcgattcctgtaaaattaatgacacaattattaaactgctatagatgggcatgtatatgtttataaataccatgctatattatgtaggtccatctatatagtgttatgaaaatttcatacatccaaaaaagttaaagatgcatcgccagatgcttcctttggccaaaa

SEQ ID NO: 96360 - DNA, 990 bp, Homo Sapiens
  misc_feature (257)..(318): n is a, c, g, or t
  misc_feature (422)..(475): n is a, c, g, or t
  misc_feature (571)..(579): n is a, c, g, or t
  misc_feature (832)..(903): n is a, c, g, or t
ctggacgaggcgcgggtcaaaatcggcagaggctcaaccatttatcacccatcaactatttccatcctgtacattttccacccatttacccatctactaattcactcatccatccacctacctatccatttatcatccatctacccactcacccatccatccatccttccaaccatttatccacccatccaaccatttccatctgttcatttccatccatctacccatctacccattcactcatccgtccacctatnnnnnnnnnnnnnnnnnnnnnnnnnnnnnnnnnnnnnnnnnnnnnnnnnnnnnnnnnnnnnncccacccgtccatccacctacctattcatttatcacccatccatccacacacgggtctgtgcagattcattaatatccacccatgcatccatatttatctattnnnnnnnnnnnnnnnnnnnnnnnnnnnnnnnnnnnnnnnnnnnnnnnnnnnnnngatgtttattgagcacctgtgttctgggtcctatttgggagccttgttaaccaccaagaccttcctaagccatattgtggtatacagacagatacnnnnnnnnnggctctctccctgtctgatctcatgcagcctgccttggagacaagactctcccagtgctgtgtgcttggagagaggaaagcacacagccctggagtcagagacctgggtttcaattctgtctccacctcttattagctagctatggactcctctctgagcctcgattgcctcatctgtgaaatggggtaatggtgtgagcagcgtttccctgggggatgtgatgcagcccacttggggcctcatgcactcagnnnnnnnnnnnnnnnnnnnnnnnnnnnnnnnnnnnnnnnnnnnnnnnnnnnnnnnnnnnnnnnnnnnnnnnntttataacaaaagggacagaagcattcctgctcttgtgaagtttacattgactagatagtaaacaaaataaatgaaatatgcagtga

SEQ ID NO: 96361 - DNA, 748 bp, Homo Sapiens
  misc_feature (135)..(239): n is a, c, g, or t
  misc_feature (521)..(680): n is a, c, g, or t
  misc_feature (693)..(708): n is a, c, g, or t
gaccttcctaagccatattgtggtatacagacagatgcagaaaagaaggctctctccctgtctgatctcatgcagcctgccttgggagacaagactctcccagtgctgtgtgcttggagagaggaaagcacacannnnnnnnnnnnnnnnnnnnnnnnnnnnnnnnnnnnnnnnnnnnnnnnnnnnnnnnnnnnnnnnnnnnnnnnnnnnnnnnnnnnnnnnnnnnnnnnnnnnnnnnnggtgtgagcagcgtttccctgggggatgtgatgcagcccacttggggcctcatgcactcagcatctctttattagcaaacacttattgaacccctagtacatgccaggcactgttatgaggtcccggggatactttataacaaaagggacagaagcattcctgctcttgtgaagtttacattgactagatagtaaacaaaataaatgaaatatgcagtgtgtcagtgctggtaaacccgtggagaaaataaagcaaggttggggtctggggttgggaattgnnnnnnnnnnnnnnnnnnnnnnnnnnnnnnnnnnnnnnnnnnnnnnnnnnnnnnnnnnnnnnnnnnnnnnnnnnnnnnnnnnnnnnnnnnnnnnnnnnnnnnnnnnnnnnnnnnnnnnnnnnnnnnnnnnnnnnnnnnnnnnnnnnnnnnnnnnnnnnnntccttaattttgnnnnnnnnnnnnnnnnaaaaaatttttaaaacccttttttgggggcccgccccccc

SEQ ID NO: 96362 - DNA, 479 bp, Homo Sapiens
tttaacagaataaaaatgcttgctataattctaccaccaagacggtgacttttaacacaattccttcaactcagtgttttcagaacacatcatcaacatcaagtattacacatttattgtaaaagtttaagtagccacaattactttggaaatcatattatcattatctagtatggttaaagtccatacaatgtatcatgcaaccaacccattcctaatcatccactctgggggctttggggctttcttgcctatgtgcacaggagacatgcacactaatatttatggcaaaaactggaatcggccacatgtacatcaataggaaactggtgaaattgtggtaaaacgatatgtaagccttcagccgtaaaaatgaatgaatgacagcctcccacaccacagataactcctacacataatgtgtatcatgggaaaatacatgcagtaggaatttgctatacaggaagcttaaaaaccag

SEQ ID NO: 96363 - DNA, 600 bp, Homo Sapiens
ggttactatccaggagagcaggcagcgttgaatagagagtcttggtgaggtagtagacagactgctggaaggtacacatgatgacctcatccaggagggccatggcctcatcacataattccaagtcattgcagagctgtgggtcctcttggtcagcctccttctccatttccagcaccttctcctgcacaaagctaagcagctccgtggtgttggccatccacagcatgagtggccgcagctccacagacacagcttcaggagtcaggggcacctcggggaccccctcagggtggttttctggctgacggtctccaatttccttaatcttttcccagacggcctccttgatgagccgggccaggcagcccagcagtcgtggcaggtggcccagctccagctcacgggcggaatgctgcacgcacagcgccagcagcgtggcgggcccgaggggcggcaggtctcccgagccggcggctgcggcgcgcacgatctcgcccagcagcgcctcctcctcgcgcggccggaagcgcaggactggctcacggccgtccaggtaggcggccagtgcctcgccgcgctcctgcaggccgcggccgc

SEQ ID NO: 96364 - DNA, 539 bp, Homo Sapiens
gtattctatattttatttttcaaacagccagtgtccacatttaaaatgcagaatttgcaaatattagtctaataattcaatttaaagtaaagcaaaacaacttcctttagtatcacaatacataaaatggttttataaactccaaatggcaaagataactatatgacaatagtgttgaaagccgtgaaactcattaaacctcttatcaataggtcagtttaaagaacatctctatgttccatgactatgcatgaaacaagctgtcactgtattataaaggctcagcaattcattcatggcataatatagggtcaagcaagattttgtttttacaatgacaattaaaacatatttaaagaacaaaaaacctcccaattgtttaaaaacaattctatttggagagcaaaatattttaaaatatatcgacttaccaaatttcaattgtcaggctgctgactactgatgtaaaagtttatatttaaaaatatcacaaatctctttttatttaacactgaaaatttcaatgggataagtttcat

SEQ ID NO: 96365 - DNA, 519 bp, Homo Sapiens
  misc_feature (155)..(155): n is a, c, g, or t
ctttcgcctcccggttctcaccctcatacagaccctcctttcagacccgccctcctgttcacagggacccatttcggagccctggctcacgctgggcgggaactgccgtgacgaattccccccaaggtgttgattatccatcccaacccagcctntggcttccctcccacctccaccccagctcccacaggcccctcgccccgttcatcggctgggcgctcgagacggcgcccccagatctcccaccgggcagtgtccccagctgcagctgaggagagaagcgccggcgtgcgcggtgccacgtcggaattggctctggggacgccgcagctgccgaagcgcagcgcgcggtccccacgcacgccctgcctccgggcggccggcgggctggcccggcgaggagaggagggatgcgcgccctcctcccgctcctatctgcgggtgccaccgcctgcgtcagggacccctggcccgatctttctgcccccgataacagaaaatctatttttcgtcttaaaa

SEQ ID NO: 96366 - DNA, 418 bp, Homo Sapiens
tggcctctgtacatttccctgtggttctccgtccttccctggcgagggagctgggactgaagctttcccgctgtttccctgcctgcaaaagcagccccaagagctgcgcattggcttccctcagcaatctgtcctgtctgtgctcccattcggtccacatagctttctttgcctctctgaggcagacaggaagtgtctaattacgattttgtggcctgggttttgttgcataccacagattgtctatgtaacatgtagcgcacacctctcttggtgctatttcattcctgctgtaagagaatgacaaaaatattcatgtatagccaattgattgtgacgtgcttgtggtctgtgcttgctcagaaaaacaaacaaacaaacagtttttccaattataaataaatgctaaagacgaaag

SEQ ID NO: 96367 - DNA, 508 bp, Homo Sapiens
aagaatgtgtatggtatcatgtatctctctgtggtggttcattccacaggacgaatgcatattcaacacactgccttattacataactgatctatttattatcgcatacagatattctaagtcgttgagggaatgacaccatcagacattataagtacttggtcccgtggatgctctttcaatgcagcacccttgccatcccaagcccagtgaccttactcgtataccgtgccactttccaccaactttttccaagtcctttaactcggtgcagtctgtattttccaccttttgtttttccagttccaggacacagattatcaactggggggaccaaatagccaccttgattttcttctttgtggtctttttcctgaaagttggggcccagtccttggctgtatccatgtaatgatcttggacccatggtagaaaaatgcaccaaatagggatcatatgaatttgctgtctaagcccctagtccaataaacttagtaggaccttttaa

SEQ ID NO: 96368 - DNA, 486 bp, Homo Sapiens
tcacacacacccacttcctcatcgggcaatttggggcaagctacttctctaggtgcctggagtttgatgtctgtgtgatggggagaagagttgtgcctactcagaatcactggaggtgaaatacaaacttacagagaggacctggcttgaaggtattcaagaacaagaggattcagaagtgttcagtcttactcccattcttttgctacagttatcacataagctttgttgttaaatgtgggtccatgaagcttttatcattactgtccccaaagtgtgttgatagcatttcctaggaggatttgacctttgttgtattgtgattttctaataagaggcatatgattggataaaagacataatattggaaaggagtgaaaagactgggccctgcctccaattttactgttaactgtaaccctggaaacactcttttgaaaaaaagttaattaaacgagatcatgtcctttgcagggacatggatgg

SEQ ID NO: 96369 - DNA, 1088 bp, Homo Sapiens
  misc_feature (1015)..(1015): n is a, c, g, or t
gtggaccggtccggaattcccgggatcgccactccgcgcccgctatcctggctccgtgctcccacgcgcttgtgcctggacggaccctcgccagtgctctgcgcaggattggaacatcagttaacatctgaccactgccagcccaccccctcccacccacgtcgattgcatctctgggctccagggataaagcaggtcttggggtgcaccatgatttcaccattcttagtactggccattggcacctgccttactaactccttagtgccagagaaagagaaagaccccaagtactggcgagaccaagcgcaagagacactgaaatatgccctggagcttcagaagctcaacaccaacgtggctaagaatgtcatcatgttcctgggagatgggatgggtgtctccacagtgacggctgcccgcatcctcaagggtcagctccaccacaaccctggggaggagaccaggctggagatggacaagttccccttcgtggccctctccaagacgtacaacaccaatgcccaggtccctgacagcgccggcaccgccaccgcctacctgtgtggggtgaaggccaatgagggcaccgtgggggtaagcgcagccactgagcgttcccggtgcaacaccacccaggggaacgaggtcacctccatcctgcgctgggccaaggacgctgggaaatctgtgggcattgtgaccaccacgagagtgaaccatgccacccccagcgccgcctacgcccactcggctgaccgggactggtactcagacaacgagatgccccctgaggccttgagccagggctgtaaggacatcgcctaccagctcatgcataacatcagggacattgacgtgatccatgggggggtgggccgggaaatacatggtacccccaagaataaaactgatgttggattatgaaaagtgacgagaaaagccaggggccaccaaagcttggaccggcctggaacctcctttgaacaccctggaaagaagcctccaaacccgnagaacccaaggcacctcccccactttcaatctgggaaacccgcacggggaaacttccctgaaccccctgggac

SEQ ID NO: 96370 - DNA, 515 bp, Homo Sapiens
gagagagaaaatcccacacctcttggtaactggaaaggctgaggccatgggtgagagcacctcccatttccctgggaaaggagaataagtaaaacttgaattccttcaattagagactcatctaagaatcctttctatcttcccactctgttttgaagtaggacagggggcccagcatcacagacgacaaggttcttaccttgtagttctggtctcatttgtttctgtatttatcaagcctggtacataaacacagtaggtaggtggatggatgaatttgctgtccggtcaagacttcagctagcacattcctaattgacctgcctttacatatatggtttctaaaacactttcacactgggatgatgacagagttctggagatggatggtggtgatggttgcacacactattgggaatatacttaatgacgttgaattgtacatttttaaatggttaaaattgtaaattttatggtatgtatattttaccacaataaaaaattttaagaagaaa

SEQ ID NO: 96371 - DNA, 622 bp, Homo Sapiens
gctaaatggcaattaaagcatgattcctatgcttttgagcctgttttatgacaaggtgttactttgtagacctggcccatacatttcttttttgtcaacactgaaaaagaacagtttctgagatcgaaatggaaggaaaggaagtgagtaatgacaacaaaactgaatatttaaaaaatattcctttatagttaaatctctccagttggtgttggcttcacattgaaagagcagccatgtgccaccctggccggggtgtgtgcactgcatgcaggttctcccttgcatgcaagatgggtgctggcccactgtgaggcccctgctcggggaagttctgtggagtcactaccagggccaagaggcaggtgggctggctatgggacgagggccaggtgtgagcaaactgccagggtccgctgtgccactgctccccggccacatgcccgcccagctgtcgccttaaccagactgaacagacaggatccttcagggcccttggccccactctcagtgcattctgtcatcagggattaccacctgtaccattttcataaaacaaaaccaaaatcactaccatcaaatggccttgtctctctaaaaagtctgcttaaaattctgtttt

SEQ ID NO: 96372 - DNA, 571 bp, Homo Sapiens
  misc_feature (355)..(370): n is a, c, g, or t
cttggtttttaatagctgaaaatatgtctacgtgaggttaactgtatttacccaatgccagatacctgaaagagtgtgaaaaattaaggtaattattaatgtctccaaatagctggatgatggtgtcatatttgcaatgcatagattatgccatcatgtcagatttgggacactttgggaggttgggaatgggatggggatgggtggcagtgaataacatcagacagggtggatacgtaattccaaagttggaattagtgtctctattttaacagcaattcctttacttaacagcaattcttttctgtttatcattttagggaaaactagaaaatacagaaatatatcaagaagnnnnnnnnnnnnnnnntgacccaaaatcccaccaaccagagacagctattaatgattgtggtatatttattgtaagtctctttatttctgtcttcatgcaaacacatttttaaagaatggacactggtattatattgtttatacaactctaaatgctgctttttcacttattacaattaggacttttttcatgttaataaatacttcctgaaaacat

SEQ ID NO: 96373 - DNA, 460 bp, Homo Sapiens
  misc_feature (252)..(264): n is a, c, g, or t
gaagctgtcagtgccatcactggcgaggagtggagagcagggagcttcattgtctggtgttaaaacaacatgtcctgttgtcactcgtacattctacagacagaagaatgaggtgtcaacagaatcactttctcatgtatttacagaaatctcttttcatcagaggtgcctccctggccctgggttccgagttgtgtgggaaattgtcccacaccttgcccctttctcaaatcataaactttcagctattcnnnnnnnnnnnnngtggtctgttttcttgcacttaaaggaatgagacaaataaaaggagggaggagtcacgtctgtactctgagggaattggctgcaaggtgtaattttggatttcacaaatggaaaaatagcagcatagatttttcttatattattttactgttcatagtggtaaaaaatcaattaaagagaaattatctttcaaaaa

SEQ ID NO: 96374 - DNA, 648 bp, Homo Sapiens
tagtgatacacaaattacatgtgggctacttcatttggtaatttggtccagctttttggtggctgtagagtggcctctaggatacagaaaatgattctctgaaatttttcgttgtaattgttaaatactactctgcttgacttactcagttttggcgggaagatctgggtcaattggaatagtacacctttctcagggttttcagtttaataaggttgtcatattattcccaacatgggaatatagtggcttctaaagtttgcaaatgaattatgtaaaaggattttctgtgtattaggaaggcaacctgttctgttcatggtatattaacacttcattgtcatgtgtctacccttaaaattgctatttgtagtgaagaaaaaagcatagtggtatttagtcacttctgggttcctcttgtcagtttatatgcaaacattttggcatgtgggacttggggaggagggacaattggttgtatgttttgaccacttccacctatgaaaattatctgaacattattcagatttaagagttcatgggagcaggtggtacagaacctagtgttgaatataatttttgtgccatgcttgaatgtattttgacggattagcaaaataaaagtgaacctcctatttttcatcttaa

SEQ ID NO: 96375 - DNA, 392 bp, Homo Sapiens
tttaatctattggagggagatgaagcaagatggctgaatagaagcctcaaccaatcgctgcccccaccacaggaacaccaaatttaacaactatctacacaaaaaaagcaccttcacaagaaccaaaaatcaggtaagtgatcacagtacctgattttaacttcatattgctgaaagagacactgaagagagtaggaaagacagttttcgattgtctactaccccttccacccccatgcagtggccgtgtggtgcaaagaatctgtgtgcttgggggagggggagcacagtgattgtgggactttgcactggaactcagtgttaccatgtcacagcagaaagcaacaccaggccaactggcaagcaacacccgggccattagcaaagaactc

SEQ ID NO: 96376 - DNA, 454 bp, Homo Sapiens
ctttgtctgtctatctggtgacaagagagagacaagtaaatgggggccgttgggacggcgggtgcctggagggcagctctgggctcagcgggcagtgcttagagcacaggcccctctgttgggggatggggaggagagcagtctgcccttgggagcgtaggccccagggagacttctaaagccccccctgtcgtctgctcttcacccagcaccacagaggcacctgctgcacacacaagcatctcactcggcccacggagggggccaggcttcctttgcctgaagctgttttgggaagggtctccacacaggcactgatctcccaagctttggtcatgatgtcttttaccatttgataattttaaacattgtttttaaacccaaaacatttagtggtccgttgcctctgaagatgtaaacaaacaaatacactatttctgggaacatttaaaaa

SEQ ID NO: 96377 - DNA, 466 bp, Homo Sapiens
ccccgcctcttcttccgggacgacgaattgcggggctcggattgggctgaggcgggccacgcctcctcatatcctccaatcaactccctctctggtgcgctccctccttctcagccccgccccaccgccccacgttacgtcgctccttctggcctcctccgttatcccggcggctgcggctcgcgcggcaaacccacctcccattgcttcccattggctggtcaggtcccgcgcgagcgggatcgcgcccttcgccccccacccccaaaaccgggccatgcctctctccttcggctttctccaggagccagcgcgaggcagtagatcggctgcttgagacgcgcgcgcagctcctgcggaccactccctccgccctgcgccagcagctgcgccggctggcagccccccgcgcacgcgcgctcgcccatcccgctccctctgctcgtttgcaagtcgcaacgcgctc

SEQ ID NO: 96378 - DNA, 481 bp, Homo Sapiens
acactcggcaacaaccaccaggagagccccggctggcggtgctgccgccccacgctgcgcgagaggaacgcgctcatgttcaacaacgagctcatggccgacgtgcacttcgtcgtggggcccccgggggcgaccaggacggtgcccgcccacaagtacgtcttggctgtcggcagctccgtcttctatgccatggtctacggagacctggcggaagtcaaatctgaaattcacattccagacgtggagcccgcagcctttctgatcctcttaaagtacatgtacagtgatgagatcgatctggaagccgacacggtgctggccactctgtacgctgctaagaagtacatcgtcccagcattggcaaaagcctgtgtcaactttctggagacaagtttggaagccaagaacgcctgcgtcctgctgtcccagagccggctgtttgaggagcccgagctgacgcagcgctgctgggaggtca

SEQ ID NO: 96379 - DNA, 433 bp, Homo Sapiens
tttacttcacagcaagatttattaatacatccaaaagaaagaaagaaaaatgattttgtcacactatatacagataatacatacagtgtttcatacacatattacatcagtttttacacaagaaaaatatacataaaaatgtaaacttttgtatacaaaaacccttaaacaaattaaacaaggaccagataacaaaaggagaccaattcattattatttcatcaaatttttaaaacagtaatacagtacattcattgagatatatatggaaaatgtgagccatctcttcttgtttaaagggaaattacaaaccaaaagtcaatcgcctcccaagacgtggtcctcccagcaatgccgcacccaatgccacaagtatgcctgtccaccagaactggggggctcttaccaaaacctgcccatctcctcatcttgc

SEQ ID NO: 96380 - DNA, 633 bp, Homo Sapiens
gaaggagcagcttgagggaatattaatggattatgagaagaaaatgaaactgaactattttgcgttatcctacaagatgaatgattatagagtacaatagactgactaaccaggagttgaaagccagatcataagatatttgaagagacacagtaacctctcaaaatgaggccaattttcttagatcaggcttttcacttgagtgctgtacatgtgtgtccttcaggtactgatgaagcctctacagagctctcttctcagccttgctctgccatttctgctgctactgcagcagtgacactggaatccctgaagcatcaaatcttgaattggaggaaagtacttctttccatattttgtaatatgtcctactaaaggatagcaaagcagagttgtttgctcccatcttagaaacttttaaataaaatttaggtattacttttaaacataggtccacagagaagacaaatctaagtggcaaaaataatgtgtattcagcgtcactattccccaaggatgacaaatgtatgttttttgctgtaatatctcccagttgactccatcttctcttctattgaattttcaaccagagagcttcttagttccttattcaaatacagttttggtagccct

SEQ ID NO: 96381 - DNA, 483 bp, Homo Sapiens
ttttcttacaaaattgtctttaattctggtatacataaaacacctcatcagtatctgtaacgttttatgagcaaaataagaagttgattcaagcagttattatgaagaaccttaagcaaagctgcttgaactgagacactgaaatttttcccttagagactggacaatattttgttgattgggagatggccccctccaaagatagtcattcagtttgtcagaatcattatatggtgtcagatatggtgaaaggccaagtttgctgttaaccggcttttttggagtgcgcggactattcaaagaatgcaatgtgttgccgctgcagacattatcagaaaagtcagcatccacaaactttgagtcagatttccttctacgattgtgagatagctccaactccgactcatcttcttctgacttgatttccacatagtcatcttcatctccatcagtctctttgaaattggaaaaataattctgtgt

SEQ ID NO: 96382 - DNA, 534 bp, Homo Sapiens
gcatcttggccccggccggcgcgtttttcctcccccgccttgtcgctctctgggactggaagggttaacgctctgctctcagcccgggagccccttgatcttgattaattcagccttcgcgcttaggcccgccagacgggcgggggctctcgctcgctcacagagagaaaaacagtaaaagcaaaggaacaatatgcagacaagattcagccgaggatcagataaaagcaaagatttctccctgaagcaagagcaaatgggattcttggcttgtctctcatcgtgatcctgattgaagaccactggacacatctgtcaagactctaaccgcaatccattggaaatcactggagagccaaagaactctctttcattgtcctggctggaagcactggattcctcctttcaaatgaactaaaatattttccaagatgtcaagtcaatctgggcaaactttctcaacataaccatccctacattccaatatccctctttttcatttttcctttaaaaataaacgtgcatttttttctc

SEQ ID NO: 96383 - DNA, 908 bp, Homo Sapiens
  misc_feature (677)..(677): n is a, c, g, or t
  misc_feature (686)..(686): n is a, c, g, or t
  misc_feature (742)..(742): n is a, c, g, or t
gtcccgggtctccatcctgttgggacatgaaaaccgcgtaagcactctacgagtttcccccgatgggactgctttctactctggatcatgggatcataccctcagagtctgggcctaatcatcttctgacagtgcactcatgtatacctgagaatttgaaatcttcacatgtaaatagatattacttctagaggagcttagagtttattgcagtgtagcttaggggagcaacccatggctcacaggtcactaagcgtctccaatatgactattaaaactgtcacctctggaaatacactagtgtgagccttcagcactgcgagaataccttcaagtacagtatttttcttttggaacactttttaaaatgtatctgtttttaaggttattctaaattatagtagcctcaactcattctgtcaccagtagaattcagcagttaatatattccatattatttctttgaatcaattcattttcagagcactttaaagtctgatatttctcgatgtgcactgtgatgcctggaaccttcctctggaagtgctgattttatggactgaggactggtgactggtctgtgatagaagcaaattccaattccaaatgtaattagacaaaaatcatttttttagaatgtgtttttattgtaaaagtatctttttcagcttcctggntctatggtncttttttcagataacaacatttttgtctaatggtgaactgcttgtaaatgacgccnaagaaatggcctaaaaagggacagggggggtttgacctccatgaaatgatggagaatggcccctgggggccactttggaaaaagggcgggtttttctcctgaaaatggaaaggggaaaagcccaatggggggttttggaaaaacaaatgggctttttggaaaagac

SEQ ID NO: 96384 - DNA, 550 bp, Homo Sapiens
aagtcttgtccctacagattcgctgacctcagctacccatgaagggtgggaagaggagtccttagcaagaagtccaggaagttgacaacctcctcagacctgataggacactcctctctccaccctgcctcctgactgatttaatctcaggggtgtgaggacctctgagataggccccaggagtctcacccgcaccacttatgtctcagggctaaccagagactccctgaaacagatcctagaggattcccaagtgataggataaatagagaggtactgagacttcctggcgtgggtgacctctcccaggctggccaacctcccccattcagaaatttgctgagcaccaggagtgaatgaagtaaaggaagcccctaggagttcaagaagcagagatttccaggtccatgcaccaaagctcatgtgctcaattctcaggaaaggcctcactcagttaaaaaattttgtatcatgaaagggtaaatgaattaattagtgaatctggtttctaagccaatggcttactagaaatattatagtaaatcagaaa

SEQ ID NO: 96385 - DNA, 784 bp, Homo Sapiens
gggtctaaggtagcgaggcctgggtggcgatttcggcacgagggcggagggaggcgggactcaagagtagccttcctcgaggacctgcctttcccatttgctgcctgaagttaatgtttcttgctggccaaatcagggacatgccggcattccccacccacagccagggggcttgggttctgagctgatggggtacccccctctgcagagcgggatgagtgggtgttccggcagggatgtggtcattgacggccagtgagggcgagagtaccacggcccacttcttccttggagcggaagatgaggggctgggcacccgtggaataggcatgaggccagaagagagtgacagcgagctccttgaggatgaggaggatgaagtgcctcctgaacctcaaatcattgttggcatctgtgccatgaccaagaaatccaagtccaagccaatgactcaaatcctaaagcgactctgcagatttgactacctgactgttgtcattctgggagaagaagtaaatccttaatgaaccggtggaaaaatggccatcctgccactgcctcatctctttccactccaaaggctttcctctggacaaagctgttgcttactccaagcttcgaaacccctttcttatcaatgatctggccatgcagtattacatccaagataggtataacttcctgttgaccagtgagatgggtggctttgggatcatgcgtgttcggggaacccactgtgagaggggcagagtcaaaccaacatgcctaatttttgtaccataaa

SEQ ID NO: 96386 - DNA, 360 bp, Homo Sapiens
cccccggcaacccagttgacctttaattgacgctttccagaccagccctgcggcaccacttgccatgcgggaggccaccagggtgtgcaagcctggctgccattccagtctgtcctgtctgggaatcgccctgtggccaggcccgcatgctggcctctgcccaggactcctcagcatttcctcttggcatccctcccctctcccagaccctcttccagcagatggcaaggcctcggcattgggaagtcaggcacctttgcgggcccagccccctcccgtggctcccctgacaggggcaggggtagggcagcagcacagaccaattccgttgaacgtggaaataaaggaccctttcacaag

SEQ ID NO: 96387 - DNA, 1006 bp, Homo Sapiens
cagcgacctgttcgccagctgcaggaagggggatgtgggccgagtgcggtacctgctggagcagcgagacgtggaggtgaatgtgcgggacaagtgggacagcacccccttgtactatgcctgcttgtgtgggcacgaggagctggtactctaccttctggccaatggagcccgctgcgaggccaacaccttcgatggtgagcgctgcctctatggggcactgagtgaccccatccgccgggctctacgcgattacaagcaggtcacggcttcctgcaggaggcgggattactatgacgacttcttgcagcggcttctagagcagggcatccacagtgacgtggtctttgtagtacacgggaagccattccgggtgcatcgctgcgtcctgggtgcacgtagtgcctactttgccaacatgctggacaccaaatggaagggcaagagtgtcgtggttctcaggcacccactgatcaaccccgtggcctttggggccctgctgcagtacctgtacacaggtgaccccctgggtccagggtaggaggagagggagtgggccgtccttctggacagcagtacacctaggtgtggctgggctgacctttcacctctagacacttcatggtcccccccggggtggttccagctgcctcttcgggttgggttgcaagagagaggactagtgtgcctggctcaagaaagagcttgtcccaaccacatgctgaggccctcccatctgttccctggggcctgtagaacagctttttgatggggaaaaccatggtggccagtgggggcccaggagtcctagtcctggagcagggggcccaaggggggaaggggatcccccctttttctggggggcctgtatgaacgctgaagggtcccccagggccctattcctccccacttgccccccgggcgcccggggacattgggggaataaacatggagaagggactgtttgaacccctgggccaaacaatgcccccgcgggggggaacct

SEQ ID NO: 96388 - DNA, 1098 bp, Homo Sapiens
ggtacatgtcggcgacgctcagcacatcataggctgcctcgggggacagctcagtgtggtcgctgtacatgtagtagagcacgtgagtgaagacgtcgggtgagatgccatgcagggtgacggctggggggccccctgaggtcgctggctcctcgctctctcggaagtggtcatccagcagggctcggaagtagtcactgcggccacagaaaaaggccttgtggcagaggaagctgcagccagccactcggaagcagatgtcagggcagctgttgaagccgtcaggacaagggaagggcagctcccaaagatcacctcggagctcggggggcagggcacaatcggccagcagcgccatgtcctcccggaggcgggggtctgcaggtgggggctcgatggtcagcaccttcacacacgtgcctggcttagacgccacaaactcagacaccttctcgcacttggcctccaggtcgctgagcaggtcccacagctggcattgcttggccaggcgctcacagtcactcacatgctctacgccaatgtccaggcggcctgtgtacaggtactgcagcagggccccaaaggccacggggttgatcagtgggtgcctgagaaccacgacactcttgcccttccatttggtgtccagcatgttggcaaagtaggcactacgtgcacccaggacgcagcgatgcacccggaatggcttcccgtgtactacaaagaccacgtcactgtggatgccctgctctagaagccgctgcaagaagtcgtcatagtaatcccgcctcctgcaggaagccgtgacctgcttgtaatcgcgtagagcccggcggatggggtcactcagtgccccatagaggcagcgctcaccatcgaaggtgttggcctcgcagcgggctccattggccagaaggtagagtaccagctcctcgtgcccacacaagcaggcatagtacaagggggtgctgtcccacttgtcccgcacattcacctccacgtctcgctgatccagcaggtaccgcactcggcgccacatcccccttcctgcaactggcgaacaggtcgctggtgtccatggcgcggaggatggacccg

SEQ ID NO: 96389 - DNA, 981 bp, Homo Sapiens
  misc_feature (243)..(278): n is a, c, g, or t
acaatatgaaaatatcttggccagtctttgagggttaggcacctggcaacagttgtggtgatttgggccattgtactaggggattcaagggaagttgggtttccccctacatttggtgattattacattaatatatgatcattccataagtctcctaagaaatcagatttttaaagaaagacacggattcagagacaatggtctgtaacatgaccaacttttgacaaatatggctgtactagnnnnnnnnnnnnnnnnnnnnnnnnnnnnnnnnnnnngattgctcttatgtcggtaggtaatgtcaggaaaagtgactgtttcagatccccagtacaaacatcagaactaggatcaaatgacttgacttttaagctgttccattttctaagaagttacaattacaaaaagtaagcattttctacattcttacttctaagtaatgaccttctcattaatctttccttggcttaaaatgacaaataagaatccaaagtttttccactcctcctgtgggagataggaatagttgtgaagagtctgatggaataaaatgactccagagatttacacagccaccatttgatcccagcctttgtccttgtgttatttaaacaatggcttcctgctttctcaggggtcaggaaaatgatttaaaaatttgtcttcttgacaaggcctgaaaacgaagggaggtgtcgtggagaaatggtgatttttctggttacatcacttgattcaagcactccctggagctttcaaagccttttttatctgctcagagtgacacccaactcagagtcagaactcaccagaagatgaggaacacccccgaaatcaatgtttcctttctccatgggatttttttcaatcttggtacagctgcatatctcccaaactcggatgctcttgtgaaatgacagccacatcagtgtggttactccccacaaataacactagggggaaatgaccttttttatt

SEQ ID NO: 96390 - DNA, 1119 bp, Homo Sapiens
cggtccggaattcccgggatcgggggcgggcggtggacccccagctggcagagcctggggcgggggcctgaggtggcgtggaccgcttccttccccgcggtcgcccgggctggcgctcgcgtgcccatcgctgagatagtgggaggtggagtgggaaccgctagctttgcagaacgcagagtccctcctcaccctggcggtcccggtgccctggagtgcagtcgcggaatactgttcagcggctcgggtggttttccttgcgtcccgccacgcggcggctcctcactaaaaggctgccttctccccacagctccaggtccgagaggagccgcaccgtcgggttggagatcgcgcgcaagggtggcctctgggtctgcatctgccccgcatcggccacaggaaaagcctggtccctaggcacggtcgtggttcgagcttttcgttctctcgcacattgaggtattcgctcagcccaccacgttgtcctcggggttattaggccccagtcacaagccctatgatgttttcagacttcccaggtggagataaaggaaaattttactatttctgcagaacttctgttgatgtacagcattgtatttagcaacttctgtgtagatctgaaaataaatacattaccaattgttagttgcgtttttattaatataaatcttagagtacttgattttgctgttagctttacttaggtaaattatgtggcactctagcatttttgttgttgcatgttccatggaacttttgctttgggatttccatttattccaattcaaactaaattggaacttccccaattattctaaggtgccaaggtaccagggcttaaccagcgtcttgaagacacacggctggactcgggagttccccagcctctttaaaaaattttctttcccgccccgaggagggcgcggttcgcctcgagtctcgaggacgtggctttcgcctgcgcctccagttagaagatgtgttctgagatttaacccccgaaacaagccggcaaacatgcttctcgcctcgtgagaaaacgcctttgtaggagggatggtaagtcgcggagcccgtctgtgggggtcctcttcgcgtcggactggtgcacccgcg

SEQ ID NO: 96391 - DNA, 1223 bp, Homo Sapiens
  misc_feature (1119)..(1157): n is a, c, g, or t
ccccgcggcccaggcggcggtggtgagcagtgctgtctcccgggaaggctgggggccaactcctgtagcggacggatctgtctgccaagcccagtcctctcttgtggctgaggatggcagtgctgtgagcgttgggggacccaggcctgcgcagagcgcgcccgcgtcctcgtggtggccgcagttgtgcacaccccagcccaggctctggcaggctgccaggcggggctcgccgccttcgcagtgcacgttgtccagcaggatgtgtccggtgccatagccgaagaaggcgttggtggtgggcggccatggccgccccgcagcccagctgacgacagaccacagcggcatccggcagcccccagtcgtcgtcacacacggtgccccacaggccactgtgcaggatctccactcggccctgacacagggtagagccagccatcctgagacgtccgtacagcccgtactggtggagtgtcaggaggccactctgatggtcatggtcagcaaagacctttttggcaccgggaagctcatcagggctgctgacctcaccttgggcccagaggcctgtgagcctctggtctccatggacacagaagatgtggtcaggtttgaggttggactccacgagtgtggcaacagcatgcaggtaactgacgatgccctggtgtacagcaccttcctgctccatgacccccgccccgtgggaaacctgtccatcgtgaggactaaccgcgcagagattcccatcgagtgccgctaccccaggcagggcaatgtgagcagccaggccatcctgcccacctggttgcccttcaggaccacggtgttctcagaggagaagctgactttctctctgcgtctgatggaggagaactggaacgctgagaagaaggcccccacctttcacttgggagatgcagcccaccctccaggcagaaatccacactggcacgccaagtgccccctgcgggttgttttatggaacccaattgcgtgggcccacccccaacaaccggaactaaaaatgggcttccaccttaattcacaccactgctttggaaccttcccaaggggcttggtctttgtttcaaacaccaccccacactcgcaatnnnnnnnnnnnnnnnnnnnnnnnnnnnnnnnnnnnnnnngaggaccccggcggcccagagaaattacaagctccccccggtattcccactacgcgctggcttacc

SEQ ID NO: 96392 - DNA, 579 bp, Homo Sapiens
gggaggaaacagctgcggggccgccgcggcgccgccgggttggtgagcgctgggcacctgggccgggaacctccccgcggcggcggcccccggcccccggctctggtcccggtcccattggccactccgctgctacaggaaggtaatcatagcctcctggtatcacacatccatgggaatactgaatttatttggactagaaactaacacctgctggaatgtcaccagaatagaacctcttaatgaagttcaaagctgtgaaggatgtcatgcccagagctgtagcggtcatcttgtgaccataagggaaaggccataaaaatagcagatatatctggcctaccatccttctgctgctgaaccaatgccaacagtgggactcaactaggaggtcttattacagtactgtgctgctttttcaaccatggagaggtcactcgtgtgatgtggacaccacctctccgtgaaagtttttcctatccatttcttgtacttcagatgtatattttaactttgattctcaggtaacttcgatttataaaacaaaggcaaataaattataatttaaatatcaaaaaa

SEQ ID NO: 96393 - DNA, 552 bp, Homo Sapiens
aaatttaaaggagtttaattgagcaatgaatgattcatgaatcgggcagcgccagaatcacagcagattcagagagactccagggattcctcgtggtcagaacaaatatatagacaaaaaaaaggggaagtgatatataaaactcggcagtgaggtacagaacagctggattggttccaggttggcatttgccttattggaacagtttgaacactcggcagtctatgcatggttgacgtatggctgctgggattggtcaagactcggccactattacaggcgcagactcctgaattaggttttcagtcctgtctgctattaaggtaggttatagttcgtccacaaggactcaaacatagacgtcctggcattcttctcaggccacatttagttcgtgttagcacatggcactgtgtttgtccattgatctgtagatggacatggtgctgttttcaccttttggctgttagaataatgttactctgtacatgggtgtacaagcacctgttgagttccagctttcaatttgggggtttatgcccagaagtggaa

SEQ ID NO: 96394 - DNA, 737 bp, Homo Sapiens
atctttcttttccatcttcaatatatcatgaaagtagggaccttgtcttgcctggaacacagttacagcctaatatgctgaatgaatgcatgcacacatgctctgtgacaacactgaagacaggttttcttctactctcctcctgtgtagggcttccttggctcaccaaagacatagggcacttctccagctcctcttcattcttgatctgcacatctgcgatggagatatacttgtgctgctttagggtcttcacactctcatggatgggcctgggtaatccaaccaatgtatctgtgtcctgccccagggtgaatccgatgaacttgttcctgctcatctccaagaagtgctcaatgtccttctgtctgacctttggggcccagggcaggcccttgggaaaagccacccgctcagcagagaggggtgcctgtgagggtggaggtggcaccagagggtcctgctctagcaggtctagctctccatccaaggttcgttctccatcaccagcagactcctcttcctcctctgtggcgggctcctcagtcttgaagagatccctttcattgtagatgtccaggctgtcctgcttagtgaggagttgctggaggggaaagaagggagggtaggcatgcagagatctcactctgggcatccttgtctgaggccaccccatatccacaggcctccacatttcagggaacatggaatctgaacacagcccttgcgaaaacatc

SEQ ID NO: 96395 - DNA, 407 bp, Homo Sapiens
acgaggaagaaaaagagaaaaaagaaatttagaagaataacaagttattccaaatgaaggcgtaagaaagggaataataacaataataagaggagttgttcatgaggaaaaaccaaagcttgaaaattcaacaaagccagtgaagctcattcttgaaaacatgaatcacactcatgaattctaactacaatgaaaaagagaaagaaagagcaggcatgcatttccatatgggagtgagccagcagacagccctacagatcgtacacacgttttccaaaactaacaatggaacaggcggcaaacctatgccaatatactagaaattgcagattaaatagatgaaatattctaaactggagtttacataatgaacataagagtaatcagagaatctgactcattttaga

SEQ ID NO: 96396 - DNA, 815 bp, Homo Sapiens
tttttgtcaaaacaaggatctgctggtgatgcttcacagtgaaacctccattatcactgagaatgtcacttggaaaacattcttaagaaatgagtctctttctcataggctcaatttcaggattctcaaactcaatgttctgctcagaagtttccatgatgaagcctatttgtctctgaggctggggctctgcctttagacttattctgctccagtcataggttgtggttgtctttgttcttggtcagaacctgcaagtagacttcatgaagtgtactgaggaagctggaatcattctttattagatgtattaatgtatcctggagctgagacttgctgagaataatggaaggctttctctgactttctggcgttccaatagttagaggagaaggggagctggctttcctctcaaggtccgaagatcttgtaactgtctgctggaaaacacttggggccagcaggactgaagacactgcagtggtcgttgcagtaaccagtggggcgcctgcaaccgggatggcactggataacaccttaggctgcacaaatacttcaggatcctggttctgctgcatagactgaaggggagcaagcaccatgttgctcagggaggctgaggccgccactcttgctgctgctgtcttagagggaggctctatgaagctctcaggtgtggctagctgaccagctgccggagaaaagctggctaccattgcacctttcccaagtggttgtgtctgtatttggtcatgctgtggggtcaacctgagtttctggagaagatcaacgcttgggagggatgtgccagctgt

SEQ ID NO: 96397 - DNA, 529 bp, Homo Sapiens
ttttttttggagatggaatctcactctgtcgcccaggctggagtgcagacagaacaagagacccggagaccccgtctgggggtgggagtggcgggcgggaaacggcgacaaaagagggagcgagaatgggagaaaacgcaaaaagagacaataggaggtgccacacagcatcccccgcctcgcgccaagactaatattaaaaagccaccccgagaaaacccaagagccgtcaccgctgaaacaggaggcgaaaacctttctcgcgacattgccaagcaggagcgaacagcccggaaacgccccgcagtttacgagctagtctctgtcattgagccatcaagaaggaaaaaccactcagaccgcgttctctccctctcactccccaatacggagagaagaacgatcatcaatggctgacggcagttgcagccaagcaacgccaaaaagccggcttcacgctcaggagaaaacgctacctctcttcctcgtggttttcggtgctctacacgttcagagaaacttctctagt

SEQ ID NO: 96398 - DNA, 554 bp, Homo Sapiens
  misc_feature (52)..(52): n is a, c, g, or t
cttaaattttgaattcactcaacattcattcagaaaatacataataaatacntactatgtattaagtgccatactaaagttgggcacattaaaaaaaacagtgtccctgctctgaaggagctcacaatttgaagatatacattaagaaaactctattaattggtgatacatgccttaaaaataatatgtggccattagagattgttcaagagacctttaacagaggatttgatttttaattcattctgaaagatgagtgctgtggcagacagaagacacagaatgtgcataagcactatgctatgaaaaatatatttttagagcatgttgcagtttaagagagaagccattggtgaaactgctgtaattctttgactattttctccaaatgtggaatcaaagagacgtcttgaggagctctggatgtcactcctatggattattctagacacttggctggctccagttccaggaaaatgggctgagtcaacagcaatgaatataaaaccatttatgaataataagcaataaataatataatagtgaagaataaa

SEQ ID NO: 96399 - DNA, 595 bp, Homo Sapiens
  misc_feature (83)..(83): n is a, c, g, or t
  misc_feature (134)..(201): n is a, c, g, or t
cagttaattatattagaagtttatcaattggtgtttatgaatcaccaagcattttatgtactgcatcctcataaataaacccntaagatgacactcgcttttggagttggcactacaagatgcatgagaaatannnnnnnnnnnnnnnnnnnnnnnnnnnnnnnnnnnnnnnnnnnnnnnnnnnnnnnnnnnnnnnnnnnntttgccacccctgagagaagaccaacccctcctcttgctcctcctcctcagcctacttgatgtgaagacaatgaggatgaagacctttatggtgatccacttccacttaatagtaaatatattttctcttctttatgattttcttaatgacatttcttttctctagcttgctgtattgtaagaatacagtatataatacatatggcatacaaaatatgtgttaatcaactgcttatgttattcataaggctttcagtcaacagtaagctattagtaagtttttgaggagtcaaagttatacacagattttcaactgcacagggggtctgtttccctaactcccaagttgttcaggggtcaactaagtagtcaaatgagatcatgtgtacagaaa

SEQ ID NO: 96400 - DNA, 991 bp, Homo Sapiens
  misc_feature (828)..(843): n is a, c, g, or t
atattctgaattgttaactaggtatttcaaaacaggaattaaattcaataggctcttctcagtgaacaggttttaatgttgttttgatgtaattttaaaagacttttagcaaacatgcatttctttatatgatatatttcttttacgaagctattttaaaagtaagccaagtgctgtctagtctgcttataaagtaggaattgcatcagagtacatatattcttgctgtacaatgcctgtgatgttgaggagggttcttttttaaagtgtatgcttgagtaactgactctatggagtctataaatgcactgacttcttgtttgtaccccaaaatgatcgaattgttaagtacaaaattaagctaattaaccaatttgtaaccattttttcactcataaacagctactcaatactagacaattttgttttttatgtatgtgtatgtacgtaaatacatacatattaatttacattagagtgaaaaataaatggtttgtttctgaagttagtttcttaagtgagttttcaggtgtctctgaaaaatttataacaatcatgtattatatgtgctgtaacatcatgtacgttacctccatctattttaggatattttcctcacctatatattatagggagaataatttagatacacatgctcagagctgagatatttctctgataaatcaggtaacaaaatgtatttgattgatggaattttgaagtaaatgtgtttttatccatcagtttctgagtaacaaagagcaccaagttttaatttaaataggagatttaacactaggggatcagggagtttagtatgaagagttnnnnnnnnnnnnnnnncagtgtaagctgttgaaatggcaagtgaattatttttaatgatgtaataaaatattttttaaatttttgacataagtgatcatttaatgaaaaaaactcaccaaaatgtctccctttgaaattgtatttgataatggggggaacttat

SEQ ID NO: 96401 - DNA, 525 bp, Homo Sapiens
gtgtttactatatcagcttggaaacatgctttgtttccaggagataaaaggtagagctgacaagatgctttcctctgagtaaagacattatgtcacctatgaaatgttagtagatgcagagcaatgctgataaggtgtgtagtcttagactactgaaataagaaatgtaacgtcttcatgttgccgcattttaagagcataatgaagcaggtaagtggaaatgcttgtacctgaaatgtgtattttgaaaatcagattcaattaagtgagctgctttgacacttaattctagattttccaaatgaactaaagtgtgttgctgtgtcttgtgatgcttttccttcagtggctctctcttatatgtattttagttggggtaactttgttttgattcatgccaatgtgacttaagtctgaaaatatgtcagtctcacattatgtatttttctgaccacttagtattttaaagacttctacttgttataaaatcacaatttggaataaatgtggtaaattttagcaaaa

SEQ ID NO: 96402 - DNA, 1822 bp, Homo Sapiens
  misc_feature (814)..(841): n is a, c, g, or t
attcctaactcatggtatttacccaccagagatcatgatggaatgagtgggtgagttttctacctgccattccctcagaattcatgaggggtgggggacagggggaccggaattgtcttagcaccccaatgttatgacaaaactatgctactttagaaacgcagtctgtttttcaccaattgacatactactgatctgaagtaaccagtgccatcataagaaattactgcattaagaaaatccttgctgtgccctttgaaaagctgttcagaaatcatttacagtgatctttcatctcggtcgctgtagtgaaacattttagtgtgataaatttcaaaattctaaacaaattacccacttttatattggaaatctctaccagaactccctcttcattttttaaggcatacatttgcttgttttcaagatcaagaattctgagctagctttaagtagcaaactgatttatatgtgcaattataggatgcattaagatgaatgatagcctttacatattgaaaactttgcagacgttttgttttgaaaatggcattgtatagtaaatgcaaattaattttgtaaaattatgttaaagagtatgttcagacactttctgccatggccaaaaagtatgtatgaaagtatgtgtgtatttgtttgtaaaaggatgccaatgttttacctgatatcttagtgacacttcagttatctatgcattctttagatctgtgattcggtaaacaggcagccatgttcacgatgccttctatgtcttaccatatttttaattaacctgttaaatacagcttaaaannnnnnnnnnnnnnnnnnnnnnnnnnnnctgaaatatactgcattattgtgttaatgtattatctttcctggatattatctcccagtgtatccagatctaagtaatctcagtgaactatacattgcctaaaaagtggttttgtaatgatttgtagtcacatttctattgggatatgtagaagaaaaggcaaaatgcttaaagttccttttattttttaaaagcagctagatagacacagacttgccacctcatacatctgctccttggcaacatcaaggggaacgactagccaacatgcctatggctaaaaactttcctttgcagactaaagcactgcttggtgcttcgtttttctacccttcacaacatgtgtgatttcatctaagagatatatacatgtacacatgccctttgtttccacctggatacaagatcactcatagctaattaggaccattgttttttgttcatctgtcttgttgcatgaagggacattagacccatttccattaaaataagttcttggtgataaactgtggcactgctacttctttttaaatccactttatgatttcaagatggacacttgtaagatgactcgacacaaggccattgcctggaagccccagagctttcctctgtttgtatggcccgttcatgtcccaggcattgcaacacaaactcaagatttcaccacaacatgacaagcattttcctaactgatattagcacaatttaactaataagccccttcgctctctagttggccaggcttaacctaatacacatctaacgtgtgtgccacacggccagtagaaagtttaacttcagcttcagggcaaagatacccactcacaccgtgtcaacgcaagcagtagttcctggcctccagagcagcttacttcccctgaaagaacgctttgttttcctttatgcccttttcctgttgaccacttttacacatttaaatgtaatttgttgtgagaataaatttagctgcataaaaaa

SEQ ID NO: 96403 - DNA, 987 bp, Homo Sapiens
  misc_feature (258)..(258): n is a, c, g, or t
  misc_feature (261)..(261): n is a, c, g, or t
aatactgcactctgagcaatgaggtcaatgggaggagctggatgagaaacccaaaagacaaaactgttacaaaacccaaaatgggcggagacgaacccaagtaggggaccgggaataagaagtgggtgagcaatagaaggggcagcctcctctgacccaggagccgcacacttctcttcaccccaaccttacccaacggtaaaaagcgcatcatatcagacccggaaggccacctgctcctctcccatttggtcagcnggnaaggggtcaggtgcagagctgggtggtccacatcttacgagctggctacaggttggggccccgggcggcagcccctctactgcaaccctaagcccaaagccacccactccttgcctttgaggcccctcctcctgcccccttcactggagaaacagctcagccttctctctgcagcctctggagcaatcatccacccccgccgctcacaggggtgaggcagctcaggcaggggtgaggcgggggcttgtggcccaaagaatacattcacgtggcaaggcagagagctggggctttcaggttcaaacccagggtgtcccccaaaatggcagcagtgggagacgcccctcaccagagccagagtcctgctgccccaccctgccagccagagaggttggcacggcttggcccctcccgtctactcggccagcacaagatggcagccagagagctggggccgctcgtccaatttgtgcaactgtcccccaaagcagcgaagccaaggggctactttggccccaccccgggacacctcagccagcctcagtgacaggagctgctcacaacaggtctggcgggtggggctcagacaggcctcctgtgcaaactgctggcccccagcttccagttaccccatggcccgccttctggggggtaagtatggccttgggggccaggcaggacaggtccacggggcctgtgtccccactgccccaaaataacagtgtg

SEQ ID NO: 96404 - DNA, 262 bp, Homo Sapiens
tttcacattcaagtagcatttaataacttccatgaaattggctttagagtaaagtctatattgttgtaatacagaagtgaaggtgagtgggagggaacaatataatgaagaaacccaagtcagatggaacaggttaaacatgaaggtgaattcagagtaccttccctcaaaccccacccacacccctgctgctgttcctgagtatgacctgagttcagggctgcagcttcttcacagcagctacagaacaaggtctacctag

SEQ ID NO: 96405 - DNA, 991 bp, Homo Sapiens
  misc_feature (825)..(837): n is a, c, g, or t
cagtttctgacccgagtctcgggctgggcagaggaaagcagtgtggggttcccggagttttccgggtcaagaggcgtcgggaacttagaagagcctgcttgcgatcgccgagggaaaaagggtggccagaaccggaagcccgcccgagggccaagccgtttccgcgatccgcctgtccccggctccatctcctttttcttgacagtctctcaggtagggccgcggcgctcagcggctggaggtcgacgggattcggaggaagcctacagagtctcggccttgcccagcggtggcgtcgctgctccaggccgatcttcgagccagcagaaaagccacagagggcagcgaatgcggcagcgggcggcagaacacagggaagaacagcccgcgcaataggcggcgactgatgcgacttccatcctggcggggaaggaggttccctagtcggctcgacgcttcaacaccatggataggagtccccccacggcctcggcgatggttttccgactgacagagggttgaaaagcccctgagcaacgcgataccggaaggactgggtaggccggctggtgcggtggaagcgaagcccaaaatggccgcagggcccgcgcgccggcaggacacccccctagacgccggaagagacgcaggactgttgggcgtctacgtcgctagcgccgcgccgcccaacgtcactcgcaaaatccccggggggcgggcctttccgcccacttccgtgtggccgccgattggttttgccagatttccctgtcggcttccttactcgaggtagagccgcacggcagcgtgaggttgcatcagccnnnnnnnnnnnnnaatgcacgcatgcgcagtcgtttctgtgtgttctcctaggagaccgccccaacagccctctaggttaaaggtcttggggagggaaggggttttcaaaataacccgagaatttcccggaggcgttttgatggcctaatacacactgacgtgtgta

SEQ ID NO: 96406 - DNA, 844 bp, Homo Sapiens
  misc_feature (536)..(536): n is a, c, g, or t
  misc_feature (576)..(576): n is a, c, g, or t
  misc_feature (617)..(617): n is a, c, g, or t
  misc_feature (656)..(656): n is a, c, g, or t
  misc_feature (668)..(668): n is a, c, g, or t
  misc_feature (730)..(730): n is a, c, g, or t
  misc_feature (735)..(735): n is a, c, g, or t
  misc_feature (759)..(759): n is a, c, g, or t
gggggggcaggaagggaggcggccgccgtgccattcttaaaggcgcccgagtgtaggcgacaggccgctgacggccggaaggaaaatgagtgagtctttggttgtttgtgatgttgccgaagatttagtggaaaagctgagaaagtttcgttttcgcaaagaaacgaacaacgctgctattataatgaagattgacaaggataaacgcctggtggtactggtatgaggagcttgagggcatttcaccagatgaacttaaagatgaactacctgaacgacaacctcgcttcattgtgtatagttataaatatcaacatgatgatggaagagtttcatatcctctgtgctttattttctccagtcctgttggatgtaagcctgaacaacagatgatgtatgctggaagtaagaataagctagtccagacagctgaactaaccaaggtatttgaaataagaaataccgaagacctaactgaagaatggttacgtgagaaacttggattttttcactaatgtgaacttctgtgtttctanagtatttatgtattaacctgaccatactggaatcagacantaatacttatttatgcctaaaaatgcactgttacttacagnttgtttcctgcagtaaagaaaaattcttcatttgtgcanaatttgaacaangaagaaatcatcttcatagtaatggaaactttgtaaagtgtttccctaatattggtaaatgnttagntgggactactttttcttccaaggnactttttttgcactccttgtggacttaatttcctcataaccttaatggggtccgggaaattttgtttacttattttaacaggacc

SEQ ID NO: 96407 - DNA, 625 bp, Homo Sapiens
ggggtttttggatagatgattgactggtgagaatttggtcaaggtgacagcctcctgtctgatgacaggacagactgttggtgaggagtctaagtgggctcagtttgatgtcagtgtctgggctcatgacttgtaaatggaagctgatgtgaacaggtaattaatattatgacccacttctatttactttgggaaatatcttggatcttaattatcatctgcaagtttcaagaagtattctgccaaaagtatttacaagtatggactcatgagctattgttggttgctaaatgtgaatcacgcgggagtgagtgtgcccttcacactgtgacattgtgacattgtgacaagctccatgtcctttaaaatcagtcactctgcacacaagagaaatcaacttcgtggttggatggggccggaacacaaccagtctttttgtatttattgttactgagacaaaacagtactcactgagtgtttttcagtttcctactggtggttttgatattgtttgtttaagatgtatatttagaatgacatcatctaagaagctgattttgctaaactcctgttccctacaatgggaaatgtcacaagaatgtgcaaaaataaaaatctgaggaaa

SEQ ID NO: 96408 - DNA, 438 bp, Homo Sapiens
agtgctgggagatgatcagaaatctcagggcacagcctcaggtctacctggacactcatccactgttggagatgctcaacagctagacacagatgctcacagccgacctgtggcctcttgctctgaagccatcccccatcttccctagacacagcagacatctgagaaagcttcagcatttctcttgctaacagattcagaaaagtgtctcaaagcagagcacagagttatttggtgtttgctgaagacagcctttgtgccacaatcacttattaaataagcgatcaatttcccattgaactgaacatgcaacatttatcatacattcagttctcattcacactccttaagatttggtcagaatttttatttctgttcatgtcttctacttttccactcctgtatgaataaaatattgatttgattacagtggctttg

SEQ ID NO: 96409 - DNA, 497 bp, Homo Sapiens
gcggccgcgcggggaccgacgcgcgggctgaccgagtgggggccccgccgcggggcgcctccctctccgcgccgcgcaagcccggggactgctcgcgggtcgggtttcccgccagctcaggtgggtttttgcccgggcccctcctctgcctccgtcacaggtgagtttagttccaggccctacgagcagtgcccacaccctcccagttccgcctccgcccaggtgcgctgcacccccgcgggtcaccgggagccgcacctcgcccgccccttccgaggtgagcaggtgggtgttttttacctcacctggtagactcagtctcgcgtttcctctcagtccaggtcatcggactccacctcctctcctaggtgagtggcggccccgggctgcctctgagtggctcctacctggctcaggtaccaccttctcttccgccttccaagtgactagagttcctgggccagtctcccgaaatcaaaaggcgctccggcctccag

SEQ ID NO: 96410 - DNA, 445 bp, Homo Sapiens
ggaaactaggccgcccggtcgcgcgcctctccaaaacgttcttcccagactgcgaggaccgcctcggcaggtggcggtaaaagcgcccccatcaagtcacataacatcctgcctccgagagcgcggtctggccccatcctggtccatcacttacgacgtctcccaggcttgcctccccggatcggattcctttcccttcgatcccgcaggccggaggcgcagacctgtggtgaggacacccgaggcctcctgggagacctgcagaccacgcccacctcatttacatgttcactcccgaccctggaaacccggatttcgcctccggacagcggcgtctgggcagggttcgggtactgcagtcccgcgtctggatgcccccgccccctgagctgcagggctgtgtgtggtccttccctggtcccaaaataaagagcgaattgcacag

SEQ ID NO: 96411 - DNA, 581 bp, Homo Sapiens
aaattctggctggtgttaatgctatgaagataatatgtagttagaaaattgagtcggggaggaatgctcttcattttaagtggattttaaagtttctccttgagtggatgaagaacttgcctggtttgcaaaaatcttagttcaaaattatattttctaacaaaaactgcattttgagaagataagctaattttactcagtagtaagtcaaatgaggaagtgcagagggtttttttacatatatatagcaaccttgtcaagtggtcctcacaagagtcataaatactttgtaattagcacagtatattcagcagtgtataactctacaaatagtaccttatattagtgtagtattatatcaatatcttatgtataattcttatattaataccttatgcataattggattcaaacattgaaggtctattttagtgttcttcaaaatgtgcttccctgacctactgaaatagaaacttggtgatgaagttcaagaatttgtattctaatcatctcaaacaattcctaaagacactgattttaaaatatctagtctaggccccattgtgtaatagttagcactc

SEQ ID NO: 96412 - DNA, 1742 bp, Homo Sapiens
  misc_feature (1094)..(1153): n is a, c, g, or t
  misc_feature (1375)..(1375): n is a, c, g, or t
  misc_feature (1397)..(1397): n is a, c, g, or t
  misc_feature (1494)..(1499): n is a, c, g, or t
  misc_feature (1503)..(1503): n is a, c, g, or t
  misc_feature (1505)..(1507): n is a, c, g, or t
  misc_feature (1512)..(1515): n is a, c, g, or t
  misc_feature (1517)..(1517): n is a, c, g, or t
  misc_feature (1523)..(1523): n is a, c, g, or t
tagagggcgggcgtgtgacggcgtgtggcggcgtcggaggcgcctcgggggacggtggcggctcccggcggtgaggccgcgcctgtccggggatcgtcgagggacggcgggagcttgggccagcggctgtgctgtgcgtgctgggacagcaggctggagccccgcgcaggcccaaggtcccggaggctatggcagcggctaccatcgtgcacgacacgtctgaggcctgtggagctctgcccatgcttacggcttgtacctgaagcccatcaccaagatgaccatcagcgtggcactcccgcagctgaagcagccggggaagtccatctccaactgggaggtgatggagaggctgaagggcatggtgcagaaccaccagttctccacgctgcgtatttccaagagcaccatggacttcatccgcttcgagggggaggtggagaacaagagcctggtcaagtcttttctggcctgcctggacggcaagaccatcaagctcagcggcttctccgacatcctgaaggtgcgcgcggccgagttcaagatcgacttccccacccgccacgactgggactccttcttccgcgacgccaaggacatgaacgagaccctgccgggggagcggccggacaccatccacctggaggggctgccctgcaagtggttcgccctgaaaggagtcgggctccgagaagcccagcgaggacgtcctggtcaaggtgtttgagaagttcggggagatccggaatgtggacatccccatgctggacccctaccgggaggagatgacgggccgcaacttccacaccttcagtttcggggggcacttgaacttcgaggcctatgtgcagtaccgcgagtacatgggcttcatccaggccatgagcgccctgcgcgggatgaaactcatgtacaagggcgaggacggcaaggccgtggcctgcaacatcaaggtttcttttgattcgaccaaacacctgagtgatgcctcaattaagaagcggcagctggagaggcagaagcttcaggaactggagcagcaaagagaagaacaaaagcgcagagagaaggaagcggaagagaggcagcgagcnnnnnnnnnnnnnnnnnnnnnnnnnnnnnnnnnnnnnnnnnnnnnnnnnnnnnnnnnnnncttcgcaagagggagcagaagcagagggaccgtgagctgcgccggaatcagaagaagctggagaagctgcaggcggaggagcagaagcagctgcaggagaagatcaagctggaggagcgcaagctgctgctgggccagaggaacctgcagtcatccggctcatcgcgagctgctcgcagagccagggtacccgggggtcctctgcagcgccagcgggccggntgcctcatgcccccctgaatgngacgcgcagggcgttcccgcgtgcatgactcaacctttgagagagctcgaggcgcgcgtcagtatgatcttatgtgcacgcggcttgaactggcgtnnnnnnactngnnncgacnnnncnaccgcnacaccaaaacacacacaaactctccaccacgcacatactccccaccccccaccgacctcagctacacccggaactatcgccccccctcgcgctattctctgatacgaccgcgaactcgacatgcgcacacccgaatttaccatgtgcgctcccaccccccggcttaacgctaccctctgcatccggcttcgtaactcatccgccctcaataccggcccg

SEQ ID NO: 96413 - DNA, 663 bp, Homo Sapiens
aaaacacagatcacctggggatgttatgaaaaggcagacttttttactgcttttgttcctttagaattttgtagcaagtatgtgtgatgtatttaaagacagaaagtactagtctgtgagatgatctggggtgtgccttattcatagatgggaaacctactgcccatctgtagtaaataaagtgagaagagccctcgctgctcacaggcaatgctcctacagtgtaaccctggtaacctgatgcagattcctgactgcctcacccattaggggaaatggaagacttttaaaacacaacaatgataagtagttaagatcctaaactgcaaaatatattctatgattgattcattgaccagcagaagaaagaaacattttccctgcattgctggtgaaagagcaggaaaaatcccaagtagctcctatttcccagccccaacaagagggaagacagcagggggaaaagtgaagagaaaacaagggtgacgggaccactttgcggtagtcaaggcagggggtggcggaagggccctttatgaaaacacaggtatgatatgatggctgttcctgtgtgttcccgagtcacccaaaaacagttcaaattatgtttgacattctgatgttggcacagggtgaaaaagtgtggtctattctagaaacaaa

SEQ ID NO: 96414 - DNA, 985 bp, Homo Sapiens
  misc_feature (910)..(910): n is a, c, g, or t
tttgcagttttaaaattgagaagtattttttaatagccttttcaaattatcttggttattctttttcgatactactaccccaaaacacgagtggtggattttccaattactatttggaatttgaaaccacttcaatggacattttgtacttgttacattaaaactcattatttttgactgtacctcgaatgcctattttcctgtgcgtgatgttgaaatgtcatgcattggtcatttggaaaatactgatttactgaattaaacagatcttccaaatgctaaaacatttcattattcaatatcaatcacattgttaatatcactagtaatctcatcagaaaagtttttaagtattgggaagctaaagtattgtagcactggcttccacataaagtcaccaagttcttgatggttttaagtttgttttttatttgaatttttgcatgaaaattccaacattattggcaacaagtactgagaattatgttccttgaagtggcacgaacatatttattttcacgaaaatgtctgccaaatatctaggtttgaatacctcagtttatctgtcagttctttccagtaaaagcggtatttcatgaaaaaagcagctagttagttcagcttacaactcaaacgttcccacaagttcttttcctggagacaacaatcataattcagcatgtagcagaagtgctttatgtgcatttcccattttgttatagagaatattagatgagtactgaatggtcgagatgattaaagttaatattttttactgctaaccatcagctgagccttcaatgagtcataatctttttgctggtggagggttttgcctcaatgttgatggctgttgatcaaggtggtgcttgaaagtgggggtggcttgtgcagttttgttaaaaaaatngtgctgacggactcgctccatgcggggcggccacgaaccgtgcgttggtgagaaacatattaaacctttcccaag

SEQ ID NO: 96415 - DNA, 609 bp, Homo Sapiens
tctgtctcagatgtaaatgggagtacagagtcatttgaaatgatcattgaggaagcaactatagattcagcaacaaagcaaacctctggtgccacaacagaagcagattggcttcctctcgagctgtgctttggaattccactgttcagttccgaattaaaccggaaagtttgtaggaaaattgctgcacatggcctttgcagaaaagagagccttcaaaacctcttacattccagtagaaaactctctctgcaagtccttaactttgttcactcattccaggaaggtgcttcaatattggatattcacacagagcccagtttttcaagtttgctttcacagtcatcgtatgctgacatgggtgttccacttcctgcaaaaaacttaatatttaaagatggtgtcttatcagaatggagtggacggtcaccttcctcacttcttattgctaatctccatttgcaataatttggttacaccatttgttgctcacactttctgccttttttctttcttaacgttagctttatagtgtcagccactaaaaagcatcctgctgctgcagtgcaattcttgcttaactaatattaaaagttggggaacataaaa

SEQ ID NO: 96416 - DNA, 624 bp, Homo Sapiens
aggctcggtaccgattacgctcctagacgggagtagtagatttttcattaagataagttctttggatttggaggagggagtactgctggaagatgcaatagaggctggacgtaatcggggcatctttcttgagcaggcgtgtcttgtctaggccattctctctgggggaatgtgctgggctccctcgaggggaagatggatcctcattggaaacgtcaaccaccaagttgtcatcacttttctcaccatcgctgtcataacgagctgcaatttccttttcttcagttttctgctttttgctctctgaggagtagtctgcggagtttctgtgcttctcagcacctcggaaactggctgatggggatactgaagagctcttgatggagtctctgtctctttggtgatcattgtcatggtgcttcttctcatctttaattggaagatgggactgacctcctagagcactggagagggccagaagcccggcactgctaccgatgggtggaatggcagggggctggagccctgaagggtgtggagtcagaggtacggggagaccatgtccatgtgataaatgctgggcctggagttgttgctgctctggggacaggaaaggaatgactt

SEQ ID NO: 96417 - DNA, 881 bp, Homo Sapiens
gctatgtgactatagaacagtggtttcaaaaaagcaggctggtacggtccggaattcccgggatatcgtcgacccacgcgtccgtggagttgcgcgggctgacgcgccactatgtagcgggtttcgggcgggccacgcgtgcgggacaggaacccaaccccagccgaccttgagctccaggagttcgtctcttacgtctgcggaagtgcagctgcctcagttcttagcgcaggttgacaactacaggcacaagccattgaagctggaatgtcctgttgctggtatttcaattgacttaagccaactatcccttcagttacaataggaaagtgcctctaataaggccaaatatgcgtactaacttgtagcaaccacgtgtccgtgcagtgccacaggagctagagcagtgacaatgctggtggcaacagggcagtgtagcaggtgcttcatgttcaccttttcaaccttttcatttaattgtcacaactcggaggtggattctgttagggacaggctgccccaggaccactccgcccccgctaactcaatgcagctgacccttaccctgaatactctgcagctgcattcctgaaccgttatctaggcgctatagcaaggtcaccagacttgctacaccgaagccctctgggtggcacgggggaggtcatgagaaacgtggattacacccccttgtaaattcctattttcacaagataatatattgtaagccggtcatgagattatatgtggtaaagttaattgactaacaaccccagggtctctctcccccatataaacccctcattttgtaagctcagggctgccacctccgactggtggagaagcctggcaggttaataaacttacttggcctgacaaaa

SEQ ID NO: 96418 - DNA, 898 bp, Homo Sapiens
  misc_feature (733)..(733): n is a, c, g, or t
  misc_feature (740)..(771): n is a, c, g, or t
  misc_feature (776)..(776): n is a, c, g, or t
gggcagcctcggcgtttccgccatgcgtctgcagtgctccgcgcgctcttgacgtccggagcccctggagtaggcgcttccggccattcatactgcagtcggtcagtgttcggttgaaggattctgtgtgctgtcggacccagagggtgacggcgccgctaggatgaagctcgtgagatttttgatgaaattgagtcatgaaactgtaaccattgaattgaagaacggaacacaggtccatggaacaatcacaggtgtggatgtcagcatgaatacacatcttaaagctgtgaaaatgaccctgaagaacagagaacctgtacagctggaaacgctgagtattcgaggaaataacattcggtattttattctaccagacagtttacctctggatacactacttgtggatgttgaacctaaggtgaaatctaagaaaagggaagctgttgcaggaagaggcagaggaagaggaagaggaagaggacgtggccgtggcagaggaagagggggtcctaggcgataatgtctctcaagatttcaaagtcatatgagatttgggatattttttgtacaggttgtgtttgtttatgtcagtttttaataaacataaatgtgggacagagctgtctatttagtatatcaaagttttagtagtttcctccacattcacgaaattaccacagtgagagctaagcatttctactgggcagtttcattttttagttgatcaggntttaagnnnnnnnnnnnnnnnnnnnnnnnnnnnnnnnnatgangaataaggtttaaaataaaaggctttagacaaatttaaatttgggcagagtttaaattgaagcaaagggaccatttcacaaaatcagggtagccccctggaaccattaatagggcttcaaag

SEQ ID NO: 96419 - DNA, 891 bp, Homo Sapiens
  misc_feature (641)..(706): n is a, c, g, or t
ggggcgctcttgacgtccggagcccctggagtaggcgcttccggccattcatactgcagtcggtcagtgttcggttgaaggattctgtgtgctgtcggacccagagggtgacggcgccgctaggatgaagctcgtgagatttttgatgaaattgagtcatgaaactgtaaccattgaattgaagaacggaacacaggtccatggaacaatcacaggtgtggatgtcagcatgaatacacatcttacagctgtgaaaatgaccctgaagaacagagaacctgtacagctggaaacgctgagtattccgaggaaataacattcggtattttattctaccagacagcttacctctggatacactacttgtggatgttgaacctaaagtgaaatccaacaaaaggcaagctgttgcacgaacaggcagaggaaaaagaacaggaacaggacgtgggccgcggcataagaaaaagggggccctaggcgaaaatggcctctcaggatttcgaaactctatgaaaatttcggaatatcctttggaccaggtggtggctggttttcggccacgctttaattaaaccttaattgggggacccaccgacccaaccacctagcaaggaaccctctattatggccgaggcccnnnnnnnnnnnnnnnnnnnnnnnnnnnnnnnnnnnnnnnnnnnnnnnnnnnnnnnnnnnnnnnnnnagggtaaaaccgaaaacttggctccccaaaacccatccccctaaggaaaaccccctgggtctatggactaaatgccctggtgccctcttttcccatcaccaaaaccttcgcagcgggaccccaacaaaaagcccttctcaaaccccttctcgtcagggttgtaatatccgcgggcgctcttttat

SEQ ID NO: 96420 - DNA, 433 bp, Homo Sapiens
cagtctcgtgctagtgacggaggggaatgagactgtgatctccctcatgacactaattaatatccttcatccaaggtggtgacactgtactttggggctgaagtctgaaacttaaccaatggcagttctggtccagcctggagatgctaagtgacagcttgttaccttcagcttcatttattaacatcagctgaataaacaaatcccggtaggagcagagccccgctgcccaggaacccctcccactggttctcaaaactctctggtgattggaattgaagccatcttgagtaagaaggtcccactggaccttgtccctccagtgaaggctgcccggatgcctcagagagcacagccttcttagcttcattcttccggagtgcttttccttatttggtgctttctagggagtaggcaggtcaggtcttaggga

SEQ ID NO: 96421 - DNA, 788 bp, Homo Sapiens
agcgagaggaagagaaagatgtcactgtctctaatctccctgtcatttttatttccagcaggcgcggggcgaaggagctgctagaacaatgctgaggcgggtgaggtgaggagcagcccctcgcggcagccccgacagagtgtctggaacaggtgattggaggagccggagacccaggcacctgggcatccttcccctcgcctctgccaggccccgcgcccctaaaaggtgggaaaaccatggcgaccaatttcagtgacatcgtcaagcaaggctacgtgaagatgaagagcaggaagctcgggatctaccggaggtgctggctggtgttccggaaatcctccagcaaggggccccagcggctggagaagtatccagatgagaagtcggtgtgcctccggggctgccccaaagtgactgagatcagcaacgtcaaggtgtgttacgcggctccccaaggagaccaatgcggcaggcggttggccatcatattcactgatgacgtcggcacgtaccttcacctgcgactcagagctagacgcacaggagcggtacaagacactatctgtggagtgtctgaggtcccgcctcaacgacatcagtctgggagaacctgacctcctggccccaggcggtgcagtcgtgaacacgacagatcgcttcaatgtcttcctgcctgccctgacccaacctggacgtgtatggcgagtgcaagctgcagatcacccacgagaacatctacctctgggacatccacaacccccgtgtgaagctcgtctcgtggccct

SEQ ID NO: 96422 - DNA, 437 bp, Homo Sapiens
gtattgattttcacagctttgaggaacatgcataagaaatgtagctgaagtagagggggcgtgagagaagggccaggccggcaggccaaccctcctccaatggaaattcccgtgttgcttcaaactgagacagatgggacttaacaggcaatggggtccacttccccctcttcagcatcccccgtaccccactttctgctgaaagaactgccagcaggtaggaccccagaggcccccaaatgaaagcttgaatttcccctactggctctgcgttttgctgagatctgtaggaaaggatgcttcacaaactgaggtagataatgctatgctgtcgttggtatacatcatgaatttttatgtaaattgctctgcaaagcaaattgatatgtttgataaatttatgtttttaggtaaataaaaacttttaaaaattaaaa

SEQ ID NO: 96423 - DNA, 1451 bp, Homo Sapiens
  misc_feature (1354)..(1354): n is a, c, g, or t
cggggctcggcccgccggcgcgcgacccatccccatcccggtccctgcagagcgatccccgggcccagatatggacgcagcagagccgggactccccccaggtcctgagggcaggaagaggtacagtgacatcttccggagcctggacaacctcgaaatctcactggggaacgacccttgagatgctggctggagaccctctactctcagaagacccagaacctgacaagacccctacagccactgttaccaacgaagccagctgttggagcggcccctccccagagggtcctgtacccctcacaggggaggaactggacttgcggctcattcggacaaaggggggtgtggacgcagccctggaatatgccaagacctggagccgctatgccaaggaactgcttgcctggactgaaaagagagccagctatgagccacatgcctctgcagtacatctacaccctgtttctggagcacgatctcagcctgggaaccctggccatggagacagtggcccagcagaaaagagactactaccagcccctcgccgccaaacggactgagattgagaagtggcggaaggagttcaaggagcagtggatgaaggagcagaagcggatgaatgaggcggtgcaggcactgcggcgcgcccagctgcagtatgtgcaacgcagcgaggacctgcgggcacgctcccaggggtcccctgaggactcggccccccaggcctcgccgggacctagcaagcagcaggagcggcggcggcgctcgcgagaggaggcccaggccaaggcgcaggaggccgaggcgctgtaccaggcctgtgtccgcgaggccaacgcgcggcagcaggacctgcagatcgccaagcagcgaaatcgtgtcccaaggtgcgccaagcctgggtggttttcagggggggattaaaactgggcttaacgggcggggtggaacaaccttaaacctttcctttcccgggcccttgtcggtggggatatatttttagcactcccctatcctccatccctgtacccctacccaccgcgcacgctatccccctctccgccactagcctaacacgctcctgtccccacacccccctgctcgaccacacatctgcgcctcccgcattattattgatcttcccaccacactgtctgggtccccgcaccagcctgcgagcgcaccctactctactgtgcgccgcccaccagatcagtcccccccacgacacacgtcagactgccccagcccttgcactataaccccttcatctctccgcaccccgtcacccgcccaatgttcacttatataacccacacgcctatctataccaaagcgccagtttccgctnccttagtcaccgcgtatcatccctgcaccccccatttactcacctacataacgcggctccctacgattgctcgcatcgcctccccgagctacatatc

SEQ ID NO: 96424 - DNA, 1028 bp, Homo Sapiens
ggctggtaccgggtccggaattcctgcgatggaaatcggggctcggccccgccggcgcgcgaccccatccccatcccggtccctgcagagcgatccccgggcccagatatggacgcagcagagccgggactccccccaggtcctgagggcaggaagaggtacagtgacatcttccggagcctggacaacctcgaaatctcactggggaacgtgacccttgagatgctggctggagaccctctactctcagaagacccagaacctgacaagacccctacagccactgttaccaacgaagccagctgttggagcggcccctccccagagggtcctgtacccctcacaggggaggaactggacttgcggctcattcggacaaaggggggtgtggacgcagccctggaatatgccaagacctggagccgctatgccaaggaactgcttgcctggactgaaaagagagccagctatgagctggagtttgctaagagcaccatgaagatcgctgaagctggcaaggtgtccattcaacagcagagccacatgcctctgcagtacatctacaccctgtttctggagcacgatctcagcctgggaaccctggccatggagacagtggcccagcagaaaagagactactaccagcccctcgccgccaaacggactgagattgagaaaggggcggaaagagttcaaggagcagtggatgaaagagcagaagcggatgaatgaagcggtgcaagcactgcggacgcgcccagctgcacgtatgtgcaacccagcgaggacctgcgggcaccctcccaaggggtcccctgaggaatccgcccccccaggccttcgccggggaacctgccaggccaccaggaacccggcggcgggcccctccccaaaaaggaaggcccaggcccaaggggcccaagaaggcccaaggccgcttgtaacccaggccctgggggtccccgcaagggcacaaccccgggaaaaaagggaccccttggaaaatcttcccaaacaaagggaatttc

SEQ ID NO: 96425 - DNA, 517 bp, Homo Sapiens
  misc_feature (20)..(20): n is a, c, g, or t
ctactgataatgaaatttanaattggaaattttgtgagtgtttttcttgtccaatagagcctaattgtttccttttttagtgatttaacaatctcttgagggctgcacctttaaattcccagattgtcaatagacatgtacagtatatgggataaggtggacacaagtgcacatataaataaaatcttcttaagacttttaactattcatttacagtaggagagtatgtagaaatcatcatccacaagtcataattaggttgtgtgcctactgtagttttttccatttctgtattatataaacatttgcatattaaaatttgatttttcccagagacaagtattatatactgtatctatatttaaatcaaactgtggtaatatatttctcagaaaataatgttggggactatagcctgaacatgtggacttgaagcgacatggaggaggaggttgatcccattgtgtataagttaatatgtgataactattgaatcttgtacaaaaacaaaaattga

SEQ ID NO: 96426 - DNA, 1094 bp, Homo Sapiens
  misc_feature (11)..(11): n is a, c, g, or t
  misc_feature (326)..(338): n is a, c, g, or t
  misc_feature (843)..(843): n is a, c, g, or t
  misc_feature (890)..(901): n is a, c, g, or t
caggaggaatntgaagaacatgaagacgacacaacatgaccatatttaccatcacgtgcactatcaagacagcaagttcgtgctctgcaagatggtgcagagctttatgaagcagtgaagaatgcagcagacccagcttaccttgagggttatttcagtgaagagcagttaagagccttgaataatcacaggcgaatgttgaatgataagaacaagctcagatccagttggaaattaggaaggccatggaatctgctgaacaaaaggaacaaggtttatcaagggatgtcacaaccgtgtggaagttgcgtattgtgagctattcnnnnnnnnnnnnngattcagttatactgagtatttggcgtccatcatcagatttatattctctgttaacagaaggaaagagatacagaatttatcatcttgcaacttcaaaatctaaaagtaaatctgaaagagctaacatacagttagcagcgacaaaaaaaactcagtatcaacaactaccggtttcagatgaaattttatttcagatttaccagccacgggagccccttcacttcagcaaatttttagatccagactttcagccatcttgttctgaggtggacctaataggatttgtcgtttctgttgtgaaaaaaacaggacttgcccctttcgtctatttgtcagacgaatgttacaatttactggcaataaagttttggatagaccttaatgaggacattattaagcctcatatgttaattgctgcaagcaacctccagtggcgaccagaatccaaatcaggccttcttactttatttgctggagatttttctgtgttttctgctagtccanaagagggccacttgccagagacattccattgttattactgggacatnnnnnnnnnnnntaaagaaaggtgtagcccgcctcggtgtcgggacccgcttccggacccccgaaaaagctttctaaaaaccacttcgtttgggcgcgcgcgggccccagaaagggtaaagggagacaggggctcaatagcttgtgttccccaggaaaaaaccacggggccaaagaccaagagggccttgggaattctcccgccc

SEQ ID NO: 96427 - DNA, 701 bp, Homo Sapiens
gggaatggagatgtcatcgaggaactggtgtcgatgtgactccactgctttttgaagctgatggactcccaccctgtgcgcctctcccacagcctgtgctgagactctccacggttcacgagcccagcagcactcttgtggtcctggagtgggaacactcagagccaccaatcggggtgcagattgtagattacctcctccgtcaagagaaagtcactgacaggatggaccactccaaagtggagacagaaacagtgctgagctttgtggacgacatcatctctggagcaaagtctccttgtgcaatgccatctcaggtgccggacaagcagctcaccaccatctctctgatcatacgatgcctggaacctgacaccatttacatgttcacgctgtggggagtggacaacacaggacggcgctccaggccaagcgacgtgatcgtgaagaccccatgccccgtggtggaatgatgtcaaggctcaagaaatagcagacaagatctacaatctcttcaatggctacactagtgggaaggagcagcagaccgcctacaacaccctcctggatctgggttcccccaccttacaccgggtcctctaccactataaccagcactatgagagttttggggaattcacctggcgatgtgaggatgagttaggtcccaggtaatcaataaactaagtcaacccttaaaa

SEQ ID NO: 96428 - DNA, 1163 bp, Homo Sapiens
  misc_feature (139)..(236): n is a, c, g, or t
aggccgcggacctgactgaaggaggccacggccacttctggttggcctcggggcgcgctggctcggctcttcctccgccctcgaggcccccgcagtcccatcattcagttccgtagggtcaggggccgagcggagaggnnnnnnnnnnnnnnnnnnnnnnnnnnnnnnnnnnnnnnnnnnnnnnnnnnnnnnnnnnnnnnnnnnnnnnnnnnnnnnnnnnnnnnnnnnnnnnnnnntgagccactgcgcccggcctgttgtacagttattaaagatgctaagatacgaagtgtaaatcaaatccccagacattgcagacattgctctatcatctggcatttgttgcagtgggtgaagatggcagaggctaccctgatttttgctaattttatcatttaacatggaagaagatgagttcattggagaaaaaacattccaacgttattgtgcagaattcattaaacattcacaacagataggtgatagttgggaatggagaccatcaaaggactgttctgatggctacatgtgcaaaatacactttcaaattaagaatgggtctgggatgtcacatctaggagcaccctacccatggacagacatgtccttcccatggagatgggagacctttaactctgaaagacatattgggaaggagttcatgagtgctataagatgcgactgctacagggaccatgggacactattacgcaacaggaacatccaatacttgggcaacccttttttgtacttcatccctgcaagacgaatgaattcatgactcctgtattaaagaattctcagaaaatcaataagaatgtcaactatatcacatcatggctgagcattgtagggccagttgttgggctgaatctacctctgagttatgccaaagcaaacgtctcaggatgaacgaaatgtccattaacaagattcttctatggagtttaggaattgcggcaccgaagaatgccaagagtttacctggccagccctggctttaataggactgataccatggaatatttcatctcaccaaagatgtgacatggattatttttcccttggacacaaatgtctacagcaactgatgtttgataggctgaatgtttagaagaaacacttcaaagggatacatcatggccaggcatggtggctcacac

SEQ ID NO: 96429 - DNA, 511 bp, Homo Sapiens
ctggcaggacccccaagcttagcccgcaagacttccatagagctgcccagcatgctgcgtccagttaccaagagtttgtggaagacggttagggtacaggctcagtctgcggcccaagatccgtcttgcaagatggactctgtgactacatgactaataaaatatggcagaaatgacaccatgcagtttccaagcccaggccttaggagacaggcagcttccagttcagtcttttggagggtcagctctggggccctcagccatcacgcatggagtccaaccaccctgagacgtcatgctggagacccacctgtggatgccccagtcaagagtcctggctgagcccagcctcccagccacccccacccaaggcatcagaccacgaagcttctggccaaggcttcaccaacttcacttgatgctgtgaggaacagaactgcccatccaagccctgccagaatttctaacccacaaagccatgagtcacaataaatgccatgggacaaaaaca

SEQ ID NO: 96430 - DNA, 387 bp, Homo Sapiens
cattcattcatcaagtcagtctaaaaccctctggttcatccttggctcctctccatatcgtataacatgcatctggttcatcagaacatgccattgctttgccttcaaaatagacttagaaatgcattgcccacatcttcagctcatcgccttgtcccagtcaccctcctatctcttgccaggactattgtccttgcctcctaattgctctccccgcccctgccatcactttccccaccctgaggccccgccaggatgtccgcactatgagagctgggcctttgtccacttgactcatgcctgtgtcctggtgcctacaagactgttgtcagttgagtaggtattcaataaaagtattctttattgaatgaatgagtaccaaaaaaa

SEQ ID NO: 96431 - DNA, 519 bp, Homo Sapiens
  misc_feature (220)..(260): n is a, c, g, or t
aacctgaggcccgagggatagaggtgcttgtatgaatttgaacaaattgatttgtatgtgcgtatctgttataagctgggccctctgtggcatgagttccaaggaagcccccactccataccttaccccagcctaagggcaatattgcttctttacctccatctttggaccccacacggtctctgatatttgttttgtaatagcagagacttgttcattnnnnnnnnnnnnnnnnnnnnnnnnnnnnnnnnnnnnnnnnnagctttcagcatctagggcaacactctccccatttatggtctagtggtatgtggactttgatttcggcctgtggaagcaagattctcaagggcagggctgtgctctatgcatctttgtgtccaaagcccctgttagacagtagttgcttctaaatgtgtgtggcattgtactcacaaagttccccgtttcgtagctataagctcaagcaaactcttctttcaaatgatgttagtgctgtatttggtaatctaagagaaa

SEQ ID NO: 96432 - DNA, 612 bp, Homo Sapiens
  misc_feature (498)..(507): n is a, c, g, or t
tgatgattatactatgtactgaagatggatggggatcattaggtttctcttattatattgtcccacaaatatcttaaccgtttgtgtgctggagaggcaaatatttgacttccttggatatcagtgggcacctatcctggcaaattttgtacatattattatcgtcattcttggtttgtttggaactattcaatatagacctcgttacataacaggatatgctgtctggctagtcctctgggttacgtggaatgtgtttgttatctgcttctatttggaggctggggacctctcaaagcacccatctgtgaactggtggaaggagccatgtttatcaaacagagagtggaagaaagcaccagaactgcaaatccagaatttcagtctacagagtaaggaagggacaaggctggccctgcatctattcctgtagaccctgcaatgccaggggatatagcacaaggccattgtaagttccatgaggaactaggaaagagnnnnnnnnnngagaagcatctaaaaatatgttaaaagttcacatttctggtgctgttttggacattttttatgggaaagtctctttgtaagtaatacaatatctttgaaagaaaa

SEQ ID NO: 96433 - DNA, 556 bp, Homo Sapiens
aggaaatgtgtaccaaggcacaatcattaaaaggagttggaggcatcatttggttgacactgttgtcattcttgttctgatcattttggaccttgaagaaattggtgattctctcctagaattagacaaacaaagtgtgtttggaaataatgattgttttcctgccttaaaaaatatattaacagaaagcttttataacaggctgtttccctctggacaggtattaattctgagtaagaattttcagtgactacataaggatttgtgtaacttatgaaggaagagtccatttctaatcaaataattcacctgttttactagcttatagtgatctgatttcagaattttcctgtatcttttttacatacatcagaaaaagaaatgtttactatatttttggttccatttatgattgtattaagcatttgactataaggaaaactaacaattaaatcaattagaaaagcaacataaaattaaatgatatttaggaaatcagttatatgtgagcttgggtattcaaatgtcacaaataaaaagcatataaccattaaaa

SEQ ID NO: 96434 - DNA, 820 bp, Homo Sapiens
  misc_feature (626)..(626): n is a, c, g, or t
  misc_feature (628)..(628): n is a, c, g, or t
  misc_feature (630)..(630): n is a, c, g, or t
  misc_feature (635)..(635): n is a, c, g, or t
  misc_feature (643)..(643): n is a, c, g, or t
  misc_feature (645)..(649): n is a, c, g, or t
tgcctcggaagccgtcggtaccttggcagcgccaaatggaccagccgcaagaccgaaaccaggcactgggcacgcaccgacctgtgaacaagttggcagagctgcagtgcgaggtggccgctctgcgtgaggagcagaaagtgctgtcccgcctcgtggagtcgctgagcacccaaatccgggccttgacggagcagcaggagcagctgcggggccagctgcaggatctggactccaggctccgtgctgggagctcagagtttgattcagagcacaacctaacaagcaatgaagggcacagtctgaaaaacctggagcaccgcctaaatgagatggagagaactcaggctcagctgagggatgctgtccagagcctgcagctttctccaaggacgcgggggtcttggagtcaaccccagcccctcaaagcaccctgcctcaatggagacaccacctgagctgcccatcctgcctcatcacacgtggtctgggagcagagagatagccatcttagggggggtgtctgactttgccttagccctacttggcctacagtggggagtggagctgctggtcccaaccactctggcagtatgaagttgcccagtaaaatcttgattccgccncngncggcnggtggggnannnnnttttggcggcccccttcggccctccaaaaaatttttttaaaccatttcttttggcgccgggggcccccctaagggtaaggggaaacctgggccctatacctgggtttcccaaaggaaaaaccccggggcccacgaaataaagggggcttgagaattccccccccacacaat

SEQ ID NO: 96435 - DNA, 856 bp, Homo Sapiens
ctagtagagccgggtgtgaatcggcacgaggaggcctgagtcaataggcctgcgctctgctgcgcccagcagccccgggtctcccaggccagcactgccggctaccccaccagccaccccgcctgcagcctctcccagtgctctgaagggggtgtcccaggatctgctggagcggatccgagccaaggaggcacagaagcagctggcacagatgacgcggtgcccggagcaggagcagcggctgcagcgcttagaacggctgcctgagctggcccgcgtgctgcggagcgtctttgtgtccgaacgcaagcctgcgctcagcatggaggtggcctgtgccaggatggtgggcagctgttgtactatcatgagccctggggaaatggagaagcacctgctgctcctctccgagctgctgccggactggctcagcctccaccgcatccgcaccgacacctacgtcaagctggacaaggccgcggacctcgcccacatcactgcacgcctggcccaccagacacgtgctgaggaggggctgtgagcctgggggccactgtggacagacgtgggcttcagaagctcgctggcctgggcccaccagcattttcttttatgaacatgatacactttggccttcctttccccagcgcccctgagggccagaggcagatgtgggctgcaggctgcacagcccgagggtctctggctgcgggcggtgggccccttcatggggctcacctggtggattcacattaaaccggtttctgtgggcacctctgtccttgctgctggtggggaagggaagccagatccagcaccccctggggggccatcgggagtgtgctggggtgacggg

SEQ ID NO: 96436 - DNA, 551 bp, Homo Sapiens
tgctgtcccgggtcccagagtgcactctgccccactgctctgctgcctgtcctgggaaagtatctttgccccactaggaaatgtaaacaggagggcttggggagcgtgggcacttttctcatgagcagctactgcggcgttggcaggactcgctgctgctgctgctgcttgtgtaggtcggggagccagagatccccgaggacgcgcgccggacagtcggcactgaccggcccacctggtagcagaggacacccccagccccccaagcattgaagacatagtgtatttcctcgtatcctttctcccttgggtgtagttggggtggggaagcagggaaggctggtgcgatctccattccttgggctccacgtccgagttcatggtgcgccgctgtgctgggagctgcagtggtaatgtgtgggacaccttgaccaaaggggagctttgtctcgtgtgttttgaaaaaggcttaatgaagagaatgttgttcattcttagtagtatagtttgcaattcttaatggcaaataataagtttcagtagaaaacaaa

SEQ ID NO: 96437 - DNA, 530 bp, Homo Sapiens
acatccagtcctctccttcctgtaacttcatctccagtaattatttctccccttcagaatcagtccttgctaccacagttctagaccatgtcatcattagaatccgcatcctctctacagtcttgtctgtggtgaccatggcctctcagatctcctgctccacggagcggaagtgactgacaggtccccctgccttcccaaggcatacactgctgggtttgcactgaagccatgcttctctggcactactcccagtcagtgagcgggcacagcacggggtgttggtggtggcacgttcatggaagatgtaggactcctctgatgagcaagtttggcttggaaacacctgagccggctggttgaaactttttgagaactatgctgcatgcagcctgaggctcttgggcccagttcccctctcctttcacaggtgtcagacctgtattatgatatgaagtctcccttccccgctcctgcttccttctgtttatccttcacaggagttcccttaataaaactcttgcacattg

SEQ ID NO: 96438 - DNA, 478 bp, Homo Sapiens
gacattccagagccatgcaccaaacccttacttggtgtatgcacctcctttccctctctccatcttccaatccctggaaaagtctggtctgagtgtgacttgggaagctttcagtgctgctgtttggcccagctcattactttctccctttctctaccacagcaaacacattctccaccatgtcagtctaaagagtctaaaggggccgggagaagcatgagcgaggggcagattctagtcgggagcccatgccctggaaatccatctttcttcatctttcccattgaccactttgggtttgacctgcacatctgcagtgagggcagaattcaacaagcacaactcactggtctttcagtcaacgtgctagaaaccgatgacttattaatctctaattttttggcgcctctttcattgaatgagaattgctttcgtatagttcacattagaaaaatgcctaatataataaagtaaacca

SEQ ID NO: 96439 - DNA, 523 bp, Homo Sapiens
  misc_feature (114)..(122): n is a, c, g, or t
catcttggattgcaggaagacatggtctatgaattacagaaaaccacacacagagataagatgaaaagttaggaagacaagatacaaagagagatgcgataagaatggatgtcnnnnnnnnntgcaatccaagaattaaaatccctcatggaggtggaaagaagcaaaattgacagtgtagaaaatggaaacgttgatttggaggtgaaccttgagaggtcttttacaggaaaagagcatagagttagacatgataagtgaaaataaatagttaactaagaaaagtgatagattctgataaatataaacaatgggaattcagtttaagacttaacagtattactaatcaagaaaccagaacaacagaaataagtgataatgactttattgaagaaaacattttcaggctggaaaaagactggagtatatagattgactgggctcacaaattccaggtaaaatcaattttaaaacacccacacctagacacatattgaccacattttataaaatacaaagacca

SEQ ID NO: 96440 - DNA, 393 bp, Homo Sapiens
acacactttgatggcactaactgcatgttagaattgtgtggcaaagaactgaaggcatcagtccaaaagcccaaagaactaaataccgccaacaaccccatgaacttggaagtgggtcctttcccagtgagctctggaaatgacaaaaagacagacaacaccttgatggtagtctgtgagaaaacctgaagcagaagacccagctaacttgtgctcagattcctgaccaatacaaattgtgagacaaatgtgtaattttttaagccaagttttttgataatgtaatatgaagtgatagataactaatacaaaatagagaactggatacatatgttcacgagctattctggcataaaaatacattcaataaaaaacttgaagcaactctgtaaa

SEQ ID NO: 96441 - DNA, 852 bp, Homo Sapiens
ccagattcctggcctgataagaaatgacttcccacagggtatcggatgatagcattaatcacaaatggagcatctgcggccctgcccaccagccaagatgggttgggatcattcaggacggtggtaacgttcctctcctggtaggcagcaacaatatgggtgaggtcgtagtcataggcaaaggggctggtcccgttgatcacggatatgttgtatcgggcatctaggccaccacagctcagcggctgcttctgctgcagcctcaggtctccgttcacgtataactgggatcccgggacaggaaaggaggactggagaaacgccatgctctgcatcacgagggtcgccatcctgtgtaatcgataggagaaagtcaggatgagctgcacaccgagaacgtgctccgtggactgcaggggaagctccagcttaaaatgtaacatgtccgtcttcccatcctggttcctgtcttcttctctagtcgaaacgagcgggacgcgcaggcgatccccttgcagccggttgaaggcggggaacgtgctccaggcgaggaacccgtcgctttcgggtccgagcagggccacgagcagcacctggtgttggaagcgcacggtcggctgctcctcgtagctgctccgcttcagccaaaacccgtggctccggaaggccaccagcagcggcgggatgtacgtgagcgcagcggccagcagcaggaacagcgcggctttggagcagagccccgcgcggtaactgcgctcgaccgggtgagagaagacctcatagagcgccatgagcaccgctcgcaggcactccgcgagccgggggaccaagtttggcttctcctggttgcca

SEQ ID NO: 96442 - DNA, 694 bp, Homo Sapiens
gactcacccaaccgaaaaccagcaaaggatgcaaagaaacaattcccaaagagcaaatccaggcagaggtggagaaatgcagatccgagtgacagtgagctctgactttgcacccatggcgctgatgtggcgttggctgagatgaggggtggctgcagggccggcaggaaggctttcgaggcagcaacctgataagggccacgggaatcacaaatgcaagcacgatgtggcctagaactgacccactcaaaatccaggtgcctggaggccaaaggcaggaactggagacaacatctccacccagcagcagggaatggacggccccggcctccacctgaggagccgccagatccaccgcacaaccgcgtggggagaaatcaaaaggccacataaagcgtaacagtcacgtgttcaaacaaaaccacgtgtgtgaacagggataaacactgggataaacatggtcccaggaagcggcaggcttcggagtcactattcacacgcggcctctgacacaactgcccacgcacccagccctggtgcaatctcccagggtgcccctgtctgggaccgctggccccgtgtcctttctacatacccacacaggccaccctttaaaaccagaaatggtaccagaatgtggttctctgcaagatgcttttcacaataataaaatgcactaatcaaaccaaaaaaa

SEQ ID NO: 96443 - DNA, 689 bp, Homo Sapiens
  misc_feature (31)..(31): n is a, c, g, or t
  misc_feature (64)..(64): n is a, c, g, or t
  misc_feature (335)..(335): n is a, c, g, or t
agctggtttaacaagaggggagcctctgacntcaggcatcctatgctgaaagataggcagagtntgagttgtgcaactgttcagccaagcctacaagatgtatagtgctgtgggggtaacatggcctccctacccagcctcgcttcagaactttcgtaccaaggctggactgtagaaaagtccttcctatgccatggcactttcccactgaggcctcccatgggtgccgtttcctttgctggaaggttctcctcgactcctggcagtctatactcatttaaaggtttccgccttctctaaagcctctcactgatggacttcacggtggatcagantttcccttttataaacattcatagcagactgtacatttctttcactgcgtttaccaaacgatttgatggcgaagtgcgtcagggcgtgggccttctccatcactagcgttccttgcaccccaggagctcaatccgtgtttcctaaatgaatacttgacatttcgcttgatcgtatatttttgcacagcagtgatcttcacgacctttgattaggcagtggcttctcagatacgacaacaaaagcataagcaaccaaaggaaaaaattaattggacttcatcaaaattaaaaactttagaacttcaaaggacattctcaaaaaagttaaaaacaaacattaactagcaaattata

SEQ ID NO: 96444 - DNA, 1634 bp, Homo Sapiens
  misc_feature (994)..(994): n is a, c, g, or t
aattccttgcaatcgtcgacccacgcgtccgctgagccgacaacacggctgcctgccctatgccatcaccatcgtggccagcatgacggtgcgggagctgtttgaggagctggacagaccagcggccagtgacgaggagctcaccaggctgaagagcaagcgggcccgggtggcccagatgaagaggacctgggcagggcagggggcttctctgaagctcggcgacctcatggtgctgctgggcgccgtgggagcctgtgagtatgccagctgcacaccccagttttgcgaagccaacgggctgcggtacaaagccatgatggagatccggcgcctgcggggccagctgaccaccgcagtcaatgccgtgtgccccgaggctgagctcttcgtggatcccaagatgcagccgcccaccgagagccaggtgacctacctgcgacagatcgtgacggcaggcctgggggaccacttggcccgcagggtccagagcgaggagatgctggaggacaagtggaggaacgcctacaagacccctctcctcgacgaccctgtcttcatccaccccagctccgtccttttcaaagagctccccgagtttgtggtctaccaggaaatcgtggagaccactaagatgtacatgaaaggcgtctctagcgtggaggtccagtggatcccggccctgctgccctcttactgccagtttgacaagcccctggaggaaccagcccctacatactgccccgagcgggggcgggtgctgtgtcaccgggccagcgtgttctatcgcgtgggctggccgctccccgccatcgaggtggattttccagaggggattgaccgctacaagcactttgcccggttcctgctggaagggcaggtcttccgcaagctggcctcataccagagctgtctgctgtccagccccggcaccatgcttgaagacgtgggccaggctgcagccccgtacggagagccttctgcgagccctggnttgcagagaaggctgactgccatgaagccttgctggctgcttggaagaaaaaccccaaatacctgctggctgagtactggtgagtggcttccacaggccatgcaccccgatatcgagaaagcctggccccccaccactgtccactgaccagaaacctggctgcagggccgaggactggtttggggactggagggctggcagcagcctgtcaccgtgcgaccgtgaccacctggcatgggcttcgtggcctgctctcaggaagtgggtcaagccctgggaaccctcatccatgagagctcgatcccgtatgaagggtgctgccgcccgtgccatctggcccgggggtgactttttgaactgtttattatatggtggatgatgatttcatctcacgtgctggacgctgttctgttcagtgtgctctttggactacattagtcccctgtggagcagcagggctggagatctctgcagtcccttccccgcccgccctgccagaaggccgaggaggcacgtggagggcctccttcctgcaattcttccctctccagagtcaggcagggctgcccagccctggcctcacagccgtcccagatgttaggtgagccactgagctctgtgttgaccttgaggggcctgg

SEQ ID NO: 96445 - DNA, 642 bp, Homo Sapiens
gaaagtatgtgtcgctttatttttcatatttagtacagtcagatcttcagttgacatattttaggtgatattttagaattaattatattaatattccatagcattcaacaaaatatactctaacatcatgtgttctaccatatgaacagatttatgcctgtctgttcctaaaatgatagtatagaggtgggaggtaggcctacccctccctacccccaggtgagactttgataagaatgagaaaatcagcttaaatcttgacacaaacttcagctatgtgaaagacatgattaaactcatttcagtagaagttgcaagctacataaaactacagtatttacaatgcccttaacttgacgcagttaaaatttgaggcacttttgctgacatcttattgtctatttgctgacatcttactctctactctgagtcaccttttatacctagcaaataactacaatactcagtttttaatatttaactaaggattggaaaagtctatgaaggcttagatttgcattaatgggctttattaattcaaggaagcaaaaaactaattcaagtttacatagtataagtttacataacaaatatgtacttttggatcaataaaccacagaagatatattgagctaattaatt

SEQ ID NO: 96446 - DNA, 473 bp, Homo Sapiens
caggcatatttggaggggatctggtggtgccttgaaggtatgatcagagaggggaccacaggtgtgtgtttcccctttgtgttaagcgtgaggcagagggagacgttagtccagcatttccaaagtgtgggtgggtccgttggttcccgagatacttttaggtggtatggggcctgcattaagtggcacaaaatcagagcaagaaagcgatgcccttcccaattctctcaatccttttatgccgagaagatctcagctggatgccaacatgttccgatgcctgtggaagacatgccgacgtctcctctgcctagggagcaggacttgggcttagggcaggtggaaaaaattccagacttttttagcactgtttttgttttaatggtatatttttattggctactttattgtttaggacaagtggtagtggcattctatttattgtgaccttttcaataaatagatttaagtaa

SEQ ID NO: 96447 - DNA, 418 bp, Homo Sapiens
gaacattctaacggcggaggctgtcaactagcatattgaggctatggtccttgttgaacaggttttgtcatctgatactgataatatttagaaatctaagatgcctttggagtataatatgttcaaaaaatgtggttatcttggtctgtgattacagcatatgtccatgctaaggagtttgtttcaggacaggaataagtcctcttctgttaagcagtttctcctaaatcagtttggagacatttcaggagcttttctaacacccaagctgaaattattggcttcttctctgattaaaaccatcccagcagttagcaaacaataaccagaaggttttcaatgtagcccctgtgcaccattcagaaaacatcttgaaacagtactgtaaatagattcaagaaaggaatgtggtttggaa

SEQ ID NO: 96448 - DNA, 234 bp, Homo Sapiens
atgtaccactgggcctagctgaaacatcagtttctgactgaaggggagactacaacaactttagggtttcccttaaaaggattacggccatggggaacttgactgagtaaacaatgctataaataaaaagctcttccaaaacattaaccatggtaagcatcattatccccataaaatgggggcatccaggttaaatggcccacagaccaaaagtctaaaatgaagatagaatcc

SEQ ID NO: 96449 - DNA, 486 bp, Homo Sapiens
tgtgctctcctctcaggggcagcatgctaacggggcgacgtcctaatccaactgggagaagcctcagtggtggaattccaggcactgtgactgtcaagctggcaagggccaggattgggggaatggagctggggcttagctgggaggtggtctgaagcagacagggaatgggagaggaggatgggaagtagacagtggctggtatggctctgaggctccctggggcctgctcaagctcctcctgctccttgctgttttctgatgatttgggggcttgggagtccctttgtcctcatctgagactgaaatgtggggatccaggatggccttccttcctcttacccttcctccctcagcctgcaacctctatcctggaacctgtcctccctttctccccaactatgcatctgttgtctgctcctctgcaaaggccagccagcttgggagcagcagagaaataaacagcatttctgatgccaaaaaaaa

SEQ ID NO: 96450 - DNA, 1035 bp, Homo Sapiens
  misc_feature (65)..(65): n is a, c, g, or t
  misc_feature (133)..(133): n is a, c, g, or t
  misc_feature (745)..(745): n is a, c, g, or t
  misc_feature (816)..(816): n is a, c, g, or t
  misc_feature (839)..(839): n is a, c, g, or t
  misc_feature (911)..(911): n is a, c, g, or t
atgcacgggggactgggggagcccccagcctggggcagcccagcaggccgctgaacaaaccaccnccagaagccagcactgtggcagggtgctggggagatgcccctctgagccttcctcccccctcagaccntgaatgcaccccacagttgggggctgcccctgccactcccctggtaatgcataaaaggggaggggaaggttccctggggcttgagctccctctgtggaggtgaggaggggagattccgttcacatccaggaggggcaaaatgactgatgtatttttatgtatctacacagagagtgcattttctctccagagatgctgtctggttaacaaaggaataacttaagaaattgatcgattatcttaataaactgtgcccccccgccgcaccgaccgggacgggtatcgtctacccttaccgcgtactcccgaaccaccccatcaacccactatgaactctgcgaaccccgttgttataaagctcgtgtccccccggcccatcctcttcccaccgactttggcccgccccgtttagcccgattttattcttgtgggtggcccctccccctccctaccctccgaaagaaagatttttgcccaatcgaaccatcctttttttccgcgtcgcgagccccgccgcttccccgcttgcccggtagtaaccctaatcacgtttgtgcgcccccatgaaattcgcccgcccccccacgattacacaaccctaccttgtgggtnccccacgtaccgtacgcgtgcggccgtcgccattcccaccccacacgcacataacacacaaaacagcgacncaggccgtggcactccacccaanagtggtgccgcctttgtcagaaaccaccatcccgcccgcaatacgcttgactctctctcctacggcgatatnccaagtcgtgtggggggacccacacccgcaccaccaagatgcggcggcgtttactcatgcgcctagttaaccgcgcctccccattttatatatcgcatgctccctttgccgctccctctccacg

SEQ ID NO: 96451 - DNA, 558 bp, Homo Sapiens
  misc_feature (109)..(117): n is a, c, g, or t
  misc_feature (266)..(351): n is a, c, g, or t
  misc_feature (406)..(418): n is a, c, g, or t
gggttatatgaatttttattgatagagagtatgtaagcttttggcatttttgtcactcagcaaattactcctaaggtttatatgagttgatgaatagttgttttattannnnnnnnnaccaccatgtatctaaccagatgaaagttgtttatatttgagagtagtatacatatttgatgtagtagtttatccattcacctatgagatatatttgcactgttttcctggttttaagtgctataaataaagatgctgtgaaatctacnnnnnnnnnnnnnnnnnnnnnnnnnnnnnnnnnnnnnnnnnnnnnnnnnnnnnnnnnnnnnnnnnnnnnnnnnnnnnnnnnnnnnntaccccgcgggcaacaaccccacaaaacacaaaaaaaaccccttgtgcgggccgnnnnnnnnnnnnnagaaaattttcttacaaaccacctcttttgggggcggggcggccccacaaaggtaaagggagcaacggggccaataatttttttccccaaaaaagaaccccggggcaaaggaacaaggggtcgtgggattttcccccccc

SEQ ID NO: 96452 - DNA, 1391 bp, Homo Sapiens
  misc_feature (1254)..(1254): n is a, c, g, or t
  misc_feature (1301)..(1301): n is a, c, g, or t
tcgcaccaaggattttaaattcgccattgcgctcgcctatccgctcagccaacccgacgcggccctccagccctgtcacctcccacatctccaaggtgctttttggagaggatgacagcctgctgcgtgttgactgcatacgctacaaccgtgctgtccgtgatctgggtcctgtcatcagcacaggcctgctgcacctggctgaggatggggtgctgagtcccctggcgctgacagagggtgggaagggttcctcgccctccatcagaccaatccaaggcagccaggggtccagcagcccagtggagaaggaggtcgtggaagccacggacagcagagagaagacggggatggtgaggcctggcgagcccttgagtggggagaaatactcacccaaggagctgctggcactgctgaagtgtgtggaggctgagattgcaaactatgaggcgtgcctcaaggaggaggtagagaagaggaagaagttcaagattgatgaccagagaaggacccacaactacgatgagttcatctgcacctttatctccatgctggctcaggaaggcatgctggccaacctagtggagcagaacatctccgtgcggcggcgccaaggggtcagcatcggccggctccacaagcagcggaagcctgaccggcggaaacgctctcgcccctacaaggccaagcgccagtgaggactgctggccctgactctgcagcccactcttgccgtgtggccctcaccagggtccttccctgccccacttccccttttcccagtattactgaatagtcccagctggagagtccaggccctgggaatgggaggaaccaggccacattccttccatcgtgccctgaggcctgacacggcagatcagccccatagtgctcaggaggcagcatctggagttggggcacagcgaggtactgcagcttcctccacagccggctgtggagcagcaggacctggccccttctgcctgggcagaagaatatatatttttacctatcagagacatctatttttctgggctccaacccaacatgccaccatgttggacataagttcctacctgactatgctttctctcctaggagctgtcctggtggggccaggtccttgtatcatgccacgggcccaactacagggtcctagctggggggcctggggtgggccctggggctctgggcccctgctggctctagccccagccaccagcctgtccccggttggtaagaagccagggncttctctcttcattcctcttaggagagtgccaaactcagggacccancattgtgctggggttgggaataggtgtccccaaagggggcttgggggggaacaggctgccgggaacccctgggcctgagacaaaaagtgg

SEQ ID NO: 96453 - DNA, 895 bp, Homo Sapiens
  misc_feature (23)..(23): n is a, c, g, or t
actcctcaggcagctgtgactcntgagacttgtgggtctgaatcagctctggctgtgttactcttatcagctgctgcagagcctctagtactgtctgacggttcaccttcagcacatgcagcctggcctcatacttgatcctgcggtcgggcaccactgccatcaggttgaagcggatgtcgtggtagggctcccctgcagtggcgaggccgatacgctccatgatgacccgccgggccttgtctgtccactcctcgtcctccccccagggcccatggtccaatggggtagaccttcagcccatccagctcaaagagccggcctgtgataggcacatagctgacaaagtggaacgcctccatggtccgcactgcactaaggccattctgcttctcagggagctggcgtggctcgggcctggcatggctattatgggccttggccaactccggggcattgccaatcgcatatcctttgctctcagggctgaaacccttggtgaagtccttcatgcgactcagggtgggtcccaggtccacgctgctgcagttcaggagcacgctcagcaaggcatgattgcacaagagttgggtatcagctggtgggcaaagaacatgttattcacaatatcatcatcaatcacggacgtatcatccaccaaggtagagacctttcgccgggaccggcgctcttcgatccatttgaacaggaagataaatccatatacagggccctgacatttgctctgaaggtcgtagatctcctccacttgcacccccttgacaccgaaatcttccacgagcagggtgaagaggcctgggtcgctctccagctccagccagcccttattcatcttcccgcgggcggcccctcagcgccatgtccaggccctccc

SEQ ID NO: 96454 - DNA, 433 bp, Homo Sapiens
ggagggatataaagttcctgaataagacactgagaacatctagatttattattttctctattttacttcccaacttacagaataaactgtaaattaaagaataactccataggaaataaaagaggtcttacaaacttagtttacaaattccagctacagtagttggagttttacttgatctatgtatttctatgtaccctgtaactaagcttctagccatcttaagtgtaaaccacagatcatttactaaagaacatgattctcaacagttctaggaacagttataaatggtctaaaggtgttctacattttgaggccccaggatatccttttattttatatatctgcaaggtagcaaaggatagctatacaccttgacacggcagagatccagtgtaaaaaggtgcttcactagtttgttttgtcaaaaaaa

SEQ ID NO: 96455 - DNA, 452 bp, Homo Sapiens
tttgcccttcattgtgaggatcccaaactttctcatgcatttcaaggctgggaaagtcacatcctgctttgctctctatcccctctataaccttccctcttccaatccatccttaacactctcttttggatattgctacttccctgcttcccaaaagacaaggtccaaacgcctatcaataactttaccaatcagatctcaacatatgtttcacatgtcctccccaaccctacctctcaggcccctttgtcatgctttcccatgtacctgtgctctagcagccaaatcaaaatcactcaatgacatccaaacacaaaactcatttctacatctctccaacttcactcaccctgctttgatagcctagaagatcattccttgtctccaccacagaaccaaactcctctttatcattcaagatctagttctgtatggaaacaaggtagagccga

SEQ ID NO: 96456 - DNA, 1135 bp, Homo Sapiens
  misc_feature (875)..(875): n is a, c, g, or t
  misc_feature (972)..(972): n is a, c, g, or t
agcagcacacgcgcacacacgcccgaccgctcagcttgaccccataggccatcgcccccctcccgcccgcttgatatcatataaccgcgtgttaaaaagcacgctggaccggtccggatttcccgggatatcgtcgacccacgcgtcggtgctagcgtggctctaagacgcgtcacccacgctgcgggctaagccatgtgctgggaagctgagccgcgtcagcggtaacaaactcgccgcgcgcccttcagcgactggggccgcctggaggcgggccatcctcagcggcttggaagaccttctggcaggtcagtgatgcagaggcagagaggtggcgcgtacgacctcacgggaggacggtggatgaggcgtgccagcaccctgacgcggctgccgattgatgtacacgctatatattttgtcctttctttcacctcatgatctgtgtcagttgggaagtacaaatcattatggcaatgaaacgtgtaagagatccaattctgtgagagatactttttgttgagggatcttccttcttggtcttctgttgactggaagtctcttccagatctagaaatcttaaaaaagcctatatctgaggtcactgatggtgcattttttgacctacatggcagtctatagaatgtgctgtccatacacaagaagagcttcaaaatccagccgtccctatgtatggagctgtcacttcttttttacactccctgatcattcagaatgaacccacgatttgctatgtttggaccaggtatggaagcaacttgaatacctcttgggtgtgcagcttggatgtccttcagaggaactttgcccaacagctggtttgcctcagaggcagattgatggtattggatcangagtcaattttcagttgaacaaccaacataaaattcacattctaatcttatattcaactaccagaaaggaaagagatagagccagggaagagcatancagtgcagttaacaagatgttcagtcggacacaatgaaaggtggatgatccaccaagaaagcccgggtaccgtggtggattccccaagaatctcaaaaaagtggtggtggaaatgtttgttaaaaggggggctcccttctctatggctgcgccaaattgggct

SEQ ID NO: 96457 - DNA, 1160 bp, Homo Sapiens
attccgcatgcccttagcatggatgaaatgatcgttacaccagatggtggagtaattattgttcttccactgcaggtaaacattcaggtaggtcaaatgatcgctctcaggaacagcgaacttctcccggatttgatcactctcctcctctcgacccttgggcctgtagaagatggctgggaccgagagcatggaaacgatgagcaggatctcggagctgcagcccatgtcacaggacacgatgagcatcttggacagggcagggtccagcgggaactccaccatcagccgcccggtagaggtcagaccacctgtgttgtccagggccccgaggatccagagctgatacatagagttgagcatgttgtcctccgggggcgggtccatgaagtggaactgcagcaggtcctgcaccccgagggacttgagcagcagcaccacgttggccaggttagtcctctggatctcgggcactgtggtggtcaggagctcattcttgtaggcgctctgggtgtagagcctgaaacactgacctgggcccgtcctgccggctcgccctgaccgctggttggcattggcctggctaatgggatagatctgcagagcatccatgccaatcctggggttgaagacctttaatttgcaataaccagaatcgataacaaacatgatgccgtcaacagtgagagacgtctcggcaatattggtggcaacgatgcacttccgaacgccatctggagccttctggaagattttggcctggaggtcagaaggcagctgagagtagatgggcagcacagccagtgcaggcgcgttctccagttcctccagatgctccacaatctggtctgaggtcacctcaatgtcctcttggccaggcatgaagataaggatgtctccaggggcccccgacaggtgcacctgcaaggactgcttcactgcagcctccacgtaatcctcctgtggggtcttgctgaagaggatgtcaacagggaaggtacggccagggatgtggaagatggggacattcccaaaaaaggcagcaaacttctccgcatccatcgtggctgatgtgaccggacgcgtgggtcgacgatatcccgggattcccggaccggtaccagcctgcttttttgaacacactgtttatattctcatga

SEQ ID NO: 96458 - DNA, 915 bp, Homo Sapiens
  misc_feature (61)..(61): n is a, c, g, or t
  misc_feature (83)..(83): n is a, c, g, or t
  misc_feature (654)..(698): n is a, c, g, or t
gggagtgttctgtgacggtggttctcatgtgtggtagctggggcagcaccagcagcagtgncggcttcagcatcacctggganctgtccagaaatgcaattctcgggcttccaccctagacctcctgatcagggattcggggatgactaggcaaactattttcatgagccctgtaggtgattctgaagcttgttcaagtttgagagtcactgacctatggattaaggtgagtgagtgcacctgtgacagaacaagtgctcactgctcttggtttccttattaaaagagggagggagttgaaatggggtagctctcagattgcctctctcctgttttattttgtgattctcccttttagccatggaattgggggaaggaaagaggaaccatttgtctatcacaaactgtcccagagtcttccagatttcacgtttggaatgaaagtctcaggaaggcacggactttgttttcttcctcatgtatggcatagagcagcggtccccaacccctgggccacagatcagtatcgttctgtggcctgttaggaaccaggctgcacagcaggaagtgagcggcgggccagcaagctaagcttcatctgtttttacagccgcttcccattgcttccgttactgcctgagccccacctcctgnnnnnnnnnnnnnnnnnnnnnnnnnnnnnnnnnnnnnnnnnnnnnttgtgaactgcccacgcgagggatgtaggttgtccgctgcttatgagaatccagcacctgccgatctgtcactgttccccgtcaccctcagatgggaccgtctagttgtaggaaaacaagctcagggctcccactgattctacattttggtgagttgtataattgttatgtattgcaatgtaataataatagaaataaagtgtacgataaatgcaaa

SEQ ID NO: 96459 - DNA, 1054 bp, Homo Sapiens
  misc_feature (222)..(290): n is a, c, g, or t
  misc_feature (363)..(473): n is a, c, g, or t
  misc_feature (755)..(770): n is a, c, g, or t
  misc_feature (971)..(999): n is a, c, g, or t
aaatgaaacctagggcacggcctccgaagctgcgtgtggccccttagaggtgagcatcagagccagagcagtgagggggagactcacccaccctctccctctcccttcagctctgggaggcaggcgcagtgcccccctcccgtgggctggcccaggaccgcgggtgaaacctgggtctgtttagtttcttggtttttgtatgtttgtttgtttttgacacannnnnnnnnnnnnnnnnnnnnnnnnnnnnnnnnnnnnnnnnnnnnnnnnnnnnnnnnnnnnnnnnnnnngctcaagcgattctctcacctcagcctcctgagtaggtgggattacagatgcccgccaccacacccagttaannnnnnnnnnnnnnnnnnnnnnnnnnnnnnnnnnnnnnnnnnnnnnnnnnnnnnnnnnnnnnnnnnnnnnnnnnnnnnnnnnnnnnnnnnnnnnnnnnnnnnnnnnnnnnngtgtgagccaccgcacccaatcctattaggtttctttgaatcccctcatggcctgcctggtttttgctcagcctgtcttcagcttgaggagctgggaagctctggtggatgctatgaactcacttgctgaagagcagcattcaggtgcatccccagccagggcacgtggctccctcagccatgaattcacttctcttcaggaggtttggcttggcatgaaaatacttcattcagagtatgggcaaatgcttctggaaaacccttccctgaagagagagaacnnnnnnnnnnnnnnnncggtgatcacaccctcccatccttcctgcctcctgccccaaaccccgggttcctgggtctggaagggccttctctccaagctgggagctcctgggcccccaccattcactttttgtccttgctgctggcaaacagtaaagaaactcactttccctgtggcacgttatgcttcagaattaaaacaatgaagattaaaatttnnnnnnnnnnnnnnnnnnnnnnnnnnnnngaccgcgtatgcggccgcaagcttattcccttgtagtgagggttaattttagcta

SEQ ID NO: 96460 - DNA, 840 bp, Homo Sapiens
tgagtgagctcgatacgctctagacgggggccctttctgctcaatgctgtccgctggctggatggggcgcagaggcaagattgtggtgcagacagagctgagaaccctgagtggcctcctcgcagtggggggcataggcaccagcatcgagcccaatctgaccagtgatgcaagtgtctactgctttgaacccgtgagtgaagtgggggtcaaggaactgcaggagtttgtagcagagggtggcgggctatttgttggagcccaagcctggtggtgggccttcaagaaccccggagtgtcccctttggctcgattcccaggaaacctcctcctcaacccctttggcatcagcattacaagccaaagcctcaatccagggccctttcgtactcctaaagcagggataaggacctatcacttccgctccaccttagccgagttccaggttataatgggcaggaagagaggaaatgtggaaaagggctggttggcaaagctgggaccagatggtgcagctttcctgcagattcccgcagaagagatccctgcctacatgtctgtgcatcgactcctgaggaagctgctaagtcgatatcggcttccagtagcaacccgagagaaccctgttatcaatgactgctgcagaggtgctatgctttccctggccacagggctggcccactctggaagcgacctctctctgttagtcccagaaattgaagatatgtacagcagcccctatctgcgcccctcagaatctcctatcaccgtcgaggtcaactgcaccaatccaggcaccagatattgctggatgagtactgggctctacatacctggaag

SEQ ID NO: 96461 - DNA, 1282 bp, Homo Sapiens
  misc_feature (1085)..(1085): n is a, c, g, or t
caggctggtaccggccggataattcccgggatatcgtcgacccacgcgtccgagagcatcatttgaaaaagaacctatggaattgtgaagtttgctgctttttatgtgactgtgactgaatgggtcttgttaagcccaaagtgactcaaagggcatgaccgtgtgtataactctctggtgattatatacaggattgaaaatcctccaagcctgcttttaaagttgtagcacagcagttttagacatagaaaggctggttttccatctgtcatacaggcagaaatactcagtgtcctcagtcacagaaacatcatccagttttatggagtaattcttgaacctcccaactatggcattgtcacagaatatgcttctctgggatcactctatgattacattaacagtaacagaagtgaggagatggatatggatcacattatgacctgggccactgatgtagccaaaggaatgcattatttacatatggaggctcctgtcaaggtgattcacagagacctcaagtcaagaaacgttgttatagctgctgatggagtattgaagatctgtgactttggtgcctctcggttccataaccatacaacacacatgtccttggttggaactttcccatggatggctccagaagttatccagagtctccctgtgtcagaaacttgtgacacatattcctatggtgtggttctctgggagatgctaacaagggaggtcccctttaaaggtttggaacggattacaagtagcttgcgcttgtagtgcaaaaaaacgacagattaaccattcccagcaagtcgccccagaagtcttggccgaactggtacatcaagtgcctgcgaaactgactgcccaagaaaacggcccatcattccaggccacattatttttcaatccctggcagtcccatgtcccaattgacaccgaatcctttccctgaacaaggtggtaaactccatcttcctaacacaaccaaaggcgcggaacccgggaccctggccaaaaatttgaagggcaaactttctttgaagaagggttacacgcaaacttaggaggcggccgaatccctcccnctttcttaaagggcacccccggaaaccttctaaacgaaacggagcaacccgcaccgcctccaaaacaatgtgggggcgaggcccataacccctggaaagaaagagaagattccgcacccacccccccgcctggaatggaccccttacccttttagcaaaattcgggtgggcccctcggcacactggaaagacaacaa

SEQ ID NO: 96462 - DNA, 2219 bp, Homo Sapiens
  misc_feature (1973)..(1974): n is a, c, g, or t
cctcccggcagctgaagcgcctcgagtcggtcagccgctccccggtctattccatttcaacgagaccttgttgggggtcagcgtcattcgagccttcgaggagcaggagcgcttcatccaccagagtgacctgaaggtggacgagaaccagaaggcctattaccccagcatcgtggccaacaggtggctggccgtgcggctggagtgtgtgggcaactgcatcgttctgtttgctgccctgtttgcggtgatctccaggcacagcctcagtgctggcttggtgggcctctcagtgtcttactcattgcaggtcaccacgtacttgaactggctggttcggatgtcatctgaaatggaaaccaacatcgtggccgtggagaggctcaaggagtattcagagactgagaaggaggcgccctggcaaatccaggagacagctccgcccagcagctggccccaggtgggccgagtggaattccggaactactgcctgcgctaccgagaggacctggacttcgttctcaggcacatcaatgtcacgatcaatgggggagaaaaggtcggcatcgtggggcggacgggagctgggaagtcgtccctgaccctgggcttatttcggatcaacgagtctgccgaaggagagatcatcatcgatggcatcaacatcgccaagatcggcctgcacgacctccgcttcaagatcaccatcatcccccaggaccctgttttgttttcgggttccctccgaatgaacctggacccattcagccagtactcggatgaagaagtctggacgtccctggagctggcccacctgaaggacttcgtgtcagcccttcctgacaagctagaccatgaatgtgcagaaggcggggagaacctcagtgtcgggcagcgccagcttgtgtgcctagcccgggccctgctgaggaagacgaagatccttgtgttggatgaggccacggcagccgtggacctggaaacggacgacctcatccagtccaccatccggacacagttcgaggactgcaccgtcctcaccatcgcccaccggctcaacaccatcatggactacacaagggtgatcgtcttggacaaaggagaaatccaggagtacggcgccccatcggacctcctgcagcagagaggtcttttctacagcatggccaaagacgccggcttggtgtgagccccagagctggcatatctggtcagaactgcagggcctatatgccagcgcccagggaggagtcagtacccctggtaaaccaagcctcccacactgaaaccaaaacataaaaaccaaacccagacaaccaaaacatattcaaagcagcagccaccgccatccggtcccctgcctggaactggctgtgaagacccaggagagacagagatgcgaaccacccaaaacacgcacaccctgcccctggtgccctgagacagacacacagcctcacgcccccaggaatgcaagtggtttcctggtgcttcccacggaggagttttggcagccagacttctggaggaattggttgtatagaagatcctagtgaccaaattcagcctactgcctcggatctctccagccgaagtctgtggactgcaagtctttgagatgcttctggctcccatcacctctaacatccttgtctgggtctaccaggaacgcttcatttccttggggctgcagttttgtggttgaggggcctggagaaaatcattttctccccttggcagtgtcccagggccctggatggtcctcttaccaacatctggtcttccaggcactcaaaagctgggaaccagcatctcagcgccagctctaccagttctcgttttgggccagaggcagcctctgcactcccacgcctgtcctcctggaagggacctggttggactaacggctaacctggacctggaactgtagggccaggggattgtctcagggccgacgttccacctgggggttnncctccccacccacccccacttcaggcttttcccttttttcttttggtccacattgtaagaaaacatcatgctgttattactggtcccaccatgatttgatgtgggggtaataattaagggagatgggcctcatggggaatttgaccctggactagaaaatagagactgaagagtggagccacccagcctggaaaggtaactattgccagtccctagccagaaaaaaatggggtttagggggcccg

SEQ ID NO: 96463 - DNA, 951 bp, Homo Sapiens
  misc_feature (820)..(830): n is a, c, g, or t
caaaaagcaggctggtaccggtcggaattcccgggatatcgtcgacccacgcgtcgccacgcgtccggttgcactgaacaggttctcttcctggcatcataaggagttggtgtaatcattttaaattccactgaaaatttaacaagtatccccgttctcatcgaagggattgtgtatctgtgcttctaatattagttggctttcataaatcatgtagttgtgtgtatatgtatttaagatgtacatttaataatatcaaagagaagatgccgtgtgtaatttataatgtatttgaaaattacatgttttttcatttgtaaaaatgagtcatttgtttaacacaatctttcatgtcgttgtctatacaaatttagtaaaggtctgcactcctttatctgtaattgtaattccaaaatccaaaaagctctgaaaacaaggtttccataagcttggtgacaaaattcatttgcttgcaatctaatctgaactgaccttgaatctttttatcccatttagtgtgaatattcctttatttgtgctgcttgatgatgagagggagggctgctgcacagactgtggtgagggctggttaatgtagtgatggtatatgcacaaaaatacttttctaaaatctaaaatttcataattctgaaacaactggcccaagggtttcagagaaaggactgtggacctctatcatctggtaagtaatttagaagatattattggtcttaaaaaatgtgaaatgctgttatattctaatagttttcaccttggtgtattaaagtggggtctcaattgagtaaagcatcgcacaaannnnnnnnnnntcaaaggtttcctcgggggggcgacagattagcgtgcacccacgtttttggacaaaagggggcccaaagaggggttttaaaaaagaaaggggggtgtaaaaggcggttgggaaacgcgtgg

SEQ ID NO: 96464 - DNA, 816 bp, Homo Sapiens
  misc_feature (473)..(666): n is a, c, g, or t
  misc_feature (670)..(683): n is a, c, g, or t
tgagtcatttgtttaaacaatctttcatgtcttgtcatacaaatttataaaggtctgcactcctttatctgtaattgtaattccaaaatccaaaaagctctgaaaacaaggtttccataagcttggtgacaaaattcatttgcttgcaatctaatctgaactgaccttgaatctttttatcccatttagtgtgaatattcctttattttgctgcttgatgatgagagggagggctgctgccacagactgtggtgagggctggttaatgtagtatggtatatgcacaaaactacttttctaaaatctaaaatttcataattctgaaacaacttgccccaagggtttcagagaaaggactgtggacctctatcatctgctaagtaatttagaagatattatttgtcttaaaaaatgtgaaatgcttttatattctaatagtttttcactttgtgtattaaatggtttttaaattnnnnnnnnnnnnnnnnnnnnnnnnnnnnnnnnnnnnnnnnnnnnnnnnnnnnnnnnnnnnnnnnnnnnnnnnnnnnnnnnnnnnnnnnnnnnnnnnnnnnnnnnnnnnnnnnnnnnnnnnnnnnnnnnnnnnnnnnnnnnnnnnnnnnnnnnnnnnnnnnnnnnnnnnnnnnnnnnnnnnnnnnnnnnnnnnnnaagnnnnnnnnnnnnnnaaaaaaattttttcaacacctttttcttcgggggccgcgggccccacccagaaaaaacgacacagcatcccttctaccttcttcctctcccacaacaacccccggccaaaaaacacctccgggtcttttttct

SEQ ID NO: 96465 - DNA, 1547 bp, Homo Sapiens
  misc_feature (79)..(93): n is a, c, g, or t
  misc_feature (694)..(702): n is a, c, g, or t
cttccggtcttcccccgggtgctcccgtggtgcccgcgggccctgccgtgggtgaatccctccccgggtgggggtcgtnnnnnnnnnnnnnnntttccgggaacacccttggccaaccaagaggtaacggggttgccaccaagccgcccttccagaccattttttgggccgggccagaaaccgttgtcttggccatacgggttgaaccacgccaccgcaacgcgtctcggtctggcctgccccagacaggcacctgaccgagttctggacgcacgtgccaggaggttgggtatgctccctctcctgcacccagccaccccgcccaggagagcatctccctctggcataggcgaaggccctgggaagctgaccggaagccctctgttcacaggcagccaccggagagcagattcttccagctccaaatcctgcctgcctctgacaaaccaaaataaatagtgtgtacttctcacgccacctggaattcctggcccccagaccagaggcgcgagccctcctcctccaccccacacccaggtgcccatgccgagggcactttctgcccagccaggggctggcagcagcacagcgagggtctctggccacggcccccaggcagcaggccccccagggtcctggttgaggggctggttcagccctttggtccaccttgttcattaaaattaaaataagnnnnnnnnnggctccacttggtgacttgggtctgtagaggtctctgcttcgtccctgtctgtcatcctgtccatcctgcaaggcatcgtgcgggccagatctggaggctggacccagccacacccactggtcactgcagtttcgtccccagcttgcgttgtctgttcctggcttctgcccgggttaccgtgtactcaaaccagagtacgttgggaatgaggcttgtgtctcggattaggaagaactcggagacaggccaggctgctatcctggggaacagcggggtgaggacctcctgggtgaagatgaaccaggcgatggccatgaggcctccagcgatgcctccatagagcacctggctccaggtgtggtacagcaggtagaccctgctgtaggagactaggaaggccacagcgaggagtcccagggagagcacgtgcctccacagcaagtccaggaacctggcgttgtttgtttggtgcattcttaaatacaggaaaaggaaggaatagacggagaagaaccacataaactgggaatggctggagggcatcccgtacttggtgcccactgctgtgtgggggcctccacagggccgtggctcctggatgacgtttttgatcagccagttgaccccctcgttcagtgccaggcccccaaggaaggagatcgtgtgcagctcccgcttaaatatgatgagggtcacgaaaccgacgatgacaatacagggctgaggctcaggtaggcaaggagtggcccagagagatcacctgcaggatattcgacgtgggtgagggtcccgccgccatgagcggggagcgagcctacctccgctcccctctccgactcaccgg

SEQ ID NO: 96466 - DNA, 968 bp, Homo Sapiens
catttaccaaaacattgcattaaaatattttctttcttttcctccggcaataaactctatacccctttattagcccattacaaacctgggaaactcagctattctattaccggcacttcatttaccaagtttccccataatcccttattatgacaccttaacaagtgaccccatcaatgaagtgaatgcacatttagactgtgccagagtaaaccacattctggattgctttctataattcaccacgttttcaggaagtaaacattctttgatttgttcataatatactgaagttacctataacactggtgcagtaacacagctagttcctctgtattgttatggtagaacggattttgtaatataaagttaacaggaaaaaatgctcacacattatgtgatgaaacttatcgcgagacaaagagcattaaataaaaggatagagggaaaataaaccatgcagaagagacggcttccccatctccacctgtttcccatgggctcactcattgccatacatcacttgccacactatcaagtgactcctttctgctttggtgacagaaggttcaagtggaagatcctctccaagaagttctgattctccaccttcatcacccattcggaagtcgatgtagccctctcctccactgatgacaagcatagacttcaagggcgtctgactaccaggctcctgtgcagatggccctgctttgtcacccgtcagatccgtgccactactgctactttgtgggctgatgacttgacctgggactgccacaaagaatttcacagcatcccggtgcccatggaagcaaagctgtgcatgtgccattgaacatagggtataaatgtcctggagtcactttatcactgttttcatcacccgacgcgtgggtcgacgatatcccgggaaatccgaccgtaccagcctgctttttttaccactgttcatattacgaagcgct

SEQ ID NO: 96467 - DNA, 929 bp, Homo Sapiens
  misc_feature (587)..(587): n is a, c, g, or t
tggtaccggtccggatatcccgggatatcgtcgacccacgcgtccgatctgacacaaacacagctgaagcaaacagaggtcctagtgacagctgaaaaattgtcttcaaatttacagcaccatttcagtttgtcatctgtttattcacattactttcctgacactggaattccagaagtgaccacctgtcattcccgaagtgccataactgtggattatattttctactctgcagaaaaggaagatgttgctgggcacccaggagctgaagttgctttggttggtggcttgaaacttctagctagactgtcacttcttacagaacaagacttatggactgttaatggacttccaaacgaaaataactcttcagatcatctgcctttattggcaaagttcagacttgagctctgactctctttgatcacatactaattttctttccaatttgtattgtttttcaaagaatgtaaagttcttaagtgtatgcatgtgtttatttttgcactgtggagattctgaagcggttatgttagatgctttgaaactccatatcagaagaaataactttataacaattttttttnaataatgaaaaatattttcgtgacaagtgagctctaaattctctttattgtcaaaagagatgtaaaggttttatattctaaatcctagtaaaattgaccagggattttaatataattgcatcttccctctgtctgttagttaacacatttccttcataatttggcagctcctgggcgggatccacaggctcttgaagttctggcacttaccagtgttctttcagaaggtgacttcattaggaagaccctctatgagtgctaattctttttctggaagcctgggtttccaagttccaccgcagttattgttgagggtggacactctaatgtgaagtattcttc

SEQ ID NO: 96468 - DNA, 1546 bp, Homo Sapiens
aaggcagacacgggcgggtgtgagacacctgctctgctatgtagaatgtgcggctgtcagtctgcgggtgaaccagcagcagcggaaggtctcccccaggatggggttgtacggcttcttgattcccttgggcttcttgtagaagccagacaggtaccaccgcagcaccagcttcatgcggctgtaggcatcctcctccaccgcagccctggagagcaggtctgcgtggtagtagtagtcggagagcttgttcaggaaggagcgcggctccagtacgaacgtgggtagcaccacgcgggacaggtccatgcctggccgtagctgcttcagcagggtccacatcagactcttgttctcctctgacactgtctccacctgggacgcctcgcccagctcccccagctcctcctggacctgctccacataggtggtccctctccgcaccggggccccaggggtctctgactggtcgctgccactctccgtcttccggctatggtcctgggtctcggtatctgactcctcagggttctctctctccgacttgtctgagaatgcatcgttctccagggaagacccgttcagtgggaacaggtcttggtctgggtggacggtggctgaggctggcagcccacagagcgatgagggtgatgcgtctggcgaggtccctggctccccgtctcggcccggctttcaggtgcccagtcctcagtaggctagagcagcgcagggccaagctccagggcgtccagccagcagcgaccatctgactcggaggcggccctgaagatcaggtagctgctgggcaggggcctgtgtgatggagcccacgctctcacctttggggcccttcacggcccagacggactgatccagcgggtggaagagcttgaagcagaagccgtccttcttggaggcacgctcgatgagctcgcagcagtgcagcagcaccgtgcccacccacgggcccaccttgggcgtcttgtagatgagcagcacccccggcttcagcacgcaccacagcttggtccagctcttcagggtgccgcggatcttcaggctgtcagccatgatgaccacgctggggtctgtcagagcgctgagcagctgccgtgtggcgcgcttcttctcctgccggtagttctccttctgcgccttgagagtctccttcttggtgaccctggcggtgggggacacacagcccttgtctgacccgttgcacagcctgtactctgccggtggcaccttcgtggcagagcttggggtcgggggcccttcatccctgggcagcgacgggccgttgggctccatgtccttccctgggctgagtgggtagagctcattgtctccgctgaggagcaagttccgggtgagcttccgggggtcgactttctgaggggtggaggaaggtggacacagggagaagcggcgccggaggaaggcctcctccattcatgctgtgggcgcatcgggggcttctcctaccgtgccgcgagctcggtgctccgggccggccgggcgcgacgggggctccactggcggcgcg

SEQ ID NO: 96469 - DNA, 1252 bp, Homo Sapiens
  misc_feature (1203)..(1203): n is a, c, g, or t
ggggcagtcgctgcagccgccgcgggaggcgtccgtgacaagatgaagctcatcatcctggagcactattctcaggcgagcgagtgggcggctaaatacatcaggaaccgtatcatccagtttaacccagggccagagaagtacttcaccctggggctccccactgggagtaccccacttggctgctacaagaagctgattgaatactataagaatggggacctgtcctttaaatatgtgaagaccttcaacatggatgagtacgtgggccttcctcgagaccacccggagagttaccactccttcatgtggaacaacttcttcaagcacattgacatccacccagaaaacacccacattctggatgggaatgcagtcgacctacaggcagaatgtgatgcctttgaagagaagatcaaggctgcaggtgggatcgagctatttgttggaggcatcggccctgatggacacattgccttcaacgagccaggctccagtctggtgtccaggacccgtgtgaagacgctggccatggataccatcctggccaatgctaggttcttcgatggagaactcaccaaggtgcccaccatggccttgacggtgggggtgggcactgtcatggatgctagagaggtgatgatccttatcacaggtgctcacaaggcatttgctctgtacaaggccatcgaggagggagtgaaccacatgtggaccgtgtctgccttccagcagcatccccgcaccgtgtttgtgtgtgacgaggatgccaccttggagctgaaagtgaagactgtcaagtatttcaaaggtttaatgcttgttcataacaagttggtggaccccttgtacagtatcaaagagaaagaaactgagaaaagccaatcttcgaagaaaccatacagcgattagcctgtgctgggacctagtgtcaagtacccatagggaaaggcaggtctttctggaaattgtctttagaagaaagaattgtatttctttaatctagtatggttactccagataagtgggtgaacttattgttcttggccatgaggctgggagcctagtcacggagtttagctatagggagaatgtttgtaacttaatcagaaaaaaaatatctgcaaaatgtactccatcattttgatgtctggccaaccccaggttggggaagttttaaacttttttgtttctggctttcanccatggggtccacacatatggacacacttccccgctccaaggaattttc

SEQ ID NO: 96470 - DNA, 938 bp, Homo Sapiens
gcgcaagcccagctccctcctgctaagggagtgcaaaggctcttcactgataggccatttgcagacactgagcccgtgacatgcagggtgcctactgcacattccctgcctcggtgctggcaccggtgcctacccactcaagcagtctcagagcttcagcagaagccctgtggcaacggccacatcctgctaaaactgggatggaggaatcggcccagccccaagagcaactgtgatttttgtttttaagactcatggacatttcatacctgtgcaatactgaagacctcattctgtcatgctgccccagtgcagatagtgagtggtcaccaggcttgccaaatgaacttcagacggacctcagggtaggttctcgggactgaaaggaaggccaagccattacgggagcacagcatgtgctgattatgtacttccagacccctgcctctttgggactgcccagtcctttgcaacctcagagttcgcctttccatttcaagcataaggcaataactacctgcagcaacgtgggagaaagaagttgctggcacaggagaaaaggcagttatgaacccaattcatttgaaggaagcacaatttccaccttatatttggacattggcagtttcaaatgtctggtcttctggtggcttcggggcataagctgattcagcggtctagtttgggaaaagtcacacttaacgggttttgtaggggacatgatccggttcctggatttgaacctttaaatgttgttgttaacaccctttgggtgtcacatgaggaattgttaatagcaacacgttggcgtcttggaaattgggaggggattccagagcatggggggagaattaaatacagcaagtgtctcccttttcggaacttctgtgaagagtgcaaaaaaagatttctgggggaacggggcacgtattctggga

SEQ ID NO: 96471 - DNA, 843 bp, Homo Sapiens
caaattaaaataaagtggttttaatcattagcagaacaagagcaagcagtaagtgttgatcaccccattggtggagtgaggggtggagggagtattaataaatgctttgaaaaaaagtttctcctcttagcggtaaggtccgggatcacttactcccagcagcatccgaggctcccgagagccatttctggtgctggtctcatcccaggaatgtgtgtggagcacctgctctgaaccggcactggtgctggggtacttgctggggaatacgagatgaccccagctttctaggagctaaatgggctgatgagccgtaggcagggactatggcagaagggagaaaaatagaaagacatagatttcatgacggagctatggataatcgggacaccaaaaaataaaccttggcttcatatactggcctgatgccttggcctcaatcccgcatcctaaaaccaggcgggactatggggtgacacaggtggggatcccatttcaagtgcaaaatttaggggggccccaaaagtccccatagtcaatataaataaacatttaaggcaatggtctaaaaataaaatttcacttttaaaatgtccctcatagacaactttggaaatgtcgggaccaagaagcctgaactttgaagaagtggctcttcctgctacaccttatcgtgggcccctggtccaatcaaaattccatccctataaagggggccagggcgggaagtgtaacgggtgttaagaatatgtggtcacaaaatagatcattgggacaattaacatcgagttcagaaaagagggctggtaataacctatccagctggggaagttctgaaaacag

SEQ ID NO: 96472 - DNA, 1001 bp, Homo Sapiens
acaattcagtaaatatttatggggagcttattatgtgtcaaatgttgtgtcagacttggggaaattaacaatgtacaaaacagatactccttactagaatgtgcaagtctagtaggagacataaaataatgaacaggcaattataatacggactaaggtattgtaacaggggtcatgcaggatgctataagagtacctaaaaggggactcttacccagacttaggacatcaggaaaagcttcctagcagataaatcatgtctcagctgggggctttaagacaaatattagcaaggaagggaaaagaaaaaaattccaggcacaggtgaactaaagatctttacgaagtttcaaagacaggagaaacaatgacccgtgggaaaaacagtaaaagttggataggcctggaaccgggaaaggcacggtcctaagttatggagccaaatagtcagagggccttgtaaggcagctacactttctcccgtgcaggacctggagaggggcactgataatacccaggagtaggtgtgcattagaagaaaataacaacacacaacagaacctgttattctggcacggtcagcctagggcctacatatcaagataaacaatacaggaagcaaggagacttaccactgttgccagattatcgaatagaaggttgccgccatcataacagaatgtcgcaaaccctctcgacgaacttattcgcacttgtcacataagcagctgcaacgcatcaacattcccccagcgtatataccgtactggagccccacaaagcacgtcacgacgagcgaacaacccatgggtccagcgattacgaacacccgacccgctggggaagccaacctccgacacgcgaagaacgaaacgccaagaccctgacccacacgggaatgggcagcctgtggagaacatagccgtcagatacgccgcaccagactaccacggcaggtcccaggacacacaggcgaccggggaacgaaacgacaacaaggg

SEQ ID NO: 96473 - DNA, 1211 bp, Homo Sapiens
aggctggaccggccggattcccgggatctcggacagcggaaatcacttcttggaggtgccctgcacgccggtcctgggagcaggcggcctcccgggggtgcgggagccccactcctccgtggtgtgttccatttgcttcccacatctggaggagctgacgtgccagcctcccccagcaccacccagggacgggaggcatgagccggtcaaggcacctgggcaaaatccggaagcgtctggaagatgtcaagagccagtgggtccggccagccagggctgactttagtgacaacgagagtgcccggctggccacggacgccctcttggatgggggttctgaagcctactggcgggtgctcagccaggaaggcgaggtggacttcttgtcctcggtggaggcccagtacatccaggcccaggccagggagcccccgtgtcccccagacaccctgggaggggcggaagcaggccctaagggactggactccagctccctacagtccggcacctacttccctgtggcctcagagggcagcgagccggccctactgcacagctgggcctcagctgagaagccctacctgaaggaaaaatccagcgccactgtgtacttccagaccgtcaagcacaacaacatcagagacctcgtccgccgctgcatcacccggactagccaggtcctggtcatcctgatggatgtgttcacggatgtggagatcttctgtgacattctagaggcagccaacaagcgtggggtgttcgtttgtgtgctcctggaccagggaggtgtgaagctcttccaggagatgtgtgacaaagtccagatctctgacagtcacctcaagaacatttccatccggagtgtggaaggagagatatactgtgccaagtcaggcaggaaattcgctggccaaatccgggagaagttcatcatctcggactggagatttgtcctgtctggatcttacagcttcacctggctctgcggacacgtgcaccggaacatcctctccaagttcacaggccaggcggtggagctgtttgacgaggagttccgccacctctacgcctcctccaagcctgtgatgggcctgaagtccccgcggctggtcgcccccgtcccgcccggagcagccccggccaatggccgccttagcagcagcagtggctccgccagtgaccgaacgtcctccaaccccttcagcggccgc

SEQ ID NO: 96474 - DNA, 1807 bp, Homo Sapiens
tgcggtgggctgggctgcttgttgtgatacggcatcgcgggtcgactgtgatgagtcatcatgtggctctctgtgtctgtgtcctcatcttcatgtgaatagctgccgcggctgcgatctggtctaccttgccttggcacgatgttgttgagcgactgacgcgtgccgcggggcggccggtgtgagtcacggttgtgtgctagcgaacgcggaggatcccgtgtgttgtgtgggcgccgctgtaggcgggctcattgattttgtgggctgcctcccctctgttgtatggcatcacctcgtggttggtgtccgaacgataagagcggctgccggcgttggtggttgatgcggccgcgtgtctccgtggcggggttgtttcgcgctgggggagatgatgtctgggttgttcgatgactcccacgtgcgcggttgtcgccgccgggatagccgcgcctgttggggggggtgtcaccgaggcccgccgcacataggtggatggggttgtctggtataccacagcgagagctgttgttatcgtgtttgtggctgcgtgcgggttgtgttgtatttcgagtgggtggggggggtgttttggagttgtacgacggccgtttgtgtgagtgggatgtgttcggatcggcgcgcccctgtgtcagtgggaggtgggcaacgtgttgggtgcggcccggtgggagttgtggtgggtgcgtgtgttgtcgcctgatgggtctttccctggggttgatatgggggcgcggctgcttgtgtttgtcggccttgggatagcagaacgctttttcgagggccagcggtgcctcttgtgtatcctgtggtgatgcttgtgtgagtgtgtaggtgcgtgtgtgagcacaaccttggtgtttctatggagggacggggcctcgtcaacggggggagatgagtttaagtggtgtgtactccgccgcgttgctgttggggaggccgtggtgtggcgcgctggggcgccgcggccggcacggtgcgacgttccctgtatgggtggccccgctgcatcttgtcggccgcccgtttcggcccagattgcctcgcctaataccgcgcgaacatcccccctgttgtaggccactgttacccaccgcagcccgagaggtgttcacacgcgagatgtctccgctctccctctctatgaccacgtctcgcagagtgtcccatgtttgtggcccaccccccacacttgggttgatacttcgagagaccctcatctcgagggtgacaccacccgcagagctattcgcgcgcgcgagcactatatatttctgtgcacaactttccctatacacatatacttttctccccgactctatatttcgtctatagagaccacacgcggcgagcactctcggcgagactctccttctgagacgcgttagagacacacattcgagagaatgtgatactctctccgcagattgtagaagcgcgccgcacatgttgggtattataatagaatgtatcactctaccacaagagacgttcgttgtcacactcacatgagagctgtgccccaccacattatgggcttataaaaccacgagatgcacacatgttcccggagacggtttatagaccacaaccacctttcacccgctaacaccgagccgcggggtaataactatcggtcacaatgcttctgaaaaatctgtggaggcacaaaccaccacgtttcaatgcccactcgtcctatgagaattaaattccccttaaaaatctttgaaatagggcccgtatttaccctatagcaccccctttaccccctttagagccc

SEQ ID NO: 96475 - DNA, 1346 bp, Homo Sapiens
cgacccagaggggaattgcaagtgcctgggggacggtggcaatgggacacgcgagccaacgcgcaccgtgagacgccaggctggctgggctctgcccgggtggcggccctgggagggatgtcgaacgaggtgccccgagatatttggcgtgccgacaccttcgagggccagccctgacaagcgtcgcccaggccgatgaaggataagccagagaccggcagaggaaggcgctcaactcgacgccccgtgcgggtcgagggctgcaggacaacaagcggggtccctgtcccaggccccgggacaatcgtgtgcaagcccagacgacaagatgctcgtcttgagaccccggtgtcgtcgtcggagtgagcccgacaccacgttctccccaaacagtccccaagccaccagctggtgatatccgcatgtgataaggcacttctgtccaattacaagtggaccaggccagaaagatctataatagtccccagccgcatgtggggatagatgaggcgcgacagaggccattcacggtcttgagggaacctggcggcttgtaatgtttatccgtgttgaaaccttttcgtcctatcctgggtacacgaagggaactgttctgcccacggagcctgagcctcaggctgttggagaagcatctgatagcccttttctttgctgggggtcttctacgtgagggtccttggcgttgtttaaggtcaactccaccaaatacagcaaccagctggggcttgagcaaaaagacccccaccaaaaacagcacccttgtcaagccgcctcggcccctcgaaaaacccttctcaagacccattcgcttgggcagcgccgggacccccataacgccaaagcgaaacaaggggcccaaacatgggttctccctagggaaaactcccggggcaatagacaccagacggcctttgccaacgtcccccagcccgtaacaagaaacagcggcccgccgcgagcggcgaaccccctaaagcggaagacttggtaccgccaggtcccccagaaccgcgaggccgcccgccgcccacgccacacatcactctgaggccgacgtgtccaaaaacgtagcagccccactccagagcgcgataatccacgcgctgcgacgaccgatagaacaaaccccgcagcacgcacagccccctcgcgcagtgctcaacagatacaagccggctggtatgaggctgcactcgatgtcgcaggagataaagaacgaagaggaaatagaagagaataagcaccaaacgacacaaaacaaccacggccggatctacgcggcagctgcgtgacgaggtcgacagcgtcggggagcgcatatggcg

SEQ ID NO: 96476 - DNA, 1640 bp, Homo Sapiens
  misc_feature (1052)..(1061): n is a, c, g, or t
  misc_feature (1288)..(1289): n is a, c, g, or t
  misc_feature (1298)..(1298): n is a, c, g, or t
cctgttctccgccgggcaccgctttgtgctcattgccgcctttgtttgggggccagcatgattgatgctacgcatgggttgtgcccacagaaagaccgagtgttggtccctcgggttccggggatttccctcggtgatattttcgtgtacgacgaccacgcgctttcctcgtgcccacagcaccccctattgccggtgtgggccaaagacacccacgcccccccttttcccggaagggccgcgcccacaaaaatgggggcgccccctacaggaggaaagagtgtggttgtggcaccaccagagttgttcgtaaaagaagaagaattatgggtaaatgagaatgaggttgagaaacggccaccacgcccgtagatagggtcgccgccaagaaataaaggagaaatatagtttgggggaagacgaaccacgcggttctggtccacatccccccgggggctcccctcaaggggggacccccacgaaatgttggccacaattcttgggaaatggggttctttccacaaagggtgttcctcgttgggtgtgtttttttggagaaagtggaaggttcctctttgccgtgtgtagatttatcgccccaaggaaaattgtgatttgggagaagagtttggcgccatttgttattatgggggaaaaaaatgcttctacaagatccctgggagagttgtatttctcgtagaaaggaataggtgttgttctccaccgcggcgttattaaaaaaacctcttgcccccctctggaagccctataaaaccttttcccacacctggggcgccactcggggagttttctctgaatgaccccgcgctggtagcccccagaaaaattgggtggtgtttcacaactcgggtttcccacacaaaatatttgggcccacagagcacccaacttgagattttgaaaaggccttctccacccctctgtgagagtgtctcacacagagctcatccccccgagcttgggtgtgatactctgggactctttctgtgtctctgtgtatctctgtgtgttttgggtgttttacactcatnnnnnnnnnnctctctcacccccactttcacagagttaccccggagaaagacgcccttctctttattttgtctctcacgtcactccccacacacgggtgtcccgcgcacacatttccgccgagaatgagaagagttgtagtttggagaattatcactggagaccccgcagagagggtgtggtcacagacccacacatatgagactcttgagaaagagaagtgggggtgtcacataannattggagtntcccacgagcacgccacttggaggaacaagacacactatggaaaagggctctgccccactgtctatttgtattcctctctcccactcgagaggttctttcggttatgagaaaagtataaaaatgtctcgagaaggaggccccaagtttgaaattggggaaagctcactggaggctttcactggtgaagcgcacgtaagtttctggaaaaaaccacctcggggaacgagacacacggtgctataaagttgaaacgcaggctgaatggaatatgaaccccccgtcccagaaatctgttttaagttcagacttccaatagtggccaattaaaagtgctatttgtg

SEQ ID NO: 96477 - DNA, 1014 bp, Homo Sapiens
  misc_feature (139)..(139): n is a, c, g, or t
  misc_feature (153)..(153): n is a, c, g, or t
aggcaagcttcaaaaggggggctgggtaccaggcaagccccctttttgggtaccaagggccgggcctgggaggcggattgtagccacctccagcgccctcgtctgtgtcccgccgcctgcacggctgctggcgaggcantgacctcccccctngccctctttttcacctgcagactcaaaatgccgctccaaactccacaggagggaagaactctgtgagctcaaggagctgtcactgccatccacagaggtgcccacggattcctgagaggctgggatctgggcgtcatcattgaggcctggaggtgcctccttggtggggcgacctgcttgggggtgtgatgcttccatgatgcttcctttgatgtcgggggcccttggtcttagcaggtcccttgggcctatgggccccaggtcctgtggtggcctcctgctgggcatggacccctgcccttgaaggcttgtaggtctgggaggcgagggtctggcagtgaggcgcctgcaacagcggctgtgaggactggctctcgtcctcggagtctgagtccagggtctggtgagtgtactggaatatctccttcagcttcagaaccatctggcgtttaggcagagggcggactccaaacctatccagttccttcttcagcaccggcgtctccataatggaatactgtggcatcggcgttatgggcactttggggggcaagttcttcttccgattagcacctttgggtgtctctaacccttcgggcttctgagctccaccagcgcttggcatctgggccggaggaggggtctctggaggcctctgctcttccccgtcccaaacgtcccacagagccgaattcagaaagctcggcctgctattccccagggagcccgcgcccgaggacttctcttgcaatttcctctgggtagtgcagcttcctcggatgggggtggtgtccaggagtcccggggagcgacagtcacggccggacgcggggtcgacgatatcccaggaattccggaccg

SEQ ID NO: 96478 - DNA, 1106 bp, Homo Sapiens
  misc_feature (912)..(912): n is a, c, g, or t
  misc_feature (923)..(923): n is a, c, g, or t
  misc_feature (1074)..(1074): n is a, c, g, or t
  misc_feature (1082)..(1082): n is a, c, g, or t
aaagccaattaatactatgaacaagtgtgtaaaaaaagcaggctgtaccggtccggatatcccgggatatcgtcgacccacgcgtccgggacgtggggcttttgcagctcagctggttccggctggggaagatggcggtggctggggcggtgtccggggagccgctggtgcactggtgcacccagcagttgcggaagactttcggcctggatgtcagcgaggagatcattcagtacgtttgtcaattgagagtgctgaagagatacgagaatatgttactgatctcctccagggaaatgaaggcaaaaaaggtcaattcatagaagaacttataaccaaatggcaaaagaatgatcaggagttgatttcggatcctttgcagcagtgcttcaaaaaagatgaaattttagatgggcagaaatcaggcgaccatctaaagcggggtaggaagaaagggagaaacagacaggaagttcctgcatttactgaacctgacacgactgcagaggttaaaacaccttttgatttggccaaggcacaagagaacagcaactccgtaaagaagaagacaaagtttgtcaatttatacacaagagagggacaggacaggcttgcagtcctgctccctggtcgtcacccttgtgattgcctgggccagaagcacaagctcatcaataactgtctgatctgtgggcgcattgtctgtgaacaagaaggctcaggcccttgcttattctgtggcactctggtgtgtactcatgaggaacaagatattttacagcgtgactcaaacaagagccagaaactgctaaagaaactcatgtcaggagtggagaattctggaaaggtggacattctcttacaagggacctttcttcctcatcaagaattgcgaattaagtctggtctggnagaaggctatncagcataaagaccaactgttagagtttgacagaactagtattcgaagggacccaagtcatttgatggatgagtcagaataactttgccagtgtgattcctaaccaatgggttggtcccaaaccttggaagcggggaaaaaccctgggccgnaaaccccnaagaagggaggggagcctggaaac

SEQ ID NO: 96479 - DNA, 1292 bp, Homo Sapiens
gggacagcgcgtcgcggcagcccccaaggaagaccagcctgcctctggtcggttcctggcgctctgcgtttcgtgaccttgtccagtagaaggctatttaattttcacaactgcttgaattttgacatacaagatgaagcaagatgcctcaagaaatgctgcctacactgtggattgtgaagattatgtgcatgtggtagaatttaatccctttgagaatggggattcaggaaacctaattgcatatggtggcaataattatgtggtcattggcacgtgtacgtttcaggaagaagaagcagacgttgaaggcattcagtataaaacacttcgaacatttcaccatggagtcagggttgatggcatagcttggagcccagagactagacttgattcattgcctccagtaatcaaattttgtacttcagctgctgatatgaaaattagattatttacttcagatcttcaggataaaaatgaatataaggttttagagggccataccgatttcattaatggtttggtgtttgatcccaaagaaggccaagaaattgcaagtgtgagtgacgatcacacctgcaggatttggaacttggaaggagtgcaaacagctcattttgttcttcattctcctggcatgagtgtgtgctggcatcctgaggagacttttaagctaatggttgcagagaagaatggaacaatccggttttatgatcttttggcccaacaggctattttatctctttgaatcagaacaagtgccatttaatgtcagccacactggtgcttaaaaaacaccttccaaagttggagccgttgcacggaaaagatgtggttaattttgggatattactcggtccagtgtatcgctcagaaataagagacctgttcacatggatcgagcctgcttattcaggtggtccacaattagtgaaaatctgtttgcaaccactggttatcctggcaaaatggcaagccagtttcaaattcatcatttaggacaccctcagcccatcctcatgggttctgtagccgttggatctggactgtcctggcatcgaactctccctctgtgtgtaattggaggagaccacaagctgttgttttgggtgactgaagtataaagtgttttctgtaccttagattcacaaactttgtatttttagtacatatggttgaagaatttctatagtacatattttgaagaattaatacatcaaatataccgtatactttagaaaatgtctcagttgcttttattaaataaaatgttgatggtttgaaaaattaac

SEQ ID NO: 96480 - DNA, 1272 bp, Homo Sapiens
  misc_feature (864)..(889): n is a, c, g, or t
ccggaattcccgggatatcgtcgacccacgcgtccgacaaaatgaatttatactcactgtgtaagaagatagaacagtgtgactacccacctcttccttcagatcactattcagaataactccgacagttagttaatatgtgcatcaacccagatccagagaagcgaccagacgtcacctatgtttatgacgtagcaaagaggatgcatgcatgcactgcaagcagctaaacatgcaagatcatgaagagtgtaaccaaagtaattgaaagtattttgtgcaagtcgtacctccccatttatgtctggtgttaagattaatatttcagagctagtgtgctttgaatccttaaccagttttcatataagcttcattttgtaccagtcacctaaatcacctccttgcaacccccaaatgactttggaataactgaattgcatgttaggagagaaaatgaaacatgatggttttgaatggctaaaggtttatagaatttcttacagttttctgctgataaattgtgtttagatagactgtcagtgccaaatattgaaggtgcagcttggcacacatcagaatagactcatacctgagaaaaagtatctgaacatgtgacttgtttcttttttagtaatttatggacattgagatgaacacaattgtgaacttttgtgaagattttatttttaaacgtttgaagtactagttttagttcttagcagagtagttttcaaatatgattcttatgataaatgtagacacaaactatttgagaaacatttagaactcttagcttatacattcaaaatgtaactattaaatgtgaagatttgggggacaaaatgtgagtcagacactgaagannnnnnnnnnnnnnnnnnnnnnnnnngatattctctttgcattgaaatggtataaatgaatccattttaaaagtggttaaagttgcacattgcccaaggctttttttgtgtggttttattgttgtttgtacatttgaaaaaatattctttgaataacctttgcagaactatatttccaatttctttaatagactttaagtggcatttttaactcattaattggtacaattaataatataagcccctaagttttttatttcataaggtttttatttgaagtttctggattggggtccccctttcaaaaaaattttttttgaaacataattccttgccagggttaacactttccttaaatttaaaaaacggggaatggggggcattttttttcttcccccctttaaaagga

SEQ ID NO: 96481 - DNA, 878 bp, Homo Sapiens
ggagctggccgccggaagcttctcggaggagcagttctgggaggcctgcgccgagctccagcagcccgctctggccggggccgactggcagctcctagtggagacctcgggcatcagcatctaccggctgctggacaagaagactggactttatgagtataaagtctttggtgttctggaggactgctcaccaactctactggcagacatctatatggactcagattacagaaaacaatgggaccagtatgttaaagaactctatgaacaagaatgcaacggagagactgtggtctactgggaagtgaagtacccttttcccatgtccaacagagactatgtctaccttcggcagcggcgagacctggacatggaagggaggaagatccatgtgatcctggcccggagcacctccatgcctcagcttggcgagaggtctggggtgatccgggtgaagcaatacaagcagagcctggcgattgagagtgacggcaagaaggggagcaaagttttcatgtattacttcgataacccgggtggccaaattccgtcctggctcattaactgggccgccaagaatggagttcctaacttcttgaaagacatggcaagagcctgtcagaactacctcaagaaaacctaagaaagagaactgggaacattgcatccatgggttgatgtctctggaagtgcaaccacccaatgtctctggaagtgccacctggaagtgcccacctggaagtgtctctgggaagagcacccaacaatgttcagccttcccctgctgtgtctgtcttcagaggcctacacactacacatcctttctaagcatgttgcctgacatccagctcactcgtctgctccttctacgtccccga

SEQ ID NO: 96482 - DNA, 1848 bp, Homo Sapiens
  misc_feature (257)..(462): n is a, c, g, or t
ggtccggaattcccgggatcccgcccgttgtccccgcattccccgacgggagcgccatggcccagccgccgcccgacgtggagggggacgactgtctccccgcgtaccgccacctcttctgcccggacctgctgcgggacaaagtggccttcatcacaggaggcggctctgggattgggttccggattgctgagattttcatgcggcacggctgccatacggtgattgccagtaggagcctgccgcgagtgctgacnnnnnnnnnnnnnnnnnnnnnnnnnnnnnnnnnnnnnnnnnnnnnnnnnnnnnnnnnnnnnnnnnnnnnnnnnnnnnnnnnnnnnnnnnnnnnnnnnnnnnnnnnnnnnnnnnnnnnnnnnnnnnnnnnnnnnnnnnnnnnnnnnnnnnnnnnnnnnnnnnnnnnnnnnnnnnnnnnnnnnnnnnnnnnnnnnnnnnnnnnnnnnngtgtgaaccactgtgcccagccggcaccaaaacttgcacctatcctaaatatggagcttcagtgccgccaggaagctggctggggccaccggccggcgctgcctccctctctctatggacgtccgagcgcccccagctgtcatggccgccgtggaccaggctctgaaggagtttggcagaatcgacattctcattaactgtgcggccgggaacttcctgtgccccgctggcgccttgtccttcaacgccttcaagaccgtgatggacatcgataccagcggcaccttcaatgtgtctcgtgtgctctatgagaagttcttccgggaccacggaggggtgatcgtgaacatcactgccaccctggggaaccgggggcaggcgctccaggtgcatgcaggctccgccaaggccgctgtggacgcgatgacgcggcacttggctgtggagtggggtccccaaaacatccgcgtcaacagcctcgcccctggccccatcagtggcacagaggggctccggcgactgggtggccctcaggccagcctgagcaccaaggtcactgccagcccgctgcagaggctggggaacaagaccgagatcgcccacagcgtgctctacctggccagccctctggcttcctacgtgacgggggccgtgctggtggccgatggcggggcatggttgacgttcccaaacggtgtcaaagggctgccggatttcgcatccttctctgctaagctctaggaatcttccggccgctgcttcctgccgcctcactcagccaggtggagagcaccaatctgaaccagcaatgcctgcagcccagcccctcctctgaacactcagctattactgcgctttccctccccacggccccaactccagggcaggagcaactggacagtgggcctggcccgtggagctgccacgcaggtgcctgagggccaggtgccacgcaggtgtctgaggaccaggtgccacgcaggtggtgggggtacagacaagatgctgggatgtcccctgccccatggtcaagggtgtcctgcctgcctgggtccagggcctgagggagccacatggatcccgagacttgtgttctcttggctgaaaacactgaggtgctcccatctgtgcgtggcccatgagctgggatggtcctccagctgcccacaaaggtccgcccctctgtctctgcaccacctgtttgcataaacacactttgctacaatcttgctagtgcgttttcttaaacagataatctattttactgtacacaacttacttgggactttggcaaaagcttttagaaggaaacgaaccgcacggattacagagaattgctggtgatccttaaaacaacactcaacctcgctataaacacaagggggg

SEQ ID NO: 96483 - DNA, 1045 bp, Homo Sapiens
  misc_feature (118)..(118): n is a, c, g, or t
taaaatttccccgtttgaaaaattggggttttgaaggggtttttaattggaggattcattaacccccaggccagggctttgggcccttcttttttccagggaggtgggaatttcccancaggcaggcacctggttgggctgaccatgtttgaaaggagggcagcgggcgggaatacctaaagccctccttgagttccttcaccaggctgccaggcgttcaaagcatcgcacaagtttataaatccaggggctccatttagaacctgtgatgggaagcttgggctgccagtgtgtacagctgggcaggggtctgatgtgggttcattccatatctcaagggcatctgagatacgcctttgctgtactgtttcctgaaataatctgaaattgcttcatcatattgtgccgtatgagtgaatgccttcaaggctaactggcgtctagtctccaaggaggtgtccttactctcggagctctgcatctccgtggacaccaccacatagtcctctggttcacacaccactgtcactcgagcgtggtttttggctgcagctctcagtaaggttactccaccaatgtcaatttgctccacagcctcctcaacacttacacctggagaagccactgtctttacaaagggatagagattgcaggcaacaactcttataagattgaaatcaagtctggccatgtcagcattatcttctggaatattacgagctaggattccagcatggactgcaggatgcaaagttttcacacgtccccccaacatttcaggaaatcccgtcaactcagagacatctctgactgccagaccagcatccctgagagcttttgcagtccctccggaagcgaccagattcaaaccaagagcggtcaggtttcttgcaaattccacaaggccggttttgtcagagacactaaataaggcgagctggccgggagccatggctgcaggcactgggttcagggcgagcgggaggcagcagcggcggcaccacgtcgccggtaggagcctcgtccggaattcgccacccaggcc

SEQ ID NO: 96484 - DNA, 1194 bp, Homo Sapiens
ggtaccggtccggaattcccgggatatcgtcgacccacgcgtccgcccggcagccctcctaccggcgcacgtggtgccgctgctgctgcctcccgctcgccctgaacccagtgcctgcagccatggctcccggccagctcgccttatttagtgtctctgacaaaaccggccttgtggaatttgcaagaaacctgaccgctcttggtttgaatctggtcgcttccggagggactgcaaaagctctcagggatgctggtctggcagtcagagatgtctctgagttgacgggatttcctgaaatgttggggggacgtgtgaaaactttgcatcctgcagtccatgctggaatcctagctcgtaatattccagaagataatgctgacatggccagacttgatttcaatcttataagagttgttgcctgcaatctctatccctttgtaaagacagtggcttctccaggtgtaactgttgaggaggctgtggagcaaattgacattggtggagtaaccttactgagagctgcagccaaaaaccacgctcgagtgacagtggtgtgtgaaccagaggactatgtggtggtgtccacggagatgcagagctccgagagtaaggacacctccttggagactagacgccagttagccttgaaggcattcactcatacggcacaatatgatgaagcaatttcagattatttcaggaaacagtacagcaaaggcgtatctcagatgcccttgagatatggaatgaacccacatcagacccctgcccagctgtacacactgcagcccaagcttcccatcacagttctaaatggagcccctggatttataaacttgtgcgatgctttgaacgcctggcagctggtgaaggaactcaaggaggctttaggtattccagccgctgcctctttcaacaggtcagcccagcaggtgctggctgttggaatcccactcagtgaagatgaaggcaaagtctgcatggtttatgatctctataaaaccctcacacccatctcagcgggatatgcaagagcaagaggggctgataggatgtcttcattttggtgattttgttgcattgtcccgatgtttgtgatgtaccaactggcaaaattattttcagaaaaagatctggatgggataaattgcccccgatatgaagaaaaaaccctggacaatacttttccaa

SEQ ID NO: 96485 - DNA, 825 bp, Homo Sapiens
  misc_feature (695)..(695): n is a, c, g, or t
ggtcggattcttcgaatcgtcgaccccgcgtccgattaactgtaaaaaataagtatttttatatagctctcatggattttattaaacagaattggctcaaaaatactatgttacagactgttgggtacccttgcctaacgtgaactggcagtgttaccttgcttttgcagtaatagtctacagattgcaggtctcatcaattccatccaaagtttaaaagcatttaaaattaccaaatctttaaaatcactttggtggtgattccaaattggtaccaagcaaactttctggatgcccaacatgattttcagtaaccaccctttagagtatttgtttactaagttcaccacattttgaacatggtagttttagactgcaataatatttagacttacattattacttactgctaagtaaaatctaaatcctgcaaatgcacagaattcaagctgaaatataatgatttatgtttagctcacattgaagtattggttggttacttatgtattaatgcagtgtgcattcacatttaatcaggtttagtctgtttctattttaataattttaaaaaattatacaagcaaattagatattagacatgttagttacaatggtaacacatttttaggtgtcgaaacacaattttcaaaattcctaatgaaagttataaaaatgtaaacaagaatttgtaaaantggacaaagtagtcaaatatatttccaaagcacaatttttattagacaggccataatttacatttttgcttttctaggtgggtttgaaaatgtttattgggagattggggctatgtagttttataatttt

SEQ ID NO: 96486 - DNA, 1205 bp, Homo Sapiens
ggtccggaattcccgggatatcgtcgacccacgcgtccgcctggctcccagctggtgctgaagctcgtcagttcaccatccgccctcggcttccgcggggcgctgggccgccagcctcggcaccgtcctttcctttctccctcgcgttaggcaggtgacagcagggacatgtctcgggagatgcaggatgtagacctcgctgaggtgaagcctttggtggagaaaggggagaccatcaccggcctcctgcaagagtttgatgtccaggagcaggacatcgagactttacatggctctgttcacgtcacgctgtgtgggactcccaagggaaaccggcctgtcatcctcacctaccatgacatcggcatgaaccacaaaacctgctacaaccccctcttcaactacgaggacatgcaggagatcacccagcactttgccgtctgccacgtggacgcccctggccagcaggacggcgcagcctccttccccgcagggtacatgtacccctccatggatcagctggctgaaatgcttcctggagtccttcaacagtttgggctgaaaagcattattggcatgggaacaggagcaggcgcctacatcctaactcgatttgctctaaacaaccctgagatggtggagggccttgtccttatcaacgtgaacccttgtgcggaaggctggatggactgggccgcctccaagatctcaggatggacccaagctctgccggacatggtggtgtcccacctttttgggaaggaagaaatgcagagtaacgtggaagtggtccacacctaccgccagcacattgtgaatgacatgaaccccggcaacctgcacctgttcatcaatgcctacaacagccggcgcgacctggagattgagcgaccaatgccgggaacccacacagtcaccctgcagtgccctgctctgttggtggttggggacagctcgcctgcagtggatgccgtggtggagtgcaactcaaaattggacccaacaaagaccactctcctcaagatggcggactgtggcggcctcccgcagatctcccagccggccaagctcgctgaggccttcaagtacttcgtgcagggcatgggatacatgccctcggctagcatgacccgcctgatgcggtcccgcacagcctctggttccagcgtcacttctctggatggcacccgcagccgctcccacac

SEQ ID NO: 96487 - DNA, 827 bp, Homo Sapiens
gagagagtatgaagtcgacggcgcgccgaattcggcacgaggggtgacagcagggacatgtctcgggagatgcaggatgtagacctcgctgaggtgaagcctttggtggagaaaggggagaccatcaccggcctcctgcaagagtttgatgtccaggagcaggacatcgagactttacatggctctgttcacgtcacgctgtgtgggactcccaagggaaaccggcctgtcatcctcacctaccatgacatcggcatgaaccacaaaacctgctacaaccccctcttcaactacgaggacatgcaggagatcacccagcactttgccgtctgccacgtggacgcccctggccaacaagacagcgcaacctccttccccgcaaggtacatgtacccctccatggatcaactggctaaaatgcttcctggagtccttcaacaagtttgggctgaaaagcattattggcatgggaacaggaacaggcacctacatcctaactcgatttgcacaaaacaaacctgagatggtagagggccttgtccttatcaacgtgaacccttgtgcggaaggctggatggactgggccgcctccaagatctcaggatggacccaagctctgccggacatggtggtgtcccacctttttgggaaggaagaatgcagagtaacgtgaaagtggtcacacctaccgccacacattgtaatgactgaaccccggacctgcactgttcatcatgcctacaagccgcgcgacctgaatgacgacaatgcggaacccacatccctgatgccgcttgtgtgttggacacccgcatgatctgtgatca

SEQ ID NO: 96488 - DNA, 230 bp, Homo Sapiens
tagctggtccggctgcgggtgccatccagagaagtgacgctggaaccagaggctgtgcgggaccgcatcaggcgggtcatgctagccgagggcactaggggaacaagagacagccggttagagggcaggagactgccaggtgaggagccaggcatgcccgtccaccagccacatgctcttctacgtgccagccccagagaagacttgatccctgcagccttcagataaaa

SEQ ID NO: 96489 - DNA, 703 bp, Homo Sapiens
  misc_feature (680)..(680): n is a, c, g, or t
  misc_feature (686)..(686): n is a, c, g, or t
tacatgatacaatcgagctcggtaccgaacgggtgatgcggttgtagacctcgctgaggtgaagcctttggtggagaaaggggagaccatcaccggcctcctgcaagagtttgatgtccaggagcaggacatcgagactttacatggctctgttcacgtcacgctgtgtgggactcccaagggaaaccggcctgtcatcctcacctaccatgacatcggcatgaaccacaaaacctgctacaaccccctcttcaactacgaggacatgcaggagatcacccagcactttgccgtctgccacgtggacgcccctggccagcaggacggcgcagcctccttccccgcagggtacatgtacccctccatggatcagctggctgaaatgcttcctggagtccttcaacagtttgggctgaaaagcattattggcatgggaacaggagcaggcgcctacatcctaactcgatttgctctaaacaaccctgagatggtggagggccttgtccttatcaacgtgaacccttgtgcggaaggctggatggactgggccgcctccaagatctcaggatggacccaagctctgccggacatggtggtgtcccacctttttgggaaggaagaaatgcgagtaccggggacgtggtcacacctaccggcaggacattgtgaatgacatgaancccggnaaccgcatcacccgtgc

SEQ ID NO: 96490 - DNA, 1042 bp, Homo Sapiens
  misc_feature (466)..(479): n is a, c, g, or t
  misc_feature (502)..(754): n is a, c, g, or t
  misc_feature (763)..(836): n is a, c, g, or t
tcgtgacttcccaggagggaaaaaatgtgtttatttatttaaattaaaaaatattgtgaaaattacaaagtgttaaatacaaaagacaattctatacaactcaacagaataagaaggaagtatatacatcactttttaataggtgcagagagacttgcaccaaacttcaggattaagcaatggaaaatgtgacaaggcacatgtccgtcgcagtgaaatttcagaattcaagtgattccaggcaagaggccaaacttaacttggcttctttcaacttaaacagccccctttggcataagtccacactgaattttaaagtgaacagagggcctttttccccccaaacataaatttcctttagcggtatgtcaaagcggactgataaaccagctcctacactgttaacccttccatggcaacagtagttattgctgtgtctccaatccatgcagagcatttttctttnnnnnnnnnnnnnngtggccgggtgcagtggctcatnnnnnnnnnnnnnnnnnnnnnnnnnnnnnnnnnnnnnnnnnnnnnnnnnnnnnnnnnnnnnnnnnnnnnnnnnnnnnnnnnnnnnnnnnnnnnnnnnnnnnnnnnnnnnnnnnnnnnnnnnnnnnnnnnnnnnnnnnnnnnnnnnnnnnnnnnnnnnnnnnnnnnnnnnnnnnnnnnnnnnnnnnnnnnnnnnnnnnnnnnnnnnnnnnnnnnnnnnnnnnnnnnnnnnnnnnnnnnnnnnnnnnnnnnnnnnttctgtctnnnnnnnnnnnnnnnnnnnnnnnnnnnnnnnnnnnnnnnnnnnnnnnnnnnnnnnnnnnnnnnnnnnnnnnnnncttcctccttgtctttaagggcctaacggatctgcgaaactgttgaccacaggaatacttggagacattggaagcattcctgtgtgttttcctttagactttgctttcccttagctgggagtgttaacatcacacattctccagagaactttgcagaggagaatgtggtgtctgcctctttccttcagtcctgggaaaactacagc

SEQ ID NO: 96491 - DNA, 1457 bp, Homo Sapiens
  misc_feature (101)..(149): n is a, c, g, or t
  misc_feature (513)..(513): n is a, c, g, or t
  misc_feature (1121)..(1131): n is a, c, g, or t
  misc_feature (1133)..(1140): n is a, c, g, or t
  misc_feature (1143)..(1143): n is a, c, g, or t
  misc_feature (1146)..(1211): n is a, c, g, or t
  misc_feature (1216)..(1216): n is a, c, g, or t
  misc_feature (1239)..(1253): n is a, c, g, or t
taaattggggtcactcttttaccgcgtttcaacgcggtgcgatcacatatagtgggggcggaacaatgttttgtgagttatgggggtgcaggtttcggcannnnnnnnnnnnnnnnnnnnnnnnnnnnnnnnnnnnnnnnnnnnnnnnnatccggctcacattgatgttatatccccagctgtcgcatcttttgtaggctccctcgagaagggtaggaattcatactccggaaagtttcttacagggaaagagagctaatatggggtggagggggtcaagaaagaggagttcgcggataagaattggatatctgaggtggggagtccaaagtccacgtttggccaattgtgactaggttttccaggaaaattttttgccaataaattggggaaaaatccctttgttgagtttggataaaagggtgaccccgtacttttttaaaaaggggttctttaacccggggctactaaacctttaagtttttaaaaaataggtttttcatttagggcttntttgtgggttttagcactttaagaaggtttaattttttgtaatttttaatatgctctttcagtgtatctcagcgggtactccagcttgtggcattcccatgtgactggggagaagacaaaattggtgtttagattctggaggagaaaaaatgagttacaatgtcaggtgtttttaaaaattccttttagagacagtcttttgggaaccaaagtattttactgtaaatctttaaaataacagaattcagtgctctttcatttgttaatgctgtccagatttttcacacagttatactcagttaatactagttttcagaacattagtccaaggctatttcaagttttccattgaatatatgcttatggttaaaagaaaaacgaatggttttataattctgtgtattttgtcatatgccttagcagagtaagtcatttttccattttacttaggaataagctttttcgaactgaaaattcatggtaaaataggatttctatctaatgttaatccattgcttatttgtattcaattccattgtctacagtttgcttaaatgttgactaagaatgattggagtcaataaatttgtactgtattttgcttcgannnnnnnnnnncnnnnnnnnccnccnnnnnnnnnnnnnnnnnnnnnnnnnnnnnnnnnnnnnnnnnnnnnnnnnnnnnnnnnnnnnnnnnnaaaancctttcacaaactcttccttcgnnnnnnnnnnnnnnnaccaaaacacaaaaggcgacaaaatcgggttccccaaaaaaacttcgggggattggcgtggggggtggggaccctcgagaaataatatatacaccctctgcggccaccgggcggtcctcccacaaaaaaatcgcagagcggagtgtcctcacgctctttccatcgggaggcatctccccgcggtataccatagccggcgcctaa

SEQ ID NO: 96492 - DNA, 727 bp, Homo Sapiens
  misc_feature (57)..(118): n is a, c, g, or t
  misc_feature (149)..(149): n is a, c, g, or t
agccgtgtaatcccagcttcttgggaagggtgaggccaagaggaatccgctgaatcnnnnnnnnnnnnnnnnnnnnnnnnnnnnnnnnnnnnnnnnnnnnnnnnnnnnnnnnnnnnnnggagtgaaaccctgtctcaaaaagaaaaaanaagttgaccttgagaatttataatattctgagaaaactggaagcatgcataaagcccctctgctgtgcactgaagcatgggtgccttgaggaaaagcagttacacagttgagttgcaagctgaattggctgtgttcaaggcatgccctttagaattgaaagaactagcagattacggtatttagacttgaatatttggctgatattttctggaaattaatggaatgagcctctcacctcaagggaaacaactgatagtgttgccagtgataaagctttcaagcaaaaattggaatttccgaaaatctgtactccaccatgagctttattgttggggatattaacaaatgtgatttgtataatgaaatgcatttcatttggaagaattcaatgaaccatttttccaagtgaccagcaccgtgatgttacaaaatcatgcatggctcaaagattgattcaaaagtgtaacacaggccagtggattttaatgtattaacaataaaagagtgcattaagttttcggagtctacattgcctttaagaaactatgacttgtagtaagccgggcgcggtggctca

SEQ ID NO: 96493 - DNA, 964 bp, Homo Sapiens
ggcgggaccccaagtttggaaagctcttttaacgatagtaactgtccctactgaaggccccaggagtgctccagccagagctgaggcttcgaagacctcagaggacttctctcagcactcacagaaacctcctacaccctcggatggcacaaagggactgttttcttactcttagtctgagtgactgccaaggaaggcaaaggtagagcaactggatctctggctctccacatagcttctgatctcagaccttactaaaatgctttctgggcccaaggacaaagctcacatgaacaaatgattttgagtcatgaatgaaaaatcttgctctttccatagtaaagaagaattaagagatggacagggtgaaagattgtctgctggatattctccatcatatgacaaggacaagagtgttctggctttcagaggaatccctatctcagagttgaagaaccatggcattctccaggctctgaccacagaagcttatgaatgggagccacgtgttgtgagtacagaggtggtcagagcccaagaagaatgggaagctgtggacaccatccagccagagacagggagccaagctagctcagagcagcctgggcagctaatctccttcagttgaggccctgcagcacttccagactgtggacctttcccccttcaagaaaagaatccagccaactattcgaaggactgggctcgccgacctccgacactacctcttcgggcctccaaagctccaccagcgccttcgggaagaaagggacttggtcctgaccaatgctcagctgtggcctggatagccaagcacccagtgcatggccgagtcctccaggaccatctataagaagctgaccggctccaagtttgactgtgcccttcatggaaaccactgggaggacctgggcttacagggagcgaatccagccacagacctaagaggcgcaggcttccttgc

SEQ ID NO: 96494 - DNA, 1016 bp, Homo Sapiens
  misc_feature (898)..(898): n is a, c, g, or t
  misc_feature (958)..(958): n is a, c, g, or t
  misc_feature (970)..(970): n is a, c, g, or t
  misc_feature (974)..(974): n is a, c, g, or t
gggtccggaattcccgggatgccgaggcggcgggacccccaagtttggaaagctcttttaacggctatgcgaaagttctgtccaaaggctgctcacagcccctgtctgactggttgtcatgatgaattgagctctctgttacctgcgcatcacaaccgagctgaggcttcgaagacctcagaggacttctctcagcactcacagaaacctcctacaccctcggatggcacaaagggactgttttcttactcttagtctgagtgactgccaaggaaggcaaaggtagagcaactggatctctggctctccacatagcttctgatctcagaccttactaaaatgctttctgggcccaaggacaaagctcacatgaacaaatgattttgagtcatgaatgaaaaatcttgctctttccatagtaaagaagaattaagagatggacagggtgaaagattgtctgctggatattctccatcatatgacaaggacaagagtgttctggctttcagaggaatccctatctcagagttgaagaaccatggcattctccaggctctgaccacagaagcttatgaatgggagccacgtgttgtgagtacagaggtggtcagagcccaagaagaatgggaagctgtggacaccatccagccagagacagggagccaagctagctcagagcagcctgggcagctaatctccttcagtgaggccctgcagcacttccagactgtggacctttcccccttcaagaaaagaatccagccaactattcgaaggactgggctcgccgccctccgacactacctcttcgggcctcccaagctcccacagcgccttcgggaagaaagggacttgggtcctgaccattggctcagtgagcgaaatcagccacagaccntgagagggcgcagggcttccttggccctccctgcatctggcttctacctggtggatgggnactcaaagaccnttgnccgatgggcgccaaggagatttttccggccttggtctcggtc

SEQ ID NO: 96495 - DNA, 1688 bp, Homo Sapiens
  misc_feature (51)..(220): n is a, c, g, or t
  misc_feature (239)..(322): n is a, c, g, or t
  misc_feature (1066)..(1180): n is a, c, g, or t
  misc_feature (1186)..(1186): n is a, c, g, or t
  misc_feature (1188)..(1250): n is a, c, g, or t
  misc_feature (1262)..(1270): n is a, c, g, or t
  misc_feature (1501)..(1510): n is a, c, g, or t
cagtcgacggtaccggacatatgcccgggaattcggccattacggccgggnnnnnnnnnnnnnnnnnnnnnnnnnnnnnnnnnnnnnnnnnnnnnnnnnnnnnnnnnnnnnnnnnnnnnnnnnnnnnnnnnnnnnnnnnnnnnnnnnnnnnnnnnnnnnnnnnnnnnnnnnnnnnnnnnnnnnnnnnnnnnnnnnnnnnnnnnnnnnnnnnnnnnnnnnngagacagggtcttcggcannnnnnnnnnnnnnnnnnnnnnnnnnnnnnnnnnnnnnnnnnnnnnnnnnnnnnnnnnnnnnnnnnnnnnnnnnnnnnnnnnnngtagaggggtttataggcacgagaccctgcacccaacctagagttgccttttttaagcaaagcagtttctagttaatgtagcatcttggactttggggcgtcattcttaagcttgttgtgcccggtaaccatggtcctcttgctctgattaacccttccttcaatgggcttcttcacccagacaccaaggtatgagatggccctgccaagtgtcggcctctcctgttaacaaaaacattctaaagccattgttcttgcttcatggacaagaggcagccagaagagagtgccagggtgcccctggtctgagctggcatccccatgtcttctgtgtccgagggcagcatggtttctcgtgcagtgctcagacacagcctgcccctaatcctaccagctcaaagcagcacctgctctcccttggcagctaatggccatgacaaccccagagaagcagcttcagggaccgagtcagattctgttttgtctacatgcctctgccgggtgccggtattgaggcacccagggagctgttactggcgtggaaataggtgatgctgctacctctgctgctgcactcacagccacacttgatacacgatgacaccttgcttgtttggaaacatctaaacatctagtagatgacttgcaggctgttggctaccagtttcctgtctgaggtgtatatgttaacttcgtgatcagtttgtatgtttgggactcttgtcctatgtaaagttaaggtgnnnnnnnnnnnnnnnnnnnnnnnnnnnnnnnnnnnnnnnnnnnnnnnnnnnnnnnnnnnnnnnnnnnnnnnnnnnnnnnnnnnnnnnnnnnnnnnnnnnnnnnnnnnnnnnnnnnaaaacncnnnnnnnnnnnnnnnnnnnnnnnnnnnnnnnnnnnnnnnnnnnnnnnnnnnnnnnnnnnnnnnacgggcccaaannnnnnnnnccgcttctaagaaaaatcccctcgcaggggggccccaagtctatacgcggtacaccccgctctttcttttgtcaaaaaagggggtgcccctcaataagcggaggtcggtaacttatgaagactaaggaccctgggcccgcgccctttttacaccaccctcgtggaattggcgaaaaaaactgcccgagcttgtgggaaactttttgtgggagaggaaccccttacttttcnnnnnnnnnncgcacaaatttggtgaccaacctccgccccccacagaatttcgaggccccccgaggggaccaaaataaacactcttctcagccgacacattgcggctaaaacaaacgcaccgacaaaatacctttcgcgcgcggttgagaaccattttccccctccacacgggcgccacatgtccttc

SEQ ID NO: 96496 - DNA, 2037 bp, Homo Sapiens
gtggtaccggtccggaattcccgggatatcgtcgacccacgcgtccgcccacgcgtccgggcgcgggagcttgcgtgctgctgggcctgagctgtctgtctcgtttctgtccgcgcgccctgcatcccggccccgggcgcccgctggaggtcgccgaggagccacagggctgactggtctgctgcccgggcccaggagtgcctggtgtagcagtcgcggagccatcccggcgtctgctgccatgaccgactctcccctcagaggagactcttcctcagcggtggctgcagagacagatgagcggcggctcctggccgcgggaccgtgagacgggttcgtggccggccatttagggggacgctgcgaccaccgcctgcgcccctccggactggttccttgggccccggaagctcgcggcgggccctgcgggaggcggcatgctcccgcggaggctgctggccgcctggctggcggggacgcggggcgggggcctgctggcgcttctggccaatcagtgccgcttcgtcacgggcctgcgcgtgcggcgcgcgcagcagatcgcgcagctctacggccgcctctactccgagagctcacgccgcgttctcctcggccgcctctggcgccggctgcacggccgtcctggccatgcctctgccttgatggcggcgttagccggcgtcttcgtttgggacgaggagaggatccaggaggaggagttgcagagatctattaatgagatgaagcggttggaagaaatgtcaaatatgtttcagagctctggagtccagcaccaccctccagaaccaaaagcccaaacagaagggaatgaagattcagagggcaaagagcaacgttgggaaatggtgatggataagaaacactttaagctgtggcggcgcccaattacaggcacccacctttaccagtaccgagtttttggaacctacacagatgtgacacctcggcagttcttcaatgttcagctggacacagagtatagaaaaaaatgggatgccctggtaatcaagctggaggtgattgagagggatgtggttagtggttccgaggttcttcactgggtaacccattttccttatccaatgtactcacgggattatgtttatgttcggcggtatagtgtggatcaggaaaacaacatgatggtgttggtgtcgcgtgctgtggagcatccgagtgtgccagagtctccagaattcgtcagggtcagatcatatgaatcccaaatggttatccgtccccacaagtcatttgatgagaatggctttgactacttactaacatacagtgacaatccccaaacggtgtttcctcgctactgtgttagttggatggtttccagtggcatgccagatttcctggagaagctgcacatggccactctgaaagccaagaatatggagattaaagtaaaggactacatctcagctaagcctctggaaatgagtagtgaagccaaggccaccagccagtcctctgagcgaaagaacgagggcagctgtggccctgctcggattgagtatgcttgacaggctttgggataagaagggacacggtgcttctagccctgtctcagtccgttatcactctgctgtacgaagggggacatgccacatgtattagaaggccatctgctgtaacttccaatgccagataattcaattaactgatgtcccatttccattcagaggccttattgctcttatcaaaacagaagaaggctacatctgtgggacctgtgtcatattctcagcccactgtttgaaatcggctccacggactaacggaaaaactccactcagccagagggatgacccaatggcgcctgagtaagactctgggattccagtcccacaagagggaagctggataccgacccggcaccgcagctgtgccgccgagcccacaaaggcccggggcggccccaaggcagggcacagcgagaaccggcggcggcaccgcaacaaatccgcgaaggagaacccccgacggggcagaaacacgaaacacaggcaa

SEQ ID NO: 96497 - DNA, 1886 bp, Homo Sapiens
  misc_feature (1698)..(1742): n is a, c, g, or t
aagatgtaaacgggtgtaaagaggcagtactatacggtcctaaggtagcgaggcctgggtggcgaattcggcacgaggggctggaggagctggcctgtggcacggccctgagtgtcccaagccgggagccaacgaagccggacacggcttcactgaccagcggctgctcaagccgcaagctctcagcaagtgcccagtggagcctgccgcccccgcctgggcaccgggacccctcaccatccagtgggcccggagaaacctgatgaacagttggggactcaggaccagatgtccgtctctcttgcttgaggaatgaagacctttattcacccctgccccgttgcttcccgctgcacatggacagacttcacagcgtctgtcataggacctgcatccttcctggggacgaattccactcgtccaagggacagcccacggtctggaggccgaggaccaccagcaggcaggtggactgactgtgttgggcaagacctcttccctctgggcctgttctcttggctgcaaataaggacagcagctggtgccccacctgcctggtgcattgctgtgtgaatccaggaggcagtggacatcgtaggcagccacggccccgggtccaggagaagtgctccctggaggcacgcaccactgcttcccactggggccggcggggcccacgcacgacgtcagcctcttaccttcccgcctcggctaggggtcctcgggatgccgttctgttccaacctcctgctctgggacgtggacatgcctcaaggatacagggagccggcggcctctcgacggcacgcacttgcctgttggctgctgcggctgtgggcgagcatgggggctgccagcgtctgttgtggaaagtagctgctagtgaaatggctggggccgctggggtccgtcttcacactgcgcaggtctcttctgggcgtctgagctggggtgggagctcctccgcagaaggttggtggggggtccagtctgtgatccttggtgctgtgtgccccactccagcctggggaccccacttcagaaggtaggggccgtgtcccgcggtgctgactgaggcctgcttccccctccccctcctgctgtgctggaattccacaggggaccagggtcccaccggcaggggactgtctcagaagacttgatttttccgtccctttttctccacactccactgacaaacgtccccagcggtttccacttgtgggcttcaggtgttttcaagcacaacccaccacaacaagcaagtgcattttcagtcgttgtgcttttttgttttgtgctaacgtcttactaatttaaagatgctgtcggcaccatgtttatttatttccagtggtcatgctcagccttgctgctctgcgtggcgcaggtgccatgcctgctccctgtctgtgtcccagccacgcagggccatccactgtgacgtcggccgaccaggctggacaccctctgccgagtaatgacgtgtgtggctgggaccttctttattctgtgttaatggctaacctgttacactgggctgggttgggcaaggtggtccggcttttttgcgggggtctttatttttaaagcaaaccctccattttctttctggggaccgcgcgacggccaatcagccacacattgtcgggcgccttgagaccctccaagaacccttcaagaacacttcctttagannnnnnnnnnnnnnnnnnnnnnnnnnnnnnnnnnnnnnnnnnnnngttttcccgggacaaaccctgcgcatctcctctcgtgcctcggccctcccccaccccaccaaaaggcccccgcggcgccacacgtatgctttccccaaaccactaacccgtacgcagaatctttcaccgactgccccctggcca

SEQ ID NO: 96498 - DNA, 2817 bp, Homo Sapiens
  misc_feature (2239)..(2253): n is a, c, g, or t
  misc_feature (2351)..(2351): n is a, c, g, or t
  misc_feature (2610)..(2618): n is a, c, g, or t
gaccttgcatgtgctcagatgaggtatctcctttaaaacaaaattccctggtgctcagctgggcccagccaggctggacagtccccggtggccaccacggccgtccacagccctgctcgtgggccccagggctcagccagccgcctctctcttccagtgtgtgatgacgctgctctacgccttctccaaggacatcttctccggtcatcaacttcttcagcttcttcaactggctctgcgtggccctggccatcatcggcatgatctggctgcgccacagaaagcctgagcttgagcggcccatcaaggtgaacctggccctgcctgtgttcttcatcctggcctgcctcttcctgatcgccgtctccttctggaagacacccgtggagtgtggcatcggcttcaccatcatcctcagcgggctgcccgtctacttcttcggggtctggtggaaaaacaagcccaagtggctcctccagggcatcttctccacgaccgtcctgtgtcagaagctcatgcaggtggtcccccaggagacatagccaggaggccgagtggctgccggaggagcatgcgcagaggccagttaaagtagatcacctcctcgaacccactccggttccccgcaacccacagctcagctgcccatcccagtccctcgccgtccctcccaggtcgggcagtggaggctgctgtgaaaactctggtacgaatctcatccctcaactgagggccagggacccaggtgtgcctgtgctcctgcccaggagcagcttttggtctccttgggccctttttcccttccctcctttgtttacttatatatatattttttttaaacttaaattttgggtcaacttgacaccactaagatgattttttaaggagctgggggaaggcaggagccttcctttctcctgccccaagggcccagaccctgggcaaacagagctactgagacttggaacctcattgctaccacagacttgcactgaagccggacagctgcccagacacatgggcttgtgacattcgtgaaaaccaaccctgtgggcttatgtctctgccttagggtttgcagagtggaaactcagccgtagggtggcactgggagggggtgggggatctgggcaaggtgggtgattcctcccaggaggtgcttgaggccccgatggactcctgaccataatcctagccccgagacaccatcctgagccagggaacagccccagggttggggggtgccggcatctcccctagctcaccaggcctggcctctgggcagtgtggcctcttggctatttctgtgtccagttttggaggctgagttctggttcatgcagacaaagccctgtccttcagtcttctagaaacagagacaagaaaggcagacacaccgcggccaggcacccatgtgggcgcccaccctgggctccacacagcagtgtcccctgccccagaggtcgcagctaccctcagcctccaatgcattggcctctgtaccgcccggcagccccttctggccggtgctgggttcccactcccggcctaggcacctccccgctctccctgtcacgctcatgtcctgtcctggtcctgatgcccgttgtctaggagacagagccaagcactgctcacgtctctgccgcctgcgtttggaggcccctgggctctcacccagtccccacccgcctgcagagagggaactagggcaccccttgtttctgttgttccccgtgaatttttttcgctatgggaggcagccgaagcctggccaatgcggcccactttcctgagctgtcgctgcctccatggcagcagccaagggacccccagaacaagaagacccccccgcaggatccctcctggaactcggggggctctgccctcctaagcccccgggcttcccttccccccagccagaggtggagccaagtggtccagcgtcactccagtgctcagctgtggctggaggagctggcctgtggcacagccctgagtgtcccaagccgggagccaacgaagccggacacggcttcactgaccagcggctgctcaagccgcaagctctcagcaagtgcccagtggagcctgccgccccccacctgtgcaccgggcacccccctcaccatcccgtggggccccggagaaaccctgattgaacagctttgggggactccaggacccacaatgtcccgtcctcttctttgcttgaaggaaatggaagaaccttttattnnnnnnnnnnnnnnnggtttgcttccccgcctgccacattgggaacagaactttcaccaggcggttttggccttcaataagggaacccttgccattccctttccccttggagngggacgtaaaattttccaaccttcccgttccccgaagggggaaccaacgcccccaccgggggttccttgggaaagggccccgaaaaggaaacccaaccccgagccaatgggccaggggtggggcaaacctggacacctgggtgtttttgggcgccacaaggacaccctcctctttcccctctccttgtgggcgccctggttttctcccttgtgggcgcttggcaaaaatataaggggaacagtcctagccttgtggggnnnnnnnnnaccctggtcccgtgggggagacaattggccatgggcgtgacaactcccccagccaaggccacaatgggccacattcgccaaagggaaacccccatccgggacgcccccgggcctcccaaggggagaaaaacgcgctctccccttggggaagggcaactgcaccccgacttgttctttccccaaacttgggggggccggc

SEQ ID NO: 96499 - DNA, 247 bp, Homo Sapiens
tcccaacatcttcagcgggctgcccgtctacttcttcggggtctggtggaaaaacaagcccaagtggctcctccagggcatcttctccacgaccgtcctgtgtcagaagctcatgcaggtggtcccccaggagacatagccaggagcccgagtggctgccggaggagcatgcgcagagaccagttaaagtagatcacctcctcgagccctcaccggttccgcgctgaagatgatgttgggtaccgag

SEQ ID NO: 96500 - DNA, 1387 bp, Homo Sapiens
  misc_feature (1266)..(1281): n is a, c, g, or t
  misc_feature (1301)..(1301): n is a, c, g, or t
acggacaaaagaaaaacacacaaagcgcacaccagcctggcaccggtccggaattctcttccaatcgtcgacccacgcgtccgggtgtcacccccagcgggcgcgggccggagcacgggcacccagcatgggggtactgctcacacagaggacgctgctcagtctggtccttgcactcctgtttccaagcatggcgagcatggcggctataggcagctgctcgaaagagtaccgcgtgctccttggccagctccagaagcagacagatctcatgcaggacaccagcagactcctggacccctatatacgtatccaaggcctggatgttcctaaactgagagagcactgcagggagcgccccggggccttccccagtgaggagaccctgagggggctgggcaggcggggcttcctgcagaccctcaatggccacacggggctgcgtcctgcacagactggccgacttagagcagcgcctccccaaggcccaggatttggagaggtctgggctgaacatcgaggacttggagaagctgcagatggcgaggccgaacatcctcgggctcaggaacaacatctactgcatggcccagctgctggacaactcagacacggctgagcccacgaaagctggccggggggcctctcagccgcccacccccaaccctgcctcggatgcttttcagccgcaagctggagggctggcaggttcctgcatggctacccatcgccttcatgcactcaatggggccgggtcttcagcaagtggggggggagagccccgaaccgggagcccggaaaacaccagcccccccacccgggctcttgaaagaaaagggggcgaggccacagggaaccaagaaccccttcccagggaaaagggccacagtaaaaacttcccttgaacacaggggggcaaccagggcttggccccaccgggacaaacccctctgaaagaagacccaccccacttttgtccccggcttgaaacacgtatattgcccgcacaccgcgcggttcctttgttgtcgccattgccacaaggcaaacaccaatcccccacgtgttgtgggtcccaagcattccccccgccggggggcccccccatacaaaacccagacttaaccacatccggcgacattaacaaaaggccccacgtttgaagaaaaacccgggtgaccccatttaacgcaaaaacccctgccagtaaacactctcttagccaactccacaaaaaccccacctaacaccgcatagtgtccggtnnnnnnnnnnnnnnnntacgacctaaaacgacccanaccaaaaaccctgtgcccccctttacaacacacaaccgccggttgcgccccacgactctttcccctcaactttctttattcccgcg

SEQ ID NO: 96501 - DNA, 1308 bp, Homo Sapiens
  misc_feature (1201)..(1211): n is a, c, g, or t
agaactggagcaaggcctgttgatgcagccatgggcgtggctacagcttgcagagaactccctcttggccaaggtttttatcaccaagcagggctatgccttgttggtttcagatcttcaacaggtgtggcatgaacaggtggacactagtgtggtcagccagcgagccaaggagctgaacaagcggctcactgctcctcctgcagctttcctctgtcatttggataatctccttcgcccattgttgaaggacgctgctcaccctagcgaagctaccttctcctgtgattgtgtggcagatgcactgattctacgggtgcgaagtgagctctctggcctccccttctattggaatttccactgcatgctagctagtccttccctggtctcccaacatttgattcgtcctctgatgggcatgagtctggcattacagtgccaagtgagggagctagcaacgttacttcatatgaaagacctagagatccaagactaccaggagagtggggctacgctgattcgagatcgattgaagacagaaccatttgaagaaaattccttcttggaacaatttatgatagagaaactgccagaggcatgcagcattggtgatggaaagccctttgtcatgaatctgcaggatctgtatatggcagtcaccacacaagaggtccaagtgggacagaagcatcaaggcgctggagatcctcatacctcaaacagtgcttccctgcaaggaatcgatagccaatgtgtaaaccagccagaacaactggtctcctcagccccaaccctctcagcacctgagaaagagtccacgggtacttcaggccctctgcagagacctcagctgtcaaaggtcaagaggaagaagccaaggggtctcttcagttaatctgttgtggcctcagctgctgaggatggacttggagaacagcttccaagcttcaccttgaaagaagcttacatggcagcaatatttctaaaatagtgatacagtcagaggcctcctgtaagggcgagaagactgaaagttgatgttgacaggcccccagggaatttggccttcccctgttcaagtggaagccagtctctgagaatccggtgctctcctctccttttggggggaggtttcggaaggttccaggtttctaccactgggactttagggtatttaagggccaggccccctaaaaaaagnnnnnnnnnnnttcagggaagccctttgttctacaccttttcctcaaccgtcttctatgccaaagtccaggccccccaaaaaatttcctctccaaaaacaccacgttc

SEQ ID NO: 96502 - DNA, 1114 bp, Homo Sapiens
  misc_feature (1072)..(1072): n is a, c, g, or t
tatttattattaatttatttacgaatccccattacactcacacacaacacctaccggcccggaattccttgcatatcgtcgacccacgcgtccgcaagatggagacggcggcggctgtagcggcgtgacaggagccccatggcacctgcccagccccacctcagcccatcttgacaaaatctaaggctccatggagccaccacggggcccccctgccaatggggccgagccatcccgggcagtgggcaccgtcaaagtatacctgcccaacaagcaacgcacggtggtgactgtccgggatggcatgagtgtctacgactctctagacaaggccctgaaggtgcggggtctaaatcaggactgctgtgtggtctaccgactcatcaagggacgaaagacggtcactgcctgggacacagccattgctcccctggatggcgaggagctcattgtcgaggtccttgaagatgtcccgctgaccatgcacaattttgtacggaagaccttcttcagcctggcgttctgtgacttctgccttaagtttctgttccatggcttccgttgccaaacctgtggctacaagttccaccagcattgttcctccaaggtccccacagtctgtgttgacatgagtaccaaccgccaacagttctaccacagtgtccaggatttgtccggaggctccagacagcatgaggctccctcgaaccgccccctgaatgagttgctaaccccccagggtcccagcccccgcacccagcactgtgacccggagcacttccccttccctgccccagccaatgcccccctacagcgcatccgctccacgtccactcccaacgtccatatggtcagcaccacggcccccatggactccaacctcatccagctcactggccagagtttcagcactgatgctgcccggtagtaaaggaaggtagtgatggaacccccccggggggagccccagcccagccagggtgtccttcgggggaagaaagtccccacatttccaagtcaccaccagaacagccgcggaccgggaaagtccttggccctatggaccaggagngaaagtgaaagaaacctgggggttaccgggggaactcaaggc

SEQ ID NO: 96503 - DNA, 441 bp, Homo Sapiens
ctcccgatgctctctctgtgcgggtcgggataccttgcagcaccttcacggccacatcgccatgccaccgccctcgaaacacggctgccaaacgagcccgtcccgatcctcttcagcagctgcacctcactgggtggtacctcccagtaatagcctgagtcccggtaccccaggttcttcactttcttcttgtcatcggccaaggacttccgctcgcgctgctctgctggtgacttggaatgtgcggacttcctccccgaggacacgctggctgggctggggctcccccggggggttccatcactacctcctctactaccggcagcatcagtgctgaaactctggccagtgagctggatgaggtcggagtccatgggggccgtggtgctgaccatatagacattgggagtggacgtggagcggatccccacagagagagcg

SEQ ID NO: 96504 - DNA, 1541 bp, Homo Sapiens
  misc_feature (1094)..(1103): n is a, c, g, or t
  misc_feature (1375)..(1375): n is a, c, g, or t
ccaaacaacaaactaatcctctcactccatctcccccaccctctgatacggtccggcattcctgggatatcgtcgacccacgcgtccgcaccaatacaaacacttaagagatgacatatcgccctagctggatctactacagggaagggaagagggtgctgggtccaggcaggctgagtgtctcatgtcttaatgcttctctgcccaatctatttccggctggatgtggagtctgaaggcctggcacccactctggctctgtgatttaccagctgtgagccttgggggagctgcttactctcttggtgaattcttgtgctcatttctatgatggggtagaggataatgcctatgcttacaaagtggctgtgggaagtaaaccggatgggataagaatggcttgctgtggaccacaggcaccgcaggataaccattcctcagaactcctcgtactgctctagtgcttggaggtccgtgtattacctcagctattccaatcacgacgaccaaccacgggagccacgtgtctacgtctgacagataaagatgctgagtttagagtctgcaaggcttgacaaccacagatcagggacaggagctgaggtctcctgacctggagcccagggccacccggagctgcaagaaacctgcactcacaactgcctcctattttaaaatgctgagtcgatcccacaggtggcaaaccagttctgggcttcaatttacaagcagtcagaaaagctgggttgaaatcgccactgtccttctatgtggctgatgaggaaggatgacggtgcccaccgctccatctctccagctgaccccaagctggcactcacgggtgggcaggctcagacaggcccagctccaccaagtgcacttgaagccggaatgcaagacatccgatggtatacttactcgaacccgtccttttcacaacagccgcgggatccgctttctttggctgactgctcagagtcttcccttttcctgtgaccccattagacgccacggggggctttttacccttgagctgttgaaataaacatataagaacattaaaaataaacacaaagtcaaacaaatcttggtcnnnnnnnnnnctggagtcatttctttcagtctctaagtattgtagaaactggcatagatggaggaaaaatcgaaagtgaaagaaaaaccaagatggtttccaaacactggggctgctggggattctgggggaatggctaaggagggtacggcagaggctcccgtaggatgtgttctgctggaacactgcagaagtggcccctttctactggcagaccacaaatgctaaccaagctggcgcaggcagctgactaccccagaacactcagcttaaaagaaaaantttgtgttttctgaaggataagcagctttttatttcagtgggaatgcccttttgggaaaggagcccaaccctggacggggggagtttctgccgcgtccaagggctttgtaccctgaatgcaactccttatttgggaaataaggacccccctttttaaacgccgaaa

SEQ ID NO: 96505 - DNA, 1811 bp, Homo Sapiens
  misc_feature (54)..(54): n is a, c, g, or t
  misc_feature (490)..(561): n is a, c, g, or t
  misc_feature (645)..(693): n is a, c, g, or t
  misc_feature (1012)..(1012): n is a, c, g, or t
  misc_feature (1041)..(1041): n is a, c, g, or t
  misc_feature (1115)..(1115): n is a, c, g, or t
  misc_feature (1156)..(1186): n is a, c, g, or t
  misc_feature (1291)..(1341): n is a, c, g, or t
  misc_feature (1407)..(1407): n is a, c, g, or t
  misc_feature (1591)..(1591): n is a, c, g, or t
  misc_feature (1598)..(1606): n is a, c, g, or t
  misc_feature (1653)..(1653): n is a, c, g, or t
  misc_feature (1720)..(1720): n is a, c, g, or t
  misc_feature (1794)..(1794): n is a, c, g, or t
cgtctgtggtcacaaagcgcaaacacgctgcacgccccgaataggaaggaattnctgccaatcggcgacccacgcgtccggatagtggtgacaccgccggggtgcggagggagtccctgaaacttctcccaacagccccagggccaatcttccctcagcccactcccctcttcgccagctcccaggtccccactcctgtaccgggggtggggtggggagccaggcccgtctcccgctgggacacacacaggggccgggagcggggacgggacccccgaggcgggggggacgaaccgacagacagacggctgggcgcccgccccagcgggcaggcaggcaggaggaggcggaggcgggggtacgacggggagcactgggtctggggagtttactctccactatcggggggaacaactccccccagacggaggaattaccccccaccgtgcttccctccaggagacccacgttcccccgccacgaccaccgnnnnnnnnnnnnnnnnnnnnnnnnnnnnnnnnnnnnnnnnnnnnnnnnnnnnnnnnnnnnnnnnnnnnnnnngcgtccctcacgctcacaacccttgtcccagcgtcaacgagataatcgaaaacctcacctgctgcatgctgcagaaaaatactnnnnnnnnnnnnnnnnnnnnnnnnnnnnnnnnnnnnnnnnnnnnnnnnnaccattatcctatcgaccgtaacccaccgactcactatacccgtccctattcgctgccccccacatgacgcaccccgcaatgaaccttcaccgcggtgcccgcaccttccccgtgtcttgccattgcctcacccgcgcctagtcacacaccgtactcaaacacaaaaacaacaaaccgacatactaccgccctctatacatataaaatccatcccacatcacctcagcgctagctaccgctgcggcatccccgccctccacatgtcgctgtagatccaccggcggttggcacacgtgatacacgaagtccgcgcgcctnttattcacacgtagttacacgtactctanccgtaataaaaacaccctcacaatagtccccccccactcgctaaatgccacagcttccccgcgccaccaatcanttccgtcgaacccccccggtttttagctcatgcctgatacnnnnnnnnnnnnnnnnnnnnnnnnnnnnnnnttaagattaccactaacgacagcgcctattcacccccaagaactgctataaccaccatcgccggggcgcgttttttcgtataaaccgccaccctttcctccgttnnnnnnnnnnnnnnnnnnnnnnnnnnnnnnnnnnnnnnnnnnnnnnnnnnntacaaacatccacactaaactcagcagcaccgcgtttcccaccatttcggtgctacccgatgccanatcctaaatactatattcacacccgcgcataatcgacgatacaccccacccaaatccttaaaatccaccccattcgcatacttcctctcggcattcccccccctaatgttttatccaccacaaaccgaaatccataaagtaacgctcccgccccaacggcgcatgcccggacactaatccgctngtctaannnnnnnnntaggcgatcgctactaacccgccaaaccacgttccaacctgtaaaantaggaaacgtcaagtgccgaggtagcgcctgccccgtcccaccttcacctcaacacctctttccccntgcgtggtcgccctttgtactccttacgggtctaaaaaccagtggttcacgaagatactgaaatcatcgtatanaatgtgcttcccacgcc

SEQ ID NO: 96506 - DNA, 1986 bp, Homo Sapiens
ggaattccttggatatcgtcgacccacgcgtccggtggaatacagctctcattggccttatgactactttcgggaggctgtggtgaacacccaagagctcttggacttactggtgaagtgtgagaacaaaatccagacacgtatcaagattggactcaactccaagatgccaagtcggttccccccggttgtgttctacacccctaaggagttgggtggactcggcatgctctcaatgggccatgtgctcatcccccaatccgacctcaggtggtccaaacagacagatgtaggtatcacacactttcgttcaggaatgagccatgaagaagaccagctcattcccaacttgtaccgctacatacagccatgggagagcgagttcattgattctcagcgggtctgggctgagtacgcactcaagaggcaagaggccattgctcagaacagacgcctgactttagaagacctagaagattcatgggatcgtggcattcctcgaatcaataccctcttccagaaggaccggcacacactggcttatgataagggctggcgtgtcagaactgactttaagcagtatcaggttttgaagcagaatccgttctggtggacacaccagcggcatgatgggaagctctggaacctgaacaactaccgtacagacatgatccaggccctgggcggtgtggaaggcattctggaacacacactctttaagggcacttacttccctacctgggaggggcttttctgggagaaggccagtggctttgaggaatctatgaagtggaagaagctaactaatgctcagcgatcaggactgaaccagattcccaatcgtagattcaccctctggtggtccccgaccattaatcgagccaatgtatatgtaggctttcaggtgcagctagacctgacgggtatcttcatgcacggcaagatccccacgctgaagatctctctcatccagatcttccgagctcacttgtggcagaagatccatgagagcattgttatggacttatgtcaggtgtttgaccaggaacttgatgcactggaaattgagacagtacaaaaggagacaatccatccccgaaagtcatataagatgaactcttcctgtgcagatatcctgctctttgcctcctataagtggaatgtctcccggccctcattgctggctgactccaaggatgtgatggacagcaccaccacccagaaatactggattgacatccagttgcgctggggggactatgattcccacgacattgagcgctacgcccgggccaagttcctggactacaccaccgacaacatgagtatctacccttcgcccacaggtgtactcatcgccattgacctggcctataacttgcacagtgcctatggaaactggttcccaggcagcaagcctctcatacaacaggccatggccaagatcatgaaggcaaaccctgccctgtatgtgttacgtgaacggatccgcaaggggctacagctctattcatctgaacccactgagccttatttgtcttctcagaactatggtgagctcttctccaaccagattatctggtttgtggatgacaccaacgtctacagagtgactattcacaagacctttgaagggaacttgacaaccaagcccatcaacggagccatcttcatcttcaacccacgcacagggcagctgttcctcaagataatccacacgtccgtgtgggccgggacagaagcgtttggggcagttggctaagtggaaggacagctgaggaggtggccgccctgatccgatctctgcctgtggaaggagcagcccaagcagatcattgtcaccaggaaaggcatgctggacccctggagtgcctttactggcttccccatattgtctcaaggtccggagctccatccttcaggcgtgttccggggaaatccgggatctcttaaccttggcccatggtttttactcttagggtcaga

SEQ ID NO: 96507 - DNA, 1345 bp, Homo Sapiens
  misc_feature (21)..(21): n is a, c, g, or t
gcaggatgaggcggggtgaantcggcacgaggctctcatcagatcttccgagctcacttgtggcagaagatcatgagagcatgttatggacttatgtcaggtgtttgaccaggaacttgatgcactggaaattgagacagtacaaaaggagacaatccatccccgaaagtcatataagatgaactcttcctgtgcagatatcctgctctttgcctcctataagtggaatgtctcccggccctcattgctggctgactccaaggatgtgtatggacagcaccaccacccagaaatactggattgacatccagttgcgctggggggactatgattcccacgacattgagcgctacgcccgggccaagttcctggactacaccaccgacaacatgagtatctacccttcgcccacaggtgtactcatcgccattgacctggcctataacttgcacagtgcctatggaaactggttcccaggcagcaagcctctcatacaacaggccatggccaagatcatgaaggcaaaccctgccctgtatgtgttacgtgaacggatccgcaaggggctacagctctattcatctgaacccactgagccttatttgtcttctcagaactatggtgagctcttctccaaccagattatctggtttgtggatgacaccaacgtctacagagtgactattcacaagacctttgaagggaacttgacaacccaagcccatcaacggagccatcttcatcttcaaccccacgcacagggccaagctgttcctcaagataatccacacctccgtgtgggcgggacagaagcgtttgggggcagttggctaagtggaaaacagctgaaggaagtggcccgccctgatcccaatcttctggcctgtggaggagcagcccaagcaaaacattgctcaccaggaagggcatgcctgggaccccactggaaggtggcacttactgggactttcccccaataaatggtcatcaaagggatccggaaacttccaactccccttttccaggcgtggtgctcacgggggggaaaaaatacggggggaatttcattcccttcaagccccactgaagcccccaaatgggtcctctttccaaccctccaatgaacaactggcctcaagaaaaatttccatgcttaacacggggcctttttcccgggtcccattccgggaattcgtgcgggggccccaaaacgggggaaaccacgaaattgagggccaaaaaactgagtcccgtgacgcgctcataacgagaaactacttatttttcacaaccccccctccaattctcggccccctaccgcaactgccccaacacgggcaacccg

SEQ ID NO: 96508 - DNA, 1104 bp, Homo Sapiens
ggacgagtagtgaatatagaaccacgtgtttaaaaaagcaggctggtaccggtccggaattcccgggatatcgtcgacccacgcgtacggactcagagcgctccgggctgcaggagaggaagaaatcttgcatcaccatggtgcacttctgtggcctactcaccctccaccgggagccagtgccgctgaagagtatctctgtgagcgtgaacatttacgagtttgtggctggtgtgtctgcaactttgaactacgagaatgaggagaaagttcctttggaggccttctttgtgttccccatggatgaagactctgctgtttacagctttgaggccttggtggatgggaagaaaattgtagcagaattacaagacaagatgaaggcccgcaccaactatgagaaagccatctcccagggccaccaggccttcttattggagggggacagcagctccagggatgtcttctcttgcaatgtgggtaacctccaacctgggtcgaaggcggcagtcaccctgaagtatgtgcaggagctgcctctggaagcagatggggctctgcgctttgtgctcccagctgtcctgaatcctagataccagttctctgggtcgtctaaggacagttgccttaatgtgaagactcctatagtccctgtggaggacctgccctacacactcagcatggtcgccaccatagattcccagcatggcattgagaaggtccaatccaactgcccccttgagtcctaccgagtacctaggagaggacaagacttctgctcaggtgtccctggctgctgggccagtagaacggaacgtggaacctcctgaactaaactcaccaatgaccgtggaataccccaaaagggactcgcgaaacggggacatccaaccactgaggcacggggccaccagacacgggagccccccagctggaacgggcaagatgaaaccccagaacacccggaagagtacccagcaaaacgaccccggtggagacgccacacccccacagagagccaccgagacgaagtaaggccccgagaacgacgcacacatcagagcggaaaaccgagacgcaacagaacaagagagggaagagcaa

SEQ ID NO: 96509 - DNA, 1165 bp, Homo Sapiens
cggtacccacgaagaggcatccccgaggcacgcaatgcccgcgttatcacgcacatccacaatagaattgaggccagaggactaacttccctggaccacagatgctctgtcccaatctccagaaaagacgaatcaacagaaagatcccaggcaacgtcagagggattcaggaaagctttttctaagaaactgatctcatcttaattacagcatgctcaaatgcacaaaggaagccacaggctcatacttagacgatcaccgcttctgttggaaaggcagaagatgcaggaagtctctgtttggatcttttgaaaattccagcctttaacagttgcctatgtttgcacataaatattcatttaggccagaagaaaatgtatccattgtttttctgcaacaaatgacaccattttcccttaatgtggcaagcaaatgcgtatcacctgtctagttactagagaagcagaatcctctagaactctgtcagctttattacaggagaggagtcagcccgtcctcctccctaacccatctccccactggatggcaatggctgcagttggctgctcccaggagtctacgctggagaaccaagtggtaggtgctgtctaaagagcctacgaaagcagactctgacctccaaaacttcaccccactgagttgtcaggggctaacaggtaccctgacaggcagttcacaaaccctcctgtcctggcacagtgcacacagctcagtgctgttgggacttggcatctctggtctagcctgtgggagtatgagaaagctagcagtggcctgaactcggcctggtatcctaaccctctagagacgcagcaaagccagatgcccagagggagatctccttgtcttctctggctcaatgagatgctaattttggaagctggtatacgtagcacaaaacacaagctagtgtaaagatgctgtagttcaaacactgctgtctctctcctaatcaagtggcatgtttcttttttcacccctaagaggtttgggactgtttgcttaagatctcatgtcaatgtctgaaggagggaagccagctcaggcaagagctctaagaaaaactcgtgagacaaaagaaggaagctcttgcctggaagttcactgtcccggacgcgtgggtcgacgatatcccgggaattcc

SEQ ID NO: 96510 - DNA, 1542 bp, Homo Sapiens
cctaggggcgagagagtatgaagtcgacggcgcgccgaattcggcacgaggtgagtgcctggggcagagtgagagcaggaccagcgggcaggtggcggagcgggggtcggtggtggatggcccagccctggaaagccgaggtgaaggttacgagtccctgaggatctgtgggtgtgagccagccgcgtggccctgggcaacggcgctgccggacagaagtggcggttgctgacgcctggaaattcccctgaaggtggagcaccacccaacccccctgggtcccaccctccctcaaggcctcctccacctccacctccaccccgcctggcctggcgtccacctctgcggctcctacctgggtgcaatcgagttaaatggctgataagcagatcagcctgccagccaagctcatcaatggcggcatcgccgggctgatcggtgtcacctgcgtgtttcccatcgacctggccaagaccaggctgcagaaccagcagaacggccagcgcgtgtacacgagcatgtccgactgcctcatcaagaccgtccgctccgagggctacttcggcatgtaccggggagctgctgtgaacttgaccctcgtcacccccgagaaggccatcaagctggcagccaacgacttcttccgacatcagctctctaaggacgggcagaagctgaccctgcttaaagagatgctggcgggctgtgtgggctggcacctgccaggtgatcgtgaccacgcccatggagatgctgaagatccagctgcaggatgcagggcgcattgcctgcccagaggaagatcctggctgcccagtggccagctctcggcccatgggggggtgcccagccctccagtggagggctccatgctgcccctcggcccaaggccacccatgctgacccgcgacctgctgcggagccgtggcattgccgggctctaaaagggaatcggggccacgcctgctcagggatgtccccttctctgtggtgtacttcccgctctttgccaacctgaaccagctgggccgcccggcgtccgaggagaagtcgcctttctacgtgtccttcctggccggctgtgtggctgggagtgccgccgctgtggccgtcaacccctgtgatgtggtgaagacgcggctccagtcacttcagcgaggcgtcaacgaggacacctactctgtggatcctggactgtgccaggaagatcctgcggcactgagggcccctcggccttcctgaagggcgcctactgccgcgcgctggtcatcgcgccccttttcggcatcgcacagggtggtctacttcctggggcatcgcggagtccctgctggggctgctgcaggacccccaggcctgagcccagcacccgctccaccccagccagctgggcagggccggtgtggggctggagccaggcagctagcccaggacggagcaagggaagacccctccccagccctcccgtcggcaggggcagcagggggcagggtgcagggtccacataggtggtgcacacgcaagccccccggggtgctggct

SEQ ID NO: 96511 - DNA, 849 bp, Homo Sapiens
  misc_feature (709)..(709): n is a, c, g, or t
  misc_feature (783)..(807): n is a, c, g, or t
cagtcgacggtaccggacatatgcccgggaattcggccattacggccggggggcgtggagtccagaatgagaagaaggaaagcgggtccggttccttcaggacccgcttcagggggcaccgcggcggcttggggaccatttggagccccgtcctggggagaaaacagctcacgtctatggccctgactgcttaggcgggagctgcgtgcagctcagcttctccggggcatttttttctacacgctgggtgagctatgaacaggccaactgcaagggcgagcagtttgtgtttgagaagggcgagtacgcccactgggactggtggaccagcagccagaggacagactcagcagcctgaggcccatcaaagtggacagccaagagcacaagatcatcctctatgaaaaccccaacttcaccgggaagaagatggaaatcatagatgacgatgtacccagcttccacgcccatggctaccaggagaaggtgtcatctgtgtgggtgcggagtggcacgtgggttggctactagtaccctggctaccgtgggctgcagtacctgctggagaagggagactacaaggacagcagcgactttggggcccgtcaccctcaagtacagtccgtgcgctgcatccacgacatgcaggggcaccaatgtggtgcctttccacccctacaactagtgcccacccccacatgcctccttnccaggacccaggtctgctgcccaggaacccctcagacctccccagagagtggattaaagtgtgactttgcagannnnnnnnnnnnnnnnnnnnnnnnnaaaacatggtcggccgccctcggcccctcgaggaagctttct

SEQ ID NO: 96512 - DNA, 1064 bp, Homo Sapiens
gctggtaccgggtccggaattcccgcgatatcgtcgacccacgcgtccgcaatcttcgctcctccaatctccgctcctccacccagttcaggaacccgcgaccgctcgcagcgctctcttgaccactatgagcctcctgtccagccgcgcggcccgtgtccccggtccttcgagctccttgtgcgcgctgttggtgctgctgctgctgctgacgcagccagggcccatcgccagcgctggtcctgccgctgctgtgttgagagagctgcgttgcgtttgtttacagaccacgcagggagttcatcccaaaatgatcagtaatctgcaagtgttcgccataggcccacagtgctccaaggtggaagtggtagcctccctgaagaacgggaaggaaatttgtcttgatccagaagccccttttctaaagaaagtcatccagaaaattttggacggtggaaacaaggaaaactgattaagagaaatgagcacgcatggaaaagtttcccagtcttcagcagagaagttttctggaggtctctgaacccagggaagacaagaaggaaagattttgttgttgtttgtttatttgtttttccagtagttagctttcttcctggattcctcactttgaagagtgtgaggaaaacctatgtttgccgcttaagctttcagctcagctaatgaagtgtttagcatagtacctctgctatttgctgttattttatctgctatgctattgaagttttggcaattgactatagtgtgagccaggaatcactggctgttaatctttcaaagtgtcttgaatttgtaggtgactattatatttccaagaaatattcccttaagatattaactgaaaaggctgtgggatttaatggggaaaatgatgtttccctaaaaaatctggttgaatggcaatcacactggttatcttccctttttacaagaaatagggaaataattttaaaaggttccttgggggaaaaaggtttaaaaaaatttcctttacccctttgactggggggcactctattccacatcactttccttttcccaaagcc

SEQ ID NO: 96513 - DNA, 929 bp, Homo Sapiens
ggaccggtccggaattcccgggatatcgtcgacccacgcgtccgggatcctccaatcttcgctcctccaatctccgctcctccacccagttcaggaacccgcgaccgctcgcagcgctctcttgaccactatgagcctcctgtccagccgcgcggcccgtgtccccggtccttcgagctccttgtgcgcgctgttggtgctgctgctgctgctgacgcagccagggcccatcgccagcgctggtcctgccgctgctgtgttgagagagctgcgttgcgtttgtttacagaccacgcaaggagttcatcccaaaatgatcagtaatctgcaagtgttcgccataggcccacagtgctccaaggtggaagtggtagcctccctgaagaacgggaaggaaatttgtcttgatccagaagccccttttctaaagaaagtcatccagaaaattttggacggtggaaacaaggaaaactgattaagagaaatgagcacgcatggaaaagtttcccagtcttcagcagagaagttttctggaggtctctgaacccaaggaagacaagaaggaaagattttgttgttgcttgtttatttggttttccaggagttagctttccttcctggattcctccactttgaagagtgtgaagaaaacctatgtttgccgcttaagctttcagctcagctaatgaagtgtttagcatagtacctctgctatttgctgttattttatctgctatgctattgaagttttggcaattgactatagtgtgagccaggaatcactggctgttaatctttcaaagtgtcttgaatttgtagtgactattatattttccaagaaatattccttaagatattaactgagaaaggtgtgggatttaatgtgggaaatgatgttttcataaggatttcctgttgatgggaatacc

SEQ ID NO: 96514 - DNA, 900 bp, Homo Sapiens
gggaatttccccagcatcccaaagcttgagtttcctgccagtcgggagggatgaatgcagataaagggagtgcagaaggcacgaggaaaccaaagtgctctgtatcctccagtctccgcgcctccacccagctcaggaacccgcgaaccctctcttgaccactatgagcctcccgtccagccgcgcggcccgtgtcccgggtccttcgggctccttgtgcgcgctgctcgcgctgctgctcctgctgacgccgccggggcccctcgccagcgctggtcctgtctctgctgtgctgacagagctgcgttgcacttgtttacgcgttacgctgagagtaaaccccaaaacgattggtaaactgcaggtgttccccgcaggcccgcagtgctccaaggtggaagtggtagcctccctgaagaacgggaagcaagtttgtctggacccggaagccccttttctaaagaaagtcatccagaaaattttggacagtggaaacaagaaaaactgagtaacaaaaaagaccatgcatcataaaattgcccagtcttcagcggagcagttttctggagatccctggacccagtaagaataagaaggaagggtccgtttttttccattttctacatggattccctactttgaagagtgtgggggaaagcctacgcttctccctgaagtttacaagctcagctaatgaagtactaagtatagtatttccactatttactgttattgtaccttgataagttattgaacccttgggcaattgaccatattgtgagcaaagaatcacgtggttattagtcttcaatggaatattgaattgaaggataactatggtatctctatcatacattccttaaagtcttaccggaaaaggtgtggaatttcgtatggaaa

SEQ ID NO: 96515 - DNA, 1565 bp, Homo Sapiens
  misc_feature (463)..(481): n is a, c, g, or t
  misc_feature (571)..(654): n is a, c, g, or t
  misc_feature (1419)..(1480): n is a, c, g, or t
aggcaagttgcatttccctccctttccccccaaaaaaccccaaattgaaaccaaggacttttggtaggtataaaaaccggcccaaggtcccaggtattaataaaaaaatgggggtccatcaaggacggtaacccaaaaatgtgtatggggggccgagtccatcttcagagggaggagacaagagaggttggcaggcaaatagagggaacccacccccaaggggtaagcagccttagaagtggctccccccaaggggcaaaaaccagggaagggcggtgtgtgtgagggggtggggcttaggagttgaccccacttgggctgttgggaaagagctacccctatagccactcccaggcattttaaattttcttttagaaggagctgcctccatagccacccccaccgccatagccgcctctgtaaggtccactattactgcgaccgccccagctactgcctccannnnnnnnnnnnnnnnnnntcttcatgggcccataggaggactgatgctggctgtagctgccgaagccgccgaagccgttaccgtagtcgctcccaccgtaggacgaannnnnnnnnnnnnnnnnnnnnnnnnnnnnnnnnnnnnnnnnnnnnnnnnnnnnnnnnnnnnnnnnnnnnnnnnnnnnnnnnnnncccttggaaaggccgttctggtctcgaccaccgccgcgcccccgccgcctcggccgccccgggaggatcgggagccgcctccacccccaccggagtagatatcctccttggggactgctttcttcacctccacgcgatggccctgaatcggatggaacttgaccaccgcggccttgtctgccgcgtcgtgattctggaaatacacgaagccgaatccacgcttcttgccggactgcttgtcggcaataatctcggccttttccacggtgccaaactgcgagaagtgctcgatcaggtcgccctcagccacgtctcctttaaggcctccgacaaagagcttcttaaccttggcgtgggcaccgggccgcgccgaatcctcccgggacaccgcccgcttcagctccacagtgttgccgtccacggcatggggcgaggcggccatggcggcgtccgcctcctccacattggagtaggtcacgaagccaaagcaacgggagcgcttggtctggggattcaccaccaccacgcagtccgtcagagtcccaaaggcctcaaagtggccgcgcaggcccgactcactcgtctgcacattgaggccgccgatgaacagcttacacaactgagaattctccatctccaaggcccgggccttgcccccgccctgcgagctccgaggtttcgccgtcgccgccgttatcgttggttaaggcctctacacagcttgggcccagccgttgctggagccacccccgccgctcaccgacnnnnnnnnnnnnnnnnnnnnnnnnnnnnnnnnnnnnnnnnnnnnnnnnnnnnnnnnnnnnnncggctgccggctaaagggcgagccgaggagactggaagacaaccaaggccaccgctaccgccgaccgccgccacctccgctcccc

SEQ ID NO: 96516 - DNA, 1098 bp, Homo Sapiens
  misc_feature (778)..(778): n is a, c, g, or t
gtggaccggtccggaattcccgggatatcgtcgacccacgcgtccggaggaagaaggattgatgaagtgatagtcccactgcccacctggaatgctcggacccgggaacctgtcacagacaatgtagagaaatttgccattgagacagaactcatctataagtactctccattccgcactgaggaggaagtgatgacccagtttatgaagattcctggggacagcggaacattggtgatcatcttcaatctcaaactcatggataatggagagccagaactagacataatctcaaatccaagagatatccagatggcagagacgtccccagagggcacgaagccagagcggcagctcgttccatgcctatgccgctgtgctcaatattgatccccggatgaggatcttcatccatgggcacaaggtgcgagaacaagaggcatcgtcctgctgcctgaacaagcaccaggatgataacaagtacacgtcaagccgtttcaagacccgtgcggagcaggaggtgaagaaagcagagcacgtagcaaggattgctgaagagaaggcgcgggaggcagagagcaaagctcggacattagaagtacgcctaggtggagacctcacgcgggactccagggtgatgttgcgacaggtccagaacagagccatcactctgcgcagagaagccgatgtcaagaagaggatcaaggaggccaagcagcgagcacttaaagaacctaaggaactgaattttgtttttggtgtcaacattgaacaccgnggatctggatggcatgttcatctacaactgtagccgactgatccaaatgtatgagaaagtgggccccacagcctggaaaggggcatgggcatgtgggcgggggttgttgcggtttactgaagaggccttaccattgtcttggggacgcttcacacggggatctcgcgcatcttcgtaaatgctagggagtgccggtgcccagcctccgagtaacagtgggggtgcaacctgcgatatccgctgtggttgcccactataggcctggcccccgtatgggggcagtctggccacaattagtgtaaacgttcttccgcaccctt

SEQ ID NO: 96517 - DNA, 1128 bp, Homo Sapiens
  misc_feature (48)..(92): n is a, c, g, or t
gtggaccggtccggaattcccgggatatcgtcgacccacgcgtccgannnnnnnnnnnnnnnnnnnnnnnnnnnnnnnnnnnnnnnnnnnnnaccgccgccgcgggccggggagccaccggccgccaccatgagttccttcagctacgagccgtactactcgacctcctacaagcggcgctacgtggagacgccccgggtgcacatctccagcgtgcgcagcggctacagcaccgcacgctcagcttactccagctactcggcgccggtgtcttcctcgctgtccgtgcgccgcagctactcctccagctctggatcgttgatgcccagtctggagaacctcgacctgagccaggtagccgccatcagcaacgacctcaagtccatccgcacgcaggagaaggcgcagctccaggacctcaatgaccgcttcgccagcttcatcgagcgcgtgcacgagctggagcagcagaacaaggtcctggaagccgagctgctggtgctgcgccagaagcactccgagccatcccgcttccgggcgctgtacgagcaggagatccgcgacctgcgcctggcggcggaagatgccaccaacgagaagcaggcgctccagggcgagcgcgaagggctggaggagaccctgcgcaacctgcaggcgcgctatgaagaggaggtgctgagccgcgaggacgccgagggcccgctgatggaagcgcgcaaaggcgccgacgaggcggagcttgcttgcgccgaactccaaaagcgcctcgacaagcttgaagggaacgaaacctttttcctgcaagaaagtgcttcgaagaaggaaatccgcccaaactgcagggggccactatcccgtaaactggccagaatatccgggggaaaatggagggtgcaccaaagtccgcgacccgtcccttgccgcgcttcatggcgccgcggcgatcctttcctatgtcaaccggcgaccgttttaaaacccaccgtttgtaccgtaaaaggaccgcggtgttagacgccacccttacgcttagttttttccccttataaccccgacacatttatgtagacacaaaattgtggcgcccacaaagaaccgtggcggaggcgcttgaattaacgcaaccca

SEQ ID NO: 96518 - DNA, 1078 bp, Homo Sapiens
gctggtaccggtccggaattcccgggatatcgtcgacccacgcgtccggacgatagagaacgccacggatatttggcaggatgactccgaatgctccgagaaccacagcttcaagcaaaacgtggatcgttatgccttgctgtcaaccttgcagctgatgtacaccgtgggatactccttctctcttatctccctcttcctggctctcaccctcctcttgtttcttcgaaaactccactgcacgcgcaactacatccacatgaacttgtttgcttctttcatcctgagaaccctggctgtactggtgaaggacgtcgtcttctacaactcttactccaagaggcctgacaatgagaatgggtggatgtcctacctgtcagagatgtccacctcctgccgctcagtccaggttctcttgcattactttgtgggtgccaattacttatggctgctggttgaaggcctctacctccacacgctgctggagcccacagtgcttcctgagaggcggctgtggcccagatacctgctggtgggttgggccttccctgtgctatttgttgtaccctggggtttcgcccgtgcacacccgggaaaacacagggtgcttggacaacaaatggggaataagaaaatctgggggaatcatccgaggacccatggatgctctgtggaaccagtcaatttcttcatcttcctgaaaattctcaagcttctcatttctaagctcaaagctcatcaaatgtgcttcagagattataaatacagattggcaaaatcaacactggtcctcattcctttattgggcgttcatgagatcctcttctctttcatcactgatgattcagttgaaggaattgcaaaacttatacgacttttcatcagttgacactgaactcctttcatgggttcccggtggcccttcaagcatggttttggccattgcaaaagtgcaacggtttaactcgggaaaaacttgggtccgcttttggctaagcccccccctacaggttccaaaacctgtggccctggggcaaaaaatcccggtgtcaaggaacaagttatctacaacctcccc

SEQ ID NO: 96519 - DNA, 1076 bp, Homo Sapiens
aaggctaggtgcgggctgggtgtgaatcggccgaggcttccccgactttgcagatttctcttcccccaggcctccctcctccacctctccgccccctccgggcttggctctcccaggaggctacgactggagccactggtcccgcaggatccccgcgtcctcggtcgccgcgtccacgtccctctcgcgtccccgcccggcgccacgccgcctcctctgggttcggcctccgcgcggtgcagcgcagtctcaggccgcgggacaagcccgacttaaatctctgcaatggctaacgaagcttatccttgtccgtgtgacattggccacagacttgagtatggagggctaggccgtgaagttcaagtcgagcacatcaaggcttatgtcaccaaatcccccgttgatgcaggcaaagctgtgattgtcattcaagatatatttggctggcagttgcccaataccagatatatagctgacatgatctcaggaaatggatacacaaccattgttccagacttctttgtagggcaagagccttgggacccctctggcgactggtctatcttccctgagtggctgaaaacaagaaatgcccagaagatcgatagagagatcagtgctatcttgaagtatctgaaacaacagtgtcatgcccagaaaattggcatcgtgggattctgctgggggtggaactgctgtccatcatttgatgatgaaatactcacaattcaggggcaggggtggcccgtctatggcatccgtcaaggattctaagacatttacaatttaaagaaccccactttgttcatttttggctgaaaaagaaggtgcgattccacccaaggacctatcctttgctggacccaaagttgaaaaaccactgccacagttgaaatatcaaccccaaacctcttccttggaagaaccatcggtttccgcgcacccccaagaaaaaacaatttgctcacgtgcaaacaaagcccctaaattggacaagactccacaagggaatttaaattgatcggcctcaaccaattacccggcaaccacgcaaccacggttataccccctcctaa

SEQ ID NO: 96520 - DNA, 1409 bp, Homo Sapiens
ggcgagagagtatgaagtcgacggcgcgccgaattcggcacgaggtgcttgtcggaatcagaaacagtcaacaaagagcgagcgaacagttacaaaaatccccgcacgcaggacctcaccgccaagcttcggaaagctgtggagaagggagaggaggacaccttttctgaccttatctggagcaacccccggtatctgataggctcaggagacaaccccactatcgtgcaggaagggtgcaggtacaacgtgatgcatgttgctgccaaagagaaccaggcttccatctgccagctgactctggacgtcctggagaaccctgacttcatgaggctgatgtaccctgatgacgacgaggccatgctgcagaagcgtatccgttacgtggtggacctgtacctcaacacccccgacaagatgggctatgacacaccgttgcattttgcttgtaagtttggaaatgcagatgtagtcaacgtgctttcgtcacaccatttgattgtaaaaaactcaaggaataaatatgataaaacacctgaagatgtaatttgtgaaagaagcaaaaataaatctgtggaactgaaggagcggatcagagagtatttaaagggccactactacgtgcccctcctgagagcggaagagacttcttctccagtcatcggggagctgtggtccccagaccagacggctgaggcctctcacgtcagccgctatggaggcagccccagagacccggtactgaccctgagagccttcgcagggcccctgagtccagccaaggcagaagattttcgcaagctctggaaaactccacctcgagagaaagcaggcttccttcaccacgtcaagaagtcggacccggaaagaggctttgagagagtgggaagggagctagctcatgagctggggtatccctgggttgaatactgggaatttctgggctgttttgttgatctgtcttcccaggaaggcctgcaaagactagaagaatatctcacacagcaggaaataggcaaaaaggctcaacaagaaacaggagaacgggaagcctcctgccgagataaagccaccacgtctggcagcaattccatttcccgtgagggcgtttctagatgaaagatgacatgagctggacagaaaataaaacaatcggcaaaaatgcaggtcgaaataaccagccggccacagtcgggctttggacatacgaggtgcagcgccttccccttggagcaggagggagacctcatagaagcggcggagcgggaagtccacacagcagcggaagtgggttctgccatctctggatacaggcggacctgcggggcagaggccaggcccggggggaggcctcggcctgccggttgccggggcgcaacggatggactggggcgcccgaccgaggcgtc

SEQ ID NO: 96521 - DNA, 606 bp, Homo Sapiens
gctggaccggtccggaattcccgggatatcgtcgacccacgcgtccgggaggaccttggagccaagggggccaaggagaagatgaaagaggagtcatggcacatccacttcttcgagtacgggcgtggcgtgtgcatgtaccgcacagccaagacgcgggcactggtcctgaagggtatccctgagagcctccggggagagctgtggctcctcttctccggggcctggaatgagatggtgactcaccccgggtactatgctgagctggtggagaagtccaccgggaagtacagcctggccacagaggagatcgagcgagacctgcaccgctccatgcccgagcaccctgccttccagaacgagctggggattgctgccctccggcgggtgctgactgcctatgccttccgaaaccccaccatcggctactgccaggcaatgaacatcgtgacctcggtgctcctgctctatggcagtgaggaggaggccttctggctcctggtggccctgtgcgagcgcatgctgcccgactaccacacacctctgctggcagggcgcatgttcaggctcctggaagaaaaaaaggactcgtgtcgtgaggactcg

SEQ ID NO: 96522 - DNA, 1240 bp, Homo Sapiens
  misc_feature (481)..(535): n is a, c, g, or t
  misc_feature (679)..(687): n is a, c, g, or t
  misc_feature (779)..(779): n is a, c, g, or t
  misc_feature (796)..(804): n is a, c, g, or t
gctggaccggtccggaattcccgggatatcgtcgacccacgcgtccgcccacgcgtccggcgagagcccgcccggcctgagagggacatgggtgagctcagtcctgctgtggcccaggaggagacccctcctggggactggctcttcggaggggtccggtggggctggaatttccggtgtaaaccgccagtgggcctgaacccgaggacggggcccgaggggcttccttactcctccccggacaacggagaggccatcttggaccccagccaggccccaaggccattcaacgaaccctgtaaataccctggccggaccaaaggctttggccacaagccagggctgaagaagcaccccgcggcgccccccgggggccggcccttcacctgcgccacgtgtgggaagagcttccagctgcaagtcagcctgagcgcgcaccagcgcagctgtggggcgcccgacgggtcgggcccgggcacannnnnnnnnnnnnnnnnnnnnnnnnnnnnnnnnnnnnnnnnnnnnnnnnnnnnnncacgggatggcagcgcccttcggtgtgcggagtgcgatcaaccgctcaaactctcctcgcacaaacggttcccctccccttactccctcacctcgcctattgcgcacaccccccgcctcttcccccactacgtcttccccctcnnnnnnnnnacgaaattcgccaccttccttttaaaatttctttgcgtattaccatcccgttattgcccgcattttccccaatcttaacgtgtccttcaccntccactctcaaactgcnnnnnnnnncctacacctctccccctctcccccctcttttcacaccgtcttttccacaatcatttacctcttcattcaggtccgaaaaaccgatcccgtacaaatgtaagtgaaacttaccatcggatattgtgcaagcttcttttcgtctgtccccaacactttcacccaccacctaaactccgcgcgcttcatacttccccgaccccgccgttcattttcctgttgtgctataccccctagctctttttgtcccatacacccgttgtttataacctgacaaattccccccactgtcttctctaaccgccgcggagcggtacaatatattatatttgcctactgtaaacccacaacaaattcatttcttacagcacaacctttgccgttcacccaaatatagacttttctcgtcgcccccatatcaatattcccttctacaccg

SEQ ID NO: 96523 - DNA, 1493 bp, Homo Sapiens
tgaagtcgacggcgcgccgaattcggcacgaggcagcttccagcactcgtagtcgggaagaggagcttcagcagcgctgttgtcccacagtaggtcttctgtccgcacccgctctgcgctgcaccctcttaacgctgttcccaggagctggggaaagggatgcttttgcccactcccatggcccctggaactggtggaaacctttcctctaaccagaaagcctcgatatccttaattcaccaaggatccttggcgtggagtcttcctcccttctcccaagtctttctccgtgaacttttcctcctggactttgctaaagcagaacctcccagctctttgctgtctccggttgtctcttccctgtattcatggcaacatcagctgacagccccagttcacccctcggggcggaggatctcctgagtgattcatcagaaccccctgggctcaaccaagtgtcgtctgaagtgacctcccagctctatgcttctttgcgcctcagccggcaggcggaggccacggcccgagcccagctgtatttaccctccacctccccgcctcatgaagggttagacggcttcgcccaagaattgagtcgaagcttgtcagtcggattggaaaagaacttgaagaaaaaggatggttctaagcatatctttgagatggaaagtgttcggggtcagctccagaccatgctccaaacctcacgtgatacagcctatcgggatcctctcattcctggcgctggctcagagagacgggaagaggactcctttgacagtgatatgcacagccaccttgctcaacacccggcccctgcaagacttgtctccatctagctcagcccaagccctggaggagctgtattccccgctacaccagccttcggccagggcctccacgtcaatcccccagatttacaggggctgagagatgcattggattcagagcatacccgccgcaaagcattgttgagcgccatattcagagcctgacagacccgagtgttacgagctacagcaacaattagcctgtggctgtggctgcgaccgctaagaaagataccatgattgaacaactggacaagacctggcccgtgtggtggagggctggatacccggcatgaggctgaactggccagagtgttctcaggggaacttccacttaagtgaatcaccatggcactgtacgagctcatcagaaggcagcgccgtcaggagtaaccggctggcaacaaagcctgctgaggccatggaggcctgactcgtgagcatgaaagtgcatacttgatgctcactggtcacttgagacccctgcagtgaggaaacggcacgctcgtgcacagagagtcgatcgcaaacaacaaagtatgcacttacatgcagacagaggaatgtcaacctgaatacgcacgacttgtactagaagttaaaatatccaagctgcacgacgatacactgatacatgtcccaggattcctcattatctatacc

SEQ ID NO: 96524 - DNA, 919 bp, Homo Sapiens
  misc_feature (891)..(891): n is a, c, g, or t
ggacatcatgctgcagtgagcgaggaagccccggggtttgtcgtcgttgagcagcccccacggctgtcggtcagactcttgggtgtgtgttgtctgtgtggtccttgagtgggtttctcggatccgtgccctggaatacctggctcaggaatgctgtcagaccagccagccagcgagctctaggcaaaaggacatggaaactgtcacgttagctactgaatcctgggggcgagtgaaactactgaaaatccgagtgatgatgttgtgaatacggaacacctaatcacacagcttgctttgcttttacagaaacgttcctctttttctgacgcagtttaattgaggaccgtgttgtgtgtgtatgtgtgtacacacgctctgtctttaatgacagaaacacaaaaaccagctggccttgcagacggcttttctaactcacaagtcttccctgagacagactaacctgaaagctttgcctaacagtagcttgtagagatccagtgcacgccgatgctgctaaactcagtgcctgagcccggccctgcagccccagccgcagtgtctgaaggccacctcccaaagggagcacgttgccttttcaaactcccgtgccgatttcctaagagcccctagtccaagcctctcagatgaagctgaggagccgtgcctaggatcccttcccagctctgaggacgggctgcagagctctgcaggtgtggattcaccttacgcccctacagcaggctcagcccctcccaccctgccccgatgcccagcagcacaacaccggagtgagacaggatgccccacggtgactgcccgctcccgtccgtgcacacacagccggtgcttcttcttccccttagccacccactgcccaaacccacgggncaaggacccggaaaaccagggtcccctt

SEQ ID NO: 96525 - DNA, 1152 bp, Homo Sapiens
  misc_feature (760)..(785): n is a, c, g, or t
  misc_feature (923)..(974): n is a, c, g, or t
cggctaggtacgaggcctggggtgtgtaaattcggcacgaggctcctgccactgcagtgctcgagccccgtgcaggggagcttgcgggaggatcgaccgacagacggacgcacgccgaggcagctgcgcccccagccccgcgccggtgccaccgcagcccgaccccggccgccagtccagccgcccctcgcccggtgcctaggtgcccggccccacaccgccagctgctcggcgcccgggtccgccatgcgctccgccgctgtcctggctcttctgctctgcgccgggcaagtcactgcgctccctgtgaacagccctatgaataaaggggataccgaggtgatgaaatgcatcgttgaggtcatctccgacacactttccaagcccagccccatgcctgtcagccaggaatgttttgagacactccgaggagatgaacggatcctttccattctgagacatcagaatttactgaaggagctccaagacctcgctctccaaggcgccaaggagagggcacatcagcagaagaaacacagcggttttgaagatgaactctcagaggttcttgagaaccagagcagccaggccgagctgaaagaggcggtggaagagccatcatccaaggatgttatggagaaaagagaggattccaaggaggcagagaaaagtggtgaagccacagacggagccaggccccaggccctcccggagcccatggcaggagtccaaggctgaggggaacaatcaggcccctggnnnnnnnnnnnnnnnnnnnnnnnnnnccaccaacacccaccctccagccagcctccccagccagaaatacccaggcccacaggccgagggggacagtgagggcctctctcagggtctggtggacagagagaagggcctgagtgcagagccagggtggcaggcannnnnnnnnnnnnnnnnnnnnnnnnnnnnnnnnnnnnnnnnnnnnnnnnnnnctgtccccgaggaagaaggccccactgtagtgctgaacccccacccgagccttggctacaaggagatccggaaaggcgagagtcggtcggaggctctggctgtggatggagctgggaagcctggggctgaggaggctcaggaccccgataggaagggagaacaggagcactcccagca

SEQ ID NO: 96526 - DNA, 676 bp, Homo Sapiens
ttccgggatatcgtcgacccacgcgtccgctcacttctagaccaggaagtgggatattgccaaggtctcagctttgtagcaggcattttgcttcttcatatgagtgaggaagaggcgtttaaaatgctcaagtttctgatgtttgacatggggctgcggaaacagtatcggccagacatgattattttacagatccagatgtaccagctctcgaggttgcgtcatgattaccacagagacctctacaatcacctggaggagcacgagatcggccccagcctctacgctgccccctggttcctcaccatgtttgcctcacagttcccgctgggattcgtagccagagtctttgatatgatttttcttcagggaacagaggtcatatttaaagtggctttaagtctgttgggaagccataagcccttgattctgcagcatgaaaacctagaaaccatagttgactttataaaaagcacgctacccaaccttggcttggtacagatggaaaagaccatcaatcaggtatttgaaatggacatcgctaaacagttacaagcttatgaagttgagtaccacgtccttcaagaagaacttatcgattcctctcctctcagtgacaaccaaagaatggataaattagagaaaaccaacagcagcttacgctggaatggaattg

SEQ ID NO: 96527 - DNA, 1176 bp, Homo Sapiens
  misc_feature (558)..(600): n is a, c, g, or t
ttagatgaagagagcttcttaagatcagcgtttaagagtcaaagcacctgtaagggagagttaacgaccctttcaaatcaagtgagggcagaagggtgagggcatagttcaaaggaacgaggcagctccaccggaaggtggcgagtaaaagctgcacaccgtggcaaatcagtagcaatgggaaagggcaggaaggtacagccaagaatagctacaaacaactggtcaccttcaaaggaaacgctgcatatggatgtctgtgtatatgtactatacatatcaaccaagcacacacataaatatttaatatataaaaaataaagtgctttctaacaggtccctgggcagggacattataaaacatttcacagaactgcaaaacaaaattgatacaatcaaagaacactacatccaacatatgtgaaaacagccaaacacagtatgtacaatctggtgggtgtcccaggacaaacatcctgtcatatacatggtatatacatatatactcttttactcaatatattatgacaatatatattttaaaattttgttatagannnnnnnnnnnnnnnnnnnnnnnnnnnnnnnnnnnnnnnnnnnacgataaggatcaagcaggtgagtcctagactgacagacaaatcactgcctccacggggagtcccattgccactgctggggaaaatgtgccagcgttccttccttgggtgcagggcctccacatcctccaaggcactgtgggctgcggcagtaaagttggcatcaccagtggtgagcaggtcgaagacacaggactggaaatagatgtccttcactggcatcttctcatggcattgagtgttggcagtctccagtgtgtagccaggccaggcctgcaccaaggaggtgcgaggcaggctgtgtcccaggatggcagacacctggccctgcccgtcatcgatgcgttcactcagggggcagccgttcacgcacagctgcaggtcctggctctcctcgtaggacatggccaggtcttcaggcatacggatggcaagggtcaggtagcgacccacctgccgcacaaacactgtggtccctatatagcgggcgtgcatctccacatagtggccactctccctttccacgatacgcaggctcggacgcgtgggtcgacgatatcccgggaattccggaccg

SEQ ID NO: 96528 - DNA, 866 bp, Homo Sapiens
gatgtcgcccaccaacccgctggtacggtccggaattcccgggatatcgtcgacccacgcgtccgcccacgcgtccgcgtgcggcaagtgagcgatttggtgaacagacactcccttctgtagccatggattgttacagaacttcactaagcagttcctggatttaccccactgtgatcctctgcttatttggttttttctccatgatgagaccctcagaaccattccttatcccatatttatctggaccagataaaaacctgaccagtgcagagataacaaatgagatcttccccgtttggacatactcctacctggtgctgctgctgcctgtgtttgtcctcaccgattatgtccgctacaagccagtcatcatcttgcaaggtatcagtttcatcattacctggctgctgctgttgtttggccaaggagtgaagaccatgcacgttgtagagttcttctatgggatggtcaccgccgccgaggtggcctactacgcctacatatacagcgtggtcagccccgagcactaccagagagtgagcggctactgcaggagcatcacgctggccgcctacacagaagggtcggtgctggctcaactcttggtatccctggcgaacatgtcgtacttttacctcaacgtcatatcccttgggcctctgtctccgtgggctttcccttttctcacttttcctaccaatgcccaagaaaagcatgttttcatgcaaaacccagcagagaaatacagaagtcatcaagcgtgaatccagtattagaggaaactcacgaaggtgaagcaccaggctgtgaagagcagaaacccacatcagaaaatactcagcacttcagggaagctgaataag

SEQ ID NO: 96529 - DNA, 2163 bp, Homo Sapiens
  misc_feature (1927)..(1944): n is a, c, g, or t
  misc_feature (2113)..(2113): n is a, c, g, or t
gatattttttcttaatgtgttctattccagtgatgtcttggttcgtgtccccactgctttctggaattatgtctggaattttattcttcctggttcgtgcattcatcctccataaggcagatccagttcctaatggtttgcgagctttgccagttttctatgcctgcacagttggaataaacctcttttccatcatgtatactggagcaccgttgctgggctttgacaaacttcctctgtggggtaccatcctcatctcggtgggatgtgcagttttctgtgcccttatcgtctggttctttgtatgtcccaggatgaagagaaaaattgaacgagaaataaagtgtagtccttctgaaagccccttaatggaaaaaaagaatagcttgaaagaagaccatgaagaaacaaagttgtctgttggtgatattgaaaacaagcatcctgtttctgaggtagggcctgccactgtgcccctccaggctgtggtggaggagagaacagtctcattcaaacttggagatttggaggaagctccagagagagagaggcttcccagcgtggacttgaaagaggaaaccagcatagatagcaccgtgaatggtgcagtgcagttgcctaatgggaaccttgtccagttcagtcaagccgtcagcaaccaaataaactccagtggccactaccagtatcacaccgtgcataaggattccggcctgtacaaagagctactccataaattacatcttgccaaggtgggagattgcatgggagactccggtgacaaacccttaaggcgcaataatagctatacttcctataccatggcaatatgtggcatgcctctggattcattccgtgccaaagaaggtgaacagaagggcgaagaaatggagaagctgacatggcctaatgcagactccaagaagcgaattcgaatggacagttacaccagttactgcaatgctgtgtctgaccttcactcagcatctgagatagacatgagtgtcaaggcagagatgggtctaggtgacagaaaaggaagtaatggctctctagaagaatggtatgaccaggataagcctgaagtctctctcctcttccagttcctgcagatccttacagcctgctttgggtcattcgcccatggtggcaatgacgtaagcaatgccattgggcctctggttgctttatatttggtttatgacacaggagatgtttcttcaaaagtggcaacaccaatatggcttctactctatggtggtgttggtatctgtgttggtctgtgggtttggggaagaagagttatccagaccatggggaaggatctgacaccgatcacaccctctagtggcttcagtattgaactggcatctgccctcactgtggtgattgcatcaaatattggccttcccatcagtacaacacattgtaaagtgggctctgttgtgtctgttggctggctccggtccaagaaggctgttgactggcgtctctttcgtaacatttttatggcctggtttgtcacagtccccatttctggagttatcagtgctgccatcatggcaatcttcagatatgtcatcctcagaatgtgaagctgtttgagattaaaatttgtgtcaatgtttgggaccatcttaggtattcctgctcccctgaagaatgattacagtgttaacagaagactgacaagagtctttttatttgggagccagaggagggaagtgttacttgtgctataactgcttttgtgctaaatatgaattgtctcaaaattagctgtgtaaaatagcccgggttccactggctcctgctgaggtcccctttcccttctgggctgtgaattccctgtacatatttctctactttttgtatcaggcttcaattccattatgttttaatgttgtctctgaagatgacttgtgannnnnnnnnnnnnnnnnnaaacatgaagagccgtttgacagagcatgctcctggcgttgtttggtttcaccagctttctgccctcacatgcacaggggattttaacaacaaaaatataactacaactttcccttgtagtcctcttatataagtaagagtcccttggtactctgcccctcctgtcaantagtgggcaggaacctatttggcattattcgggagcttccttaaaaggga

SEQ ID NO: 96530 - DNA, 1514 bp, Homo Sapiens
  misc_feature (1349)..(1349): n is a, c, g, or t
cggtccggaattcccgggatatcgtcgaccccgcgtccggagctgcccgcactccgtagctcatggatgtgctgggcctgcctttggcgccatgctgcagactccagtgggcctggtttctgcagaatgtccatggtggccgctgcagagttgcagaggtccctgtagagataaagctgaggaggaggctgtgtgtgatggctctggctcggaccaaccagatgagcctcctgaagcccccttccctgcctgcctgctgacccgtggccccagctcactcattgccctcagcagccacccgaggctgtgcagaagggtaggttcaggttgaccaggaagctgccaaaagggacatggatatgaggatacatctggacgtgcttaggaacagggtgctggttgagggcccccagctgacccctactgcagatccgcatgtggaccatgagccggctgccagcactaggtcctgggcagctttgtttgtcccacttttctttgtttcttctcactaaaatgatcacgaagacctttgacaagaggagagatatgcactgtgatattaaattagaaataatttatcaaaatcagacctctcctaaaagaataagaaattcattgtttggcccatcctgaaaggtgaggtggcgagacagtggggtgcctccgtgccgcttcgtgcagcagcaagttcagcctgagatgctggctgtactcagcctttgcaatttttgtagatgtagcttaggacgtgagttatttttccgcagactggccaagagccaggttctaagcttggacctaaggtagaaagctgcccatcgggggccctagctcagccccaccaggccctctgttgggcctgcacacagctctgtggctagaacactccaaggcccttcggtacccatcagagtgggccccttgccaggtggcttttcagttacagagtccagtggaccattttgtagaaccatgcagctccctgcggaaggtggggtagggtgggaaagaggagcaggtctggaggtttgtggaacccagtcccctgcagaatctgtaaaacctaataaatcatggttgtggccattctcacggtggtgattgtgattagacgacccccgggaagcccagacactcgggggcctggagttcctccccctgcctgacctagaagcagaaccgttttcagcgctctgccctgttggctttaaggctttgtctaaattttaaggaaaaagatcctcccggggttttatttctctcttttcttgaggggactgtttccctatattaaaagagggggtgagtcctgggggagctttcccgcctcctgtccacgtgctaancagaacagggaggccccagcacccctggctgctttttgctgggggcaatggaacggacccccaactccttaatcttcgggccccaaacaatggctggtgagcaagtggggggccatggggcaccgaaatggccccctttggacacccccctgcctgggggggctc

SEQ ID NO: 96531 - DNA, 1139 bp, Homo Sapiens
cagtgtgcccaaacccctaagccctctttgtggttccccccgaagggttgggtggggaacggacgggccaggcccaccaaaattgacattcccttcgggccggccctgggccaaagggccagaaaccgccacggcaagcccccaaagggtggttcctggaaatcctgcaagggagaccaaggggccaacccggtgggcagcggggaataaatgtggaaaggtggaaagagggccagttggggaaggggtttccaacttctgttttcagacaacccctttggaatgcatccccagcaacccctgggaggccatgaactggagcagccgtgtgtgcagcaattgccatgctatctcttcccctctcattctagtttcacatttggaattgttttttaaacaaagggctcagtttaacataaggagcactgttcccaccaacctaggcaggccccccatatttggccaggacctctgggggccacgcctgtttgggtgtctgggtggtaggagcttcgctacttgactggagagcagcaggccagctggccccaaggctcccaagggccgggcaccacggtcgtgttccacgaagagcagagcggaggggaggtccagttgaccctctccgagcattcacagcccctgaagccagggcagcgtcctctggaagtcagctctcacaccacagagtcacggatctccgagccaaggcggacccggggccgggggcacactggggatacctccacgaagctgtcttggatgctgagtggcctcttctctgactcagtgaagactcgggaccccggggggctgtctgacagggactggtaccctcggtgatcgagcggggtgctaagggaccctaggccgttgagagggcgggtatcagggggcagcaccacacggtcaggtcttggggtgcaacgctggcacattccccctgcttcaggaagactttcatgctgttccggtgccggtagagcaagaataaaactgggagcagcacggccagcacaaagagcgtgcacatcaccaggaactccttccagtaggacctgtctgcaccccagctggccttgccaccagctggtgcactcacacgcgatgtgctgataatgacgggtacactgccaccc

SEQ ID NO: 96532 - DNA, 946 bp, Homo Sapiens
agaaaagtccaaaggtaaaacctaccagcccccacattgttagggtgatctccagggacccctgaattggatacttgaagggttgatagaaactgaaaatgagctggacttaagctgctggctcactccctccacaccacagtcatttctgtttgttccacctggagtggtcccgtgccacccctcagtgaaccctccgggcagcagcaggggggctgtttttgggaagctactggttttgccatttgcttccagaatcacatagactataacaaactttacattaaacactgttctgtcctgagttgggggaaagcccatgagaggagggggccgagttcactgggactcttccctccttggcgtggcgtcatacgtggccctcaggtttctcttcttccattgcttgactgtctgttcctttttcattagtgaccccttctgaagtcttcttgcccattgctttattggcctcttccttggcatcctgctctgcaaacttcttgaacatgttggcgtatatcctgcggtcccgctcgttgtgctccttggcctttttctggcacatggagatctgcagtcttgcagccttattctgggggtttacttccagcactttctcaaagtcacccttggctgactcaaactcgttcatgagcagctgggcttcacccctcctatacaagcctttctcattggcactgtccagtccaagggccttgtcacagcattcaacagctttggtgtattctctaagcttcaggtagcacatggccaggttcagaaaggcagcaaggagaaatgattcagaagctttcgattccttttctgataaaccatattccatctctaaccaggacactatcttcccatactgaatcaccgcctgcatgtatttgcctccctagaagtatacggttcccttctctttgacaatggcagcccc

SEQ ID NO: 96533 - DNA, 885 bp, Homo Sapiens
gctggtaccggtccggaattcccgggatatcgtcgaccacgcgtccggcagccgccgctacagtccgggccgggctccaccgcgcatcctgctccactctggcgaccgcccccggggcccccgccgcgggcgcggcgcccgccatgggcgaggaggactactatctggagctgtgcgagcggccggtgcagttcgagaaggcgaaccctgtcaactgcgtcttcttcgatgaggccaacaagcaggtttttgctgttcgatctggtggagctactggcgtggtagttaaaggcccagatgataggaatcccatctcatttagaatggatgacaaaggagaagtgaagtgcattaagttttccttagaaaataagatattggctgttcagaggacctcaaagactgtggatttttgtaattttatccctgataattcccagctggaatacacacaggagtgcaagactaagaatgccaacattctaggattctgctggactagttcaactgaaattgtcttcataacagatcaaggaatcgaattttaccaggtattaccagagaaacggagtctgaaactcttgaagagccacaatctcaatgtgaattggtacatgtactgccccgagagcgccgggatcttgctgtctaccacggtcctggagaatgtcctgcagccttttccactttagggctggcactatgtcgaagctgcccaaatttgagattgaattaccagctgcgcctaagtcaactaaacccagcctttccgaaagagacatcgcaatggctaccatatacgggcagctgtatgttctcttcttgaggcatcattctcgggactccaacagcacaggagcggaggtggtcctctatcaatctaca

SEQ ID NO: 96534 - DNA, 2899 bp, Homo Sapiens
  misc_feature (1809)..(1809): n is a, c, g, or t
cgctgccagtgtcagggtcactgctgtcttgcagccgctcttcggggctccccaggttccggcctctctcggtcctcaaagtttcgatggacagagcgagtagtgacaggtagatccaggcggtcagtgcctcggctgggctgtggggggttgaaactcaagtacagggcatcgcctgcggggaggctgcgccgccgaggatccacaggtctgcgggcccagggggcctcagctgggagtggctcggtctggcccagggcggccagctgccttcgagcctcttcggcctcacgctccagcagtgcccgggcctgctcactctcccggagccgggcctccaggctgccagcttcggttgcccgttcttcacctagccgccggcagcgccgtagctcctcctgcagcagcgcatgttgccgctgcagtaatgccagttccgtggcctgcttttcaggggccacaggggcagccccagccctgccagcctccccatcccgagagttggctcggcacagcttctcccgccgctcagggccctcagggaaccgggcttccatcagagtgtcctgctgggccacagctgcctgtaggccatgtagaagtccatagagattgaccaatcgctgtaacgcctcctcttgcggtgatctcagctgatttccatttcgatccctctggctagagtctgagtcagctctgcagagttcaatggagccattgaaggttctggcctcaccattggcagtgaccccaggactcgtgttaccaccgctgtctggttccaaggggcagggctggctctcggggtgtcaagagcagttccactcctggccccaccagcaggtctttcagaccctccacctcacggatggcatcctgcagcagccgctcgccacgaggggactcaagggactcagagcggaaaaggcccctgggcagggtgggcagggccatcccactgccaccatcctcttcggcctggaaatgggtcatctcagcaaacagcccgaccttctctcgcagcagctccaccagtgcccggtccttctgctgcaactccatcttaattcgccgcaggtaagcctcatcctctgtctcaatcagggggaagtcctccctggatgggcatgtgcgcacgctctgctgaatgacccggatccaggtgctccggtcatcccgggatgctgtgtgcacctcgtacatctcaggtggggctgcgctgatcagaaacatccctttctcctggttggcaatgtctcgtacgattagattctgcagcgataccactgaaggcttgtccagggtaggaaagatgtacttctggtccttttcctggagaaacaccagtacatctgtcatcagcagcactagcacatctttgaagcgccccgtcgctgtcttccagagcaggcagccatcgtggatgagtttgcgcctcagaagttcctctcggccaaaggggcccttgccaggcactggggtttgggcccgagggtccatgcggttgtagatctcctgcagacgggcccctttctccagctgataaataccctcgtccacattggacagcagctccttcactagccccagtgctgtggtcaggtcctggcgctcctcctcgatcccgtgggaatgctgcaggatgcggcctgatgagtaacgggtacttggtgatgcgctgagtcaccagcaggatgcactcctgtaccccgtgccgtcgtgagcacggcggggcgggtcactttccggatgaattgctggaagcgtttgtctcgggcgtacagctccttatagagctttaaggccttngctgtggcggctgcagaactccgagtaggtcttacacatctgctccgcactaggacctgagaactggctgatgagcagatcacccaagcgatggatgacaaagttccgggtgctgccagggcacagggcctggcgtcggcgttctaatagctggctgaggaagcgtgtatggatgtcactgagctcgtccacgcaggggaacaggccctggaccactcctggctccaagtgtagctcttccagcatccccgtgcggaagaggcgggtcatgatcttcagtgtcctcacatggtgcagctctgtctggattagctcatagatgacatcttgctgcttcatcacctcctttttatgctgctgcaggaagctgctgtccacagcaagactccaagagtcagctgcaaagtccttctcatccatctcaaagtcactcatcagctcactgtagattacctcttcgtcaatgagggattgccacggatagggttcggttccgcatgttgagggagtctgtggactgtgagaggatccggcgcagccccaggggagactcatcattgaaatgtccagcaatgttggtggtagaaaacactcttggctaaagacaaggaggagcggccacggcgggagcccaggagggactgccggaagctgtcggaggggtagatggccgagcttggccgctcccggatggttgtcttacttcgaagagaaacggaactgcaaggcggtgttgttcttcagcagggccgctttctgttgcttctgcttgaccttggtacagttggcgagggtgtctttacagcggttgtggatagtcacattgcaggttgggcagatgagggcttccttggctgtgatgctcttgttacaggcatagcacatggtcatgcctgaaactgaaatggtggtgaagaggtgcccattggtatagcgggcatccttggcttccttcatcttctccttttcccgggtctggcccctacggctgggctgcctccatgttgccacatcatctacactggctctaggtctctgcgtcctcactccaccttcccagccctagctctgctcacccccgagctgctgt

SEQ ID NO: 96535 - DNA, 785 bp, Homo Sapiens
cccatactccctccctcccccccctccacgctgttggtactggcccggaatttccgggatctccccccgccttcccccaacaatacaggacgccggggtccgcgccgcgtcctccctggtccccccgtccgattatgtctcggatcgaatccctcacgcgggcgcggatcgaccggagcagagagctggcgagcaagacccgggaaaaggagaagatgaaggaagccaaggatgcccgctataccaatgggcacctcttcaccaccatttcagtttcaggcatgaccatgtgctatgcctgtaacaagagcatcacagccaaggaagccctcatctgcccaacctgcaatgtgactatccacaaccgctgtaaagacaccctcgccaactgtaccaaggtcaagcagaagcaacagaaagcggccctgctgaagaacaacaccgccttgcagtccgtttctcttcgaagtaagaacatttcaatgatgagtctcccctggggctgcgccggatcctctcacagtccacagactccctcaacatgcggaaccgaaccctatccgtggaatccctcattgacgaagcagaggtaatctacagtgagctgatgagtgactttgagatggatgagaaggactttgcagctgactcttggagtcttgctgtggacagcagcttcctgcagcagcataaaaaggaggtgatgaagcaccaagaagtcatctatgagctaatccggacagagctgcaccatgtgaggacactgaagatcatgacccgcctct

SEQ ID NO: 96536 - DNA, 957 bp, Homo Sapiens
ctggaccggtccggaattcccgggatatcgtcgacccacgcgtccggccgctccgagtggaggcgactgggggctgaagagcgcgccgccctctcgtcccactttccaggtgtgtgatcctgtaaaattaaatcttccaagatgatctggtatatattaattataggaattctgcttccccagtctatggctcatccaggcttttttacttcaattggtcagatgactgatttgatccatactgagaaagatctggcgacttcaaagaaacactatattaaggcagaagaggacaagttagaacaaataaaaaaatgggcagagaagttagatcggctaactagtacagcgacaaaagatccagaaggatttgttgggcatccagtaaatgcattcaaattaatgaaacgtctgaatactgagtggagtgagttggagaatctggtccttaaggatatgccagatggctttatctctaacctaaccattcagagacagtactttcctaatgatgaagatcaggttggggcagccaaagctctgttacgtctccaggatacctacaatttggatacagataccatctcaaagggtaatcttccaggagtgaaacacaaatcttttctaacggctgacggactgctctgagttgggcaaagtgccctatacagaaccagattattaccatacggaactgcggatggaacaagccctaacgccactggatgaaggccgagattttctaccatagataaaggcctctgcttctacattatttgaacctatgccggtgtatcacgcagggcaggacccgcggataaggggcacttttgccctcaccaaaagaaagccttcccttggaacctaggatccgctggaaccatccgagacgaacctaaattggctaaacctttataaacatatattttgcgagcctataattaattgcgcccttta

SEQ ID NO: 96537 - DNA, 999 bp, Homo Sapiens
  misc_feature (933)..(933): n is a, c, g, or t
ctggtaccggtccggaattcccgggatatcgtcgacccacgcgtccgccttctttcagctccttccctccacctcaatacacactcctgtcccaggaacctaacctcatctagaaataccagggccagcatgccttacacctagaggtttggttggcttcagagaaacttctggaggctaaaagcagccaagaagaatcagccactacatgctgggcctggatgaacagagcagtgagctgtgatggggctggggctggggcccaggaggagcaggcaggagagtttgtatgcaccgtgattcaaatattataacaaaaatcatcgatcatgtgttaggcactttacagttcccaaagcactttcccatccatgccctgatgatctttgacacaacactgtgatgtgggttttattatttccagtacagatgaggaagactgaggcctgcatcagtgaagcaacctatccaagactacatagagaaggcagtaaatggcagggttagtctcagaacaggggagggtctgttccccccgcagtgggcagtcctaattctgaacttcacctatctgggggtgatagaggggaacaagaggaagcctggctgaacagaaaacctaaacatctgctttgtctacgtatgacttcctctgcttgtgggacacaacgaaggaaacgaacacattggtggcacccccacaaccccaacagaaataaacccctgtaccgggttgaaccccagagggcttcccttcccaatccaggagccccgcgaccacatggatctatccctctggggccccacccagagaagatgctcgcccctagtcccagtttcgcatttttcccaatcccaatttccccccaaaccgcgcccgtgttcctaacttttacttttcaccgtgggggggaacccaatgccccggggtgnttccgcgggccgtcacccctctagcgcggagccagggcaactctccactgagggcgcccccccttt

SEQ ID NO: 96538 - DNA, 1511 bp, Homo Sapiens
  misc_feature (1254)..(1254): n is a, c, g, or t
  misc_feature (1433)..(1444): n is a, c, g, or t
  misc_feature (1449)..(1458): n is a, c, g, or t
aagctagtacgaggcctggtgttgaattcggcacgaggaggaggcggagacgctggctcaggtgaagccttcagggaagacccaccagatcagagctgccttggctcctgccaaggagtcccccaggaaaggggctgccccaacacctcctgggaagacagggccttcggctgcccaggcagggaagcaggatgactcagggagcagcagcgaggaatcagacagtgatggggaggcaccggcagctgtgacctctgcccaggtgattaaaccccctctgatttttgtcgaccctaatcgtagtccagctggcccagctgctacacccgcacaagcccaggctgcaagcaccccgaggaaggcccgagcctcggagagcacagccaggagctcctcctccgagagcgaggatgaggacgtgatccccgctacacagtgcttgactcctggcatcagaaccaatgtggtgaccatgcccactgcccacccaagaatagcccccaaagccagcatggctggggccagcagcagcaaggagtccagtcggatatcagatggcaagaaacaggagggaccagccactcaggtgtcaaagaagaacccagcttccctcccactgacccaggctgccctgaaggtcctcgcccagaaagccagtgaggctcagcctcctgttgccaggacccagccttcaagtgggggttgacagtgctgtgggaacactccctgcaacaagtccccagagcacctccgtccaggccaaagggaccaacaagctcagaaaacctaagcttcctgaggtccagcaggccaccaaagcccctgagagctcagatgacagtgaggacagcagcgacagttcttcagggagtgaggaagatggtgaagggccccagggggccaagtcagcccacacgctggtaggtcccaccccctccaggacagagaccctggtggaggagaccgcagcagagtccagcgaggatgatgtggtggcgccatcccagtctctcctctcaggttatatgacccctggactaaccccagccaattcccaggcctcaaaagacactcacaagctagactccagcccctcagtttcctctactctggccgccaaagataacccagatggcaagcaggaggcaaagccccaacaggcagcaggcatgttgtcccctaaaacaggtggaaaagaggctgcttcaggcaccacacctcagaagtcccggaagcccaagaaagggggctggngaaccccccaagccctcaacccctgggcggctgcaaaagcaaacatcacccccagggcctcccctggggccaaacccttggcccccctgaatggaagggcccagggggcaaggccctcaatggggggaagggccctggaatggaacctgccttgggaacccgggaaaagaaaaagaaannnnnnnnnnnnaacannnnnnnnnnaggggagaaacccacccccgggaaaaggggccttgtgggaaaaaacacccccc

SEQ ID NO: 96539 - DNA, 1465 bp, Homo Sapiens
  misc_feature (1170)..(1170): n is a, c, g, or t
ggcacgaggtaggaaaacagggcctgcagccgcccaggtccaggtggggaagcaggaggaggactcaagaagcagcagcgaggagtcagacagtgacagagaggcactggcagccatgaatgcagctcaggtgaagcccttggggaaaagcccccaggtgaaacctgcctctaccatgggcatggggcccttggggaaaggcgccggcccagtgccacccgggaaggtggggcctgcaaccccctcagcccaggtggggaagtgggaggaggactcagagagcagtagtgaggagtcatcagacagcagtgatggagaggtgcccacagctgtggccccggctcaggaaaagtccttggggaacatcctccaggccaaacccacctccagtcctgccaaggggccccctcaaaaggcagggcctgtagccgtccaggtcaaggctgaaaagcccatggacaactcggagagcagcgaggagtcatcggacagtgcggacagtgaggaggcaccagcagccatgactgcagctcaggcaaaaccagctctgaaacattcctcagaccaaggcctgcccaaagaaaaccaataccactgcatctgccaaggtcgcccctgtgcgagtgggcacccaatgccccccggaaagcaggaactgcgacttctccagcaggctcatccccagctgtggctgggggcacccagagaccagcagaggattcttcaagcagtgaggaatcagatagtgaggaagagaagacaggtcttgcagtaaccgtgggacaggcaaagtctgtggggaaaggcctccaggtgaaagcagcctcagtgcctgtcaaggggtccttggggcaagggactgctccagtactccctgggaagacggggcctacagtcacccaggtgaaagctgaaaagcaggaatgactctgagagcagtgaggaggaatcagacagtgaggaagcagctgcatctccagcacaggtggaaaacctcaggtaaagaaaagcccaggccaaagcgcaacccagctgccgcgcagagtcaccttcagcaaaagggacaatttcagcccctggaaaagttgtcactgcagctgctcaagccaagcagtaggtctccatccaatggtgaagccaccagtgagaaacccccagaagcagtaccgntcttggcgaggggcccagcatctgtgccatctgtggggaaggccgtggctacaggatgctcaggcccagacagggcccagaggaggactcagggagcagtgaggaggagtcagacagtgaggaggaggcggagacgctggctcaggtgaagccttcagggaagacccaccagatcagagctgcttggtccctgcaaggagtcccccaggaaaggggctgcccaaacacctcctgggaagacaggccttcggcttgccaggcaggaagcaggatgatcaggtagcagacgaggatc

SEQ ID NO: 96540 - DNA, 1275 bp, Homo Sapiens
  misc_feature (135)..(135): n is a, c, g, or t
tggtaccgggtccggaattcccgggatatcgtcgacccacgcgtccgcccacgcgtccgcgctgccctgagcctcccgtgccggccggccggccgggggaacaggcgggcgctcggggggcgctcggggggcggngggagttccggttccggttctttgtgcggctgcatcggcggctccgggaagatggcggcccgggcgggtttccagtctgtggctccaagcggcggcgccggagcctcaggaggggcgggcgcggctgctgccttgggcccgggcggaactccggggcctcctgtgcgaatgggcccggctccgggtcaagggctgtaccgctccccgatgcccggagcggcctatccgagaccaggtatgttgccaggcagccgaatgacacctcagggaccttccatgggaccccctggctatggggggaacccttcagtccgacctggcctggcccagtcagggatggatcagtcccgcaagagacctgcccctcagcagatccagcaggtccagcagcaggcggtccaaaatcgaaaccacaatgcaaagaaaaagaagatggctgacaaaattctacctcaaaggattcgtgaactggtaccagaatcccaggcctatatggatctcttggcttttgaaaggaaactggaccagactatcatgaggaaacggctagatatccaagaggccttgaaacgtcccatcaagcaaaaacggaagctgcgaattttcatttctaacactttcaatccggctaagtcagatgccgaggatggggaagggacgggggcttccctgggagcttcgggtaaaaaggacggctcccctggaggatttcaccccttggtccaaaataggatggccccttaaaacaaaagaaggaaaggtcctccttccctttttttaaagaaccttttgggggaattggaaacttgggaccaaaagaacctggtatggggcccaagaaaaaaccctctcttgggtcaaaaatgggcgcccagggaaccgcccccctaccccaggggagaacccgaagggggcttttcacagggggaaaaccggtcccgggaaaaacctgggaaatggttacgcgggggaaactggggcctacactgagaagcgcggggaatatacccaagaccctccccccaagtttttctaaaattatggcaccccccggcccccatgagtctcacacattcctcgtggggaactcccccattaacccccaaaaactgcgtgccccgcgggggcatcccctctcca

SEQ ID NO: 96541 - DNA, 965 bp, Homo Sapiens
  misc_feature (152)..(152): n is a, c, g, or t
  misc_feature (266)..(266): n is a, c, g, or t
gcagatggacaaacttcccgtttggtgaaggtccttgaagcttaaggtgtctttaatataatgcccacagtgcttggatgatcacggacgaagtctgggtatggatgcccaggagtcgagctaggcgggggtttaatttaaactggggaggntgtaatccagcatcagtaggacagtacaccgtacattcacgtctcccggccgcttcaccggaaagccatcggtctcctgggtagtggcggtcctgtgccaattctaccagatgngttgtctggcccatacaggtctttgtccagttcaatcaccaagggacttaaaaaaggaagagaacttcctctttttgtttagtggcatcatatttggacaaggctgacttgatgggacgtttcaaggcctcttggatatgctagccgtttcctcatgatagtctggtccagtttccgttcaaaagccaagagatccatataggcctgggattctggtaccagttcacgaatcctttgaggtagaattttgtcagccatcttctttttctttgcattgtggtttcgattttggaccgcctgctgctggacctgctggatctgctgaggggcaggtctcttgcagggactgatccatccctgactgggccaggccaggtcggactgaagggttccccctcatagcacagggggtcccatggaaggtccctgaggtgtcattcaggctgcctggcaacataccatggtctcggataggccagctccgggcatcaggggagcaggtacagcaccttgacccaggagccgggcccattcgcacaggaggccccggagttccgcccgggcccaaggcagcagccgcgcccgcccctcctgaggctccggcgcacgccagcgttggagcgcacagactggaaacccgcccgggcacgccatcttcccggagccgccgatgcagcacgcacaaagaaccagaaccgg

SEQ ID NO: 96542 - DNA, 1560 bp, Homo Sapiens
gctaattccccgctaccgggttgcggccggaagccgggcgccgcggctctgcttccctcggggatctggcgacatggccagaaaggctctcaagcttgcttcgtggaccagcatggctcttgctgcctctggcatctacttctacagtaacaagtacttggaccctaatgactttggcgctgtcagggtgggcagagcagttgctacgacggctgtcatcagttacgactacctcacttccctgaagagtgtcccttatggctcagaggagtacttgcagctgagatctaaggtgcaccttcgctctgccaggcgtctctgtgagctctgctgtgccaaccggggcaccttcatcaaggtgggccagcacctgggggctctggactacctgttgccagaggagtacaccagcacgctgaaggtactgcacagccaggctccacagagcagcatgcaagagatccgccaggtcatccgagaagatctgggcaaggagatccatgatttgttccagagcttcgatgacacccctctggggacggcctccctggcccaggtccacaaggcagtgctgcatgatgggcggacggtggccgtgaaggtccagcacccaaaggtgcgggctcagagctcgaaggacattctcctgatggaggtgctcgttctggctgtgaagcagctgttcccagagtttgagtttatgtggcttgtggatgaagccaagaagaacctgcctttggagctggatttcctcaatgaagggaggaatgctgaaaaggtgtcccagatgctcaggcattttgacttcttgaaggtcccccgaatccactgggacctgtccacggagcgggtcctcctgatggagtttgtggatggcgggcaggtcaatgacagagactacatggagaggaacaagatcgacgtcaatgagatctcacgccacctgggcaagatgtatagtgagatgatcttcgtcaatggcttcgtgcactgcgatccccaccccggcaatgtactggtgcggaagcaccccggcacgggaaaggcggagattgtcctgttggaccatgggctttaccagatgctcacggaagaattccgcctgaattactgccacctctggcagtctctgatctggactgacatgaagagagtgaaggaatacagccagcgactgggagcccggggatctcctaccccttggttggcctgcattgctgaccgggcgccatccttgggaactccggtcaaaccgaaggccttcaggccaaggcttcccggtccacttgccacttgaggaacttaaaaaaatctcacaacaaacgcagggccaacctacctttcccccaagatgaaagccatttttcctttcaaccaccgtgtgccccgcccaaaaaagcctgccctccttcgttgagaaaacaccccgcaacctggtttgcggggagcaatttgaggcgccgcccctgtggggaacccgtcgtaccaagaggcccgactctcctttttcttcaacattgtccacctttggccttggcgtaccaagagcgctcattgctg

SEQ ID NO: 96543 - DNA, 960 bp, Homo Sapiens
gctggtaccggtccggaattcccgggatatcgtcgacccacgcgtccgatacttttaaagactgagctgtttaagaattttttggggaacatttctagcagtgatttttttggcctttaatgatagcgtaaagacaggagccttacaacttaggcaaagcatttcacatgcagtccttcttccatctcaaaatatgtacttattttacatacagaattttacactaaccattgaaaaataaagtaggatctgctacagtttcacctgaaaatttataaaaagtgttgagattggtagaaggtagtttttaagtacatgtgcactaccctaaaagacttgtctattgtcaataaagtgttagtatttgtgaaattattattcctgttcagaaatactatttcttaaatctcctgggaatttgtggcataataaagcacattcaaagttctaatgtatttatgagctcattttcaaaatagtaagtttgtcatctttaaaatgaacatgacttgcctccttgatttctgaaatgaattaattgaagattgctatagtaatctttatttcatctttctagagttgttgacaattttattatacaacagttaccattagagaaggagggaagggcttttgggtgtgtatttatacgtactaagggatttactaaatattgcagattagcactgtcactcttggtccaagaagtttccaacatacaaaattaagtaccagggatgggggagcacaggacgttttttctttttccctcacgtcaaaaaaattttcctttcgcccgcaaaactctaacacatctccctaccgggtgaaaaaagcttgcccccgcgcctcgcaatgggagacttggccgaagcacccacggcgatggagaccccccgtgccccttttccgtgttctgcccaaatggaccaccgccggcgggcgtttcccacccctgta

SEQ ID NO: 96544 - DNA, 1230 bp, Homo Sapiens
  misc_feature (202)..(202): n is a, c, g, or t
  misc_feature (206)..(206): n is a, c, g, or t
  misc_feature (1076)..(1110): n is a, c, g, or t
  misc_feature (1114)..(1165): n is a, c, g, or t
catcttcccaacaaagatccggtataataattctattaccagctctaaaggatggggaaaatatttatctccaggcagccactttcagtttcttttctggcctttcagcactgagggcagagaaattttaaaggctgtctcgcacgtagtacaaatggggctgaaattgcagaatattgacaaacacccagaacagacatanccantttcaatgagatttcgatgacagaagcaagcagccctgtagtcaacatgaactgggggtgggaggattaactgagatctctgatcttgatcgggaagaaacacccacagcaaatactgcagaagagaaggcatctgaggcaccttcaggtacagtcctcccgtgatgtcacaagcctgttggaggagccctgagtcggagtctaaaacacaggcatcaatcaaaatattctgtttctgtgctgcaaagatgacattcatgaagttcatatactgcaacgcactgtcttctgcagccttaatcaccaatatccttgatttcatttcctgatggtctttaactttcctggttcattctatgaatgtagcaaagggctttggccagggatcctgccagcaaagtttctgtatgttgaccctttatgtcacttttggtcattagatctttaatctcttcaacaataacttcatttgctgaggttaaaagttcgtattttccatctttactcccagagggattaaattcaggagggttgccagggtctccgaagaagtctccaagtctgccattctttccaggatataagaatcggctttcttgaatgtgacttgctatcacagcaagtttgttggaacgattcatgaataaatgcgaatttcccagcaccatcacggcatctatgcatttggataaagtgaactgagattcctttaatgcttgctttccccaccaaattgggttggcatcaactacaataaccagaagattcaattcatcttcgtctgaaaccatggctgtcccagcacctcagcgcagagcccccggccgtaatggccgaattcccgggcatatgtccggtaccgtcgactgnnnnnnnnnnnnnnnnnnnnnnnnnnnnnnnnnnncggnnnnnnnnnnnnnnnnnnnnnnnnnnnnnnnnnnnnnnnnnnnnnnnnnnnntagcgccctataggagttgggtggtgttcgggttgggggtatggggggaataattgagggaatag

SEQ ID NO: 96545 - DNA, 910 bp, Homo Sapiens
gggtgtgaatatagaacagttgtacaaaaagcaggctggtaccggtcggaattcccgggatatgtcgacccacgcgtcgcccacgcgtcggacgcggcgggagcatgttccggctcctgagctggagcctgggccgaggcttcctgcgggccgcggggcggcggtgccggggctgctccgcgcgcctgctcccggggctggcaggaggtccggggcccgaggtgcaggtgccgccatcccgagtcgcgccgcacggccggggcccaggcctgctgccgctgctggcagcgctcgcctggttctcgaggcccgctgcggcagaggaggaggagcagcagggagccgacggggccgctgccgaggacggggcggacgaggccgaggcagagatcatccagctgctgaagcgagccaagttgagcattatgaaagatgagccagaagaggctgagttaattttgcatgacgctcttcgtctcgcctatcagactgataacaagaaggccatcacttacacttatgatttgatggccaacttagcatttatacggggtcagcttgaaaatgctgaacaactttttaaagcaacaatgagttacctccttggagggggcatgaagcaggaggacaatgcaataattgaaatttcccctaaagctggccagccatctatgctgccgcagaacagaacaggaatttgctgttggctggctatggaattctgcattttcaactctagaaggaaaaaatggaaagaagaaaagggaattagccgaaagactttaatgtccagtggaagaaaaaagccaattaccccccctccttcctggggcatggggctttaaaacccggggggttcgcttacccttttgggtccttccaaggaaagccgtcccaagggccccaaaag

SEQ ID NO: 96546 - DNA, 835 bp, Homo Sapiens
  misc_feature (670)..(670): n is a, c, g, or t
gccgccgccgcgcagatccacgctggctccgtgcgccatggtcacccacagcaagtttcccgccgccgggatgagccgccccctggacaccagcctgcgcctcaagaccttcagctccaagagcgagtaccagctggtggtgaacgcagtgcgcaagctgcaggagagcggcttctactggagcgcagtgaccggcggcgaggcgaacctgctgctcagtgccgagcccgccggcacctttctgatccgcgacagctcggaccagcgccacttcttcacgctcagcgtcaagacccagtctgggaccaagaacctgcgcatccagtgtgaggggggcagcttctctctgcagagcgatccccggagcacgcagcccgtgccccgcttcgactgcgtgctcaagctggtgcaccactacatgccgccccctggagccccctccttcccctcgccacctactgaaccctcctccgaggtgcccgagcagccgtctgcccagccactccctgggagtccccccagaagagcctattacatctactccgggggcgagaagatccccctggtgttgagccggcccctctcctccaacgtggccactcttcagcatctctgtcggaagaccgtcaacggccacctggactcctatgagaaagtcacccagctgccngggcccattcgggagttcctggaccagtacgatgccccgctttaaggggtaaagggcgcaaagggcatgggtcgggagagggggacgcagggcccctctccttccgtggcacatggcaccaagcacaagaaaggcaacccaggaagaaaagccctggaagctcct

SEQ ID NO: 96547 - DNA, 903 bp, Homo Sapiens
gctggtaccggtccggaattcccgggatatcgtcgacccacgcgtccgcagagctcgggaccggcccaggagcagcgggtggagatggagatgattcgctatacccgatcgcggttttaatcgacgagctccgcaatgaagacgtgcagctccgactcaacagtattaagaagttatcaacaattgccctagcacttggagtagaaaggacccgaagtgaattgttgccatttcttacagatacaatttatgatgaagatgaggtactattagctcttgctgagcagctgggaaatttcactggcctagtgggaggtcctgactttgcccactgtctgctgcctcctttggaaaatctggcaactgtggaagagactgttgttcgtgacaaggctgtggagtccctgagacagatctcccaggagcatactcctgttgctctggaagcttattttgtacctctggtgaaacgcttagcaagtggggattggttcacctctcgcacatctgcatgtggtttgttcagcgtttgctatcccagggcatcaaatgctgttaaagcagaaatcagacagcaattccgttccttgtgctcagatgacacaccaatggtacgacgtgctgctgcttccaaattgggtgaatttgcaaaagttttggaattagacagtgtgaaaagtgaaattgttccactgttcactagtctagcttcagatgaacaggattcagtgcgcctccttgctgtggaagcttgtgtcagtattgcccagttattgtctcaggatggacttgagactttggtgatgcctacacttcgacaagcagcagaaggataaatctggcgcggtcgctatatggtggctgacagattttcagagctccgaaaagccatgggtcctaaaa

SEQ ID NO: 96548 - DNA, 951 bp, Homo Sapiens
ggaccggtccggaattcccgggatatcgtcgacccacgcgtccgcccacgcgtccgccacgcgtccgggctgccatggcggcggcgggccggctcccgagctcctgggccctcttctcgccgctcctcgcagggcttgcactactgggagtcgggccggtcccagcgcgggcgctgcacaacgtcacggccgagctctttggggccgaggcctggggcacccttgcggctttcggggacctcaactccgagcaagcagtacggatctcttcgtgctgcgggaaagaaatgacttaatcgtctttttggcagaccagaatgcaccctattttaaacccaaagtaaaggtatctttcaagaatcacagtgcattgataacaagtgtagtccctggggattatgatggagattctcaaatggatgtccttctgacatatcttcccaaaaattatgccaagagtgaattaggagctgttatcttctggggacaaaatcaaacattagatcctaacaatatgaccatactcaataggacttttcaagatgagccactaattatggatttcaatggtgatctaattcctgatatttttggtatcacaaatgaatccaaccagccacagatactataaggagggaatttatcatggcatccaccattgaccactacaagtaaaatgcgaattccacatatctcatgcatttattgatctgactgaagattttacagcagatttattcctgacgacattgaatggccaccactagttactttccagtttgaaatatgggaaaattttggatggaaaacttccctgtcagtactatattgggaaaaacctcaaaatatgatggggggttggacacccaacatttggcagacctttgatggagatgggacccctgggatcttttactgcccaggctggggaaaaataaaatttgcccaaaa

SEQ ID NO: 96549 - DNA, 1007 bp, Homo Sapiens
  misc_feature (65)..(97): n is a, c, g, or t
  misc_feature (146)..(184): n is a, c, g, or t
  misc_feature (866)..(875): n is a, c, g, or t
gctggtaccggtccggaattcccgggatatcgtcgacccacgcgtccggcttcgcgctgactcannnnnnnnnnnnnnnnnnnnnnnnnnnnnnnnnttagccggccctcgcgctctttcccttcctggggcgccgaccccgcccnnnnnnnnnnnnnnnnnnnnnnnnnnnnnnnnnnnnnnncggcgccacgcaagagaaggtgccaggggacgcagagcgactagaggcgcgcggtcccggccagcaccgtctctggcgttgtagctgcggccgtggcggaggactacggcgacaaggacgagggccgctctcccagctctctgcgtgccgcgccgctccgctccgctggctgaccatctggagtgcaggctgggaggcgggatggagtgatagggaagatgtttataaattcttctgtgggatcagagggcacgcctattacaaccagaaaactacaagtataacagcgaggatggatgaacaggctctattagggctaaatccaaatgctgattcagactttagacaaagggccctggcctattttgagcagttaaaaatttccccagatgcctggcaggtgtgtgcagaagctctagcccagaggacatacagtgatgatcatgtgaagtttttctgctttcaagtactggaacatcaagttaaatacaaatactcaaaactaaccactggttcaacaacagctaattaggggagacgctcatatcctgggctggcaacctcagatgcctgaatcccccaacccagagaagaccttttatacggaaataccggccgcccaaagtccttcgcccttggctttttggttacaaaagtctctcccctaagtgggccccccggnnnnnnnnnngacatttctcctcaggaagtgggacctaaatcccgagggggagtcagatcctccaacctggggaaatcccaactggcctattggatttcacaatttgggggggatccgtggatgggggtgggcttcccctcg

SEQ ID NO: 96550 - DNA, 1053 bp, Homo Sapiens
gctattgtgaatatagaaagtggtgtaaaaaaagcaggctggtaccggtcggaattcccgggatatcgtcgacccacgcgtcggagctgcgggccgggtgcggacggcggaggcggcgggactggtccctgctcttcagtgggtcatctgtgtgtcacagcctcagaagaccagcgagatggctgccaacaagagtaagggccagagctccttggccctccacaaggtgatcatggttggcagcggaggcgttggcaagtcagccctgacgcttcagttcatgtatgacgagtttgtagaagactatgaacctaccaaagctgacagttatagaaagaaagtggttcttgatggggaagaagttcagatagatattctggacaccgctgggcaagaggactacgcagccattcgagataactactttcggagtggggaagggtttcttcttgtgttctcaatcacagaacatgaatcctttacagcaactgccgaattcagggaacagattctccgtgtgaaggctgaagaagataaaattccactgctcgtcgtgggaaacaagtctgacctagaggagcggaggcaggtgcctgtggaggaggccaggagtaaagccgaagagtggggcgtgcagtacgtggagacgtcagcgaagacccgggccaacgtggacaaggtgttctttgacctaatgagagaaatcagaacaaaggaagatgtcagaaaacaaagacaagaatgggcaagaaaagcagcaagaacaagaaaagttttaaagaaagatgttgcttactatgagtgtcaaggtgacggatgaagccagctgctcctaaggacacaggggctgggttgggtaaagagaaggctatggtttgacttcttggcttgtggcttccactctccccgacttcattcactcaaacttctttaaatgggggaaaaatatttgggactcagtgggctggcagaagaaataagcccatgccagtggaaaggctgcttttgtcaggaaggtggtggaaatttcttttcttctccccctttcttccc

SEQ ID NO: 96551 - DNA, 906 bp, Homo Sapiens
  misc_feature (833)..(833): n is a, c, g, or t
  misc_feature (835)..(836): n is a, c, g, or t
ctggtaccggtccggaattcccgggatatcgtcgacccacgcgtccgcgaagacagaagatttggatgatacaccactgactttctttgtttggaatacacgttatgaaccctttctggagcatgtctacaagctctgtacgcaaacgatctgaaggtgaagagaagacattaacaggggacgtgaaaaccagtcctccacgaactgcaccaaagaaacagctgccttctattcccaaaaatgctttgcccataactaagcctacatctcctgccccagcagcacagtcaacaaatggcacgcatgcgtcctatggacccttctacctggaatactctcttcttgcagaatttaccttggttgtgaagcagaagctaccaggcgtctatgtgcagccatcttatcgctctgcattaatgtggtttggagtaatattcatacggcatggactttaccaagatggcgtatttaagtttacagtttacatccctgataactatccagatggtgactgtccacgcttggtgttcgatattcctgtctttcacccgctagttgatcccacctcaggtgagctggatgtgaagagagcatttgcaaaatggaggcggaaccataatcatatttggcaggtattaatgtatgcaaggagagttttctacaagattgatacagcaagccccctgaacccagaggctgcagtactgtatgaaaaagatattcagctttttaaaagtaaagttgttgacagtgttaaggtgtgcactgctcgtttgtttgaccaaacctaaaatagaaagacccctatgcaattaggcttttctccatggaantnnccttctgttacatgatgaaagccccagagaaaaagatggctttgactcagaaaaaaagaaagccttgaaa

SEQ ID NO: 96552 - DNA, 808 bp, Homo Sapiens
  misc_feature (613)..(621): n is a, c, g, or t
tggaccggtccggaattcccgggatatcgtcgacccacgcgtccgcccacgcgtccgcaaacacccacaaactttaattttgttaaatttatatggctttgaaatagaagtataagttgctaccattttttgataacattgaaagatagtattttaccatctttaatcatcttggaaaatacaagtcctgtgaacaaccactctttcacctagcagcatgaggccaaaagtaaaggctttaaattataacatatgggattcttagtagtatgtttttttcttgaaactcagtggctctatctaaccttactatctcctcactctttctctaagactaaactctaggctcttaaaaatctgcccacaccaatcttagaagctctgaaaagaatttgtctttaaatatcttttaatagtaacatgtattttatggaccaaattgacattttcgactattttttccaaaaaagtcaggtgaatttcagcacactgagttgggaatttcttatcccagaagaccaaccaatttcatatttatttaagattgattccatactccgttttcaaggagaatccctgcagtctccttaaaggtagaacaaatactttctannnnnnnnncaccattgtgggattggactttaagaggtgactctaaaaaaacagagaacaaatatgtctcagtttgtattaagcacggaacccatattatcatattcactttaaaaaaatgatttcctgtgcaccttttgggcaacttctcttttcaatgtaggggaaaaacttagtcaccctggaaaacccacaa

SEQ ID NO: 96553 - DNA, 772 bp, Homo Sapiens
gaccacacatatgaaccacccaacccccccctaaaaaaacggctggtaccggtccggattcccgggatatcgtcgaccccgcgtccgtcttgcctgagtctgaggtgaacagtgaacatatttacatttgatttaacagtgaaccttaattctttctggcttcacagtgaaacaagtttatgcaatcgatcaaatattttcatccctgaggttaacaattaccatcaaaatgttttgtggagactatgtgcaaggaaccatcttcccagctcccaatttcaatcccataatggatgcccaaatgctaggaggagcactccaaggatttgactgtgacaaagacatgctgatcaacattctgactcaacgctgcaatgcacaaaggatgatgattgcagaggcataccagagcatgtatggccgggacctgattggggatctgagggagcagctttcggatcacttcaaagatgtgatggctggcctcatgtacccaccaccactgtatgatgctcatgagctctggcatgccatgaagggagtaggcactgatgagaattgcctcattgaaatactagcttcaagaacaaatggagaaattttccagatgcgagaagcctactgcttgcaatacagcaataagctccaagaggacatgtattcagagacctcgggacacttcagagatactctcatgaacttggtccagggaccagagaggaaggatatacagaccctgcgatgggtgctcaggatgcaatggtcctatggg

SEQ ID NO: 96554 - DNA, 1297 bp, Homo Sapiens
  misc_feature (1182)..(1182): n is a, c, g, or t
ggtccggaattcccgggatatcgtcgacccacgcgtccggtgtcaagaaaggaggggtaagtactctctacttgctggaaaatcattgtaagtctgttgtgtatgaaattttaggaaaagtcttatatagttccctttccagactgttttcttttgactctaactataatcataagtctgtgcttccattatgaaggtcacattcctagcattcttgggaagtattagctcatactctcattcacatatgggaggttagatttttttcctctacccagagtccctttttagtttaccccacggcttagtttgctgtcagataccagttctctagcagattccccaacagttttttccccagtggggagggtggaagggagggactgatataagtaaggagatgagtagttgtgttacagttcattttctttaaaaaaaagtattttgagaaaaggtgcaaaatattcttgaaagtctctaggccagccaaagtccacatatggatatttggggatgttatttaaatactcagcaggctgagtgcaggtatacgtgtgtatagagtgtgtatactttgcttttgttttataacattgtcagctaattttggctttgttctttggcatccattcttattataagtgatggaatgccatgaaatgtactgtattgtatattacgtgggaggacactaggttttcaaagaagtctggcagcacttgggttatagagggctcagcatgaccaaagtcctaaagattttacctcccagctttggttgtatgtgttcccaagtggttgaggtgaaattgtgggctggaggaaagaaaaaggatggcatgaaagaatgacccctttattgtggtctggcctttctaatcaacataattaaggcagcttaccccaacatgaaaatgatgacctggccatttttaatggccagagcttgaagtctggtctctcattttgtttcagaaatgagtgagaggccttcctgcagagcagtcaggagaaatggtggagcctggggccctggaatggctgaccctgtgcctagagagctgatggcaagggctgtctggctggctcattttggggttggggttttccccaggcatacccttagttcccctggatcctctgcaaagagtaggctcattggactgagcaagcggctttccngaaggacttggggcttgggttgttccccagaaccaaagaagaagtcacctttttgaactcccatcaaaactttcaaaggggggacaggaggccttaaggccaggcagaatttcct

SEQ ID NO: 96555 - DNA, 1461 bp, Homo Sapiens
tgctaggtacgaggctgggtgtgtgaattcggcacgaggcggcggatcacacgggccctacaaggggcccctacaagcggccacaaggatggcaggcttcgcggagctcgggctgtcatcgtggctcgtggaacaatgtcggcagctgggtttgaagcagcccacgcccgtgcagctcggctgcatccccgccatcctggagggtcgagactgcttgggctgtgctaagacaggcagtgggaagacagcagcgtttgtccttcccatcttgcagaagctgtctgaggatccctatggcatcttctgcctcgtcctgacacccaccagggagctggcctaccagatcgcagagcagttccgggtcctggggaagcctctagggctgaaagactgcatcatcgtcggtggcatggacatggtggcccaggcgctggagctctctcggaaaccacacgtggtcatcgccacgccggggcgcctggcagatcacctgcgcagctccaacacttttagtataaagaagatccgcttcctggtgatggatgaggcagaccggctgctggaacagggctgcactgacttcaccgtggacctggaggccatcctggcggctgtgccggcccgcaggcagacactgctgttcagcgccacgctgaccgacacactccgggagctgcagggtctggccaccaaccagcccttcttctgggaagcacaggccccggtgagcaccgtggagcagctggaccagcgctacctgctggtgcctgagaaggtcaaggacgcctacctggtccacctgatccagcgcttccaggatgagcacgaggactggtccattatcatcttcaccaacacgtgcaagacctgccagattctgtgcatgatgctgcgcaaattcagcttccccaccgtggctctgcactccatgatgaagcagaaagaacgctttgccgccctagccaagttcaagtccagcatctaccgggatcctgatcgcaacagacgtggccctcccgggggctggacatccctaccggtacagggtggtcatcaaccacaacacccccgggtccccaagatctaatccaccgagtcggctggacggcccgtgcagggcggcagggtcacggcatcacgctggtgaaaacagtaccgacgattccaccttggttgctacgccaatcgagggaagcacaatccacgcaaggacgctggcgccacttcctccgtgggacagcaggccggaggtggctaagatcctaaccaggtcacgtggtgccgaacagagtgtgggaatcacattgggaggcggccgtttggagaacagagggttccccaccgagccctgctctgcaggggaggccgcactgaggcacccagctgtcgcacaacacgaacagccccccgcagggcgccccgcaccacgggcgcccggcacccaacgcggccagaccccgg

SEQ ID NO: 96556 - DNA, 1382 bp, Homo Sapiens
tttgggcaccaggtggggagaagggcttgcgcccccccctggccttttcttgtaattccagggacccactgcccggccccaagaaggtaggggctggcttaatgtttgaggaactcactgtcaacgttctgacaggtcccagcaggtcctctgaactcccttcttcatcagaaaaagaccgcctgactttgggctgcagcatgttcttgagtgattttattcctggcatccatactttgcacatcttcttcactgcgactcttgtctggatgctggatgaggtatgcttccacgaggttgttgaggatgtggtttttacagatccgctccacgggacagcggcaggtaggacacagggacgagcgctccatccagcccgagtagcaagccgcgcagaacgtgtgcatgcagggctgcaaactcacgcagtcgtgcagcaggtcctggcagatgatgcatgtcagcgtctcctccatcttgtctggcttcccagccgctgctctgacgtcctcgtggacggtttgggcatttctacgcggttgtgcgaccaacaactgcccgttcaggtcaaggtccccatctcctctcattttcttcttcacgggctccaaatcctcctgatcctggggttccaacgacgaaaaggacgcagtctttctgtctgggagagctgaggcaaagctggagacttcatcacttgccacagagggaccaacttcctgtaggggagatgccaccacccccagacccacaactggaggaacgctctcgccctgcaggagaaggctccgtggaagaggccgaggctgtggggaagaggtctgacgtcgatgttgatggctgtggttcctcaaagcacacctgagtggcgggcgacgacggagggacccggggatcggcccctcgcccatgcacctgcacctgaggtatcaaaggattcttgtgtcatgccttgcttttcacttaaagattcatagaggtatgccacgttgtgttccggttcattcttcctgtacaccaagtagatgacatccccagtctgtaaagggcatgtctgcttcttaacaaccttcagcttgttaatcactgttccactggtgctggtatcttccagtgtcacctgacctgatttttcatccactacaattctacagtgatctccacgagaccagtttattgctggggaaggaaaggtcagcaacctcgtctccgcccgatggtccactcccgcttcctcaggaggacgtgcggctcgccctcctccgcgcccagacgcaggagccgtccccagggctgcggcgccggcgactgcttgccttcctcgggccgctccatcgggattcacatccccgccccgcgccgaacccggaaccggctgcgcc

SEQ ID NO: 96557 - DNA, 1122 bp, Homo Sapiens
acgggtgggggcctcgaaagggggcccaagcacaaggccttgctttggggcgggaagccccagggggtttcaagccaattccccaggggtttttttgagggaggggggggaaagtctggctcttcgggccaaggggcggcctgggttagctgggccattaaagtgctcccatagttgaggccagagatcatgttcttcaccagggtggggctccctgtcatctttggcggtctccgcttctgatactcccgctcgtccacagtccacacggcacccttgacgttctccacgcggacgaagcacttgtgcaggctgaggttgtggcgcacggcgttcttccaggtggcagtgtttctgcggaaataggcgaacatcctggtgaaccagttatagatctcattcagggtcagctgcctgtcaggggtttccaggatggcctggcggatgagggaggcgtaggtgaaggggggccggacgtcggcgttcttgtagaactcatgattctgggccagctctgaggagatgggggagcagaacttgtcactgcttctccgacgggctgggcccccaccatgcagggaggcagagcccaggccagggggccgtagaggggtgacaggggctgcggccgaggtcggggggtgcacgagaccatctgggaatgagtctgctgcagagacggtcactggctggctgaagggcttgggctccgagggccgcatgtgcaggtgggccatcatggcctgcagccgctcgctctccttggcgagctggatctccagctgctgcaccacctgcatctgtacccggcactgggctgtactccggtcatcacagggcgtgctctgtgttgagatgatttgataaactggcccaggtcttcacacagggtctcacagcctaggccacttgcactctccgtgtccgtacagtggggtgggagccgggggtctcctcgtgggaagagctgtctctccgagatgtgagcacagtaggctgtccgttgggcagggtatggtgggagagggggggtgagacgaacgcgtgggtcgacgatatcccggtattccggaccggtaccagcctgcttttttgtacaaactgttcatattcacctaaacg

SEQ ID NO: 96558 - DNA, 402 bp, Homo Sapiens
ctagactaggtacgaggcctgggtgttgaattcggcacgagggcgtggagaacgtcaagggtgccgtgtggactgtggacgaagcgggagtatcagaagcggagaccgccaaagatgacagggagccccaccctggtgaagaacatgatctctggcctcagctatggagcacttaatgccagctaccaggccgccctggccgagagcagcttccccctcctcaacagccctggcatgctgaaccctggctccgccagcagcctgctgcccctcagccacgatgacgtgggtgcccccgtggagccgctgcccagcaacggcagcagcagccctcctcgcctctccccgccccagtacagccaccaggtgcaggtgaaggaggagccagcagaggcagaggaa

SEQ ID NO: 96559 - DNA, 1001 bp, Homo Sapiens
ggtcctaggtagcgaggcctgggtggcgattcggcacgaggaacagtctgcctctgctgtgcaggtgcctgtgtcggtggccatgatgtcgccgcagatgcttaccccgcaacagatgcagcagatcctgtcgcccccgcagctgcaggccttgctccagcagcagcaagccctcatgctccagcagctacaggagtactacaagaagcagcaggagcagctccacctgcagctcctcacccagcagcaggctgggaaaccgcagcccaaagaggcactggggaacaagcagctggccttccagcagcagctcctgcaaatgcaacagttgcagcagcagcacctgctcaacctgcagaggcaggggctggtcagcctgcagcccaaccaagcctcggggcccctccagacccttccgcaagctgtttgcccaacagacctgccccagctgtggaagggcgagggtgcccccgggcagcctgccgaggacagcgtcaagcaggaggggctggacctcactggcacggccgccaccgctacctcgtttgccgctccccccaaggtctcaccccccctctcccaccataccctgcccaacggacagcctactgtgctcacatctcggagagacagctcttcccacgaggagacccccggctcccaccccctgtacggacacggagagtgcaagtggccaggctgtgagaccctgtgtgaagacctgggccagtttatcaaacacctcaacacagagcacgccctggatgaccggagtacagcccagtgcccgggtacagatgcacggtggtgcaaccagctgggagatcccagctcgccaaaggaaagcgagcggcctgcaaggccatgaagggcccacctggacatggcggccctcggaagccccaaggccctttcaagccaggccaggtaaccgttctcctgcagcagaactcattccccaggaatgggtctcgggggcaacccccccggaacctgcgggt

SEQ ID NO: 96560 - DNA, 1086 bp, Homo Sapiens
aaacaatcataaccagcaaaaaataagtaaaacaaacaagctggcaccggtccggaattcccgggatatcgtcgacccacgcgtccggccggacagagcagaagaaccctcttggactggacgatttgggaattcaaaacttgggacaaactgtcagccttgcccctgctgtggaggcagcctcaatgctgaaaatggagcctctgaacagcacgcaccccggcaccgccgcctccagcagccccctggagtcccgtgcggccggtggcggcagcggcaatggcaacgagtacttctacattctggttgtcatgtccttctacggcattttcttgatcggaatcatgctgggctacatgaaatccaagaggcgggagaagaagtccagcctcctgctgctgtacaaagacgaggagcggctctggggggaggccatgaagccgctgcccgtggtgtcgggcctgaggtcggtgcaggtgcccctgatgctgaacatgctgcaggagagcgtggcgcccgcgctgtcctgcaccctctgttccatggaaggggacagcgtgagctccgagtcctcctccccggacgtgcacctcaccattcaggaggagggggcagacgaggagctggaggagacctcggagacgcccctcaacgagagcagcgaagggtcctcggagaacatccatcagaattcctagcacccccgggacccctgcgggtggctccatcagccagcaaccttagagagaggaaagaacagttttcaagtgtctggtttcactttcacagtgcggctgccactttgaagagacccttggtaaacccctgattcgggtgggggtgggggactaggctcagccggaaccagcacctccaagaagtcgggaagtgcctgtggtttgcacccccactgaaaaagccgcggagatgcccaccgcgtacactgactttggggcttgggtgttgggggtctgatcaaaatttggggggatgaaatgcttgccattttctcactggatgccctggggtaactcccgcaaggtctgcctggttcccagggcttcccgaatgcctaaggaaaccctg

SEQ ID NO: 96561 - DNA, 1406 bp, Homo Sapiens
ctggaccggtccggaattcccgggatatcgtcgacccacgcgtccggaggaattcacgaaagtggttcagccacaggaggaaatcgctacgtaagaaactccgactaacaaaaccaagtaaatctgcagcactccacatagatctgtgtaaagctacctccccagcagatgctttgcaatacttgctccagtttgccaggaagcctgtcgaggcggaaagcgtagagggagtagtcaggattctcttggaacattattacaaggagaatgatccatctgtgagactgaaaattgcatcattgttgggtttattatcaaagacagcaggattttcaccagactgcattatggatgatgccatcaacatcctgcagaatgaaaagtctcatcaagtcctagctcaactgctggatactttgcttgcaattggcactaagctaccagagaatcaagctatccaaatgcgattagttgatgtggcctgcaagcatctgacagatacgtctcatggtgtaagaaataagtgcctgcagttacttggcaatcttggctctttggagaaaagtgtcacaaaagatgcagaaggcctagctgccagagatgtccagaagattataggggattacttcagtgaccaagacccacgtgtcagaacagcagctataaaagccatgttgcagctccatgaaagaggactgaaattacaccaaacaatttataatcaggcctgtaaattactctctgatgactatgaacaagtgcgcagtgctgcagtccagcttatctgggtcgtcagtcagctctatcctgaaagcattgtcccaaattccttctttctaatgaagaaaatacgcttagtttgatgatgcgtttggcaaaatttgtcacatggtcagtgatggctcttgggtggttcgtgttcaggcagcaaaactgtagggctctatggagcaagtcagttctcatttcttcgagcagacccttgacaagaagctgatgtcagatctgaggaggaaaccgtactgcacatgagcgtgacaaggaactttacagttcggaggagagttatccacgtggcagacagtggcgcagactgatgctcgcaaggcaagaaagtagattaccgggccctgcaccttgactgcagtcacgaagctatgtggaactttcgatcatgggctggaagaatgcaatgtatgacagggatccaaatcagctacctgtaggacgagcccgtatggctgggtaggccaagttatcacgctccttttcgcatgaaacggcatactatcccatgtcgaaatgtcacacgataatatgagcaatacatcatacgcaaataagcgcaatgagaaaatatatgaaaatacacacaacaacaacctgcaaagaatggaggaacaaaa

SEQ ID NO: 96562 - DNA, 1389 bp, Homo Sapiens
  misc_feature (1246)..(1247): n is a, c, g, or t
  misc_feature (1253)..(1253): n is a, c, g, or t
  misc_feature (1295)..(1295): n is a, c, g, or t
  misc_feature (1340)..(1340): n is a, c, g, or t
  misc_feature (1353)..(1353): n is a, c, g, or t
  misc_feature (1360)..(1360): n is a, c, g, or t
gctggaccggtccggaattcccgggatatcgtcgaccacgcgtccgctcaaaattctttaagtcaatatttatcatatgtaaattaaacatgaatacattctcatcttataactacatcttataaataaggctaataacccttagaacaccacctgcggttctgtcctcaccccagtggcgactactgtttaccactacactggtgaattgtagtagggaaaaacaatctaaatattgaagaggaatggcctaattaaaatatgatgtagtcataggatagattattgtattggagttaaaagaaataatctagatccatattaacctggattggtctcaaaaacataatgctcagtgaaaatagcaagttgtagaaagttatatacaaattatatatatgtacaaaacaatactatgcattctctatggctatataatgtacgtaaatctatttttaaaggttcagaggaatccataccaaagttctaacagcgagtaggaggtatagatgagagattaggggtgcaaatcaggattgggagggtggtcagagggaactttagctttatccataacattaatttttttaaaaaataaggtcttaatgtttcatttaatttaaaatatactgtcatgttgtgttttgtaaatcaactgaattgaggtactatttacttagatttattgcaccctttttaagtgtgtattttattgagttttgacagattcatacctctgtgcaaccactatcacgatcaagatacaaatattttcattgcccccaaaattctcatacccccttttcccaatcaattcctctacccctagccctaggcagccacagatttgccttttgggttaccgattagatctattccattgcagaaattcatgtaaatagaatactgtagtatgtactttgccttcttcctctctgcagatttttgagattgatccctgtgtgtcagttgtgcattttttttgttgctgagtagtatgttctatcttatgtcagatcattcacgtgagactttggcatgaaatgttaagcatccgacatctaaatagcaatattttgaatactggaaactcaggttaaagattttgtttccaagtagaaatgaaatcttattattttaataagtagctgacaatgacagaaagattggattttgatcagattggctgttaggcttcaggtatgggaaacagctctcagatttattaattgggaaatcaccaggnntacttngccatatataggtcatatttgctgccatttgtacttaatttnctaaaatatattaaaatcccacattttaaaaatttataaaaagcnaagggactttggnggattgnacctggattgaaatccatgggaaatttgc

SEQ ID NO: 96563 - DNA, 915 bp, Homo Sapiens
  misc_feature (23)..(23): n is a, c, g, or t
  misc_feature (36)..(36): n is a, c, g, or t
  misc_feature (39)..(39): n is a, c, g, or t
  misc_feature (103)..(103): n is a, c, g, or t
ccggtgttctgggatcaggccanccttctcccaccntgnttcagcccacagcccacaggggggctggaggcccaggaaggctctttcttcctgcttttcttgntagtcttagacagtggggttggggggcttccagtgaggagctgagtaggggccccggtgtcactggcgttcacgaggttgttgacgggcagagtgagcgtcacattgccgcccccacctgtcaacttcaccacattggccccgctctgcacgggggtggtggtcgtactcgacttctggatgggggctggcttgatggggacaggcttgtgactggacggtgagggggtgatgatggcttggttggtgccagggatgatgctggatctggttggtgagattgggctgtagcttggatggtttgggaattgcttgcgctgaatctgagggaccgcctggtactggatattggcatttgatcgggtccctttgttgatcatggtgggattctggatagcgaacaccagctgccctccaggataggaggcgctcagttgtgacccctgaatctgaagtatatttcctttggaggacaagattccaaagctattcttgccggggctgagagggagaggggcaggtttgatagggacaagtttccgcggtgtgggctgtgggggagcaggaggtgtcacagcagcttcaactgctggagggccaattttgctacatgttgcagcaagcagggctaagggagatggctgggagtcctgggtggtggaggcggcaggctgcaggtagtcactgggactcacagcagcagtggcagccatgctggtctgtggatcgctcattacgacatcttcctccctggcctccgccgcctccgccgccacccctcgtgccgaattcggcgcgccgtcacttcatcct

SEQ ID NO: 96564 - DNA, 928 bp, Homo Sapiens
  misc_feature (774)..(774): n is a, c, g, or t
  misc_feature (794)..(806): n is a, c, g, or t
  misc_feature (809)..(809): n is a, c, g, or t
ggtaccggtccggaattcccgggatatcgtcgacccacgcgtccgcccacgcgtccgcttaaacttagatcaaattttttggtttttaatcagttatcttgggaacttaacctggcccctcacctcttctgcaccccccgcccccgaaactgtctcgtaatgaatttctgctgtcctcctgggagtggacggccgggtcccgtcccccgggagcatcgctcggctcagcaccttggctcccagtgggggccccgtggagggcgcccgtagtgataagcacaccggcacgaacgtcaggtccattcctcgaagtcggagccctcactctgccctgtcctggggctggctgagggcgaacgccccacctcactttctagagccctgtctgtcctagctcctatctgaccttgtgtgtaaatacgtacatctgtttttaaagtggatgggcccctgagaactcagtgaaatgcagagttctccatgcacctaaagctcctttgtcgctctcatggctgtcagatcctggtccctccacactgggtgctggggagggaggaccctcggggctaccgcgcgcccccccatcccacagatcaggagccaaggagggagaacagggcagcctgtgggactctaggatgcttcagaagaagcgacggcaccgtcaaccctctgttttttaaaggtggttggagactgttaacactgagctcattgacttctagagattttatttttactggttgatctcttggtgggttttcacttcctgcntgaaactagaggtggggcannnnnnnnnnnnnagnctcgcactgtgttccttgggggaggccccgcccccattctgggccggggtcactgttggccccggccaccccctggaccgccccagctcccttaccctccttggaacgtctcttgaaag

SEQ ID NO: 96565 - DNA, 881 bp, Homo Sapiens
caggctgtacggtctgggatgttaaggatcctgccgggcttgctgtgcgactattctccgtggtagccgtcctgtgtcaccgccggacacctggcgcaggttctttatacgataaagtgccaatggtaggaaatttcgccgatggtgaagtggtaacgaggtcgatggccgtgggagttacacttctattatgaagtacaaattactgagccacgacagcacctcccaggctttacactgtaaagtataaagatggaacagagcttgaattgaaagagaatgatattaagcctttaacttcctttaggcaaaggaaaggtggctcaacttccagttccccttccagacgccgagggagtcgatcaaggtcacgctcccgatcccccggtcgaccacctaaaagtgcccgccgatctgcttctgcttcccaccaggccgacattaaggaagcaaggagggaagtggaagttcaaattgactccgctgattctgaagcccatctggaacatagcatcagcagatataatggggagcctgagcactattgacgagaaatgacgcacctcataaaaatacacaggacaaaattcaatttgtcacaagaaagcagttacatagcaacacagtatagccttcgtcccaagaagagaagaagtcacattaacacgaactagattctaaggaagacaaatacgttgcaacagaactggcagtgagaacctttgaagtgatccccatccgggcaacgggacttggccgtttggacggagtaccttgcggtgtatcctcatcatgcttggctgcctgtgttcctccttcctgttgcctgttgattctgtaaaccgaacacgatcccagtcttctgaattttccctcctacc

SEQ ID NO: 96566 - DNA, 1303 bp, Homo Sapiens
  misc_feature (43)..(55): n is a, c, g, or t
ttccaaagcccaagctttgggtaagggggccggcccgaaggannnnnnnnnnnnnttggaaattaaatggaaggaaggaagggatgttcatttgtaaataacccaccagggacagcgttggggtggcaccggacatccccccagcacacatagacctgtggtgcctccttgggctatgtctgtccacatggtgggacctcctgcccgctgaggtggtgcggagaggcctcagggagttgtttggcaacagggcagccctgaccccctctggctgatgggaagcagcatgtctgctgccccagagtctgaaggcccccacagtgctgggtgaaagtccacagggcccctcttggcctccccgctgtgggcccagagtcacagaaatcacccccagaaatttgcagaaactcaacaccaggacacagacccaccgcccaacctaaaagaacaggaacaaccctaaggccacgcaggcctggcaggtgagagacgcagagtggctgccggccgcagccccgcggggtcagcacaaaggcaagacgcggtggggagaggacaggagccttccagcacatcacggggcagaggcggtgcacaccggcggggcacggctagttcctcaaggcggccaacctccgtgacagctggtcctcctggctgcgcacagagctctcgcccacggcagaggcgccctcgggcagctggctgagctggtccagcacctccaggccattctcctcggcgatctgcatgatgaggctgtccacctgctcctgcggcgtggtcagggtggtggccgagctcatggagtcctccatcaccgatgtatggacgtccaggttctgcacctgctgctcgaacctgtccatcactgaggagaccttctgcaggtccatggtgctcagggccttgtccagggctttggtcacctgggccatattcttggtcacccccttcatagtcacagctgtctgcaccttggaggccactgcgtctacgcgggacgccatccgaagccagttcacaccttcgttcttcttgcggatggcgttctcggcatacacacgggcacactctacatttttctgcagaagggccttcttcactttggcctgctccgccttggagtccttctccgccttcttggccagcttctccagctgcttcgccgtgaacttcaactggaacagggtatcgtccatggccacaatgacaggagcagcactcggagagggagaagggacgccaactccgggcggtgtcaggtcccggcggcgatcgaaccgacccactgcacccgcgg

SEQ ID NO: 96567 - DNA, 694 bp, Homo Sapiens
atcgccgccgggacctgacccgcccggagttggcgtcccttctccctctccgagtgctgctcctgtcattgtggccatggacgttcacggcgaagcagctggagaagctggccaagaaggcggagaaggactccaaggcggagcaggccaaagtgaagaaggcccttctgcagaaaaatgtagagtgtgcccgtgtgtatgccgagaacgccatccgcaagaagaacgaaggtgtgaactggcttcggatggcgtcccgcgtagacgcagtggcctccaaggtgcagacagctgtgactatgaagggggtgaccaagaatatggcccaggtgaccaaagccctggacaagtgccctgagcaccatggacctgcagaaggtctcctcagtgatggacaggttcgagcagcaggtgcagaacctggacgtccatacatcggtgatggaggactccatgagctcggccaccaccctgaccacgccgcaggagcaggtggacagcctcatcatgcagatcgccgaggagaatggcctggaggtgctggaccagctcagccagctgcccgagggcgcctctgccgtgggcgagagctctgtgcgcagccaggaggaccagctgtcacggaggttggccgccttgaggaactagccgtgccccgccggtgtgcaccgcctctgccccgtgatgtgctgga

SEQ ID NO: 96568 - DNA, 936 bp, Homo Sapiens
  misc_feature (706)..(706): n is a, c, g, or t
ccgtccggaattcccgggatatcgtcgaccccgcgtccggccaccctctaaaaagatgaaactggaggcctctcaacaaaactccgaagagatgtagacgatgctttaaagcctccgatccatgttccatggaaggtacatcagcaattaattctagagcaactttgccccagcgattcctcttgggtgcgaacagaactactaacgtttcaagtttaccaagtgcaaatccaagaagacccagaacggcgtcacttctcagacactgaagaactctgctgtgaagcaaaacactcaaacctttaagggactgtccttggggaggcaggcggggctgacagctcaggagtgtctgcacactgtctcggaagccaggattccatttgtgttgctgctgtattttccccccacttctctatgtaacgatataagctatcggagggtggtaccgatcaggaacgctttttggcggggctttccactgttcaaccgattccttccgctttctttttttgtgccttgtgcccttaaggtgacctctggcatgtatcctggtggttcttacatccccctctgcaaagtgccctcttggtttggttcgggcggcggctgccaccctactcaccgctctcctccctgccccaggacttcatcggagcaggcagggtggagcgaaggaagctccttaagcccacctggtttgcanggtgcaagggggaccttaggcacgccccaagcaccaggcaccagggcccaaggacgcgcaggtgttgggggcacagtcccccaagggctcggcccccttggatcaggctgggcactcgctgtgctctccccttccttggggcgtttaagactggccgtctccaagcccaccatgggcccagatgggacgtgcaaagccccttggaatttttctgggcacttcctctctat

SEQ ID NO: 96569 - DNA, 957 bp, Homo Sapiens
  misc_feature (80)..(114): n is a, c, g, or t
  misc_feature (575)..(623): n is a, c, g, or t
  misc_feature (896)..(896): n is a, c, g, or t
aagactgatgatcctatagggcgccttaggcttagaagcgaacgacgagcgcaggagtcaagtgagcgaggaagcggcgnnnnnnnnnnnnnnnnnnnnnnnnnnnnnnnnnnncagtcgacggtaccggacatatgcccgggaattcggccattacggtccgggtgccgttcagctgagcgctcgcaagaggacggcagaggcccggcagctcggagctccgggaccttgtggcgcatcaggacgcggctgtccctctgccgggacccagagccgccgccgccgctctgcctcctgcgtgttagcctcctctgcgcgctccgggcaggcggccgtgggagccgctggggcgaggacggcgcgaggctgctgctgctgcccccggcccgcgcggctggaaacggagaggccgagccaagcggcggcccctcttatgctgggaggatgctggagagtagcggctgcaaagcgctgaaggagggcgtgctggagaagcgcagcgacgggttgttgcagctctggaagaaaaagtgttgcatcctcaccgaggaagggctgctgcttatcccgcccannnnnnnnnnnnnnnnnnnnnnnnnnnnnnnnnnnnnnnnnnnnnnnnnacaacagcccgggcaggggccggccgagccgtcccaacccagtggccccgctgtcgccagcctcgagccgccggtcaagctcaaggaactgcacttctccaacatgaagaccgtggactgtgtggagcgcaagggcaagtacatgtacttcactgtggtgatggcagagggcaaggagatcgactttcggtgcccgcaagaccagggctggaacgccgagatcacgctgcagatggtgcagtacaagaatcgtcaggccatcctggcggtcanatcacgcggcagaacagcagacctggtcagcagcagccccctcgcagcgcagcgcagcgca

SEQ ID NO: 96570 - DNA, 1119 bp, Homo Sapiens
  misc_feature (370)..(416): n is a, c, g, or t
gctggaccggtccggattcccgggatatcgtcgacccacgcgtccggagccgcgcacgggactgggaaggggacccacccgagggtccagccaccagccccctcactaatagcggccaccccggcagcggcggcagcagcagcagcgacgcagcggcgacagctcagagcagggaggccgcgccacctgcgggccggccggagcgggcagccccaggccccctccccgggcacccgcgttcatgcaacgcctggtggcctgggacccagcatgtctccccctgccgccgccgccgcctgcctttaaatccatggaagtggccaacttctactacgaggcggactgcttggctgctgcgtacggcggcaannnnnnnnnnnnnnnnnnnnnnnnnnnnnnnnnnnnnnnnnnnnnnnccgccggcgagctgggcagcatcggcgaccacgagcgcgccatcgacttcagcccgtacctggagccgctgggcgcgccgcaggccccggcgcccgccacggccacggacaccttcgaggcggctccgcccgcgcccgcccccgcgcccgcctcctccgggcagcaccacgacttcctctccgacctcttctccgacgactacgggggcaagaactgcaagaagcccgggccgagtacggctacctgaagcccggggggcgcctgggggccgccaaggggcgcgctgcacccccggctgctttctcgcccctgcacccaccgccccccgcgccgccggcgcccgccgaactcaaggcggagccggggctttcagcccgcggactgcaagccggaaggaggagggcgggggctcacccactcaatcttcgccacctcctgccgggagatctaggaccgcgctagctggcctaccgtctgggccgagggcgacaccacgccggtcacacttgacgcacgaacgacccgggggcgccggaagcgcagccgacctcgcacgtctataacgtcgctcagccggcgtgctaggtgactcaaatggcgactctcaagacacggacgcaacgcgtttcagatggcggtgagggcggctgcagccacggcacggcctcgcggtagtagacccggcccgtgcacttccgccgt

SEQ ID NO: 96571 - DNA, 885 bp, Homo Sapiens
  misc_feature (509)..(523): n is a, c, g, or t
ccactatcaaaagccaactcagctgaagcttatctattttctactacagtagttattttgaatgtatagagctaaagaggcctgtggctaacagacagggattccatgcacaagagcttttaagtatgtgcccatgcagtgcaaggccctgtgaacccaacaggccctgtccctcatcccatccaatgactatacttcaaagggaaagaaagatgtggattgcctgtatgttgcttcaatatgagatctctgagcaagctgggttggtttagcagatctagcaagagacaaataataagagaaaccaacataaaggtaatcagaagtttcaaactttccttctaattgatgaaaagataccctgctccaactccccaaacataaagcactgcacattccccattccaaaaccagttacctgcattgcattcacctaattttaatttacataaaataccattctgtgactaaataactgatactgcaatagagggaagcatgattttaannnnnnnnnnnnnnnagattttaaaaatcaaaatcatgtttccatgcacttgagttctggatcaaatatattatctacagaaaaaatccacaaactcttatcgaaatgttcatataaagtttaaattatttcaggttggcttttctcctttagttttatattcattaagtattgaaaacaaacctaaaatcttcaagtggaaagatattaaattaaattttgttggaaaaaaacccatctttgccatgatgttaaaaaagggaaaatcaggaaaaatggttcccacagatatttaaagttttaatgggtcctcttctccaagatgtttttccggacgcggggtcgacgatatcccgggaattccggaccggtaccag

SEQ ID NO: 96572 - DNA, 888 bp, Homo Sapiens
cgcgaaacactatgctaatggcatggtgccgcggtcctgtcttgctgtgcctgcggcaggggctcggaaccaattcattcctgcacggcctggggcaggagcccttcgagggagctcggtcactgtgttgcaggtcctcgcctagagacctgcgagatggagaaagagagcacgaggcggcacaaaggaaagccccaggagcagagtcttgcccatctctccctctgagcatctcggacattgggactggatgtctttcgtcactggaaaacctcagactgccgacgctgcgggaagagtcatcacctcgagagctcgaggactcgagcggagaccagggccggtgcggtcccacacaccagggatccgaggatccttcgatgctctcgcaggcccagtccgctaccgaggtcgaagagcgtcacgtctccccttcttgttcaacttccagagagagaccctttcaggctggggagctgattttagctgagactggggagggagaaacaaaatttaagaaaattatttaggttgaacaacttcggactcttaaatagtaactggggggcagtcccgttcggcaagatcgtggggaagttccccggccagatactgaggagttccttcggtaagcagtacatgctgaggaggccagccttggaagactatgtagtattgatgaaaagagggactgccataacattcccaaaggatattaatatgattctctcaatgatggatatcaacccaggtgatactggtttggaagctggctcaggctctggtgggaatgagcttattttgatccaaagcagttggatcacaaggacgagtcataagtttttgaggtacgcaaaagaccaccatgatctggcctaagaagaatta

SEQ ID NO: 96573 - DNA, 911 bp, Homo Sapiens
tggaccggtccggaattcccgggatatcgtcgacccacgcgtccggcgccctgtgagggacaagcgtttgccgtaggggttgaaaagaattggggtgcagtagttcgctccccagaagggaccccccagaaaatccggcagctgatagatgaggggattgccccggaagagggaggcgtggacgcgaaggacacgtctgccacatcccagtcagttaatggatcaccccaagcggaacaaccttcattggaatctacaagcaaagaagccttctttagcagagtggaaacattttcttctttgaaatgggcaggtaagccctttgagctgtctccactcgtctgtgcaaaatatggctgggtcacagtggaatgtgatatgctcaagtgctctagctgtcaagcttttctctgtgccagtttacaaccagcttttgactttgacagatataagcaacgatgtgctgagctgaagaaagccttgtgtactgcccatgagaagttctgtttctggccagacagcccatccccagaccgatttgggatgttgcccctggatgagcctgctattcttgttagtgaattcctagatcgttttcaaagcctttgtcacttggacctccagcttccttccctaaggccggaggacttgaaaactatgtgcttgacagaagacaagatcagtcttctcctacacttgccttgaagatgaacttgatcaccgaactgatgagagaaaaactacaatcaaattaggctcagacatccaagtccacgtcacggcctgtattctctctgtgggtggctgggcgtgtagttcctctttggaatccatgcagctctccctgatagcatgttcgccatgtatggaggaagtggggctctggggccttcagccagattgaatcgtcc

SEQ ID NO: 96574 - DNA, 1126 bp, Homo Sapiens
  misc_feature (425)..(728): n is a, c, g, or t
ggaccggtccggaattcccgggatatcgtcgaccacgcgtccgggcaggcaccttaattttttccttgcatattctagtcttcagaagcattgccttttgtcctactggtagtgacatagaccaataacagggcatctggggattttaatcctgaaaacagtgagtctgatactgcttgtgtttttcatcagtgtccaccccaagtgggtcttcctgctattctcttcacttagttgcccctcacttgccatctgagcaattggcaaggatgtgccaggcctaggttaaacttggaaacatgcttgaccattctattccctggtcctttaagatcagtttggctgcaattttggctccttggaccctcaagcatagctggtaaatcaagttagagatgtaactgccttaaaacatgccagcttannnnnnnnnnnnnnnnnnnnnnnnnnnnnnnnnnnnnnnnnnnnnnnnnnnnnnnnnnnnnnnnnnnnnnnnnnnnnnnnnnnnnnnnnnnnnnnnnnnnnnnnnnnnnnnnnnnnnnnnnnnnnnnnnnnnnnnnnnnnnnnnnnnnnnnnnnnnnnnnnnnnnnnnnnnnnnnnnnnnnnnnnnnnnnnnnnnnnnnnnnnnnnnnnnnnnnnnnnnnnnnnnnnnnnnnnnnnnnnnnnnnnnnnnnnnnnnnnnnnnnnnnnnnnnnnnnnnnnnnnnnnnnnnnnnnnnnnnnnnnnnngtgccagtggatgagggaagtacactggttctcccccgagggtacctgcccagaaaagatgctatagatgctactcccatgtgccaaaagccggtgggcccactggtggccacagcttatatccgcccggtgctgtgcccgcactaagggagaggcgggggcttccccgccgaccacaaagaaggaacgtcacactcccccaaccagtggcgcaccgattcgatggtaccagcgcgcgtcagcacacccactcgcccggaacgcttctccgcgccgccgccacccgtgcggtcgcagagcgccgatgcctagccgtgcgaccacgcatcccatcttaggcagtcggcgcagacaccacgtcaaagatttgcatggaacctgcagccagctaacagcag

SEQ ID NO: 96575 - DNA, 775 bp, Homo Sapiens
tattcgcagatcccgcaaaggcaccacgtcacagctcgcgggctggagtctgccggccaaagccaggcctctgcactgactgtggctgaagaggtgtggcaaaggtcaggttgagggatctggtgagggaagaggcaatcaagcaattcccttgaggctcttgggagagagacagcccctggtcacacatcccatgcatgaaacaactgacagtcgtcaagccatctgtttcacatcctggcacaggggcacagcagacactggagtccaggatttgtggggggcatcgagcatcaggaagttgctagcatccaaggctgcacagcaacatgcttcatcttgtctggagggttggaccagccatgcaggtgcatggcacatggcattcactaccgacatcaggcatcaggatggaagattctggggcagttagtaggatgttcattcagcagcagtcacgaggtgtctgttcaatcaacaagtgcccactggccatgaatatgggccagatctgccaacagacctggctccatgggaacagccctctggctatcgtccattgtttggccacatcaacttcactgggggaagccagtttcaagcagggctctccagggctccagcccgagcactcaaggggtcaccgcaggggtgcgcagggtcacagcatgtatccatgcacgcagtcagcagcagcgtgcgcaggcgtggagtcacagtcagggttgtggcctcgtgccgaatttaaaacccaggcctcagtacctagccagtt

SEQ ID NO: 96576 - DNA, 1093 bp, Homo Sapiens
  misc_feature (1051)..(1051): n is a, c, g, or t
ggcgggaaggcggagcctgcagctggctgggcggttaggagggcccggggccgagacgatggctgaccacaaccctgacagcgactccacgccgcgcacgctgctgcgacgcgtgctggatacagcggacccgcgcaccccgcggcgaccccggagtgctcgggctggagcccggagagccctgcttgaaacggcttcccccaggaagttgagtggccaaacaaggacgatagccagagggcgttcccatggagccaggtctgttggcagatcggcccatattcaggccagtgggcacttggaggaacagacacctcggacgctgctgaagaacatcctactaactgccccagaatcttccatcctgatgcctgagtcggtagtgaagccagtgccagcaccgcaggcggtccaaccctccagacaagagagcagttgcggcagcctggagctgcaacttcctgagctcgagccccccacaaccctggctccaggtctgctggcccctggcaggaggaaacagaggctgagactgtcagtgtttcagcagggagtggaccaggggctgtctctctcccaagagcctcaagggaatgctgatgcctcttccctcaccagatccctcaacctgacctttgccacacctcttcagccacagtcagtgcagaggcctggcttggcccgcagacctccagcccgccgagctgtagacgtgggtgcctttttgcgggatctgcgagatacttccctggctcctccaaacattgtgttggaggacacccagccgttctctcagcccatggttggctcccccaacgtgtatcactccctgccctgcacgcctcacactgggggctgaagacgctgagcaggctgccgggtcgcaagacacagagcagtgggcctggggctgcagaaaaatagcccgggggaaaacaggccaagttttctggcaaggaaaagcaaaaggagggccaatgccctttggctccggggcttccttggagcaaccagccaatgggtgtgctcctgggaggaagaatggaggtanaaggccccttacacccaagggggagtttggaaaaaaggcatc

SEQ ID NO: 96577 - DNA, 731 bp, Homo Sapiens
  misc_feature (150)..(150): n is a, c, g, or t
tcaggttgagggatctggtgagggaagaggcatcagcattcccttgaggctcttgggagagagacagcccctggtccactccctgctgaaacactgacagtctcagcctctgtttcctcctgccaggggccagcagacctggagccaggnttatggggggctcgagctcaggaagttgcagctccaggctgccgcaactgctctcttgtctggagggttggaccgcctgcggtgctggcactggcttcactaccgactcaggcatcaggatggaagattctggggcagttagtaggatgttcttcagcagcgtccgaggtgtctgttcctccaagtgcccactggcctgaatatgggccgatctgccaacagactatcggcaaagcaccaagcaaccagtctgtccgtctgccttgagatttcctcaaggtgggctccagagcagagctagacctcaacccccctccccgaggcagccagggccctttggggtcagtgggctgggtacttacactggctccatgggaacgccctctggctatcgtccttgtttggccactcaacttcctgggggaagccgtttcaagcagggctctccgggctccagcccgagcactccggggtcgccgcggggtgcgcgggtccgctgtatccagcacgcgtcgcagcagcgtgcgcggcgtggagtcgctgtcagggaagtggtcagccatcgtctcggcatccgaaaa

SEQ ID NO: 96578 - DNA, 1098 bp, Homo Sapiens
  misc_feature (660)..(660): n is a, c, g, or t
  misc_feature (672)..(672): n is a, c, g, or t
  misc_feature (695)..(695): n is a, c, g, or t
gctggtaccggtccggaattcccgggatatcgtcgacccacgcgtccgcgagggcgaggcggccactgcggggccgggaatgcccgcggtgcggggccccagagccgcccggtggtcgtgtccgggcgatggctcttcgcctggtcgccgacttctgaccctcggggaacggacgtgctcccgtggttgctgggcgcagcgggctaggtgctctggagcgccagcggggccgggaaagtcggacggacgccagaatgattctctagcaaataacgattatgagcagctttgacgatgtacttaacatcgttgaagacgtagaatggcacaaatattactctccataacctactaagggatgatcaaggagtagaatgtcgctcgtttgcgacttactattcgaatttgtccatacatccaggaccatagaccatgatgccttcctagtaatatccctttgcacgcaacatgatcttgccagacgcttgtcactacagtccgcatctgctcagagcacagggaacacggaagctttcgcctttgtagctgcagacggtttacagttccatggattctaacctaaatgacaggcaatacacaggtacactgtagacttgcatatcctaggggaattccaaccatgtgtcttaggtactatantgtttcgagttngcacaagtcccaaacccctgttngttaaatcgagattgttgcaataggtttccctaagtaagggactgtagtgattaaggctattattttggggggttccccacgtattcctcttacgcacaaccagttatttcgcagagacgttccattcctactttccccaggaagaaaacacatttctttgtctaactcgatttttccaaggaagggaagagaactaatattgaaacgaaatccctcggttatatccaatgggtacggcccccaaagaaaggactggggacattaagcaaggtggttacgaaggactttcgaacacactacctgttgtctggctcttcaataaggggtgagaaccgtggtgaacccaccaacgaaaaaggaacagttccaatttaacctaaggaacgtgggcctaaggacgaa

SEQ ID NO: 96579 - DNA, 1493 bp, Homo Sapiens
  misc_feature (1377)..(1377): n is a, c, g, or t
gagagagtatgaagtcgacggcgcgccgaattcggcacgagggggcgtggcgcccgcttaccttgaggctgggttggaaaaagactatgttagcaagtgtcacgccatgcttttgccaactttccaattaaaggttgacattcctgcataagcatttctctgtgaaaatgtccttgcctcttacagaggagcagaggaaaaagattgaagagaatcgacaaaaggctctggcccgcagagctgagaagttattggcagaacagcatcagaggactagctcgggcacctccattgctggcaacccattccaggccaagcaaggcccatcccaaaatttcccaagggagtcttgtaagccagtgagccatggtgtcattttcaagcaacagaatctcagtagctcatctaatgctgaccaaagacctcatgattcccacagttttcaggcaaagggaatatggaaaaagccagaagaaatgcccacagcctgcccaggccacagtccacgtagtcaaatggctctcactggaatctctcctcccttggcacaaagtcctccagaggtccctaaacaacagctcttgagttatgagttaggtcaaggtcatgctcaggcttcacctgagatcaggttcacaccctttgctaacccaactcataagcctctggccaaaccaaagagttcccaagagacaccagctcattcctctggacagcctcccagggatgctaagttagaggccaagacagcaaaaacctccccttcggggcagaacatttcttacatccattctagctcagagagtgtaaccgcccaggacagaaggaagactccagcagaagtcagggtcctcagtccaaaaaggagtgaactctcagaagggaaagtgcgtaaggaacggcgatcgtttccaggtgttgattgggtacaatgcggaactcattgcagtgtttaagaccctgcccagcaagaattatgatcctgacaccaagacgtggaacttcagcatgaatgactatagtgccctgatgaaagcagcccagagcctccccacggtcaacctgcagcctctggaatgggcctatggcagcagcgagtcaccctccaccagcagtgagggacaggccggccttccatcagctccatccctttcatttgtcaaagggcgatgcatgctcatctccagggcctacttcgaggcagacatcagttattcacaggaccttattgcgctttttaaacagatggattccagaagatatgatgtcaagaccaggaagtggagctttctcttggaagagcacagtaaactaattgcaaaggtgcgctgcctcccacaagttcagctggaccctctgcccacgactctcaccctnggcgtttgcttctcagctcaagaagacatctctcagtctcacgccagatgtcccagaggcagacctttctgaagtggaccccaagctcgtgtctattctgatgccctttcagagag

SEQ ID NO: 96580 - DNA, 1764 bp, Homo Sapiens
  misc_feature (1558)..(1558): n is a, c, g, or t
  misc_feature (1624)..(1633): n is a, c, g, or t
gctggtaccggtccggaattcccgggatatcgtcgacccacgcgtccgcccacgcgtccggaagcagcctccggccccggcggcccctgtctcccgaccccggaaggcgaagcaggctgcccggggaccccgcgcgtgggcgcttgaagccgagaccagcctgcccgggcctgggcaggcggagcagggccttggaccccgcggcgcccctcggcctcggagcaacgagcgcagcgccgcctctgaagagccaatccattcaggatgggaaaccacgcaggcaaacgagaattaaatgccgagaaggccagtacgaatagtgaaactaacagaggagaatctgaaaaaaagagaaacctgggtgaactttcacggacaacctcagaggacaacgaagtgttcggagaggcagatgcgaaccagaacaatgggacctcctctcaggacacagcggtgactgactccaagcgcacagcggacccgaagaatgcctggcaggatgcccacccagctgacccagggagccgcccccacttgatccgcctcttttcccgagatgccccggggagggaggacaacaccttcaaagacaggccctctgagtccgacgagctccagaccatccaagaagacagtgcagccacctccgagagcctggatgtgatggcgtcacagaagagaccctcccagaggcacggatccaagtacctggccacagcaagtaccatggaccatgccaggcatggcttcctcccaaggcacagagacacgggcatccttgactccatcgggcgcttctttggcggtgacaggggtgcgcccaagcggggctctggcaaggactcacaccacccggcaagaactgctcactatggctccctgccccagaagtcacacggccggacccaagatgaaaaccccgtagtccacttcttcaagaacattgtgacgcctcgcacaccacccccgtcgcagggaaagggggccgaaggccagagaccaggatttggctacggaggcagagcgtccgactataaatcggctcacaagggattcaagggagtcgatgcccagggcacgctttccaaaatttttaagctgggaggaagagatagtcgctctggatcacccatggctagacgctgaaaacccacctggttccagaatcctgtcctcagcttcttaatataactgccttaaaactttaatcccacttgcccctgttacctaattagagcagatgacccctcccctaatgcctgcggagttgtgcacgtagtagggtcaggccacggcagcctaccggcaatttccggccaacagttaaatgagaacatgaaaacagaaaacggttaaaaactgtcccctttctgtgtgaagatcacgttccttccccccgcatgtgcccccagacgcacgtgagttcttcaggggggccagggtgcacagacgtccctccacgttcacccctccacccttggacttttcttttcgccgtggctgcggcaccccttgccgcttttgctgggtcactggccatggaagcacacagctgccnaaaacccaaaagggacgtgggccgggcaaaaaaggactgtttgacatccaaagctttccctttggnnnnnnnnnnccgggcccttctctaaccctcctaaaagtagaacttccttttttccccaacaggaattaaaacgttcaagggaagggctttaactaaatgggggggaaaatttttggggaatggggacttgccggggcggt

SEQ ID NO: 96581 - DNA, 1155 bp, Homo Sapiens
gctggaccggtccggattcccgggatatcgtcgaccacgcgtccggctggcctgggaggcgggggccggcgggagccaagccgaggaaagggcggagcggctctccgggcgcgtcatcggagcaccatggcggagctaggagctggcggcgacggccacaggggcggcgacggcgcagtgcgaagcgaaacagcacccgacagctacaaagtgcaagataagaaaaatgcctccagccgccctgcctctgcaatttcaggacaaaataacaaccactcaggaaataaaccagaccctccgcctgtgttacgtgttgatgaccggcagcggctggcccgggagcgacgtgaggaacgggagaaacagctagctgcaagagaaatagtgtggttagaaagagaagagcgagccaggcagcactacgagaagcacctggaagagcggaagaagaagttggaggagcagaggcagaaggaggagcggaggagggctgctgtggaggagaagcggaggcagagacttgaggaggacaaagaacgccacgaagctgttgtacggcgcacaatggaaaggagccagaagccaaaacagaagcataaccgttggtcgtggggaggctctctccatgggagccctagcatcccacagtgcagatccagacaggcggtcagtttccaccatgaatctttcgaaatatgttgatcccgtcattaacaagcggctctcctctacatctgcaaatttactaaattctccaaaaaaagctcgccgcctgcacctcagcccatgggagacccaccttggttaacaaactcctgacgcccacacattccattcccggcccgaaggtaaaagcccagctggccttggctgggaaaaccagattcttgcagccccatcaaccatggccctaaaaggctgccacctccagaaaattcgatggaatcgacccaaaattctttggaaaccccacctggagggcctctttcccccagaggaacctttcctgggcacagggagcttttctacctcacaggccgggggaaaagggggctcttttcccacaagcggggcacccccaaagggcctcaattcccccctctatcccccaaagaagaaaaaaccgccttcggtttccccagaattgtggcctcc

SEQ ID NO: 96582 - DNA, 1409 bp, Homo Sapiens
  misc_feature (1111)..(1119): n is a, c, g, or t
gaggcctgggtggcgaattcggcacgagggggtggtggtctggggggttggaaggggcgggaagggcgctgtcttaagaatcatcctcacatctcagggcttcgcccctcgagggaggtgacccttggccaccctctgcgcagttctccctgaaaggtcatgccacgtcttagcactctggtccctgcgcccctgcaggcctcgcggatcccccacttgtctcgacgcaggggacgcccacttgtctgacgcaggggacgtggctgaagtcagtcgggccgcccgcttgctgcacggcagccgtgggactggcacaggctcctcggcagcattatgggcagctggtagagcggccacttctgagagccggatgggccttccgaggtcgggccgtgccccgctgggcagcgcagagggggtgtgtagggcacgcgacttggagccaggtccagacccatcctggctcctctcagggctccttcccctccccccattccaccccagccctgctggctgtcccgcaggacccagcgccgcggtagccttctctgaactgcggctcaggcggaggtgtcactcctgcctccagcccaggagggcaggtcaggttatgcaacgcgtgccgcgcgatctccccccacctccaacccccttttctcccgggtccacaccgcagttcccaccgctccgggtgtcctccccagtgcgccgcgatttttgtgtccaagccccagagtccctctgagaccaacccccagccagcacagacttcctgccttcccagctcggaagcgcccttcagaagtgtctaaaggagacagctgatatcccaaccaacagttttggattccctgactgattcatgaaagaagccgtataactgggactcaggaattcgtccggcaaggaagggcctctcacctaacgcccactggcctggctccctggaacttctccagccctctctattcctttgactctcggtttttttggcaatcctttagggcttttccacccggctgaaaagccctggccctaaaccttcctgggagggattggccccattacccctgggaacaggatttccagggccttaccctacgtttggaannnnnnnnnacttaggccctaaggcagccgcgctccaaactccaccccacacaattggatccaccttccggccacttttaaatctcttcccggcccccctagctacgatattctgatgactatctgcccctcaaagcactttcccccacgatgatataagggggtcaaacctaatttccccccaagctaaacttcttcaatcgatcgcatatcccgcgtatgatggagtgacacattttattacgtaagcgaccgcccgccagaccctacatggcactttatctgtgaaccccaccccc

SEQ ID NO: 96583 - DNA, 1729 bp, Homo Sapiens
  misc_feature (652)..(700): n is a, c, g, or t
  misc_feature (1660)..(1660): n is a, c, g, or t
  misc_feature (1693)..(1693): n is a, c, g, or t
  misc_feature (1704)..(1704): n is a, c, g, or t
gggagactgggttgggggaggggttcaggcctgttccccgcggctgcggcagcaccagggccggccgccaccgcctctagaacgcggaggaggtgggtcctgggaagcgggatgtccatcgctccagcttggtggtgaatgctgaggagagtcactgttgctgcagtctgtgccacccggaggaagttgtgtgaggccgggcgggagctcgcggcgctctggggaatcgaaacgcggggtcggtgcgaagactctgctgctgccagaccctttcctattctggccatgcctggaaggaacaaggcgaagtctacctgcagctgccctgacctgcagcccaatggacaggatctgggcgagaacagccgggttgcccgtctaggagcggatgaatctgaggaagagggacggagggggtctctcagtaatgctggggaccctgagatcgtcaagtctcccagcgaccccaagcaataccgatacatcaaattacagaatggcttgcaggcacttctgatttcagacctaagtaatatggaaggtaaaacaggaaatacaacagatgatgaagaagaagaggaggtggaggaagaagaagatgatgatgaagaacattctgggagctgaaatagaagatgacgatgaagagggnnnnnnnnnnnnnnnnnnnnnnnnnnnnnnnnnnnnnnnnnnnnnnnnnactgaggataatgaattggaagaattagaagagagagcagaagctagaaaaaaaactactgaaaaacagtctgcagcggctctttgtgttggagttgggagtttcgctgatccagatgacctgccggggctggcacactttttggagcacatggtattcatgggtagtttgaaatatccagatgagaatggatttgatgccttcctgaagaagcatgggggtagtgataatgcctcaactgagttgtgaacgcactgtctattcagtttgatgtccatgaggaagtacttcaaggaagctcttgatagatgggcgcagtttcttcatccacccactaatgatcagagatgcaattgaccgtgaagttgaagctgttgatagtgaatatcaacttgtcacaggccttctgatgcaaacagaaaggaaatgttgtttggaagccttgctagacctggccatcctatgggaaaatttttttggggaaatgctgagacgctcaagcatgagccaagaaagaataatattgatacacatgctagattgagagaattctggatgcgttactactcttctcattacatgactttagtggttcaatccaaagaaacactggatactttggaaaaagtgggtgactgaaatcttctctcagataccaaacaaatgggttaccccagaccaaactttgggccatttaacgggatccattttgacacaccagcatttaacaaactttatagagttgttccaatcagaaaaattcatgctctgaccatcacatgggcacttcctcctcaacagcaacattacagggtgaagccacttcattatatatcctggctggttggacatgaaggcaaaggcagcattctttctttccttaggaaaaaatgctgggctcttgcactggttggtggaaatggtgagacaaggattgagcaaaattctacttatttagtngtcagcatttctattacattgactgatgagggntatgaacattntaatgaagtggttacacctgtcttt

SEQ ID NO: 96584 - DNA, 1001 bp, Homo Sapiens
cggtccggaattcccgggatatcgtcgacccacgcgtccgctgggctcggcggcagccgggctcggagtggacgtgccactatggggtcgtccaagaagcatcgcggagagaaggaggcggccgggacgacggcggcggccggcaccgggggtgccaccgagcagccgccgcggcaccgggaacacaaaaaacacaagcaccggagtggcggcagtggcggtagcggtggcgaacgacggaagcggagccgggaacgtgggggcgagcgcgggagcgggcggcgcggggccgaagctgaggcccggagcagcacgcacgggcgggagcgcagccaggcagagccctccgagcggcgcgtgaagcgggagaagcgcgatgacggctacgaggccgctgccagctccaaaactagctcaggcgatgcctcctcactcagcatcgaggagactaacaaactccgggcaaagttggggctgaaacccttggaggttaatgccatcaagaaggaggcgggcaccaaggaggagcccgtgacagctgatgtcatcaaccctatggccttgcgacagcgagaggagctgcgggagaagctggcagctgccaaggagaagcgcctgctgaaccaaaagctggggaagataaagaccctaggagaggatgacccctggctggacgacactgcagcctggatcgagaggagccggcagctgcagaaggagaaggacctggcagagaagagggccaagttactggaggagatggaccaagagtttggtgtcagcactctggtggaggaggagttcgggcagaggcggcaggacctgtacagtgccccgggacctgcaggggcctcccgtgggagcatgccattgatttcttcccaaaaaggggagacaattgattcttacccttcaagggacaaaggcgttgctgccaggaagaaggaagaacctggctgggtgaaacgtgaaacctggggggattaaggaagccgggccag

SEQ ID NO: 96585 - DNA, 1330 bp, Homo Sapiens
  misc_feature (77)..(77): n is a, c, g, or t
  misc_feature (1143)..(1200): n is a, c, g, or t
agcgtgaacgctgccgaacggtgtaagattgtgtcttataatttggatgtcgctgggtatgccaaaataaagggtgnttccgactaacataagttttttaccgtcagtgtcgagaactcccgcattaggttcgtttgtgcctcgtaaggaagagggttgtaaccagcgtgaatcctctggtgaatccagggtgtatcttccttagatcaatcccaagtgtagttatacaaggcggccttttgtgccggcagttgggtttcttgggctcagaggtgggccaagattccatgtccaggcagtacctccccccaggccatgattttttgtcccaaaggagggtgccggaaccttttttacgtggacccggcatgtgggggacattcaagcacagggaatggctttcgcgcataccagatttagctggtgggccagcacaagcagcgactgtccgcgcattttcgtcttcaggttcacgataaggttcaggcaataaaagccaagttgtcacagaaaggtaaatgcgccacagtaagtttctacattcatttccaaaccgcatacagtgtaaaaagacagcaaaggctgcttctaggaactgtatttactggcctctgccagagcagcaggcagctatgcctgcaccgtggcctccagagctggatgcatgctgtgccgatgtgctcactctcatgaggatgcttggctatggcagtgacagtgaggagattcacctctcatacagctcattagaaaggtcatcttgtgttttcaatatgaaacatttcatatggtaaaatccaatcccaagacttcttggattcagtcttcacacacttttaagcgtgactatttggtactgaatacagttcagtctatataagacatcacttcaaaattatgtggatgccatcactactttcagcttttactgtggagaataaaaaacaactctcatcttgaaaattctgaaccatctgatcactaacaagaatgtgaataccagtgggaccctgtctgtaaacctgattaatttggtggagagggatattaaacaccagcgcaagttttcgagcaacttctgaggcaatcatttcttccaagtagattgcatgataaacatagggtgccccactgccattctcnnnnnnnnnnnnnnnnnnnnnnnnnnnnnnnnnnnnnnnnnnnnnnnnnnnnnnnnnncggcagacatagatggttaaacggggtctaaccgaccttgacttcagtgaattatagagccgaattccatcggctgcaccacaaattgaaccctcgtgccgattcacacacccagcctcgtacctagcct

SEQ ID NO: 96586 - DNA, 924 bp, Homo Sapiens
  misc_feature (886)..(886): n is a, c, g, or t
ggctggaccggtccggattcccgggatatcgtcgaccacgcgtccggagaaccaccagtggcagggcagcatcctctacaacatgcttatgagcgcgaagcaaacgcgcgcggctcctgaggctccagagacgcggctggtggatcagtgctggggctgttcgtgcggcgatgagcccggggtgggcagagaggggctgctgggcgggcggaacgtggcgctcctgtaccgctgctgcttttgcggtaaagaccacccacggcagggcagcatcctctacagcatgctgacgagcgcaaagcaaacgtacgcggcaccgaaggcgcccgaggcgacgctgggtccgtgctggggctgttcgtgcggctctgatcccggggtgggcagagcggggcttccgggtgggcggcccgtggcactcctgtaccgctgctgcttttgtggtgaagaccacccgcggcagggcagcatcctctacagcttgctcactagctcaaagcaaacgcacgtggctccggcagcgcccgaggcacgaccagggggcgcgtggtgggaccgctcctacttcgcgcagaggccagggggtaaagaggcgctaccaggcgggcgggccacggcgcttctgtaccgctgctgcttttgcggtgaagaccacccgcagcagggcagcaccctctactgcgtgcccacgagcacaaatcaagcgcaggcggctccggaggagcggccgagggccccctggtgggacacctcctctggtgcgctgcggccggtggcgctcaagagtccacaggtggtctgcgaggcagcctcagcgggcctgttgaagacgctgcgcttcgtcaagtacttgccctgcttccaggtgctgccccctggacagcanctggtgctggtgcgcaactgctgggcgtccctgctcat

SEQ ID NO: 96587 - DNA, 1614 bp, Homo Sapiens
gggggggcccttagagggaaaagggcggggcgaacccttcccccaaagggggccccggccctgggcccccaggggggccatcgaaatcccctttttttgggacccgggggccccgggccgggccgggcccttggccatggaaaggctttccccgttgggggtgccaagggcggcaggcaggccggaccaggccaaggccttcccaggcgggggcccacgtagggggtaggaaaaaacccattcagggttgaaagcgggggcaggccaccccagggtgcccaaagcctcaacccgccgcaaagggctggttccaccccccccagtggagcagcaactgcaggtcagctgggtccagccggcactcggccagcacattcccgctcctgggctgctgttataagtcgaccgcctactgccagcactgacagcgccaggccaggcgctgtgcaacgtcggaggagcgcacctagtgcgtcttcgcagcggggcggccaaggggcaacacagccgcacggcacccaaggagccagggctcctgggtcctgctccatactgtccagaagtcggtccagtgtgcgctctgaaccagccagcaggcggcggaggtcatagttctgcttgtgtgcgaagatgcgggcgacacttgcacgtgtaagtgtgctcacgatctgtgcgtgcacagctagcagctccccccgcagctgggctgctgactgagaagtccgtgacatggccacgagcaacagtgggccctgttgtaggaacaccagcttgtggtcctcagcgtagatggcacggatggcatctcccgcactctgcacaaaggacaccagggcggtcattacacccatggtagccgacagcgcctccacactaccataccgcgagtagatgggcttgccagcctcactcagcacaaacacatgcttccgctggctgcgccactcctcatcactggggtccccgccctggcctccagagctactctcagggctacatgtgggactattctcaggggctgcaggactccagagccgagaggtgcttgacagggcctctgactggggcggtggtgatgggctgggtggctggtccttgtccttggatcctgtttcctccaggccctcgtcttcgggatccggcgggaccgcgtgaacccctccaccttctctagcttcctcactggggaactgcgtgtcctccaagtcctccgcgcccccgggggccggggcagcagtgtctcctccgacctccatctgcacatccctgttttaactccgaatctcaattggccggataccattacttccccgtagcggcggtggcatcacacttccgggtgcggcccgggaggtgccacacttccgggtacgacccctcccagaagacacttccggttgcggagctttattggctcctcgcggcgtccctctcccgccgcctacgggtgtcccctcatagttgagatggcgcgggccacttcggatctacgtcaggtctgttcgggagcgcaatgagacctctctgcactcatttcaacggatctggctacggccccacgcgtccgcggacgcgtgggtcgacgatatcccgaaaattccggaccggtaccac

SEQ ID NO: 96588 - DNA, 918 bp, Homo Sapiens
  misc_feature (654)..(664): n is a, c, g, or t
  misc_feature (701)..(709): n is a, c, g, or t
ggggtgctgggtgcgggtgcgggtgcggggttgggcctgcgcatcgggtgagacgctggctgcttgcggctagtggatggtaattgcctgcctcgcgctagcaggaagctgctctgttaaaagcgaaaatgaaacaattgcctgcggcaacagttcgactcctttcaagttctcagatcatcacttcggtggtcagtgttgtaaaagagcttattgaaaactccttggatgctggtgccacaagcgtagatgttaaactggagaactatggatttgataaaattgaggtgcgagataacggggagggtatcaaggctgttgatgcacctgtaatggcaatgaagtactacacctcaaaaataaatagtcatgaagatcttgaaaatttgacaacttaccggttttcgtggagaagccttggggtcaatttgttgtatagctgaggttttaattacaacaagaacggctgctgataattttagcacccagtatgttttagatggcagtggccacatactttctcagaaaccttcacatcttggtcaaggtacaactgcaaactggttttaaaactattttaacaaatctaccttgtaaacaaaagccagtttttacctccccttccctcccacggcggtgaatataatattttannnnnnnnnnnttgtcgggcccgccctcgggccccctccgagcacgcnnnnnnnnnaaaccccttccttttttgggtgccccgccgcccccactaaaggtaaagggagaacatgggcccaatagccttgtttcccctaaggaaaaacctcgggaccaggacaaaaaggcctgggggtctcccccccacaataaaaacacccccccggcggggaaacacggaggggtttttgaaacaacctctccaaaatggcaacttctttaaga

SEQ ID NO: 96589 - DNA, 1255 bp, Homo Sapiens
  misc_feature (221)..(251): n is a, c, g, or t
atcgcgaccgtgactccggcgtcgtgggggcccgtccgcgagcttcgccaccgcctcaaggcccgctaccaggaccgccgggcgctcttcatcgctgggcgctggccgtgccgcctggtgcagtggcgggtccccggccacaacaggcttctccacctccttgcgggggcccaggtggtcccggcggcggtcccggcgacgcgctgggcgcaacggcggcnnnnnnnnnnnnnnnnnnnnnnnnnnnnnnngtgggtggtgccgtaggcgtgggcggctgctgctccgggcctgggcacagcaagcggcgacgtcaagctcccggggttggcgcggttggcgggggcagtcccgagcgtgaggaggtcggcgcaggctacaacagtgaggacgagtatgaggcggctgcagcacgcatcgaggctatggaccctgccactgtcgagcagcaggagcattggtttgaaaaggccctacgagacaagaagggcttcatcatcaagcagatgaaggaggatggcgcctgtctcttccgggctgtagctgaccaggtgtatggagaccaggacatgcatgaggttgtgcgaaagcattgcatggactatctgatgaagaatgccgactacttctccaactatgtcacagaggactttaccacctacattaacaggaagcggaaaaacaattgccatggcaaccacattgagatgcaggccatggcagagatgtacaaccgtcctgtggaggtgtaccagtacagcacagaacccatcaacacattccatgggatacatcaaaacgaggacgaacccattcgtgttagctaccatcggaatatccactataattcagtggtgaatcctaacaaggccaccattggtgtggggctgggcctgccatcattcaaaccagggtttgcagagcagtctctgatgaagaaatgccataaaaacatcggaggagtcatggattgaacagcagatgctagaagacaagaaacgggccacagactgggaggccccaaatgaagcccctccgagggaacagggggctccggaaatcctacctggcagggggttgccgggaatcaggaaaaaacaggcttcgccaggtcccgaaggccccaagccacgcccccggaaaaacccagaggcccacatggcaagttcggggcccacaagcaggcctacccctccaatggcccctggaaaggaaatgggaacttagcccggggtccccccgcgcggcaaaccgt

SEQ ID NO: 96590 - DNA, 1008 bp, Homo Sapiens
gtccggaattcctgcgatatcgtcgacccacgcgtccgcccacgcgtccgagggaagtcaccagaaggtgtagccttgggggcgtgcacaaggactttgaatgggggcccccctgaccttccctcgacgtggccgtggcctgcaggaggatgggcagggactctgagtgggcgagggtcggagctgaccgcccgcttccctccccaaggctctagcagcctgggcttcacctccagcccctcccctttctcctcctcgtcgcccgaaaacgtggaggattccggcctggactctccgtcccacgcggcacctggcccctccccagattcctgggtcccccgcccaggcaccccgcagagcccgcccagctgtagggcgccacccccagaggccaggggtatccgggcaccgcctctgccagactcgccgcagcccctcgcctcgtctccaggcccctgggggctggaggccttggccggaggagacctgatgcctgcacctgctgaccccacagccagggagggcctggcagccccacccaggagacttccgctctaggaaagtgtcctgccctctcacacgtagcaatggggacctgtctcgttccctgagccccctccccactgggctcttcaaccgccagcactgccttggaaaggcccagcttcttatcccagacaggacacgggagtctcccggggtccgagccctgtggtcctgggctcccaggatgccctgcccatagccacagccttcacggagtatgtccacgcctacttccgtggccacagccccagctgcctgggtcgagtaactggggaggtgaacatgaccttcccctgctggcatcgtgcgtggggttcacgggaaccccacaaccacctggtcctcagcttccgggttgtgacccccaaccgctattgagcacttccagcccaacgcccgaatttgctggtcagtgaaccccttccccaaatggacccctggaaaccaagaaatttctgggct

SEQ ID NO: 96591 - DNA, 871 bp, Homo Sapiens
  misc_feature (62)..(157): n is a, c, g, or t
tggaccggtccggaattcttccgatatcgtcgacccacgcgtccgcccacgcgtccgagccnnnnnnnnnnnnnnnnnnnnnnnnnnnnnnnnnnnnnnnnnnnnnnnnnnnnnnnnnnnnnnnnnnnnnnnnnnnnnnnnnnnnnnnnnnnnnnnnagtaatacaaaatacagttaaaataaaatgtcaacctcctggagtgatcggttacagaatgcagcagatatgcctgctaacatggataagcatgccctgaaaaagtatcgtcgagaagcctatcatcgggtgtttgtgaaccgaagtttagcaatggaaaagataaagtgttttggttttgatatggattatacccttgctgtgtacaagtccccagagtatgagtcccttggttttgagcttactgtggagagattagtttctattggctatccccaggagttgctcagctttgcttatgattctacattccctaccaggggacttgtctttgacacactgtatggaaatcttttgaaagtcgatgcctatggaaacctcttggtctgtgcacatggatttaactttataaggggaccagaaactagagaacagtatccaaataaatttatccagcgagatgatactgaaagattttacattctgaacacactattcaacctaccagagacctacctgttggcctgcctagtagatttttttactaattgtcccagatataccagttgtgaaacaggatttaacgatggggacctcttcatgtcctaccggagtatgttccaggatgtaagagatgctgttgactgggttcattacaagggctcccttaaggaaaagacagttgaaaatcttgagaagtatgtactcaaagag

SEQ ID NO: 96592 - DNA, 913 bp, Homo Sapiens
ggtccggaatttccgggatatcgtcgacccacgcgtccgctgcgtgtggaggaggccggcctgcaggagctcattcccaccacctggtggccccactgctccagtagggagggcaaagagagcacggagatgaaggaggagaccgcagaggagcggctgcggcggcgagcctacgaacggggctgtcagcggctcaggaagcgcatcgaagtggtggaagaactacaggtccagatcctgaagctgctgctggacaataaagatgacaatgggggtgaagcttctaggtatatcttcctgaccaagtttcgcaagtttctgcaggagaacgccagtggccgggggaacatgcccatgctctgcccccctgagtacatggtctgcttcttacaccggctgatctctgccctgcgctactattgggatgaatacaaggcttccaatcctcatgcttccttcagtgaggaggcctacatcccgccccaggtcttctataatggcaaggtggactactttgacctgcagcgcctgggggggcctcctctcgcacctgcggaagaccctcaaagatgaccttgcttccaaagcccaacattgtgatcgacccactggagctccagtcaaccgccatggatgacctaaatgaggatgaggaaccagccccagctatggcccagcggccccatgcaggccctggctgttgggggggccactgccccctgccccggccccggtggctcagttctcccactttgggccgagccaccggctttcctcagcacagcgggctggtggacccccatgaaccccacggggggcctcttgaacaccctccgaaaaaggtggaagggtccccccccttaagcgggggaaccaaaggaccccgggagggacctttgaaaggcagcccccc

SEQ ID NO: 96593 - DNA, 603 bp, Homo Sapiens
  misc_feature (603)..(603): n is a, c, g, or t
gccggaattcccgggatatcgtcgacccacgcgtccggtcagctcctaacgccgcaggttcctcctggtccccgaggcccccggtcgggcgttgcctgccccgcgcgggcggccgggccgagggacgatggtcagtggacggacggcgccagggagcagtgcccacgcgcggcagggcggtaccttcaggcctccagaggctggggctggctctgttggcctctgtgctgggtttcttcctctgcaccgcaggactggctctcctgacctctccaggtgtcatcgaacacccttgtgcttgctgtcacccgctgcctgtctgcaggatcccggattccgtatcaggggaccgaaattagtcggaaaataggaagcaggtgctcgcttggatggaaccctgaccctgtgctcacacttgtaggaggagggctctgcaggccgcctcccggaacgggaaggttcccaagccactgcacttcggaggggctgtaattagagttgcacattcattcagttcccagtaaagtagaacgtgctccagccagtgaggaaaaggtgtttttaaaaattagattggccgagtgcggtggctcatgccttttn

SEQ ID NO: 96594 - DNA, 1014 bp, Homo Sapiens
ggaattcccgggatatcgtcgacccacgcgtccgcggacgcgtgggcgacgggctcagaatgtagccccatgggcgggactcgaggctcggtggacggccttgcaggaggtacccggaactccacgagtgacctcgcgatctggcccggctcccgctcgtcgcaacagcgtgactacagggtatggcggggtccgggcactgtgcggctggacccccagttctggggccacgccgcggaaccgcttactgctgcagcttttggggtcgcccggccgccgctattacagtcttcccccgcatcagaaggttccattgccttctctttcccccacaatgcaggcaggcaccatagcccgttgggaaaaaaaagagggggacaaaatcaatgaaggtgacctaattgcagaggttgaaactgataaagccactgttggatttgagagcctggaggagtgttatatggcaaagatacttgttgctgaaggtaccagggatgttcccatcggagcgatcatctgtatcacagttggcaagcctgaggatattgaggcctttaaaaattatacactggattcctcagcagcacctaccccacaagcggccccagcaccaacccctgctgccactgcttcgccacctacaccttctgctcaggctcctggtagctcatatccccctcacatgcaggtacttcttcctgccctctctcccaccaggaccatgggcacaggttcagagatgggaaaaaaaagttgggtgagaagtaagtgagaagactatggcgagatagaaactgacaaggcaaaataaggtgtgaagtacggaagaggtatctggcaaatctggtcctgaagacaaaatgtccgtatggacccgtctggtatttgcgaacgcgggaatataggttgttgattggcagcagtttagattacacacaggggcgataacacaccgggggtcacaaacagataatataaaagacgacagatggaaggagtgtgcacatcgagaag

SEQ ID NO: 96595 - DNA, 1116 bp, Homo Sapiens
ggtaccggtccggaattcccgggatatcgtcgacccacgcgtccggctgaggcgtctggactctgtcaccaggtccccaatctactctcacttcagcgagaccgtatcaggtttgccagttatccgtgcctttgagcaccagcagcgatttctgaaacacaatgaggtgaggattgacaccaaccagaaatgtgtcttttcctggatcacctccaacaggtggcttgcaattcgcctggagctggttgggaacctgactgtcttcttttcagccttgatgatggttatttatagagataccctaagtggggacactgttggctttgttctgtccaatgcactcaatatcacacaaaccctgaactggctggtgaggatgacatcagaaatagagaccaacattgtggctgttgagcgaataactgagtacacaaaagtggaaaatgaggcaccctgggtgactgataagaggcctccgccagattggcccagcaaaggcaagatccagtttaacaactaccaagtgcggtaccgacctgagctggatctggtcctcagagggatcacttgtgacatcggtagcatggagaagattggtgtggtgggcaggacaggagctggaaagtcatccctcacaaactgcctcttcagaatcttagaggctgccggtggtcagattatcattgatggagtagatattgcttccattgggctccacgacctccgagagaagctgaccatcatcccccaggaccccatcctgttctctggaagcctgaggatgaatctcgaccctttcaacaactactcagatgaggagatttggaaggccttggagctggctcacctcaagtcttttgtggccagcctgcaacttgggttatcccacgaagtgacagaggcctggtggcaacctgagcataggccagaggcagctgctgtgcctgggcagggctctgcttcggaaatccaagatcctggtcctggatgaggccactgctgcgctggatctagagacagacaacctcattcagacgaccatccaaaacgagttcgcccactgcacagccgtccgcctcccacagtgtcctgcctataaggatcctctagatccag

SEQ ID NO: 96596 - DNA, 868 bp, Homo Sapiens
cggtccggaattccttccaatcgtcgacccacgcgtccggtctctcggctcaaggaccgggaggtaagaggtttgggactgccccggcaaactccagggtgtctggtccacgacctatcctaggcgccatgggtgtgataggtatacagctggttgttaccatggtgatggccagtgtcatgcagaagattatacctcactattctcttgctcgatggctactctgtaatggcagtttgaggtggtatcaacatcctacagaagaagaattaagaattcttgcagggaaacaacaaaaagggaaaaccaaaaaagataggaaatataatggtcacattgaaagtaagccattaaccattccaaaggatattgaccttcatctagaaacaaagtcagttacagaagtggatactttagcattgcattactttccagaataccagtggctggtggatttcacagtggctgctacagttgtgtatctagtaactgaagtctactacaattttatgaagcctacacaggaaatgaatatcagcttagtctggtgcctacttgtttagtctttagcaatcaaagttctattttcattaactacacactattttaaagtagaagatggtggtgaaagatctgttgtgtcaccctttggattaggatctttgtcacaagcaagtggcagggttgatggtaacagcaaaattatctggaaattgggacttgaaacagggtatacaacaatttcagaccagtgcgaatgcagtttcattgaaacagccagggttagaaatctcagagtcctggaccaaaattactttcaaaatttcctggcctatactgtcaatcatggggccaatagcgataccgg

SEQ ID NO: 96597 - DNA, 908 bp, Homo Sapiens
ggtccggaattcccgggatatcgtcgacccacgcgtccggcggctttgcagagcaggatgaatgtgatagaccacgtgcgggacatggcggccgcggggctgcactccaacgtgcggctcctcagcagcttgttacttacaatgagtaataacaaccctgagttattctccccacctcagaagtaccagcttttggtgtatcatgcagattctctctttcatgataaggaatatcggaatgctgtgagtaagtataccatggctttacagcagaagaaagcgctaagtaaaacttcaaaagtgagaccttcaactggaaattctgcatctactccacaaagtcagtgtcttccatctgaaattgaagtgaaatacaaaatggctgaatgttatacaatgctaaaacaagataaagatgccattgctatacttgatgggatcccttcaagacaaagaactcccaaaataaacatgatgctggcaaacctgtacaagaaggctggtcaggagcgcccttcagtcaccagctataaggaggtgctgaggcagtgcccattagcccttgatgccattctaggcttgttgtccctttctgtaaaaggggcagaggtggcatccatgacaatgaatgtgatccaaaccgtgcctaacttggactggctctctgtgtggatcaaagcgtatgcttttgtgcacactggtgacaactcaagagcaatcagtaccatctgttcactagagaaaaaatccttattgcgagataacgtggacctattggggaagcttgggaaatctgtacttcagagctggagacaataaaaactctggtcctcaagtttgaaaaaggcacacgatgttgggatccttaatcttgataaaaaaggaatgggaatggtataatgggctta

SEQ ID NO: 96598 - DNA, 1404 bp, Homo Sapiens
  misc_feature (828)..(828): n is a, c, g, or t
  misc_feature (1227)..(1283): n is a, c, g, or t
  misc_feature (1302)..(1364): n is a, c, g, or t
aggtctgggttgaatggcgaggctcaggaagaaaagtcagaagaccagctccaacaggattccatggtagctgggatgttagggctcaggaagaaaagtcagaagaccaggacctccagggcctcaaggacaaacccctcaagtttaaaaaggtgaagaaagataagaaagaagagaaagagggcaagcatgagcccgtgcagccatcagcccaccactctgctgagcccgcagaggcaggcaaagcagagacatcagaagggtcaggctccgccccggctgtgccggaagcttctgcctcccccaaacagcggcgctccatcatccgtgaccggggacccatgtatgatgaccccaccctgcctgaaggctggacacggaagcttaagcaaaggaaatctggccgctctgctgggaagtatgatgtgtatttgatcaatccccagggaaaagcctttcgctctaaagtggagttgattgcgtacttcgaaaaggtaggcgacacatccctggaccctaatgattttgacttcacggtaactgggagagggagcccctcccggcgagagcagaaaccacctaagaagcccaaatctcccaaagctccaggaactggcagaggccggggacgccccaaagggagcggcaccacgagacccaaggcggccacgtcagagggtgtgcaggtgaaaagggtcctggagaaaagtcctgggaagctccttgtcaagatgccttttcaaacttccccagggggcaaggctgaggggggtggggccaccacatccacccaggtcatggtgatcaaacgccccggcaggaaaccanaaagctgaggccgaccctcaggccattcccaagaaacggggcccaaagcccggggaatgtgggggcagccgcctggccgccaagcccaaaaagaaagccgggaagggagtcttctatccgatctgtggcagaagaccgtactccccatcaagaagcccaagaacccgggagacggtcagcatcgaggtcaaggaaagtggtgaaaccccctgctggtgtcccaccctcgggtgagaaagagcggggaaagggactgaaagacctgttaagagcccctggggcgggaaaagcaaaggagaagccgccccccaaggggggggccaggaaaaaagggccttctttaacccccccaagaaagggagcaccacccacccattacccacccaattttgaaagttnnnnnnnnnnnnnnnnnnnnnnnnnnnnnnnnnnnnnnnnnnnnnnnnnnnnnnnnnaacttttaaaccttgggannnnnnnnnnnnnnnnnnnnnnnnnnnnnnnnnnnnnnnnnnnnnnnnnnnnnnnnnnnnnnnggaaactttttaaggacaaaaaaagggtgtctggtggaaa

SEQ ID NO: 96599 - DNA, 840 bp, Homo Sapiens
  misc_feature (725)..(726): n is a, c, g, or t
  misc_feature (764)..(764): n is a, c, g, or t
ggtaccggtccggaattcccgggatatcgtcgacccacgcgtccggggcgttcttggtgcgccgggccgtggtgagtccgggctcccgtggccgcgtgctgggaggagactggagcccggttaggaagaatggagttggcgactcgctaccagatccctaaagaagtggctgacatctttaacgcccccagtgatgatgaagagtttgttggcttccgagatgatgttcccatggaaaccctctcgtcagaggagagctgcgatagttttgactcactagagtcagggaaacagcaggatgtgcgctttcattccaaatacttcacagaagagctaagaagaatttttatagaggacactgactcagagactgaggattttgcaggatttacgcagagtgatctgaatggaaagactaacccagaagtaatggtcgtggagtcagatttgagtgatgatggcaaagcatctttggtgagcgaggaagaggaagatgaagaagaagataaggctacccctagaagaagcaggtctagaagaagtagtattggtcttcgagtagcctttcagttccccaccaagaagctggccaacaaaccagataaaaacagttcttccgagcagttgtattctagcgcacgcttacagaatgagaaaaaaacaattccttgaaagaaagaaagactggtagacagggtgatacaaaggggaaagattctaccctnnctgagtctgagggggatgactctcgggggatggagagnccccaggaagaaagtttcaggaatggctttttggcttggaaaaaagggacccattggaaacccattccaaaggggg

SEQ ID NO: 96600 - DNA, 451 bp, Homo Sapiens
  misc_feature (285)..(328): n is a, c, g, or t
  misc_feature (394)..(406): n is a, c, g, or t
gtgtggccaagtcactccaaggagaccgtggataagatgtattgagattccagccccgcctgaagttgtgtaccttccccgcacgtccttctctggtattgaataaagctgaatcactcaccaaggccattatcatacgatgaatccaacttgcttgattatcactttgatagtcacttccagcatcttcattttcagtgcctagggaaaaataaaaggtcaccactacagactccaaaatgcactgtttaaaaagggatctttgggccgggcccggtggctcannnnnnnnnnnnnnnnnnnnnnnnnnnnnnnnnnnnnnnnnnnntgaggtccagagatcgagaccctcctggcccaaccaggtgaaaccccatctctactaaaaataccnnnnnnnnnnnnnttagctgggcatggtggcgtgcacctctagtcccagctactcgga

SEQ ID NO: 96601 - DNA, 2206 bp, Homo Sapiens
  misc_feature (327)..(368): n is a, c, g, or t
  misc_feature (1393)..(1393): n is a, c, g, or t
  misc_feature (1813)..(1813): n is a, c, g, or t
gctggaccggtccggaattcccgggatatcgtcgacccacgcgtccgcttgcaagtgggcaaacttgacgttttcgctatgggcaaacgcgggagccggagccagagccagctactcaacaccctaactaaaaagcagaagaaacatcttcgagatttcggcgaggagcatcccttctatgacagggtttccagaaaggaagcaaagccacagatttgtcaactgtcagagagttcagattcttcagattctgaaagcgactcagagagtgaaccagaacaagtttctggctaccacagactacttgctacattaaagaatgtttcnnnnnnnnnnnnnnnnnnnnnnnnnnnnnnnnnnnnnnnnnncagtattgtagatgatgcagaaatgaacgatgaagatggtggtagcgatgtcagtgtggaagaagagatggctgcagagtctactgaaagtccagagaatgtagctttatctgctgaccctgagggaaaagaagatggggaagagccaccgggcacatcacaaacatcccctgaagagttcacagatgcaaaacacgagtcactgttcagcctggaaaccaattttctggaagaggaaagtggagacaactcttctttgaaagcctctcaagatccatttcttcaacatgtgaacaaagaactgaaagaaaaagcaattcaggctgttgccacaaatcccaaaactacccacgagcttaaatggcctattctgggccagcttttcttttcctctaaggttcagaaggtgggaaacatttaaacccccaaaggatattgacttaaagtcacttcatctccagaagcctctggaatccacctggactaagaccaacagccagttcctatctgggtccccaaaaatcaagcagcccattcacccccctccagaaaaaactcttcttaattatgaaattcttaccgggacctgttctacccggaaaggactgctctgaagaacggggaagagatccgccatgtgtattgcctgcatgtgataaatcacatcctcaaagccaatgcccaggtgcttggcaacaatagcagacgccgaagccagaagtttggagtgggtgatgatgatgacttcagagaccaagggttaacaaggcccaaggtactgatagtggtgccattccgggaagctgctttgcgggtggtgcagctcttcatcagcctcctcgagggtgacagcaagaagaaaatcattgtgagcaacaaaaagaggtttcagggagaatatggatcagatcccgaggagagaccacccaacttgaagaggcctgaggattatgaagccgtatttgtgggcaatattgatgaccacttcaggattgggagtggcaatacttcagagaagcatcccngactctatgccccgttttactcctcggatatcctcattgcttcccccctgggcttgaggaccatcattggtggagaaggagagaagaagagagattttgactttctgtcttctatcgagcttctcatcattgatcaagctgacatttacctgatgcagaactgggagcatgtcctgcatttgatgaatcacatgaacctactacccctggactcacatggggtagacttttctcgagtgcggatgtggagcctcaataattggtccaagtactatcgccagacactgctattttggggcccttcaggatgcccagatcaactcagtgttcaacaagtactgtgtcaacatgcaaggccaggtggccgtgaggaatgtcccaattgacaggctctatcagtcatgtcctggttgcagttcncacatgtcttccagagggattggaagctgaaaaacctagcttcagtgatttgatgccaggttaactttttgtggaaccaagattttgccaacagatcgtgattgcagtcatgtctccacacaggcttcattatatattccccctcctaatttggaactttcgagcagtcttcggaaatttacttcacagaacgcagcgactcgactcttacccacattttgcgaggtacacccgcagaaagatttgggtgttcaccagaggccagacacttccttccctcacagagaagaagaacacagtgccaccatttcaaaaagaaggtccaatttcaacaaaggttttcaccataagggatccggcagccgaatcaatagaagcgggccaattttcacg

SEQ ID NO: 96602 - DNA, 951 bp, Homo Sapiens
  misc_feature (644)..(644): n is a, c, g, or t
  misc_feature (700)..(700): n is a, c, g, or t
  misc_feature (712)..(712): n is a, c, g, or t
agtcgtggtacaccatcatgcggttccatgtggttcctgcagcaaataaagagcagtatgaacaactatcccaaagtgagaagaacaattactattcaagccgttttagccctgacagccagtatattgacaacaggagtgtgaacagtgcagggcttcacacggtgcagagagcaccccgactgaaccacccgcctgagcagatagactctcactcaagactacctcatagcgcacacccctcgggaaaaccaccatccgctccagcctcggcacctcagaatgtatttagtacgactgtaagcagtggttataacaccaaaaaaataggcaagaggcttaatatccagcttaagaaaggtacagaaggtttgggattcagcatcacttccagagatgtaacaataggtggctcagctccaatctatgtgaaaaacattctcccccggggggcggccattcaggatggccgacttaaggcaggagacagacttatagaggtaaatggagtagatttagtgggcaaatcccaagaggaagttgtttcgctgttgagaagcaccaagatggaaggaactgtgagccttctggtctttcgccaggaagacgccttccacccaagggaactgaaagcagaagatgangatattgttcttacacctgatggcaccagggaatttctgacatttgaagtcccacnttaatgattcangatctgcaggcccttggtgtcagtgtcaaaggtaaccggtcaaaagagaaccagccagatttgggaatcttttgtcaagtccattatttaatggaggagcagcatcctaagatggaaagcctccgggtgaaatgatcaactggatagccagtaaattggaaaactccctgttggggccaagacaaaaccaagatggccatggaaaacccctaaaaaaaggtctattggcctactggaag

SEQ ID NO: 96603 - DNA, 877 bp, Homo Sapiens
cctcttcaatctccatgatttcatccagtgcagatttctttttcttcttttctttagactgagttgagctctgggaagattcttttcgtttcactgatgctgaacttcctatcgtcttcagtgcactcggtcccagagtacttgacttggaagatgttgctccggatgagctacatgctcctttactcaaattaaacgtgactttctcttcatcattttctctgcttaattccgtaaaagtagggacctcctgttccttcccttccaggcctcttctcacttgctcttcaataaatttggcagttttttcttcatcatcaaggtcctgctttttctttttctccagttccagttgccggcggatagtttctgggtccctgtctatgtactgaatataccagccttttggtgtctcgtccactttgcacaagccttctctgcccagccacttagtaaaatcagtcagagtttcccactgagtggcattcatgtggatgtgctctcggtggctgatgtattcgttgtagacaatgttgttgtggacccttttagtgccaaagcgtctcctgagaagttctagaaagtcatttcggaattcctctgaaaaataatccataaactgctgaggattttctgaagccagcaatagttgtctctgatgagattcggacatacaatgacacttaaagccattctcgtcccggcactgcttctggcacatctggcaataccagcgtagcttctgcagccccttggacttgatcctgttggcgatagccttgggagtaagaaaatccgacttccccatggcgaccacggcagcgatcactttctggaccccggacgcggggtcgacgatatcccgagaatccggacc

SEQ ID NO: 96604 - DNA, 900 bp, Homo Sapiens
  misc_feature (874)..(874): n is a, c, g, or t
tgtgctggccggtctgcctccggggagaaccgagcgcttccggtggtttggctttgaatgacagcaagaactctgtctttaatggcttcattggtagcgtatgatgattcggactcggaggctgagacagagcatgcaggaagttttaatgctaccggccagcagaaagacacttctggtgtggccagaccacctgggcaggattttgcatctggtacactggatgtgcccaaagcaggggcacagcccacaaagcatggctcctgtgaagacccagggggctatcgccttccattggctcagcttgggagaagcgatcggggatcttgccccagccagaggctacagtggcccgggaaggagcctcaagtcaccttccccatcaaagagccttcttgttcttctctgtggacgagccatgttccagccagccacatgcccctggcagctgcccgctttaagcaagtaaaactctccaggaactttcccaagtcatctttccgtgctcaaagtgagtctgaaaccgtaggtaaaaatggcagctcttttcagaagaaaaaatgtgaggactgtgtggtaccctatactcccagaagactaagacagcggcaggcattaagcacggagacaggcaaggggaaagacgtggagccacaggggccccctgcagggcgtgccccagcccctctctacgtgggcccgggagtgtctgagtttattcagccgtatttgaatagccattataaagaaaccacagttccccggaaagtgcttttccacctgagaggccacagggggccctgtcaacaccattcagtggtgtccagtccctttctaagaagccacatggctttctctccaccttctatgggantaaaacttttcaaaggtatgggaacg

SEQ ID NO: 96605 - DNA, 1183 bp, Homo Sapiens
ctggtaccggtccggaattcccgggatatcgtcgaccacgcgtccggggccgcgtagggcccactggccagggagggcgccgcgcggaggcgcggggcgtgtctcctgtcaaaagccatgctcggcaggtctgggtaccgggcgctgcccctgggtgattttgaccgcttccagcagtcgagcttcggctttctgggctcgcagaagggctgcttgtccccggagcggggcggcgtggggacaggggccgatgtaccccagagctggccctcctgcctctgtcatggcctcatcagtttcctggggttcttgctgctgttggtcaccttccccatttctggctggtttgccctgaagattgtgcccacctacgagcggatgattgtgttccgcctgggccggatccgcaccccccagggacctggcatggttctgctcttgcccttcattgactcctttcagagggtggatctgaggacacgagccttcaacgtccctccctgcaagctggcctctaaggacggggctgtgctgtccgtgggagccgatgtccagtttcgcatctgggacccggtgctgtcggtgatgactgtgacagaccttgaaccagccccacgcatgacagcccagaacgccatgaccaaggccctgctcaagaggccgctgcgggagatccagatggagaagttcatgatcagccggaccaccttctcgctggacatccaccaggtgaccaagggccctgggggggctagaaggtaaatacgctagcaaacttggcaattggacggcccttgacttccaggcctctccctgggcacctgcccccctcttgggcgccaacacctgcgatcacacaccccctccacaacacccgtggacccatggcacaatcatccggtgggtgtacatccccgtcacactcccactgcggctacacgcgtgccgcccacccatctccaacctcgatactatgggaactcccgctcaccacgacctctccaacccccaactagctcccaccacctccgccgcacaacgacctctccccctcaacccgtcccctatcctctgcgaataccttaccacatacacttccacaatctatcctggactctcattcttcagccctcttctactcctctccatccgaacacgccactcacttccgctccatagagac

SEQ ID NO: 96606 - DNA, 882 bp, Homo Sapiens
gcacgaagggcttctggcaaaaacccatgctcggcaggcctgggaaccgggcgctgcccctgggtgattttgaccgcttccagcagtcgagcttcggctttctgggctcgcagaagggctgcttgtccccggagcggggcggcgtggggacaggggccgatgtaccccagagctggccctcctgcctctgtcatggcctcatcagtttcctggggttcttgctgctgttggtcaccttccccatttctggctggtttgccctgaagctggcctctaaggacggggctgtgctgtccgtgggagccgatgtccagtttcgcatctgggacccggtgctgtcggtgatgactgtgaaagacctgaacacagccacacgcatgacagcccagaacgccatgaccaaggccctgctcaagaggccgctgcgggagatccagatggagaagctcaagatcagcgaccagcttctgctggagatcaacgatgtgaccaggcctgggggctggaggtagaccgcgtggagctggcagtggaggccgtgctccagccgccccaggacagcccagctgggcccaacctggacagcaccctccagcagctggccctgcacttcctgggaggaagcatgaactcaatggcaggaggtgccccgtccccggggccagcagacaccgtggagatggtgagtgaagttgagccacctgcccctcaagttggtgccaggtccagtccgaagcagcctctggcggaggggctactgactgctctacagcccttcctgtctgaggccctggtcagcaagtcgggcctgctaccagttcaatgtcgtcctgcccagcggaccaaagcgcctattcctggagctcactacaggacgaggaa

SEQ ID NO: 96607 - DNA, 1374 bp, Homo Sapiens
  misc_feature (987)..(987): n is a, c, g, or t
  misc_feature (1038)..(1038): n is a, c, g, or t
  misc_feature (1298)..(1298): n is a, c, g, or t
  misc_feature (1320)..(1320): n is a, c, g, or t
actcgccacggcacccaggctgcgcgcacgcggtcccggtgtgcagctggagagcgagcggccaccgggagcccccggcacagcccgcgcccgccccgcaggagcccgcgaagatgccccggcgcagcctgcacgcggcggccgtgctcctgctggtgatcttaaaggaacagccttccagcccggccccagtgaacggttccaagtggacttattttggtcctgatggggagaatagctggtccaagaagtacccgtcgtgtgggggcctgctgcagtcccccatacacctgcacagtgacatcctccagtatgacgccagcctcacgcccctcgagttccaaggctacaatctgcctgccaacaagcagtttctcctgaccaacaatggccattcagtgaagctgaacctgccctcggacatgcacatccagggcctccagtctccctacagtgccaccgcccctgcacctgcactggggggaaccccgaatgagcccgcacgggctcgtgagcaccaccggtccgtcgggaccggcaccttcctcccgcccggaggcttgccacagttggggtccatttcacaggactccaggaagccttttattccactggaccggcgcaggccagttgggcgcagggccgaccgaaaggtttcgggaaaaagggcgcctcccgggcgctggttgccctctgagcgccctgggtgttgccccgcggccttctgtggcgcaagatcgggggacgcttcgccgctcgttacgccatgtccctctccggccttaccctccccaccacccccccatcctactaggaagaggtgccccgctgtgcctggggcaggctcgtccgccccctcttacgtcccctctacatacactctgctgctctagctcccgagtaacgtgccgccaagtgtctgccgcggtgcacggcgccatgtctagtccgcactaccgcgctggctgtgtcgtgcgctgttccgtnacgccatttgggggaagtgcctccctttgctccacacgtctccgtgttttnggggctaccacgcgtctcgcgtccctccttgccgccgcagcaacgacgcgcccccccaccaggccccccggtggtgtacagacactcaacttatagacgcctgcggcccccgggacgcctccgccccccgcgatctatccgcgactcccgctgcccgcggtagcgtggcgagtgaactaatcagcgcgcgtgccgctcaactgtcggcacgcgtgccgcgcacctcgggggggctggcgaggagaccgctctgtgtcctnacatgcaggggatccgcgggangtagtgggacgtgtagatgacggggggtgcaaggagcgtgccccgcgcctgttc

SEQ ID NO: 96608 - DNA, 777 bp, Homo Sapiens
gtgggaagaagccgagatggcggcagccagcgctggggcaacccggctgctcctgctcgggctgatggctggtagcagcgcccagtcgagcccggggcagcggctgccgggccgggactggtgcgcgaggggctggggcggaaggtcgagaggggcgaggcctgtggcacggtggggctgctgctggagcactcatttgagatcgagtgacagtgccaacttccggaagcggggctcactgctctggaaccaggcaggatggtaccttgtccctgtcacagcggcagctcagcgaggaggagctggggccgactccgggatgtggcagccctgaatggcctgtaccgggtccggatcccaaggcgacccggggccctggatggcctggaagctggtggctatgtctcctcctttgtccctgcgtgctccctggtggagtcgcacctgtcggaccagcttgaccctgcacgtggatgtggccggcaacgtggctgggcgtgtcggtggtgacgcaccccgtggggctgccggggccatgacggtggaggacgtggacctggagctgttcaacacctcggtgcagtctgcatgccgccaccacagccccaggcccttgagacggcggccgtcattgaggcgcctggacatggaacaggcccagaagggccaagaacccccaggagcagaaggccttcttcgacgaaatactgcatgtacatcattcccgtcgatcgctgttcctcatgatgtcaggaagcgccagacacctgggtgcag

SEQ ID NO: 96609 - DNA, 855 bp, Homo Sapiens
  misc_feature (752)..(752): n is a, c, g, or t
gccgtcccttcgctggtgggaagaagccgagatggcggcagccagcgctggggcaacccggctgctcctgctcttgctgatggcggtagcagcgcccagtcgagcccggggcagcggctgccgggccgggactggtgcgcgaggggctggggcggaaggtcgagagggcgaggcctgtggcacggtggggctgctgctggagcactcatttgagatcgatgacagtgccaacttccggaagcggggctcactgctctggaaccagcaggatggtaccttgtccctgtcacagcggcagctcagcgaggaggagcggggccgactccgggatgtggcagccctgaatggcctgtaccgggtccggatcccaaggcgacccggggccctggatggcctggaagctggtggctatgtctcctcctttgtccctgcgtgctccctggtggagtcgcacctgtcggaccagctgaccctgcacgtggatgtggccggcaacgtggtgggcgtgtcggtggtgacgcaccctgggggctgccggggccatgaggtggaggacgtggacctggagctgttcaacacctcggtgcagctgcagccgcccaccacagccccaggccctgagacggcggccttcattgagcgcctggagatggaacaggcccagaaggccaagaacccccaggagcagaaaagtcctttcttctgccaaatactggcacatcatcctggggggggcccgtgttgctcacagncctgcgtcctgctgcgccagggcccgcgccaccgcacaggaggcctgatggatgtcatcattcccgtcgtcctgttcctcatgatgtcaggagcgccagaaac

SEQ ID NO: 96610 - DNA, 1625 bp, Homo Sapiens
ggctggaccggtccggaattcccgggatatcgtcgaccacgcgtccgggaggagccgccgagcggagacccgggagcgggagctgggcctaggtctgcgccctggcagccgtgtctgtgtttttgtctcgcagaattagagcccattgggaacgatgccaccaccgtcagacattgtcaaagtggccattgagtggccaggtgctaacgcccagctccttgaaatcgaccagaaacggcccctggcatccattatcaaggaagtttgtgatgggtggtcgttgccaaacccagagtattataccctccgttatgcagatggtcctcagctgtacatcaccgaacagactcgcagtgacattaagaatgggacaatcttacaactggctatctccccgtcccgggctgcacgccagctgatggagaggacccagtcatccaacatggagacccggctggatgccatgaaggagctggccaagctctctgccgacgtgactttcgctactgagttcatcaacatggatggcatcattgtgctgacaaggctcgtggaaagtggaaccaagctcttgtcccactacagtgagatgctggcattcaccctgactgccttcctagagctcatggaccatggcattgtctcctgggacatggtttcaatcacctttattaagcagattgcagggtatgtgagccagcccatggtggacgtgtcaatccttcagaggtccctggacatcctggagagcatggtcttgaacagccagagtctgtaccagaagatagccgaggaaatcaccgtgggacagctcatctcacacctccaggtctccaaccaggagattcagacctacgccattgcactgattaatgcaccttttctgaaggctcctgaggacaaacgacaggatatggcaaatgcatttgcacagaagcatcttccgctcgtataatcgctgaatcactgtgattccgagggaaccgccccatcaaaactgagatggcccatcagctatatgtccttcaagtcctaacctttaaccttctggaagaaaggatgatgaccaagatggaccccaatgaccaggctcaaagggacatcatatttgaactgaggaggatgcatttgacgcagagtctgatcctagcaatgcccctgggagtgggaccgaaaaacgcaaagccatgtacacaaaggactacaaaatgctgggatttaccaaccacatcaatccagccatggactttacccagactcctcctggaatgctggccttggacaacatgctgtacttggctaaagtccaccaggacacctacatccgggtaaaggcaggggagctggccttctcagtcctggtgccacatctcctgccttcctccttcatctccctaatcctccctttctcttcccccgacagattgtcttggagaacagtagccgggaagacaaacatgaatgcccctttggccgcaaggtcccattgagctcaccaaaatgctctgtgaaatcctgcaggttggggaactacgtaagtctctgcagctccctcttcttcagccattccttgtcatcaagagctcagtgagactcaaaattataaacagttacatgtcagtggg

SEQ ID NO: 96611 - DNA, 921 bp, Homo Sapiens
ggctggtaccggtccggaattcccgggatatcgtcgacccatgcgtccgcgcgtcctgagcagggagcgcttcttcggggcctgttcctgccctcgtgcccgggctgcggccaccccgagctgctgcaggcggtgggcattgttggcgccatcatcatgccccacaacatctacctgcactcggccctggtcaagtctcgagagatagaccgggcccgccgagcggacatcagagaagccaacatgtacttcctgattgaggccaccatcgccctgtccgtctcctttatcatcaacctctttgtcatggctgtctttgggcaggccttctaccagaaaaccaaccaggctgcgttcaacatctgtgccaacagcagcctccacgactacgccaagatcttccccatgaacaacgccaccgtggccgtggacatttaccaggggggcgtgatcctgggctgcctgttcggccccgcggccctctacatctgggccataggtctcctggcggctgggcagagctccaccatgacgggcacctacgcgggacagttcgtgatggagggcttcctgaggctgcggtggtcacgcttcgcccgtgtcctcctcacccgctcctgcgccatcctgcccaccgtgctcgtggctgtctttccgggaccctgaaggacttgtcgggcctcaatgatctgctccacgtgctgcagagcctgctgctcccgttcgccctgctgcccatcctcacgttcaccagcatgcccccccctcctggcaggaatttggccaatggcctggtggaaaaaagggccgtcccctccttccatcaagggggcctaggcctggcgccaatcaaacctcttaacttcgggggtacacgtaatttggcccaaacctggccccacccccggccctaattttcgg

SEQ ID NO: 96612 - DNA, 1139 bp, Homo Sapiens
  misc_feature (851)..(851): n is a, c, g, or t
gtggaccggtccggaattcccgggatatcgtcgaccacgcgtccgggcggcaggtggaatttccacgctttatctgcgcctgcgccgcgcgggattcgcggtccgagctgaagaggttcgcggtccggtttcacttctccgaaccctgaggcagtgtgtgaagctgggacgccagccatgttccagaccgcttggcgccaggggatgaggccagaactgagaaggaaggattaactccaaaggatcatgtgtccaaagaaacagagtccttcagactgatggtggggggcctgccagggaatgtttcccagcaccttgactttgggagcagcctagagcagccacaaggtcattggataattaagacaaagtcaaagaggagacatttcacagatacctcagccaggcaccatgaggcctatgaggtcaagaatggagagaagtttgagaaattaggaaaaaatattagcgtcagcacacaactcactacaaatcagacaaatcctagtggtcagatatcttatgaatgtggacaatgtggcagatatttcattcaaatggcagacttccaccgacatgagaaatgtcacactggtgaaaagtcttttgaatgcaaagaatgtggaaaatacttcagatataactcattacttattcggcatcagataattcacactggaaagaaaccatttaaatgtaaagaatgtggaaaaggtttaagttcagacacagccttgattcagcatcagagaatccacactggcagaaaagccctatgaatgtaacgagtgcggcaaggacttcagtagcagctctgtcttccgccagcaccagaggttccacactgcggnagaagctctatgaatggaacgaatgttgggaaaactttcagttgcagctcaagtttcactgtccatcagcgaatgcacactggggaagaaaccttatgaatggtaagagtgtggaaaaacgattaagctccaacacagccttgactcagcatcagcggaattccccctgggggagaagcccttttgaaaggtaagggaatgtggggaaggcaattccaatcggaaaataacccctgattcaggaaccagcggagtttcacaccgggccgagaaacccttatggagggg

SEQ ID NO: 96613 - DNA, 862 bp, Homo Sapiens
ttccgggaatcgtcgaccacgcgtccgttgatgagttatccaccagaatgaaagttatattctggtttgaagcttctgctgtcagataatatagttttctatagtgtggaagaacagcatcatcttcaagcaaggtggaattaagcatggacagaactgtgtttctcacccaggaggaggtatgaaagttttcaagacgcctacaagtggaaaatgcactcctcccagccaaatcaagcttcgccagattccttacagctgtgtgcagtgaaatgactaatgaaagagccctctgctgctggtggaactttcacatatggcactgttatgccactcagcaggacccgaccctggtatttacatattggatgtcaccccaaaagcccctgaccagggggtttccgggatgtaataagaatgccactctgggctttggaaggtgcaccgtatgcacacccatactatagggcaggggttagcatttcagacccctgttcctcccttgacaagcaagtgcttttctccagggaagacgttcaggttcattcatagatccattggtgccgtgggcagctcagtaacaatagctctgctgcctaccagctgctggtggaggtgttgagaatacctaatgaggaagtcagggcccctgcgtgcttcagcagagctggatgcctggcatggcaatcaatggacacaaacctttggataatttccgtccttggcggtgtgttctatagcataggtatgaagtgggtgctctgggagctcagaagaggggcttttctcttaacttatgggtggccagggaaggcttcctggagctcaaatgactgagtggagtcttcaacattaaaaaaaa

SEQ ID NO: 96614 - DNA, 1085 bp, Homo Sapiens
cggtccggaattcccgggatatcgtcgacccacgcgtccggaggcgaggtggaggcgttggcgctgccacgtctgggccgcggttcccaactgtggcgcgggcggtggaggaggaggtggggctggcgctgaagccggatccggatccggtgctgtgcacactggtgggggagagtccgacgcgcctggctaggagcgccgaccgcagggcctctacggaccttactagaaaaatgaaacctgatgaaactcctatgtttgacccaagtctactcaaagaagtggactggagtcagaatacagctacattttctccagccatttccccaacacatcctggagaaggcttggttttgaggcctctttgtactgctgacttaaatagaggtttttttaaggtattgggtcagctaacagagactggagttgtcagccctgaacaatttatgaaatcttttgagcatatgaagaaatctggggattattatgttacagttgtagaagatgtgactctaggacagattgttgctacggcaactctgattatagaacataaattcatccattcctgtgctaagagaggaagagtagaagatgttgttgttagtgatgaatgcagaggaaagcagcttggcaaattgttattatcaacccttactttgctaagcaagaaactgaactgttacaagattacccttgaatgtctaccacaaaatgttggtttctataaaaagtttggatatactgtatctgaagaaaactacatgtgtcggaggtttctaaagtaaaaatcttgtaagaaaattgtcaaaggggctaatgctacaaggctacactctttcctagagttgaaatattttgttgctgcagccgagtgaacctccataaatactggactgaaaaaacattgtaatactacaagtataatgacatttaaaagattactttggggctgcggcggacatgcctgtggaatttacgattacaaatggatatttataaaagggggatggattttttaaacccaaaaggaatataatttttttaaccttggaatccttttttccttggcaattggaatttta

SEQ ID NO: 96615 - DNA, 792 bp, Homo Sapiens
gacgctctctctgctgggggacacagactccccgtaccatttccggccacctttgaggaaacctatggcaagtggtgtgccatgcacgtgcgtgtggattacatgatcctgagacaccaggagaaaatgaagggtgactcccacaagcttgactttcggaatgacctcctgccctgccttccggggccctatggggccctgccccctgggcaggagctctcccacccggcctccctcttcactgcgactggtgccgtccacgctgcagccaaccctttcacggcagctcccggggcccacggacccttcctgagccccagcacccacattgatccctttgggcgtcccacaagcttcgcctctttggctgccctctccaacggggcctttggaggcctgggcagacccacattcaactccggcgccgtctttgcccagaaagaaagcccaggggccccaccagccttcgcctccccaccggacccatggggccgcctgcaccgcagtcctctgacctttcctgcctgggtccggcccccctgaggccgcccggactccaggctcagacaagggaccggcctgtggagcggagggagcccctccatcacaagggaggaaaaggacagggacctcccccttctcaacggccccaagctcccaaagttcctccctggctacttcccaaaggccccggcctttggtgaaggaaaggggccctcccggccaaacccaagggaaatcctgttggcggggtaaaagggaaaaaaccgggaaaaggaaagaaagggttgt

SEQ ID NO: 96616 - DNA, 952 bp, Homo Sapiens
  misc_feature (257)..(318): n is a, c, g, or t
  misc_feature (714)..(714): n is a, c, g, or t
  misc_feature (899)..(899): n is a, c, g, or t
  misc_feature (905)..(905): n is a, c, g, or t
gtggtaccggtccggaattcccgggatatcgtcgaccccgcgtccggagcccgtggttggaaccccgtccactggtcccaaacctggaggggcagctgcagatgaggtttagacctcctggtgtctccgtggattctgagtgcccaggaggggaggggagggggtggcatcctggcctctaggataaatgcctggagtatagggcagcgccacgggcacttggagaccctgtcctgcgcatctgccaagcctggcannnnnnnnnnnnnnnnnnnnnnnnnnnnnnnnnnnnnnnnnnnnnnnnnnnnnnnnnnnnnntagaatgcctgccggggttttccacctcatccctttcctccggccccttgatttgtgctggacaacaaatggcagcaccaggacctcgcctcatgtggctttgtcttggatcttgcccttctccatcgctgatgtgatacagctctagaatttcgtgaagttgcatgcaaagttgcatgcagcccgtgggtatgactgtctcaggcccccagctcatttgccaagaggaaaccttaacccccctgagagggtctgcgtttcttctagagctcctacctcagtggtgtgcacagagttggagacacctgagggctggtccacgtctcacctttgccatacgggtcatttcttgatcaaatatatgactggggtcctggtttactcccgcccaccctnttcttttaagtattcttaacatgaaatccacaaaagcggaaacaatgaaccattcttgcactttacagaatcattgtccttagctttagaggttgttaatttctttgtttttaacatgaacagaatgtgtgggtctgaagggtgggtggggggtctccagaaaattggtcctttgggggccgggncgccantggcctcaccgcctggtactccccagccactcttgggaagggcccaa

SEQ ID NO: 96617 - DNA, 758 bp, Homo Sapiens
  misc_feature (719)..(719): n is a, c, g, or t
ggcagtaactctaacggttataaggtagcgaggcctggcgtggcgaattcggcacgaggctgtagccgaggggccaggttcctggcttgaatctgccaccacgggccggttggggcccacagtcttctcacgccctctcctctggggcctcgtcttcccgaaggtccccttctccagtgcttccctgggagaggccagctgtgttcgagtcctctgtgcctgccctggcgttctcagagcctcccccttcccctcagcaggcggctctctttgccttacccattcagaaggctcgccctcggcgctctgtctgcctctgcctgccagctcatcacgatctgcagggcattgaccctttgctttccctttctgctccctctctttccatctgtttggctttttccctcagggaacttggtctagaaggcactgggaagctcatcagagaaaatgggtgctgggcctgagtactcccgtcggaggggatggacagtcacccctcccgttggtttccagccccgccccccttcccaaggcaactctggagggtaccctgaggtatgctgctgagccctgccccccgtcctgctccagcctgcccgtgtgtaacctgtaagatgtactgtgtgcctccggaagacaccacctttcccttcagcattccctttcatgacctgaggcactctgcgatgtgtgccccaaagcagaacttacaggcnctgcaggaagctggtgtcagggagagaaacccaacccaa

SEQ ID NO: 96618 - DNA, 909 bp, Homo Sapiens
tgcatctggtaaaatggagctttgtgcaagaactgacccttctgagcaagtcgagggaaattgtgaaattgtaaatgaactaattgctgcctccacacagaaaggccagataaagaagaaaaggttgagtgaactggggatcacgcaagctgatgacaacttaatgtcacaggagatgtttgttgggattgtggggaaccagttcaagtggaatgggaaaggtagttttggcacatttcttttctgactacagtgatgtaagtagatagcaaaatactggattttgcacatgctgccctaagaatcactgctgccattgtagtttgctgtattgtctgtattttatatttgattatttgggcttgagtgaaaggtagatttatttccatttgcaggtgttgcacataaaacactccctctttataagaaaaatcataaatgcatataaaatagaaaatatttggagattgcttatctgaaagtcttgctttcttatacacatggttctctcatattaagcctggtggtaactttttagtgtaattacctttagcacttcaaagacgaggaagtaaggaagggaatgcaagactagtgcataaaaatgcaataggtgtcatatgtacagcattcttcttagagttgccttttcatcccaattacagtgagtctgatttccatcctgtatttgcataatacttgtcttaaaataaaagcttttatgattgggaaattattgagacgtcaatgggacgcatttttctgttgagctatgcagtcgtcaaaacagcgatagacagcataggaggtttgaagcagaaatgaaatgtgttattcagagccaatgttgtacatagagcattttcactattgctgaatgggaatgattaaaaacaaggtatttttcgg

SEQ ID NO: 96619 - DNA, 1066 bp, Homo Sapiens
agctctccatagcatacgttatataaaattaaagttttgcttccaaaaatatgtttccaggtggtcgtggtgttgtccagtgctattagggccaaagcaccaaagacatgagaagtttaaccatcgacttgtcattttccataaaaactaaacatttccttataggtctggagtaaaatcttctaggcattttagtgctaaaagtcactttaaattaaatgtgaaataaaagctacaaaaagtatgagttctttcaatacaaaaagttgtgtagctgaagttgtgggctcctttgacatacataagcagtttcaataaaatatttgctcaggtaagaaaatagaaatttgtctgctttcatttagcatacgttccagtcgatgtcctgcttatccctgccagaacttctgaagaacattagaatcgatatttctttccttcaaagagcatccgtaattcacagtacaaaacagttctacagtcttattcctaaggagaaacaaaaattattaaatatgtttattttttctaaagtgtcaaatgtagccactgccagggcattaaaaactcacttatccacaacactgccgtcttcaggaaagaaccaagagttgattcattcccctttcctggagctgttactagttggttgttgctttaagtgtaataaccctaagaaaattcccaataaaaatcactgttcttaagtgtcacatatttcacacctctggtaccctgtagaaacgcttgtattacatgggaaagcagcatctgaaaagatctatttcctattctagttcatttccaagccctgttattgaaaacctcttctctagaagagagagtcactgctctctcttaacacagtcgctgctatacttcagcgtgactgaccatacatcattttccattctgggacagaggaagaagacgggtgggggagttgatctggctagcccagagctggacagtgccattctattcttccctcccacttgtctacacggtggttattactaccggacgcgtgggcggacgcgtgggtcgacgatatcccgggaattcc

SEQ ID NO: 96620 - DNA, 964 bp, Homo Sapiens
  misc_feature (60)..(593): n is a, c, g, or t
ggtccggaattcccgggatatcgtcgacccacgcgtccgcccacgcgtccggcaaaattnnnnnnnnnnnnnnnnnnnnnnnnnnnnnnnnnnnnnnnnnnnnnnnnnnnnnnnnnnnnnnnnnnnnnnnnnnnnnnnnnnnnnnnnnnnnnnnnnnnnnnnnnnnnnnnnnnnnnnnnnnnnnnnnnnnnnnnnnnnnnnnnnnnnnnnnnnnnnnnnnnnnnnnnnnnnnnnnnnnnnnnnnnnnnnnnnnnnnnnnnnnnnnnnnnnnnnnnnnnnnnnnnnnnnnnnnnnnnnnnnnnnnnnnnnnnnnnnnnnnnnnnnnnnnnnnnnnnnnnnnnnnnnnnnnnnnnnnnnnnnnnnnnnnnnnnnnnnnnnnnnnnnnnnnnnnnnnnnnnnnnnnnnnnnnnnnnnnnnnnnnnnnnnnnnnnnnnnnnnnnnnnnnnnnnnnnnnnnnnnnnnnnnnnnnnnnnnnnnnnnnnnnnnnnnnnnnnnnnnnnnnnnnnnnnnnnnnnnnnnnnnnnnnnnnnnnnnnnnnnnnnnnnnnnnnnnnnnnnnnnnnnnnnnnnnnnnnnnnnnnnnnnnnnnnnnnnacttaatgaaaggtagctagagacagcaagtgaggggaagcgaggaagggcgaattattggttgaagggtacaagtttttgttaaggatgaccggcgaagttttgggtacagacctgtggtcatggttccacaacattcgggaatgagtttagtgcccaccccattaaatgggattcatgggcgggaagcacagcccacgccattgacgcagctcccagctcggtgcgaagacgacgggggcggccccctcctcaaaataatccccctcaaggggggccacaacttttacgcgtacccagaccttttctttggaaaaaagggggtcccctcataagcgcggtcgcttttttaacagctaggccccgggcgc

SEQ ID NO: 96621 - DNA, 1701 bp, Homo Sapiens
  misc_feature (1340)..(1340): n is a, c, g, or t
  misc_feature (1489)..(1489): n is a, c, g, or t
  misc_feature (1502)..(1502): n is a, c, g, or t
  misc_feature (1520)..(1520): n is a, c, g, or t
ctcagtgggatgagggtgaaactgctattgccggcggctcctgttttaccgcgtcagcatgctggtgcatttatttcgggtcgggattcggggtggcccattcccaggcaggctgctaccgcccctccgcttccagacattctcagctgtcaggtactctgatggctaccgcagctcctccctcctccgggccgtggcccacctgcggtcccagctctgggcccacctccctcgagcccccctagctcccagatggagcccctctgcctggtgctgggttgggggagccctgctaggccccatggtactgagtaagcatccccacctctgccttgtggccctgtgtgaggcagaagaggcccctcctgccagctccacaccccatgtcgtggggtctcgctttaactggaagctcttctggcagtttctgcacccccacctgctggtcctgggggtagccgtcgtgctggccttgggtgcggcactcgtgaatgtacagatccccctgctcctgggccagctggtagaggtcgtggccaagtacacaagggaccacgtagggagtttcatgactgagtcccagaatctcagcacccacctgcttatcctctatggtgtccagggactgctgaccttcgggtacctggtgctgctgtcccacgttggcgagcgcatggctgtggacatgcggagggccctcttcagctccctgctccgacaagacatcaccttctttgacgccaataagacagggcagctggtgagccgcttgacaactgacgtgcaggagtttaagtcatccttcaagcttgtcatctcccaggggctgcgaagctgcacccaggtggcaggctgcctggtgtccctgtccatgctgtcgacacgcctcacgctgctgctgatggtggccacaccagccctgatgggagtgggcaccctgatgggctcaggcctccgaaaattgtctcgccagtgtcaggagcagatcgccagggcaatgggcgtagcagacgaggccctgggcaatgtgcggactgtgcgtgccttcgccatggagcaacgggaagaggagcgctatggggcagagctggaagcctgccgctgccgggcagaggagctgggccgcggcatcgccttgttccaagggctttccaacatcgccttcaactgcatggtcttgggtaccctatttattgggggctcccttgtggccggacagcagctgacagggggagacctcatgtccttcctggtggcctcccagacagtgcaaaggtccatggccaacctctctgtcctgtttgggcaggtggtccgggggctgagtgcaggtgcccggngtctttgagtacatggccctgaacccctgcatcccactggtctggggggctgctgcgtccccaaagagcagctgccgtggctccggttacattttcagaacagtctgctttcagctacccctgccgcccggggctttcgaaggtgctgnaaagacttcaccnctgacgctgccccctggncaagatcgtgggcccctccgtgggcccagtctgggcgggagggaaagaccaccggtgggtttccctggctgggagcggcttctacgacccccacgggcaagggcgtggtggatgccttggatgggccggggaccctgccgcacccctttgaaccccctccttggcttccggggggccaagc

SEQ ID NO: 96622 - DNA, 742 bp, Homo Sapiens
  misc_feature (652)..(669): n is a, c, g, or t
gagggggtttccctggccccttcccccttggtttccccagggtttaagggggtccccttcccccttcagggagccaggggccccaaaagccccaagtttggggccatgccccattttttaaagcgggcgcaagaaccccttcacggggccctggcagggggccaaggggggctgggttggaagtctcagaggccacagagggtaggaggacctgggggtcaaagccccaggcttcctggggtcctgcctggtctcccctcccaaggagccattctgtgtgtgactctgggtgaaagtgcccagcccctgcccctatgggcgctgcagcctcccttccatgccccaggatcactctctgctggcaggattcttcccgctccccacctacccaactgatggggggtggggtgcttcctttcaggccaaggctatgaagggacagctgctggaacccacctccccctccccggccacatgccgcgtccctgcccccacccgggtctggtgctgaggatacagctcttctcagtgtctgaacaatctccaaaattgaaatgtatatttttgctaggagccccagcttcctgtgtttttaatataaatagtgtacacagactgacgaaactttaaataaatgggaattaaatatttnnnnnnnnnnnnnnnnnngggcggccgctcgcgatctagaactagtccggacgcggggtcgacgatatcccgggaattccggaccggtacc

SEQ ID NO: 96623 - DNA, 922 bp, Homo Sapiens
  misc_feature (54)..(54): n is a, c, g, or t
  misc_feature (91)..(91): n is a, c, g, or t
cgtagcggatggagccctgaaagatgaccccctggaacgtgttggttttgtcantagccaccagctccacacagaccatctctccttcccntacggtcatgtcgctgaacacctcctcgaagctgtcaatcatgaagaagatgttggggtagctgatctgtggactcctcccccttgctgtccatggggtgtttactgggggacgcgaacacttgctgagatttcttcttatggatgtgaatgtccccgccgtcagcacgtgtgcacaccgcacaggtcaccatgtagtccagcttctgcaggatgagattcaggcagacgctctcctcccagtcgatgtcagggtctcccaggcctggcagcttcttggagtcccgccggtacacctccacctccacctcaggctcagctgccttcctcccgtctgcaccgctttcgctgccggagtacgccagcttccggcgcacatagaaaagcatgtcgtcctgccggggagcccatttctccatgaagtaggtggagaacatccaagtccagaagacgatgcggtcatccttgaagcaccctgcagagggaggccagacaggagtgaggaaggacggccaccctggcccttgcagcatggccttggccaagctgcgcccatacccccacatttctggccagaaatttgcgagggctctgagatgcgccacccttccctcaccactcccagacccccactccatggagcatcacagagaggctggaggacacactcgccaggaggcccaattcctccactcagcagcagcctgagagcccatgctcccagccccacacagctgagcctgactccagcctggggatgaatcagcagcttcggaggaaaaggaaaatcccgaggagccaggaacgccactggctggctggtgtctgggct

SEQ ID NO: 96624 - DNA, 1430 bp, Homo Sapiens
cctgggtggcgaattcggcacgaggccccgagcctgcgggcggcgccgaggccgaggagcgctcgctgcagcacatgctgcgtgccatagcggaggagcgcggccgtcttagcctgcgccgcgaggtctgcggcctcgggtgcttcaaggatgaccgcatcgtcttctggacttggatgttctccacctacttcatggagaaatgggctccccggcaggacgacatgcttttctatgtgcgccggaagctggcgtactccggcagcgaaagcggtgcagacgggaggaaggcagctgagcctgaggtggaggtggaggtgtaccggcgggactccaagaagctgccaggcctgggagaccctgacatcgactgggaggagagcgtctgcctgaatctcatcctgcagaagctggactacatggtgacctgtgcggtgtgcacacgtgctgacggcggggacattcacatccataagaagaaatctcaacaagtgttcgcgtcccccatgtaaacaccccatggacatgcaagggggaggagtccaagatcagctaccccaacatcttctacatgattgacagcttcgaggaggtgttcagcgacatgaccgtaagggaaggagagatggtctgtgtggagctggtggctagtgacaaaaccaacacgttccagggggtcatctttcagggctccatccgctacgaggcgctcaagaaggtgtatgacaaccgggtgagcgtggccgcccgcatggcacagaagatgtcgtttggcttctacaagtacagcaacatggagttggtgcgcatgaagggcccccagggcaagggccacgccgagatggcggtcagccgagtgtctacaggtgacacatccccctgtgggactgaagaggactccagcccagcttcgcccatgcacgagcgggtgacctccttcagcacaccccccaacccagaacggaacaaccgggcctgccttcttctccccatccctcaagaggaaggtgccccggaaccggatcgctgagatgaagaagtcgcactcggccaacgacagcgaggagttcttccgggaggacgacggtggagccgatctgcacaatccaaccaacctgcggtctcggtccctgtcgggcacaggacggtccctggtcgggtcctggctgaagctgaacagagcagatggaaacttccttctctatgcacacttaacctacgtcacgttgccgctgcatcggattttaacagacatcctggaagttcggcagaagcccatcctgatgacctagccgcgtgcggagcctgcgcagagccccggccgggcccagccctcggagtgctgccaagtgcctacctgtccaccgccaccggggtctgcgatggcacgccagtgctggagccgcagccaggcgaggccactcgaatcc

SEQ ID NO: 96625 - DNA, 885 bp, Homo Sapiens
  misc_feature (163)..(174): n is a, c, g, or t
  misc_feature (253)..(331): n is a, c, g, or t
  misc_feature (552)..(670): n is a, c, g, or t
  misc_feature (745)..(745): n is a, c, g, or t
gggctttttggagacagattcgcagtggtcgcttcttctccttggatttgttaaggattccaagtaactcttatttggagagaagacgatctgcacttcgcattttggcattgacatttaattttagggtcctttatatagaagggagagtaggtaaactgannnnnnnnnnnnaacagggagggtttgacaatctttggcagacttggagcaaaagattgaggtgcatttcatgcctccttttgagagtctnnnnnnnnnnnnnnnnnnnnnnnnnnnnnnnnnnnnnnnnnnnnnnnnnnnnnnnnnnnnnnnnnnnnnnnnnnnnnnnataagccaccacgcccagccctcatacctcttttaaaagtcgacctgttttgcagaaagtctgctgtttttgtactaaaggctttggaatttggcatttagctaggaatgcacattctttcacctcattcatactttaagaaccacagaagtgactctgcttggccagaaggcacactgtgttggtggttatattaaaagtccttgagtattttgcttttnnnnnnnnnnnnnnnnnnnnnnnnnnnnnnnnnnnnnnnnnnnnnnnnnnnnnnnnnnnnnnnnnnnnnnnnnnnnnnnnnnnnnnnnnnnnnnnnnnnnnnnnnnnnnnnnnnnnnnntagtagagatgaggtttcaccatattggccaggctgttctcaactcctgacctcgtgatccgcccaactcagccntccttaaagtgctgggattacagctgtgagccaccctgcccggccacttttgtatgatttctaatgtatttgtaatttacctaacaaattgcctaatctgctatgttaatgtatttatgaattaaaataaatacgactgc

SEQ ID NO: 96626 - DNA, 1260 bp, Homo Sapiens
gactgcgccgacctagtctaaactatccacacggaaccacctcctcccagaggcatagtactatgaccgtgtacgaaagcaggctgtacggtccggaatcccgggatatcgtcgaccacgcgtcccttccttccttcctttcgccgggcgcgatggagccggggcgccggggggccgcggcgctgctagcgctgctgtgcgtggcctgcgcgctgcgcgccgggcgcgcccaatacgaacgctacagcttccgcagcttcccacgggacgagctgatgccgctcgagtcggcctaccggcacgcgctggacaagtacagcggcgagcactgggccgagagcgtgggctacctggagatcagcctgcggctgcaccgcttgctgcgcgacagcgaggccttctgccaccgcaactgcagcgccgcgccgcagcccgagcccgccgccggcctcgccagctatcccgagctgcgcctcttcgggggcctgctgcgccgcgcgcactgcctcaagcgctgcaagcagggcctgccagccttccgccagtcccagcccagccgcgaggtgctggcggacttccagcgccgcgagccctacaagttcctgcagttcgcttacttcaaggcaaataatctccccaaagccatcgccgctgctcacacctttctactgaagcatcctgatgacgaaatgatgaagaggaacatggcatattataagagcctgcctggtgccgaggactacattaaagacctggaaaccaagtcatatgaaagcctgttcatccgagcagtgcgggcatacaacggggagaactggagaacatccatcacagacatggagctggcccttcccgacttcttcaaagccttttacgagtgtctcgcagcctgcgagggttccagggaaaatcaaggaccttcagggatttctacctttccctaaccgatcattatggtagaaagtctggaaggcaaaatacccgggggaaagagaaccctcaccccccgtttatagggagggctatccccggttgagaaaattttggggggctccccgtggaatcctctacttggccggttggcctatttataaattcggacactaccctgaagaaattggcgcccccccggggggccatccggcctatcgcgcctccttggactcaggaaaggagaaggggtcaatttgcagtcgaaaccctgggggtggatttacccggctctcccagagggggccccctgggggggccctccccggg

SEQ ID NO: 96627 - DNA, 1135 bp, Homo Sapiens
  misc_feature (949)..(1032): n is a, c, g, or t
  misc_feature (1125)..(1125): n is a, c, g, or t
cctgaatgatgaaagggtctcccaggcggcccttcctcaaggcccttttcttgcgggaactccttcttgaagggatgccctcttcttcttcttgcttggcttaaagagtattctggggctcccgggcgcggaggatcccaggtgggcgggatgaccacggctgcgtggacccccagcgagcacggctcctcgatctgctgcagcatgaagcaggacaccttgctgtggtatgcctgcttgcaccacgagcagctgatggccacaatctccttgctgtggaaggtgaacttctgctggaatcccttcccacagtgccgacacttgccgtcctggcgtcgtctgtgtacccagtggtgccgtacaaaggttggctcgcggacattcctggagcctgattcacggaaggacggcttacagcggaaatttatcttctccagctgctcgatgcagggcgtgtgcaccacaatcttgcaggctgcgcactttcttcgagacactgacttctgcagcatcctggctacacagtactgctccccaacgtagcagaagtccccggacacgttggtctcgaaccagatgtgctccccatatgtcgctgactcggctccaagtccactgtactcccggatctgccgctatgactcgctgcacgggggccccaggggtgggcggagggggggccaggtgctggagggcccgacttggtgatggctttcctgtgcccgaagagccgcagccccgggaagcgccgcttgttgagtcgccgcggcgccttgtccggctcgggaccggcgtcgcgctcggagccgctggacgaggcggaagccgactcggagtcgctgctccgggcctcggggctaccgtcccgcggctccatccggccctagccccggccggcggagggcccgcgggagacgcccatgccgggccggcggccggggctcagcannnnnnnnnnnnnnnnnnnnnnnnnnnnnnnnnnnnnnnnnnnnnnnnnnnnnnnnnnnnnnnnnnnnnnnnnnnnnnnnnnnnggtgcccgggaagccgctgccgccgccgctccaggaagtatcccgggaatccggaccggtccggtgcgggatcgcggtgagaggaggggaggntaaagggaag

SEQ ID NO: 96628 - DNA, 1079 bp, Homo Sapiens
  misc_feature (96)..(96): n is a, c, g, or t
  misc_feature (223)..(494): n is a, c, g, or t
  misc_feature (643)..(668): n is a, c, g, or t
  misc_feature (714)..(775): n is a, c, g, or t
  misc_feature (830)..(934): n is a, c, g, or t
  misc_feature (957)..(974): n is a, c, g, or t
agcttgtaatatgaacagttgttacaaaaaggcaggctggtacggtccggaatcccgggatatcgtcgacccacgcgtcccggttttctcaacctnagggaaaaagaactatggttccatattcaaaataaatattatagacccttttcctaagtaggattttgtggtttactgagtgggtaatttgatcattaaaattatgtgaaatctgcccgggcacacnnnnnnnnnnnnnnnnnnnnnnnnnnnnnnnnnnnnnnnnnnnnnnnnnnnnnnnnnnnnnnnnnnnnnnnnnnnnnnnnnnnnnnnnnnnnnnnnnnnnnnnnnnnnnnnnnnnnnnnnnnnnnnnnnnnnnnnnnnnnnnnnnnnnnnnnnnnnnnnnnnnnnnnnnnnnnnnnnnnnnnnnnnnnnnnnnnnnnnnnnnnnnnnnnnnnnnnnnnnnnnnnnnnnnnnnnnnnnnnnnnnnnnnnnnnnnnnnnnnnnnnnnnnnnnnncaacaacaagaaaaattatgccaactcctgtgacttgcctgggaaaacttgcttacatattgagctacttatgccctcctagcctttatattacttgcatgctccgtttctacccctgtttctagttaatttccacctttgcctaatgnnnnnnnnnnnnnnnnnnnnnnnnnnattcccgttagttttcttgttctcgcgtacatttccccctctttcnnnnnnnnnnnnnnnnnnnnnnnnnnnnnnnnnnnnnnnnnnnnnnnnnnnnnnnnnnnnnntcgtctatcgttccttccgtttcccttcccggtgtgtttttgccgattcccatannnnnnnnnnnnnnnnnnnnnnnnnnnnnnnnnnnnnnnnnnnnnnnnnnnnnnnnnnnnnnnnnnnnnnnnnnnnnnnnnnnnnnnnnnnnnnnnnnnnnnnnntttgcgtcgcgtgcagccgcaannnnnnnnnnnnnnnnnngtcgccccttccttttttccgcatttcccctttgtgttcacctctttcccctcgcctaccaactgcccgctcccgttgcccgtcacctaccgttgtgtgtttgct

SEQ ID NO: 96629 - DNA, 933 bp, Homo Sapiens
  misc_feature (818)..(818): n is a, c, g, or t
ctggaccggtccggattcccgggatatcgtcgacccacgcgtccggtagctaggaacagatccacttgcaggttgctgttcccagccatggcttcgcgctgctggcgctggtggggctggtcggcgtggcctcggacccggctgcctcccgccgggagcaccccgagcttctgccaccatttctccacacaggagaagaccccccagatctgtgtggtgggcagtggcccagctggcttctacacggcccaacacctgctaaagcacccccaggcccacgtggacatctacgagaaacagcctgtgccctttggcctggtgcgctttggtgtggcgcctgatcaccccgaggtgaagaatgtcatcaacacatttacccagacggcccattctggccgctgtgccttctggggcaacgtggaggtgggcagggacgtgacggtgccggagctgcgggaggcctaccacgctgtggtgctgagctacggggcagaggaccatcgggccctggaaattccttggtgaggagctgccaggtgtgtgctccgcccgggccttcgtgggctggtacaacgggcttcctgagaaccaggagctggagccagacctgagctgtgacacagccgtgattctggggcaggggaacgtggctctggacgtggcccgcatcctactgaccccacctgagcacctggagagaacggacatcacgaaggcagccctgggtgtactgaggcagagtcgagtgaagacagtgtggctagtgggccggcgtggacccctgcaagtggcctttcaccattaaggagactccgggnagatgattcagttaccgggagccccggcccattttggattctgggggatttcctggggtctcccggaccagatcagggaggtcccccggcccaaagaaacggcctgaagggactg

SEQ ID NO: 96630 - DNA, 953 bp, Homo Sapiens
  misc_feature (798)..(798): n is a, c, g, or t
ctggtaccggtccggaattcccgggatatcgtcgacccacgcgtccgcggacgcgtgggctccgaccctggatagtcgccgtcaggcactgaggaggccgagagatgaggccggagcccaccaagttctgggaacccacaggtgctgagaacaagagaaatcaagtgaaggaaggaggcggagtttccaagacttgggtgtcatcatttctggggacatccttgattggagattgaagtttttgaaccgaaatttagagctgattcagaagagacaaatacagaacgtccaagttagcagtcatttcccaaatttaggagacaatgatgcaggcccaggaatccctaacactggaggatgtggctgtggacttcacctgggaggagtggcaactcctgagccctgctcagaaggacctgtaccgggacgtgatgttggagaactacagcaacctggtggcagtggggtatcaagccagcaaaccagatgcactctccaaattggaacaaggagaagaaacttgcacaacagaagatgaaatctactctcgaatctgttctgattcaggaggtgcatcaggaggtgcatatgcaggtttgtctcatggatatattgcctgatgccgaggattcactagaagctcaatcctgtcacccaagtagtgaacatagtaccaaatagaaatcaggaaaattgatgatcctctgcagcatcacttgcaaaatcaaagtattcagaagagtgtgaaacagtgccatgaacagaatatgtttggaaatattgttaatcagaacaaanggtcatttccctgctgaagcaaagattgtgatacgttttgacttacatgaaaaaacctttaaaaatcaaattttaagtttttgaaaacccagaaaaaggagcctctgggccctaaaagaaaactctggctgagttttaaataggaggatggggac

SEQ ID NO: 96631 - DNA, 937 bp, Homo Sapiens
ctggtaccggtccggaattcccgggatatcgtcgacccacgcgtccgcccacgcgtccgggtgtagcaatgtgcctggccccaagccaaccacagtctcttctgagatgaagaataaagtctggaatgtttctctcaagacctttgtcttaaaagggatgctgaagaagttcaaagaggaccttcggggagagctggagaaagaggagaaagtggagctcaccttggatcccgacacggccaacccgcgcctcatcctctctctggatcttaagagcgtgcgcctcggcgagcgggcccaggacctgcccaaccacccctgccgcttcgacaccaacacccgcgtcctggcgtcctgcggcttctcctcgggccggcatcactgggaggtggaggtgggctctaaggacggctgggcctttggcgtggcccgcgagagcgtgcgccgaaagggcctgacgcccttcactcccgaggagggcgtctgggccctgcagctcaacggcggccagtactgggccgtgaccagccccgagcggtcgcccctcagctgcgggcacctgtcgcgcgtgcgggtggccctggacctggaggtgggagccgtgtccttctacgctgtggaggacatgcgccacctctacaccttccgcgtcaacttccaggagcgcgtgttcccgcttttctctgtttgctccacgggcacctacttgcgaatctggccttgaggggcactgctggggagctcctgtctctgggcctgcggtgagaggggatgtcgcctccccagagatgcctgggtccgtcttgggtctgccctccgtgctcctgacccctgcctgcccaaaagagcctggctacagaaaacaaacccctgagggagggagagtggcctggtggcccaaccgaaccaggggaaacagggggcctttgggaactcc

SEQ ID NO: 96632 - DNA, 1170 bp, Homo Sapiens
aggcagtagtaactatagacccgtgtgtaaaaaagcaggtggtacggtccggaattcccgggatatcgtcgacccacgcgtccgcccacgcgctcggtaggaggtttgactaagatcaatcatgacgacttacagtgacaaaggggcaaagcctgagagaggccgattcctccacttccactctgtgaccttctgggttggcaacgccaagcaggccgcgtcattctactgcagcaagatgggctttgaacctctagcctacaggggcctggagaccggttcccgggaggtggtcagccatgtaatcaaacaagggaagattgtgtttgtcctctcctcagcgctcaacccctggaacaaagagatgggcgatcacctggtgaaacacggtgacggagtgaaggacattgcgttcgaggtggaagattgtgactacatcgtgcagaaagcacgggaacggggcgccaaaatcatgcgggagccctgggtagagcaagacaagtttgggaaggtgaagtttgctgtgctgcagacgtatggggacaccacacacaccctggtggagaagatgaactacatcggccaattcttgcctggatatgaggccccagcgttcatggaccccctacttcctaaactgcccaaatgcagtctggagatgatcgaccacattgtgggaaaccagactgatcaggagatggtgtccgcctccgaatggtacctgaaaaacctgcagttccaccgcttctggtccgtggatgacacgcaggtgcacacggaatatagtctctctgcgatccatggaggtggccaactatgaagagtccatcaagatgcccatcaacggcagcaagcgccgtgcaacacagcagtcgcggacacccggaactcgcgtggacccaactcacacggggaggccgaacggaagccaacgagccaatcagacgcaaaacaacgaggaaacaactcacctccacaagagcatggcacctgccacacaacgagtgcacgggaaggaacaacaacgcgcacacacaaagacccacaaacacaagcggcggagaacacaaaaagcagcaaaacacacgcggaacaagaacaactagaaccccagaacaaagccgaacaaccgaggcaaccaaacgacagagtccccgtgacagcaaaaag

SEQ ID NO: 96633 - DNA, 1534 bp, Homo Sapiens
  misc_feature (90)..(101): n is a, c, g, or t
tcctcatcaaatcctcacctaagctttcagtgtatccagatccacatcttcactcaagccaggagagggaaagaggaaaggggggcaggnnnnnnnnnnnncccaacaacttagcggaaacttctcagagaatgctccaaaactcagcagtgcttctggtgctggtgatcagtgcttctgcaacccatgaggcggagcagaatgactctgtgagccccaggaaatcccgagtggcggctcaaaactcagctgaagtggttcgttgcctcaacagtgctctacaggtcggctgcggggcttttgcatgcctggaaaactccacctgtgacacagatgggatgtatgacatctgtaaatccttcttgtacagcgctgctaaatttgacactcagggaaaagcattcgtcaaagagagcttaaaatgcatcgccaacggggtcacctccaaggtcttcctcgccattcggaggtgctccactttccaaaggatgattgctgaggtgcaggaagagtgctacagcaagctgaatgtgtgcagcatcgccaagcggaaccctgaagccatcactgaggtcgtccagctgcccaatcacttctccaacagatactataacagacttgtccgaagcctgctggaatgtgatgaagacacagtcagcacaatcagagacagcctgatggagaaaattgggcctaacatggccagcctcttccacatcctgcagacagaccactgtgcccaaacacacccacgagctgacttcaacaggagacgcaccaatgagccgcagaagctgaaagtcctcctcaggaacctccgaggtgaggaggactctccctcccacatcaaacgcacatcccatgagagtgcataaccagggagaggttattcacaacctcaccaaactagtatcattttaggggtgttgacacaccaattttgagtgtactgtgcctggtttgatttttttaaagtagttcctattttctatcccccttaaagaaaattgcatgaaactaggcttctgtaatcaatatcccaacattctgcaatggcagcattcccaccaacaaaatccatgtgatcattctgcctctcctcaggagaaagtaccctcttttaccaacttcctctgccatgtcttttcccctgctcccctgagaccacccccaaacacaaaacattcatgtaactctccagccattgtaatttgaagatgtggatccctttagaacggttgccccagtagagttagctgataaggaaactttatttaaatgcatgtcttaaatgctcataaagatgttaaatggaattcgtgttatgaatctgtgctggccatggacgaatatgaatgtcacatttgaattcttgatctctaatgagctagtgtcttatggtcttgatcctccaatgtctaattttctttccgacacatttacccaattgcttgagcctggctgtccaaccagactttgagcctgcatcttcttgcatctaatgaaaaacaaaaagctaacatctttatgtact

SEQ ID NO: 96634 - DNA, 1411 bp, Homo Sapiens
  misc_feature (1341)..(1350): n is a, c, g, or t
gctggaccggtccggaattcctgggatatcgtcgacccacgcgtccgcccacgcgtccgcgagactccacggacgtcacgtgaggcaggcggcgagcgcgggtggggcggggttaggcggcgctccgcgagaaccaaagtgcagccgctgacccggcaaaactcagcgggggctggatagccatgcccaagtactgcagggcgccgaactgctccaacactgcgggccgcctgggtgcagacaaccgccctgtgagcttctacaagttcccactgaaggatggtccccggctgcaggcctggctgcagcacatgggctgtgagcactgggtgcccagctgccaccagcacttgtgcagcgagcacttcacaccctcctgcttccagtggcgctggggtgtgcgctacctgcggcctgatgcagtgccctccatcttctcccggggaccacctgccaagagtcagcggaggacccgaagcacccagaagccagtctcgccgccgcctcccctacagaagaatacacccctgccccagagccctgccatcccagtctctggcccagtgcgcctagtggtgctgggccccacatcggggagccccaagactgtggccaccatgctcctgacccccctggcccctgcgccaactcctgagcggtcacaacctgaagtccctgcccaacaggcccagaccgggctgggcccagtgctgggagcactgcaacgccgggtgcggaggctgcaacggtgccaggagcggcaccaggcgcagctgcaggccctggaacggctggcacagcagctacacggggagagcctgctggcacgggcacgccggggtctgcagcgcctgacaacagcccaagacccttggacctgagcgaatcccaaacctttcaccatcatctgtggagggcctgacataaccatggtccttgcccaaggacactgcacctgcaacagtggattgccaagccgaagctcctggacactcggatcccccagtgcataaggatccagacagacaatgtcgagggacaaaagatagaaaatggaggaggaaagacatacgtgggcttggcccagccccaccgcccacgcctggggtaataacaatgcctccctcacaggcctgggttctaccaccccactcctagggatctcttgaaccttaagggtgacctggggcccaatctctcatcagccccccaatcccctgggtaacaaggcttctgccaccccccgggttcaaatcttttgccaaacacctacgaccggccttcatatcataaccaggggtttgctttgggaaaaaacctaccctgggttctaaaggagtnnnnnnnnnnttttttgcacaacccctggaatatgaaattcctggaaaccaaagggggggacaaccgctgg

SEQ ID NO: 96635 - DNA, 946 bp, Homo Sapiens
ctggaccggtccggaatttcgggatatcgtcgacccacgcgtccggtatgagagagaccagaaagaggagggaaatgattatgacactcgaagtgaggccagtgactctggttctgaatctgtttccttcacagatgggtctgtcagatctggttcaggcacagatggatcagatgagaaaaagaaggaaaggaagagagctagaggcatatctccaattgtttttgatagaagtggaagctctgcatcagagtcatatgcaggttcagaaaagaagcatgagaaattatcatcttccgttcgtgctgtccgaaaagatcaaaccagtaaacttcaaatatgtgcttcaagatgcaagatttttcctcataaagagtaacaaccatgagaatgtgtctcttgccaaagcgaagggtgtatggtccacgctccctgtaaatgagaagaaattaaatcttgcatttagatctgcaaggagtgttatcttaatattttctgtcagagagagtggaaaatttcaagggtttgcaagactttcttcagaatcacatcacggaggatctcctatacactgggtgcttccagcaggaatgagtgctaaaatgctggggaggtgtctttaaaattgactggatttgcaggcgtgaattacccttcactaagtcggctcatctcaccaatccttgggaatgaacataaaccagtaaagatcggacctgatggacagggaaattgaacttgaatggggaaaccccagctttggccttccgttttcccccccaatgaaaatattggacttgtatcaaggccatttcataaaatggcgtcaccaagagaaaaatgcatttcttagccccccgatcccgaagaacggtcccttcccgccccaaaacccagtcccgggatggtgggaaaggcgctccccccgaaagattatgatcttttg

SEQ ID NO: 96636 - DNA, 609 bp, Homo Sapiens
  misc_feature (588)..(589): n is a, c, g, or t
aggaacaacagcttgtcagcgactgtgttaaagaacttcgtgaaacaaatgctcagatgtccagaatgactgaagaattgtcagggaagagtgatgagctgattcgataccaagaagagctttcctctcttttgtcacagattgtagaccttcagcataaacttaaagaacatgtgattgagaaggaagaactaaaacttcacctgcaagcttccaaagatgcccaacggcaactgacaatggagctgcacgagttacaagacaggaatatggagtgtctaggaatgttacatgaatcccaagaagaaataaaggaacttcgtagtagatctggccctactgctcatctctacttctcccaatcatatggagcttttactggggaatctttggcagctgagattgaggggactatgcgtaaaaagctgagtttggatgaggaatcttctctctttaaacaaaaagcccaacagaagcgggtatttgataccgtcaggattgccaatgacacacggggccgctctatctcattcccagctctgttacccattccaggctccaaccgttcaagtgtcatcatgacagcannaccttttgagtctggtcttc

SEQ ID NO: 96637 - DNA, 1820 bp, Homo Sapiens
ccccgccgctgcatggcggcagctccgccgctttccaaggccgagtatctgaagcgttacttgtccggggcagatgccggcgtcgaccggggatctgagtccggtcgcaagcgtcgcaaaaagcggccgaagcctggcggggccggcggcaagggaatgcggattgtggatgatgatgtgagctggacagctatctccacaaccaaactagaaaaggaggaagaggaagatgatggacgatttgcctgtggtggcagagtttgtggatgagcggccagaagaggtaaagcagatggaggcctttcgttccagtgccaaatggaagcttctgggaggccacaacgaagacctaccctcaaacagacattttcgtcacgataccccggattcatctcctaggagggtccgtcatggtaccccagatccatctcctaggaaggaccgtcatgacaccccggatccatctcctaggagggcccgtcatgacaccccggatccttctcccctcagaggggctcgtcatgactcagacacatctcctcccaggaggatccgtcatgactcctcagacacttcacccccaaggagggcccgtcatgattctccagatccttctcccccaaggaggcctcagcataattcttcaggtgcatctcctaggaagagtccgtcatgaattcacaagatccctctacctcctaggcgagcccgtcatggttcctcagatatctcttccacccagaagggtccaataacaactcccctgacacatctaggaggactcttggctcttcagacacacagcaactcagaagggcccgtcatgactcccctgatttggctcctaatgtcacttattccctgcccagaaccaaaagtggtaaagccccagaaagagcctctagcaagacttctccacattggaaggagtcaggagcctcccatttgtcattcccaaagaacagcaaatatgagtatgaccctgacatctctcctccacgaaaaaagcaagcaaaatcccattttggagacaagaagcagcttgattccaaaggtgactgccagaaagcaactgattcagacctttcttctccacggcataaacaaagtccagggcaccaggattctgattcagatctgtcacctccacggaatagacctagacaccggagctctgattctgacctctctccaccaaggaggagacagaggaccaaatcttctgattctgacctgtccccgcctcgaaggagtcagcctcctggaaagaaggctgcacacatgtattctggggctaaaactgggttggtgttaactgacatacagcgagaacagcaggagctcaaggaacaggatcaagaaaccatggcatttgaagctgaatttcaatatgctgaaaccgtatttcgagataagtctggtcgtaagaggaatttgaaactcgaacgtttagagcaaaggaggaaagcagaaaaggactcagagagagatgagctgtatgcccagtggggaaaagggcttgcccagagccgggcaacagcaacaaaatgtggaggatgcagtgaaagagatgcaaaagcctctggcccgctatattgatgacgaaaatctggataggatgctaagagaacagggaaagagaggggggacctatggccaacttcatcaagaagaataaggccaaggagaaccagaataaaaaagtgagacctcgctacagtgggccaggacctcctcccaaagatttaatatctgggcctggaaatccctggggacacgatgggacgcatccaatggatttggaacgaaagcgcttttgc

SEQ ID NO: 96638 - DNA, 914 bp, Homo Sapiens
agttcccgggatatcgtcgacccacgcgtccgcgcttgggtactggctgggtccgatgctgggtacgctgcgcgccatggagggcgaggacgcggaagacgaccagctgctgcagaagctcagggccagtcgccgccgcttccagaggcgcatgcagcggctgatagagaagtacaaccagcccttcgaggacaccccggtggtgcaaatggccacgctgacctacgagacgccacagggattgagaatttggggtggaagactaataaaggaaagaaacaaaggagagatccaggactcctccatgaagcccgcggacaggacagatggctccgtgcaagctgcagcctggggtcctgagcttccctcgcaccgcacagtcctgggagccgattcaaaaagcggtgaggtcgatgccacgtcagaccaggaagagtcagttgcttgggccttagcacctgcagtgcctcaaagccctttgaaaaatgaattaagaaggaaatacttggacccaagtggatatactgctacaaggtgcagagtattttgagtgtgcaggtaacagaactgggaaggatgtacgtgtgactccgctgccttcactggcctcacctgccgtgcctgccccccgatactggcagcgaatctccagaaaagagtcccgggggacccagcgaaaccagcttcgtcctcccagagaatgggatccttttgcatccttccctcccagaacctggcctttagtacctaggaaatgaacggcctcctcctaccagagaccaggtagccggtagcttccttaagcagcccacgccttttgaaaaatgaaggaccttttgcaatgggggcccattcaacggcacctggacccccggggaatgctggacctccattgaacccggcttgttcaccac

SEQ ID NO: 96639 - DNA, 1207 bp, Homo Sapiens
  misc_feature (23)..(23): n is a, c, g, or t
  misc_feature (961)..(1028): n is a, c, g, or t
tgggaaatgaagaatcacggccnccgattcggccgagggggcagaggaggacttgctgcgagtgagcagcagccaagctggacagatgacctgcctctctgccacctctctggggttggctcagcctccaaccgcagctactctgctgatggcaagggcactgagagccacccgccagaggacagctggctcaagttcaggagtgagaacaactgcttcctgtatggggtcttcaacggctatgatggcaaccgagtgaccaacttcgtggcccagcggctgtccgcagagctcctgctgggccagctgaatgccgagcacgccgaggccgatgtgcggcgtgtgctgctgcaggccttcgatgtggtggagaggagcttcctggagtccattgacgacgccttggctgagaaggcaagcctccagtcgcaattgccagagggagtccctcagcaccagctgcctcctcagtatcagaagatccttgagagactcaagacgttagagagggaaatttcgggaggggccatggccgttgtggcggtccttctcaacaacaagctctacgtcgccaatgtcggtacaaaccgtgcacttttatgcaaatcgacagtggatgggttgcaggtgacacagctgaacgtggaccacaccacagagaacgaggatgagctcttccgtctttcgcagctgggcttggatgctggaaagatcaagcaggtggggatcatctgtgggcaggagagcacccggcggatcggggattacaaggttaaatatggctacacggacattgaccttctcagcgctgccaagtccaaaccaatcatcgcagagccagaaatccatggggcacagccgctggatggggtgacgggcttcttggtgctgatgtcggaggggttgtacaaggccctagaggcagcccatgggcctgggcaggccaaccagatggagtctnnnnnnnnnnnnnnnnnnnnnnnnnnnnnnnnnnnnnnnnnnnnnnnnnnnnnnnnnnnnnnnnnnnnagtcattcttctgctcagctcctgatagctggactaaggagatgctgcatgatgacactgagttgccagcaaactcctgacgcatgccagcgtctgacggtgagccatcacacaactcgcatgtgggactgcagtctgccgacagactactgatgagactgtacgtgcaatgacacaca

SEQ ID NO: 96640 - DNA, 1027 bp, Homo Sapiens
  misc_feature (173)..(173): n is a, c, g, or t
  misc_feature (189)..(238): n is a, c, g, or t
  misc_feature (426)..(466): n is a, c, g, or t
tgccccaagcttctgggcaaatagtgaattggacgcgacagggaaagtagctacgtgatccactaatcagattcaaaacatgaaaatgcactggagagtgtatcccttcctgctcttctccatggtagagagacttaaagataatcaataaaaatagctggtccctttcaaantcagaggaggttttcnnnnnnnnnnnnnnnnnnnnnnnnnnnnnnnnnnnnnnnnnnnnnnnnnnccccccaatacgcctgaaagtaaaacagtctcatggtgactgatgtctggaagaagttgaggcagaaaagactgacaaagttggaagcatccggccacaaaagtgccctaaagaattcactgcagtgctctccatttccaaggctgagtagctattcccagtaagttaacatttttctattaaggagnnnnnnnnnnnnnnnnnnnnnnnnnnnnnnnnnnnnnnnnnggtcaagagaagagcactgtagaaagtcaagcagctgagcgccggcggagtcagcgaagagcccgcgcgtgaagctgggcccagctagatcctcatctgtgggggctgtcacttgtcttcctcacccagatctcattggctcctacagaagctgatcacgcagcgcagtttctggttgtcctttgactccagatagatggcctggctcttgtggtaccatcttttgtcatagtacagtttgccatcttctatccgagcttcgaacctctgggctggagattccgcgggtgttgcaggcagtgctcaggagaggatggagatgctggtctcttgggtgacttaagcttatttaatgttctcagatcctccatgatctgttcatctgttaacaatagtttacgctgggctggaccgcacggtttcctcctcttgtctgggatggggacgggatcatttgtcgcctccagcgactttctggtcatgataggtgtcacctccatagaatctgcaccgacgcttggcgacgctggtcgacgatatcccggaaatccgacgcgtaac

SEQ ID NO: 96641 - DNA, 1242 bp, Homo Sapiens
gagtatgaagtcgacggcgcgccgaattcggcacgaggggagaggctgggacccggcaccagggcagtactgtggccgctgcggccctcagctccgactgggtcaggttgcggagactccaggccgcttccagggcgagtactcctgattgtgacatcacattcatcccctgggcgatggagcttgtcactgggaaggaatactcagtcggagaatagccaacaagatgggttactgggagaatctcttcagtggcactgagtggaggcatcagggggttggagccttgtgaacagggaacctgccccccaacacttggaaggacctgggtttcagtgatgagacatggggtatgatgtaacccgtttccagggggatgttgacgaagatcttatctgccctatttgcagtggagtcttggaggagccagtacaggcacctcattgtgaacatgctttctgcaacgcctgcatcacccagtggttctctcagcaacagacatgtccagtggaccgtagtgttgtgacggtcgcccatctgcgcccagtacctcggatcatgcggaacatgttgtcaaagctgcagattgcctgtgacaacgctgtgttcggctgtagtgccgttgtccggcttgacaacctcatgtctcacctcagcgactgtgagcacaacccgaagcggcctgtgacctgtgaacagggctgtggcctggagatgcccaaagatgagctgcccaaccataactgcattaagcacctgcgctcagtggtacagcagcagcagacacgcatcgcagagctggagaagacgtcagctgaacacaaacaccagctggcggagcagaagcgagacatccagctgctaaaggcatacatgcgtgcaatccgcagtgtcaaccccaaccttcagaacctggaggagacaattgaatacaacgagatcctagagtggggtgaactcccttcagccagcaagagtgacccgctggggagggatgatctcgactcctgatgctgggctccaggctgtaaatcaagcgctccctggggggaaaatggctgtccctgcttctattgccaacgagctgattgaaaatgcccacgagcgtagctggccccaggggtctggccacactagagactagacagatgaaccgacgctactatgagaactaccgtggccagcgcatccctggcaagcaagctgttgtcgtgatggcctgtgagaacagcacatggggga

SEQ ID NO: 96642 - DNA, 938 bp, Homo Sapiens
ttaggctaggtacgaggctgggtttgaattcggcacgagggttccaaaccacgtggacgcgtctgggctgctggaggcagcccgagccgccgccgtcggtgtcgccgccaccaccaccatcggagtcacgagtcccgcgtctgtccgaagtcgccgctctcgggctgctcacgtctcttcggagagcgcgcacatggcgactcaggcgcactccctcagctacgcagggtgcaacttcttgcgccaacgtctggtcctgtctaccctgagcgggcgccccgtcaaaatccgaaagattcgggccagagacgacaacccgggcctccgagattttgaagccagcttcataaggctattggacaaaataacgaatggttctcgaattgaaataaaccaaacaggaacaaccttatattatcagcctggcctcctgtatggtggatctgtggaacatgactgtagcgtccttcgtggcattgggtattacctggagagtcttctttgcttggctccatttatgaagcacccgttaaaaatagttctacgaggagtgaccaatgatcaggttgacccttcagttgatgttcttaaggcaacagcactccctttgttgaaacaatttgggattgatggtgaatcatttgaactgaagattgtgcgacggggaatgcctcccggaggaggaggcgaagtggttttctcatgtcctgtgaggaaggtcttgaagcccattcaactcacagatccaggaaaaatcaaacgtattagaggaatggcgtactctgtacgtgtgtcacctcagatggcgaaccggattgtggattctgcaaggagcatcctcaacaagttcatacctgatatctatatttacacagatcacatgaaaggagtcaactctggggagtctccggggctttggggtgtcactggttgctgac

SEQ ID NO: 96643 - DNA, 1019 bp, Homo Sapiens
cgatcctggtttgggtccgtgttcaccctgggagcagcggccggaggcctgagtgccatgatcctcaacgacctcctgggccggaagctgagcatcatgttctcagctgtgccgtcggcggccggctatgcgctcatggcgggtgcgcacggcctctggatgctgctgctcggaaggacgctgacgggcttcgccggggggctcacagctgcctgcatcccggtgtacgtgtctgagattgctcccccaggcgttcgtggggctctgggggccacaccccagctcatggcagtgtgcggatccctgtccctctacgcccttggcctcctgctgccgtggcgctggctggctgtggccggggaggcgcctgtgctcatcatgatcctgctgctcagcttcatgcccaactcgccgcgcttcctgctctctcggggcaaggcacgaagaggccctgcgggcgctggcctggctgcgtgggacggacgtcgatgtccactgggagttcgagcagatccaggacaacgtccggagacagagcagccgagtatcgtgggctgaggcacggggccccccacgtgtgccggcccatcaccgtggacttgcctgatgcgcctcctgcagcagctgagcgggcatcaccgcccatcctggtctaccctgcgagtccactcttcgacagtcaccgctgtcctgctgccccccaaggacgagcgcagccatcgttggggccgtgccggctcctgtccgtgctgatctgccgcctcaccatggacctcgcacggccgcaaggctgctgctcttcgtctcagcggccatcatgtttcgctgcctaacctgactctggggctgctacaatccactttggccccaggcctctgagccccaacagcactgcgggcctggaaacgcgagtcctggggggacttggcgcagcccctggcagcacccggctggctacctcacctggtgcccctgtctggccaccatgctcttcatcatgggcctacggccgtgggctg

SEQ ID NO: 96644 - DNA, 865 bp, Homo Sapiens
tatcgtcgacccacgcgtccgcggacgcgtgggctgatggccttcgagaacaaggcggggctgcctgtggagccggccaccttccagctgtacgtcccggccctgagcgcactctggagggattctggcatcagggaggctttcagccggagaagcgagtttcagctgggggagtcggtgaagtacttcctggacaacttggaccggatcggccagctgaattactttcctagtaagcaagatatcctgctggctaggaaagccaccaagggaattgtggagcatgacttcgttattaagaagatcccctttaagatggtggatgtgggcggccagcggtcccagcgccagaagtggttccagtgcttcgacgggatcacgtccatcctgttcatggtctcctccagcgagtacgaccaggtcctcatggaggacaggcgcaccaaccggctggtggagtccatgaacatcttcgagaccatcgtcaacaacaagctcttcttcaacgtctccatcattctcttcctcaacaagatggacctcctgggggagaaggtgaacaccgcgagcatcaagaagcacttcccggacttcaggaggcgacccgcaaaggctggaggacgtccagcgctacctggtccagtgcttcgacaggaacagaccgaaccccagcaagccactctttccacacttgacccacccgccttcgacacccgagaaccgcccccttcgcggttcatggctgggaaagaccccattcccgccaggaagaacccggaagggacctcatgcttggcccctgccgcgcgggaaggcccgcgggggtccggtcccccgcttgaggaaagccccccccggcgctggc

SEQ ID NO: 96645 - DNA, 555 bp, Homo Sapiens
agctggcccgatccggtccaagctgtccaggaagtacttcactgactcccccaagctgaaactcgcttctccggctgaaagctcccctgatcccagaatccctccagagtgcgctcagggccgggacgtacagctggaaggtggccagctccacaggcagcaccgccttgttctcaaagagccatcaggaacatcccatgcttctcatgttcagaatactgccaaggaaatgccaagcttatctcgtgcatcaacaaaaacccttgagcccttgaggatgatgtcaaagatggtgtcacggaactccagcagcgccttctgatcgaactcgcggccgtggatgatgcgcatctgcttgaggaacgtggacttccagctctcgcccgcgaccagcagcaggatcttcaccaggcgccggaccgcgcgccgctcacggaccaacagcgcagtcgatgtcacggatacgcctccagacctcgcgctccgcgtcgcgcgcgccgctgcccgccctgcgctcacgggccccgccgacgacgaccgtcagcaacacgcggc

SEQ ID NO: 96646 - DNA, 1052 bp, Homo Sapiens
  misc_feature (94)..(118): n is a, c, g, or t
cccccccgggaaaaaagttgagcaacccacacccccaggtgggcgcccccgttttggaggcaagttttgccaaacacaatgccacaaaggaccnnnnnnnnnnnnnnnnnnnnnnnnntgcgctccagcagcctgtttgggaagcagcagtctctccttcagatactgtgggactcatgctggagaggagccgcccacttccaggacctgtgaataagggctaatgatgagggttggtggggctctctgtggggcaaaaaggtggtatgggggttagcactggctctcgttctcaccggagaaggaagtgttctagtgtggtttaggaaacatgtggataaagggaaccatgaaaatgagaggaggaaagacatccagatcagctgttttgcctgttgctcagttgactctgattgcatcctgttttcctaattcccagactgttctgggcacggaagggaccctggatgtggagtcttcccctttggccctcctcactggcctctgggctagcccagagtcccttagcttgtacctcgtaacactcctgtgtgtctgtccagccttgcagtcatgtcaaggccagcaagctgatgtgactcttgccccatgcgagatatttatacctcaaacactggcctgtgagccctttccaagtcagtggagagccctgaaaggaggctcacttgaatccagctcagtgctctgggtggccccctgcaggtggcccctgaccctgcgttgcagcagggtccacctgtgagcaggcccgcctggggcctcttcctggatgtgccctctctgagttctgtgctgtctcttggaggcagggccaggagaacaaagtgtggaggcctcggggagtggcttttccagctctcatgccccgagtgtgaaccagcgaaaggacctaggaaaaagccccgggggcccgaaatccggcgaaaccagccgggtctggggtcggaacgggcataaaagcccaaaaaagggaccggctccgcggacggaaaaagggggcagggcagacagagcaaggacagggaaagaca

SEQ ID NO: 96647 - DNA, 1231 bp, Homo Sapiens
aaccggttccaagtaagaggtccccggggctttgggccctccggcattccttgtttcccctttcccctgaaggctttgtgcttccctccagaaagggaaaaagggcccccaggggctgcccactgcccccttggcggctgaaagccagagattccggggtaggtttgctttacgcaacgggaggggtccaaggctctttcctagcacgtgccaaggtccagatttagggaagggggtggggggaacagggacaggggaccaaaggctactttttgcgggtgtgctgccttcggggcctgcagtcgctgtcgagcccctggggtcttggatcccgcaccaatggaaaatgaaagggccgccgatccgaacggtccaacaccaacaaagccttgggcgggtgctgaagatgccccaaaggagaggctgctgcccgatgtgcccactccaggcgcaggggtgttctgaccaaaggtgggggtggcggtgcctccaaacacaggtttgctctcagttgtgctgcccacgttgaaggcaaacggtgtgctctggccggtggtgcccagggcgttctgacctaagccccctgtgaagggggtggaggtggctgtgctcccactctgtcctgctccaaagctgaaagctccggtggtggcgctggagcctggggtggccacgttgatcccaaagctcccactgccagcgggggctgccgaacccccaaacgtgaagggtgatggtgttgtgctgccaaacaccgagctgctgctcccgctgctggcggtctgggtggtggctccaaagccggagctggtggctgcaccgaaggagaagacagcagtggagccgccaaaggcgggctgtgagctggcgggagcgccgaaggccgaagccgtggctttcaacccaaacgccgagtgcgtggcaccgccaaaggtaggctggatgggcgtaggcacgtgcgcaggcacgatcttgatcgtggacgcaggtgcaggtgtgggtgcagcagccggggccggggctgcagagtttccaaaagtgaaagagctgccaaagctgggggcaagggccggcttggcggcccccggtggctgcccctcagcggccccaaatgcgggctgggggttggctcccgcatatgatgggagcggggacttggcgcttgagccaaagggaatgttgaactgggggtgctctgtgttactgatcgtcagagtggctgcactcgccc

SEQ ID NO: 96648 - DNA, 1126 bp, Homo Sapiens
cggtccggaattcccgggatatcgtcgacccacgcgtccgcagggtcctgacggacagcctggagtaaaaggtgaacctggagagccaggacagaagggagatgctggttctcctggaccacaaggtttagcaggatcccctggccctcatggtcctaatggtgttcctggactaaaaggtggtcgaggaacccaaggtccgcctggtgctacaggatttcctggttctgcgggcagagttggacctccaggccctgctggagctccaggacctgcgggacccctaggggaacccgggaaggagggacctccaggtcttcgtggggaccctggactctcatgggcgtgtgggagatcgaggaccagctggcccccctggtggcccaggagacaaaggggacccaggagaagatgggcaacctggtccagatggaccccctggtccagctggaacgagccgggcagagaggaattgttggcatgcctgggcaacgtggagagagaggcatgcccggactaccaggcccagcgggaacaccaggaaaagtaggaccaactggtgcaacaggagataaaggtccacctggacctgtggggcccccaggctccaatggtcctgtaggggaacctggaccagaaggtccagctggcaatgatggtaccccaggacgggatggtgctgttggacgaacgtggtgatcgtggagaccctgggcctgcaggtctgccaggctctcagggtgcccctggaactcctggccctgtgggtgctccaggagatgcaggacaaagaggagatccggggttctcggggtcctataggacccacctggtcgagctgggaaacgtggattacctggaggcccaaggacctccgtggtgaaacaggtgatcatgggagagcggagggaccagagggtcaggaaagggcagcaggagggtatactggtcttcagggtctcctgggcctcctggtccaatggtgacaagggcagtgtgggatcctggacgtttgggccagaggtctccagggccagcgggactcgggtaggaagaacactgggcgcatggggcaattgacctcaggttagaggcggatggcgagggcctgggcactgtggcggca

SEQ ID NO: 96649 - DNA, 1588 bp, Homo Sapiens
  misc_feature (1257)..(1257): n is a, c, g, or t
aaggctgcgtgttgaatcggccgaggcccggtccaagatggctgcgtccatggcgcggcgcttgtggcctttgctgactcgtcgggggttccggccccggggaggctgcatctccaacgatagtccaaggagaagtttcactacagagaaacgaaaccggaacctcctgtacgagtatgcgcgcgagggctacagcgcactccctcagctggacatagagcggttctgcgcatgcccagaagaggccgcacacgccctggagctccgcaagggggagctgcgctcggcggacctgcccgcgatcatctcgacatggcaggagctgaggcagctgcaggagcagatccggagcctggaggaagagaaggcagctgtgactgaggcagtgcgggccctgctggcaaaccaggacagtggtgaagtgcagcaggaccccaagtaccagggtctgcgggcacgtggccgggagatccggaaggagcttgttcacctgtaccccagggaggcccagcttgaggagcagttctacctgcaggcgctgaagctgcccaaccagacccacccagacgtgcccgtcggggatgagagccaggctcgagtgctccacatggtcggagacaagccagttttctccttccaacctcggggccacctggaaattggcgagaaactcgacatcatccgtcagaagcgcctgtcccacgtgtctggccaccggtcctattacctgcgcggggctggagccctcctgcagcacggcctggtcaacttcacattcaacaagcttctccgccggggcttcacccccatgacggtgccagaccttctccgcggagcagtgtttgaaggctgtgggatgacaccaaatgccaacccatcccaaatttacaacatcgaccctgcccgcttcaaagatctcaacctggctggaacagcggaggtggggcttgcaggctacttcatggaccacaccgtggccttcagggacctgccagtcaggatggtttgctccagcacctgctaccgggcagagacaaacacgggacaggaaccccgggggctgtatcgagtacaccacttcaccaaggtggagatgtttggggtgacaggccctgggctggagcagagctcacagctgctggaggagttcctgtcccttcagatggagatcttgacagagctgggcttgcacttccgggtcctggatatgcccacccaagaactgggcctccccgcctacccgcaagtttgacattngaggcctggatgccaggccgaggccgctttggagaagtcaccagtgcttccaactgcacagacttccagagccgccgcctccacatcatgttccagaccgaggctggggagctgcagtttgcccacacggttgacgccaccgccttgtgctgtccccccgccttctcatcgcgcttcctggagagtaaaccagcagaaggacggctccatggctcgtggccccctggccctccaagtcctacctcgggcactggattcgaatcacaggcccctaccccacgtggcccttctccaggaacattcgggcccccaaaccagccccccgagaagc

SEQ ID NO: 96650 - DNA, 1345 bp, Homo Sapiens
gggagagtatgaagtcgacggcgcgccgaattcggcacgaggggagcccgagcccggggcgggtggacgcggactcgaacgcagttgcttcgggacccaggaccccctcgggcccgacccgccaggaaagactgaggccgcggcctgccccgcccggctccctgcgccgccgccgcctcccgggacagaagatgtgctccagggtccctctgctgctgccgctgctcctgctactggccctggggcctggggtgcagggctgcccatccggctgccagtgcagccagccacagacagtcttctgcactgcccgccaggggaccacggtgccccgagacgtgccacccgacacggtggggctgtacgtctttgagaacggcatcaccatgctcgacgcaggcagctttgccggcctgccgggcctgcagctcctggacctgtcacagaaccagatcgccagcctgcccagcggggtcttccagccactcgccaacctcagcaacctggacctgacagccaacaggctgcatgaaatcaccaatgagaccttccgtggcctgcggcgcctcgagcgcctctacctgggcaagaaccgcatccgccacatccagcctggtgccttcgacacgctcgaccgcctcctggagctcaagctgcaggacaacgagctgcgggcactgcccccgctgcgcctgccccgcctgctgctgctggacctcagccacaacagcctcctggccctggagcccggcatcctggacactgccaacgtggaggcgctgcggctggctggtctggggctgcagcagctggacgaggggctcttcagccgcttgcgcaacctccacgacctggatgtgtccgacaaccagctggagcgagtgccacctgtgatccgaggcctccggggcctgacgcgcctgcggctggccggcaacacccgcattgcccagctgcggcccgaggacctggccggcctggctgccctgcaggagctggatgtgagcaacctaagcctgcaggccctgcctggcgacctctcgggcctcttcccccgcctgcggctgctggcagctgcccgcaaccccttcaactgcgtgtgccccctgagctggtttggcccctgggtgcgcgagagccacgtcacactggccagccctgaggagacgcgctgccacttcccgcccaagaacgctggccggctgctcctggagcttgactacgccgactttggctgcccagccaccaccaccacagccacagtgcccaccacgaggcccgtggtgcgggagccacagccttgtcttctagcttggctcctacctggcttagccccacagagccg

SEQ ID NO: 96651 - DNA, 1484 bp, Homo Sapiens
ctgtgtgtccgctgccgtcttctggtgtttccccccatgctgtcaccccgcttccgttctcccacttgtgttcccgcattcggtgcaagcccccgatgggtcgcgctcccctcagcccccatgtctgcacccgcgctccccatcggcccactcacgtcctggcgcttccttccggccagtttggctgctctcggcgcgtggcccactcccatgacgccagcagccgttcctgcccctgccttgcgtcccccgaggataaccagtcccctcagccgcagtacgtacagtgcgtcccacagcatagctccacagagctctccactctgcttggagctggttccaacgcatggccacgggcacccccactgataccacccgcacaggtctgggtaaacctcatccagagagccaggccaggacctggcattgagcccaggggcacctcctccatgtacacagcctcatcctggcacccacgggcctccatgcacagtgttctccactgcccggagctgctctggggtcaatgggctctggcgtggtcacatccaagcgcagctgctcaggattgagatgggagccctgctgctctgagccagggcccagggtctgcctcagtgcccagttcagcaggtgggtcgccgtatgcttcgccagcagcctagacgccacggcctcatccacatgcagctgcacctggtcccctaaccgcaggcactcaggggctactgcctcatgcaggatgaaacctccacagacctgggcccgggctactgggaacagcacgtcctcttgccctgcccgcaccaggtagccacggtctgaagcctgggcccccctgttctgcgtagaagttggtcctgtccaagaggaggccacagcgctggcctttccccacggaggccactgctgtcccgtcctctgtatacagttgcaacacctgggcctcacaggtgccgaactcataacttccgctgggtcgcagggagtagttgtacttggggctgtcagtcagttgggggcactccttggcgctgcagctccccaagcgcatggacatcaagccacaatccctgcttcttgaactggctcagcctgccgtgcccggtgctgggcctcctcttgggccaaccgctccagtacagcggagtctagctggacccctttctcctccagcatcagctctaccatgtccaaggggagtcccaggtctccacacagtgacaaggaccaggccacttcagcagggaacatatctgaaggccccagggtcctcagagtccgatcaatgatccgcctaccccgctccagggaggccaggaaggctgcctcgtcctctgacaccaggttggcgatctgggcaaagttcttttgcggtcaaaaataagcatctcccagtgtctccaccactacaggtaccaggctgcctaggaagccagcggacgcgtgggtcgacgattccgcgagaattccggaccggtcca

SEQ ID NO: 96652 - DNA, 1231 bp, Homo Sapiens
ttaggctaggtacgaggcctggtgttgaattcggcacgaggttcatgcaacacaatcagagaggcagatggaagcctgcagcccctgccccagcggcatgtggacacaggaatgggcctggaaaggctggtggctgtgctgcaaggcaaacactccacctatgacactgacctcttttccccgctgctcaacgccatacagcagggctgcagggcacccccttacttgggccgagtaggggtggcagaccaggggcgcacagacacagcgtaccgcgtggtggctgaccacatccgcacactcagtgtctgcatctctgatggcgtcttccctgggatgtcaggtcccccgctggttcttcgtcggatcctgcgtcgagctgtgcgtttctccatggagatcttaaaggcaccacctggcttcctaggcagcctggtacctgtagtggtggagacactgggagatgcttatccagaactgcaaaggaactcagcccagatcgccaacctggtgtcagaggacgaggcagccttcctggcctccctggagcggggtaggcggatcattgatcggactctgaggaccctggggccttcagatatgttccctgctgaagtggcctggtccttgtcactgtgtggagacctgggactccccttggacatggtagagctgatgctggaggagaaaggggtccagctagactccgctggactggagcggttggcccaagaggaggcccagcaccgggcacggcaggctgagccagttcagaagcagggattgtggcttgatgtccatgcgcttggggagctgcagcgccaaggagtgcccccaactgacgacagccccaagtacaactactccctgcgaccagcggaagttatgagttcggcacctgtgaggcccaggtgttgcaactgtatacagaggacgggacagcagtggcctccgtgggggaaaaggccagcgctgtggcctcctcttgggacaggaacaacttctacgcagaacacgggggccagcttcagaccgtggtacctggtggggcagggcaagagacgtgtgtcccaggtagccgggccagtcgcgggggttctcctgctgaagagacccgatgctggttaggacaggcctgtttgtaaagcgggtagggagggaataggccccggagggcggaccggcgaagagccatcaacggatcaggggcccctccagcgggaaacgggga

SEQ ID NO: 96653 - DNA, 1922 bp, Homo Sapiens
  misc_feature (1553)..(1586): n is a, c, g, or t
  misc_feature (1640)..(1736): n is a, c, g, or t
gctggtaccggtccggaattcccgggatatcgtcgacccacgcgtccggccgagagcgttcgccaggaggcccggctcttcgccatgctggcacaccccaacatcattgccctcaaggctgtgtgcctggaggagcccaacctgtgcctggtgatggagtatgcagccggtgggcccctcagccgagctctggccgggcggcgcgtgcctccccatgtgctggtcaactgggctgtgcagattgcccgtgggatgcactacctgcactgcgaggccctggtgcccgtcatccaccgtgatctcaagtccaacaacattttgctgctgcagcccattgagagtgacgacatggagcacaagaccctgaagatcaccgactttggcctggcccgagagtggcacaaaaccacacaaatgagtgccgcgggcacctacgcctggatggctcctgaggttatcaaggcctccaccttctctaagggcagtgacgtctggagttttggggtgctgctgtgggaactgctgaccggggaggtgccataccgtggcattgactgccttgctgtggcctatggcgtagctgttaacaagctcacactgcccatcccatccacctgccccgagcccttcgcacagcttatggccgactgctgggcgcaggacccccaccgcaggcccgacttcgcctccatcctgcagcagttggaggcgctggaggcacaggtcctacgggaaatgccgcgggactccttccattccatgcaggaaagctggaagcgcgagatccagggtctcttcgacgagctgcgagccaaggaaaaggaactactgagccgccaagaggagctgacgcgagcggcgcgcgagcagcggtcacaggcggagcagctgcggcggcgcgagcacctgctggcccagtgggagctagaggtgttcgagcgcgagctgacgctgctgctgcagcaggtggaccgcgagcgaccgcacgtgcgccgccgccgcgggacattcaagcgcagcaagctccgggcgcgcgacggcggcgagcgtatcagcatgccactcgacttcaagcaccgcatcaccgtgcaggcctcacccggccttgaccggaggagaaacgtcttcgaggtcgggcctggggattcgcccacctttccccggttccgagccatccagttggagcctgcagagccaggccaggcatggggccgccagtccccccgacgtctggaggactcaagcaatggagagcggcgagcatgctgggcttggggtcccagttcccccaagcctggggaagcccagaatgggaggagaaggtcccgcatggacgaagccccatggtacctggattccgatgactcatcccccttaggatctccttccacacccccggcactccatgggtaacccccccgcgggcctaacctggaaccccgaaggagccccaagaaggcccggtccccccccaaagcccgggttagccagctcttggggactcccccaagcctgaaccccggccggggcgcctgcctggtcgcgggaaaacnnnnnnnnnnnnnnnnnnnnnnnnnnnnnnnnnnttgtggccgcgcgacctttgcacacccgtcccggggaaggcccccaggaaccannnnnnnnnnnnnnnnnnnnnnnnnnnnnnnnnnnnnnnnnnnnnnnnnnnnnnnnnnnnnnnnnnnnnnnnnnnnnnnnnnnnnnnnnnnnnnnnnttatcccggggtcgccctccgcttttaaagttataacaaactcccccataccctaacgataacattcctgtggatcccccggttagcctctggcacctgtggctcacccccccgcgtgggggcccacaccgcccctccaataaactcccactcaccaccgtcgtggaagagagtcccatccacgta

SEQ ID NO: 96654 - DNA, 1481 bp, Homo Sapiens
tgcggccgccaactgcagccatggatgtgccagatgtgggcaacatggtgtcagatctgccaggcctgaaaaagatagacacagaagcaccaggcttgcctgggtgccagtgaccacagatgccatgccaaggaccaacttccacagctctgtggcattcatgttccgaaagttcaagatcctccgtccggcacctttgcctgcagccgtggtcccgtccacgcccacctcagctcctgctcccacacagcctgcacccacccccacatctgggcccattggactgcggattctcgctcaacagcccttgtctgtgacctgcttcagcctggcactgcccagccctccagccgtagctgtggcctcccctgcccctgatccagctccatcccctgctccggctcgagctcaggctccagcttcagcccgggatccagctccagctccagctccagttgcaggccctgctccagcatctacttcagccccaggggactccctggagcagcattttacaggactacatgcgtccctgtgtgatgctatttctggctccgtcgcccactctcctccagagaagcttcgcgagtggctagagacggctgggccctggggccaggctgcgtggcaggactgccagggtgtgcaggggctgctggccaagctgctgtctcagctgcagcgcttcgatcgcacccaccggtgccccttcccccatgtggtgcgagctggcgccatcttcgtgcccattcacctggtgaaggagcggctcttccctcggctgccacccgcttctgtggaccatgtgctgcaggagcatcgtgtggagctgcggcccaccacgctgtcggaggagcgggcactgcgggagctcgccctgccaggctgcacctcacgcatgctgaagttactggcgctgcgccagctgccggacatttaccccgaccttctcggcctgcagtggcgcgactgtgtacgccgccagctgggtgagcatggggcagccccagtggccaccggagctgtgtgagcaagtgacaggtgactttgacactgaggctggagctgtgtcctcctcagagcccactgtggccagagatgagccagagagcctagccctggctcagaagtcaccggcccccaaggtcaggaagccaggcaggaagccaccaacccctggcccggagaaagcagaggcagcttgctggggaagagtcctgtggtgcctcccctacccctgctaccagtgccagcccacctggccccacactgaaggcccgcttccgcagtctgctggagaccgcctggctcaatggcctggctctgcccacctggggccacaagtcctcaagaccagaccagccctcaccctgcccacagctgctggacagcccgagccatcaccggtaacactggttggcaatgctggggtggatagaagttactcttcacccttcccttctggctggcccagctgcccc

SEQ ID NO: 96655 - DNA, 1428 bp, Homo Sapiens
aaaacatacggctaggtacgaggctggggtgtgtaatcggcacgagggcatcatctggccactgctgacactgtcatcatctttgattctgactggaacccccataatgacatccaggcctttaccgggctcatcggattggccaggccaacaaagtgatgatttaccggtttgtgactcgcgcgtcagtggaagagcgaatcacacaagtggccaagagaaagatgatgctgacacacctggttgtgcggcctgggctgggctccaaggcaggctccatgtccaagcaggagcttgacgacattctcaaattggcactgaagagctattcaaggatgaaaacgagggggagaacaaggaggaggacagcagtgtgattcattatgacaatgaggccatcgctcggctgttggaccggaaccaggatgcaactgaggacactgacgtgcagaacatgaatgagtatctcagctccttcaaggtggcacagtacgtcgtgcgggaagaagacaagattgaggaaattgagcgagagatcatcaagcaggaggagaatgtggaccctgactactgggagaagctgctgaggcatcactatgagcaacagcaggaagacctagcccggaatctaggcaagggcaagcgggttcgcaagcaagttaactacaatgatgctgctcaggaagaccaagacaaccagtcagagtactcggtgggttcagaggaggaggatgaagacttcgatgaacgtcctgaagggcgtagacagtcaaagaggcagctccggaatgagaaagataagccactgcctccactgctggcccgagtcgggggcaacattgatggtgctgggcttcaacacccgtcagcggaaggctttcctcaatgctgtgatgcgctgggggatgccaccacaggatgccttcaccacacagtggctggtgcgggacctgaggggcaagactgagaaggagtttaaggcctatgtgtctttgttcatgcgccatctgtgtgagcctggggcagacggctctgaaacctttgccgatggggtccctcgggagggactgagtcgccagcaggtgttgacccgcattggagtcaggtctctcgtcaaaaagaaggtgcaggagtttgagcacatcaatgggcgttggtcaatgccggaaactgatgcctgaccccagcgcccgattctaaagcgctcctccagaagcctccttctcctaccaaaacgtctcccaccactcctgaggcttctgctaccaacagtccctgcacctctaaacctgctactccagctccaagtgagaaaggagaaggcataaggacacctcttgagaaggacggaagctgaaaaccaggaacaagccagagaagaacagcagcaacttgcgggagacgatggagacacgaggctgatgccgt

SEQ ID NO: 96656 - DNA, 940 bp, Homo Sapiens
  misc_feature (608)..(645): n is a, c, g, or t
  misc_feature (661)..(734): n is a, c, g, or t
  misc_feature (812)..(812): n is a, c, g, or t
  misc_feature (835)..(835): n is a, c, g, or t
ggtaccggtccggaattcccgggatatcgtcgacccacgcgtccgagatgagaagtcaagccctgccagctctcaagaagggtctccttcaggtgaccagcagttttcacctaaatccaacactgaaaaatctaaaggggaattaatgtttgatgattcttcagattcatcaccggaaaaacaggagagaaatttaaactggaccccggccgaagtcccacagttagctgcagcaaaacgcaggctgcctcagggaaaggagcctgggttgattaacttgtgtgccaatgtcccacccgtcccaggtaacattttgccccctgaggtccggggtaatttaatggctgctggacaaaacctccaaagttctgaaagatcagaaatgatagctacctggagtccagctgtacggacactgaggaatattactaataatgctgacattcagcagatgaaccggccatcaaatgtagcacatatcttacagactctttcagcacctacgaaaaatttagaacagcagctgaatcacagccagcagggacatacaaatgccaatgcagtgctgtttagccaagtgaaagtgactccagagacacacatgctannnnnnnnnnnnnnnnnnnnnnnnnnnnnnnnnnnnnncccagttttacacctnnnnnnnnnnnnnnnnnnnnnnnnnnnnnnnnnnnnnnnnnnnnnnnnnnnnnnnnnnnnnnnnnnnnnnnnnncgccgcatccattttcacagcaacagcagcagcagcagcaagcccatccgcatcagttttcacagcaacagctacagnttccacagcaacagttgcatccntcacagcagctgcatcgccctcagcagcagcttcaacccctttcagcagcagcatgcccctgcaacagcagtttccattcagctgcagccagcaccaaactccaa

SEQ ID NO: 96657 - DNA, 626 bp, Homo Sapiens
  misc_feature (581)..(581): n is a, c, g, or t
  misc_feature (592)..(592): n is a, c, g, or t
tgcggccgccaaaaagagaggaggaagaagatttcataagggcagcttttggcaaggagtctgaagttcttattgggaacctgggtgataaattaatccctccacaagacatccttcgtgacgtcagtgacctcaaagccttggccaacatgcatgaaagcctggaatggttggcaagtcgaacaaagtcagctttctccaatctttctacatcccagatgctttctcctgctcaagacagccacacgaacacggatctccccccagtgtcagagcagatcatgcagactctcagtgaacttgccaaatcgttccaggatatggctgaccgctgcttgcttgtcttacatctggaagtgagggttcactgtttccactatcttatccctcttgcaaaggaggggaactatgccattgtggctaatgtggaaagtatggattatgaccccctggtggtcaagctcaacaaagatatcagcgccattgaagaggccatgagcgccagccttcagcagcacaagttccagtatatcttcgaaggcctgggccacctgatctcctgcatcctcattaatggtgcncagtacttcangcgcatcagtgagtctggcatcaagaaaatgtgt

SEQ ID NO: 96658 - DNA, 1032 bp, Homo Sapiens
  misc_feature (861)..(861): n is a, c, g, or t
gctggtaccggtccggaattcccgggatatcgtcgacccacgcgtccggccgccgctgcgaccatggcggctgcggcccgggaactggtgttgcgggctgggacctcagatatggaggaggaagagggcccgctggcgggtggtcctgggctccaggaaccactgcaacttggggagttggatatcacttctgatgaattcatcctggatgaagtggatgttcacattcaggcaaatctggaggatgagttagtaaaggaagctcttaaaacgggtgtagatctccgtcactattcaaagcaagttgagctggagctacagcagattgaacagaaatccattcgggattatattcaagagagtgagaatatagcatctctacacaaccagatcacagcctgtgatgctgtcctggagcgaatggagcagatgttgggagcttttcagagtgacctcagctccatcagctctgagatccggacactgcaggaacagtcaggagccatgaacattcgacttcgaaatcgccaggcagttcgggggaaacttggggagcttgttgatggtctggtggtgccttctgctctggtcacggcaattctggaggctccagtgacagagcccaggttcttggagcagctacaggagctggatgccaaggcagccgcagtcagagagcaggaagctagaggcacagcagcctgcgcagatgtcagaggcgtgctcgatcggctcccgggtcaaggcagtgacgaagatccgagagtttatcctccagaagatttattccttcaggaaacccatgaccaactatcagatcccccagacggccctgctggagtacaggtttcttctatcagntttctgctggggcaatgaaacgagcaacagcaaaggagatccagggatgaattatgtggaagacccttaagcaaggattttccctgtctttactacggctctttaccctggggcgggctcattaaaggtgcactattgaggaattcccttgagaaaagaataaaccaatgg

SEQ ID NO: 96659 - DNA, 1006 bp, Homo Sapiens
cggtccggaattcccgggatatttgcagttgggtgaagtggttagagctgaaaggggacagctggagtcaaacaacttaactcaaatatctgggaacgatttcgcgctgaggaagaccctttgggacttgtagctccactccggggaacggactcgccgggactgacagttgccggaagtgaggctgcggggaatggccgccgctgcgaccatggcggctgcggcccgggaactggtgttgcgggctgggacctcagatatggaggaggaagagggcccgctggcgggtggtcctgggctccaggaaccactgcaacttggggagttggatatcacttctgatgaattcatcctggatgaagtggatgttcacattcaggcaaatctggaggatgagttagtaaaggaagctcttaaaacgggtgtagatctccgtcactattcaaagcaagttgagctggagctacagcagattgaacagaaatccattcgggattatattcaagagagtgagaatatagcatctctacacaaccagatcacagcctgtgatgctgtcctggagcgaatggagcagatgttgggagcttttcagagtgacctcagctccatcagctctgagatccggacactgcaggaacagtcaggagccatgaacattcgacttcgaaatcgccaggcagttcgggggaaaccttggggagcttgtcgatggtctggttggtgccttctgctctggtcacggcaatcctggaggctccagtgacagagcccaggtttcttggagcagctacaaggagctggatgccaaagcagccgcagtcagagagcaggaagctagaggcacagcagcctgcgcagatgtcagaggcgtgctcgatcggctccgggtcaaggcagtggacaaaaatccgagaggttaatcctcccgaagaattatttccttccggaaacccccggaccaactaaccgaatccccccaaacgggccctttgtgaaagaaccg

SEQ ID NO: 96660 - DNA, 1089 bp, Homo Sapiens
ggtccggaattcccgggatatcgtcgacccacgcgtccgggagaattaaagctagcagattttggactagcccgagccaagtcagttcccacaaagacctactcaaatgaagttgtcacactatggtaccggccacctgatgtgcttcttggttcctcggagtactcaacacagattgacatgtggggtgttggttgcattttctttgaaatggcttctggaagacctttatttccaggatcaaccgtggaagatgaactgcacttaattctccgactgcataggaactccatctcaggaaacttgaccagctatttcttcaaatgaggaggtcaagaactacaactttccaaaatataaaccacagcgctctaattaaccacgcacccagcatagactctgaaggaattgaggtgataacaaaagttcttcagtatgaatctaagaaaagaccttcagctgaagaggccatgaaacatgtgtactttcgaagtctgggaccaagaatacatgctttaccagaaagtgtatcaatattcagtttgaaagagattcagttgcaaaaggacccgggttttcgaaattcttcttatccagagacaggtgtgtttgtcataaaccatttcacgtgtcgatcatgaatttttgcgtggaaccaagcttttggtttataaattgatcagtaaaaattattgatgtaaaaaccaatggacagtgcattccacaactgtttatgtttagcattgcacgtactcacttttctgtatgatgggggcagctccgtaaatcttcagagaaaaatctgactcagtcaagtcagggaatccttaaagctgcaaatgggcacaaaaaaccttttaccaagtgacctgggcttggatcactggaaaccgcccatcccctgggaacctgagggcagaagacacatccttgggggcttccccaaagccatccaggttccattccctttccaaacaattaaaaacttgtaagaattggaaccccggttaaacaagaaaggggttctttttaaaaacacggggccgggttcccctcctttacccgtgggaaatatttaagcttttgtgg

SEQ ID NO: 96661 - DNA, 1026 bp, Homo Sapiens
caagctacagtggttgtatccatggctacctttgccttccgggccaagtggaaacatcttcgctcaatagtgggatgtccatcaagcaacacgtcaagtctcttgacagcggatccctgtgcctgggacggcgtgggcgaagtgtcttctgactacagagacctttcggttgcccaaggccagcaggcagcaaggaggcccaggaacaggcacagctccaccctgaacacgatgatggcgaaggctgacagccagatgaagcgggcccactcgtgccgcagccaggccgcgagggccagcaggactacaggcagggccagcacattgggcagtgtccgcgtgcagtagaacatcaggtggaactgcatggccgtcacccagcagaacatggtggccaccatggccccgaagtgccgtctcacttccttttgtaacgtccagagtccaaaaatcacgccgagtccaagcactcctctaactattagctgagagtaaaacttggacatttctaacagcgaaagcacgtaaaccgcggggctggagaacactgcgatcaccactggcccgaggaacgtcctggggacgactccggggaactcaagatggtcgtactgctccaggtcttgccagtggtagagcaggtcatgtgtggcctgcaggttgaagctctcctccactttggtgtagggacagatgaccaggtggacagtggctacggccaccagcagccccagcagcaggggccgcctgcctgatgacccctttccagccattccaggctttcagcttcacgtaccttcacaggccaacagtgcgagacaccagccgttagcactgccactccacgcatgctccgcagctcccggcggcgtccttcgaagcgcggctgcctgggccagcctcggcaggaagcaggacggcggaaacagaacagagcccgaatctaaagtccttgcccaaatctaaagtggctaccgcagccccggccgctacggcacgcagagaccctctgtgaactgagtaaag

SEQ ID NO: 96662 - DNA, 944 bp, Homo Sapiens
  misc_feature (879)..(879): n is a, c, g, or t
  misc_feature (919)..(919): n is a, c, g, or t
tttttcctgaaaaatggcactgtcaaagagggagctggatgagctgaaaccatggatagagaagacagtgaagagggtcctgggtttctcagagcctacggtggtcacagcagcattgaactgtgtggggaagggcatggacaagaagaaggcagccgatcatctgaaaccttttcttgatgattctactctccgatttgtggacaaactgtttgaggctgtggaggaaggccgaagctctaggcattccaagtctagcagtgacaggagcagaaaacgagagctaaaggagttccaggaagcgctcgcccctggccgaggatatgtccttgcaaaacacgagccctcctagtgaagaggggatgtcacccaaagcctaccaccggaggtgtttggtgatgactctgagatctctaaagaatcatcaggagtaaagaagcgacgaataccccgttttgaggaggtggaagaagagccagaggtgatccctgggcctccatcagagagccctggcatgctgactaagctccagatcaaacagatgatggaggcagcaacacgacaaatcgaggagaggaaaaaacagctgagcttcattagcccccctacacctcagccaaagactccttcttcctcccaaccagaacgacttcctattggcaacactattcagccctcccaggctgccactttcatgaatgatgccattgagaaggcaaggaaagcagctgaactgcaagctcgaatccaagcccagctggcactgaagccaggactcatcggcaatgccaacatggtgggcctggctaatctccatgccatgggcattgctccccccccgaaggttggagttaaaagaccaaacgaaacctacacacntgatccctggatgagcaagggcgcactgtaaatgcaacanggcaagggagattgagctgaccccc

SEQ ID NO: 96663 - DNA, 1056 bp, Homo Sapiens
  misc_feature (998)..(998): n is a, c, g, or t
  misc_feature (1001)..(1001): n is a, c, g, or t
cacacaacagctctgtgaatataaacagtggttaaacaagcaggctggtacggtcggaattccgggatatcgtcgacccacgcgtccgcgaggcacaaggcacaacaggctgctctgggattctcttcagccaatcttcattgctcaagtgtctgaagcagccatggcagaagtacctgagctcgccagtgaaatgatggcttattacagtggcaatgaggatgacttgttctttgaagctgatggccctaaacagatgaagtgctccttccaggacctggacctctgccctctggatggcggcatccagctacgaatctccgaccaccactacagcaagggcttcaggcaggccgcgtcagttgttgtggccatggacaagctgaggaagatgctggttccctgcccacagaccttccaggagaatgacctgagcaccttctttcccttcatctttgaagaagaacctatcttcttcgacacatgggataacgaggcttatgtgcacgatgcacctgtacgatcactgaactgcacgctccgggactcacagcaaaaaagcttggtgatgtctggtccatatgaactgaaagctctccacctccagggacaggatatggagcaacaagtggtgttctccatgtcctttgtacaaggagaagaaagtaatgacaaaatacctgtggccttgggcctcaaggaaaagaatctgtacctgtcctgcgtgttgaaagatgataagcccactctacagctggagagtgtagatcccaaaaattacccaaagaagaagatggaaaagcgatttgtcttcaacaagatagaaatcaataacaagctggaatttgagtctgcccagttccccaactggtacatcagcacctctcaagcagaaaacatgccccgtcttcctgggagggaccaaaggcgggcaggatataactgacttcaccatgcaatttgtgtcttccctaagagagctgtacccagagagtccntgntgctgaatgtggactcaatccctagggctggcagaaaggggaacagaaaggtttt

SEQ ID NO: 96664 - DNA, 981 bp, Homo Sapiens
ggaccggtccggaatttccgggatatcgtcgacccacgcgtccgcccactgtgagagctgttagggttgaaacagggagcacagcagggtaggggctgccatcaggagcttagtggggagaccattgtgcaacctggttccagcgcttggggtggggaagctcagggagttcagggtcctaggatcgagggcagaatcatggaaaggacataacctccccagcctctcctgcctccattgcctcccaggcctcctctgcttccctggcctctcctaccttcctggcttccccttccgccccggcctcctcagtctcccctgtctctcctgcttttgaggtgggccaggagctgctagtgctcacttagcctgtcctggactctgggtgtagcaccctcaatgtccagaaaatacccccgagttcagctaatcacacagccaaggaaggagctccacactgacactaagggtgcatcctgggctcattcatcagggcatgcctccaaaaatatttctccacgtcctcctccctttgcccacctgcactgtctctgtgcctcagccccggctggggggcctgcaaggatccccgtaatcctcctctgcccctgcacgggtggggtcccaggcaatctgtctgcccaccccaccttccttccccgttgccccacccatggcttcaagccccaacggccctcctttctggcttcttttccccggccctccggggctttttggcccacgcgtggtcccttcctccctggaacacccctcccattggggcgtgagaaacaaactcctctggaaaaccttctcctcaagcttgggtgccttcccttttgggaaaacacccgcctgcgctggcgtggccccgtctcccaagagttaaaaaaatggggcctgagcccctctccccccttatttaccaggacccccattgcccccgcagcgaaccttacctccctgtggcgccttcctcta

SEQ ID NO: 96665 - DNA, 985 bp, Homo Sapiens
ttctcgggaatcgtcgaccacgcgtccgtccggagaggagcatgaatggagcaaaatggcggatcatgtgcagagcctggcccaactagagaatctgtgcaaacagctgtatgaaaccacagacacaaccactcgactccaggcagagaaagccttggttgaatttaccaacagccctgattgcctgagcaagtgccagctactcctcgaaagaggaagttcctcttactcccagttactggcagctacatgccttaccaagcttgtatcacgcacaaacaaccccctaccattggaacagcgaatagatattcggaactatgtgctcaactaccttgccactcggccgaaggttggctactttcgtgacacaagcacttattcagccatatgccacaatcacaaaactgggctggtttgactgtcagaaggatgactatgtctttcagaaatgcaatcccaggacgccaccaggcttttcagaggatagtcgttgaatactgcatacttgggagtcacaattttatctcccctaagcgatggatttaatcaagggaaggtggtaccgccctccccgctttgaaggaacgtgccgatacttcctcctcagacgtcggggctctcctgctggcgtgggggataccgctttttgtcgcgcgctgcagaccttttgcgggtcaggtggtctaacggccctgtgtgcgacactacgagaaaccattgtgggaggcccgcacgggagatccggcaaccacagcttaacgtttctaggtttcgggtgctcccgctctagatccgacgagtgtggttcttcccacttttggcatgcagccgcaccatggctgccactatgacggaggtctgaatcatcggtgttccccgtacggagattcgattccacaccgctctttgacggaagcactggaaacgccggactcgattcgcactgtgacgatacattcggaccaacgcgcatctaatcgtc

SEQ ID NO: 96666 - DNA, 1596 bp, Homo Sapiens
  misc_feature (14)..(14): n is a, c, g, or t
  misc_feature (30)..(30): n is a, c, g, or t
  misc_feature (1258)..(1299): n is a, c, g, or t
aaaaagcgccgggngggcccgtcatgggtncgtctcagcccctaggtagcgaggcctgggtggcgtttccggcacgaggctgctgcgcgtctactccgtccccgcgggccttccgggcccactgcgccgcgcggaccgcctcgggctcggacggccggtgtccccggcgcgccgctcgcccggatcggccgcggcttcggcgcctggggctcggggctccggggaggccgtcgcccgcgatgctgctctccaagttcggctccctggcgcacctctgcgggcccggcggcgtggaccacctcccggtgaagatcctgcagccagccaaggcggacaaggagagcttcgagaaggcgtaccaggtgggcgcagtgctgggtagcggcggcttcggcacggtctacgcgggtagccgcatcgccgacgggctcccggtggctgtgaagcacgtggtgaaggagcgggtgaccgagtggggcagcctgggcggcgcgaccgtgcccctggaggtggtgctgctgcgcaaggtgggcgctggcgggcggcgcgcgcggcgtcatccgcctgctggactggttcgagcggcccgacggcttcctgctggtgctggagcggcccgagccggcgcaggacctcttcgactttatcacggagcgcggcgccctggacgagccgctggcgcgccgcttcttcgcgcaggtgctggccgccgtgcgccactgccacagctgcggggtcgtgcaccgcgacattaaggacgaaaatctgcttgtggacctgcgctccggagagctcaagctcatcgacttcggttcgggtgcgctgctcaaggacacggtctacaccgacttcgacggcacccgagtgtacagccccccggagtggatccgctaccaccgataccacgggcgctcggccaccgtgttggtcgctgggcgtgcttctctacgatatggtgtgtggggaccatccccttcgagcaggaccgaggagatcctccgaggccgcctgctctttccgcaggagggtctctccagagtgccagcagcgtgatccggtgggtgcctgtccctgcccctcccaccatctgccttgttgcctgccattgcggcctcacccccggccgttcccctgccgcccctgttttttccccccctccactccttacgccaccggtgggcccgtattgcccgtccagcactttttgtccccccgtctcccccttctccccatgccttgcacccctggtcgtttgcgnnnnnnnnnnnnnnnnnnnnnnnnnnnnnnnnnnnnnnnnnngcctttcctgttccccttgtccacttttcgggtgaccccctgtccctgcccaccccttgtacgcgggcccgacccccatattgcactgcgactgtccacacgcgcacttccgtgggtcccccgtcctcccacgcccactcgtcgcgcccttgcagtccgcacggtgcccgcgcactagtggcccatgggcgccccgtcaggtacccgcctgtgcgggcccccaccgttgacgcggttcgcatttttgctcccccagtgtttgccccgcccagtcgttgcgtgtctccccccacgctt

SEQ ID NO: 96667 - DNA, 1236 bp, Homo Sapiens
  misc_feature (125)..(169): n is a, c, g, or t
cctcccttctccttgtccatgtgccctgccgccgcagagcagctggtccggtccggaattcccgggatatcgtcgacccacgcgtccggcccgctcgccatggggagccccgcacatcggcccgnnnnnnnnnnnnnnnnnnnnnnnnnnnnnnnnnnnnnnnnnnnnngcgtcccgcccagccgcagcttcccaggatcgggagactcaccactagaagacgatgaagtcgggtattcacaccctagatataaagataccccgtggtgctcccccatcaacgtgaactatggggatgtgtactgcagggcccctcaaggaggatactacaaaacagccctgggaaccaggtgcgacattccctgccagaagggctacgagctgcatggctcttccctactgatctgccagtcaaacaaacgatggtctgacaaggtcatctgcaaacaaaagcgatgtcctacccttgccatgccagcaaatggagggtttaagtgtgtagatggtgcctactttaactcccggtgtgagtattattgttcaccaggatacacgttgaaaggggagcggaccgtcacatgtatggacaacaaggcctggagcggccggccagcctcctgtgtggatatggaacctcctagaatcaagtgcccaagtgtgaaggaacgcattgcagaacccaacaaactgacaagtccggggtgtcctgggagacaccccgaaggaagagacacagcagatggaatttcttactgatgtcattctaaaaggcctccccccaggctccaactttccagaaggagaccagcaagatccagtacacagtctatgacagagctgagaataagggcactttgcaaatttcgagtttaaagtaagagtcaaacgctgtggcaaactcaatgccccagagaagggttacatggaagtgctccagcgacgggggataattatggagccacctgtgagttctcctgcatcggcggctatgagctccagggtagccctgcccgagtattgtcaatcctaactgggtttggtctgggcacggaggcccatctgttgcagcatgaacgtccatgtggggtgtccacaaccggcccctgccctctggtcccgtttattgagagaaagggggatcctcctttgtgtcccaaacccaaggccggaactcccttttcgggtcccgtagggattgcttcgcggcaagccacggggggtctcttttcgcgcacc

SEQ ID NO: 96668 - DNA, 912 bp, Homo Sapiens
gctggaccggtccggaattcccgggatatcgtcgaccacgcgtccgggaggagggaacatggcggccgggccaggaccctttgctcctggctctgcgcggctcctacccctgctttgcttgcccttttacctgcttttctggaaccttgtttcccctctctttgcgtcccctttccctcagccgtttcttttgccttcctcgactattcccccccagctccacactgggtcgaagtgtgagaggtagattaagtgggagccggtcgggcccgttcggtgccgagagaccgactcctaaatttgattaggttctcgcatgtcactttatcagtctgcctggggtcacaggagaagtactgaacatgagagatcaagcctgatttgtagtcctgatgatgtctctgagtaagttctggagggatcctgcctcttggagccttcgcagccaggcatctgtgaactgtgagctagagtgaagcagaaatctaggaagatgagctccaagatggtcataagtgaaccaggactgaattgggatatttcccccaaaaatggccttaagacatttttctctcgagaaaattataaagatcattccatggctccaagtttaaaagaactacgtgttttatccaacagacgtataggagaaaatttgaatgcctcagcaagttctgtagaaaatgagccggcagttagttcagcaactcaagcaaaggaaaaagttaaaaccacaattggaatggttcttcttccaaaaccaagagttccttatcctcgtttctctcgtttctcacagagagagcagaggagttatgtggacttgttggttaaatacgcaaagattcctgcaaattccaaagctgttggaataaataaaaatgactacttgcagtacttggaatatgaaaa

SEQ ID NO: 96669 - DNA, 1006 bp, Homo Sapiens
  misc_feature (823)..(823): n is a, c, g, or t
  misc_feature (899)..(899): n is a, c, g, or t
ggctaggtacgaggctgggtgtgtgaattcggcacgaggccgactctggaggaagactggagcctttgcggcggcgctgcccctcccctggtccccgcgagctcggagggcccggctggtgctgcgggggccccgggaggttgaaaactaagcatggggaagagctgcaaggtggtcgtgtgtggccaggcgtctgtgggcaaaacttcaatcctggagcagcttctgtatgggaaccatgtagtgggttcggagatgatcgagacgcaggaggacatctacgtgggctccattgagacagaccggggggtgcgagagcaggtgcgtttctatgacacccgggggctccgagatggggccgaactgccccgacactgcttctcttgcactgatggctacgtcctggtctatagcacagatagcagagagtcttttcagcgtgtggagctgctcaagaaggagattgacaaatccaaggacaagaaggaggtcaccatcgtggtccttggcaacaagtgtgacttacaggagcagcggcgtgtagacccagatgtggctcagcactgggccaagtcagagaaggtgaagctgtgggaggtgtcagtggcggaccggcgctccctcctggagccctttgtctacttggccagcaagatgacgcaaccccagagcaagtctgccttccccctcagccggaagaacaagggcagcggcttccttggatggctgaagagctgccgttcctctttcacgatcccagcccccattttcagtgtctggggcctctgggtagaatgtgttgagggccaaaagtaaaggacanagcctggtctttccccagtcaagccaaggaagctcccccgccaagggcccacgcccccagccaacttttggctccnctctctacccttctggggaaggtgccaaaattactccttggggttggacattcccccttttccctcaggcccctctccaagccctaacttcccccattccccaagga

SEQ ID NO: 96670 - DNA, 1176 bp, Homo Sapiens
  misc_feature (988)..(988): n is a, c, g, or t
  misc_feature (1041)..(1041): n is a, c, g, or t
  misc_feature (1123)..(1123): n is a, c, g, or t
gctggtaccggtccggaattcccgggatatcgtcgaccacgcgtccggcgctcgccgtcggctctacctgcgtgctttagctccttctcgcctgatccttctgtctctcccaaccccggacacccggcttcgactggttatatcttcggtgttcttttcctctcttcttctttcgcggttcagcatgcaggaaaaagacgcctcctcacaaggtttcctgccacacttccaacatttcgccacgcaggcgatccatgtgggccaggatccagagcaatggacctccagggctgtagtgccccccatctcactgtccaccacgttcaagcaaggggcgcctggccagcactcgggttttgaatatagccgttctggaaatcccactaggaattgccttgaaaaagcagtggcagcactggatggggctaagtactgtttggcctttgcttcaggtttagcagccactgtaactattacccatcttttaaaagcaggagaccaaattatttgtatggatgatgtgtatggaggtacaaacaggtacttcaggcaagtggcatctgaatttggattaaagatttcttttgttgattgttccaaaatcaaattactagaggcagcaattacaccagaaaccaagcttgtttggatcgaaacccccacaaaccccacccagaaggtgattgacattgaaggctgtgcacatattgtccataagcatggagacattattttggtcgtggataacacttttatgtcaccatatttccagcgccctttggctctgggagctgatatttctatgtattctgcaacaaaatacatgaatggccacagtgatgttgtaatgggcctggtgtctgttaattgtgaaagccttcataatagacttcgtttcttgcaaaactctcttgggagcagttcccatctcctattgattgttacctctgcaatcgaggtctgaagactctacatgtccgaatggaanagcatttcaaaaacggaatggcagttgcccagttcctggaatctaatccttgngtagaaaaggttatttatcctgggctgccctctcatccacagcatgagttggtgaagcgtcagtgtacaggttgtacagggnatggtcaccttttatatttaagggcactcttcagcatggctgagatttttcct

SEQ ID NO: 96671 - DNA, 1109 bp, Homo Sapiens
  misc_feature (1041)..(1059): n is a, c, g, or t
gggacttccggggcggggctatctggccctttcctttccgcgtgtagaatgtggggcgcctgtaaagttaaggttcacgattccttggccaccatctccatcactctgagacggtacctgagattgggggcgaccatggcaaaaagcaagttcgagtacgtgagggacttcgaggctgacgacacctgcctggcacactgctgggtggtagtgcggctggacggccggaatttccatcggtttgctgagaagcacaactttgcaaaacccaatgacagccgtgctctccagctgatgaccaaatgtgcgcagactgtgatggaagaactagaggatattgtgatcgcgtatggacagagtgatgagtacagctttgtgttcaagcggaaaaccaattggtttaaaagaagagccagtaagttcatgactcacgtggcctcccagtttgcctccagctatgggttttattggcgggattactttgaagaccagcccccttctggaacccccaggcctttgaccgaacagtcgtggtgtatcccagcaaccaaactttaaaggactacctcagctggcgacaagcatattgtcacatcacaaatctttataatacagtttctcggggacttatacaacaatctggactaacacccagtacaaccccaagggagattacaggcaactcttgcaccaaacaaaaatgagattttgttttctgaatccaccatccactcatataatgaacctgccccatgttatagaaaagggactgtggttgatatggccacaaggtgggatgaagccgatgaccaaagaaaatttaccctgcccaccctgaaatggcaaagaaaccaaaaatggccacggacccggcacccgggaaaaagtccccctgccccttgcaccttgcaaaaaccattggctgaatgcttttctgggaaagcgcacctctccccaaaaattcttacaatgaaaacacacctctacccctttctgcccctttccctttcccggtgggcgcctttaatccataggacaaannnnnnnnnnnnnnnnnnnagggggcttcctttgctcctctagagggcgttggcaacacatctccacac

SEQ ID NO: 96672 - DNA, 822 bp, Homo Sapiens
gggcctttcctttccgcgtgtagaatgtggggcgcctgtaaagttaaggttcacgattccttggccaccatttccatcactctgagacggtacctgagattgggggcgaccatggcaaaaagcaagttcgagtacgtgagggacttcgaggctgacgacacctgcctggcacactgctgggtggtagtgcggctggacggccggaatttccatcggtttgctgagaagcacaactttgcaaaacccaatgacagccgtgctctccagctgatgaccaaatgtgcgcagactgtgatggaagaactagaggatattgtgatcgcgtatggacagagtgatgagtacagctttgtgttcaagcggaaaaccaattggtttaaaagaagagccagtaagttcatgactcacgtggcctcccagtttgcctccagctatgtgttttattggccgcattactttgaggaccagccccttctgtatccaccaggctttgacggaagagtcgtggtgtatcccagcaaccagactttaaaggactacctcagctggcgacaagcagattgtcacatcaataatctttataatacagctttctgggcacttatacaacaatctggactaaccccagtacaagcccaaggggagattacaggggaactcttgcagcagcacaaaatgaaattttggttttcctgaattccacatccacctatcaatacatgcacccgccgatgtataaggaaacggcactgggcttgcatatggcaaaaaggtgggaaggaagtggatcgcccaaaaaaatttccccctgccacacaaaac

SEQ ID NO: 96673 - DNA, 907 bp, Homo Sapiens
  misc_feature (565)..(600): n is a, c, g, or t
  misc_feature (823)..(855): n is a, c, g, or t
tggaccggtccggaattcccgggatatcgtcgacccacgcgtccgcccacgcgtccggagcagcagaggctgctccagttacagcaccacccggccgctgcacccggctgctcccaggccccccagccggcccctgccccgtttgtgatcgccccctgtgatggccctggggctgccccgctccccagcaccctcctcacgtcggggctcccgctgctgccgcccccactcctgcagaccggcgcgtccccggtggcctcagcggcgcagctcctggacacacacctgcacattggcaccggccccaccgccctccccgctgtgcccccaccacgcctggccaggctggccccaggttgtgagcccctggggctgctgcagggggactgtgagatggaggacctgatgccctgctccctaggcacgtttgtcctggtgcagtgagggcagccctgcatcctggcacggacactgactcttacagcaataacttcagaggaggtgaagacatctggcctcaaagccaagaactttctagaagcgaaataagcaatacgttaggtgnnnnnnnnnnnnnnnnnnnnnnnnnnnnnnnnnnnncttgcactgagtgacctcaactttgagtagggactggaaactttaggaagaaagataattgaggggcgtgtctgggggcgggggcaggaggggagcggggtggagggaacacgtgcagtgccgtggtgtggggatctcggcccctctctctgggttcgtcgtggttgagatgattacctcggacgtctaccggaacgagcggggcgcattgttgtccgctttnnnnnnnnnnnnnnnnnnnnnnnnnnnnnnnnncccccctacacttggatttactaatcccatttttctttttaggaccaaacgc

SEQ ID NO: 96674 - DNA, 1011 bp, Homo Sapiens
gtggtaccggtccggaattcccgggatatcgtcgacccacgcgtccgagccagggctgcagcctcatctgtttgcggatcagaacccgagctgtgcttgtggctgcggctgctaactggctgcgcacagggagctgtcaccatgcctcactcgtacccagccctttctgctgagcagaagaaggagttgtctgacattgccctgcggattgtagccccgggcaaaggcattctggctgcggatgagtctgtaggcagcatggccaagcggctgagccaaattggggtggaaaacacagaggagaaccgccggctgtaccgccaggtcctgttcagtgctgatgaccgtgtgaaaaagtgcattggaggcgtcattttcttccatgagaccctctaccagaaagatgataatggtgttcccttcgtccgaaccatccaggataagggcatcgtcgtgggcatcaaggttgacaagggtgtggtgcctctagctgggactgatggagaaaccaccactcaagggctggatgggctctcagaacgctgtgcccaatacaagaaggatggtgctgactttgccaagtggcgctgtgtgctgaaaatcagtgagcgtacaccctctgcacttgccattctggagaacgccaacgtgctggcccgttatgccagtatctgccagcagaatggcattgtgcctattgtggaacctgaaatattgcctgatggagaccacgacctcaaacgttgtcagtatgttacagagaaggtcttggcctgctgtgtacaagggccctgagtgaccatcatgtataccttggaggggaccctgctcaagcccacatggtgacccgggcatggctgtcccatcaaggttacccagaggaaatggcagggcacggcctgccggcttgctggcccagtgtgcagggatgcttcggtggggaaagggaaaagtatccccaggactaacgggcctcggacggggaacaccaggggcgcgaactccaggaga

SEQ ID NO: 96675 - DNA, 648 bp, Homo Sapiens
ctggtaccggtccggaattctccggatatcgtcgaccccgcgtccggacatccgtcagctaaacccagtgtggctgagatccaaaattgggacagtgagtcaggaacccattttgttttcttgctctattgctgagaacattgcttatggtgctgatgacccttcctctgtgaccgctgaggaaatccagagagtggctgaagtggccaatgcagtggccttcatccggaatttcccccaagggttcaacactgtggttggagaaaagggtgttctcctctcaggtgggcagaaacagcggattgcgattgcccgtgctctgctaaagaatcccaaaattcttctcctagatgaagcaaccagtgcgctggatgccgaaaatgagtaccttgttcaagaagctctagatcgactgatggatggaagaacggtgttagttattgcccatcgtctgtccaccattaagaatgctaatatggttgctgttcttgaccaaggaaaaattactgaatatggaaaacatgaagagctgctttcaaaaccaaatgggatatacagaaaactaatgaacaaacaaagttttatttcagcataaggaagcaattactggtaaacaatatgagactttaatgcaaaacagtgttgcag

SEQ ID NO: 96676 - DNA, 513 bp, Homo Sapiens
  misc_feature (388)..(388): n is a, c, g, or t
ggcagtactatacggtcttaaggtacgaggctgggtggcgaatcggcacgaggggcttctgggggctgctggtggtattttcagttccttggtgtgtggatacttcgccccatctctgccttcacctgtgtcctccctgtgtgggtgctggtgtccaaaatttccccttttcgtagtgacaccagctgtgttggattggggcccaccctgctccagcatggcctaatcttaactaattacatttgcaaggatcttatgtccacaaaagtcacagtctgaggtgctggggggttaggacttcaatatataaattttgcggttacacaattcaatccatgacagaatccaaaggtttactctggttataaaaacagtacaataaaatatngtttatagccttccctgtaaggaataggagagctattttttattcttcccaagattgtatttgatgtaaacatattttctgtagaagccatggcccttcagttcatatagttagaaaatttcctt

SEQ ID NO: 96677 - DNA, 2088 bp, Homo Sapiens
  misc_feature (996)..(1031): n is a, c, g, or t
  misc_feature (1783)..(1798): n is a, c, g, or t
  misc_feature (1859)..(1881): n is a, c, g, or t
atgcagctgagggcagagtcatggagggcctggctgcgggggaatgaagcctccgccttcgcaggcaaaagcctttaaatacgggctcaggcccgggactcagagtgtaacgcgtggcagcctgagggaggggcgtgcgccgagagggagctcagatcgagcggggcgcgggtggagaagctgcggcagcgcggcccgtaggaaggtgctgtccgaacgatcgggataggagcggtccctgcgcttgctgctgggaaagtggtacaatcatgtttgaaattaagaagatctgtcgcatcggtgcaggctatgttggaggacccacatgtagtgtcattgctcatatgtgtcctgaaatcagggtaacggttggtgatgtcaatgaatcaagaatcagatgcgtggaattctcctacacttcctatttatgagccagggactaaaagaagtggtagaatcctgtcagaggaaaaaatctttttagttatctaccaatattgatgatgccatcaaagaagctgatcttgtatttatttctgtgaatactccaacaaaaacctatggaatggggaaaggccgggcagcagatctgaagtatattgaagcttgtgctagacgcattgtgcaaaactcaaatgggtacaaaattgtgactgagaaaagcacagttccggtgcgggcagcagaaagtatccgtcgcatatttgatgcaaacacaaaacccaacttgaatttacaggtgctgtccaaccctgagtttctggcagagggaacagccatcaaggacctaaagaacccagacagagtactgattggaggggatgaaactccagagggccagagagctgtgcaggccctgtgtgctgtatatgagcactgggttcccagagaaaagatcctcaccactaatacttggtcttcagagctttccaaactggcagcaaatgcttttcttgcccagagaataagcagcattaactccataagtgctctgtnnnnnnnnnnnnnnnnnnnnnnnnnnnnnnnnnnnncagcgattggaatggaccagagaattggaaacaagtttctaaaagccagtgttgggtttggtgggagctgtttccaaaaggatgttctgaatttggtttatctctgtgaggctctgaatttgccagaagtagctcgttattggcagcaggtcatagacatgaatgactaccagaggaggaggtttgcttcccggatcatagatagtctgtttaatacagtaactgataagaagatagctattttgggatttgcattcaaaaaggacactggtgatacaagagaatcttctagtatatatattagcaaatatttgatggatgaaggtgcacatctacatatatatgatccaaaagtacctagggaacaaatagttgtggatctttctcatccaggtgtttcagaggatgaccaagtgtcccggctcgtgaccatttccaaggatccatatgaagcatgtgatggtgcccatgctgttgttatttgcactgagtgggacatgtttaaggaattggattatgaacgcattcataaaaaaatgctaaagccagcctttatcttcgatggacggcgtgtcctggatgggctccacaatgaactacaaaccattggcttccagattgaaacaattggcaaaaaggtgtcttcaacagagaattccatatgctccttctggtgaaattccgaagtttagtcttcaagatccacctaacaagaaacctaaagtgtagagattgccatttttatttgggannnnnnnnnnnnnnnnggaccttccaggaaaccaaattcctatccggtatttaaagggaaaatggaaccacagtggnnnnnnnnnnnnnnnnnnnnnnnggaacaaaaagtcttccctggttggccccccacgttggggaattgccaatggggtggcaaatttcctgggtcttcatgtgggaaagcactttttggcttttcccacaggggtttccacgccccaccatttttctcccctttgggaggtttaaacgccctctttccccaaaaggtaaacaatttggtgggagcaatttatacggaggc

SEQ ID NO: 96678 - DNA, 1253 bp, Homo Sapiens
ggccacattggatagccagttgtccaaacacagcttaaaagacggcagtactctaacggttctaaggtagcgaggctgggtggcgaattcggcacgaggtggtcacggccgcaggtgaccccttagcccagctccagtgggcgggtggcagggtcatggaggacgctggcggcggcgaggagaccccggccccggaggccccgcacccccctcagctcgcgcctccggaggagcaggggttgctcttccaggaggaaaccatcgatcttggcggagatgagtttggatccgaagagaacgagaccgcatcggaaggctcgagtcctctcgcggacaagctgaacgaacacatgatggagagcgtcctcatctctgactcccccaacagcgagggcgacgcgggcgacctgggccgagtgcgggacgaagctgagcccggaggggaaggcgacccaggcccggagcccgcgggcaccccgagtcccagcggcgaggccgacggcgactgtgcccccgaggacgcggcacccagtagcggaggggccccgaggcaggacgcggcccgcgaggtcccaggcagcgaagctgcgcgcccggagcaggagcctcccgttgcggagccggtcccggtgtgcaccatcttcagccagcgcgcgcccccagcctccggggacggcttcgagccgcagatggtgaagtcgcccagcttcggtggcgccagcgaggcctcggcaggacaccgcccaggtcgtgcagcccaagcccagcctcagcaacgtctcggagacacggccgcagacactcctttgagcctcgtgacttcattcgaatccttcacttacttcggcctttcaattaccgtgagaatcccggcgcagggctcccgtgccgacagaccgcatcacgctggagttgccaggacacgaagggagcccagaaaccggggcaatgacaagggccacaggacattggagccccgaggccccagacacattcgggacaaccaggggggttagcaaaggaaagtagggcccctatagacccgcgagagcgagggagagcagccagaacgaaaccacgtggcacagggaaaacaaaaagaaacaagggcggaaaacaagaccggagagacgagaacagacaaacagaagcgagaaacacgaagacgaagaaccgaacgagagcaggagacagacaagaacaggaacaccaagagagcacaaagcaacccggcagcgcgccgcccgccgagg

SEQ ID NO: 96679 - DNA, 1177 bp, Homo Sapiens
aattagtgaactatagaacagttgttcaacaagcaggctgtacggtccggaattcccgggatatgtcgacccacgcgtcgggctggctctgggcgcgcgccagcaaatccactcctggagcccgcggaccccgagcacgcgcctgacagcccctgctggcccggcgcgcggcgtcgccaggccagctatggcccccgacccggtggccgccgagaccgcggctcagggacctaccccgcgctacttcacctgggacgaggtggcccagcgctcagggtgcgaggagcggtggctagtgatcgaccgtaaggtgtacaacatcagcgagttcacccgccggcatccagggggctcccgggtcatcagccactacgccgggcaggatgccacggatccctttgtggccttccacatcaacaagggccttgtgaagaagtatatgaactctctcctgattggagaactgtctccagagcagcccagctttgagcccaccaagaataaagagctgacagatgagttccgggagctgcgggccacagtggagcggatggggctcatgaaggccaaccatgtcttcttcctgctgtacctgctgcacatcttgctgctggatggtgcagcctggctcaccctttgggtctttgggacgtcctttttgcccttcctcctctgtgcggtgctgctcagtgcagttcaggcccaggctggctggctgcagcatgactttgggcacctgtcggtcttcagcacctcaaagtggaaccatctgctacatcattttgtgattggccacctgaagggggcccccgccagttggtggaaccacatgcacttccagcaccatgccaatgcccaactgcttccgcaaagacccagacatcaacatgcatcccttcttcttttgccttgtgggaatgatcctctctgtggagcttgggaaacagaagaaaaaatatatgccgtacaaccaccagcacaaatacttcttcctaatttgggcccccagccttgctgcctctctacttccagtggtatattttctattttgttatccagcgaaatgacgtgggtggacttggcctggatgattaccttctacgtccgcttcttcctcacttatgtgccactattggggctgaaagccttcctgggccttttcttcatagtcaggttc

SEQ ID NO: 96680 - DNA, 2368 bp, Homo Sapiens
  misc_feature (17)..(17): n is a, c, g, or t
atgggcgcgtgccggtntcttacgtcacccgccggggttcgccacaaacaagctggtaccggtccggaattccccggatatcgtcgacccacgcgtccgtggcggaggcctcctcgctggggaggcagagtcctcgcgtggtctcctgcctcgagcacagcctgtgcccaggggagccgggcttgcagacaacagcagtggtgtccatgggctctggagaccatcagttcaacctcgcagagatcctgtcacagaactacagtgttaggggggagtgcgaggaggcctcgaggtgcccagacaagcccaaggaggagctggagaaggacttcatctcccagagcaacgacatgccctttgatgagctgcttgcgctctatggctacgaggcgtcagaccccatttcagaccgggagagtgagggtggtgacgtggccccgaacctcccagacatgaccctggacaaagaacaaatagcgaaggatttgctttcacggggaagaagaggcaagagacgcaatcatctgctgacgacctcaccccgtccgtgacctcccacgaggcctccgacctcttccctaaccggagtggatctcgtttcctggctgatgaagacagagagcctggctcttctgcctcctccgacaccgaggaggactctcttcctgccaacaaatgtaagaaggagatcatggtgggacctcagttccaagctgacctcagcaacctgcacttgaaccggcactgtgagaagatctacgagaacgaagaccagctgctctgggaccccagcgtcctccctgagagggaggtggaggagttcctgtacagggcggtgaagcggcgttggcacgagatggccgggcctcagctcccagagggagaagccgtgaaagacagtgagcaggcgctgtacgagttggtgaaatgcaacttcaatgtggaggaggccctgcgaaggctgcggttcaacgtgaaggtgatccgagatgggctctgtgcttggagtgaagaggagtgcaggaactttgagcacggcttccgtgtgcatggaaagaactttcacctgatccaggccaacaaggtgcgcacacggtcagtgggcgagtgtgtcgagtactactacctgtggaagaagtcggagcgctacgactacttcgcccagcagacgcggctgggccggaggaagtacgtccccgtccggaaccacgggacgcagaccaggacctggatggcagcgaccccgatggccccggccgtccgcgcccggaggcaagaaaccctgactgggatgcgcacagatccactggagcgtggatggcacggccggtggtctcgatgagcccggagtggcctctgatggactcccgtcctcggagccagggccgtgttccttccagcagctggatgagtcccccgctgtacccctgtcccatcggcccccagccctggccgacccagcctcataccagccagctgtcactgctccggagccagacgccagtccaaggctggccgtggacttcgccctgcccaaggagctgcccctcatctccaggcatgtggacctcagcggggatccggaggagactgaggccccagcacaggtggctttgtcggtcaccggagtttggactcatcggcattggggacgtgaaccccttccctggccgccccaccccacgtgcccggcccccgggctacactcggagcccctgtcacactgaaacgtgatgacctgctgactcctggccgcgggcggcgtatgcggcccaaactgaactttagcgctgccgctgggcccgcctctggcaggcttcctgaacccttccccaccccccgggccctggggtagcacctccttctgcttcagaacacgtcaggactggggtgaggtggctgggccgtgagcccttgcccctgtccacacagaatggacccacggccccacccagcgccgtcagcgcccggcactgccacccgggtccgggccgctgcctgcacgtgggatccgtcgggcagccggggacagaagagaccccgccgttgggacgcagggcagagccggccacctagtcccttccagccagcagaggcgagggaaggcgtcactgccccggcggggagacgggcaggacgccctgccccccaacagcagcctccggcgggggcgccctcagctccctggttggctcttgtcttctccacacccgggagggcccgcgggctgccccatacctggggggcgttgggcacctgctaattataggccaagggggaagggccacagagccatatgggggtgggtgattaggagcccaaacacagagaattggggttgcctggtgcaggtggtgacgtgggtgcc

SEQ ID NO: 96681 - DNA, 909 bp, Homo Sapiens
  misc_feature (336)..(337): n is a, c, g, or t
  misc_feature (344)..(390): n is a, c, g, or t
  misc_feature (840)..(840): n is a, c, g, or t
tcccgggatatcgtcgacccacgcgtccgagagtagtgacttagaatccagatatcttttgttttagaaaaacaagcaaaactatgttgcaagactgacagttgtaatgtttatttgccacagatcaaaggttcacaaagtatatcaaatttacatctacttggggtaccttgatagattattattgtttttcttttatctttcccttcaggaatttggaaactcgttgtcactttttttaattttaaaaatactaaattgtaatagttttcttttgccaaatgtgtgcgtacatattcaaagcaatgaaactatttcaagccatacaaccacagnnagtgggnnnnnnnnnnnnnnnnnnnnnnnnnnnnnnnnnnnnnnnnnnnnnnntgtatgaaatattttcatgatagaatgaatatatttaaatgaagttgaattattccagtgctacttaaacacattacaaaaattttggtgagaattatctgagtctattgagatgtaatgcagatcaattttgatttttaaaaatcaaaagcctacaataactctgactctcagcaacttcctcggcgttgttgcacctgacgtggagagagctcgtaggcttccccagtgcctcagccgcttcctggtggaagttaggtgctaatggaggtgtgttcaccttttagtgatatcactgcaggcctttgaggggcctgagagtgaatcagaggcattagagacaccggtgcagttatctggagcacaatttctttgcagggcagcagaatcagaagccagacttggccatgtgaaacctcgaactcggtttcccgggccgccatcaaccgncacccttactggctagtcacacacgtcagggaggctgccctcagtggaatttggggttgagaccccagg

SEQ ID NO: 96682 - DNA, 958 bp, Homo Sapiens
ggggccggggacggctgctggagcggcgcccgccgcggctcagcgcattcccgctctccgcttccctctccgctgcgtccccgcgcgaagatggcaaccgaggggctgcacgagaacgagacgctggcgtcgctgaagagcgaggccgagagcctcaagggcaagctggaggaggagcgagccaagctgcacgatgtggagctgcaccaggtggcggagcgggtggaggccctggggcagtttgtcatgaagaccagaaggaccctcaaaggccacgggaacaaagtcctgtgcatggactggtgcaaagataagaggaggatcgtgagctcgtcacaggatgggaaggtgatcgtgtgggattccttcaccacaaacaaggagcacgcggtcaccatgccctgcacgtgggtgatggcatgtgcttatgccccatcgggatgtgccattgcttgtggtggtttggataataagtgttctgtgtaccccttgacgtttgacaaaaatgaaaacatggctgccaaaaagaagtctgttgctatgcacaccaactacctgtcggcctgcagcttcaccaactctgacatgcagatcctgacagcgagcggcgatggcacatgtgccctgtgggacgtggagagcgggcagctgctgcagagcttccacggacatggggctgacgtcctctgcttggacctggccccctcagaaactggaaacaccttcgtgtctgggggatgggacaagaaagccatggtggggggacatgcgctccggccagggcgtgcagggcctttgaaacacatgaatctggacatcaacagggggccgggactaccccaaggggagaaggcctttgctttcagggtcagaatgacgcctaccgtgtcgccctctatgaccctgggggggcagaataggggagggttggcccttcctatttcccaaagaaaaggcc

SEQ ID NO: 96683 - DNA, 1023 bp, Homo Sapiens
acagtagttgtcaaaaagcaggtttgtaaaacgaacggcagtaactataacggtcctaaaggtagcgaggcctgggtggcgaattcggcacgagggtgcaaagataagaggaggatcgtgagctcgtcacaggatgggaaggtgatcgtgtgggattccttcaccacaaacaaggagcacgcggtcaccatgccctgcacgtgggtgatggcatgtgcttatgccccatcgggatgtgccattgcttgtggtggttggataataagtgttctgtgtaccccttgacgtttgacaaaaatgaaaacatggctgccaaaaagaagtctgttgctatgcacaccaactacctgtcggcctgcagcttcaccaactctgacatgcagatcctgacagcgagcggcgatggcacatgtgccctgtgggacgtggagagcgggcagctgctgcagagcttccacggacatggggctgacgtcctctgcttggacctggccccctcagaaactggaaacaccttcgtgtctgggggatgtgacaagaaagccatggtgtgggacatgcgctccggccagtgcgtgcaggcctttgaaacacatgaatctgacatcaacagtgtccggtactaccccagtggagatgactttgcttcagggtcagatgacgctacgtgtcgcctctaatgacctgcggggcagatagggaggttgccatctattcccaaagaaagcatcatatttggagcatccagcgtggaccttctccctcagtggtcgcctgctgtttgctggatacaatgattaagcttatcaacggtctgggattgtctcagcagggtccggtcttcaatcctgtttgggcttgaaaaccgggtagactcttacaagtttcgcgcagtgggcggcttccggcccggacggggacataccccagagtggggctaaattctttgagagggcatggtatcccggagatggactccccgtgtcatgcttttcttcggggcacattgtgcgtcgctcctcc

SEQ ID NO: 96684 - DNA, 1124 bp, Homo Sapiens
ggtaccggtccggaattctccggatatcgtcgacccacgcgtccgactatattgaggtggagactggatatttgaaaagcagaagtgctatgatcctacagcgctattatgattcgaaaaaccatcaaaagagatccattggcacaggaggtattcaagatttgaaggaaagaattagacagcgtaccaacttaccacttgggccaagtatcgatactcatggggagacttttctatcccaagaagtggtggttaatcttttacaagaaaccaaacaagcctttgaaagatgtcataggctctctgatccttctgacttaccaaggaatgccttcagaatttttaccattcttgtggaatttttatgtattgagcatattgattatgctttggaaacaggacttgctggaattccctcttcagattctaggaatgcaaatctttattttttggacgttgtgcaacaggccaatactatttttcatctttttgacaaacagtttaatgatcaccttatgccactaataagctcttctcctaagttatctgaatgccttcagaagaaaaaagaaataattgaacaaatggagatgaaattggatactggcattgataggaccattaaattgtatgattggacagatgaagcatattttggctgcagaacagaacaaaacagattttaagcccacaagatgaaaacaatgttttgattcaatatacctaatgcctgtgtaaaaagtctgtgcttacgtacgaaaaccaccgggataagaattaaccattccctggaggggaaaaaatgtggaaaccgcacttgcatgggaactctgaaacaacacttcccttccgaatcaatcccatgggacaatctttcccccaatatttccctaacaattcccaatggttttggctatagtcagccctatcccccatcacgctatccccgaccacattcgcacgccccctccattacttaatcctcaaagcgttatcgaggtggagcattaaatatctacttcgaacgcaccctcttacaaactctgtctctttaaccccccgccccatttaatcccgagcgcgctacttacaacgcccccccacttatcgcgccccatctccag

SEQ ID NO: 96685 - DNA, 984 bp, Homo Sapiens
tggaccggtccggaattcccgggatatcgtcgaccccgcgtccgggagaagaagcagaagagtggctgagctcccttcgggcccatgttgtgcgcactggcattggacgagcccgggcagaactctgtgagaagcagattgttcagcatggcggccagctatgccctgtcccagggcccaggtgtcactcacattgtggtggatgaaggcatggactatgaggcgagccctccgtccttctcagactatccccatgctgcccccgggttgctcatgcttggtgtaagctcagcctggtctgagccttgctgcctttcaggaagtaggaggctggtggactgtagtctggacttcagcatcttcatccccagtatggtacttggaaccatccactagcccagcaagggtcagtagcaggattgcgttctatatccgtcctggacatcctcatgagtgctcctgcttcagacaagccctttctccgtcctcgctcgctccctacacaggcactgtgtcgtcctcctcgcataaaggcaaacagaggcaccaaacacccaagcccagcccatctctgatgatgaagccagtgatggggaagaaacccaggttagtgcagctgatctggaagccctcatcagtggccactaccccacctcccttgagggagattgtgagcctagcccagcccctgctgtcctggataagtgggtctgtgcacagccctcaagccagaaggcgaccaatcacaacctccatatcacagagaagctggaagttctggccaaagcctacagtgttcagggagacaagtggagggccctgggctatgccaaggccatcaatgccctcaagagcttccataagcctgtcacctcgtaccaggtacccaggggctagagtgggaggaggggtctttactggccagtggttagtaaccccagtggggttcaggtacagtggtgaagattttatggggtctaggac

SEQ ID NO: 96686 - DNA, 922 bp, Homo Sapiens
ccgcatggacactataacagtgttaaaaaagcaggctggtacggtcggtatcccgggatatcgtcgacccacgcgtcgggctctgctgcagccctgaccaacgctccaataggccgggatccagccatacttcaatggatcccaggggtatcttgaaggcatttcccaagcggcagaaaattcatgctgatgcatcatcaaaagtacttgcaaagattcctaggagggaagagggagaagaagcagaagagtggctgagctcccttcgggcccatgttgtgcgcactggcattggacgagcccgggcagaactctttgagaagcagattgttcagcatggcggccagctatgccctgcccagggcccaggtgtcactcacattgtggtggatgaaggcatggactatgagcgagccctccgccttctcagactaccccagctgcccccgggtgctcagctggtgaagtcagcctggctgagcttgtgccttcaggagaggaggctggtggatgtagctggattcagcatcttcatccccagtaggtacttggaccatccacagcccagcaaggcagagcaggatgcttctattcctcctggcacccatgaggccctgcttcagacagccctttctcctcctcctcctcccaccaggcctgtgtctcctccccaaaaggcaaaagaggcaccaaacacccaagcccagccccatctcctgatgatcgaagccagtgatggggaagaaacccacggaggcctgcacaatcccagggactgggaagcggatggctgagaaaatcatagagatcctggagagcggggcatttgcggaagctggaccatatcagtgagagcgtgctgtcttggagctcttctccaacatctggggagctgggaccaaactgccccgatgtggtccac

SEQ ID NO: 96687 - DNA, 897 bp, Homo Sapiens
  misc_feature (709)..(709): n is a, c, g, or t
tggaccggtccggaattcccgggatatcgtcgacccacgcgtccgcgcgtgtgccgccgctttcctcctccatctcttttcctccgcctccgccggcgcgatggcgaagccgctgacggacagcgagaagcggaagcagatcagcgtgcgcggcctggcggggctaggcgacgtggccgaggtgcggaagagcttcaaccggcacttgcacttcacgctggtcaaggaccgcaatgtggccacgccccgcgactacttcttcgcgctggcgcacacggtgcgcgaccacctcgtgggccgctggatccgcacgcagcagcactactacgagcgcgaccccaagcgcatttattatctttccctggaattctacatgggtcgcacgctgcagaacacgatggtgaacctgggccttcagaatgcctgcgatgaagccatctatcagttggggttagacttggaggaactcgaggagatagaagaagatgctggccttgggaatggaggcctggggaggctggcagcgtgtttccttgactcaatggctaccttgggcctggcagcatacggctatggaatccgctatgaatttgggatttttaaccagaagattgtcaatggctggcaggtagaggaggccgatgactggctgcgctacggcaacccctgggagaaagcgcggcctgagtatatgcttcccgtgcacttnctacggacgcggtggagcacacccccgacggcgtgaagtggctggacacacaggtggtgctggccatgccctacgacaccccagtgcccggctaccagaacaacaccgctcacaccatgcgggctgtggtccgcccaaggctcccaaacgactttcaagctgcaaggacttcaacggtggggaggact

SEQ ID NO: 96688 - DNA, 1158 bp, Homo Sapiens
  misc_feature (677)..(677): n is a, c, g, or t
  misc_feature (920)..(929): n is a, c, g, or t
gggaagagatgaatcacggccgccgattcggacgaggaggattaggattcctgtctcctttcaattcaatgcatctgtttctggggttaacagtggactgttaagaggctgtgcagcttgggttaagtcattcttatctctgggcttcaggagcttagaccagatagtttctacaggctctcttggtgctgatgccttgggattctgtggctgttttctgtaagatctgcaagggggaaacaggattttggcagcaatcctttcattactaaagcttcctttcttttcgggtacagtgaaaagagccaaggctgtgtgaccccctcatcacttagccaggcgtatggtcctggtttctgaggctgccagaaagcatcttagcaatttgtgtttggatggtccatgcctgactattctaggctggaggttcctaaagagtaacaagaggaagagaaacaagaatctctgacacttgttgagaatagagcacagtcccatttgtttgaaaagagacaccaggcagccatgtttatgtgccagaaatgcattccacctcaaggaggacttaatttatggacccgtgtgtgccacggctgagctgggcaaggatctttctcaggacaaactctgccatgcagctaaagagcctggtataactagaaggcagttgtcattgntagataaactagtcttccaacccctgtaggacatcgatgaaccacaggcagcaggtttcagaaggctcaaattaaaaagggggccaaggagaagtaagcctctaaagccttaacagggcttacagttctgacagaacgctgggggttttttcccaaagggttttcctttggggtcttcatcacttagttattgtagactatcgggcacaggggccaaaaattttttggggaaaaacccttttnnnnnnnnnnagggtgggaaagggccccccctttcccaaagggttggaaaggggcccccctttttcccaaaagggttttttaaagccattttcccaataacgttgttagaactgcaacgtaagtaacgtattcttaacttttccaaacaaaaaggggggccccttttggggattttggggaacaaaaggggaacttttacaaattgggagaatgggtgtaaaagccttagtgcagtgcg

SEQ ID NO: 96689 - DNA, 1486 bp, Homo Sapiens
  misc_feature (1189)..(1189): n is a, c, g, or t
  misc_feature (1244)..(1244): n is a, c, g, or t
  misc_feature (1249)..(1249): n is a, c, g, or t
ggaattcccgggatatcgtcgacccacgcgtccgcccacggaaaggcatgtggaggatgtgctgctcatcatggatgtgtacaaactggcactgagcttccagttgtgccgtctggagcagctgtgccgccagtacatcgaggcctccgtggacctgcagaacgtgctggttgtgtgcgagagtgccgcccggctgcagctgagccaactcaaggagcactgcctgaacttcgtggtaaaggagtcccacttcaaccaggtgatcatgatgaaggagttcgagcgcctctccacaccactgatagtggagattgtgcggcggaagcagcagccgccccctcgcactcccttggaccagccagtggacattggcacatctctgatccaggacatgaaggcatacctggagggagcgggcgcggaattctgtgacatcactctgttgcttgacgggcacccacggccagcccacaaggctatcctggccgcccgctccagctactttgaagccatgttccggtccttcatgcccgaagatgggcaggtgaacatctccatcggggagatggtgcccagcaggcaggccttcgagtccatgctgcgctacatctactacggcgaggtcaacatgccgcccgaggactcgctctacttgtttgcggccccctactactacgggccttctacaacaaccgggctgcagggcgtactgcaagcagaacctggagatgaacgtgacggtgcagaacgtgctgcaggtagccccccagccccgtgcacatggctgcagctcccactgagtgggtgaaaggggcagcgcctcaaggtccctgccattgcagatcctggaggcagctgacaaaacgcaggcactggacatgaagcggcactgcctgcacatcattgtgcaccagttcaccaaggtctccaagttgcccaccctgcggtcgctgagccagcagctgctgctggacatcatagactccctggcctcccacatctcagacaagcagtgcgcagagctgggcgccgacatctgaggccctgtggcgcctgcccattgtgaagaatcgccgtgcctgcctgccctgcctactgagaagactaccggctatgcgcatgcctatggcagtgggtgcacctgccaggccaagggtcagggtgcccagagcctccaaagagagctganggggatgtggggccccaaactcattaattcactgaagacacaggtcccacagggnagcgngatgatgaagcagaccccctcctgtcatcaccctctcctgggtgtagtggtggatgcgaagccacgggctcagtgatgggctcaccacccagaaagtggggaagagactttgggcctccccacccaggggggcttggccttggcttctggtggccctggggccgtgttgtgggactccagggcactgggggcctgttcacccaggcctccctcaaacatggcgggaaggagggttta

SEQ ID NO: 96690 - DNA, 1010 bp, Homo Sapiens
  misc_feature (26)..(26): n is a, c, g, or t
catggacaaaatgagacgcgacaggnacaagagcattttgctctgcttccaggaaacatcaagtgagtccgctcctcagttctcaccaggaagcctgatcaggctgaggcgagttcctcgggaaggaagggcgcgcgggatgctgggtgggctcgagtagtgaggcctcagagcacccgccgggagctgtgcgggcgggggcgtccaggagagcgctgggccccgcctgtctgcgccggagagcaggtctcctggctcccccacccgagagccttccttcccgggtctctctgacgccctcggctccccacaggcctttcccctcgcgtcctccctccctttccagcaccttcactcggcctgtttttcttcctcctcctcggcactgagctgagacgcgctgagcagtttgctctcctttttccacttcatgcgtcggttctggaaccatatcttgatctgcctctccgtcaggcacagggcgtgcgcgatctcgatgcgccgccgccgcgtcaggtagcgattgtagtgaaactccttctccagctccagcgtctggtaacgtgtgtatgtctggcggcctcgccggccgctgggcccaaaggaggaactgttgcacgaattcatccgctgcatccacgggtagaccggagtggagcacttctgctcttctgtctcgccgaacacgctcttgtcctgcgcgcagtccgacttccgcggctcggggtggaacgggggctgctcgtcggcgccggagagtgcgcaggccgactctttctcgcggtagaaggccggcgccggcccgtagtcgcagggcgccgctcggccgtagccaccgcccgccggcgggtaataggaggaagtggcaaagcccttgtcctggcccggccctggcccgtagggcgcggggtaatgtctcagcgggtccgcatagcccgacgaatagagcggtagctggcccaggaaggactcctgcccgctcgccagagtgacggggaaggtggagttca

SEQ ID NO: 96691 - DNA, 923 bp, Homo Sapiens
  misc_feature (710)..(710): n is a, c, g, or t
ggtaccggtccggaattcccgggatatcgtcgacccacgcgtccgccattactctctggagtcgattgccccgagacacatgggccaaggaggggtcagcggcgaattctttcggcctgttggggacccctcgtgtccccacgccagactggacctcccgtatgaacttctcttcgcatcggcggcggcttccgtcacctccgctcccccgatcctattcccagtcgtatgccagcttggagagtcacgtgagagcaagagagtagctttctggttgtcctggtgccctgctcaggcaaactgactgccattctctgaggatggcagctctgtcccccacatttgccacgtccacccaggattccacctgtctccaggactcagaatttcctgtttcttcaaaagaccattcctgtccccagaatttggacctgttcgtgtgcagtggtctggagcctcacacacccagtgttggttcccaggaatcggtgactttccaagatgtcgctgtggactttaccgagaaggagtggcccttgctggattcttctcagagaaaactgtacaaagatgtaatgctggagaactacagcaacctcacttcactggggtatcaggtcggcaaacccagcctcatctcacacttggagcaggaggaggagccgaggacagaggagaggggcgctcaccagggcgcttgtgcagattgngagactccatctaaaaccaagtggtcacttcttatggaagatatttttgggaaggaaacgcccagtggtgtgacgatggaaagagccggtcttggagagaagtccactgaatacgctcacttgttcgaagtctttggcatggaccctcatctcactcagccaatggggaggcacgctggcaagaagccctatcaccgccgcgactatggggta

SEQ ID NO: 96692 - DNA, 1261 bp, Homo Sapiens
  misc_feature (1073)..(1073): n is a, c, g, or t
tggaccggtccggaattcccgggatatcgtcgacccacgcgtccggctcaggctcttcgaagtctcttggaggttgtagttttatctcgaaactctcgggatgccatagctgctcttggattgctccaaaaggctgtagagggcttactagatgccacaagtggtgctgatgctgaccttctgctgcgctacagggaatgccacctcttggtcctaaaagctctgcaggatggccgggcatatgggtctccatggtgcaacaaacagatcacaaggtgcctaattgaatgtcgagatgaatataaatataatgtggaggctgtggagctgctaattcgcaatcatttggttaatatgcagcagtatgatcttcacctagcgcagtcaatggagaatggcttaaactacatggctgtggcatttgctatgcagttagtaaaaatcctgctggtggatgaaaggagtgttgctcatgttactgaggcagatctgttccacaccattgaaaccctcatgaggattaatgctcattccagaggcaatgctccagaaggattgccccagctgatggaagtagtgcgatccaactatgaagcaatgattgatcgtgctcatggaggcccaaactttatgatgcattctgggatctctcaagcctcagagtatgatgaccctccaggccctgaggagagaaggcagagtatcttctgaaggaatgggtgaatctctaccattcagcaacagctggccgcgacagtaccaaaagctttctctgcatttgttggacagaagccaccagcaaggaatactggaagaccgatgatctcataacaaggttctttcgtctgtgtactgaaatgtgtgttgaaatcagttaccgtgctcaggctgagcagcagcacaatcctgctgccaatcccaccatgatccgagccaagtgctatcacaacctggatgcctttgttcgactcattgcactgctcgtgaaacactcaggggaggccaccaacactgtcacaaagattaatctgctgaacaaggtccttggtatagtagtgggagttctccttcangatcatgatgttcgtcagagtgaattttcagcaacttccctaccatcgaatttttaatcatgctttctccttggaactcaatggcacctgagcatgtgttggaaaacattaaatttcccagacacttacagcctttctgcaatacattccacatccttgaaggcctaccaaaactccctggcctttgc

SEQ ID NO: 96693 - DNA, 923 bp, Homo Sapiens
gggggaacgtagctaggtagaggcctgcgtgggtaattcggcacgaggatcgacctgaggacttgcgagccgctcagctcccgggacgtgtggagctgctgctaaataatttctgctcagccatgtcgccggctccagatgcagccccggctcctgcgtcgatctccctgtttgacctcagcgcggatgctccggtctttcagggcctgagcctgagggaacattataagcttgactggcatcggtttaacctaaagcaacgtctcaaggacaagcctctcctgtctgccctggactttgaaaagcagagctccacaggagatctttccagcatctcgggatcagaagactcagactcagccagtgaggaggacttgcagacacgtggatcgggagagggctacatttgagaagttgagccgacccccaggctataaccctcatcgagtgctttaaccagaatgcccagggccagtttctttatgcctaccgctgtgtcctaggccctcatcaggatcccccagaagaggcagaactgctgctacagaacctgcaaagtagaggtcccagagactgcgtggtgctcatggctgcagctgggcactttgctggtgctatatttcaaggaagagaagtggtgacacacaaaacttttcaccgctatacggttcgggccaagcggggcacagcccaggggcttcggcgatgcccgaggtgggccatccacactctgctggagccaacctgaggcgctacaatgaagccacctatatcaggatgtccgtgacctgctggcagggccaagctgggctaggcgcctgcggagcctgtccaactgttgcttgctcccgctctggcagcttgttcttggcggcaggaggccccttcaaggggggtcccgttggggttcccccgccccccga

SEQ ID NO: 96694 - DNA, 1210 bp, Homo Sapiens
  misc_feature (897)..(897): n is a, c, g, or t
  misc_feature (1144)..(1144): n is a, c, g, or t
  misc_feature (1185)..(1185): n is a, c, g, or t
  misc_feature (1197)..(1197): n is a, c, g, or t
gggggagagagtatgaagtcgacggcgcgccgaattcggcacgaggtgggacggagctgtagcggcactgtaactgcgagggcagcgccgcgtgtgtaacggcgggggcgtgtcggcgggaaggacaatcgggccgggactcgcggtgtccgggtgaccgcggcttcccgggagcagacctctgtgggcactgtgaggcggaacggagcggcggggcaggagctgttctgggcagccttcatcccgcgtggagtctacccccaagcccttctcctcttcccaattcttgtcaccttcgaggaggccatggaaaccccaacacctttgccgcctgtacccgcctccccgacctgcaacccagccccacggacaatccagatcgagttcccacagcatagctcgtcgctgctggaatctctgaaccgccacaggctagagggaaagttctgtgatgtgtccctcctggtgcagggccgggaacttagggctcataaagcagtgttagctgctgcctctccttacttccatgacaagctgcttctgggggatgcgcctcgtctcactctaccgagtgtcattgaagccgatgccttcgaggggctgctccagctcatttattcagggcgtctccgcctgccactggatgctcttcctgctcatctccttgtggccagtggccttcaaatgtggcaggtagtagatcagtgctcagaaattcttagagaattagaaacttcaggtggtggaatttcagcccgtggaggaaactcctaccatgcccttctttccactacatcctctacaggaggctggtgcattcgctcttcgcctttccagaccccagtacagtcctctgcttctactgaaagccctgcttccactgagagccctgtgggnaggggagggaagtgaactgggagaagtgctgcaaattcaggtggaagaagaagaggaggaggaggaagatgatgatgatgaggaccaggggtcagccacactctctcagactcctcagccccagagagtatcaagggttttttccccgtcctcatggaccccacccactgcccatgactgctactccccgaaagcttcagaagggtgagagtgcaccacttgagctttcctgcccctcctgcactgnccccccaaaatctttctacattaaggcagggaaccctttcnaggcctaaaggnagggagatatcag

SEQ ID NO: 96695 - DNA, 1243 bp, Homo Sapiens
  misc_feature (1203)..(1203): n is a, c, g, or t
ggctcctaggtcgactccacggcgcagcctatcttactacgagcgcgctataagatctatgtattacaaacaggcgctacagtgggtgggttcaactttagggggacccttatgacccaagtctcttggtcacggaacccgttgtcgagagtcaacccaagcacgctttctctggggggggcgccagaagggcccccgccctgaccctgggtaagtaagccggaaggtaaccctctccctggggttccccaaggcgggcgcccgggaggccttgagcccggctccttcgtttgagacaggggggattcccccgttcccccttttttgtccctccaggcaggataggtggttcttgtttctgcgcgccacccccagtcttggagccaacttacccaaaatgtaaggtggacaaccgggcggttcctggaaagtccgggtactttgtagtggtggcaaacggggacaggatgatttttccccgacttcgttcttctgaagaaacctcctttgcccggaaggcttgatggcacttttagggggtggctgaggagtctggacacaaaactgggtgaggatggcctcctggtcgtccttcacctgaacccgcagcgtgaagtcagagagctcgttggggttctgggaggtgatggggaagatcaggcggctcaccttgcccagcttcagctggaatcctcgcaccactttggcctgctcgctggctttgacctcgtaattcgtcatattggaaaacatacagaccttgagatcctggggcctggacaaaacgaactggtgcttcccccacagctgcagggccaccggggcagggttgggtgcctggcgtgtgacctcgctgaccaggagcgtctttggggcacagtcatgcccaaaaatggtcactaccgtcttgaaggatgggtggatgtgtttagggccgtagagacccactgtgacttttttattgatgaagtcccacacggtggaagggtagaggatgcttgggccatgggccacgacagccacgtacatacagggctccaggttgtgcagctgtgcctggaccgtgtccccacagctgcagttgagcgggacggagacatatggcccttccttcgagtcgctcctcaggcactggaggcccactgtgcttttgctaaaaaggtcattttttatctcggctgacactttcatctccaagatgantagcctcgtgccgaattcgccacccaggcctcgcgtcctt

SEQ ID NO: 96696 - DNA, 1379 bp, Homo Sapiens
gctaggtacgaggctgggtgggaattcggcacgaggcggagtagcaacgcaaagcgcttggtattgagtctgtggccgacttcggttccggtctctgcagcagccgtgatcgcttagtggagtgcttagggtagttggccaggatgccgaatatcaaaatcttcagcggcagctcccaccaggacttatctcagaaaattgctgaccgcctgggcctggagctaggcaaggtggtgactaagaaattcagcaaccaggagacctgtgtggaaattggtgaaagtgtacgtggagaggatgtctacattgttcagagtggttgtggcgaaatcaatgacaatttaatggagcttttgatcatgattaatgcctgcaagattgcttcagccagccgggttactgcagtcatcccatgcttcccttatgcccggcaggataagaaagataagagccgggcgccaatctcagccaagcttgttgcaaatatgctatctgtagcaggtgcagatcatattatcaccatggacctacatgcttctcaaattcagggcttttttgatatcccagtagacaatttgtatgcagagccggctgtcctaaagtggataagggagaatatctctgagtggaggaactgcactattgtctcacctgatgctggtggagctaagagagtgacctccattgcagacaggctgaatgtggactttgccttgattcacaaagaacggaagaaggccaatgaagtggaccgcatggtgcttgtgggagatgtgaaggatcgggtggccatccttgtggatgacatgcctgacacttgtggcacaatctgccatgcagctgacaaacttctctcagctggcgcccaccagagtttatgccatcttgactcatggaatcttctcccggccctgctatttctcgcatcaacaacgcatgctttgaggcagtagtagtcaccaataccatacctcaggaggacaagatgaagcattgctccaaaatacaggtgattgacatctctatgatccttgcagaagccatcaggagaactcacaatggagaatccgtttcttacctattcagccatgtccctttataatagagtaacttctgaggctttttgagaataaaatccacccaccttgtttccccttggtatttgatgacaaattcagcagaagacccggttgctccagtgtagctttctacatccacatcagggtatattagagcttatccgaactggggaaagacggattgagattaactgtgggaactcctaactgattatctcattctggttccttgataattctgtgggcttgcagttttaatatagtcagtgtgaagattcagactttgaggtgttgtgtgag

SEQ ID NO: 96697 - DNA, 1245 bp, Homo Sapiens
aaggtagcgaggcctgggtggcgaatccggcacgagggcggcgcggggctcccttcctcgtgctcggcgttgagctcctgcagccgccgccgctgcagtggtcgtccctgccctccccggccccggggtgcaccccgcaaggctcccgctggtgtccctggagcatgggaggctgctgagcgtgagtggcggtgtctggcaggagctgcgtggcagggagggcgtccatggctgcagccaacaagggcaacaagcccagagtccggagtatccgctttgcggcaggccacgatgcagaaggatcccacagccacgtccactttgatgagaagctgcatgactcggtggtcatggtcacccaggagagtgacagcagctttctggtcaaggttggcttcctgaagatcctgcacaggtatgagattaccttcactctgcccccagtgcacaggctgagcaaggatgtccgcgaggcacctgtccccagcctgcacctcaagctcctcagcgtggtgcccgtccctgaaggttatagtgtcaagtgtgagtactcggcgcacaaagagggcgtcctcaaagaggagatactgctagcctgcgaaggtggcactggcacctgtgtgcgcgtgacggtgcaggcccgcgtcatggaccggcaccacggcacgcccatgctgctggatggtgtcaagtgtgtgggcgccgagctggaatacgactcagagcacagcgactggcacggctttgactgaggcccgaggccccgcctgccccgggcccctcagccttaaaccccgccttgtccccccgacatgctgcgtgatggtgtggcttcctcgcccctctctggggtgggtgtgggggtggagtggcttgccccgcctctcacctctgcttcatttgtgctgccacctgccctccctcgtctcctctccattcctccctctcggtgtgcctcagtctcctgccggaaggaatgggttgaagcccaaagggaggtggctagcaaggacgggaggcctggggtgggccaccaaaagaggcgcagcacaggacctccaacaaggcagagagaagcgaccgctaaggtgaagccaacacaggctgcaggacccatgccccaacccagacacacgaacacgaacaccaaaacgcggagaaggcaaaagcgcaacacaaacctcgacgacacaacggcaccaagcgagcacaacaacgaaagaagaacaaaaaggcaaaaaacac

SEQ ID NO: 96698 - DNA, 1056 bp, Homo Sapiens
  misc_feature (13)..(13): n is a, c, g, or t
cccccaacacatnaaagaaaaaaagcggacacaaaagaaagctaggaccggtgcggaattatccggatatcgtctacccacgcttccgagtgctgaatgccctgaatcatccgccccctaacgctcaaaagaagaggtatttgttccgctccttcaaagccaccaaattctttcagtccacaaagctggactgggtggaggttgggctccaggtttgccgccagggctacaacatgctcaaccttctcattcaccgcaaaaacctcaactacctgcacctggactacaacttcaacctcaagcctgtgaaaacgctcaccaccaaggaaagaaagaaatctcgttttgggaatgctttccacctgtgtcgggaagttctgcgtttgactaagctggtggtggatagtcacgtgcagtatcggctgggcaatgtggatgccttccagctggcagatggattgcagtatatatttgcccatgttgggcagttgacgggcatgtatcgatacaaatacaagctgatgcgacagattcgcatgtgcaaggacctgaagcatctcatctattatcgtttcaacacgggccctgtagggaagggtcctggctgtggcttctgggctgccggttggcgaatctggctgtttttcatgcgtggcattacccctttattagagcgatggcttggcaacctcctggcccggcagtttgaaggtcgacactcaaagggggggtggcaaagacagtaaccaaccagcgaagggagtcacatttttgaccttgagctgccgggcacctgtgatgcatgaatattctggaacatgatgccctgaaggggattcagccaaaaccaaggccccgggacaatccttgcaaccaccttcattgaaaacccttggcgctgcctggaaaaagccaaaaatttcccctggaaagggtcccctgggggcttccccaaccccccctttagaaaaaatatgaatccctttccaataccctaaaagggccccaaggccttaactgggtggggaacacaaacactggcccccactacaaacc

SEQ ID NO: 96699 - DNA, 1327 bp, Homo Sapiens
  misc_feature (66)..(67): n is a, c, g, or t
  misc_feature (69)..(72): n is a, c, g, or t
  misc_feature (378)..(386): n is a, c, g, or t
  misc_feature (812)..(812): n is a, c, g, or t
  misc_feature (832)..(832): n is a, c, g, or t
caaggaaagaggacaggaagggagaaaggggggacaacaccagagaaacgggggcagaccagaggnngnnnnaagtactaatataagtgtaatcggagacatcaatcgggaaagtgggcgcaaaggcaagcaatgtagatgattgagaaatgagtaacaagcaagatgtcagatgtgacagaggaagcgggaggcgaaagaagagggggaagaaaaaaggcgaggtcggataatgagggaaagagggaaaaagaagataaaagggatcggtacacaaagacgaatagggggagtagagggagaaaggtagggataagccgatggagagaagaggagggggtacaagaaaagtttggattaggagcgaaaagtgtgtgnnnnnnnnncgggaagggaagggttgattagaataggagaaagaagggagggaagaaaaggcgagtatgtgggggggacaaaaagtggaatcgaggaatgttgggggggttcgcggaataataaggggcgtagaaggggaactggggaggcgaagggagaatcaggtttgtggaggtgtaggggggggaagaggaaaactgatgaaaagccggttgagagcagcgggaacattggccaagtaaggggtgagaaagaggaaggaaggccgggtcccggcgttggtggtggttggacatctcttcatatggagcccaggcctgccgggcagtacaggatgcccacgttgcgttggaagctcagcactgggtcatccagtgtgagcagcgtccgtggtaccttgggtgaagctgagcccaggcgcaggcagctggggntcaggtgcggcgccaagtgntccagaagtttcctgggggacagaccccgtgggggccccggcggcaagcgcgtcctccgagatgggtgccacggagtgtccggagctgcgtggtccgcacgatgacgcggtagctgtgcagggtgccccctccgctgccctccttctcctcccgccgcaggctcactgccaccgggcccagcgactcgtccatcccgaagaagttctgatgttctttgccatagaagtatttgcggtagtagccagcacccaggtctgcgtgctccaggctgtaggccgaggttcggttctgtggctcctccaggatggacacggccgcgttgggcagtgcagggggcacaggtgggaatgctggtccacccaggcctagctcaccctcacccccgagctcacacacaaagccaggtgccccatgcagcaggtccgagctggcagcctggtcctcggctgaagccagggtcccagagctggcctctgagtggccctcgtgctgga

SEQ ID NO: 96700 - DNA, 1440 bp, Homo Sapiens
tgcagtaactatacggtttaaggtagcgaggcctgggtgcgaattcggcacgagggtacgcaagatggcggcgcccagaggctgctgaggcgcggaacggaggatggcgctggtggcgttggtggctggggctcggctggggcggcggctgagcgggccgggactggggcgagggcactggacggcggccaggcgctcccggagccggcgcgaagcggcagaagccgaggcggaggtgcccgtggtccagtacgtgggcgagcgcgctgcccgcgccgatcgcgtcttcgtgtggggcttcagcttctcgggggcgctgggcgtgccttcctttgtggtgcccagctccgggcccgggccccgcgccggcgcccgaccgcgccgcaggatccagcccgtgccctatcgcctggagctggaccaaaagatttcatctgctgcttgcggctatggattcacactgctgtcctctaagactgcggatgttacgaaagtctgggggatgggactcaacaaagattctcagcttggatttcacaggagccggaaagataaaacgaggggctacgagtatgtgttggagccctcacccgtctccctgcctctggacagacctcaggagacacgggtgctgcaggtctcctgcggccgagctcactctcttgtgttgactgacagggaaggagtcttcagcatgggaaacaattcttatgggcaatgtggaagaaaggtggtcgaaaatgaaatttacagtgaaagtcacagagtccacaggatgcaggacttcgatggccaggtggtccaggtcgcctgtggtcaggatcatagtctgttcctgacggataaaggagaagtctattcttgtggatggggtgctgatgggcaaacaggtctgggtcactacaatatcaccagctcgcccaccaagctgggtggagacctggcgggagtgaacgttatccaagttgccacctacggtgattgctgcctggccgtgtccgccgacggaggactttttggttggggaaactcggagtacctgcagctggcctctgtcactgactccacacaggtgaatgtgccccgctgcttacacttctcaggagtggggaaggtgcgacaggctgcatgcggtggcacgggctgtgcagtgttaaacggagaaagacatgtttttgtctggggctatggaattcttggggaaaggtccaaaacctagtggaaaagtgcccgtcccctgaaaatgattccaccccactctctttgggcttgaacggagttcaaccccaaaatccaaggtttccccgcatccgatgtgggacttagccaccttttgctgcccctgacccaacaaagggagaagctggtttggtatgggggccaagcaaccatcccaagggggtggcctgggggaattcgggtccgccctgggaaggagaa

SEQ ID NO: 96701 - DNA, 858 bp, Homo Sapiens
ggaccggtccggaatttccgggatatcgtcgacccacgcgtccgctattcaccgtacttatccaaaaatctcttttaaaaagtaaatttgtgcaacaacgtttatttgaaagataatgtcttctcaaaatcagaaactgcagtggtaattaaattaatagaaaagagaacaaactgcaggtttagaaaaatggttttcatattcaccattcttccacctcattgaattgcatgctgtagttctagcttttctgctataatatgtaaatatgactgtagccttttaagcttcagtctcagcagagaatttcctaaatgcgtttgacctaatgaaactgatcatggcttcccacttaggtttttcttcttatagctttatagaactatataataatatggacttgctgtgtaatggaattaaagtgcttttgcacaataagttctgcaaaaccctctcattcatgaaaaggtgctccttgctagacagaaactttgctgatttacagtattgttatttttgtctaaagttctgtaaatacatgctttaatgttatctttgagaaatctatgtaaataatatagtctacaacatagagactgtataattctgtgttatatatgtgcctagtgctctgttggcactcaataaattttaagtaacaaaattgataatcatatagcgaaggcatatttttttcttcccaagctcaagtcagggatggggactatatatttaatgagaatccataaacccaacccacacctgaagaactcgccctcattaactttatagaccatgtcacggcagggtttttttaaccatggaaatggaagattaaaaaggatttttttaaatggg

SEQ ID NO: 96702 - DNA, 1476 bp, Homo Sapiens
gggagagtatgaagtcgacggcgcgccgaattcggcacgaggggagttgttaagcggccagggtcaggtgtgctggagcggggtccgggcccgggttccagggcgaggcggcggagcgtggcaggcaagcctagagcggcgtggtccatgcgccggcgccgggggcagagcggagccgcagactcccctggccccggcgcggccccggcagccgcgggctaaggagtcgcgaggttcccccagctgccaccatgaaccccgagaaggatttcgcgccgctcacgcctaacatcgtgcgcgccctcaatgacaagctgtacgaaaagcggaaggtggcagcgctggagatcgagaagctggtccgggagttcgtggcccagaacaataccgtgcaaatcaagcatgtgatccagaccctgtcccaggagtttgccctgtctcagcacccccacagccggaaagggggcctcatcggcctggccgcctgctccatcgcactgggcaaggactcagggctctacctgaaggagctgatcgagccagtgctgacctgcttcaatgatgcagacagcaggctgcgctactatgcctgcgaggccctctacaacatcgtcaaggtggcccggggcgctgtgctgccccacttcaacgtgctcttggacgggctgaccaagctggcagccgacccagaccccaatgtgaaaagcggatctgagctcctagaccgccttttaaaggacattgtgactgagagcaacaagtttgacctggtgagcttcatccccttgttgcgagagaggatttactccaacaaccagtatgcccggcagttcatcatctcctggatcctggttctggagtcggtgccagacattaacctgctggattacctgccggagatcctggatggactcttccagatcctgggtgacaatggcaaagagattcgcaaaatgtgtgaggttgttcttggagaattcttaaaagaaattaagaagaacccctccagtgtgaagtttgctgagatggccaacatcctggtgatccactgccagacaacagatgacctcatccagctgacagccatgtgctggatgcgggagttcatccagctggcgggccgcgtcatgctgccttactcctccgggatcctgactgctgtcttgccctgcttggcctacgatgaccgcaagaaaagcatcaaagaagtggccaacgtgtgcaaccagagcctgatgaagctggtcacccccgaggacgacgagctggatgagctgagacctgggcagaggcaggcagagcccacccctgacgatgccctgccaaagcaggagggcacagccagtggaggtccagatggttcctgtgactccagcttcagtagcggcatcagtgtcttcactgcagccagcactgaaagagccccaatgacccttcaactcgacgggatcgtgcaagtcctaaactgccacctca

SEQ ID NO: 96703 - DNA, 933 bp, Homo Sapiens
ctggtaccggtccggaattcccgggatatcgtcgacccacgcgtccgatttaaattaaatttttcataatctattgttttgaactatggattctgttttatggtggatacctaaggtttatataatagttgctggaaaacttaaagtagctggtgagcttcctgttatgtcactattaaagaatgatggctgatgtaactctgcccctgaaatctacaagggtcatgcccaaattaatacaggttaacctttgtagaggtatatatgttggcattatttattgacatttatgcttcaagcatgtcttattttatgtaattttaagaaatactctatttaacttgtgaaatatacctaaaagcatactagttagctcttagactctcacttagggagggtaaagaaacatcactgatgccaatatgaagatctataaacaaatcctttgtttagaacttttttctcttcgtgcacctcacaacacacttaccatggtacatatttcttaatgccactaagaaaggcaagatagtgaacgcagaattatttatgtggtatagtgtttgttttcctgttttagtgcttttgtagctaaacttactggaactgcatcacaactacatttgcagtctcagtgggaggtggactagcctgtggttaattttagagcttaaaagtttataagcattaaaaacacatacatgtattagaatcttgtctaacccctcacaaaggatgatggtgatcagcatgccatctttttgaagattaattctaaaatttgaggactctggtaggttgtttttattttccttcccaaccagccattcatttccaattggtctgcctttgaaactttttgtgaaaaattgcctgtaccaattgcattggttgcgtttgctctgattttaaatgccaaaaacccttaatatt

SEQ ID NO: 96704 - DNA, 1168 bp, Homo Sapiens
  misc_feature (339)..(357): n is a, c, g, or t
tggaccggtccggaattcccgggatatcgtcgacccacgcgtccgctaattcttgttagcccaacagctgttctgttctatctacccctcatttcacgctcaaggagtcatacctagaatagttacacacaagagggaaactggaagccaaacactgtacagtattgtgtagaaagtcacctccctactccttttattttacatgagtgctgatgtgttttggcagatgagctttcagctgaggcctgatggaaattgagataacctgcaaagacataacagtatttatgagttatatcttagttcttgaaattgtggaatgcatgattgacaatatannnnnnnnnnnnnnnnnnncaagtaataccagtactgtttaactatagccagaactggctaaaatttttatattttcagagttgaagttggtgaagacattcatgatttaaacaccagatcctgaaaggggttaaatctactttgaaatgaatctgcaatcagtatttcaaagcttttctggtaattttagtgatcttatttgattagactttttcagaagtactaaataaggaattttaacaggtttttattaatgcacagataaatagaagtacagtgaggtctatagccattttattaaaatagcttaaaagtttgtaaaaaaatgaatctttgtaattacttaatatgttagttaagaacccgtcaagcttatatttgctacacttaacaattactcctaatgcatttacctgttcgggacacctattcgcgggaatgtgtaaatttaccccagttcttgcgtgcccgatttaaagccacgtttaaaatctgtatccggggccccctgaaaaagaaacgggctttgggatcacaggggggaagagtttaggattggttcaacccctggttttttccgaaggggggagcggggaatgggggtcgtgagacgttgcaactgggggttttccccgggggaacctacgccgctgcccagggggaaaaattgcggaacttagggtggggcacaggaaaaacggttgtcccccctcgttcccaggacgccaacaattccctcaaggacccttctgttttggggaccggggtcggaggggcgcgccgacaatgagcgggtacgcacctcactcaaagcattcgggtccgcccc

SEQ ID NO: 96705 - DNA, 2014 bp, Homo Sapiens
gggttgtgagggttcctgcttcggagtcggcggtggtcgtccagaccgagtgttctttactttttgtttggttgaggtttcacgctagaaggtggctcaggatgtcttcatcacattttgccagtcgacacaggaaggatataagtactgaaatgattagaactaaaattgctcataggaaatcactgtctcagaaagaaaatagacataaggaatacgaacgaaatagacactttggtttgaaagatgtaaacattccaaccttggaaggtagaattcttgttgaattagatgagacatctcaagggcttgttccagaaaagaccaatgttaagccaagggcaatgaaaactattctaggtgatcaacgaaaacagatgctccaaaaatacaaagaagaaaagcaacttcaaaaattgaaagagcagagagagaaagctaaacgaggaatatttaaagtgggtcgttatagacctgatatgccttgttttcttttatcaaaccagaatgctgtgaaagctgagccaaaaaaggctattccatcttctgtacggattacaaggtcaaaggccaaagaccaaatggagcagactaagattgataacgagagtgatgttcgagcaatccgacctggtccaagacaaacttctgaaaagaaagtgtcagacaaagagaaaaaagttgtgcagcctgtaatgcccacgtcgttgagaatgactcgatcagctactcaagcagcaaagcaggttcccagaacagtctcatctaccacagcaagaaagccagtcacaagagctgctaatgaaaacgaaccagaaagaaaggtgccaagtaaaggaagacctgccaaaaatgtagaaaacaaaacccgaccaagggtatttcttgtaaagtcgatagtgaagaaaatactttgaattcacaaactaatgcaacaagtggaatgaatccagatggagtcttatcaaaaatggaaaacttacctgagataaatactgcaaaaataaaagggaagaattcctttgcacctaaggattttatgtttcagccactggatggtctgaagacctatcaagtaacacctatgactcccagaagtgccaatgcttttttgacacccagttacacctggactcctttaaaaacagaagttgatgagtctcaagcaacaaaagaaattttggcacaaaaatgtaaaacttactctaccaagacaatacagcaagattcaaataaattgccatgtcctttgggtcctctaactgtttggcatgaagaacatgttttaaataaaaatgaagctactactaaaaatttaaatggccttccaataaaagaagtcccatcacttgaaagaaatgaaggtcgaattgctcagccccaccatggtgtgccatatttcagaaatatcctccagtcagaaactgagaaattaacttcacattgctttcaagtggggacaggaaacttgaattggacattccagatgatgctaaagatcttattcgcacagcagttggtcaaacaagactccttatgaaggaaaggtttaaacagtttgaaggactggttgatgattgtgaatataaacgaggtataaaggagactacctgtacagatctggatggattttgggatatggttagttttcagatagaagatgtaatccacaaattcaacaatctgatcaaacttgaggaatctgggtggcaagtcaataataatatgaatcataatatgaacaaaaatgtctttaggaaaaaagttgtctcaggtatagcaagtaaaccaaaacaggatgatgctggaagaattgcagcgagaaatcgcctagctgccataaaaaatgcaatgagagagagaattaggcaggaagaatgtgctgaaacagcagtttctgtgataccaaaggaagttgataaaatagtgttcgatgctggatttttcagagttgaaagtcctgttaaattattctcaggactttctgtctcttctgaaagccccttctcaaaga

SEQ ID NO: 96706 - DNA, 951 bp, Homo Sapiens
ccgcggggtaatggacgagggggccgcgccatgtgggctgcggcgggcgggctgtggcgctcccgcgcgggtctccgggccctgttccgtagccgcgatgctgcgctatttccaggctgcgagcggggacttcactgctctgctgtctcctgcaagaactggctcaagaaatttgcctcgaaaaccaaaaaaaaggtttggtatgaaagtccttccttgggttctcactcgacttacaaaccatccaagttggaattcctcatgaggagcacctcaaagaaaaccaggaaggaagaccatgcgcgcctgagggccctgaacggcctcctctataaggcactgacagacctgctgtgtacccctgaagtgagtcaggagctgtatgaccttaacgtggagctctccaaggtttccctgactccagacttctcagcctgccgagcgtactggaagacaacgctctctgctgagcagaacgcacacatggaggctgtcctgcagagaagtgccgcgcacatgaggcaccttttgatgtcccagcagaccctgaggaatgtgccaccgatagtgtttgttcaagacaagggaaatgcagctctagctgagcttgatcagttactggcagtcgcagactttggaccccgggatgaaagagacaactttgtacaaaatgatttcagggaccctgatgccccacaaccctgcggcaccacagagccgaccacaagctccagtctgtgtgggatcgatcatgaggcgctcaacaagcagattaaggagtacaaaaggaggaaagataaagggctcgggggcccggtgtgggcagggcaggggtgactgacaagcagatggcaagggagaggaggcaagcccggctggagaagaaagcccaagatccgggggaggagggacaaaccgggccggtgggccggaaaatgttgcccgacaagg

SEQ ID NO: 96707 - DNA, 1160 bp, Homo Sapiens
  misc_feature (884)..(884): n is a, c, g, or t
  misc_feature (1000)..(1000): n is a, c, g, or t
  misc_feature (1002)..(1002): n is a, c, g, or t
gctggtaccggtccggaattcccgggatatcgtcgacccacgcgtccgagctgatcatacagttgaccagttcagggtgcccgctgctggttggatgccaggcggaatgtcagggtgttctctggtgtctgttgtggctgtgggatccacggttactgggcggagccctgtggtggctgtggtgccatggaggggctgcgatcttctgtggagctggaccctgagctgactccagggaagctggatgaggagatggtggggctgccaccccatgacgcgagtcctcaagtcactttccacagcctcgatgggaagacagtggtgtgtccacacttcatgggcttactgctgggtctcttacttttattgactttgtctgttaggaaccaactctgtgtaagaggtgaaaggcagcttgcagaaacactgcattcacaggtgaaggagaaatcccagctcattggcaagaaaacagattgtagagactgaggcatctttaaaagatgtcagggtacagaaaaagtctttcaacacccccggctttgtagatgcctacaagaaggtgaatagcaccaacgagatgctgatggagaaatttaccaccctcgttcaagaactgaaagaagagacatcctccagactctccaggcaacaagaggagctggtagagatgctaacaacgctggaggccctgggagaggccatgagagccaccccgtcacaaggagcttttccacacctgccatgcagctgagagccaagccctgctgctctctccccccacgagggggctggggtcttagagcagcactgttcttttcccctccacccaggcctcccgagctgccaggctctgtgctcccacactgactcccatctgaagngtccttgaggccagtgggatctggagtaccccgccccctgggcctggagttcctccctccttctcacgctgacactgcagccagctccctcaatggggcggtggcctccaaatctnanaaagaatatggaaggtccctggagcacacccaagaaaatggaggggacttttttcttttggcagaaaagttttgaaattctgttctttaagtgagaccggaatgcccatactttgaagcaccttcatccttttggctctcaaattggaaaatggtcat

SEQ ID NO: 96708 - DNA, 993 bp, Homo Sapiens
  misc_feature (17)..(17): n is a, c, g, or t
  misc_feature (69)..(69): n is a, c, g, or t
  misc_feature (87)..(87): n is a, c, g, or t
  misc_feature (827)..(835): n is a, c, g, or t
gcaagggagtggggaanaagcacggggccgtggacaaaacaagctggtaccggtccggaattctttcanaagcggcgacccacgcgnccgcttcgatcgtggctaccacatgtactgtctcaccccgtccatgtctgagccccctgaaggaagttggagctgccacctgtgtctggacctgttgaaagagaaagcttccatctaccagaaccagaactcctcttgatgtggccacccacctgctccccgacatatctaaggctgtttctctcctccacttcatatttcatacccatctttcccttcttcctcctctcccttcacaaatccagagaaccttggggtggtcgtgccagcctgccttgggcagctgcaagctgaggtggcagctctgaccacctctggccccaggccctcagggagaaaggagcaacacacggcccctaggcgtgcgtgtggcccagtttctctctgctctccattaagtgcattcactctgctggcctggggcccagcccctggtgatcacagggttcaaacagggtcctcctagaaagagtgggagagcagctcacttctctgtgttctgcctcccctctggtctccagagttttcctgtcctctagaggcaagccaggccagggagctgggagcgagcaagctgaggccacgtccacaaggagcttttcatgcccctgtgccgcatagcctcacctctttcctccagagtggctctctgcggccctgtgttcctgctacagagtgttcttttctggagtcaggatgttctcggtcaccctcctggttctgccccggtcccattccannnnnnnnnaggggggaacagtagcttcaccttgttattcccattggctcccctggctcacttcttacggtcgggcctccagggactggaaccatttccccaccccttggaattttctcattctttctgccctccccttccctactccttttttgggtttttggggg

SEQ ID NO: 96709 - DNA, 1229 bp, Homo Sapiens
  misc_feature (1132)..(1132): n is a, c, g, or t
ctggaccggtccggaattcccgggatatcgtcgacccacgcgtccgtgctgcccgctcgccgcccgccatggcccgcgcacccccgctgctcgccgcgttgaccgcgctcctcgccgccgccgctgctggcggagatgccccgccgggcaaaatcgcggtggttggggctgggattgggggctctgctgtggcccattttctccagcagcactttggacctcgggtgcagatcgacgtgtacgagaagggaaccgtgggtggccgcttggccaccatctcagtcaacaagcagcactatgagagcggggctgcctccttccactccctgagcctgcacatgcaggacttcgtcaagctgctggggctgaggcaccggcgcgaggtggtgggcaggagcgccatcttcggcggggagcacttcatgctggaggagactgactggtacctgctgaacctcttccgcctctggtggcactatggcatcagcttcctgaggctgcagatgtgggtggaggaggtcatggagaagttcatgaggatctataagtaccaggcccacggctatgccttctcgggtgtggaggagctgctctactcactgggggagtccacctttgttaacatgacccagcactctgtggctgagtccctgctgcaggtgggcgtcacgcagcgctttattgatgatgtcgtttctgctgtcctgcgggccagctatggccagtcagcagcgatgcccgcctttgcaggagccatgtcactagccggggcccaaggcagcctgtggtctgtggaaggaggcaataagctggtttgttccggtttgctgaagctcaccaaggccaatgtgatccatgccacagtgacctctgtgaccctgcacagcacagaggggaaagccctgtaccaggtggcgtatgagaatgaggtaggcaacagctctgacttctatgacatcgtggtcatcgccacccccctgcacctggacaacagcagcagcaacttaacctttgcaggcttccacccgcccattgatgacgtgcagggctctttccagcccaccgtcgtctccttggtccacggctacctcaactcgtactacttcggttttccagaccctaagcttttccnctttgccaacatccttaccacagattttcccagcttcttctgcactctggacaacatctgccctgtcaacatctctgccagctttcggcgaaagcag

SEQ ID NO: 96710 - DNA, 640 bp, Homo Sapiens
aagtgctgggattataggcgtgagccactgcgccccaccttatttagtattaaagtgttctcattacttgtacacacaaatttaaatgtcttagctttacagtattgcttgctcagcgaatatatgtcatgagaaaggtctgtcagattcatacagtaaacttgagcaccaattatgtgttttgacactactgggcacaaagacaatggaaaagaaaaggtgtaacaaatcccctgtctgagattaataagccccaaggcaacaatttgggcttttgtttgttttgtcaatctgagaaatgcagtttcagaactttgataggtggtactgtcagccctgatgacattcaaagtcctcatttcaaatattcaaggtagaaaattcaaaactcagttgtaaaacaaaagaattggattagcagacccttttcatgaaatgaaatcttacttagaagcctgttatgtaaagcagaaaagccaagctactctggtggttagtatctggaagccttcctactgttgtgttgtcacccacctgcactgccagtgatgcctaaggctcatcttcaagcttccaggttttaccaagcacactctgaaagtgacgtctatgtattaaggatacacgttcacgaaggacc

SEQ ID NO: 96711 - DNA, 891 bp, Homo Sapiens
ctggaccggtccggaattcccgggatatcgtcgaccacgcgtccggcacaactgcaggaacaccgtcacgctgctggaggaggctctagaccaagatagaacagcccttcagaaagtgaagaagtctgtaaaagcaatatataattctggtcaagatcatgtacaaaatgaagaaaactatgcacaagttcttgataagtttgggagtaattttttaagtcgagacaaccccgaccttggcaccgcgtttgtcaagttttctacttttacaaaggaactgtccacactgctgaaaaatctgctccagggtttgagccacaatgtgatcttcaccttggattctttgttaaaaggagacctaaagggagtcaaaggagatctcaagaagccatttgacaaagcctggaaagattatgagacaaagtttacaaaaattgagaaagagaaaagagagcacgcaaaacaacatgggatgatccgcacagagataacaggagctgagattgcggaagaaatggagaaggaaaggcgcctctttcagctccaaatgtgtgaatatctcattaaagttaatgaaatcaagaccaaaaagggtgtggatctgctgcagaatcttataaagtattaccatgcacagtgcaatttctttcaagatggcttgaaaacagctgataagttgaaacagtacattgaaaaactggctgctgatttatataatataaaacagacccaggatgaagaaaagaaaccgctaactgcactccgagacttaataaaatcctctcttcaactggatcagaaagaagattctcagagccggcaaggaagatacagcatgcatcagcttcagggcaataaggaatatggcagtgaaaagaaggggaccctgct

SEQ ID NO: 96712 - DNA, 957 bp, Homo Sapiens
  misc_feature (842)..(842): n is a, c, g, or t
ctggtaccggtccggaattcccgggatatcgtcgacccacgcgtccgtcatgctgagctttgccagagaccctcagggtttcatcaatgactggcttcagtcccagtgcagggacctcaagacaatgactgatgtggtgggtaacccagaggaggagcgccgagctgagttctacttccagccctgggctcaggaggctgtgtgccgatacttctactccaaggtgcagcagagacgacaagaattagagcgaagccctgggaatccggaatacatagggtctctcccacaggcctgattcgactgcaccaattcttgatttgggccctgtgctgcctgcctcatagtatctgccttggtcttgcttggggcgttccaggggatgctgtaggttcaaggacaacaccagaatgaagagggtctcacaagacacctgttatcctcttctttcaccctatctcttcccacccccagcttccctttgccccacaaagttcccatgtgcctgtaccctcccctggtctacataggacctctagatagtgttagagagagaacatgtagtggtaatgagtgcttggaatggattgggcctcaggccaggtggtcttcaaggggaccagctaactgatcctgcccttcagagacccaggaggttgggagctttcgctccttctccaagactcaggcctgtgggcactctataagctagttgatcttggctctcctgataacagaatccaatttccttccttccctccacaggttttggaacaaactctcccttcacttgttgccctgtagcactacagaaaccccgggtttcttgggctccactgaanccccaggtcagtccccggcccctctgggtttggcctgcctgtcagtgccttctctccctcccctagttgggggtccacatttcattaattgggaggttttggttcctttattgcc

SEQ ID NO: 96713 - DNA, 1548 bp, Homo Sapiens
ggaccggtccggaattttccggatatcgtcgacccacgcgtccgattatctacttctgaatttgttggagcattggacttaatagcaacaacacaagaggttctacagcaggaacttcagggcattcacagtttccggcatttgggatcacagctttgtgaattagaaaaactgatagataaaatgatgattgcagaattttctacttattctcacagtgacttaaatagaccactggaagatgactgtcaagttttagaagaggaaagactaatatctcttgtatttggacttttaaaacaaagaaagcttaattttttagaaatctatggtgaaaaaatggttattacagcaaagaatatcattaaacagtgtgtgattaataaagtttcacaaacagaagaaatagacacagatgttgttgtgaagcttgcagatcagatgagaatgttgaattttccccagtggtttgatctgctcaaggatattttctctaagtttacaattttcctacagagagtgaaggcaacattaaatatcattcacagtgttgttctctcagttcttgacaaaaaccaaaggactagagaattggaagagatttcacaacagaagaatgctgcaaaagataattcactggacacagaggtggcttatttaatcccatgaaggcatgtttataagtgatgcattcggtgagggtgagctaacacctatagcagttgacactacctctcaaagaaatgcatctccaaatagtgagccctgcagcagtgattctgtatccgagccagaatgtactactgattccttcatccagcaaagagcacacatcatcatctgctattccaggaagtgtggatattattgggcagtgaaagatatgaaaattaacttgactcagagcctaggaaagctggcaaataatatccaggaattattatatagtgcctcagatatatgccatgatcgagctgtcaaatttctcatgtcaagagcaaaggatggttttcttgagaagctaaattccatggaattcataacactttctagattaatggaaacattcattttagacaccgaacagatctgtggaagaaaaagcacgtcattacttggagcacttcagagccaagctattaagtttgtaaataggtttcatgaagagagaaaaaccaagctcagcctcctcttagacaatgagcgctggaagcaagcagatgttcctgcagaatttcaggatcttgttgattctctgtcagatgggaagattgctttacctgaaaaaaaatcaggagccacagaagaaaggaaaccagctgaagttcttattgtcgagggacaacagtatgcagttgttggaaccgtattgctgttaataagaattatccttgaatattgccagtgtgtggataacatcccatctgttactactgacatgcttactcgtctgtcagatttattgaagtacttcaattcaagaagttgccagttagttcttggagctggtgcactgcaagttgttggactaaaaacgataactacaaa

SEQ ID NO: 96714 - DNA, 286 bp, Homo Sapiens
ggtccggaattcccgggatatcgtcgacccacgcgtccgcggacgcgtgggcgcggagcgggagggctctcctcacacaagcgcttccttgccgagaggctggagctgcggcaccgcaggcctgagccaccccttctctgctgtctccttctcttcctcagggctcccgtgtctgctcgccctccgacgctgctcagaatattaaaggagacaggaagaagtccagatgaagtgactcatggaaccatttgtttatctgaacctgagctaaatcttaggagagaag

SEQ ID NO: 96715 - DNA, 1134 bp, Homo Sapiens
  misc_feature (945)..(945): n is a, c, g, or t
  misc_feature (1012)..(1053): n is a, c, g, or t
cagtcgacggtaccggacatatgcccgggaattcggccattacggccgggggaggcggtcgggatccgctgcgcgagctgtctcggtcccacgtgtgcgagttgctacgatggaagttaaagggaaaaagcaattcacaggaaagagtacaaagacagcacaagaaaaaaacagatttcataaaaatagtgattctggttcttcaaagacatttccaacaaggaaagttgctaaagaaggtggacctaaagtcacatctaggaactttgagaaaagtatcacaaaacttgggaaaaagggtgtaaagcagttcaagaataagcagcaaggggacaaatcaccaaagaacaaattccagccggcaaataaattcaacaagaagagaaaattccagccagatggtagaagcgatgaatcagcagccaagaagcccaaatgggatgacttcaaaaagaagaagaaagaactgaagcaaagcagacaactcagtgataaaaccaactatgacattgttgttcgggcaaagcagatgtgggagattttaagaagaaaagactgtgacaaagaaaaaagagtaaagttaatgagtgatttgcagaagttgattcaagggaaaattaaaactattgcatttgcacacgattcaactcgtgtgatccagtgttacattcagtatggtaatgaagaacagagaaaacaggcttttgaagaattgcgagatgatttggttgagttaagtaaagccaaatattcgagaaatattgttaagaaatttctcatgtatggaaagtaaaccacagattgcagagataatcagaaagttttaaaaggccacgtgaaggaaaaatgctgccggcaatgcgagaagcatcagccaatcgtggcagtacgcatacaatggacaaagccattttttggagcagagggaacatggctgacggaaanaactcctaatgggaaacacctttttcagcttttaacagatcagccagaatccccgaaaattctgggnnnnnnnnnnnnnnnnnnnnnnnnnnnnnnnnnnnnnnnnnnccttatttattggattgaaaaaggaaccagaatttcctaaacctccaaggggccccaaaaaggaaaacctgggaaatataa

SEQ ID NO: 96716 - DNA, 1330 bp, Homo Sapiens
  misc_feature (71)..(71): n is a, c, g, or t
ggtcagggtttgagggtcagtaccgggagaaagaggatgggtccctgcgcagttcggattggtcccggggnccgggtgagccagagggtgagtgatcggcgttccctgagaaagaggtgcgctgggaacccggcgcagggacagcggcgagcctgttgccgctgccatcactgcagccaccgccaggggggtggggagcaggccgcccgccagggacttgtggcagctccttggagaaagtcagcgtgcccgccagctccccggcgcccctagacttcttgtgacggctcagtagtgggttgggcttcccggccacgccgtatcggtgccgccggctggagatgtgctgtttcagttggacctccgagttgaccttgacattgcagatctcacagtggaaagttcggtcctgggcaggagcctctggttcccccggggtgggaggccccagccgagggtaagctttgatgggcccgagcccacttcgggcctccagaattgtcttgtgcttagtacctttgttatgtgcctcaagctgggacagggagttcacagccaccttgcacagagcacagtagagcagccgcttggctttctcctcctcttccttgcttacccccaggcaaggaagccgggggctggagtccccccttcacccttggttacaccctgaccagtctccggaatgctgggaggggatggggagccaggctgtttctctggggatcctggggctggccccagtccattctccatggaaactggacggggtgctacaccatccccatttgttggggtgctgcctgggggagctgggtctccaggttctcggacgccaggctccctgcctctggtcttggcagcctcaatgcctttgactcgtcgggcgtggcgattacctttgtagtgcgcctcagcctggctctgagaattgaagcggatttgacagatattacaggaaatgacgggccgcttggtcttgagcaagggtcccccaaaagtgtgggagagcacagccttctgcacagggtccatggtgctgtagttgctgaagaggccaagggtaggggctggctcgagtgggaagggcaggatctgcttgaggtccagtgggggctgcatgatcgggggctgccgtagcagaggcaggggccctgcccggctcaggctgcctgaagggcagagaaaacattctgtggggtaggaagattaaagcttgggaaccccacccaagcctgccagtcccactccctagccagggcccccacactcagaagtgtcaccctcagtgcacatagtgtacacacttcccctgcatcccgggaattcc

SEQ ID NO: 96717 - DNA, 2038 bp, Homo Sapiens
ggcacgagggccccgggagcgcgggcggcgggccccttggtcctcaggcggccgtggcggcggtggcggcggttgggccgaggcaggcggcctcagtggccgaggtggctggacgcgtagcaggtggaaggagggagggagccgcaggcgcagacccacccgccatgaagccccccgcagcctgtgcaggagacatggcggacgcagcatctccgtgctctgtggtaaacgacctgcggtgggacctgagtgcccagcagatagaggagcgcaccagggagctcatcgagcagaccaagcgcgtgtatgaccaggttggcacccaggagtttgaggacgtgtcctacgagagcacgctcaaggcgctggccgatgtggaggtcacctacacagttcagaggaatatccttgacttcccccagcatgtttccccctccaaggacatccggacagccagcacagaggccgacaagaagctctctgagttcgacgtggagatgagcatgagggaggacgtgtaccagaggatcgtgtggctccaggagaaagttcagaaggactcactgaggcccgaggctgcgcggtacctggagcggctaatcaagctgggccggagaaatgggcttcacctccccagagagactcaggaaaacatcaaacgcatcaagaagaagctgagccttctgtgcatcgacttcaacaagaacctgaacgaggacacgaccttcctgcccttcacgctccaggagctaggagggctccccgaggactttctgaactccctggagaagatggaggacggcaagttgaaggtcaccctcaagtacccccattacttccccctcctgaagaaatgccacgtgcctgagaccaggaggaaagtggaggaggccttcaactgccggtgcaaggaggagaactgcgctatcctcaaggagctggtgacgctgcgggcccagaagtcccgcctgctggggttccacacgcacgccgactatgtcctggagatgaacatggccaagaccagccagaccgtggccaccttcctagatgagctggcgcagaagctgaagcccctgggggagcaggagcgtgcggtgattctggagctgaagcgtgcggagtgcgagcgccggggcctgcccttcgacggccgcatccgtgcctgggacatgcgctactacatgaaccaggtggaggagacgcgctactgcgtggaccagaacctgctcaaggagtacttccccgtgcaggtggtcacgcacgggctgctgggcatctaccaggagctcctggggctggccttccaccacgaggagggcgccagtgcctggcatgaggacgtgcggctctacaccgcgagggacgcggcctcgggggaggtggtcggcaagttctacctggacctgtacccgcgggaaggaaagtacgggcacgcggcctgctttggcctgcagcccggctgcctgcggcaggatgggagccgccagatcgccatcgcggccatggtggccaacttcaccaagcccacagccgacgcgccctcgctgctgcagcatgacgaggtggagacctacttccatgagtttggccacgtgatgcaccagctctgctcccaggcggagttcgccatgtttcagccgggacccacggggagcggggactttgtgggaggcgccgtcccagatgctggaaaactgggttgtgggagccggaagcgctgctgcgggatttccggactaccgacaggcagcgccgtgccccgggagctcctggaggaagtcattgagtccccgggaggccacaacagggcctttttaacattggccggaattgtcctctcccacgggtggaccacgggcccgttcacagagaaaggaagctgaccccgcgagagtatttgcgcgctgttcggaaaacactcaggtccggcacgccggaaacaattctgtggaccctgccactggagggtattataccccaactggacagtgttgcgagagacagaaactaataacacacacaaggtgctagctaa

SEQ ID NO: 96718 - DNA, 1293 bp, Homo Sapiens
gggctctgagccggaggtttgttgtgagggtcggttgtcaagcagcggccaatcaaggcaggagatggaggcaagtgggggtcgcgcctggagcggagcctcggcctccggagccgcagctgcagccctgtattgagctgagatggctcgagcctaacattccatgatccaggatcgtgacagatgtgcacaggctgctgctgttgctgctgtgggtaatttggaaccacgaggcaccccagggccagaagacgaggcattctgtctgcctggatgtgtgggaactctctgccaacttgattggtggatctggggggggatccacccccaccccacgaggaaagcacagtttattttgtgggtggggcttcaggtgccagccagctgaaggatggccacccctgtggtcaccaagacagcctggaagttgcaagagatcgtcgcgcatgccagcaacgtgtcctcactggtgctgggcaaagcctccgggcggctgctggctacaggcggggatgactgccgcgtcaacctgtggtccatcaacaagcccaactgcatcatgagcctgacgggccacacatccccagtggagagcgtccgcctcaacacccccgaggagctcatcgtggccggctctcagtcgggctccatccgtgtctgggacctggaagctgccaaaattcttcgcacactcatgggacacaaagccaacatctgcagcctggatttccacccgtacggcgagtttgtagcctctggttcccaggacacaaacatcaagctctgggacatcaggaggaaaggctgtgtcttccgatacagggggcacagccaggccgtgcggtgtctccggttcagccccgatgggaagtggttggcgtcggccgcagattgaccagcaccgtgaagctctgggatctcactgccggcaagatgatgtctgagtttccctggtcacacggggcctgtcaacgtggtcgagtttcaccccaaagagtacctcctggcctccggcagctctgacagggacaattccgcttctgggacctggagaagttccagggggtgagctgcatcgaaagggagcctgggcccgtcaagagcgtcctcttcaacccaaacggtgctgcctgtaaagcggctgccaggactcactgcgtgtctacggctgggaacctgagcggtgcttttgatgtgggccctcctcaactggggcaaggtggcccgacctggccattctgcaatggaccagttgaataggggtggcctcctcccagaaacaacttctcttct

SEQ ID NO: 96719 - DNA, 528 bp, Homo Sapiens
ccggaattcccgggatatcgtcgacccacgcgtccgaacgggaactgaaagcgatgaaaagcgttccacacgccacgagcccgcgggatcctcggagagtatggaacccttcccctccgctctcagccggaggccagctgcgtccagccgggctcggtcttctgaacaccgatttcaaatcaggtccccggggcccagcgtcacttagggaagtggtggcattttgtggttgctgctaaatcacggagagcagccttggcgctgccggtcccaacttgatccaaggagccttgagaaggagatgagattcagtaccaggggccggccgtggctcccatcctccggaatctgcaaaatggctacttcttcagaaataatggggagagggatggcaagaggccagagatcaaggccctcgcagtattaacttgagcatttgggcacaaaatagacacttttggattttcccgtcttttccaacaccaaggatgagattatcaaacagatgtgttaaacttaatttgtacc

SEQ ID NO: 96720 - DNA, 1353 bp, Homo Sapiens
  misc_feature (600)..(608): n is a, c, g, or t
  misc_feature (1030)..(1030): n is a, c, g, or t
  misc_feature (1099)..(1099): n is a, c, g, or t
  misc_feature (1197)..(1197): n is a, c, g, or t
  misc_feature (1324)..(1324): n is a, c, g, or t
gggtgtcaaagcagctggaccggtccgggattctcggggaatcgtcgaccccgcgtccgcggacgcgtgggcactgacaccggggaggcagtgtatcgctcccgggaccccgtgcgcaacttgcgcctccgagtccacctgcaaagaatcacatcaagcaactttcttcattatcagcctgctgccgagctcgggaaggacctcatagacttggccacttttacgcctcagccaactgccagtggacaccgccccaaaggaccaccaagagcaggacattgggcctgcgggggccacccagatccgacgccgccgccgcgccgcccagccacccaggcaacactcacccgtatacaacgccccccaagcctcacccacaatcagcaaagagcgttaggcaaacaccccccgccaccacaaagcgcggccggcacaacgcaacacgcagcacaaaccaaaaccgcctgaaaaaaggccctccgcccagcaagaaacacggtaaaccgcccccaaccagaaatataggacaccccacatcgatacccgaagagagagctcccggataccgacacaccccgcctacgcccggcccggcgcgannnnnnnnnaccacccacaaaaacaccacacaaacccaacagcgaggtaccaccagacaaagataacgagaagggcggcggttcggggcgcagcccgccccccctcgaccgccccgtctcacccgatgttagaacccacaaaccaattcatacacaagttacaaaagggaccccgagagcgcaagcacacagcacaagcaacaagaacccacaaacaaagcgccccaatgagcaggcgactaccgatacagcgccctcatccgagacgcagtatgccacgacaagagcgcgcgggtatccaatataactacgcccactccgcacccccgatgcgcgccagcattcatgataaataatagcgtggcggccgtgaaacacacacgacccgatgtgtgatcgcgggctcgtgtactagcatggggctaaccggngcgcgaatatagccgcacactatcgcgctatcgaacactaaaaatcacacgccgagaaaagcccgaggntcttcatcccttaccacccgccgcgcccatacccaacagaacaactgcggctgctcggatcctctactcgcttttcatctgtagcttgacaggtactngtaatcgccaaacataccgcgacaaacaaaagagcaacagaacgcacgcacgcgtgccaccactccacacggcacagcccgacagaagagaagataacccagatacacaatgatgcgcaatgcagcncctatagatcggaccgccgcacaactacc

SEQ ID NO: 96721 - DNA, 951 bp, Homo Sapiens
ggtccggaattcccgggatatcgtcgacccacgcgtccggaaagatctatagcactctggctggcaccaggaaagatgttgaagtgactaaggaggagtttgttctggcagctcagaaatttggtcaggttacacccatggaagttgacatcttgtttcagttagcagatttatatgagccaaggggacgtatgaccttagcagacattgaacggattgctcctctggaagagggaactctgccctttaacttggctgaggcccagaggcagaaggcctcaggtgattcagctcgaccagttcttctacaagttgcagagtcggcctacaggtttggtctgggttctgttgctggagctgttggagccactgctgtgtatcctatcgatcttgtaaaaactcgaatgcagaaccaacgatcaactggctcttttgtgggagaactcatgtataaaaacagctttgactgttttaagaaagtgctacgctatgaaggcttctttggactgtatagaggtctgttgccacagttattgggagttgccccagagaaggccataaaacttacagtgaacgattttgtgagggataaatttatgcacaaagatggttcggtcccacttgcagcagaaattcttgctggaggctgcgctggaggctcccaggtgattttcccaaatcctttagaaatcgtcaagatccgtttgcaagtggcacgaaaaatccccactggtcctcgagtcagtgctctgtctgtcgtgcgggacctgggggtttttgggatcttacagggtgccaaagcatgctttcttgcgggaattccttttctcggccatctatttttcggtgctatgctcatggggaaggctttcctttgcaattggaagatggggaaggttaacccccaggaaagcctcctctttacctgggggcccataactggggatggcc

SEQ ID NO: 96722 - DNA, 981 bp, Homo Sapiens
cccgagcagctgagtcccttccctgtctttcactcttctggcatcggtggttttacttcttcgattgaaccctgcttcctcgacccccctgggaggccgccttcttcaggcgcctcccttctctccacgagctcgctcgtgacagctgaggaactggcaagatcctgctacccagagggtgaatgggtatctttcccggaataatcctaatttttctaagggtgaagtttgcaacggcggccgtgattgtaagcggacaccagaaaagtaccactgtaagtcatgagatgtctggtctgaattggaaaccctttgtatatggcggccttgcctctatcgtggctgagtttgggactttccctgtggaccttaccaaaacacgacttcaggttcaaggccaaagcattgatgcccgtttcaaagagataaaatatagagggatgttccatgcgctgtttcgcatctgtaaagaggaaggtgtattggctctctattcaggaattgctcctgcgtagctaagacaagcatcatatggcaccattaaaactgggatttaccaaagcttgaagcgcttattcgtagaacgtttagaagatgaaactcttttaattaatatgatctgtggggtagtgtcaggagtgatatcttccactatagccaatcccaccgatgttctaaagattcgaatgcaggctcaaggaagcttgtcccaagggagcatgattggaagcttaatcgatatataccaacaagaaggcaccaggggtctgtggaggggtgtggttccaactgctcagcgtgctgccatcgttgtaggagtagagctaccagtctatgatattactaagaagcattaatattgtcaggaatgatgggcgatacaattttaactcacttcgtatccagctttacatgtggtctggctggggctctggactccaagccgggttgatgtggtccgaactcgcatgatgaaccaga

SEQ ID NO: 96723 - DNA, 1038 bp, Homo Sapiens
tggaccggtccggaattcccgggatatcgtcgaccacgcgtccgggaaggacagacagcagttaggaggaaaagcacaaagtccaggtttaaatatattatgcagcagcggggagcagtgaccccagaagtcttgcacctgggctgtgggataggttccagccccttctctattgtttctagggcgaactttgcgttgcaaggctttctacagtgtcaatggctctgtgtactgtgaggaagattatctgttttcagggtttcaggaggcagctgagaaatgctgtgtctgtggtcacttgattttggagaagatcctacaagcaatggggaagtcctatcatccaggctgtttccgatgcattgtttgcaacaagtgcctggatggcatccccttcacagtggacttctccaaccaagtatactgtgtcaccgactaccacaaaaattatgctcctaagtgtgcagcctgtggccaacccatcctcccctctgagggctgtgaggacatcgtgagggtgatatccatggaccgggattatcactttgagtgctaccactgtgaggactgccggatgcagctgagtgatgaggaaggctgctgctgtttccctctggatgggcacttgctctgccatggttgccacatgcagcggctcaatgcccgacaaccccctgccaactatatctgagctgcaatcactgctgctgctgtcaccctgcagacaaactgctgtggccagtgggcccctctgtaggccagccaaggcaaagaatgcactctgcaggcctggcagaagagtcctctggggaggaccccaagggccggagacccaaagatcatgatattccaaatggattgtggaagagaaaccttatatttaccagggtgggggcgactggcctttttcccatgtgtgcagtctgagcttaggcacacacaggagggttccaggactttctgaacatctgattctgtatcttcagtatatatattttgtttgttttagagatgggatctcaccatgttgcccaggct

SEQ ID NO: 96724 - DNA, 812 bp, Homo Sapiens
tgtgacacactatacattatctgcaaaggattggtgacatcttcaaaaggctgttttctggataacacttcccatgtgataactgcatagctatagatatcgtgcttgtatactggcccgttgattttttgtccaggttcatagttttcaggtggcatatagataagttgtccctccttctggtgcagatttgctacttgcgtgactgtgagagggacatcatgcgccactttgataaaccgaaatctgcaatcttaacatgaaattcattgtccaataagatattctgagtcttcaagtcatgatgaagtaaaggaggagtcatattgtgcaggtaatttacaccaagggcaatttcatgcaggatgcgaaatctcaatggccaagcaacatcaggatattcagttttctgtcgagcagcggagtgtggatgtgcaggtgcttcacggccacctggacgcgccagtctgcgtggcgggcggacgacacagtgccagaggcgccgcggctcaggtagcgcaggtcggcgagtttgtggtagggaatggtgggcagggcgctgcagatggcctccccgttcatggtcccgggcgctcaggccggttccgggtgtgccccctgctgcggcggctcccaaggctcccacgccgcgctcaggcgcccagatacgcccctgcacgagcgaggccggcaagaccctttttgccccgcaacactaggtcacgagggcgcccattccccggatggcccacgccagccgctgcttctccgaaccagagctgacttcttttctagagactggtgccaacgcc

SEQ ID NO: 96725 - DNA, 2365 bp, Homo Sapiens
acctaaaagcctgttgtcacacagcaggctgttttaactgatgagcagtaactagtacggtccgtaaggtagcgaggcctgggtggcgaattcggcacgagggcacagcgcccccaacctgtctgacttgcacgtcgtccgccccaagctgcccaaaccccccactggaccccctgggagctgtgttcagcccaccacaggccagccctccccagccagtcccacggatctgcagtccatgccggaacctgcggggctcacccaagctgcccgacttcctgcagcgaaaccccctgccccccatcctgggctcccccaccaaggctgtgccctcctttgacttcccgaagacccccagctcccagaacctgctggccctcctagcccggcagggcgtggtgatgacgccccctcgaaaccggacgctgcccgacctctcggaggtgggacccttccatggtcagccgttgggccctggcctgcggccaggcgaggaccccaagggcccctttggccggtctttcagcaccagccgcctcactgacctgctccttaaggcggcgtttgggacacaagccccggacctgggcagcacggagagcctgcaggagaagcccatggagatcgcaccctcagctggctttggagggagcctgcacccaggagcccgtgctgggggcaccagcagcccctccccggtggtcttcaccgtgggctctcccccgagcgggagcacgcccccccagggcccccgcaccaggatgttctcagcgggccccactggctctgccagctcttctgcccgccacctggtgcctgggccctgcagcgaggccccagcccctgagctccctgctccaggacacggctgcagctttgccgaccccattgctgcgaacctggagggggctgtgaccttcgaggcccccgacctccctgaggagaccctcatggagcaagagcacacggagatcctgcgtggcctgcgcttcacgctgctgttcgtgcagcacgtcctggagatcgcagccctgaagggcagcgccagtgaggcggcggggggccctgagtaccagctgcaggagagtgtggtggccgaccagatcagcctgctgagccgagaatggggcttcgcggaacagctggtgctgtacctgaaggtggccgagctactgtcctccggcctgcaaagtgccatcgaccagatccgggccggcaagctctgcctgtcgtccactgtgaagcaggtggtgcgcaggctgaatgagctgtacaaggccagcgtggtgtcctgccagggcctgagcctgcggctgcagcgcttcttcctggacaagcagcggctcctggaccgcattcacagcatcactgccgagaggctcatcttcagccacgctgtgcagatggtgcagtcggctgccctggacgagatgttccagcaccgtgagggctgcgtcccacgctaccacaaggccctgctgctcctggaggggctgcagcacatgctctcggaccaggccgacatcgagaacgtcaccaagtgcaagctgtgcattgagcggagactctcggcgctgctgactggcatctgtgcctgacctttctggcctggctgggccccccgtcctgccgagccctgcagagtgggctctgtgtgctggctggactcctcgggacaagcccatggcgctgatcgctggtgctgagccctgccctgggccccacggacagtcagcctgccggcctccctgcagctcacggggcagaaccagcacatctggagccacacagcttggggggtgtctcccatcttttacaggtggggatcacagaatttctgcccctccagctgcctggctcagcaggcgtgggtgccaccaccctctagccccagggcagccccggaggacaggcaagggcctgagaccactgccgactcaaagccaaagcgagctcctgcttagggcaggtcagcaggcactgtgcccaggaagagcctgcggcctcggcgtcccccagtctccaggagcctctccctccgagatacccacccagctttgtcaatcacccaagcactttatgcatatagagacagaacctggacctcaccagggactgctgggcagcgattcctggcagtggcctggtgtttgtacatacacatatgcagacacatgccagggccccccaagccccgagcaccggaccacggttgctgcccaggtctggacctcagcgggagaactggctcccgggggggagtggggccccctgcgctagaggcagaggcaggttctttgttcaaagcgttccctctgggggacccggcagcagaaggccaccggtgtttctcctcagcccctgt

SEQ ID NO: 96726 - DNA, 946 bp, Homo Sapiens
aagcgaggcctgggtggcgaattcggcacgagggcactgttggtcaccgcaggcctgtcttcctattcaccgtgggcagcagagggatggctgctcagctgctgactgatgaggcactgactgggagactagacctgaaatgaaagagttggatccaaagaatgacatttcggaagacaagctctccgttgttggggaggccacggggggacccacgaggaatggtgccaggggtcctggctcagaaggagtgtgggaaccaggcagctggccagagaggccgcggggagatgcaggtgcagagtgggagccattgggaattccccatgggaacaaactcttagggggctcagtacccgcatgtcatgaactgaaggcatttgccaaccaaggctgtgtcctggtcccaccacggctggacgaccccacagaaaagggggcctgtccacccgtaaggcgtggcaagaacttctccagcacttcagacctcagtaagccccccatgccctgcgaggagaagaaaacctacgactgcagcgagtgtggcaaggcctttagccgaagctcgtccctgataaagcaccaaaggatccacacgggagaaaagccgtttgagtgtgacacctgtgggaagcacttcatcgagcgctcgtccctcaccatccaccagcgggtgcacacgggcgagaagccctatgcctgcggggactgcggcaaggccttcagccagcgcatgaacctcactgtgcaccagcgcacgcacacgggcgagaagccgtatgtgtggcgaccttgtgggggaaaggcctttccgggaagactttcctctctcacccaggcacgaagcggatcccaccacgggggggaagaaggcccctaccccgttggggggggaactggcggcaaagggcctttcaggccaagaaacattgcacccctcattcgc

SEQ ID NO: 96727 - DNA, 1159 bp, Homo Sapiens
  misc_feature (877)..(877): n is a, c, g, or t
  misc_feature (909)..(909): n is a, c, g, or t
  misc_feature (1080)..(1080): n is a, c, g, or t
tggaccggtccggaattcccgggatatcgtcgacccacgcgtccggttggatcggcttgttgcggggagggaggggggagattgtttgcagcatagaagctccgcggacgggaaggtaaactgagctccccagagacgctcatcctacagcctcagctcgggcccagccttctctctccagctgccaccacagcctggaggcgcctgcctccaccctcccgaatggtgctcctcctagcaggcctcggtccaggatccaagccccctttgccccctgccttggagctgttgctccgggtttgtcacagtggactccctgtggcgggaagggaagaacttttgcacagacaaggcttcagctctaggaaccccactgacaacttgaatctcaacctctaacctagtgtgaggttcttcctgtgcccaccttttctgccttttgagaagagaaactcttctcctggccatctagagcccaggaagccccaagctggggccctggtcccagcatgtcagtcctctcttgtgcatagggctctgccctccccctgtcagcatggctgagctcagacaggttccaggagggcgggagaccccacagggggagctgcggcctgaagttgtaaaggatgaagtccctaggagcccagtcgcagaagagcctggaggaggtggaagcagcagcagtgaggccaaattgtccccaagagaggaggaagaactggatcctagaatacaggaggagttggagcacctgaaccaggccagcgaggagatcaaccaggtggaactacagctggatgaagccaggaccacctatcggaggatcctacaggagtcggcgaggaaactgaatacacagggttccccacttggngagctgcatcgagaaagcccggccctactatngagctcggcggctggctaagggagctcagcaggagacacagaaggcagcgcttgcggtacaagcggggcgtaagcatgcaacacgctgctccaaaaaaatggggggttttgtgcctgtaccaaggcggtcatgggttggacaagaaaccaacttggaccccccccgtgggncaagaaaaatgcttgaaaacattgcttaccctggcaaggggtggaaaatgaaagcgcggaagagaaaaaaacgcgcttt

SEQ ID NO: 96728 - DNA, 1189 bp, Homo Sapiens
  misc_feature (885)..(885): n is a, c, g, or t
cccaagccggtggtaccggtccggaatcccgggaatcgtcgacccacgcgtccggccgcatgtcggaggcgcgtggagagccagggtccgggcctgaggctggcgcccgattcttctgcactgcgggtcgcggcctggagccgttcgtaatgcgagaggtgcgggcgcggctggcggccacgcaggttgaatatatttcaggaaaggtttttttcaccacctgttctgatttgaatatgttgaagaaattaaaatctgcagaaagattatttttgctgattaaaaagcagtttccacttattatttcttctgtaagtaaaggaaaaatatttaatgaaatgcaaagacttataaatgaagatccaggaagttggttgaatgccatttcaatttggaaaaatcttcttgaacttgatgcaaaaaaggaaaaactttctcagagagatgataaccaactaaaaagaaaagtgggagaaaatgaaatcattgcaaagaaattaaaaatagaacaaatgcaaaagatagaagagaatagggactgccagctggaaaaacaaataaaagaagaaactctggagcaaagagattttaccactaaaagcgaaaagtttcaagaagaagaatttcagaatgacatagagaaagcaattgatactcataatcagaatgacttgactttcagagtatcttgtcgctgcagtggaactattggaaaggccttcactgcacaggaggtaggaaaagtaattggaattgctattatgaaacactttggatggaaagcagacttgaggaatccacaattagagatctttatacatctaaatgacatttactctgtggtgggggattcctgtgttcagggtttcccctagccagcagagncttacatcaagaacagctgggactgccgatctacaataacgtgggcaatgggatctctggctgacattaaggtaccatatggctctgactgaaacctggctgtgcactgaggactctggcttctctggtaacaatatcaagtgggggatgtctttttctcccctatctcgagcacgactgggcctgaaaaggggggctgggggcatttggttttaaatccaatggggggggacttgggaacaatactttttggaaccctggctaaaaaatggcccaaaggggtgattaatggtaggggggctga

SEQ ID NO: 96729 - DNA, 985 bp, Homo Sapiens
ggaccggtccggaattcccgggatatcgtcgaccacgcgtccggaagattcgtaggccacccaggaaaatacaataaactttttgaccggtggagactggaggaatgtcatcctagtggctgtttgatagacctctgcctccagatgggtgtcatcatgtttttgaagcaaatatggaacaacttcatggaactaggatacccgttgatccagaactggtggtcacgacataaaatcaagcggggaatacatgatgcttccatacctcagtgggaaaatgattggaatctgcagcccatgaaccttcatggactgatggatgagtacttagaaatggttttgcaatttggttttaccaccatctttgttgcggcttttcctctagcccctcttttggctttgttaaacaatatcattgaaatcaggctggatgcatacaaatttgtcactcaatggcggaggcctttgccagcccgagcaactgacataggtatctggcttggaattctcgaaggaatcggtatattggctgtgatcaccaatgcatttgtaattgctattacttctgattacatcccacgttttgtttatgaatacaaatatggcccctgtgcaaatcatgtagaaccaagtgaaaattgcttgaagggatatgtcaacaatagcctatccttctttgacctgagtgagcttggtatgggaaaatctggttattgcaggtacagagactacagaggcccgcccttggagttccaaacccctatgagtttactttacaatactggcatatccttgctgctagaatggcccttcattattgtgtctgagcaccttgtcttcgggattaagtcattcatcgcatacctgattccagacgtaccaaagggtctacatgaccgaatacgacgagagaagtacttagttcaagaaatgatgtatgaggctgcactggaacattcgcataacaccggcagacaagtggtca

SEQ ID NO: 96730 - DNA, 933 bp, Homo Sapiens
  misc_feature (857)..(857): n is a, c, g, or t
taacatgtgattttgcttaagaagttacgtggctacaattaaagttgaagataatttctgctagtgccctgctaaactgtgcttgtacacatagatgataaaatagagatttctcaactagctttggtaaatggggagaaatggaacagatagctgaaatgtactgataatttgtttggggatactattgatggtctttatagaatccatgaatacctacatccccccaagggccacccacctttttttatgaagtctctaagaaaggtagatgtatgtaaaagagaaagtggcaaataagaaacgaaatgccactttattataattaggtgggtttttgcccgatactccagtgataagctctttggttattttggatggagacatgggcttagaacacatagcatggaaaggcacaaggagctttacttacccttcaagcccagatgtaaagctgtggttgcctcagtagttccaagtaaaaagagacttgagagactaacacactagagcatgcatttgagaagaatagagcaagattaacactcggggctcctcctatgtataatcattgcctcctatgtaggatcattacttcatccagctgactgttttagctttcaaaggtaagatgaagaaagaggtggctatgtaggcaaacttgtaatacaccacagttgtcctgcccactggtatatgcactcttggacagtcttaaaacctgactttccctagatcttccgacttactttttacatgtgaacttcttctgggccacactggggccttccaactgtgggatcaaatctatttcagactctttactcagttttctcatctttcaattgatgtattangcaagatggatctgtgggtccttctatctctgatggatgttatattatcataaataacatttgctttctataaagc

SEQ ID NO: 96731 - DNA, 942 bp, Homo Sapiens
  misc_feature (789)..(789): n is a, c, g, or t
ggaccggtccggaattctcgggatatcgtcgacccacgcgtccggagcttcagtgcctaccagacagcctttatctgccttgggctcctggtgcagcagatcatcttcttcctgggaaccacggccctggccttcctggtgctcatgcctgtgctccatggcaggaacctcctgctcttccgttccctggagtcctcgtggcccttctggctgactttggccctggctgtgatcctgcagaacatggcagcccattgggtcttcctggagactcatgatggacacccacagctgaccaaccggcgagtgctctatgcagccacctttcttctcttccccctcaatgtgctggtgggtgccatggtggccacctggcgagtgctcctctctgccctctacaacgccatccaccttggccagatggacctcagcctgctgccaccgagagccgccactctcgaccccggctactacacgtaccgaaacttcttgaagattgaagtcagccagtcgcatccagccatgacagccttctgctccctgctcctgcaagcgcagagcctcctacccaggaccatggcagccccccaggacagcctcagaccaggggaggaagacgaagggatgcagctgctacagacaaaggactccatggccaagggagctaggcccggggccagccgcggcagggctcgctggggtctggcctacacgctgctgcacaacccaaccctgcaggtcttccgcaagacggccctgttgggtgccaatggtgcccagccctgaggncagggaaagtcaaccccccctgcccatctgtgctgaggcatgttcctgcctaacaatcctcttccctccccgggttctcctcccagcatcacaccagccatgccagccagcaggcctccgggatcactgtggttggggtggaaggcctggtcg

SEQ ID NO: 96732 - DNA, 1536 bp, Homo Sapiens
ccgtgatcctcagtcccccttacccgtgccctcctactggctgggcaatgaggagacaggagcgtgcctaaaaggaccatggtttgttggataacaaggtaggaggatgaggaaaacaagaagggagctggagattggccaaggagcaacttcagaaggacaggagagcacgagcattaggaggaagccaaggcagcagcagagggaagccagttaagtcatgagagaccaacggcagtgatgtttctggcgcagatgcagaagccagagggaggcccctccaaccttccctggtgaggcaggctgggagcagagaaagggttaagagagccaaccccagacagagaacctcagaagacagggccgcaaggacaggcagggggaatggtctttctctgtttctcttggctagtggggctgcggcaaggatcaatgttctgaaggttcagagacagggcaagaaaagggcagggggctggcaggagggctgcatggccccgaagcagctcagctctttggtatgacactggcggtgtgtggggcatccggctcactcctcctccacactgcgggcccccttggccgctcgcctctggcgccagcgcagctcctccacctggcgttccagccctcgcaccttggcctcgagttgggccccagaggctcgggagccagtgagccggctcagcagggcgtagaggatcagcaaggccaggagtagcagggcccgggtggaagggtcgggcaccgacctcatcagggccacgaagccggccaggaagatgacaagcttcaggccccacaggatccgccccagcaaggccaagaccaagccgaggagcagagacagcagccagtagacgaccagggcccctgctccccacagcaggaaggtctggacctggccagggctgagcttcaggccctgggcgaggtaatcaccagctagtcccaaggcattcagcagctgtgcggcgatcccagacagagcaaagaaggccacagaaatggctgatgagatggcccacaacacttgggacgaagactctgacaccaggtgcatggtctctggcccaatccaggcatccagtgtccctcgcacagatcgacctatctgggtcaagacatcaactggggcttctctcttctgttggcctggtggtgcaaagtctcgacgggactgggccaatgctgagtggaggaggataagggccactaggaccatcagaatggctttgaacacatgctttccccatggtgaactgatgctggaggctgccatgactgggtctttctcaggccactgctatccttcacgtgcgacttcgctgaaacgcgccaccaaacccgcgcctcaactcggggcgatggtttaccttctccgcatgcgcaaggcgggatgagctcggagactagccggccttcctcacaatcgaagcctgtgccgggagcgcatgcgccccgctttatctattgcgtttctttttccccccacaagcattcccaccgagagaagaatgggatcggaagttccag

SEQ ID NO: 96733 - DNA, 855 bp, Homo Sapiens
cacttcttgctccccttgttcaagtccccttgtcttaaagagcctcctgcgtcctctgggcttttcagggatgagtggatttacaaatgccggccctgttattttcagaatcacgagccaccagttacaaatgttgcatccaaaacaggacaaaattcatcaccatgtaactggaacatttgcatcttcacttccatggatgtcttcccgacccagctaacatggccactgaacttaatgtcctgttctgggctcaagctcttcttacacatatcaatcttatccaccagggctgtaactatcgataaaggagacatcttggcggagtggattttgttgtgcatgtaacaaataagaactcccaagctgtcaagatcctcaagaatcctgccaaatcttacggtgttttgaacagtcaaatatttctctcgtaattcaggctcactgcccaaaggcaagagaacttcaatataactgtccttcattctcctaggaggcagtccatcctgtgatttagccaagaaactatgaagtaatttcctttcttccattgccttcacatggtctctccagtttgtggatgctcctactatctcccgcaacttatctcgaacttcatgaatgtggaagattccctgtttcttggggttctggggtccttgagtcagtcctcttccaggagtaagctgccctttgcccaaggcacaaagccgcagtgctgcccgcctcattgcgctaggctgccgtgcgcgcgatggagaaccgggccccgcgcgctagtcggcggagggaaactgaggcgataaaagacgcacgagtaccagaccgcgcccttgctgaggacagcccgggagc

SEQ ID NO: 96734 - DNA, 899 bp, Homo Sapiens
ccgctgtccggctcccgggctgtcctcagcaagggcgcggtctggtactcgtgcgtcttttatcgcctcagtttccctccgccgactagcgcgcggggcccggttctccatcgcgcgcacggcagcctagcgcaatgaggcgggcagcactgcggctttgtgccttgggcaaagggcagcttactcctggaagaggactgactcaaggaccccagaaccccaagaaacagggaatcttccacattcatgaagcatgttcatctatacatgtgaatcatgttcgagataagttgcgggagatagtaggagcatccacaaactggagagaccatgtgaaggcaatggaagaaaggaaattacttcatagtttcttggctaaatcacaggatggactgcctcctaggagaatgaaggacagttatattgaagttctcttgcctttgggcagtgagcctgaattacgagagaaatatttgactgttcaaaacaccgtaagatttggcaggattcttgaggatcttgacagcttgggagttcttatttgttacatgcacaacaaaatccactccgccaagatgtctcctttatcgatagttacagcccctggtggataagattgatatgtgtaagaagagcttgagccccagaacaggacattaagttcagtggccatgttagctgggtcgggaagacatccatgggaagtgaagatgcaaatgttccagttacatggtgatgaattttgtcctgtttttggatggcacatttgtaatggggggctccgtgattctgaaaataaaggggccggcaatttgtaaaatccactccatccctggaaaccccagagggaagagggagctcttttaaaccaagggggaatggacccattaattttgttt

SEQ ID NO: 96735 - DNA, 1175 bp, Homo Sapiens
  misc_feature (78)..(112): n is a, c, g, or t
aaggatgatagatcactataggggctagctcgcgctgcgaacgacgagcgcagcgagtggtgagcgaggaagcggcgnnnnnnnnnnnnnnnnnnnnnnnnnnnnnnnnnnncagtcgacggtaccggacatatgcccgggaattcggccattacggccgggggttctagggcaggcgggcgggtttgagagggcggggattgcgactctcacaccctgagctccggtgctcctttcctaactccactggctgcggcatctgtgggaaaagtgtggctgggtcttcgaggagccgcaccaatggcttccgtgctgtcctacgaaagcctggtccacgccgtggccggagccgtgggaagcgtgacagcaatgacagtgttttttcccctggatacagctagacttcgacttcaggttgatgagaaaagaaaatccaaaactacacacatggtgctcctggagatcattaaagaagaaggactcctggcaccatatcgagggtggtttccagtgatttccagtctctgctgctccaattttgtctatttctacacttttaatagcctcaaagcactctgggtcaaaggtcaacattctaccactggaaaagatctggtagttgggtttgttgcaggagtggttaatgtgttgctaacaactccactctgggtggtaaacaccagactgaagcttcaaggagcaaaatttaggaatgaagacattgtaccaacaaactacaaaggtatcattgatgcttttcatcagatcattcgcgatgaaggaatctcggctttatggaatggcacatttccctcattgctgttggtcttcaatcctgccatccagttcatgttttatgaaggtttaaaacggcagcttttaacagaaacggatgaagctttcttccttggatgtgttcatcattggtgcagtagccaaagcgattgccaccacggtgacctatcccctgcagacggtacagtcaattctgaggttagggcgtcatagactaaacccagaaacacagaacattgggaaagtcttcgggaatattctctatcttctttcaccaaagaagtaagacgttttgggaatcatgggactccttacaagggcttggaagccaactgttggagaacaggcctcactggtggcccatgttcttgttatgagaa

SEQ ID NO: 96736 - DNA, 957 bp, Homo Sapiens
  misc_feature (860)..(869): n is a, c, g, or t
cggtccggaattcccgggatatcgtcgacccacgcgtccgagggactgccattagcttgtgaagtctctaggtgccttgttatttcctagtgaagttgcagaatccagggttttttccaggtttgtcttattttatcagcacccacgtccaggcccaacagcttggtaggctggtgaggtccacacacggccaggtctgggagataagggaggaagcagtggcctggaacaccccacctgtctgctatcagcactagacagctcaggctgtcttggaaacgtgtactttgttaactgccttcctgtcctctgatctttgaaagctgtctcgcgttccacagtcagcttgagggcaagagtgggatgctggggacaggtctttcccgtcctgtgggtgagctcctggcatctggctcaggaacatgtgggtccagcaggtgactctgaagctggctgggctgccatctcagacaggacgcaggcctgacaccctcagcttttagctttgtaaacttccctggcgcttggtagaatctggtgtttcttctcttctcagcagatatcattcaagtcacaagaaactgtctggttgagaaagtaatttaaaatatttgaccttctatggtttcttttattttagaaactgtgagagaaaataccgccaatatctgttaggtctagaaaaaaattttcttcccaaaagtgaatgctccggttaattcttcttcatgcaagtgaatggcattttgaaccctctttaacttgaaccggagtgggcccctcattggaatttcccctccttttgtctggaaaatattctttttcccatttggataacagttttttcaccctttggggannnnnnnnnnccctttccaaggttttccctaattcccccaaacgttaacaagtaagggaaaaaaattccacccccaagaccctgcttgaggttttaaa

SEQ ID NO: 96737 - DNA, 968 bp, Homo Sapiens
gctggaccggtccggaattcccgggatatcgtcgaccacgcgtccggcccggctcggagcgacaccagacggagcctccggagttcctccgcccccacctcgccgggtcctggagccgcagtcctcccagctgccctcctcgtggccatggagtgtccacacctgagctccagcgtctgcattgctccggactcagccaagttccccaacggctccccgtcgtcctggtgctgcagcgtgtgccggtccaacaaaagcccttgggtctgtttgacttgttcaagtgtccactgtggaaggtatgtgaatggccatgcaaaaaaacattatgaagatgcacaagtacctttaaccaaccataagaaatcagaaaagcaagataaagttcagcacacagtatgtatggattgcagtagctacagtacatactgttatcgctgtgatgattttgtggttaatgacaccaagctgggactggtacagaaagtcagagaacacttacagaacttggaaaactcagctttcacagctgacaggcataagaaaagaaaacttttggaaaactcaacactaaacagcaagttattaaaagtaaatggaagcaccactgccatttgtgccacaggccttcggaatttggggaacacatgtttcatgaatgccatccttcagtcactcagtaacattgagcagttttgctgttatttcaaagaactgcccgccgtggagttaaggaatgggaaaacagcaggaaggcggacataccacaccaggagccaaggggataacaatgtgtctttggtagaagagtttagaaagacactctgtgctttatggcaagggcagccagaactgcatttagcccagagtccctatttaatggtggtttggaagaatatgccaaactttaaggggctatcaacagcagggacgcccatggaatccatgcgctacctttgggccaccca

SEQ ID NO: 96738 - DNA, 768 bp, Homo Sapiens
ggaccggtccggaattcccgggatatcgtcgacccacgcgtccgcccacgcgtccgagtcattgtcagggtccctggtattggattgttgttctggaaagctctatagagcactgctcagccagtcgtctttattacagcttctgcagaacacttgcttagactgtgagaagatggctgcgttgcactgcgcgctctactgcggtcaaggtgcgcagttcctggaagcccagattattcagtggatttctgagaatgtctctgcctgccattcatttgacctcattcaggaatttataattgcttcttcatactggagtgtatattcagagacaagtaacatggacaaactattgccacattcctcagtgctcacttggaatacagaaattcctggaataactcttgtgacagaagacattgcattgcctcttatgaaggtgctcagctttaagggctactgggaaaaactgaactccaacctagaatatgttaagtacgccaagccacacttccactataacaacagtgtggtcaggagagagtggcacaacctgatctctgaagagaaaacaggaaaaagaaggtctgcggcatacgtgaggaatattcttgataatgcagtaaaggtgatttctaacctagaagcaagaaatttggggcccagattaacacccctccctgcagaggaaaacgccacccagcggctgctcatggggctgatggggtctgacctaaaagaccattttttgagacccctacagggtgt

SEQ ID NO: 96739 - DNA, 1403 bp, Homo Sapiens
  misc_feature (1257)..(1257): n is a, c, g, or t
  misc_feature (1337)..(1337): n is a, c, g, or t
tctatggctcccatcccccggcgtgcgcttgccaaaggaggctggtaccggtccggaattttcaggatatcgtcgacccacgcgtccgtttcccccatctggccgcgctgtggctgtttcaccgctccccggctgggacttggagtcccttatctttccctggtttggtacatgacccggaagcctcggctggccgttgcgtcatccatggcgccggcgcagagcgagaaggaggtgggaacgccgtgaagcaagagcggtcggcagagcggggaggcgaactgcagcagagttcttgctttccggcaggtgatggcgccccccgcggcctagaggtccagcgcccgccgcgagcagcggacagtcctcctgttgtgtccgaccgagagtcctggtgactttgaacatgctggtgccgctagccaagctgtcctgcctggcatatcagtgctttcatgccttaaaaattaagaaaaattatctacctctatgtgctataagatggtcttcaacttctactgtgcctcgaattactacccattatactatttatccccgggataaggacaagagatgggaaggagtgaacatggaaaggtttgcagaagaagcagatgttgtaatagttggtgcaggccctgcagggctctctgcagctgttcgtctaaaacagttggctgtggcacatgaaaaggacatccgtgtgtgtctagtggagaaagctgcccagataggagctcatactctctcaggggcttgccttgatccaggtgcttttaaagaactcttcccagactggaaagagaagggggctccacttaacactcctgtaacagaagacagatttggaattttaacagagaaatacagaattcctgtgccaattcttccagggcttccaatgaataatcatggcaattacattgtacgcttgggacatttagtgagctggatgggcgaacaagcagaagcccttggtgttgaagtataccctggtttatgcagctgctgagggccttcttccatgatgatggtaggtgctaaaaggaactgccactaacgatgtagggatacaaaaggatggtgcaccaaaggcaacatttgagagaggactggaactacatgctaaagtcacaatttttgcagaaggttgccatggacatctagccaagcaactatataagaagtttgatttgagagcaaattgtgaacctcaaacctacgggattggactgaaggagttatgggttattgatngaaagaactggaaacctgggagagtagatcacactgttggttggcccttggacagacataccctatggaggatctttccntctatcattttgaatgaaaagtgaaccccctagtagctccttgggtcttgtggggtgggcctaaaa

SEQ ID NO: 96740 - DNA, 898 bp, Homo Sapiens
  misc_feature (693)..(693): n is a, c, g, or t
  misc_feature (802)..(802): n is a, c, g, or t
  misc_feature (885)..(885): n is a, c, g, or t
ccggaattcccgggatatcgtcgacccacgcgtccggcagccgccgagccggacgtgtccgcgaagatggcgggccggagcatgcaagcggcaagatgtcctacagatgaattatctttaaccaattgtgcagttgtgaatgaaaaggatttccagtctggccagcatgtgattgtgaggacctctcccaatcacaggtacacatttacactgaagacacatccatcggtggttccagggagcattgcattcagtttacctcagagaaaatgggctgggctttctattgggcaagaaatagaagtctccttatatacatttgacaaagccaaacagtgtattggcacaatgaccatcgagattgatttcctgcagaaaaaaagcattgactccaacccttatgacaccgacaagatggcagcagaatttattcagcaattcaacaaccaggccttctcagtgggacaacagcttgtctttagcttcaatgaaaagctttttggcttactggtgaaggacattgaagccatggatcctagcatcctgaagggagagcctgcgacagggaaaaggcagaagattgaagtaggactggttgttggaaacagtcaagttgcatttgaaaaagcagaaaattcgtcacttaatcttattgggcaagctaaaaccaagaaaaatcgccaatcaattatncatcctgactggaactttgaaaaatgggaataggaggtctagacaaggaattttcagatattttccgacgagcatttgcttcccgagtatttcctccagagattgtggnagcagatgggttgtaaacatggttaaggcatcctggtatatggaacccccagggttgtggtaagaactctcttggctcgacanattgggccaagaa

SEQ ID NO: 96741 - DNA, 1164 bp, Homo Sapiens
ttaggtctaggtacgagtgctgggtggtgaatcggcacgagggggtgcgagagacaggtcgggccccctaggcagcgagccgcagcgcaatcccggcgctcgcccaaggaccctggaagctaccgttaccccgccgggcagcgtgggcgccatgagcagctcgggactgaattcggagaaggtagctgctctgatacagaaactgaattccgacccccagttcgtacttgcccagaatgtcgggaccacccacgacctgctggacatctgtctgaagcgggccacggtgcagcgcgcgcagcatgtgttccagcacgccgtgccccaggagggcaagccaatcaccaaccagaagagctcagggcgatgctggatcttttcttgtctgaatgttatgaggcttccattcatgaaaaagttaaatattgaagaatttgagtttagccaatcttacctgtttttttgggacaaggttgaacgctgttatttcttcttgagtgcttttgtggacacagcccagagaaaggagcctgaggatgggaggctggtgcagtttttgcttatgaaccctgcaaatgatggtggccaatgggatatgcttgttaatattgttgaaaaatatggtgttatccctaagaaatgcttccctgaatcttatacaacagaggcaaccagaaggatgaatgatattctgaatcacaagatgagagaattctgtatacgactgcggaacctggtacacagtggagcaacgaaaggagaaatctcggccacacaggacgtcatgatggaggagatattccgagtggtgtgcatctgttggggaaatccaccagagacattcacctgggaatatcgagacaaagataaaaattatcagaaaattggccccataacacaccttggagttttacagggaacatgtcaagccactcttcaatatggaagataagatttgtttagtgaatgaccctaggccccagcacaagtacaacaaactttacacagtggaatacttaagcaatatgggtgggaggggagaaaaactctatacaacaaccagcccattgacttcctgaaaaaagatggttgctgcctccatcaaaaatgaaaaagggcttggggggtttttggctggtgatggtgggaaaacacttcaatagc

SEQ ID NO: 96742 - DNA, 771 bp, Homo Sapiens
gggaggaatatgttccttcaaaggggaaatgcaaaaatgttttgtttcagtggggaacccgtttacccctttcctttgtttacctgggataagtggtccaacagtggggaagtttgagggtttaggatttgccattttcaggggtggaaagcaattaccataggtttcaaaaagggtttcttttttcttccagaataagaaagaaaccttggatgggaggttcaagtttttcccctttttaacaaagaggtttcccttaccattcggtggcccgtggaagaagattaagggcagaaacgggttaaatatgccaaggtgtggggacatgagcggggagaagtggagaagccactcacacattgagatccacaccagggacccattcagggacaagagtgaggacacagaacggggtggtcagaaatgactcggggctctgaggtagaggactaaaggtcacgtagaccccactccttggagagaacgtggcaggtgaactgagcaatcgaatccagcctcaactaaattggtaattggggttgaccgtgcacaggcccaaaactccaaatggaacacatgttctaacacatcgttcagtgagacaccacgaaaaagatgactgaaagttcaaaagtcctaagtgtaggcacttaagtttatgggaaatttcggtgttagaggatcatagcaaattagtttaagccattcgattatatatagcacatggtccgtacctttgttttaaaaacaacggtacgacatgtgatcctc

SEQ ID NO: 96743 - DNA, 1771 bp, Homo Sapiens
tggccggtacaccatcaccatcaagtatggcggtgatgagatcccctactcgcccttccgcatccatgctctgcccactggggatgccagcaagtgcctcgtcacagtgtccattggaggccatggcctgggtgcctgcctgggccctcgaatccagattgggcaggagacggtgatcacggtggatgccaaggcagccggtgaggggaaggtgacatgcacggtgtccacgccggatggggcagagctcgatgtggatgtggttgagaaccatgacggtacctttgacatctactacacagcgcccgagccgggcaagtacgtcatcaccatccgcttcgggggtgagcacatccccaacagccccttccacgtgctggcgtgtgaccccctgccgcacgaggaggagccctctgaagtgccacagctgcgccagccctacgctcctccccggcccggcgcccgccccacacactgggccacagaggagccagtggtgcctgtggagccaatggagtccatgctgaggcccttcaacctggtcatccccttcgcggtgcagaaaggggagctcacaggagaggtgcggatgccctcggggaagacggcacggcccaacatcaccgacaacaaggacggcaccatcacggtgaggtatgcacccactgagaaaggcctgcaccagatggggatcaagtatgacggcaaccacatccctgggagccccttacagttctatgtggatgccatcaacagccgccatgtcagtgcctatgggccaggcctgagccatggcatggtcaacaagccagccaccttcactattgtcaccaaagatgctggagaagggggtctgtcactggccgtggagggcccatccaaggcagagatcacctgtaaggacaacaaggatggcacctgcaccgtgtcctatctgccgactgcgcctggagactacagcatcatcgtgcgcttcgatgacaagcacatcccggggagccccttcacagccaagatcacaggtgatgactccatgaggacctcacagctgaatgtgggcacctccacggacgtgtcactgaagatcaccgagagtgatctgagccagctgaccgccagcatccgtgccccctcgggcaacgaggagccctgcctgctgaagcgcctgcccaaccggcacattgggatctccttcacccccaaggaggtcggggagcacgtggtgagcgtgcgcaagagtggcaagcatgtcaccaacagccccttcaagatcctggtggggccatctgagatcggggacgccagcaaggtgcgggtctggggcaaggggctttccgagggacacacattccaggtggcagagttcatcgtggacactcgcaatgcaggttatgggggcttggggctgagtattgaaggcccaagcaaggtggacatcaactgtgaggacatggaggacgggacatgcaaagtcacctactgccccaccgagcccggcacctacatcatcaacatcaagtttgctgacaagcacgtgcctggaagccccttcactgtgaaggtgaccggcgaggggccgcatgaaagagagcatcacccggcggagacaggcacttccatcgccacatcggcagcactgtgacctcacctcaaatccaggaaactggtccgaggtgtcgcccagagcgctgaacgcaccttcaagcacagcaccctacccgcaagacgaggaattccaaccggccggaacaacctgtgggggagaatcccg

SEQ ID NO: 96744 - DNA, 1015 bp, Homo Sapiens
ggttgaaaaacaggtggacggtccggattcccgggatatctcaccccgcgtccgaagcgcttccgaaagaagtcttgggaggtgtaccagggagtgtgccagaaagggggctgcaggtcagaacccattcagatggagaactccatgggcacactgcggacctccatctccgtggaacgccagattcacaaactgcaggactgggcagggagcagacagtgagcaaacgccagcagggctgctgtgaatttgtgtaaggattgagggacagttgcttttcagcatgggcccaggaatgccaaggagacatctatgcacgaccttgggaaatgagttgatgtctccggtaaaacaccggagactaattcctgccctgcccaattttgcagggagcatggctgtgaggatggggtgaactcacgcacagccaaggactccaaaatcacaacagcattactgttcttatttgctgccacacctgagccagcctgctccttcccaggagtggaggaggcctgggggcagggagaggagtgactgagcttccctcccgtgtgttctccgtccctgccccagcaagacaacttagatctccaggagaactgccatccagctttggtgcaatggctgagtgcacaagtgagttgttgccctgggtttctttaatctattcagctagaactttgaaggacaatttcttgcattaataaaggttaagccctgaggggtccctgataacaacctggagaccaggattttatggctcccctcactgatggacaaggaggtctgtgccaaagaagaatccaataagcacatattgagcacttgctgtatatgcagtattgagcactgtaggcaagagggaagaaagagaaggagccatctccatcttgaaggaactcaaagactcaagtgggaacgactgggccactgcccaccaccaaaaagctgttcgacgagacggtcgagcagggtgctgtgggtgatatggacagcagaagggggagaccaa

SEQ ID NO: 96745 - DNA, 1107 bp, Homo Sapiens
  misc_feature (183)..(233): n is a, c, g, or t
  misc_feature (862)..(893): n is a, c, g, or t
acagggccctccggcccagccggggccggggcggcaacctgcccccctgggctcgggggggctggcgaggcggcagcttggacaggatctggccgcgatgggcctcgatgggcttccggttcaaccagctccatgtcgatagtcttgcaggtggatagtcccgcggccggccggccaggcgtnnnnnnnnnnnnnnnnnnnnnnnnnnnnnnnnnnnnnnnnnnnnnnnnnnnggagggcggcatgggggaggcggcgccccccggcactgccgagagcgcgaacagggctggtgtggtggggagaccccgcccctgcaggggctgggggtctcccggcaaaaggtaggagggcctcgagggaaagctgaggtcctcagggagaagggcgcagtggtggaggggaggcttggaccgggggtgtctcagtatcccacggaaataacctagatgggcgcgatctggtaccagaaggtgggtggtcttgaataggggatctgtggcaggtcggagagagatccgtctcctggaggagaaagggtctaggatgcgcgggggctcaggagacaggccggggatgaaggcggcgtgcagggggtgcgcccgaggtctggggaaaagtctttgcgggaggccgggtcggcgactcccgagggctggtccggaatgggggcgcctgagggacgccgtgtagggggcagggagggagcaagcgtccccggcggcaaagggaggcggtctggggtccccaagtcctgcctcctcgcggggcagcgtcgcgccaagaggtccccgcgcctccggctcccagcggcaacggaaaagtctcaaaagtttttttcctcttctcccgaccagctcgnnnnnnnnnnnnnnnnnnnnnnnnnnnnnnnncgcagtggcgggggcggcggcggctcgtctcagactctggggcctcaggctgctcctcggcgactccatcctccgatccgaaccacttgccgcccccgtgggcgcatcgcagccggggcaaagcccccgacgggacgtcccggccgctcagtcgactaatcccagaaatccggccgcaccaccgctaaacaacatgaacccggcgcaacccgcc

SEQ ID NO: 96746 - DNA, 762 bp, Homo Sapiens
  misc_feature (369)..(370): n is a, c, g, or t
cgcgcatctagaccctttctcctccaggagacggatctctctccgacctgccacagatcccctattcaagaccacccaccttctggtaccagatcgcgcccatctaggttacttccgtgggatactgagacacccccggtccaagcctcccctccaccactgcgcccttctccctgaggacctcagctttccctcgaggccctcctaccttttgccgggagacccccagcccctgcaggggcggggcctccccaccacaccagccctgttcgcgctctcggcagtgccggggggcgccgcctcccccatgccgccctccgggctgcggctgctgccgtgctgctaccgtgctgtggctactggtgctgnnacgcctggccggccggccgcgggactatccacctgcaagactatcgacatggagctggtgaagcggaagcgcatcgaggccatccgcggccagatcctgtccaagctgcggctcgccagccccccgagcccaggggaagtgccgcccggcccgcttgcccgaggccgtgctcgccctgtacaacagcacccgcgaccgggtggccggggaaagtgcaaaaccggagcccgagcctgaggccgactactaccccaaggaggtcacccgcgtgctaatggtggaaacccacaaccaaatctatgacaagttcaagcagagtacacaccagcatatatatgttcttcaacacatcagagctccgagaagcggtacctgaaccgtgttgtctccgg

SEQ ID NO: 96747 - DNA, 1157 bp, Homo Sapiens
  misc_feature (163)..(213): n is a, c, g, or t
  misc_feature (910)..(982): n is a, c, g, or t
cactgcgcccttctccctgaggacctcagctttccctcgaggccctcctaccttttgccgggagacccccagcccctgcaggggcggggcctccccaccacaccagccctgttcgcgctctcggcagtgccggggggcgccgcctcccccatgccgccctccnnnnnnnnnnnnnnnnnnnnnnnnnnnnnnnnnnnnnnnnnnnnnnnnnnnacgcctggccggccggccgcgggactatccacctgcaagactatcgacatggagctggtgaagcggaagcgcatcgaggccatccgcggccagatcctgtccaagctgcggctcgccagccccccgagccagggggaggtgccgcccggcccgctgcccgaggccgtgctcgccctgtacaacagcacccgcgaccgggtggccggggagagtgcagaaccggagcccgagcctgaggccgactactacgccaaggaggtcacccgcgtgctaatggtggaaaccccacaacgaaatctatgacaagttcaagcagagtacacacagcatatatatgttcttcaacacatcagagctccgagaagcggtacctgaaccccgtgttgctctcccggggcaaagctgcgtcctgctgaaggctcaaggtaaaaagtggagcagcaccgtggaagctggtacccaaaattccggcaaccaattccctggcgataaccctcaacaacccggcttggttgggaccccaggggaaatcgcgcccaaagggggttaaccttttttgagtggcccccggaaatttgggccggcaatggggttgaaaccccggggaggggggaaaaatgaagggggttttccccccttatagggccccccctggttcccctgtgggaaaaaaagggggaataaacacccctgggcnnnnnnnnnnnnnnnnnnnnnnnnnnnnnnnnnnnnnnnnnnnnnnnnnnnnnnnnnnnnnnnnnnnnnnnnnatttttttgggggtggaaaacccggggctttttttctcggggtgtttcacgaggggcacaccccccctctggggagaagaggcgcccccccaatttcttgggaagaaaattcccccgcgggacaccccgcgaaaaacccctggggagaaacacaaacataatttgtgtgtgtgcg

SEQ ID NO: 96748 - DNA, 1384 bp, Homo Sapiens
cgactcaggtcctagggtagcgaggcctgggtggcgaatccggcacgaggcctcccgcctggctggcgccggatccgcgagcagcagtgtccacctcacgtagctggccgaggcggtatccagattccgggggtctcgctccttggcatagtggtcgcttaactccagcgccttcccagtgcctcccaaacctctcctcctcctgcccggggctgttctaggaggagcctaaatgtccgcttccccagctgaaggggattgtggtgcgtaaacaggattaactccctcgcccccagctgcgcggatctgcgcggcggcctgcgggccagagcgagccttcgggtgcgtggagggcgcagcactggagcgggggatggggaagcgcgcggccttggagccgtctcttgggcccgcttcctcgccgagtggggaggggggccacagcctaaggagctgctcctcaaaagcccgggcggacggcggcgacggcgcgggttcctagcggcagcctcagctccaccacctccctcaccctccccgcgcttcctctccgcccctcgcgctccagccactcggccgcagccggcgctgtcctccgccccccggagccgccgcgccagaccctcgcccagacatgggggacctgccgggcctcgtgcgcctctccatcgcgctgcgcatccagcctaatgacggcccggtcttttacaaggtggacgggcagcgcttcggccagaaccgcaccatcaagctgctcaccggctcctcctacaaggttgaggtgaagattaaacccagcacgctgcaggtcgagacatatttccattggtggtgtagcttgtcccaactggaactgaagtctaaagagcctgatggggacagagttgtaaataacgggtacatatgacacagaaggtgtgaccccaacgaagagtggagaacggaaacccatccagatcaccatgccgttcacagaccagtgggacctgcgagacacggtggccacgtcaagctctacaattaccacaagcgggatcactgccagtgcgggaaggcccctttctctgacataggagtaatgaagtgcaagccccaaggagcacaacgcagatctgatgtgcggatgacaacaaggcgagtacctacccatgctgcaaaggtgggcccctacgcagacgtgcctaagccagagacacagtcgcataacaagaaaacacccaccctacgcagcagtgacaccagagcggcacgaggcacctatcaaagccgaagggccatgtcccaccacccaattggcgctgtcccccacaacctgcgaaccacacaatggaacgcatactaagccgccagagataactcgagacacaacagatgtgaagcacac

SEQ ID NO: 96749 - DNA, 984 bp, Homo Sapiens
gagtaagaatggtccacgaactcactagacaccagacataatcctctccacgccgcaggtaatgcaagaccaggtaccaggggccacaagccgcaacgtcccaggatcggagcttagaaggatgaaagttgggtgactccggatcagttcctggtcctccggtcctggcactcgtccacgagtttccaggtgtgttgttgaggatgatgccaatgatgaagagcaccaggtcgggcacgcctgatggccgccagcccgtacaggtagttccgggccggcgagcaggggcagtggaaggccaccacagagaacagctcctggctgcccaccgtgcccagtgccaccaggccgttgaaaatgcatcacatccttgctcttgaagaaaagtgacaggaagcggaagttctctgcgatcagggctgccatggcgatagtcgtggcggggtggattgcaggagaggaggcaggaggagacgggattgatggttgctggtggtactaggaaggggcacaggctgggaggcgctggacggcagggtgtggttgtgctattttatccccagctgtggttggcctggtgtttccttgccgtgtccatccacgggtgtcccgaagaacctcctcttccgcagccgtgacccctctcctatccagcagcctcccagcagctccgctccaccccgcctgcctagcaacaggaagccctggtgagaccaaaggctcagcggtgccaccagctcatccggagattattctgccttggtctgggctgtagcgacgctggcaacctggggccagctgtgggcacttgtggccatggcctcctcggggccggactctccaagtggcctccaggaggcggtgcagggcagcggcggcctccgccgttccctcccgcttttcttctgcacgggggcctggggctggtggcggcttcagactaatctaactccagaaaagagagaagaaaacagtgggatggag

SEQ ID NO: 96750 - DNA, 959 bp, Homo Sapiens
  misc_feature (174)..(289): n is a, c, g, or t
  misc_feature (695)..(695): n is a, c, g, or t
  misc_feature (811)..(811): n is a, c, g, or t
ggattcccgggatatcgtcgaccacgcgtccggtgcggcggatgtacggatgattcagtggctggcaggaagcccgacctgcccgcccgccagtgtcagtggtgttggcatcagcttgggcaggtgtgcgggctcaggatggggcggccgtggtgaggaaccctggactctcannnnnnnnnnnnnnnnnnnnnnnnnnnnnnnnnnnnnnnnnnnnnnnnnnnnnnnnnnnnnnnnnnnnnnnnnnnnnnnnnnnnnnnnnnnnnnnnnnnnnnnnnnnnnnnnnnnncaggcatcacaagaggcaacaccaggagccaacatgagctcggggactgaactgctgtggcccggagcagcgctgctggtgctgttgggggtggcagccagtctgtgtgtgcgctgctcacgcccaggtgcaaagaggtcagagaaaatctaccagcagagaagtctgcgtgaggaccaacagagctttacggggtcccggacctactccttggtcgggcaggcatggccaggacccctggcggacatggcacccacaaggaaggacaagctgttgcaattctaccccagccctggaggatccagcatcttccaggtaccagaacttcagcaaaggaagcagacacggggtcggaggaagcctacatagaccccattgccatggagtattcaacctggggggcggntctcgaagcctccagaaggtgaggcgaaggacaagcccgaaggggaaggaaagtggtgtgggagctcagggcagaagccatacctcccagcaggaaaaggaggttgggccctgggnttccgatgatgatgcccatttcctaccaaaaatgtggctcatttgcaagccgaaaacccccgaaaacgggggcccaccagggagggcataggggggccctctgccaaaggggaccctcaccctgtcacttgggccctgaaaaatgggc

SEQ ID NO: 96751 - DNA, 863 bp, Homo Sapiens
  misc_feature (138)..(253): n is a, c, g, or t
ggcggatgtacggatgattcagtggctggcaggaagcccgccctgcccgcccgccagtgtcagtggtgttggcatcagcttgggcaggtgtgcgggctcaggatggggcggccgtggtgaggaaccctggactctcannnnnnnnnnnnnnnnnnnnnnnnnnnnnnnnnnnnnnnnnnnnnnnnnnnnnnnnnnnnnnnnnnnnnnnnnnnnnnnnnnnnnnnnnnnnnnnnnnnnnnnnnnnnnnnnnnnncaggcatcacaagaggcaacaccaggagccaacatgagctcggggactgaactgctgtggcccggagcagcgctgctggtgctgttgggggtggcagccagtctgtgtgtgcgctgctcacgcccaggtgcaaagaggtcagagaaaatctaccagcagagaagtctgcgtgaggaccaacagagctttacggggtcccggacctactcctttggtcgggcaggcatggccaggacccctggcggacatggcaacccacaaggaagggacaagctgttgcaattctaccccagcctggaggatccagcatcttccaggtaccagaacttcagcaaaggaaaggcagacacgggtccggaggaagcctacataagacccccattgccatggagtattacaactgggggcggttctcgaagccccaagaacgatgatgatgccaattcctacggagaattgtgctcattagcaaggcagaaaagcacaaaagaccaggtgcccagcaggagggcattaggtggcctctgcagaggggacctcaggctgtcactgggcctgaagcactggccccaattctggtctctgtgcctctgcttcccggaaaaccatc

SEQ ID NO: 96752 - DNA, 1230 bp, Homo Sapiens
  misc_feature (895)..(895): n is a, c, g, or t
taggctaggtagcgaggctgggtgtagaattcggcacgagggtggatcggtgggtttatctcaaggcctgagtagccggtaacaaacgagggttcccgggattggaccgacgcagccatgcctctgcgacttgatatcaaaagaaagctaactgctagatctgatcgagttaagagtgtggatctgcatcctacagagccatggatgttggcaagtctttacaatggcagtgtgtgtgtttggaatcatgaaacacagacactggtgaagacatttgaagtatgtgatcttcctgttcgagctgcaaagtttgttgcaaggaagaattgggttgtgacaggagcggatgacatgcagattagagtgttcaattacaatactctggagagagttcatatgtttgaagcacactcagactacattcgctgtattgctgttcatccaacccagcctttcattctaactagcagtgatgacatgcttattaagctctgggactgggataaaaaatggtcttgctcacaagtgtttgaaggacacacccattatgttatgcagattgtgatcaaccccaaagataacaatcagtttgccagtgcctctttggacaggactatcaagggtgtggcagttgggctcttcgtcaccaaacttcactttggaaggacatgagaaaggcgtgaattgcattgattactacagtggtggggacaagccatacctcatttcaggtgcagatgaccgtcttgttaaaaatatgggattatcagaaataaaacatgtgtgcagacactggaaggacatgcccaaaaatgtgtcttggtgccagctttcatcctgagttgccaatcattatcacaggttcagaagatggaacagtacgtatttggcattncagcacctaccggcttgagagcacactgaattatggaatggagagggtatggtgcgtggccagtctaagagggtcaaacaatgtcgcttttgggctatgatgaaaggagcatcattggtaaagctgggtcggaaggaacctgccatgtccatgaatgccaatggaaagataatttgggccagcattcagagtcccgcaagccaacctaaaagcattgggaaatgctggaattaaagatggggaacgaatgcccctggcaataaaggatatggggcagttgtgaaatatccccctccaacatttccgcacaatccctaatgggggggttgtgggga

SEQ ID NO: 96753 - DNA, 1071 bp, Homo Sapiens
taggctcgacagagaggccacatggggggcgggaccccggctacatgggtggaaaagtaaacgcccgaacaaggcagaaaggaggggaaaaggccccgaccatggggagggccccctcgggggaaggatccggatggtggcctgcccagtcttggaaggcgcggaaggttgccccacaagggaagccacccggttccgagggctttcccgctagggggggcgctcgcacaaggcagggccccctccgggatgtgccggaggcccagcctgccctggtgggtgcggttccgtgggtgaggcccgtggtgcccgcgttcccgtggccgttctggggcagcaacagcgggtgcgcgatgtgcgggtgatgtccgaagacggtcccccagggaatgtgtccgaggcccgcgtgggcgccgctcgcggcttcccgctgggaagcgtagttgttgagatgcgaaaccagtcgaactcgaagcgggtcagaggcatgctagtccttcaatgatgctcagataacgcgcaacttctgccaggcattcccgaaatcccaaactccgatagtccatagcaagggcgtgcgcgtcaaagtaacctttccctcctgccgtatgcagcattttcaggtgatccacggtcatctgcaggatctcggctttttctagcttagcagatccctgcttctcaaaagcactgggtaccagccttctcagctcagacaaactgttattgatccggtctcgtcggcgcttctcaattattcctctccgtctttttctggccaaaatctgggaagatgtagttggggacatggaacctagagccgaactcaagtttccattctcgtccgcactctccttctccacctcgatggtctcgtccagctcgctgtccgaggagctgtactcggggtgagctcgcttcatgctggctcctgggggttcctggggagggtcggcgcaggcgggcagggaggagttaactacagcggcgcctctccgctctcggatgcttgcgttccgccctcgtgccatttaaccacgcctatcatagccaatcttttgtcgcttcgct

SEQ ID NO: 96754 - DNA, 984 bp, Homo Sapiens
  misc_feature (929)..(929): n is a, c, g, or t
accggtccggaattcccgggatatcgtcgaccacgcgtccgagctgaccctgatcagggccgagttgtctcggcggcgctgccgaggcctccacccaggacagtccccctccccgggcctctctcctcttgcctacgagtcccctctcctcgtaggcctctcggatctgatatcgtggggtgaggtgagcaggcccggggagggtggttaccgctgaggagctgcagtctctgtcaagatgatagaggtactgacaacaactgactctcagaaactgctacaccagctgaatgccctgttggaacaggagtctagatgtcagccaaaggtctgtggtttgagactaattgagtctgcacacgataatggcctcagaatgactgcaagactaagggactttgaagtaaaagatcttcttagtctaactcagttctttggctttgacacagagacattttctctagctgtgaatttactggacagattcctgtctaaaatgaaggtacagcccaagcaccttgggtgtgttggactgagctgcttttatttggctgtaaaatcaatagaagaggaaaggaatgtcccattggcaactgacttgatccgaataagtcaatataggtttacggtttcagacttgatgagaatggaaaagattgtattggagaaggtgtgttggaaagtcaaagctactactgcctttcaatttctgcaactgtattattcactccttcaagagaacttgccacttgaaaggagaaatagcattaattttgaaaagactagaaagctcaacttgaaggcatgtccattgcagggatcatatttttcctaaagcaaaaggctttctggggttgggcacttggcctatccatttggaatttagaggatcccaagccccagaaagtggtggttaaaaggttaacccnaaaagggaattaagaaattgtgcttttcacgaaaaacacttttcccagagaatat

SEQ ID NO: 96755 - DNA, 1095 bp, Homo Sapiens
  misc_feature (1000)..(1000): n is a, c, g, or t
gtggtacgcgtcgggttcccgggatatcgtcgaccacgcgtccgccgagctgaccctgatcagggccgagttgtctcggcggcgctgccgaggcctccacccggggagggtggttaccgctgaggagctgcagtctctgtcaagatgatagaggtactgacaacaactgactctcagaaactgctacaccagctgaatgccctgttggaacaggagtctagatgtcagccaaaggtctgtggtttgagactaattgagtctgcacacgataatggcctcagaatgactgcaagactaagggactttgaagtaaaagatcttcttagtctaactcagttctttggctttgacacagagacattttctctagctgtgaatttactggacagattcctgtctaaaatgaaggtacagcccaagcaccttgggtgtgttggactgagctgcttttatttggctgtaaaatcaatagaagaggaaaggaatgtcccattggcaactgacttgatccgaataagtcaatataggtttacggtttcagacttgatgagaatggaaaagattgtattggagaaggtgtgttggaaagtcaaagctactactgcctttcaatttctgcaactgtattattcactccttcaagagaacttgccacttgaaaggagaaatagcattaattttgaaagactagaagctcaactgaaggcatgtcattgcaggatcatatttttctaaagcaaagcccttctgtgttggccattggctatcatttgcattagagatccaagcacagaaagtgtgtagagttaacaaaaggaatagaatgtcttcagagacattccaagataaatggcagagatctgaccttctgggcagagcttgtatcccaatgtttaactgaatattcatccaataaggtgttcccaacccaaatggttccgaagttgaaaatgggattggtttctggggcgtacctggccgggcaaatttgaagccgtancctacctaccagaagtaaacttccccttttccaaccaaatttcctggaaaatggggcccccttttaacctggggattattttacccggcgccccc

SEQ ID NO: 96756 - DNA, 939 bp, Homo Sapiens
ggtccggaatttcaaaatcgtcgaccacgcgtccgctaacactctgtcccaggggtctcacctcaacttcttcacattaaaatcatcagtgggcagaactttcccaagcccaaaggatcaggtgccaaaggtgatgtggtagatccttatgtctatgttgaaatccatggaatccctgctgattgtgcagaacaaaggacaaaaacagtgcaccagaatggagacgctcccatttttgatgaaagctttgaatttcaaatcaacctgcctgaactggccatggtgcgctttgtagtgctggatgatgactacattggggatgaattcatcggccagtacacaattccctttgaatgtttacagacgggctaccgccatgtccccctgcagtccttaactggagaggtccttgcacatgcttctttatttgtccacgtggctattactaaccgaagaggaggagggaagcctcataaaaggggcctttctgtgagaaaagggaagaaatccagggaatatgcatctttgagaacactgtggattaaaaccgtggatgaggtattcaagaatgcccagccccctatacgggatgccacagatctgagagaaaacatgcagaatgcggtggtgtcattcaaggagctgtgtggcctctcctctgtggccaatctcatgcagtgcatgttggcggtgtctccccgctttctggggcccgataacacacccctagtggtcctaaatctcagcgagcaataccccacaatggagctggcagggaattgtggccggaggttctgaaaaaaatcgtaacaccttatgacatgatggattcagtccctcaaggggtttgattgaaatgcagatgctgtaatatgaaaaaatcctaccttgtcaaaaggggacccatggaaattccctggaccactttgccccgcatag

SEQ ID NO: 96757 - DNA, 919 bp, Homo Sapiens
  misc_feature (727)..(727): n is a, c, g, or t
  misc_feature (776)..(776): n is a, c, g, or t
  misc_feature (854)..(854): n is a, c, g, or t
ccggaattcccgggatatcgtcgacccacgcgtccgcacgtgttaaatctaacccttattgatctacctggaataactaaagtgcctgtgggagatcagccaccagatatcgagtatcagatcagagaaatgattatgcagttcatcacgagggagaactgtctgattttagctgttactccagccaacactgatcttgcaaactcagatgcgctgaagctagctaaagaagttgatcctcaaggtctgagaaccattggagttatcaccaaactggaccttatggatgaaggaacggatgccagggatgttctagagaacaaactgttgcctcttcgcaggggttacgtgggggtggtaaacagaagccagaaggacatagatgggaagaaggacataaaggcagccatgctggcagagaggaagtttttcctttcccacccggcttacagacatatcgctgaccgaatgggaaccccacacctgcagaaggtccttaatcagcaacttaccaaccacattcgggataccctaccaaacttcaggaacaaactacagggacagttgctctccatagaacatgaagtagaagcctacaaaaatttcaaaccagaagacccaacaaggaagaccaaagcattgctgcagatggttcagcaatttgctgtggactttgagaagagaattgaagggtcaggggatcaagtagataccctggaactctcangtggtgctaaaatcaatcgtatttttcatgaacgctttccttttgagantagtaaagatgggagttcatgagaaaagaattgcgaaagagaaataagctatgcaatcaaaaacatacatgtatcccnggaacgggggttggtttactcccagacatgggcatttggaagcgatagtcaagaaacaagaatgg

SEQ ID NO: 96758 - DNA, 953 bp, Homo Sapiens
ggctggtaccggtccggaatttccgggatatcgtcgacccacgcgtccgttcacgcgtccgcccacgcgtccgaataatggcagatcggaataattgctactatacatttgatgggaagtatgaagccaaacagttgagaactttttaccaaatgtatgataagggcttggtttatcgatcttacaaacctgtgttttggtctccgtcatctaggactgcattggctgaagcagaacttgaatataatcctgagcatgtcagtcgttcaatatatgtaaaatttcctctcttaaagccttctccaaaattggcatctcttatagatggttcatctcctgttagtattttggtctggaccacacaaccttggacgattccagccaatgaagctgtttgctatatgcctgaatcaaagtatgctgttgtgaaatgttctaagtctggagacctctacgtactggcggcagataaagtagcatctgttgcttctactttggaaacaacatttgagactatttcaacactttcaggtgtagatttggaaaatggtacttgcagtcatccattaattcctgataaagcctctcctcttttacctgcaaatcatgtgaccatggcaaaaggaacgggatcggttcacacagccccagctcatggtatggaagactacggtgtagcgtctcagcacaacctgcccatggattgtcttagtggacgaagatggagttttcacagatgttgcaggtcctgaacttcaaacagctgtccttgaaggaggcatgacgtcgtctaacaatcgtcagacggccacaattgtgggaacgacggaactgtgctagtatcgttgacggaggacaagaacccgggtattgggcgcggggctttcccctccctcttcacgcgcagctgtagaacgaattccggcacacaaggatctacaatacaagaccta

SEQ ID NO: 96759 - DNA, 936 bp, Homo Sapiens
ggggacgccccgccttccctgcagcccgggatggcaaggggcgacgaagaggcttctggtgcggtcggtctccggggccagtaaccaccagccgaactcgaatagtggcagataccgggacacggtgctgctgccgcagacgagcttccccatgaagctgctgggccgccagcagccggacacggagctggagatccagcagaaatgtggattttcagaactttattcatggcaaagagaaagaaaagtaaagacagaattttgccttcatgatggacctccttatgcaaacggtgaccctcatgttggacatgctttaaataagattttgaaagacatagccaatcgattccatatgatgaatggctccaaaatacattttgtgcccggctgggattgtcatgggttgcccattgaaataaaagtattatcagaacttggtagagaagctcagaatctttcagctatggaaattagaaagaaagctagatcatttgctaaagcagccattgagaaaccagaaatcagcatttattcgtctggggaataatggcagattggcaataattgctactatacatttgatgggaagtatgaagccaaacagttgagaactttttaccaaatgtatgataagggcttgcgtttatcgatcttacaaacctgtgttttggtctccgtcatctaggactgcattggctgaagcagaacttgaatataatcctgagcatgtcagtcgttcaatatatgtaaaatttcctctcttaaagccttctccaaaattggcatctcttatagatggttcatctcctgttagcatactggtctggaccacacaaccttggacgactcccagccaatgaagctgtttgctatatgccttgaatcaaagtatgctgatgtgaaatgttctaagtctggagacctctacgtacc

SEQ ID NO: 96760 - DNA, 957 bp, Homo Sapiens
  misc_feature (857)..(866): n is a, c, g, or t
gctggtaccggtccggaattcccgggatatcgtcgacccacgcgtccgactttgaccgcttcccggtgcgttaccggcagctgaacccacccggcgtcacgggactttgacgcgtgctctgcgcttgccatgagactcctgggagccgcagccgtcgcggctctggggcgcggaagggcccccgcctccctaggctggcagaggaagcaggttaattggaaggcctgccgatggtcttcatcaggggtgattcctaatgaaaaaaatacgaaatattggaatctcagctcacattgattctgggaaaactacattaacagaacgagtcctttactacactggcagaattgcaaagatgcatgaggtgaaaggtaaagatggagttggtgctgtcatggattccatggaactagagagacaaagaggaatcactattcagtcagcagccacttacaccatgtggaaagatgtcaatattaacattatagatactcctgggcatgtggacttcacaatagaagtggaaagggccctgagagtgttggatggtgcagtccttgttctctgtgctgttggaggggtacagtgccagaccatgactgtcaatcgtcagatgaagcgctacaacgttccgtttctaacttttattaacaaattggaccgaatgggctccaacccagccagggccctgcagcaaatgaggtctaaactaaatcataatgcagcgtttatgcagatacccatgggcttgggagggtaattttaaaggtatcatagatcttattgaggaaacgagcatctattttgatggagactttggtcagattgttcgatatggggagattccgctgaattannnnnnnnnncactgaccaccggcagagctaattgatggggtgccaattcagatgaacagcttggggagatgtttctgggagaaaaatccccctcaattcc

SEQ ID NO: 96761 - DNA, 1758 bp, Homo Sapiens
tggtggtactggtcccggaatctataggatgcaacatggcggctgccgtggtgcagcgcccgggctgagcgacagcaagtgcagcgggctcctaccccgggtgaggggtggcctccgcgtgggatcgtgccctcttcagcccgctcctgtccccgacatcacgtgtattccgcacgtcccctccgcgctgtgtgtctactgagacggggaggcgtgacagggcccgggtcccttctcagtggtgctctgtgcttcagggcaagctccccgtctccgggcgcacttccctcgcctgtgttcggtccatcctcctttctccagcctcctcccctcgcaggtgggatcgtcggtgggaccggagcgcgggcgggcgcggccccccgggaccatggccgggtccgacaccgcgcccttcctcagccaggcggatgacccggacgacgggccagtgcctggcaccccggggttgccagggtccacggggaacccgaagtccgaggagcccgaggtcccggaccaggaggggctgcagcgcatcaccggcctgtctcccggccgttcggctctcatagtggcggtgctgtgctacatcaatctcctgaactacatggaccgcttcaccgtggctggcgtccttcccgacatcgagcagttcttcaacatcggggacagtagctctgggctcatccagaccgtgttcatctccagttacatggtgttggcacctgtgtttggctacctgggtgacaggtacaatcggaagtatctcatgtgcgggggcattgccttctggtccctggtgacactggggtcatccttcatccccggagagcatttctggctgctcctcctgacccggggcctggtgggggtcggggaggccagttattccaccatcgcgcccactctcattgccgacctctttgtggccgaccagcggagccggatgctcagcatcttctactttgccattccggtgggcagtggtctgggctacattgcaggctccaaagtgaaggatatggctggagactggcactgggctctgagggtgacaccgggtctaggagtggtggccgttctgctgctgttcctggtagtgcgggagccgccaaggggagccgtggagcgccactcagatttgccacccctgaaccccacctcgtggtgggcagatctgagggctctggcaagaaatcctagtttcgtcctgtcttccctgggcttcactgctgtggcctttgtcacgggctccctggctctgtgggctccggcattcctgctgcgttcccgcgtggtccttggggagaccccaccctgccttcccggagactcctgctcttcctctgacagtctcatctttggactcatcacctgcctgaccggagtcctgggtgtgggcctgggtgtggagatcagccgccggctccgcactccaacccccgggctgatcccctggtctgtgccactggcctcctgggctctgacccttcctcttcctgtccttgctgcgccggggtagatcgtggcaattatatttcatcttcttggagagacctcccgtcatgaactggcatcgtggccacatctgtgtacgtggtgatcctaccgagttcaccgcgaggcttcgaatcgtggggccctgggggtgtgctgggcccctacatggcgattgaaggggcgatggcccttttggcggttgtccacttggtttggaggggccggccttggccggaggtgacaaggggcctcttcaaa

SEQ ID NO: 96762 - DNA, 930 bp, Homo Sapiens
caaacgattgttccaaaacagtttcacagcaaatgagtagaccccgtatgaagtcatagcatcgaggcatagaatgcccagagtcgagtgcatatccagcagtgttgccggctcttcacaggaggtcccgttccggataagaaaagtatctgtgtcgaaggtggaggagtctgtgggaagggtctgcaaggaccggctcaggcccgtcttcatgtccctgttcagcagtcgtggggagcccatccagttgggttcttcccagctccttttcccccgaatggctcaggcgggtggggctggtaggggcactgatcgcccgatcgtacatccgcttaactgccagcgtggcgatgcccagcatggccgctccacccacccccagcaccagccgggcattggagagcacaaagtcaatggccgtgccaatgccattgtcatccttcttgcctttgcgctcaccagcgcctgccattgctcatctgaggcttcttaatacatctgtaagatggggatggaagagagcaggagtgtctacagaaggcacctttgtcctctttcccttggaggatcctaaatgatcctccccaatttgccgttgagaaagaccaggcccttctccagctgcctctcccgggcctcagcgtcctctagcttctgattttttcggaattcacggcggatggaggcaaagtagaagtctcgatcagtgtagcgaagctgtcggccctggcgcaacagagcccgatagagactcagcaccgcctctcggctccacggggccatgggggactggcaggggctgggtgtcacaccgcaggccgtgcgcgctaccactccgcaggactcgcctctggccgggtacctctccccgggtcacccatcaacatgccccttcactcggacgcgtgggtcgacgatatcccgaaaatc

SEQ ID NO: 96763 - DNA, 1507 bp, Homo Sapiens
aggagcgaggcctgggtggcgattccgacgaggaccagccggggagccgccgccgccgccgccacctctgagcagccggctgggagcgagagccgacagctagtctgcaagccaccgctgtcgccatggggagccgcgtctcgcgggaagacttcgagtgggtctacaccgaccagccgcacgccgaccggcgccgggagatcctggcaaagtatccagagataaagtccttgatgaaacctgatcccaatttgatatggattataattatgatggttctcacccagttgggtgcattttacatagtaaaagacttggactggaaatgggtcatatttggggcctatgcgtttggcagttgcattaaccactcaatgactctggctattcatgagattgcccacaatgctgcctttggcaactgcaaagcaatgtggaatcgctggtttggaatgtttgctaatcttcctattgggattccatattcaatttcctttaagaggtatcacatggatcatcatcggtaccttggagctgatggcgtcgatgtagatattcctaccgattttgagggctggttcttctgtaccgctttcagaaagtttatatgggttattcttcagcctctcttttatgcctttcgacctctgttcatcaaccccaaaccaattacgtatctggaagttatcaataccgtggcacaggtcacttttgacattttaatttattactttttgggaattaaatccttagtctacatgttggcagcatctttacttggcctgggtttgcacccaatttctggacattttatagctgagcattacatgttcttaaagggtcatgaaacttactcatattatgggcctctgaatttacttaccttcaatgtgggttatcataatgaacatcatgatttccccaacattcctggaaaaagtcttccactggtgaggaaaatagcagctgaatactatgacaacctccctcactacaattcctggataaaagtactgtatgattttgtgatggatgatacaataagtccctactcaagaatgaagaggcaccaaaaaggagagatggtgctggagtaaatatcattagtgccaaagggattcttctccaaaactttagatgacaaaatggaatttttgcattattaaacttgagaccagtgatgctcagaagctcccctggcacaatttcagagtaagagctcggtgataccaagaagtgaatctggcttttaaacagtcagcctgactctgtactgctcagtttcactcacaggaaacttgtgacttgtgtattatcgtcattgaggatgtttcactcatgtctgtcattttataagcatatcatttaaaaagcttctaaaaagttatttccccgggaacggggggtcaagcgctaaacccaacaactttgggaggcaagggggagggttacctgtggcaagggtgcgaccaatctggtcacacgtggacccccctcattcaaatgc

SEQ ID NO: 96764 - DNA, 880 bp, Homo Sapiens
gggacaggtgtccaaccaggctggggtccaggaccatgtcatcctcatcatatgagtacacgtcagctccatcagggatgatggtgcccagcttgacagctaacggggtagcctgtctctcggtagtgctccacagcgtggttgttgcccccactgccatcgaagtagcgtcgcccacagaggatggagccatcagtcaggtttgagccacaggttctctctcatgtcacacttggagcacttccagccacagggagggattcgagcagggttgtccaactgcttgaggctgaaggcatgcttagacacctgccgtacttccccatcccatgcctgcacctcctgcttgcgggaggctgagtcggccgacagtagggcctccactgcactggtcacccgatctctgacaatgtcaggcagtccccccagtccatcccgggcaatctccaggtaatctggcaaaatgacaatcttcacatcctcgtctaattcaaacttctcctcgctaaggtcaaacccgccttcaacaccaatagccagccgcgtgggcttcttccggggtgggtctccagtgcctgtagcagggtcctcctctttcgggcgccgggtccgccggaggtgcaagtagactcgctggccggtcttattgaaatgtctctccacatactgtttcccaaagcccagaaacgtgttcatacagatgtagaggcccccctcagactccggcgtgtcgaaggagaaggcgcactcgtctttgtggacccggtctccagccttagggacccggatcgtcggtaatactgacagcagcgcctcctcactcagctccgccatgacaccggcagcagcttctccacacacggcggctcccaccgttccc

SEQ ID NO: 96765 - DNA, 901 bp, Homo Sapiens
gtcgagttacggtagtccaggtgctcctttacaaggccaaagattggaaccagttctatgcacaatagagatgatactgcatgaggaaagcaatcggtggatgataataggagatgtggctattccaaaaatgagtattagtggaaattcatggagatgttgactgctgataattatgaagtcttgtagtacttttgtggcaaagctttccatatccttcaagataacgacgacaggaggagactgccattggctagaagtagtcctttttttgcttagcatttttgggtccgtcttctgtgtgacagtcatataccaactggaaagtgaatccattgaataatgtgtctttctttgggtgacgtgaacactttcctcctctttggattttatatctacacagcagtccatcaactgtgagatcaacttttgcaaaaaatgtttcatatctggacaatctttagcttgcaatgagactacatatggtgtgacattattctgaagggcctctgttagacttccgaatgtcaaatcatgatctgtgacattcacaccaagaacaagagcagcagttggaatttctctgagttttatttgaccgcccaagtctcttgaattcttctggaatccagaatgtgatttttgcagaaattcaatcagattgtcaaacaagtttttatttaattcctcttgtagtcgctcattttcagatttcatctgctgccatatcaactgataagtttcgaatcgaagcttactgtcctcaggctcatttttccctttgttaaaatagtcctctattggcagagagatctttctctttttggagtttggcttaaaaacaagcaacccttagacatcgaggacgtagccatggtcttactgactctgcgtattccag

SEQ ID NO: 96766 - DNA, 893 bp, Homo Sapiens; identical to SEQ ID NO: 5060
  misc_feature (476)..(482): n is a, c, g, or t
  misc_feature (484)..(500): n is a, c, g, or t
  misc_feature (504)..(508): n is a, c, g, or t
  misc_feature (511)..(511): n is a, c, g, or t
  misc_feature (513)..(591): n is a, c, g, or t
  misc_feature (615)..(618): n is a, c, g, or t
  misc_feature (629)..(645): n is a, c, g, or t

SEQ ID NO: 96767 - DNA, 1024 bp, Homo Sapiens
  misc_feature (168)..(488): n is a, c, g, or t
tatgaggcaggtaaaccaatcaaaaacagagttttctgtgtttccatgatagtgttgaagcctaatgacaagccaggtcttacagctgggctcttcagaaaaccaggtttctacatccaaagactgcttttcttttagctgccagattggattgtgaataaaaataannnnnnnnnnnnnnnnnnnnnnnnnnnnnnnnnnnnnnnnnnnnnnnnnnnnnnnnnnnnnnnnnnnnnnnnnnnnnnnnnnnnnnnnnnnnnnnnnnnnnnnnnnnnnnnnnnnnnnnnnnnnnnnnnnnnnnnnnnnnnnnnnnnnnnnnnnnnnnnnnnnnnnnnnnnnnnnnnnnnnnnnnnnnnnnnnnnnnnnnnnnnnnnnnnnnnnnnnnnnnnnnnnnnnnnnnnnnnnnnnnnnnnnnnnnnnnnnnnnnnnnnnnnnnnnnnnnnnnnnnnnnnnnnnnnnnnnnnnnnnnnnnnnnnnnnnnnnnnnnncctgaaaatacccagcattgccagccctatgcttcagccgcgccacacctcgtccgtaatcgcggtcggagccgccgctggcccaaccccggtcaccgctattgtaggggaacgcaccgtaacagcgcccttcgttgagcgcccgcacccccccggtatgtggccgcgcacgataaggcgatccgggaaccggggcgggccagggacagggtataaataggaggccggcgccgggtatcgcgccggtcccgtttatctacccccgttctcgggccgccgggagggcagcggcgggcggtatcggtttgccccgcattatcgcgcgcgcctccgcccgccgtattcggatatcttcataatgcgccgcgcggggagcgggcggggcttagtttgggacgggggtatgtgtacccgcggccgcgctcctcgccgccggcgcgataacctccactttaacgcacgcccgccccgccacggggcccgcgttaatttatcaccggtcggaccacaaatggcggaccgccatctcgccgcgc

SEQ ID NO: 96768 - DNA, 751 bp, Homo Sapiens
gtgacagatggagtcaggcgggaagtcatccctgatggacaggcagaagtcatactagaagaggttagggaaggtgttaaactctgggtcagccctgaggtcagactagggtgtaaggtctgtgcaaatcctgagtttaaactttgagtgattcctgatatcatgagctttgtctgttctgttgtcagtatgcgtcctttgctgtacacagaagaacattcgttccttaaggccataatttcgtcacgcagttttgcaaccctctgtaccaattgatctgcctggtagtattttccatcaataagaatctgtacatcaattacatgctggcgtaaaaggttctcacattcaagtatatacccagcaatttctgcttcattctgaaactgcactcctgattctaatcttttagaatcagactgaagagcatttccagcaagaatcagtttgtcttcacagatgacactgtccctctgaactctgttggcaatctgttgcaacatttctaacctgtgtccatcaaaggattcactgccgaagctaatgcaagagttgatcagtgttggaccacaatgaaccaagagaagattttcatttgaatcaagactggttcgagtgctggtagtgttactaaacacagaatcactgctacggtaactataactactactgtgcatttttattcctgaaacgatgttctttctttcacctttcaaagtagactaaaaggtaggaggtctggaaaaagccg

SEQ ID NO: 96769 - DNA, 858 bp, Homo Sapiens
acatagtttctgtcctaggaatattgtcttatctccataactatagctgatgcagaaagtccagccagtttactcatttcgattcagaatatttcaaatttagcaataaacaattagcattagttaaaaaagaaacatattccaagggcaggttcgattctagctctaattactgtcatgtcatttacccactggatcaaagggtatgtttcacttcttgacaatataaatgctgcagcaaagatgagaggtgaagtaaaaccgatacctgtcctgcacgactaaaatttgaatggaaattcaagcacaagtactggggacacatcaaagtgtggtgtttggtttgcctggagatgccacagttgaatcatgtgattctagattaacattaaatagattgaaaaagaaactttgcacggtatgagcttcataccccaccaaacaaagtcttgaaggtattattttacaagtatatttttaaagttgttttataagagagactttgtagaagtgcctagattttgccagacttcatccagcttgacaagattgagaggcccatgccaacagtctaatctaagagattagtctttcaaactcaccatccagttgcctgttacagaataactcttcttaactaaaaacctagtcaaacaacgaagctgtacgtgaggagatctgtataatattctaatttaagtaagtttgagtttagtcactgcaaatttgactgtgactttaatctaaattactatgtaaacaaaaagtacatagtttcactttttaaaaaaatccattactgttttgcatttcccaagttggggataaaaggggttgaaacctgacctacagccatgg

SEQ ID NO: 96770 - DNA, 966 bp, Homo Sapiens
  misc_feature (665)..(665): n is a, c, g, or t
ccacgcgtccgcaacgtgtcttgtaaggtgcggctagaaactggggacatggcagcgcctggcccagcgctctgcctcttcgacgtggatgggaccctcaccgccccgcggcagaaaattaccaaagaaatggatgacttcctacaaaaattgaggcagaagatcaaaatcggagtggtaggcggatcggactttgagaaagtgcaggagcaactgagaaatgatgtggttgaaaaatacgattatgtgtttccagaaaatggcttggtagcatacaaagatgggaaactcttgtgtagacagaatattcaaagtcatctgggtgaggccctaatccaagatttaatcaactactgtctgagctacattgcgaaaattaaactcccgaagaagaggggtactttcattgaattccgaaatgggatgttaaacgtgtcccctattggaagaagctgcagccaagaagaacgcattgagttctacgaactcgataaaaaagaaaatataagacaaaagtttgtagcagatctacggaaagagtttgctggaaaaggcctcacgttttccataggaggccagatcagctttgatgtctttcctgatggatgggacaagagatactgtctgcgacatgtggaaaatgacggttataagaccatttattntctttggagacaaaactatgccaggtggcaatgaccatgagatcttcacagacccccaaaaccatggggctactcccgggacagccccctggaggacaccccgcaaggatctggggaactgcctgttcctcctaacctggggaaacgagaaaagggcgggggcccccccggccttggaaagagcccaccaattaagggccattttctggtggggccccaaaatcccaaaggggctccctcccacacatggcggtcctcaccgtctaccacgggttaacctttataggtcaagggaattccc

SEQ ID NO: 96771 - DNA, 1436 bp, Homo Sapiens
  misc_feature (246)..(254): n is a, c, g, or t
  misc_feature (1311)..(1311): n is a, c, g, or t
  misc_feature (1330)..(1330): n is a, c, g, or t
  misc_feature (1357)..(1357): n is a, c, g, or t
tcgtgaccccggccgctgccgccatcactgtcgcccgcccagtcgcccctcagccgcttcccctcgccatggaggcgaggccgccgccgccggcgcggggctcggatgcctgcgggccgtggctggcggccctgagggctatgtggctggccctgaagacgcctgcgcgctggagccggaggcgtgagcctgctgtcctctgtccccagcggtccctgcccaacgcccgactctgtgacacaactnnnnnnnnncaaaggtatttatggaattccactgagtggtaatggatgatgcagttcaaataactaaggacacatgttcaaagagcataattaactttttaaaagaagctaataagcatggattcctggttcattcttgttctgctcggcagtggtctgatatgtgtcagtgccaacaatgctaccacagttgcaccttctgtaggaattacaagattaattaactcatcaacggcagaaccagttaaagaagaggccaaaacttcaaatccaacttcttcactaacttctctttctgtggcaccaacattcagcccaaatataactctgggacccacctatttaaccactgtcaattcttcagactctgacaatgggaccacaagaacagcaagcaccaattctataggcattacaatttcaccaaatggaacgtggcttccagataaccagttcacggatgccagaacagaaccctgggaggggaattccagcaccgcagcaaccactccagaaactttccctccttcagatgagacaccaattattgcggtgatggtggccctgtcctctctgctagtgatcgtgtttattatcatagttttgtacatgttaaggtttaagaaatacaagcaagctgggagccattccaattctttccgcttatccaacggccgcactgaggatgtggagccccagagtgtgccacttctggccagatccccaagcaccaacaggaaatacccacccctgcccgtggacaagctggaagaggaaattaaccggagaatggcagacgacaataagctcttcagggaggaattcaacgctctccctgcatgtcctatccaggccacctgtgaggctgcttccaaggaggaaaacaaggaaaaaaatcgatatgtaaacatcttgccttatgaccactctagagtccacctgacaccggttgaaggggttccagattctgattacatcaatgcttcattcatcaacggctaccaagaaaagaacaaattcattgctgcacaaggaccaaaagaaagaacggtgaatgatttctggncggatgatctgggaacaanacacagccaccatcgtcatggttaccnacctgaaaggagagaaaggagtgcaagtgcgcccagtactggccagaccaaggctgctggacctatggggaatattcgg

SEQ ID NO: 96772 - DNA, 638 bp, Homo Sapiens
tctccactacttctctttctgtggcaccacattcagcccaaatatacctctgggacccccttattaaaccactgtcaattcttcagactctgacaatgggaccacaagacagccaagcaccaattctataggcattacaatttcaccaaatgaaacgtggcttctacataaccagttcacggatgccagaacagcaaccctgggaggggaattccagcaccgcagcaaccactccagaaactttccctccttcaggtaattctgactcgaaggacagaagagatgagacaccaattattgcggtgatggtggccctgtcctctctgctagtgatcgtgtttattatcatagttttgtacatgttaaggtttaagaaatacaagcaagctgggagccattccaattctttccgcttatccaacggccgcactgaggatgtggagccccagagtgtgccacttctggccagatccccaagcaccaacaggaaatacccacccctgcccgtggacaagctggaagaggaaattaaccggagaatggcagacgacaataagctcttcagggaggaattcaacgctctccctgcatgtcctatccaggccacctgtgaggctgcttccaaggaggaaaacaag

SEQ ID NO: 96773 - DNA, 1164 bp, Homo Sapiens
  misc_feature (1063)..(1079): n is a, c, g, or t
agcattgatgtacttagttgttgaaagggtgatgaaactgatatccagatacttgagatcctggtaattggtcataaataattggcaaaataacaaattgtgaaaatagaagccattgctcagcaccgtttctccatcaatgccgtgaacttgccttacttgaggaaaaattctttaactttggaatattgcattgaactcagctatacacataaaacattttctttggtaaatcaagatccagtcagggtttctcttgaattattttggaacaatgccaggatccaaactgattaagttacagtttaagcacccttcagtattaatatatacggtattatataacaggtcaacaagtgctctttgatgataaaacttgtaatagagcaataattgtaaatggttaccatactgtaagatattttgataaaaattaactagtaatacttgtatttatttgaaacactgggctgtttgcacagctccaactgtgcatgctcaaaatgtgcactttttaaaattgttacttttaatgcgtatctttatatgggatctgttatagtatactagggcatgatatggtatccttttgagtgaggtatatactcatctcacaagtgaagtgcctactgatattactaaagtacattatgtttactcaagtaaataattttctccccatggtacactctagtgtaggctattcataccacactgaaatgaacaactgaagaataaggctaagaaccaataaaatatttctctaattgctagttgtaaaactgtatccaaattttcagaaaagacagcttcagcttgcaaattctatcctctaaacttatctggtgcattctccccaccccacccccattatataagggctattttagatgcttttaacctccccaacaaataatttgccaagtgtccaatgagaacttatcatgttgggtgtgttaagtaaatcgggcaaatatgatagtgtcttacattgggccttgattttaagttgttatatttggacaatcgagtattttagaaattacatgaaacatgaaacagnnnnnnnnnnnnnnnnnaaactgggcatctgggtttctaaaaattattttgaaacaatctaaaaattttcttggggcaaagcgaatcatgtggaaaatcctc

SEQ ID NO: 96774 - DNA, 924 bp, Homo Sapiens
  misc_feature (193)..(253): n is a, c, g, or t
ggacgcgtgggcggcggcgagccgcgggcaggggccggagcccgcgcccggaggcggggtggagggggtcggggctcgcggcgtcgcactgaaacttttcgtccaacttctgggctgttctcgcttcggaggagccgtggtccgcgcgggggaagccgagccgagcggagccgcgagaagtgctagctcgggnnnnnnnnnnnnnnnnnnnnnnnnnnnnnnnnnnnnnnnnnnnnnnnnnnnnnnnnnnnnnccgcagtggcgactcggcgctcggaagccgggctcatggacgggtgaggcggcggtgtgcgcagacagtgctccagccgcgcgcgctccccaggccctggcccgggcctcgggccggggaggaagagtagctcgccgaggcgccgaggagagcgggccgccccacagcccgagccggagagggagcgcgagccgcgccggccccggtcgggcctccgaaaccatgaactttctgctgtcttgggtgcattggagccttgccttgctgctctacctccaccatgccaagtggtcccaggctgcacccatggcagaaggaggagggcagaatcatcacgaagtggtgaagttcatggatgtctatcagcgcagctactgccatccaatcgagaccctggtggacatcttccaggagtaccctgatgagatcgagtacatcttcaagccatcctgtgtgcccctgatgcgatgcgggggctgctgcaatgaccagggcctggaatgggggcccactggggagcccacatccgcctgcaaattatgggggatccaaccgtcccaggggcagcccttagggaaagaagggactttcctaaagcgaaaccaaatggggaatggccgacccatggtaacggtagcgccccggaccgggaaaaatgggggccacagccc

SEQ ID NO: 96775 - DNA, 1289 bp, Homo Sapiens
tcttctgggcccagtataatctctccttggcaggtgatttcacaggaccaggtccgttccagaaaaaactttgggcccagggggtggcagagccagcgcagggagtcaggaacagcattgtgctcggggccacacaggctctggggctcggctgaggaagtagctggccaggaagcccagcttgctcccacaccgggtcttgagccccatggcagcagtcagatggatctcaaccagtgtgctcgggtgggatcttctcctctgcaccattaagccaggtttcacggcacacaacggccatgtgtacatcggaacaggcggatcctgcaggaagcttccctgtgatgtgcagctggtgcagccggtgataggccagagccgcatcccgggcgctggtcttagcttcgtcttcaaagcctgcctcagtggctggcgtggcccgccggcactggaagactttcttgagcagccagcgcaccaggcgtagcttctgcaggctgtagcggatcacgttccaggagaggctgcaggccaggtccaggcgggaggtgggcagtgcccggcccaaaactgccaggcaggtttgtaggttgccggcagcagctgcaaaatctcctctggcgagatccagatctgcctgtttccggtgcctccagaaggtgaccgaggagcgcgagtgtggccggatcactggctccccatgaaccagcagcttcacaaagacgctcaggacaatcacaccatttaccagccataagagaagagtaggcatcatccagtcaaaccagcccccagaacctgactcgaatgacaggacactgcggccagagcctgagtgtgggtgctggtcagagtcgtgggcccctccccactgcagcagggaagtcagggggttaaaggagaggcacaggaaggtgaggacacacagaagaatccgtgagcggtctaccatgcccagcgccacaggaggagagtctggctcatctttgacctttgcatcatccaatagagggcttcctggctcagagtcaatggagtagggagagaagccagcctgggaccctgagtcagaggctgggggggacatcagaaggacattctgattaaagtcctcgatcttcaggtccacctcattgtccaccagactgcctaggtcgatgccctttagaagctctgcaaagaaagccccacctggtgaaaatgatctgcttttacaaagccccacctgggccagggctgacaagccttttctcagcacacttactgttcttttgatttgccagctcaca

SEQ ID NO: 96776 - DNA, 905 bp, Homo Sapiens
caggatgtgagcggaggcaattcccggttttggaagaaaatcagacaggaaaccagtgctaggaagaaggaagagaactcagtccagcagagtgtaatagggcctcattaccgaagcaaaaagcagctgttggctaattcctagcatgctgtaacacatgagtattttgcaattagcaataaccagtgcacggggtttcgcatagacgcctgcccattcggcccggcagtgtgtgaggcgcctttcaaaccggagggattggcaagaaattccgggtagatatgcctggctcaggcagtgcattcatccccaccatcaacgccatcacgaccagccaggacctgcagtggatggtgcagcccacagtgatcacctccatgtccaacccataccctcgctcgcacccctacagccccctgccgggcctggcctctgtccctggacacatggccctcccaagacctggcgtgatcaagaccattggcaccaccgtgggccgcaggaggagagatgagcagctgtctcctgaagaggaggagaagcgtcgcatccggcgggagaggaacaagctggctgcagccaagtgccggaaccgacgccgggagctgacagagaagctgcaggcggagacagaggagctggaggaggagaagtcaggcctgcagaaagagattgctgagctgcagaaggagaaggagaagctggagttcatgttggtggctcacggcccagtgtgcaagattagcccccgaggagcgccgatcgcccccagcccctgggctgcagcccatgcgcagtggggggtggctcggtgggccgctgtcagtggtgaaacacggacccccctggcaagaggacagcccccctcggtccctcgttcggccgggggctgggacaaagggcca

SEQ ID NO: 96777 - DNA, 892 bp, Homo Sapiens
tcggggtctccgggcgccctgcagggcgggcaggctgtgccatcccgccggacgtcgggatggtgcagctgtacaacctgcacccgttcgggtcgcagcaggtggtgccctgcaagctggagccggaccggttctgtggcggggggcgtgacgcgcttttcgtggcggcgggctgcaaggtggaggcgttcgcggtggccggccaggagctgtgccagccgcggtgcgccttctccacgctgggccgggtgttgcgcctggcctacagcgaggctggagattatttggtagcaattgaagagaaaaacaaagctacatttctacgtgcttatgtgaactggagaaataaaaggactgaaaactctcgtgtgtgtatccgaatgattgggcataatgtggagggaccattcagcaaagccttcagagaccagatgtacattattgaaatgccgctttcggaggcccccttgtgcatttcctgttgccctgtgaaaggagacccttctcgttggctgcacaaataaattagtcttatttagtttgaagtaccagatcattaatgaggaattctcactattggactttgaacgttctttaattatacacatagataatatcactcctgttgaggtttctttttgtgctggaaaagttgctgtcatgtcagaattagaagtcttaatcgtaaaaatggaggtcagcccctaaaaatgggacagagagttcaccacccatccacataaagagccaaccaatcggaattaacaacgggcaggaaagaaagggcattcggtaaaaggaaaattttcacacgcctttgaggcccccaagcaatttttggtccattctgcgcccaaaaaacccccccgtggaaaaatttcctttgcgttgg

SEQ ID NO: 96778 - DNA, 1220 bp, Homo Sapiens
aatcactgccatggttcaatgttcccaggccccaggccatccacttgccggcccccaccagttcttgggttccccgctctagtttgacctgtgcagcacattccagaaggttccagggaggttgtggggcagctagaggacaaaatcatgaaaacagagtccctgtcttccagagatcatccggggctttaatattaatggcccccaaaactccgtaagaagcaggaaatgcagcccaagttttacaaatgggtaaacagaggcactgagagatagatggtagtttggtacttctggttcccagtgcccaggaatggtccactcccaagaaattcaggaaagaaagactgaggagaaggtgtgggaacattctggatgtttcgggagagttggggaaactcctcctcttaggaaaggctaatactagggtatccttgggcccaatgaattaggggtgaggccccagaacccgttatctatgagttgtatgggggagccatctgaagctgtagccaccagggatgcagctagctgaggagtttggggtgttgggttggacaaggcaggttagtagactcagattcttgcttcaaagagccttgggctggccctggaggtccctggagtctagactggacctacgagcttgagttgtcaggggccaggactggccccactgcagtgcccaggccagtcttgagccagcagggaggggctcagctgccccccagaatccaggtgcctctgaccaagcctggtcacctcctgaggaataaatgctgaacctcacaagccccatcattcattttcttctcaattcacagcgcccactctttgtttctggggtgggaactaggtcctgagggcaccgcctagctgagtgcaaagaaatatacggagccttaccaaagcatcccatgaggggccccagccctggtggcttcatgtcctggtaatcccagaactttggggaatgcccagggtgggttgggatttatctggacacccccggggaatcacctgggtctccgagacccagccctggccccaattatggcggacaacccccgcgctcctccctcaaaaatcccaaacactttacggcttgcagaacaagggaagaaattggccccgaacccccccgccacccctcacgggtcgtaaattgcggcccggacaacttggcattctacctgccacctccctaccctttggctgct

SEQ ID NO: 96779 - DNA, 1618 bp, Homo Sapiens
ggacgcgtgggcccatggccagactccgtccccgcagggccagcagcacctttcaggccttggacccccagctggcagccccctgccccagcgccttccaagtcccacctcagcgccccagcagcccgcgtcccaggccgcgccgccgacccagggtcaaggccgccaatcccggccagtggcgggaggccccggggcgcctccagcagcccgcccgcccgcctctccgtctccccagcgccaggcgggcccccccacaggctacccgtcagacatccgtctctggcccggctccgccaaaggcctctggggccccaccgggcgggcagcagcgccagggcccgccccagaaacccccaggcccagccggccccacacgccaggccagccaggcgggtcccgtgccccgcactgggccacccaccacgcagcagcctcggcccagcggcccgggccccgctggacgtcccaaaccacagctggcccagaaacccagccaggacgtgccgccacccgccaccgccgctgcagggggacctccgcacccccagctcaaagccagccccgcccaggcccagccttagccaggacgaggtgaaagctgagaccatccgcagcctgaggaagtctttcgccagcctcttctccgactgataccccactctgagaaccccaaaatccctgggcaacccttctctgggccctgaatcaatttctcacttttggagtctcccaaatcccttgagaacccatctcccggttctccaagattccacctctcattcctcaagatccccgagtaccttgagaaacctgactcctcctggccctaaatccggttctcacatgtggaatccccaagtccttttagaaccccactcgtggtcacttcaggatctacttctgttttagaacctccacattcctgaagacctccgcccctggtttccccagagggcgttttccttcctggaagtgcccaaataccaggcaacccattgcagaatcccttcctggagccctgaagttcctggaaaaccctatttttggtcccaaatctctccagcacacctatttcccatcataattttccaaatcctcaagaaacccctactgttgagccccttcccatggatcttccatccctctgaagatccacatcttcaaatgccacccaacacctagccccacaaggatttcccttcaccagctcccctcaactcattcaataccttggggagcccctcccacttccaggacccctcggttcccccaagggaccccctccccagtttcctgcctctgacagctgtctttaaatatgcaaactccacccatcttcccagaatcctttgcacacggaaggccagtggtctccgcttccccacctttgctgtggtgtctgtgtctgtgactgacgtggcctccttttgtgccgtgcttggcatatgtggtcctcgttcatcgtgccgcctgtggtgatgcgtgcagtgacgctgtttatgtggtccgcacctccccctgaccttcactccttgcctggactcaccccacccctcagcggctttgaaccccaagagaagagtcgggaaacaaaataaacaagcaaaggcccagc

SEQ ID NO: 96780 - DNA, 1059 bp, Homo Sapiens
ggtcgggtcctaagttcctcggtcttgggttcccggagaggtgagtcggctgcaggtgggtgcggggcgccgggctgttcggggtaccggtgtcgcagtcgccagtccgagctcacaccgggcgtggagttcagctgcgcatcgggttgcggcagcttcgccaggcctggggctggctgggccgcggggccgccctggaggccggagccactgggcctgcggcgcctcggcagcgagcagccgctttgctcgcgtgcaggaggctgttcgctacctcacacccccggctggcgctgtggcctcgcttagctctaccgtttagcacccggcgacatgcacccggtcggtttccgccaggatgcgggagagttggggcaagctacctgcgacagcttgaacttttcctagggattccgctccacccgccggttagagcgtattgctcattaaatccgagacctgtgtgcttgctactgaaataaaagaagtattttttccccagagtccttttaggacgttatgacttttctcctttgcaagactgcaaaaaactgacaagaagacaaaactcttcccactcccagggaccgcgttgtcttgagtttggctagtaaaggctagcaagtgaggctttgtctctgcatcccgttccccctaacatcctcagagaaccttcgtttctagaatctttctagtattcagagacttctccagggtcatgatcccaaaggcttaacccgtttacaaggagagagtttgtctcctgacgcccaaaatggcagtaaaatggagataactttaagctccaacactgaagcttcctccaagcaagagagaacatatagcaatagaaagaaacgggcctcctctgaaaaaatggccaatctggagtctgccgcagagttcgagctttggtacaagggtctgggccccaaggggttccgcccgaatttgcgctggttgccgcttggaccaggctttgggtttggtggatccacctcccggaaggcgggaggcaaagaggggcgcggaaaaccaaacagcggtgggggcaccctg

SEQ ID NO: 96781 - DNA, 989 bp, Homo Sapiens
tccgtctggcctgcaggtcggcccccgtctggtcactggcaactgggagccccagggatcgcagtgcacgcgtgttcgcagccgccgttctccacgctgccagtcccaagccccccggcgcctccctggcccagtgcccctggaccgctccggcggcgcggtgcacattagctgtaagccgaggggagccaccgcggcggatctgcccaccggcagcgcctggaagtccgctccgcgggccgcgaacggggtgccgtaggtgatcgagacggcggcagccgcggcgccgggctccacagccagtggcctgcaggtggctgggaagtggaactcgcagaggaagccatcggccttcacttgcgcactgctgctcctcccagatcggctcgctgggcacagtggcctcagcagcggtagacagcgtacgcacaacgggccgcagaggggagccccattgaggtcgagccgtgcccacgctgctatagctggtgcttgttgtctcccgtaacccactggaagccgcgcaggggcccgaggcgcttggggtccacgcacccgggtggcacctgcaggccgatccagaggcgtccggcggccaacgccgccgtcgccgttcagtagcaaggaaatgacatcggcagccaccgaggagcgcactgtcattaggtggccccgcagtccgtcgcagatctgactggcattgaggaaggtcgcggggcccgggtagagcgcgaagcagtcgtgctcgacgcactggctgccacccggctgcggctctgcgggtgcggggaaccccaggccggccagggccagcgcgccaaggaccaggaccccaagcatgttacccaggcgcgccgcgtgcaggcgccggggaaagcgcgggcactgcgacagggccgtgccggagcagaggggcacaggacgccgatggcgacagcctctcctgtccgtcccagcccagacacttcttgccctgcgccagccctgcg

SEQ ID NO: 96782 - DNA, 1207 bp, Homo Sapiens
  misc_feature (80)..(114): n is a, c, g, or t
  misc_feature (693)..(701): n is a, c, g, or t
aagactgatcagacatatagggcgctagctttctgagcgaacgacgagcgcaggaagtcagtgagcgaggaagcggccgnnnnnnnnnnnnnnnnnnnnnnnnnnnnnnnnnnncagtcgacggtaccggacatatgcccgggaattcggccattacggccgggtcacctacgtaaatttctagaagaatttactagcaggattaataatgaatattataaactgctttccacacactagggtataattattggtgcaatctatgttgttcttgatgccatggttttacatcttttaatttaaaccttatacaccagtgtttaggtcgctttgagacaaggtagccctgatgcaaggaaaaatgaggctactacttcacataaaaaatagggtgttaataccacctttactgtactgttggagcagatctttattttacaagtgttcatattcacataagagaattttaaatgaagaaaattaagttgttaaattataattatgagactttcgttggcatttgatttcaagaatacatatgcattttccaaaaaataaatgtggaggttattcagaacaaaattcatagcttacggtagtaatggcatggattaattttatttgcatgcacacacagacacacatacttcatatatgcaaattatagcattagtttttgatatatctagtggnnnnnnnnncaaaattgcaggaggttgtagattaaattaagtatgatagcacgttttttaattcattaatcatgaagtgctctgttccctaagttatgacatttagaagaaatcacatgctcaaccttaatctgagaacctaagtgtttttgagcattccagtaaaggagtagtgttcttttcctaacttacatcagggtacatctgtgtggcacacagatactatcttttcattcttcactcccagtcttaatttctttcccctgtatgtcactgtattttatgtcacttcacattgtgttaaacagggtaaatagagatcctcagtatctcagtgctgtggcatagctccaataggtgtgctgtggtgcactgcagtgatgtatttgcataacattgtttgatagtgaaaaattttttttcggttcaagtgttttgtgattaaaattttatgtttaattaaaatattgcataatattgatgggttcaaaaaccattaaaataatcaaacaatt

SEQ ID NO: 96783 - DNA, 806 bp, Homo Sapiens
  misc_feature (495)..(515): n is a, c, g, or t
gcggtttaaataatggggtaaggaatgaaaactttggttacttttcaaaagggctgcaaataagttctagtaccataatttttttaaagtattaatatttaactccggataaggtttaaaaactgtctttcataaaactcttaccattccaatgaaaactctgaaaaataaagttgtacgccacagtaattctgggaggtcattctggatcactcctaaaccctcccccgaccccctaattccttgatttttaatggggatcaagtttgactaccttagctggtgtttaaaagtctaacaaattcactgcacgttaaaaatcactggttaaaaacccaccctcaacatttccagagcaccaaaaacagtgagctgtaggctttcaacgtcttttcactggttatgtaaaatagtaaaatgtaattttgctttcaaaaatgagtagaaaaaggaggctttaaattaacctatagaactgtagctatctcaatgagnnnnnnnnnnnnnnnnnnnnnaattgtggaatcagtgtaatgggaaagtgacctgccctggtgcatttggctgtttcatcaagttgccaccagcatttctaaggagaaagaaaccgtttttagggaaatggtgatttaagataaagccacgaaactcacaaaattcaggtcgtatgctgccgtaattctaaaaatacattttgttttgacttgggtaattttgttcaggagaaaaataattagagacggaactctaaagcttctggatttgataagtttgtcagtggggaagggacaatgctaccggggttg

SEQ ID NO: 96784 - DNA, 1499 bp, Homo Sapiens
  misc_feature (603)..(664): n is a, c, g, or t
  misc_feature (831)..(831): n is a, c, g, or t
  misc_feature (1189)..(1279): n is a, c, g, or t
  misc_feature (1281)..(1281): n is a, c, g, or t
  misc_feature (1283)..(1287): n is a, c, g, or t
  misc_feature (1292)..(1292): n is a, c, g, or t
  misc_feature (1294)..(1295): n is a, c, g, or t
  misc_feature (1298)..(1301): n is a, c, g, or t
  misc_feature (1303)..(1305): n is a, c, g, or t
  misc_feature (1307)..(1308): n is a, c, g, or t
  misc_feature (1312)..(1319): n is a, c, g, or t
ttgtaaaaagtttatatgtaggataaaaaccttttagaggacacgtaggcggtaccactaaggttttggtaatgagccattcaaaccgacagcagtgtgaaggtgtgtcaaggtgtatattctcgtggctcggcattctcagtgcaaaggcctgtttggagactctgtgggaattgtttttcatctgtttctatggttgtcaaatgaattcttcacccaccctacagtttgctaactccttgaagctatcaaattagtaagagaggctgcccgcacccagggggcaccatcgcccacttattatttagttttgcggatactcatggaccatctatcacatccagcattgtcccagtgctttgagttggacgggaatgggactctgcagccaaggcaggataagaaaatcttgcaatcccgtcctgcagtgatagaaacaggtcgttctgcattataagccataggtggagcattcggtagcgtattcagactgcatgggccggcctaggagtctttgccttcataaattttaagaaccccgcccacaacagggagttaaactggaggactttgcatgattagttcagggatgagtggtttctnnnnnnnnnnnnnnnnnnnnnnnnnnnnnnnnnnnnnnnnnnnnnnnnnnnnnnnnnnnnnnccgttctggagaacaggtcacgcctgtcctggagacagtgtgccgggaaaagggaacgtggtactcactggatgcacccaggccggcccgagcctcccaccgcagacagtgtggaacagagtgagcctgagctgcccaaggcgatgccctttgtgctgtatgactgngaggcctctccgcgtgggtacttggggggtggggccacaaatctggcgaaaaacttcatgctggccgccgtgaggttttactccagcgttcccgccattgtcatggcgggtcttcgtcctaaactgagaagaaaagcattcctgtttgatcaccgccttagttaccagttctggatcagtcagtgtttctgcatggaataacaaccattaaaaaaagcactgggttctgccctttcatctttgtaagagattcttgcctctagcaatgacaacctgtgatgtctcacagtagagcacttagtgcagaatcaggtccccacggctgttgctcaataaaagtggcggaataaagtgcaannnnnnnnnnnnnnnnnnnnnnnnnnnnnnnnnnnnnnnnnnnnnnnnnnnnnnnnnnnnnnnnnnnnnnnnnnnnnnnnnnnnnnnnnnncncnnnnnccccncnnaannnntnnnannacannnnnnnnaaaaatgggggggcccccctgcggcccccaaaaaaagttttctaaaaaccatttcctttggggcgcgcgggggcccaaaaggaagaaagggagaaagtgggccacatacgttggttccccaaaagagaaacaccggggccccgaacaaaaagggggctggggggcttcccccccgcaaat

SEQ ID NO: 96785 - DNA, 771 bp, Homo Sapiens
atcctggatgacagaccctctcgcccctgaaggcgataaccgggtgtggtacatggacggctatcacaacaaccgcttcgtacgtgagtacaagtccatggttgacttcatgaacacggacaatttcacctcccaccgtctcccccacccctggtcgggcacggggcaggtggtctacaacggttctatctacttcaacaagttccagagccacatcatcatcaggtttgacctgaagacagagaccatcctcaagacccgcagcctggactatgccggttacaacaacatgtaccactacgcctggggtggccactctggacatcgacctcatggtggacgagagcgggctgtgggccgtgtacgccaccaaccagaacgctggcaacatcgtggtcagtaggctggaccccgtgtccctgcagaccctgcagacctggaacacgagctaccccaagcgcagcgccggggaggccttcatcatctgcggcacgctgtacgtcaccaacggctactcagggggtaccaaggtccactatgcataccagaccaatgcctccacctatgaatacatcgacatcccattccagaacaaatactcccacatctccatgctggactacaagccccaaggtaccgggccctgtatgcctggaacaacggccaccagatcctctacaacgtgaccctcttccacgtcatccgctccgacgagtcgtagctccctcctcctggaagccaagggcccacgtcctcaccacaaagggactc

SEQ ID NO: 96786 - DNA, 1402 bp, Homo Sapiens
caggcatgtaatatgaacaggtgttatacaagcaggctggtacggtccggatattcccgggatatcgtcgacccacgcgtacgcttgaaaatggcacggtgtctgcagcgaggctaactgatgggaagggcccagcgaatgccaataggagagagcaccggacctggaaggcctgggtcaacgcggcccggcgggggcgaagcggttccggcgcaggggcctggcgcggggctccgggaaaaccgaaccggcccacgtgggaccggtcgctccgccctgctgcagcagacgccgcctgactccgcagtccgggactggggctgggcgcgctgcccgggagccccgcacccacgcctggaccgcggagacgcccaggccgaggaacccccagcccagggactagacaccaccagggccgggcggagccagagccagacgcgccggagcgggcgcctctacgccgctagatgttcgccatccagccagggctagctgaggggggccaattcctgggggacccacctcctggattatgtcagcccgagctccaaccagacagcaactccaacttcatggcaagtgccaaggatgctaacgagaattggcatgggatgccaggcagagtggaacctatcctgaggaggagctcctctgagtcaccctctgacaaccaagccttccaggcccctggatcccctgaggaaggggtgcgcagccccccagagggggcagagattcccggggctgagcctgagaagatgggtggtgctggcacagtctgctcccctctggaggacaacggctatgccagcagttccctgagcattgacagccgtagcagcagtcctgagcctgcctgtgggaccccgcgaggccctggccctcccgatccccttctgccctcagtggcccaggctgtgcagcacttacaagtccaggagcgctacaaagagcaggagaaggaaaagcaccacgtgcacttggtgatgtaccgtcgcctggcactgctccagtggatccggggcctgcagcatcagttgattgaccagcaggcccgactgcaggagagcttcgacaccatcctagacaaccggaaggagcttattcgctgtctccagcagagggcagcaccatccaggccccaggaccaggcctaagggtgtgcctccacaagtgtgcaagggtatatgtatatatttgcaggcatgtgtgaggcgcactagtaagtacataatttgctggcatgattgcaggtaggcatgagtgtgtatgtgctaacatgtaggctggtggtgtgtaggcatgtgtgaataagcatgtataaatgaggcttaagtgtgctgtgggcacatgtggtacacacaagctaatttatctggcagactttatgggggagcttgta

SEQ ID NO: 96787 - DNA, 1000 bp, Homo Sapiens
  misc_feature (159)..(160): n is a, c, g, or t
  misc_feature (250)..(250): n is a, c, g, or t
  misc_feature (252)..(253): n is a, c, g, or t
  misc_feature (559)..(567): n is a, c, g, or t
  misc_feature (644)..(644): n is a, c, g, or t
  misc_feature (646)..(646): n is a, c, g, or t
  misc_feature (735)..(738): n is a, c, g, or t
  misc_feature (856)..(856): n is a, c, g, or t
  misc_feature (858)..(858): n is a, c, g, or t
  misc_feature (866)..(929): n is a, c, g, or t
  misc_feature (941)..(941): n is a, c, g, or t
agcacctcagggcgagccccggcggtctgatctcgccgaccctcctcgtcctggttgcaacccgcgtgcgaggccgcccgcgccctccgagtgtctgccggtgcagtgggggtggactggccggctgtggccgtgtgtgcgcgtgtggattggggcccnntccaagccagaagcttaggcggcagatgtcgggcattgccaccctcgccccacctgtcgcgggtggactttggggcagtacctgcaggananncgaacaattattatgtctgtgttcccttgggactcattggaaattgtacagtgacatcttctgggatttagtctggattgtgcagactggggcttaaaatggagagtcgatattaatggagaggctaaaaggaccctgaccaccttgcccttccctggggctgatgcaatctattttggatatgtgcgggcggagacgccccgctgcctccagccccgccgtgctccggaatgcggaggaccgtggtcgggcgatcagtgcgcgacgcggtggcggccggcgcacgcgagtgcggttgtggttgtnnnnnnnnnagccttcgcggcggtacgcctcacaaggtacagcatggagggtcgcaggagcgcccgctccggaggcgttcgccccncntgcgcgcggcccgaccacgtggtgaggccgcgttctgccccgtccgccggccccggaacgccggagcgcggcccgcagccacgccgtcnnnntttttctccctcagcgccctgattctgcccgccgggcgcccgtattgcggccggcgggtccttcccggagccccccgaccccaaacggggtattggatcgcgctagaacttcctcccncnctcgggtnnnnnnnnnnnnnnnnnnnnnnnnnnnnnnnnnnnnnnnnnnnnnnnnnnnnnnnnnnnnnnnnaggggcgtcgtntggtgagggaggagacagagcagggcgcgcccggccgcgcattccgtgtctcgctcccg

SEQ ID NO: 96788 - DNA, 1183 bp, Homo Sapiens
ggcagtaactacaacgggtctttaaggtagcgaggcctgggtggcgaattcggcacgagggcgccctgtgggggcatggcgtccgatcgaggcgggcgttcacgggcggccagggttgagtcccgggtcggggccgggggattgccggcgcatcagggccgagggctggggctggcggggccgctcgctgcctctcgctcgcagcagcggcggcaggcgcgggcgagggccacggggagaggagacgcagccccgcgggtggcacgctcggccgggccccggcccgcgctcaacgggcgcgatgctcttctcgctccgggagctggtgcagtggctaggcttcgccaccttcgagatcttcgtgcacctgctggccctgttggtgttctctgtgctgctggcactgcgtgtggatggcctggtcccgggcctctcctggtggaacgtgttcgtgcctttcttcgccgctgacgggctcagcacctacttcaccaccatcgtgtccgtgcgcctcttccaggatggagagaagcggctggcggtgctccgccttttctgggtacttacggtcctgagtctcaagttcgtcttcgagatgctgttgtgccagaagctggcggagcagactcgggagctctggttcggcctcattacgtccccgctcttcattctcctgcagctgctcatgatccgcgcctgtcgggtcaactagcctcaccgaggtgccggagagggagcgctggacaactagaatgttgacctcgagccgaggccctacttgcagcgcaccggaggagaggctctctagtctgaaggcaccgccggcttgcgccgagctgagtgccgggtttccctattccaatcctgtttgaaatggtttcttcagcagggcttaaaagagcagccttcatcctgaaaatgtatttccttttgtttaatgctttgagtagataatcctgaattgaggtcatgaggaggccccccaggccagacagtcctgacccctctgacacttgggaacctgaatataagtaaaatgtccaggtggactctgagtatttcctgtggatcctgggaaagtactgttgcacaaaggctgcaaagctggactcaggaatgtcctccaaccagcagcgctgaccttagagctcctgcgccgtcccaaagcaagcgggatcctcta

SEQ ID NO: 96789 - DNA, 538 bp, Homo Sapiens
cagctttaaagtattaaacagaaaccaacaaagaagaatatgagacagggacgtacgtggtccgtaaagtttaactttctgatccttaataggaggataagcgccgtgatagagaaatccaaaggtcatttgtattacgatggctagataatgtaatgaattccaatgtctgtgcatcagcgaatacgtcatcaaaattgctacaaaacaataataataggttgttcacagcttaaaatgtttaggtagtgaagaggaaagaatataacctacattatttattgactacttatatttccctcattttacggaagagatctatcaatttacgtactcaataatagaactacaacatggttgcactccttaatctcaggatagagataacaatttttataaatctattacattatgagaacattgttagtactataaaaatcaggatcagttaaatgttctcttaaaataattttcaatattaaatttttaagtaactcagtggatgcatattttccttatttttggaaatttgacttat

SEQ ID NO: 96790 - DNA, 1282 bp, Homo Sapiens
acggcagtaactctaacggttctaaggtagcgaggcctgggtggcgaattcggcacgagggaagttagtggcgctgctgggacgggggaaaggagacgcttcttcctcttgctgctcttctcgttcccgagatcagcggcggcggtgaccgcgagtgggtcggcaccgtctccggctccgggtgcgaacaatgctgactgatagcggaggcggcggcacctcctttgaggaggacctggactctgtggctccgcgatccgccccagctggggcctcggagccgcctccgccgggaggggtcggtctggggatccgcaccgtgaggctctttggggaggccgggccagcgtcgggagtcggcagcagcggcggcggcgcagcggcagcggtacgggcggaggggacgcggcgctggatttcaagttggcggctgccgtgctgaggaccgggggtggaggtggtgcctctggcagtgacgaggacgaagtgtccgaggttgaatcatttattttggaccaagaagatctggataacccagtgcttaaaacaacatcagagatattcttatcaagtactgcagaaggagcagacttacgcactgtggatccagagacacaggcacgactagaagcattgctagaagcagcaggaattggcaaattgtcaactgctgatggtaaagcttttgcagatcctgaggtactccggagactgacatcctcagttagttgtgcactggatgaagctgctgctgcactgacacggatgaaagcagaaaacagccacaatgcaggacaagtggacactcgcagtctagcagaagcttgttcagatggggatgttaatgctgttcgtaaattgctagatgaaggcagaagtgtaaatgaacatacagaagaaggagaaagcctgctgtgtttggcttgttcagcagggtattatgaattagcacaagtattgcttgctatgcatgctaatgttgaagatcgagggaataaaggagacataactcccctgatggcagcttccagtgggaggttacttaaatattgggaaattattactttcttcatgatgctggatggcaactccccagtctgcaacagggaaacactggggcttaacttatgccatgtggctgggagggattttgttgacatttggttaaagtggctcccttaattggaaggggcgcaatattcgaaggatccttaatggaaaatgggacctacctcccccttaatgggaaacccgcccagtggcagggtcattggtggaaatt

SEQ ID NO: 96791 - DNA, 1066 bp, Homo Sapiens
  misc_feature (867)..(867): n is a, c, g, or t
aggatgtgactatagaacagtggttacaaaaaagcaggctggtacgggtccggaattcccgggatatcgtcgaccacgcgtcgcacccaggaattgtagcatttagacaacatcttcagaatctggctagaaccaaaggaattctagagttgaacaaagtgcagttgtgtatgaacaaataggaccggaggcagaccctaacctggcgccggcggctcctcagctccaggaccttgctagcagctgccctcaggaagaagtttctcatgcagcaggaaagcgtctccactctccctgccagcgtgcatccccagctgtccccacggtcagagcctggagacccagtacctgcagcacagactccagaagcccagccttctgtcaaaggcccagaacacctgtcagctttattgcaaagaaccaccgcggagccttgagcagcagctgcaggaacataggctccagcagaagcgacgtctttcttcagaagcagtctcaactgcaggcctattttaatcagatgcagatagcagagagctcctacccacagccaagtcagcagctgccccttccccgccaggagactccaccgccttctcagcaggccccaccgttcagcctgacccagcccctgagccccgtccgtggagccttcctccgagcagatgcaatacagccctttcctcagccagtaccaagagatgcagcttcagcccctgccctccacttccggtccccgggctgctcctcctctgcccacgcagctacagcagcagcagccgccaccggcaccacccccctccacccacacgacagccaggagctgccccagcccccttacagttctcctatcagacttgtgagctngcaagcgctgcttcccctgcgccagactatcccactccctgtcagtatcctgtggatggagcccagcagagcgacctaacggggccagactgttcccagaaagcccaggactgcaagaaggccccctccaggttacggacccacttagcccctctctggagctaccctggactcctttggattggtggaaaatgcctaa

SEQ ID NO: 96792 - DNA, 922 bp, Homo Sapiens
  misc_feature (293)..(348): n is a, c, g, or t
cccagccctcgtcgccgccgccattttagctgttggttccggccgcaccgtgtgggctgtagtagcgggaggggtgggggtcctccagagttaagtggctgtcctcgactgtgcccatacagcagccagctttcttccttaataactgcccgttcgaagagtgcgaggatgtccaagcggcaccggttggacctaggggaggattacccctctggcaagaagcgtgcggggaccgatgggaaggatcgagatcgagaccgggatcgtgaagatcggtctaaagatcgagaccnnnnnnnnnnnnnnnnnnnnnnnnnnnnnnnnnnnnnnnnnnnnnnnnnnnnnnnnttgcgagcttcaacaaatgctatgcttatcagtgctggattaccacctttgaaagcttcccattcagctcactcaacccactcagcacattcaacgcattcaacacattctgctcattcaacgcatgccggacatgcaggtcacacgtcacttccacagtgcattaatccgttcaccaacttaccccatactcctcgatactatgatattctaaagaaacgtcttcagctccctgtttgggaatacaaggataggtttacagatattctggttagacatcagtcctttgtactggttgggtgagactgggtctggtaaaacaacacagattccacaggggggggtgggagtacatggcgatcattaccagggacccaaaagaaggagttgcctggtacccaaaccccaggaagagtggctggcaatgagtgggggctcaaaagagtttcttgattgaaatggatggtgaatgttgggcccaggaaatttgggttactcccattccaatttggaaaaatggcaagaaggggcaaaaacccttccttaaaaataatggacttggatgggggaatgt

SEQ ID NO: 96793 - DNA, 1047 bp, Homo Sapiens
agcattggtccctatgaacagtttgtaccaaaaagcaggctggtacggtcggattcccgggatatcgtcgacccacgcgtcgctgccagcagctgaggcgccatggcggcggcagcggtgtcagagtcttggccggagctggagctggctgagcgcgagcggcggcgggagctgctgctgacggggcccgggctggaggagcgagtgcgggcggcgggtgggcagctgccgccgcggcttttcaccctgccgctgctgcactacttggaagtgagcggctgcgggagcttgctgccgcgccggggcctggcctgggctgcagggcctgccgcatgctgcacagcctcgtgctgcggcgcaacgcgctggggcccggcctgagccccgagctcgggccgctgcctgcccttcgggtgctcgacctgtcgggcaacgcgcctggagtgcgctgccgccgggccaaggcctgggccccgccgagccgccgggccttccgcagctgcagagcctcaacctcagcggaaaccggctgcgcggagctggccagccgacctggcgcgctgcgccccggcctgagaggcttcaactcacgggcaatggctaggagtctttcccgccgagctctttcgccccggggggctgccctgtcagtgaatggggtgtgaaaatgctccgagattcagcccgattcgccactggcctcgctcagagtggcctctgaacacagatgagcgagatcctgagagttggggactgcccaaggtcaggagatccattcgtggaacacggtgggggacaagcgctggagaaattgcagggtgcagacaaatcatctggaagtactggcgttgagagcgtgtgcggaagcatggcgtgaggttgaaagaagagcgagaaagggggagacgcgcgaaggatgagaaagtggaatcaggagtgatggtgagtaaacagatagagagccggagatggattggcgagaggagagacgagatcagagaagataagggcagaagtagtattcatatgttgtatatattttggttt

SEQ ID NO: 96794 - DNA, 1141 bp, Homo Sapiens
  misc_feature (256)..(256): n is a, c, g, or t
gccccccgggtcttggaagccccccatccgggctatggatggggcacaaccaaagccccggggcatactcagcccccttgttacacagcagtgccctggggccggcccacaggccatcacttcttgggtgatgcagatggagccgcagctcatgcccacgcgcagcccgtccacaccagcatcaatcaggttcttggcctgggctgctgtcaccacgttccccccaatcacctggaggtgggggtacttctgttgnatgtaatgcaccatggcgatctgatacaccgaattcccttgggacgagtccaagactatgacgtcgacgcccgcctgggtgagcaggtccagacggtatttgtcatcctcacgggtgcccacagctgccccacagagcagctgcttctgggaatccttggaggccagagggtagtctcggttcttcttcaggtccgtccgggcgattgatgcccaccagctcatcgcaatcattgacgataggcagctcccctttcttgctacgctgcaggatctcatttgcctctttcaacgtcacacctgctggagccaccaccagttcaatccttggcgtcatcacctcactgaggagggtggtgtggtccttctcagcaagaaagtcgatgtctcgggaggtgacgatgcccaccagcttgctgcccatggtgcccgtctcagtgatggggatgccagagaagccatgccgcatcttggcctccagcacatcgcccacagtgtgcgaggggctcagcaccacagggtccgtgatgaagccctgttcaaacttcttgaccttccgcacctcgttggcctggaactctggggtgcagttgtggtgaatgaaaccaatacctcccatcagagccatggcaatggccatgtcagcctctgtcacagtgtccatgggggaggagatcagtggcgtcttcagcgtgatcttccgggtcagggctgaggtcaggtccacctcatcagctatgaagtctatgaatcctgggagaatcaggaagtcgttgtaggtgaggccgtcggcgctggcgaagagctgctgcgcggtgagcccatcctcgggcacgtagccggtgccgccgctgatcaggtagtccgccatgctgccgcgagaccc

SEQ ID NO: 96795 - DNA, 1590 bp, Homo Sapiens
  misc_feature (1167)..(1167): n is a, c, g, or t
  misc_feature (1193)..(1193): n is a, c, g, or t
  misc_feature (1211)..(1211): n is a, c, g, or t
  misc_feature (1253)..(1253): n is a, c, g, or t
  misc_feature (1262)..(1262): n is a, c, g, or t
  misc_feature (1276)..(1276): n is a, c, g, or t
  misc_feature (1305)..(1305): n is a, c, g, or t
  misc_feature (1323)..(1323): n is a, c, g, or t
  misc_feature (1363)..(1363): n is a, c, g, or t
  misc_feature (1365)..(1365): n is a, c, g, or t
  misc_feature (1391)..(1391): n is a, c, g, or t
  misc_feature (1446)..(1446): n is a, c, g, or t
  misc_feature (1466)..(1466): n is a, c, g, or t
  misc_feature (1507)..(1507): n is a, c, g, or t
  misc_feature (1539)..(1539): n is a, c, g, or t
  misc_feature (1564)..(1564): n is a, c, g, or t
gggaagcaaaattcaccctgcatctgcactgagtgacttctctttctttttctgtcattcctcattaggtatagacacgtgtggccgtttacgctgtaggatcctcattcccactggctttgaacattttggggacttacaatgccgccacccgcggacatcgtcaaggtggccatagaatggccgggcgcctaccccaaactcatggaaattgatcagaaaaaaccactgtctgcaataataaaggaagtctgtgatgggtggtctcttgccaaccatgaatattttgcactccagcatgccgatagttcaaacttctatatcacagaaaagaaccgcaatgagataaaaaatggcactatccttcgattaaccaaatctccagctcagaacgcccagcagctccatgaacgaatccagtcctcgagtatggatgccaagctggaagccctgaaggacttggccagcctctcccgggatgtcacgtttgcccaggagtttataaacctggacggtatctctctcctcacgcagatggtggagagcggcactgagcgataccagaaattgcagaagatcatgaagccttgctttggagacatgctgtccttcaccctgacggccttcgttgagctgatggaccatggcatagtgtcctgggatacatttttcggtggcgttcattaagaagatagcaagttttgtgaacaagtcagccatagacatctcgatcctggcggaggtcctttgggcacttttggagtcggtgggggtgaatagcccatgacctctacgagaaagcggcgcagggagattaccatgcggccgggtcatttcgaaaactggaggggggaagagcaggaaatcccgcacccctaactattggaccggatgaagcggggcttggtcctgaacgcgtccctggggtggagggagggccggggggaggcgcgaatgatattgtggcggcacgaacgcggaccggagcttccgttgagttgggtcagatctcggtgggtggggtgtcaacgggcccctggggggggcgcctactcccaacaactttgagccatggggcgacgtcaaatccagggggctggtcagtgacggtgcgccctcgcagatcgggcgggctcgcggacgcccgttatgttaaggggcgcgcgntcccccgtgaggagagaatgcagaanaatgggggaacggagacncggacgtgcaccgcacgtaactgggggtgctccccctcctcncgagaggcnagcaccgccgcagncatcgctgttcgcgaggcgcgggccaggntcggcatagaaggcggcntgacacgcaggcgtgctgagccacgcagacttcagcgctncnatagtgtacatgtgcgcgctgcgccntgtgtccgcgcacaccctccgcgacggacacggagagatctccgtgtgcgcgcancgcccgcgcgggtgagaganacacgggcgagcaagcgctgtcacgttctcacaccctgccntatccccgataatattgcgaagacaggcggtngcggggggtgtatagctaatgaatnatggggagcgtcggaaccccgcagag

SEQ ID NO: 96796 - DNA, 984 bp, Homo Sapiens
aggcagtactacccacggtcctcaggtagcgaggcctgggtggcgaattcggcacgaggcggcggccatggcggccgttctgaagccggtgctgctgggccttcgagatgcgccggtgcacggcagccccacagggccgggtgcctggactgctagcaagctgggcggcattccggatgctctgcccaccgtggctgcgcccaggcccgtgtgtcagcgctgcgggcagccgctcgctctggtcgtgcaggtgtattgcccgctggaaggctccccgtttcaccgtctgctgcacgtgttcgcgtgcgcctgccccggctgtagcaccggcggtgcgcgcagctggaaggtgttccgctcccagtgcctgcaggtgccagagagagaggcgcaggacgctcagaaacagggaaacagccttgcagctgaggactggtgtgaaggtgctgatgactggggaagtgatactgaggaggggccttcaccacagtttaccttggattttgggaatgatgccagcagtgccaaagacgtagactggactgctcggctccaagacctccgcctgcaggatgctgtcctgggtgctgcccatcctgtgcctcctgggctgccgctcttcctgccctactacatctgtgttgcagatgaggaagattacagggactttgtcaacctggatcatgcccacagccttctgaaggactatcagcagagagaaggcattgcatggatcagttgctttccccaaagcttcctaatgatggtgatgacaaatattgaggaagaccataattaaagtggcgatcagacgttttaccaattcatgaagcgaatgctgcttgtcacgagcaaaatttgaggtatcctggagtgggaaccctctttttgacctgcctaaattaaaagtacgagtccagctgcacggggggcacagaatgggttagtttccgcctggccttccaaggctggcccgggtgcacc

SEQ ID NO: 96797 - DNA, 1056 bp, Homo Sapiens
  misc_feature (796)..(796): n is a, c, g, or t
  misc_feature (806)..(806): n is a, c, g, or t
  misc_feature (912)..(913): n is a, c, g, or t
  misc_feature (926)..(926): n is a, c, g, or t
  misc_feature (942)..(942): n is a, c, g, or t
  misc_feature (1003)..(1003): n is a, c, g, or t
ggcacgagggtggagtttgaattgggtggcggttgactgtagagccgctctctctcactggcacagcgaggttttgctcagcccttgtctcgggaccgcaggtacgtgcctggcgacttcttcgggtggtccccgtccgccctcctcgtccctacccagtttcttgcttccctgccccatctccgccgctccccgcagcctccgccgagcgccatggctcctaggaagggcagtagtcgggtggccaagaccaactccttacggaggcggaagctcgcctcctttctgaaagacttcgaccgtgaagtggaaatacgaatcaagcaaattgagtcagacaggcagaacctcctcaaggaggtggataacctctacaacatcgagatcctgcggctccccaaggctctgcgcgagatgaactggcttgactacttcgcccttggaggaaacaaacaggccctggaagaggcggcaacagctgacctggatatcaccgaaataaacaaactaacagcagaagctattcagacacccctgaaatctgccaaaacacgaaaggtaatacaggtagatgaaatgatagtggaagaggaagaagaagaagaaaatgaacgtaagaatcttcaaactgcaagagtcaaaaggtgtcctccatccaagaagagaactcagtccatacaaggaaaaggaaaagggaaaaggtcaagccgtgctaacactgttaccccagccgtggggccgattggaggtgtccatggtcaaaccaactccagggcctgacacccaggtttgactncagggtcttncagacccctggcctgcgtactccagcagcaggagagcggattttacacatctcagggaatggcagccctcttgctgacagcaaagagatcttcctcactgtgccanntgggcggcgaaanagcctgcgattatggnccagtgacttgcagaggcacagtattgcccagctggatcccagaggccttgggaaacattnagaaggtcctccaaccgtctcgcccaaatctgcagcagcatacggacccacaa

SEQ ID NO: 96798 - DNA, 938 bp, Homo Sapiens
  misc_feature (822)..(822): n is a, c, g, or t
ttaccccaaaatggccaggataagacaaatgcaccctctcggcttaatcagtctccatgtctggcacctgtgaagcgcacttacgagcaaatggaatttcccttactgagaaggcgaaagttagatgatgatagtgattcacccagcttctttgaagagaagcctgaagagcctgttgttttagctttagaccccaagggtcatgaagatgattcctatgaagccaggaaaagctttctaacaaagtatttcaacaaacagccctatcccaccaggagagaaattgagaagctagcagccagtttatggttatggaagagtgacatcgcttcccattttagtaacaaaaggaagaagtgtgtccgtgattgtgaaaagtacaagcctggcgtgttgctggggtttaacatgaaagaattaaataaagtcaagcatgagatggattttgatgctgagtggctatttgaaaatcatgatgagaaggattccagagtcaatgctagtaagactgctgacaaaaagctcaaccttgggaaggaagatgacagttcctcagacagttttgaaaatttggaagaagaatccaatgaaaggggtagcccttttgaccctgcttttgaagttgaacctaaaatctctaacgataacccagaggaacatgtactgaagggtaattcctgaggatgcttcagaatctgaggagaagctagaccaaaaagaggatggttcaaaatacgaaactattcatttgactggaggaaccaaccaaactaatgcacaatgcatctgatagtggagttggaccaagacgatggtgttgantgggaaaaacggggcttcttccatctgaaagtggggcctggaatcccaacaaaggggcagaattttgggggacatacctggcgaaatggagacccgggaaccgggtctggacaagt

SEQ ID NO: 96799 - DNA, 770 bp, Homo Sapiens
cggctaggtacgaggctgggtggctaattcggcacgaggatggcgtcctcgacttggtctgagacgtgataggcctgccttctggttgaagatgtggcgagtgaaaaaactgagcctcagcctgtcgccttcgccccagacgggaaaaccatctatgagaactcctctccgtgaacttaccctgcagcccggtgccctcaccaactctggaaaaagatcccccgcttgctcctcgctgaccccatcactgtgcaagctggggctgcaggaaggcagcaacaactcatctccagtggattttgtaaataacaagaggacagacttatcttcagaacatttcagtcattcctcaaagtggctagaaacttgtcagcatgaatcagatgagcagcctctagatccaattccccaaattagctctactcctaaaacgtctgaggaagcagtagacccactgggcaattatatggttaaaaccatcgtccttgtaccatctccactggggcagcaacaagacatgatatttgaggcccgttttagataccatggcagagacaaacagcatatctttaaatggacctttgagaacagacgatctggtgagagaggaggtggcaccctgcatgggagacaggttctcagaagttgctgctgtatctgagaaactatcttcaggaatctcctccatctcttagggggtctcaccaatcctgtttgaacactaattgtccaggaacccgacgtaactgggggcggggggactatacttg

SEQ ID NO: 96800 - DNA, 937 bp, Homo Sapiens
gggcacagaccgggggtgaacatggcgtcctcgacttggtctgagacgtgataggcctgccttctggttgaagatgtggcgagtgaaaaaactgagcctcagcctgtcgccttcgccccagacgggaaaaccatctatgagaactcctctccgtgaacttaccctgcagcccggtgccctcaccaactctggaaaaagatcccccgcttgctcctcgctgaccccatcactgtgcaagctggggctgcaggaaggcagcaacaactcatctccagtggattttgtaaataacaagaggacagacttatcttcagaacatttcagtcattcctcaaagtggctagaaacttgtcagcatgaatcagatgagcagcctctagatccaattccccaaattagctctactcctaaaacgtctgaggaagcagtagacccactgggcaattatatggttaaaaccatcgtccttgtaccatctccactggggcagcaacaagacatgatatttgaggcccgtttagataccatggcagagacaaacagcatatctttaaatggacctttgagaacagacgatctggtgagagaggaggtggcaccctgcatgggagacaggttttcagaagtcgctgctgtatctgagaaacctatctttcaggaatctccgtcccatctcttagaggagtctccaaccaaatccctgtcctgaaacaactacattgctccaaggaaagcctgagacagtagaactgaggctgtgcgtgaggacttagtaccttctgaaagcaggcttcttgccttcctctgttctctggcttaccccttcactggcttggaagcgatctccgtgtcaatcatggggaccacagaggcacacggtccagctggagcacgcgggccaaacaaacgtgcccagcatcaacaggactgacagaga

SEQ ID NO: 96801 - DNA, 901 bp, Homo Sapiens
tggagctggtgctgaaaaagggggtttgcagaggctgccctggggctggtgctgaaagaagagcccacagctgacttcatggtgctacaataacctcagaatctacttttcactctcaggagaacccacatgtctaatatttagacatgatggcaaactgggcggaagcaagacctctcctcattcttattgttttattagggcaatttgtctcaataaaagcccaggaagaagacgaggatgaaggatatggtgaagaaatagcctgcactcagaatggccagatgtacttaaacagggacatttggaaacctgccccttgtcagatctgtgtctgtgacaatggagccattctctgtgacaagatagaatgccaggatgtgctggactgtgccgaccctgtaacgccccctggggaatgctggcctgtctgttcacaaacacctggaagtggcaatacaaattttggtagaggaagaaagggacaaaaaggagaaccaggattagtgcctgttgtaacaggcatacgtggtcgtccaggaccggcaggacctccaggatcacagggaccaagaggagagcgagggccaaaaggaagacctggccctcgtggacctcagggaattgatggagaaccaggtgttccctggtcaacctggtgctccaggacctcctgggacatccgtcccaccccaggacccgatgggttggagcaggccgtttttcagcctcaatgggctgggggttggatgaaaaaatctgggaatttggcgagccaaggtaagaactaaatggcctgggtctccggggggggtccttggtttggcccccaaggggggacccacagggggttttacacagggaaccagttaaaaggggggtgtgccagggaaccctataa

SEQ ID NO: 96802 - DNA, 1599 bp, Homo Sapiens
ggaccggtccggattctcgggaatcgtcgaccacgcgtccggtggattcccgccccgaggtttctaaatccagacattcccgtttggctgagcactctaggcctacatccatgaagctaggagagcgacactcaaagactgcactattgagagaagctaacgttaaaggcagtgaatatattcgggagtccagctccggaacccgggagctcttttagtgggaggggcggcgctgatggcgcttctggcctccgaatgctagggggcgctgtgatcgccgggcggcctcttgggcgctgagagtccaccgcgcaagcgcatcctggcctttcttcagtccccacgtgcgatccttcccggcaactttttcgagaaaaatgcccaaattcaaggcggcccgtggggtggggggtcaggaaaaacatgcgcccctggccgatcagatcctggctgggaatgcggtgcgggcgggggtccgggagaagcggcggggtcgcgggacaggagaagcggaggaagagtatgtggggccccggctgagccgacggattttgcagcaagcacggcagcaacaggaggaactcgaggccgagcatgggactggggacaagcccgcggcgccgcgggaacgcaccacgcggctgggtccaagaatgcctcaggatggatcagatgacgaggacgaggagtggcccaccctggagaaggctgccacaatgacagcagcgggccatcatgcagaggtggttgtggaccctgaggatgagcgtgccatagagatgttcatgaacaagaaccctcctgccaggcgcaccctggctgacatcatcatggagaagctgactgagaagcagacagaggttgagacagtcatgtcagaggtgtcgggcttccctatgccccagctggacccccgggtcctagaagtgtacaggggggtccgggaggtattatctaagtaccgcagtggaaaactgcccaaggcatttaagatcatccctgcactctccaactgggagcaaatcctctacgtcacagagccggaggcctggactgcagctgccatgtaccaggccaccaggatttttgcctctaacctgaaggaacgcatggccagcgcttctacaaccttgtcctgctccctcgagtacgagatgacgttgctgaatacaaacgactcaacttccatctctacatggatctcaagaaggcccatttcaaaccctggagcctggttcaaagggatccttgattccactggtgcgagtctggcacttgtaacctccggggagccatcatcgtgggtacccatcatcacccagtggctccatccctgtgcttgcctcccatgcggcctgctcgaacttgccgcgatgcatcccggcgcgcccaccgctcttcccggcatgcgctgcctacaccgtctccgggctaaccgggagcggcagtccctcatctcccctccgcgggttcgccccagcacgtgacgcgcgttctgcccaccccccacttgtgtctccccaagcgcttgctccctccacgccccgagacgccggcgcacgtgctccaagcatctgatcactcggatctcgccgcggt

SEQ ID NO: 96803 - DNA, 2128 bp, Homo Sapiens
  misc_feature (65)..(136): n is a, c, g, or t
  misc_feature (935)..(936): n is a, c, g, or t
  misc_feature (1821)..(1821): n is a, c, g, or t
  misc_feature (1913)..(1913): n is a, c, g, or t
  misc_feature (1926)..(1926): n is a, c, g, or t
ggcttgccggcttcggggaaggtgcggcaggcggtgctgcggcctggcacagcaggtttggggtnnnnnnnnnnnnnnnnnnnnnnnnnnnnnnnnnnnnnnnnnnnnnnnnnnnnnnnnnnnnnnnnnnnnnnnncatgcagggcgcagagccggctaaaccctgctgagacccggctccgtgcgtccaggggcggctaatgcccctcacgctgtctacgctgctgcaaccgggccgcatctggacggggcgccgcgcggcggagccgacgccgggccacaatgctgcttggagcctctctggtgggggtgctgctgttctccaagctggtgctgaaactgccctggacccaggtgggattctccctgttgttcctctacttgggatctggcggctggcgcttcatccgggtcttcatcaagaccatcaggcgcgatatctttggcggcctggtcctcctgaaggtgaaggcaaaggtgcgacagtgcctgcaggagcggcggacagtgcccattttgtttgcctctaccgttcggcgccaccccgacaagacggccctgatcttcgagggcacagatacccactggaccttccgccagctggatgagtactcaagcagtgtacgccaacttcctgcaggcccggggcctggcctcgggcgatgtggctgccatcttcatggagaaccgcaatgagttcgtgggcctatggctgggcatggccaagctcggtgtggaggcagccctcatcaacaccaacctgcggcgggatgctctgctccactgcctcaccacctcgcgcgcacgggcccttgtctttggcagcgaaatggcctcagccatctgtgaggtccatgccagcctggacccctcgctcagcctcttctgctctggctcctgggagcccggtgcggtgcctccaagcacagaacacnnctggaccctctgctgaaagatgctcccaagcaccttcccagttgccctgacaagggcttcacagataaactgttctacatctacacatcccggcaccacaggcctgcccaaggccgccatcgtggtgcacagcaggtattaccgcatggctgccctggtgtactatggattccgcatgcggcccaacgacatcgtctatgactgcctccccctctaccactcagcaagaaacatcgtgggaatcggccagtgcctgctgcatggcatgacggtggtgattcggaagaagttctcagcctcccggttctgggacgattgtatcaagtacaactgcacgattgtgcagtacattggtgaactgtgccgctacctcctgaaccagccaccgcgggaggcagaaaaccagcaccaggttcgcatggcactaggcaatggcctccggcagtccatctggaccaacttttccagccgcttccacataccccaggtggctgagttctacggggccacagagtgcaactgtagcctgggcaacttcgacagccaggtgggggcctgtggtttcaatagccgcatcctgtccttcgtgtaccccatccggttggtacgtgtcaacgaggacaccatggagctgatccgggggcccgacggcgtctgcattccctgccagccaggtgagccgggccagctggtgggccgcatcatccagaaagaccccctgcgccgcttcgatggctacctcaaccagggcgccaacaacaagaagattgccaaggatgtcttcaagaagggggaccaggcctaccttactggtgatgtgctggtgatggacgagctgggctacctgtacttccgagaccgcactggggacacgttccgctgganaggtgagaacgtgtccaccacccgagtggaaggcacactcagccgcctgctggacatggctgacgtggccgtgtatggtgtcgaggtgccangaaccgagggccnggcccggaatggctgctgtggccagccccactggcaactgtgacctggagcgctttgctcaagtcttggaagaaggaaatgccccctgtatgcgcgcccccatcttctgcggcctcctggcctgagctggcccaaaccaggaaacctaccaagttccacgaaaaacagaacctaccgggaaaggagggggctttgaaaccct

SEQ ID NO: 96804 - DNA, 902 bp, Homo Sapiens
  misc_feature (737)..(737): n is a, c, g, or t
aggctggaccggtccggattcccgggatgtttgggccgccactgtaggaaaagtaacttcagctgcagccccaaagcgagtgagccgagccggagccatggagggccagagcgtggaggagctgctcgcaaaggcagagcaggacgaggcagagaagttgcaacgcatcacggtgcacaaggagctggagctgcagtttgacctgggcaacctgctggcgtcggaccggaaccccccgaccgggctgcggtgcgccggacccacgccggaggccgagctacaggccctggcgcgggacaacacgcaactgctcatcaaccagctgtggcagctgcccacggagcgcgtggaagaggcgatagtggcgcggctgccggagcccaccacacgcctgccgcgagagaagcctctgccccgaccgcggccacttacacgctggcagcagttcgcgcgcctcaagggcatccgtcccaagaagaagaccaacctggtgtgggacgaggtgagtggccagtgggcggcggcgctggggctaccagcgcgcccgggacgacaccaaagaatggctgattgaggtgcccggcaatgccgaccccttggaggaccagttcgccaagcggattcaggccaagaaagaaagggtggccaagaacgagctgaaccggctgcgtaacctggcccgcgcgcacaagatgcagctgcccagcgcggccggcttgcaccctaccggacaccangagtaaaggaggagctggggccgcgccatgcaagtggcccaggtctccaccgccctcctgggggggcgcttttcaggagcgcctcccccaggaaaagggtcccccgggggctcccgcaaaaaaagggaggtttccaaccccttttcgggggactttttgcacccg

SEQ ID NO: 96805 - DNA, 1290 bp, Homo Sapiens
ttagaggatacagacctgagttttcaaatttttcaaaggttgaagattaccagttaccagatgccaaaacttccagcagcaccaaggccggcctccaggatgcctctgggaacttggttcctctggaggatgtccacatcaaagggagaatcatagacactgtagcccaggtcattgtttttcagacatacacaaataaaagtcacgtgcccattgaggcaaaatatatctttcctttggatgacaaggccgctgtgtgtggcttcgaagccttcatcaatgggaagcacatagttggagagattaaagagaaggaagaagcccagcaagagtagcctacaagccgtgacccaggggccatggcgcttacctgatgagtcaggatgctccggacgtttttactgtaagtgttggaaacttaccccctaaggctaaggttcttataaaaattacctacatcacagaactcagcatcctgggcactgttggtgtctttttcatgcccgccaccgtagcaccctggcaacaggacaaggctttgaatgaaaaccttcaggatacagtagagaagatttgtataaaagaaataggaacaaagcaaagcttctctttgactatgtctattgagatgccgtatgtgattgaattcattttcagtgatacacatgaactgaaacaaaagcgcacagactgcaaagctgtcattagcaccatggaaggcagctccttagacagcagtggattttctctccacatcggtttgtctgctgcctatctcccaagaatgtgggttgaaaaacatccagaaaaagaaagcgaggcttgcatgcttgtctttcaacccgatctcgatgtcgacctccctgacctagccaatgagagcgaagtgattatttgtcttgactgctccagttccatggagggtgtgacattcttgcaagccaagcaaatcgccttgcatgcgctgtccttggtgggtgagaagcagaaagtaaatattatccagttcggcacaggttacaaggagctattttcgtatcctaagcatatcacaagcaatacccacggcagcagagttcatcatgtctgccacacctaccatgggggaacacagacttctggaaaaacactccgatatcctaagccttattggaacctctgctcgaggggccccggaacctccctcccggggggccggaaggggcccctcccaggaatgaaaagcctggaatttaaagcctctcgggaaaaaggaaccccgccccggaaaaccagagggtttattttccc

SEQ ID NO: 96806 - DNA, 1517 bp, Homo Sapiens
aggaaatacggctaggtacgaggcctgggtgtgtgaatcggcacgaggaggttggcgcgggctgggaggtgttccagccctttaagatgttgcgcgtggtgagctggaacatcaatgggattcggagacccctgcaaggggtggcaaatcaggaacccagcaactgtgccgccgtggccgtggggcgcattttggacgagctggatgcggatatcgtctgtctccaggaaaccaaagtgaccagggatgcactgacagagcccctggctatcgttgagggttataactcctatttcagcttcagccgcaaccgtagcggctattctggtgtagccaccttctgtaaggacaatgctaccccagtggctgctgaagaaggcctgagtggcctgtttgccacccagaatggggatgttggttgctatggaaacatggatgagtttacccaagaggaactccgggctctggatagtgagggcagggccctcctcacacagcataagatccgcacatgggaaggtaaggagaagaccttgaccctaatcaacgtgtactgcccccatgcggaccctgggaggcctgagcggctagtctttaagatgcgcttctatcgtttgctgcaaatccgagcagaagccctcctggcggcaggcagccatgtgatcattctgggtgacctgaatacagcccaccgccccattgaccactgggatgcagtcaacctggaatgctttgaagaggacccagggcgcaagtggatggacagcttgctcagtaacttgggggtgccagtctgcctctcatgtagggcccttcatcgatagctaccgctgcttccaacaaagcaggagggggccttcacctgctggtcagcagtcactggcgcccgccatctcaactatggctcccggcttgactatgtgctgggggacaggaccctggtcatagacacctttcaggcctctttcctgctgcctgaggtgatgggctctgaccactgccctgtgggtgcagtcttgagtgtgtcctctgtgcctgcaaaacagtgcccacctctgtgcacccgcttcctccctgagtttgcaggcacccagctcaagatccttcgcttcctagttcctctcgaacaaagtcctgtgttggagcagtcgaccctgcagcacaacaatcaaaccccgggtacagacatgcccaaaaacaaagcccaagtgcggctcaaccaggcctcagcccagtcaggttggctctagcagaggccagaaaaacctgaagagctactttcagccctcccctagctgtccccaagcctctcctgacatagagctgcctagcctaccactgatgagcgccctcatgaccccgaagactccagaagagaaagcagtggccaaagtggtgaagggggcaagccaagaccttcagaaacccaaagatgagaaaggagtttacggacctccattcctggaaatcctggtgctggggcggggccccttttgcgcacaccccctttcggtggg

SEQ ID NO: 96807 - DNA, 1290 bp, Homo Sapiens
  misc_feature (218)..(229): n is a, c, g, or t
gcaactaagggtcggttcccccttacaaagcgcgttaaaagggccaagaagggtaagcgggcccccccaagtaccctgggtcaccagggccataattaaaggatctggccaaaataagaaacctttattggaaaatggcccaagaaataccactctctcatctctttgacatatggtcctttttcccccacactggctagtatgaaagcaggattagnnnnnnnnnnnncaaaccagtaaaagaaaaggcccaagagagcaaagatacttttgaatagagttcagacagagaatagaaaaccacaatagtgccaaagggttttgtttaacaaagactggtgcctaaggaccaccacagggatgcagcttccctggttgggttgcaatggtgcctaagatgctctgaaaaaaggtgctatgactagagcttaaaatgacaaggtctagcccaagacaatcaactcaatctcccaggatcagtctctggaaggctgccggaggggagaattcagaaaagcgactgccaaaaacagcagaaccagtccacgtgcccccagctggaaacccctttctgggcccaaggggcagcattatgtttcccagggtggtgataaaccttccggtacatatcccatgggaaaacatttgggcaagcagcagcaccttgtcctggtccctgaggagagcagtgaccatgtggcatggaggatcctggggtatagagaccctgatgctggatcccggaccccaaggatgagtgaggtcagcacccatgtgccaagaaaggacaaatgatgactgcgaaagactgaggtcaggcaggaactgtagcagctcaggagggcttgttcctcatgatccctgcgaacaggagggctcagacatgcttccaggaggccaaggcattgccaaagtcctgccttgtttcaggactctgtgtacttgctggttttggcaataaagatggcttgtaatattctcagagttgactgccccattgggaatggtagcttgcagcaaagccttcttaaaacacaatttgggaagtcatgagattttgaatcttgaaattattctcaatccaacagtaatgaaaaaggatgcttgtcatcttccaagatacagcagcaggtactcttcaatcatcattcaacagtgaacctaataagcttcctccctccttagttctccttcctgataactgatggagcaaaggggagtacaggggttggcaggtgtttactgtgtaacatatcactaccactgttcgtccccagtgtcctgcctcta

SEQ ID NO: 96808 - DNA, 887 bp, Homo Sapiens
  misc_feature (123)..(167): n is a, c, g, or t
  misc_feature (719)..(719): n is a, c, g, or t
  misc_feature (811)..(811): n is a, c, g, or t
  misc_feature (827)..(827): n is a, c, g, or t
ccacgcgtccgcacaaactgaggtgaattctctgctttgctcgtcacaaatgccaaactgactgccctttcacggtgtccatcttgctgtcttttgcttctgtttgatttggtctgcatatcnnnnnnnnnnnnnnnnnnnnnnnnnnnnnnnnnnnnnnnnnnnnncagttaacgcacgcacagacttacatgtcaagagtggactttagactttcatgtgttaagttgcttgagttacaccttgtgacccttctcccataacatggtgtgaggacggactgggagccggtacagactccagtgtttacagccttgctttcctcccaccgaccctggccccaggctgccccgggcctggcgggccacccctctctatgcaaacacgtaaaagccatgaatgctggaatccaaaactgacgaggtttatttttttcagagccagtggctggtcttccatttacagtgtcactattccctgacggagctgttatgtgccgctctagcgaaggccccagccgggatgctaggcctaattgttcagcgtggagatggcaactcacgtggtgccctaggtgcagctgcgtggtctggtatacatgctgcaaaattcacccagttcccctcattttaatttttctaacctacagcttaattttaataactttaaaacacttctaaatatttattttggcaccagcgtcaagacaaataatatcnctctcccattattttcataagtaacacagattccctgatttttaaaaactaaaaatacagcttaaacctttctttatgtataaagtatgccntatcatataccagggnaaaggtggggtaaataaaacttcctgttaatgaaccagtgtttgggcattttcttttatt

SEQ ID NO: 96809 - DNA, 885 bp, Homo Sapiens
  misc_feature (61)..(79): n is a, c, g, or t
  misc_feature (99)..(151): n is a, c, g, or t
  misc_feature (582)..(614): n is a, c, g, or t
  misc_feature (685)..(685): n is a, c, g, or t
gtgccaagctaaaattaaccctcactacaagggaataagcttgcggccgcatacgcggtcnnnnnnnnnnnnnnnnnnngagacagagtctcacctatnnnnnnnnnnnnnnnnnnnnnnnnnnnnnnnnnnnnnnnnnnnnnnnnnnnnngagttcaagctatccttccacctccgcctcctgagtagctgggaccacaggttcacataaccatgcctggctaatttatttttacttttattttaaaataaaagatgaggtctgtcttatgttgcccaggctggtctcaaactatcctacttcttcctcccaaagtggtgggattataggtgtgagccactgcacccagcctacttcactcttctgaattattctgatttattttcaacaacttttgtgaacttgcccgtgatacaaagcagatagtccctgaaccacagtcgtgcctccttgaaacaagccattctactgtgctaatgttttaatatcacatctcacaaataacaggggtgaatgtttctctctagcaatctaggcaggtgctggtgtttcatctccatttgaatgcttgacctcttaannnnnnnnnnnnnnnnnnnnnnnnnnnnnnnnntcaagggtttacaagcacagtattttacaaaaggtgtagcttttaaagagtgcagaaagggaaggattgtntttttctctcactatagtataagatctattttggagaaaaaagaaatatgagggctcgaagcatgattttatatacctattcacatttatctataactactttttaatcatatttacaccaactttcttgttgcatgcttcaaagaggtttggggtccatgaaactaagcttggaaaagcctcgtgcgatcttggctcgg

SEQ ID NO: 96810 - DNA, 1412 bp, Homo Sapiens
  misc_feature (329)..(347): n is a, c, g, or t
ggcgacatggagacaggggcggccgagctgtatgaccaggcccttttgggcatcctgcagcacgtgggcaacgtccaggatttcctgcgcgttctctttggcttcctctaccgcaagacagacttctatcgcttgctgcgccacccatcggaccgcatgggcttcccgcccggggccgcgcaggccttggtgctgcagttgtaccaggaccgtgtattctttgcattgtgaacaagactggggtctgtaaaataatgacaacaaagaccatctaactgtacatcttttaggtattcaaaacctttgaccacatggcccgtcaggatgannnnnnnnnnnnnnnnnnncttgaagagaaaatcagaagaaaggaagaggaagaggccaagactgtgtcagctgctgcagctgagaaggagccagtcccagttccagtccaggaaatagagattgactccaccacagaattggatgggcatcaggaagtagagaaagtgcagcctccaggccctgtgaaggaaatggcccatggttcacaggaggcagaagctccaggagcagttgctggtgctgctgaagtccctagggaaccaccaattcttcccaggattcaggagcagttccagaaaaatcccgacagttacaatggtgctgtccgagagaactacacctggtcacaggactatactgacctggaggtcagggtgccagtacccaagcacgtggtgaagggaaagcaggtctcagtggcccttagcagcagctccattcgtgtggccatgctggaggaaaatggggagcgcgtcctcatggaagggaagctcacccacaagatcaacactgagagttctctctggagtctcgagcccgggaagtgcgttttggtgaacctgagcaaggtgggcgagtattggtggaacgccatcctggagggagaagagcccatcgacattgacaagatcaacaaggagcgctccatggccaccgtggatgaggaggaacaggcggtgttggacaggcttacctttgactaccaccagaagctgcagggcaagccacagagccatgagctgaaagtccatgagatgctgaagaaggggtgggatgctgaaggttctcccttccgaggccagcgattcgaccctgccatgttcaacatctccccgggggctgtgcagttttaatgaccagaaggaaaggaaaccctcgccggtggggaggcagagccttatcctcggctgcccttcttggctccctgcattccagggacttgctcctcttgtttacccctagccatcctttctttcaagggtgaaccaggccttccaccctgaccttgcatctccagactgttccagagaaggtgcggggccagctgctatgtggtggccgctgtggctgacactgagtga

SEQ ID NO: 96811 - DNA, 249 bp, Homo Sapiens
ggggcacactcttgaagtgaccggcctggagacggttgcccagagcaaggcccatgtagcatccctggagggcctcatccctgaagataaggtcgtgcttctggcaggttctcccttacagaatgaagccaccctgggtcagtgtggggtggaagccctgacaaccctggaagtggttggccgcaggctaggagttcacaatgtctaaaagtcagctgattttgtgttaaaattcagtgtctggctttg

SEQ ID NO: 96812 - DNA, 1191 bp, Homo Sapiens
  misc_feature (198)..(234): n is a, c, g, or t
cgcagggaagaggaatcgcgcgcagagggtaacgtagaaagtggaggggcaggagggtcgcgaaagagatggcgaggaagaagagagggtgggcatggaccgcgggggggacagagcgggggcgattggggtgcggaaaccttgaggcgaactccaccatgaaggccggagtcgtcgcaatggagggccttaggaacnnnnnnnnnnnnnnnnnnnnnnnnnnnnnnnnnnnnnggaagggcagtaaggaggagcgcgagaaagtctggggaaaatccggggagcgaggaagaaggcagggttcaggggccaggggaaccaaaggtggcgtgcgttggtgggggagagaccgatgacgtgtttcaggtgaagacttgtgccccgtacggccttgtcgccaacaggctctttttagagacaggcaaaggctccacaccggggaccagagggcaggttgcagctgcagggaaagctggagagaactggggaagcctctccccactcgccactctcagaatcagaatcaagtcaatcacgagaaccttccccgcccatcacctcccggccagtccagtgtggagccaagaggggcctccaaagtgacccagggcctgcccggcctcaataaaagagcaaataaggaagcggctaggctctgacatcatttccgggggggctcatcaaagtgtgtgctccagcccccagagatggagctatgtggacacctgttccaccccacaccttcctctccagccaacaacagggcctgctccccaggaccagggcctgccaagaaaccccagtcttgtttcccggctgggaagcttcatctggcgaccccgctggtcacctgactgtcccttccatgacccagtgaattcacccctttcccaagagctcacggagggctgggcttctacgtccgagctggggcagtgacacagcgcattagctaaaatcgagtcctggggagcccccactcccatccttttccccagtaagacctgcgtgtggagcgcaagacaccatctagaattttggttttaatttgccagtctcgttctgtgccctgtttgccacaaggcccctggggccaggaccatggtttaacttggtcccagtggtgacagtatcagccctttgagaaaacagaggcgctggaagccagtggcgaggaacacaggattccag

SEQ ID NO: 96813 - DNA, 968 bp, Homo Sapiens
tggcaccacggctgggttgagactacggcacgaggtgcacaaaaaagaactagtgattccattactccttctaaatcatctcctgtacctgtttctgatactcagaaacttaaaaatctaccttttaagacttctggcttggaaactgccaagaagagaaacagcactttctgatgactgactactgacttctgacagatgacattgacgaatgactgacttgcgcaaagcaggcaacaacttacagcagacactacacacaccactcaactaaactgacatctgacaacgtgactccgttattgaacgctcggtacacgcggcactgactcttcacacactcaaggacgatatcacaaaccctcgcactcacattctacatagcgcttccacggctattcaaaacaaattcgatgtcatctttgacacactgcaatcagtagaactgcattgcactactctactggacgcacacacctgaactcggctgcaagcttacctgcaccattcaaggcggcagcaatttaccactgcacttggcaaccactgtaactctggccagcaactggaacatacaacacaacaactgctacagccataaacggggctcaacagtacaacaaccatgggctaaaccacggcaaacagctatcatatcaaagtccacacagttggggctacccacaaaactccccttaaaccgcaacaccgcaacgagatagaaccttctatccgttgtacttgcaaagaagacagtcatacacctttacaaaggccaaagagcgaaaacacaacatacaaacgcactttgggggtttggggccaaaggagctccccgtaatgtagcgtacccgctttgggggcaaacactttccccacacactccctatggggcatttacaaccttttctcaaacgcagaacactctacgttatcaaccccacatcaaaagcactcacccaccaaag

SEQ ID NO: 96814 - DNA, 1203 bp, Homo Sapiens
taggagaggactaagcacggaaagattcctcaaggcctcagtcccatgtccaaggcatacctaggttagaaatgtcctttacttgtttctcagttactatttctcctcttcctccctccccctgccttctcttggctgtcatttagctctctggcccacagaaatactccatccaaggagctggtcctcagtcagcctgatgaggacaggtcagtggccaacccttttgccccagtccttcatctggagacagtcacatagtcacgtcaacagttcacccaaagagaagaggtggggcctggcttctcccacagggcacagcctaactatggagacccagggctccttcctgctgcactaggcctgtgctctccctattgccttcaggtggtgtgatcccggcttcctcacagagcccttttttccttctgcccagctccatcccaccagagtttctacccccgctgaggcatctcctgggcacagaccaccacactctaagccggctggcctgggagttagggtcctgcccacctcacctgggaagttggggtcctgcccacctggagtttaacacgctggtcgctcactttgctttggtctgcacacctggtgtgtgcatgtgtatactgcttgtgccatctgtgtacccctctcccctggagtacacttgtggtcacactacagggggggacatcaagaatgcaatatttaatggattgctgcatgattccttaaaaatgaataaaactgtttacaagggaaagagagctaactgcaaagtaaaaaccccccaaacacaaaaactcaaccttgtcggccgcctccggccctcaaaaaactttcctaaacctttcctttgggccccccgggccccctaagggtaagtgaaccatggcccataacctgtttcccctaagaagatccctgggccaatggactattggctttgggatctctcccccaaaataaaaaacccccccgggcgggacaacccgaaacggtgtcttagaccaaaatccacatatgggaatcttcctgaagggccaattactggggaaccaatccaaacagcgaggtccccaggcgaaggctctcaatattacaaaatttaggcccccgccgccctgggcaaccctcattgcgcaaataaaccgggtgggtaaattctcatataaaccacatctctggccacaaacatgg

SEQ ID NO: 96815 - DNA, 1304 bp, Homo Sapiens
  misc_feature (41)..(54): n is a, c, g, or t
gtgtgttggttttgcttgtttgtttgtctttgttgagggannnnnnnnnnnnnnagaacaccgtgtggcacccgttgtccgttgcgacccttggtcgcactgctctgagtgttgccattcccatgctgtgcccccgcctttaccacgtagttcaactaccaggtgctcttgggcactggccaccagcggctcgtcaaccgactcgcccaacgagcgttcttgccacgccccccctgtggagagactgtccatggaggacctgagctactggtactgagcggcaccaagacacttccactggtgatgtggagtggaggaacagctgaccgaagcaggcacggaactgaacccaggctgactgaaggaaaagacacttgcagcactgctcgccgactgcccaaagactgagcctgcccgaaggttgtctgtccaaagacccctggggctgtggtaccaaaagctgggctgctaaaccctgagctgctgacctgtggtgtggcagctgctgtgctggctgtgctaccagtctgctgcccaaacagacttggtgcggtgctggctgccacttgcccaaacacgggcgtggcagagggggcagtggctgtgttgttggtgagctggttgaaagctgagctagaactggcagcaggaggctgagcaaagacggatgagccagaagtgacggtaccaaatgctgctgcctctgcagatgggccgggagcaacaatggacgtggtgctggaggctatgggggtacttgatgtttcgacggccacagggcctgcacttgagatagcagctgctgtgacagcagtctgcccaggcacagaaaaggaggaagcaggtggtactgcctccgtcctggcatcagggacccccgtggtggctggggtagcctctgcagaaagtgctacaagactagtactagatgctgcagtgccagagttgctgactgcaggctgggcaagaacaggttcttttttaacagagtcagaagtttgcggaggagcctggggaagctgggctgactgttgctcctctagaagtgaggctgctgatgctgagacctcactgtcacctggcttctcaggcaaagctgatgaagtggcctcttctgtgcttctgccagcggacataggcagggagggggtagttgctgaactcaggaggctaccaaatgacaatgtggggaatgatgttggaaggggagtggcagctgtagttggtggtggggcagatggggggcactgtgctattggtctgttggttccaaatgacacctagtctggccagccttagagatg

SEQ ID NO: 96816 - DNA, 1735 bp, Homo Sapiens
tgtaacacgccatccaacttcagcctccagtcgatctagagatccccctctgcagaaagtgctacaagactagtactagatgctccagggccagagttgctgactgcaggctgggcaagtacaggttcttttttaacagagtcagaagtttgcggaggagcctggggaagctgggctgactgttgctcctctagaagtgaggctgctgatgctgagacctcactgtcacctggcttctcaggcaaagctgatgaagtggcctcttctgtgcttctgccagcggacataggcagggagggggtagttgctgaactcaggaggctaccaaatgacaatgtggggaatgatgttggaaggggagtggcagctgtagttggtggtggggcagatgggggcactgtgctattggtctgttggcttccaaatgaaaaactagtcgtgccagcacttagagatgtcccaccaaaactgatgaccccagaggatcctgcactggtgactggcagactgcaaaaaacggcagttgaggaagtgctggtggctgctggtggtgctactgaggtggtggttgcagaggatgtcacagggggctccgtgtgcttccctaacaccgggggggcagtaaaattaaaccctgagggcacgcctgacgtcttggttggctgggtactagttaggcttgtggatgaagccttattggttggttttgtagaatcatctgcttggccaacccgcagtcctgaaaaacttcccagagtctctccagccaaagaacttggaaacagaagctcttccccagcttggacgggtggggtttccagcttactagaggtggtggaaagagcaagttccagaaggtgccacaggtctgctgctagatgcggcaggttctcctggggtggtgtttgatgcggatgtgattcctgagggagggtgagctttcaggaatggcctcataagaaggtttgcttcccccaccagatgagaatgcgtccggctggcttgactctttagtggagggtgttgccccttgtgcagcagtgaaattagaagacggtgttggtgtgattatcccaaaattaaagccagtccctgatggagaaaatgagaaaggcttgctgaactgcccagaagcagatggggttgaagtcacagctgtttctatcttggctgtccctgaagctttgtcaccagatgataactgaccggatgctggtgtaggcccagatggcttaagggaatttattagagacccctgcttggcttggttagcagccactggggtcaacactgggtgaggtgttttggctgtggagtagggcactgaagaacccatggctgtagaaggggttgcagggttattcttcaattcctgcacatttaccacttgagggacattcttcaacgttgattcagtcaaagtgtttacagctggtgcctgactggccatctgccgcctgagtgctgctgcggcagctgcctgcggggctgagatggggtgggaaggactaggtgcaccatgtttcacggttttcgtggcaagcattgtgctatcggccccttgaggaataattttgctagcagatgtagccactgaagttcccatcacaccaggtgaagaaccatgaaccaggtgagatttagcaaaaggtgctgcatggggcaagagactgggctggatggaaggagtgcgaaccacgggcgtgccgaggggcctgaaccactgcctgcgtca

SEQ ID NO: 96817 - DNA, 941 bp, Homo Sapiens
  misc_feature (813)..(813): n is a, c, g, or t
gagaggacagggtggagaggaggagaaccctgaaggagagacggaagatgccaggacctttgcttggacagccattgcccttccaggagaccctggagtgtactgagggttgctggactgttccacccagaggagcaaggctgtacaatgagggtctgaatctggcacacctgtcccttatgtaaaaggagtcgtggtcacaagaccctgggctggttagcctctcccgacctcattccatttctatcttctgaccttgcctctcatctttaaaataaccctcatggggtgcccctccaccttcctctggaatccaagtattcctgtttcacatttgccccaaatctttgctgtggaattgggaaatcaaaccagagtcctcctcgcctgatttccagctcaggaagggcctgctggcctgccctgttcccagttacactttcagatccctttgtgctcaagatctcagagggggtggctttttgttaaagagccttcagtcgcaatgctacccagcaccccatgtgccaaaagaaaccagctcctgtgtcaaagggcttccaaacctgatctcactctcaacaggcgatggtgctgatgtttcaagaattgtgtttttataaaacagaggtctcagcatagtcactcttcacatagtgccttacccatgggtatcgtcatatccgggtcccagttcagtttgtctgcacagcagccaccctgcctggcaacagagaccccaagacctacacagtgaaccctactgccccaaaggcgttctccaggtgacttgtgaaaacagacctccggggnaagtgatttattggggggtgtacactggggggcaatatggtttagcactgaaatttcatttgtccttagggtctatgaagtgagtccaatccttttcttggggaaagggttttggggcatccgtacaa

SEQ ID NO: 96818 - DNA, 1468 bp, Homo Sapiens
  misc_feature (1452)..(1452): n is a, c, g, or t
acggcagtaactctaacggtttaaggtagcgaggcctgggtggcgaattcggcacgaggctgaggccggtacagctgcgcgtctgcgggaataggtgcagcgggcccttggcgggggactctgagggaggagctggggacggcgaccctaggagagttctttggggtgactttcaagatggactctactctaacagcaagtgaaatccggcagcgatttatagatttcttcaagaggaacgagcatacgtatgttcactcgtctgccaccatcccattggatgaccccactttgctctttgccaatgcaggcatgaaccagtttaaacccattttcctgaacacaattgacccatctcaccccatggcaaagctgagcagagctgccaatacccagaagtgcatccgggctgggggcaaacataatgacctggacgatgtgggcaaggatgtctatcatcacaccttcttcgagatgctgggctcttggtcttttggagattactttaaggaattggcatgtaagatggctctggaactcctcacccaagagtttggcattcccattgaaagactttatgttacttactttggcggggatgaagcagctggcttagaagcagatctggaatgcaaacagatctggcaaaatttggggctggatgacaccaaaatcctcccaggcaacatgaaggataacttctgggagatgggtgacacgggcccctgtggtccttgcagtgagatccactacgaccggattggtggtcgggacgccgcacatcttgtcaaccaggacgaccctaatgtgctggagatctggaaccttgtgttcatccagtataacagggaagctgatggcattctgaaacctcttcccaagaaaagcattgacacagggatgggcctggaacgactggtatctgtgctgcagaataagatgtccaactatgacactgacctttttgtcccttactttgaagccattcagaagggcacaggtgcccgaccatacactgggaaagttggtgctgaggatgccgatgggattgacatggcctaccgggtgctggctgaccatgctcggaccatcactgtggcactggctgatggtggccggcctgacaacacagggcgtggatatgtgttgagacggattctccgccgagctgtccgatacgcccatgaaaagctcaatgccagcaggggcttctttgctacgttagtggatgttgtcgtccagtccctgggagatgcatttcctgagctgaagaaggacccagacatggtgaaggacatcattaatgaagaagaggtgcagtttctcaagactctcagcagagggcgtcgcatcctggacaggaaaattcagagcctgggagacagcaagaccattcccggagacactgcttggctcctctatgaacacctatggggttttcaagtggatctngactggactgattggc

SEQ ID NO: 96819 - DNA, 964 bp, Homo Sapiens
agtaactataacggtcttaaggtagcgaggcctgggtggcgaattcggcacgaggctggaaccttgtgttcatccagtataacagggaagctgatggcattctgaaacctcttcccaagaaaagcattgacacagggatgggcctggaacgactggtatctgtgctgcagaataagatgtccaactatgacactgacctttttgtcccttactttgaagccattcagaagggcacaggtgcccgaccatacactgggaaagttggtgctgaggatgccgatgggattgacatggcctaccgggtgctggctgaccacgctcggaccatcactgtggcactggctgatggtggccggcctgacaacacagggcgtggatatgtgttgagacggattctccgccgagctgtccgatacgcccatgaaaagctcaatgccagcaggggcttctttgctacgttagtggatgttgtcgtccagtccctgggagatgcatttcctgagctgaagaaggacccagacatggtgaaggacatcattaatgaagaagaggtgcagtttctcaagactctcagcagagggcgtcgcatcctggacaggaaaattcagagcctgggagacagcaagaccattcccggagacactgcttggctcctctatgacacctatgggtttccagtggatctgactggactgatcgctgaagagaagggcctggtggtagacatggatggctttgaagaggagaggaaactggcccagctgaaatcacagggcaagggagctggtggggaagacctcattatgctggacatttacgctatcgaagagctcccggccacggggtctggaagggccccagatgaattccccccaaagtaccaattacactttgggaacttccaggggggcagcttattgtaatttcgaaaaaccccacgtgggcctaaccggggtaatgcgca

SEQ ID NO: 96820 - DNA, 915 bp, Homo Sapiens
gggggcgatcccggcgagcaccttggcgcgcggagctggcaccttggcgctgttggtggcggcggagacagctgtgaagtgtgaggttctttgtctgctggcagctaggggcgacgaggcgggacgtcatggaagtgaaggatgccaattctgcgcttctcagtaactacgaggtatttcagttactaactgatctgaaagagcagcgtaaagaaagtggaaagaataaacacagctctgggcaacagaacttgaacactatcacctatgaaacgttaaaatacatatcaaaaacaccatgcaggcaccagagtcctgaaattgtcagagaatttctcacagcattgaaaagccacaagttgaccaaagctgagaagctccagctgctgaaccaccggcctgtgactgctgtggagatccagctgatggtggaagagagtgaagagcggctcacggaggagcagattgaagctcttctccacaccgtcaccagcattctgcctgcagagccagaggctgagcagaagaagaatacaaacagcaatgtggcaatggaccgaagaggaccccagcatagaagagcacacctggccccggcgtttcatgaagtcagaaggcctggcagccattttctggacgttgagaggattgtttatttgatttttatcctcatcccagcaggccctggctttgtggttagttgggtacatcaccaaaataagttaaaaagaaatatttgtggcttgggggagaaaaaacatggtgaaaaccaggctgaggttgtcagggccaaaaactgaaagggggggaacagtgaccgcgggaccccctctgccgcttgaaagattttcctccccggccctttgccccagttggtgggggaggtcctctgttgcacaagcggggggaaaatgg

SEQ ID NO: 96821 - DNA, 1517 bp, Homo Sapiens
  misc_feature (71)..(130): n is a, c, g, or t
  misc_feature (143)..(159): n is a, c, g, or t
  misc_feature (165)..(178): n is a, c, g, or t
  misc_feature (898)..(898): n is a, c, g, or t
  misc_feature (1296)..(1296): n is a, c, g, or t
  misc_feature (1430)..(1430): n is a, c, g, or t
  misc_feature (1451)..(1451): n is a, c, g, or t
  misc_feature (1482)..(1482): n is a, c, g, or t
  misc_feature (1484)..(1484): n is a, c, g, or t
gtgtggtgatgtgcatctgtaatctcagctacttggggggctgaggtgagaggatcgcttgagcttgggtnnnnnnnnnnnnnnnnnnnnnnnnnnnnnnnnnnnnnnnnnnnnnnnnnnnnnnnnnnnnggaccctgtctcnnnnnnnnnnnnnnnnntatatnnnnnnnnnnnnnntatttttatgaggtgaagtgcatcaaacttgggaaagatttgaggaggctgggaacctcctggaaaaccactccttgaagaaagatatgagagacatttagaagtgattcctgctttcagaaggaggcggattcaaatacatcaaaagtcccttcctctgctaagtgtttatagttcaatgaataatttcaatatttgtatgtgttcttgtcattttatttttttctgaaaaacttccaaaaatttgaaaataaaattacagccttttcttcttaacgggcggggacaaaacgagcgagaagatcaataaataacccgcgtttcccctcgccccccctcttcacgatgatttaccccaccccgccgttgcgcgcgcgtggagtgagcggagacgccgactttccaccatcggcggatacccgccagcccgtaccgcgtgcccgcggccctggcgttacgcccgcggataaacgcgttttccgcgcataacctatgctcgccccgcctcgcgggcatctggttccgcgtcggtgaagaaacaccccgcggcgacacggccgggccgtggcctaaaagagataactggcgcatccccacacaccacaccacggtgttttgcccggctcccacccccgcctcataaataaaccacgccgccccccattggtcgcgcggccgcctcgcgccgcccggacttctattcatcccaccacacgacgngtgtagcggtcgtcgtgtcgcctccccccccgctctctcacaacaggcgttgtctgcggcttccacgagattatgagcggagggggaggccgcgtacagccccgcgacacctagatcaccacaccccacgtgcgcgggcactgtgccagcactcctccatctcatatctggggataaagagcggccctccacgcccgcccgccgttgctttcatattttttttctccccgccgctcggtgcttgctttcccgccacacaccgccgcgcctgagttataacaatcacatccgtagtgagtcagcacccccgcgcggcagtagaccggcaatttatgaggagtagtaggcgcacggtacgcatcgctcgtacccatgtgacgcaaggtcgacgcggcctnacttactaggtgactgacagcgggatgggtgtgtcgtcacccggtccgcgccccaccacgcccatggtgatatgacgtttcactatagtcctagacagacgtactcgtatttgcccacgggtctctgatgctanacacccacgctgttgctccancgttattacccataccacaagaatgacgagncncccctctattttattacacagcgacgccacggg

SEQ ID NO: 96822 - DNA, 996 bp, Homo Sapiens
aacaaaaaacctaaccctcccctaccgcgcccttctcccgctggtccggtccggaattcccgggatggcagcgctggaggaagaattcacgttgtcttcggtagtcctgagcgccgggcctgaaggactcctaggcgtggagcagagcgacaaaacagaccagtttctagtgacagacagcggcaggacagtcatcctctataaggtttctgatcagaaacccttggggagctggtcagtgaaacaaggtcaaattataacatgtccagctgtgtgcaactttcaaactggagagtatgttgttgtacacgataataaggttttaagaatatggaataatgaagatgtaaacctggataaagtatttaaagctacattgtcagcagaagtatataggatactttcagtgcaagggacagaacccttggtgctcttcaaggaaggtgctgttcgtggtttagaggccttgcttgcagacccccagcagaaaattgaaactgttatctctgatgaagaagtgattaaatggacaaagtttttcgtagtattcagacatcctgttttaatttttattactgaaaaacatggaaattactttgcttacgtgcaaatgtttaactcacgtatcttaaccaaatatacactcttacttggacaagacgaaaactctgttataaagagttttactgcatctgtagatcgggaaattcatctctttgatgtcattaagctctgatggttgtatatatgaaaaccttgataccaatacgtccagctggacccagaaaaaaatcagagcttaagtaaatcactgctgctcaaggctgttgtatctggtaaacgctcgaaatggaggtgcactcactggccctggaatcacgatcacgtccccagtccttaggaagtccccttagcagcctttctaaggaaatgcctcctcctggatgggaacattaaaaattttcaagacacctaccaaactttccaaaagaagtt

SEQ ID NO: 96823 - DNA, 1724 bp, Homo Sapiens
  misc_feature (1110)..(1124): n is a, c, g, or t
caaggtagcgaggcctgggtggcgatctcggcacgaggctggactctcgggcagagctttgtgagagaaacaaggctggcttcaagtgatctgcaaccagagtaattgggatttgacaaggactgtgaaaggctgactctccctgttctctttcatgctggcaccgggcagagtgtgggaactactgcctcaatacgatcatagaagccattgagatcccgcagtttatcggccgcagttacctgacgtatgacaacccagatatcttgaagagggtgtcaggatcaagatcaaatgtgttcatgaggtttaaaacaactgccaaggatggccttttgctgtggaggggagacagccccatgagacccaacagcgacttcatttccttgggccttcgggatggagccctcgtgttcagctataacctgggcagtggtgtggcatccatcatggtgaatggctccttcaacgatggtcggtggcaccgagttaaggccgttagggatggccagtcaggaaagataaccgtggatgactatggagccagaacaggcaaatccccaggcatgatgcggcagcttaacatcaatggagctctgtatgtgggtggaatgaaggaaattgctctgcacactaacaggcaatatatgagagggctcgtgggctgtatctctcacttcaccctgtccaccgattaccacatttccctcgtggaagatgccgtggatgggaaaaacatcaacacttgtggagccaagtaacaccagcctggccttgtccaagggacagagccttctattctgagaatccccagggcccctcagaaccctgcctgatgctatatgcagaaggcccagggaccaggggtgtttcctctcaccaagaaaaaagtacacactgatgagaaaccgaggaaccaagacaggcatccctgggtggcctttcctgctgacactccacgagctgacccagcagaattctctgtgtaggaagcatcggactttgtccattgaatatgtagcggctgccagagatcacacatcaatgcaaattccagagcctgtctgctatagctcagtgactgtgttgtgattcatagtacattaaaannnnnnnnnnnnnnnaagaatcccacagggcactattaaaatacttctctccttccctgactcatgacactcttcctgacagcagaatgactgtgtgaccttgaacttcacatttcccacattggcccttggattgttcggattaaccccttccactcctcactggctggttcactgtgttctgactagtccataaaaataaagatggaaggagatcaaacacagaatcataatcataatgcggcccccttccccagagcttacctcgaatgtgaaatccctacttcttataatgcagagttaaggagctgagcccccatgattttgtagctgtacttttgtatgtgtatatttttatagctgcagattgtccacacagtatacttttggaagtttgggtggatgactctgaattcttgcacacctttcctaaaaatttctcccaagagagacttgtttgggccttttgtggtgtcagtggaatggataggtaacttgggtgggcaacttggggagctgaccattctcttttggtaaatgttgacggctcaagaggatgaatatgaagctttccaagataagcagattaaaaggaacatgtgttaccgaaaaaaa

SEQ ID NO: 96824 - DNA, 1123 bp, Homo Sapiens
ctaggtcggcgcccgatcggcaagaagagattagcaaattgatgcgactgcaagtttcaacacagatccatacgtccgtaatttggaatcatggtcaaagatgagatgacagacgtgactgggcgggtgctgcagccgccctccatcctctacgggggcaggaataaagctattgcgacccctgtccagggcgtctgggacatgcggaacaagcagttccacacgggcatcgagatcaaggtgtgggccattgcgtgcttcgccccccagcgccagtgcacggaagtccatctgaagtccttcacagagcagctcagaaagatctcgagagacgccggcatgcccatccagggccagccgtgcttctgcaaatacgcgcagggggcggacagcgtggagcccatgttccggcacctgaagaacacgtatgcgggcctgcagctggtggtggtcatcctgcccggcaagacgcccgtgtacgccgaggtcaagcgcgtgggagacacggtgctggggatggccacgcagtgcgtgcagatgaagaacgtgcagaggaccacgccacagaccctgtccaacctctgcctgaagatcaacgtcaagctgggaggcgtgaacaacatcctgctgccccagggcaggccgccggtgttccagcagcccgtcatctttctgggagcagacgtcactcacccccccgccggggatgggaagaagccctccattgccgccgtggtggggcagcatggacgcccaccccaatcgctactgcgccaccgtgcgcgtgcagcagcaccggcaggagatcatacaagacctggccgccatggtccgcgaagctcctcatccagtttctacaagtccacgcgcttcaagcccacccgcatcatcttctaccgcgacggggtctctgaaagccagtttccagcaggttctccaccacgaagttgctgggccattccgtgaaggctggtatcaagctaagaaaaagactacccgccccggggatcacccttccttcgggggggccgaaaaaagggacccaatacccgggttccttcttggccttggaacaagaaaccaagcggggttggggaaaaaatgtgggaaacctttcccagcc

SEQ ID NO: 96825 - DNA, 1490 bp, Homo Sapiens
  misc_feature (184)..(195): n is a, c, g, or t
  misc_feature (472)..(581): n is a, c, g, or t
  misc_feature (639)..(647): n is a, c, g, or t
  misc_feature (652)..(715): n is a, c, g, or t
  misc_feature (1232)..(1300): n is a, c, g, or t
  misc_feature (1326)..(1326): n is a, c, g, or t
gcttgcttcctgtctccttgatatctacacttgtcttagatcacatgccctgcttcagctggtaatgggactgcatcggttccaagtgtggcaagtaagttttcggctctgaagaactgacactagctagatttgtattcagagtgtgagagcaagctctacagatagaccttattggactacnnnnnnnnnnnncttcatgcagcctttctaccaagttttcaccttgtttcaggtcagaggaatgatagaatttgtcatttttcttacaacagcctttcatactattcttcatatgtttcaagctaatcttgtagctaagctacctaatcctctgaaaactgttttctctgatttgtatttagattcctccccccattattcacaatcatattgtattgtcggaaacccccccaatgggccagaagcaggtttggctttggaaaaataggtggtttttaaaagcttaatnnnnnnnnnnnnnnnnnnnnnnnnnnnnnnnnnnnnnnnnnnnnnnnnnnnnnnnnnnnnnnnnnnnnnnnnnnnnnnnnnnnnnnnnnnnnnnnnnnnnnnnnnnnnnnattacttcccccgcggggccgcacccgaccgctagcacggggggcccaactccagggnnnnnnnnnggtannnnnnnnnnnnnnnnnnnnnnnnnnnnnnnnnnnnnnnnnnnnnnnnnnnnnnnnnnnnnnnnaggcccgcgcgccccggggctgggccccgccgcgccaatctggggcccgatgacgcgccggggcccgccgcgagtcaccccacacccgcccacgaacgcagcgacccagatccacgcacgtcccgcacccgacccgcacgtcccggccccggcgtagattgaactatagcccacaccgtcggggcgcatgatcgcctccctgtggtcgctcgcccccggcgccgccgactctcgagtgccagacgcgcagccccgcccgctagtgtatcacgcaggtcgaccgaccggcccgctcgcccgtagccgtatccgcccgcgctcgctcacgacacgccagtcgggccgcgatgcgagggcggcgcctgccgcggggaggcacgcccccccgggcgtgtgccgcggcgcgccgccccccacgtaaccgcgtatcgcacagcgcgcgcaccgggggtcgcgctattgattgtgtgcgcccgcaccgcgccccggagccccgcggaccgggggcgcggcggtnnnnnnnnnnnnnnnnnnnnnnnnnnnnnnnnnnnnnnnnnnnnnnnnnnnnnnnnnnnnnnnnnnnnnttgtctctgatcccgcgccccatctntactcccgacgctgcggggcatcttccgcgcatccctgtcctctgcatcattcgcggcgacatccgccgagtgatgacacctcgcgcccgccgccttcgcgtttcccgcgcaatctatctccggtccgccgcaccgccgcccccgcccggaccatgccgtgcgc

SEQ ID NO: 96826 - DNA, 1114 bp, Homo Sapiens
  misc_feature (527)..(527): n is a, c, g, or t
  misc_feature (565)..(565): n is a, c, g, or t
  misc_feature (571)..(571): n is a, c, g, or t
  misc_feature (947)..(1050): n is a, c, g, or t
ggagcctcgaacccgagacgctagacccaatttggtgcccatgggaggagtgggagtggcagaggcagcgagaccactcctttcttggcccaccatttctctcaccatttttactgcagtgaactcctctcagggtggggggctggtacagaggcaactccgctttcataactctcacagggtcctttgtcggaggtgtccctgccctcctaccccagcgtggtgggagtgcgacgccaggcttctccctcctccctggcctcctgtgcctccagcctccacatctcctgagatcctccccaccccacacttacacaggtccccacacgcccctggtgcccctaaaccgccacccaaccccactcaccctggggccgggactggggtgtcagagctgagccagggaccttgggaggtggctgggaccggcgcctcctgctccctctttcattttccctttcggatttggccaggatggaggacaggacaggatggctgagaggggctagcgctcccccttctcttanaggaacagggtgaccctgctggctggctccgcccttgngaacangcacggaccacgccccttgctgggctctgtggccctcactctttagctaaatttccatctggaaatgggggaggggggtaaccagagccacatcctttatcgaggaagctgggggattcctagaagcccttcccagacagaccctcagtctggagcctagatccactacgcactaaccatgccctgtgaagatggtcttcggggacagagggaggtttggtgctggagtttaaggggcagcaaacatctaacagcttctggttccagctctgccaccgctcaccttggacaaatcattcggcggtactgagccaggctttcctgccttgtcaacaaaggcggccagtccagctgacccccaagtttccttccagcnnnnnnnnnnnnnnnnnnnnnnnnnnnnnnnnnnnnnnnnnnnnnnnnnnnnnnnnnnnnnnnnnnnnnnnnnnnnnnnnnnnnnnnnnnnnnnnnnnnnnnnnctctacttcttaatattgaattcccaaccatattacagagaaccaaaaaaacccttgtgcctgc

SEQ ID NO: 96827 - DNA, 962 bp, Homo Sapiens
  misc_feature (846)..(846): n is a, c, g, or t
  misc_feature (874)..(874): n is a, c, g, or t
gagcgaggcctgggtggcgaattcggcacgaggggagcctgcggcgtgcagtgtgaggggcgggacccggctgccggcggtgggtctagctgggggaggtcgggccatgctggtgggccagggcgcggggctgctggggcccgcggtggtcaccgccgcggtggtgctgctgctgagcggcgtggggccggcgcacggctcggaggacatcgtggtgggctgcggtggcttcgtcaagtcggacgtggagatcaactactcgctcatcgagataaagctgtacaccaagcatgggactttgaaataccagacagactgtgcccctaataatggttactttatgatccctttgtatgataagggggatttcattctgaagattgagcctcccctagggtggagttttgagccgacgaccgtggagctccatgtggatggagtcagtgacatctgcacaaagggtggggacatcaactttgtcttcactgggttctctgtgaatggcaaggtcctcagcaaagggcagcccctgggtcctgcgggagttcaggtgtctctgagaaacactgggaccgaagcaaagatccagtccacagttacacagcctggcggaaagtttgcattttttaaagttctgcctggagattatgaaatcctcgcaactcatccaacctgggcgttgaaagaggcaagcaccacagtgcgtgtaaccaactccaatgccaatgcggccagtcccctcatagttgctggctacaatgtgtctggctctgtccgaagtgatgggggagcccatgaaaggggggaaagtttccttctcttttcctccttaataactaaaggagnatgtcctggggctgcaatgtctcaccangtgcctggggttcccacccccaagacgaaagtctggcgcaatttggggcaacccgggcctccaaaaaagaagggctcccttcctcttt

SEQ ID NO: 96828 - DNA, 917 bp, Homo Sapiens
  misc_feature (114)..(114): n is a, c, g, or t
  misc_feature (129)..(129): n is a, c, g, or t
  misc_feature (144)..(144): n is a, c, g, or t
  misc_feature (168)..(168): n is a, c, g, or t
  misc_feature (237)..(237): n is a, c, g, or t
ttaaaacttaaattccggatttgggtttcaggggccaagcactaatttcccccttctattttccaaaccaaaaaaattagttcccccagctttccatagaccaaaatgtttttntaaaaggatcagcancaaaatcaatgaccnccacgtcctttagccatttcttcnccaattcctctttctgaggcagagagaggggaataatagaaacaaagctaaggatttaaactattttcnagtagtagaagacatgttaaaggccaaaaaagtgtactatttaacagaattcttatattcctaagttattgtccttcataggacaatatcagctaagaattagttacttgtattgattccctcccaaaaagaattgtataattcattcactcttgttagtggctgtgctacaggaaaggtatcaaagcaacctatggtatatgtatggtatatagtaatgtaaaaagtgcatcacattcttgattttcagtttctcatagcagcaggattaatctaagacagaaaacagttgtattttcattcttaaaatgcaacaatatctaatgaaatgtattcaagatcatgaaaggatcctcctctatgaaggataaatgaaaacagattaataatagacaaacagggtaaactaaaggcattcattcatatttacatattaaaaccacttttgttaacaccaaatctttacatctagcaaaagaaataagcattttaagaataaagcagacatcactaaagcagtatccattttcagagcctttgattagcacctgaggaaaaaagggtacatggaaagctatgtaatttgccctcaagttaatttgttggtctgaagagtacaacaactttgatatgcactgaaagtaaaactaaattggaaaataaatgtttcggacgcgtgg

SEQ ID NO: 96829 - DNA, 1396 bp, Homo Sapiens
  misc_feature (260)..(275): n is a, c, g, or t
  misc_feature (398)..(413): n is a, c, g, or t
  misc_feature (539)..(553): n is a, c, g, or t
cataaggtctaggtacgaggcgggtggtgaatcggcacgagggacacacacactgcctggatgcatgtatgcacacacatgcgcgcacacgtgctccctgaaggcacacgtacgcacacacgcacatgcacagatatgccgcctgggcacacagataagctgcccaaatgcacgcacacgcacagagacatgccagaacatacaaggacatgctgcctgaacatacacacgcacacccatgcgcagatgtgctgcctggnnnnnnnnnnnnnnnnggatatgctgtctggacgcacacacgtgcagatatggtatccggacacacacgtgcacagatatgctgcctggacacacagataatgctgccttgacacacacatgcacggatattgcctggnnnnnnnnnnnnnnnngtgtgcacagatatgctgtctggacacgcacacacatgcagatatgctgcctggacacacacttccagacacacgtgcacaggcgcagatatgctgcctggacacacgcagatatgctgtctagtnnnnnnnnnnnnnnngcacgcagatatgctgactggacacacacacagataatgctgcctcaacactcacacacgtgcagatattgcctggacacacacatgtgcacagatatgctgtctggacatgcacacacgtgcagatatgctgtccggatacacacgcacgcacacatgcagatatgctgcctgggcacacacttccggacacacatgcacacacaggtgcagatatgctgcctggacacacgcagactgacgtgcttttgggagggtgtgccgtgaagcctgcagtacgtgtgccgtgaggctcatagttgatgagggactttccctgctccaccgtcactcccccaactctgcccgcctctgtccccgcctcagtccccgcctccatccccgcctctgtcccctggccttggcggctatttttgccacctgccttgggtgcccaggagtcccctactgctgtgggctggggttgggggcacagcagccccaagcctgagaggctggagcccatggctagtggctcatccccactgcattctccccctgacacagagaaggggccttggtatttatatttaagaaatgaaagataatataaataatgatggaaggaagactgggttgcagggactgtggtctctcctggggcccgggacccgcctggtctttcagccatgctgatgaccacacccccgtccaggccaagaaaacaccccccaccccactggtccgtgtggggccccagatctcccggaatttttaatggtagaagtttggagcctgaaaacccccgcaatatttaaaatttatttttggttaaaaacatgaaaaagtgccattcccttttcc

SEQ ID NO: 96830 - DNA, 1218 bp, Homo Sapiens
agcgggattcccggggaatcgtcgagccacgcgtccgcccacgcgtccggcacggcgctggggccgcccgcagcgctcactcgctcgcactcagtcgcgggaggcttccccgcgccggccgcgtcccgcccgctccccggcaccagaagttcctctgcgcgtccgacggcgacatgggcgtccccacggccctggaggccggcagctggcgctggggatccctgctcttcgctctcttcctggctgcgtccctaggtccggtggcagccttcaaggtcgccacgccgtattccctgtatgtctgtcccgaggggcagaacgtcaccctcacctgcaggctcttgggccctgtggacaaagggcacgatgtgaccttctacaagacgtggtaccgcagctcgaggggcgaggtgcagacctgctcagagcgccggcccatccgcaacctcacgttccaggaccttcacctgcaccatggaggccaccaggctgccaacaccagccacgacctggctcagcgccacgggctggagtcggcctccgaccaccatggcaacttctccatcaccatgcgcaacctgaccctgctggatagcggcctctactgctgcctggtggtggagatcaggcaccaccactcggagcacagggtccatggtgccatggagctgcaggtgcagacaggcaaagatgcaccatccaactgtgtggtgtacccatcctcctcccaggagagtgaaaacatcacggctgcagccctggctacgggtgcctgcatcgtaggaatcctctgcctccccctcatcctgctcctggtctacaagcaaaggcaggcagcctccaaccgccgtgcccaggagctggtgcggatggacagcaacattcaagggattgaaaaccccggctttgaagcctcaccacctgcccaggggatacccgaggccaaagtcaggcaccccctgtcctatgtggcccagcggcagccttctgagtctgggcggcatctgctttcggagcccagcacccccctgtctcctccagccccggagacgtcttcctcccatccctggacctgtcctgactctccaaactttgaggtcatctagcccagctgggggacagtgggctgtttgtggctggggtcttgggggcagggtgcatttgagccagggctggtctgtgagtgggctccttgggctcggccctggttcctccctc

SEQ ID NO: 96831 - DNA, 1520 bp, Homo Sapiens
  misc_feature (254)..(254): n is a, c, g, or t
tctgtgccctgggtgggctggccccgggccagcagctatgctcccgggaccagtaaagatgttcccggaacccagggaagctccaagggtcataacacaggctggtccacaccagggacttccagcaaacctttctcacacagaggcccgggaggtcccgggcacttcagcccagggcaactggcttctgaggtagcagccccgccagcatccaggacagactaaggggaccgtgaccaagggctctccaagcntagtcacccaggacagtcagagacggaaccctcgcccctcttgagagagctcatgggctttgggggccccaataccaaaaggtgctggaggaaggcagtggtggcagggacccaagttagggctgcgcaccacggcgcatgctactcagaggttgcactaccttcagctgtccctcaaaccaacggttcctggtggcgtcgtagaagtacagatcgttgaagaactcgcccgacaggctctcctcctcttcctcgtcacagacacccccgaagaacagtgtctggtgattcggggccatggccacggaaaagccagaccgtggggtgggcttgacccccgaagggttcatccgagtccaaacccacttgtcttctcttccgtcctctggcttcagcaggaacatgtctgagtgccgtgtgcccttgtccacgtctttcttaactctctgtttcgagtagcccccatagacgacgatgccgccctggggagtgacggacatctggcagcctgatctgggtgtgggccccgtccctgacggggacagcttgctccatgtgaaggtgtccagattaaaggcatacacgtcgttgtagtagatgtaatcccgtgtactttcatggaagccaccaaacaggatcaattgtctcttccaggccaccatccgatgtccactccgacccgaaggaccgcctgttgatttgacttgttcccaggtcttggtggccaaatgcaggacccagagatccttgtagtggtagaactgctctccgttgggagaggcaaactcccctccaaagacccacagctgtccgccaacttgaggcactaccaccgcctggtgagcacagcgcctcggaggtggactggggatatcaactttggtccaggtgtcctttctgatattgtagacatagagctcgttatacaaaaaagttttttggccgttgaaatattcacctccaaaaaggattaactcatctttctcaggatgaaccgagagggaggcatttaaccttggtgagggtggggggcacggaacttccacagtctgagtcctcttggcatcgagtgtctggaaatgggctatgagcgcttccaggtcttcctcctccttccgcgagcgcttagacaccttcttctccatcttggcggccgtcttctccgcgccgcggcccttcttctccttcttgcccttcttgcccatcttgccgggtcccaagccgcgacgggacaccaggaaagaaaacggcccgcgctctccgctc

SEQ ID NO: 96832 - DNA, 1132 bp, Homo Sapiens
  misc_feature (156)..(200): n is a, c, g, or t
ggataggaagatagaccgtgtttataaaaagcaggtggtacgctccggtatcccgggatatcagtcgaccacgcgtacggtcggagttgggtgcaggcaggtgccatgggcccgcttgaggcacactgaggggacgcggggctgggccatggccgnnnnnnnnnnnnnnnnnnnnnnnnnnnnnnnnnnnnnnnnnnnnncttcaggcaaccagccgcctcaggagctggggcttggggagctgctggaggagttctcccggactcagtaccgggccaaggatggcagcgggaccggcggctctaaggttgagcgcattgagaagagatgtctggagctgtttggccgagactactgtttcagcgtgattccaaacacgaatggggatatctgtggccactatccccggcacatcgtgttcctggagtatgagagttctgagaaggagaaagacacgtttgagagtaccgtacaggtgagcaagttgcaagacctcatccaccgcagcaagatggcccggtgcagaggacggtttgtctgcccagtaatcctgttcaagggcaagcacatttgcaggtcggccacactggctggatggggagagctgtatggacgctcaggctacaactattttttctcagggggtgcagatgatgcctgggcagatgtggaggacgtcacggaggaggactgtgctcttcgaagtggtgacacgcatctttttgataaggtcagaggctatgacatcaagctgcttcgatacctgtcagtcaaatacatctgtgacctgatggtggagaacaagaaggtgaagtttggcatgaatgtaacctcctctgagaaggtggacaaagcccagcgctatgccgacttcactctcctctccatcccgtatccaggctgtgaatttttcaaggaatataaagatcgggattacatggcagaaaggctcatatttaactggaaggcaggactacgttgatgccccattgagcatccccgacttcctgactcactctctgaacattgactggagccagtatcaatggttggggatctgggggccaccaaaccacaaaactaacctggaagctgcctgcttttcctttaggttaaccaggggaatgaatgc

SEQ ID NO: 96833 - DNA, 1152 bp, Homo Sapiens
  misc_feature (76)..(76): n is a, c, g, or t
  misc_feature (92)..(92): n is a, c, g, or t
  misc_feature (125)..(125): n is a, c, g, or t
  misc_feature (154)..(154): n is a, c, g, or t
  misc_feature (156)..(156): n is a, c, g, or t
  misc_feature (182)..(182): n is a, c, g, or t
  misc_feature (190)..(190): n is a, c, g, or t
  misc_feature (219)..(219): n is a, c, g, or t
  misc_feature (227)..(227): n is a, c, g, or t
  misc_feature (414)..(414): n is a, c, g, or t
  misc_feature (420)..(420): n is a, c, g, or t
  misc_feature (448)..(448): n is a, c, g, or t
  misc_feature (525)..(536): n is a, c, g, or t
actaacaccgaaaattgagttcccggaacaaatattctccggacacaaaattaacatccatgccacgcccaattancttcatgattacacancagcttcacccccaaaagtctgaacccgtcctnacagaatgcgccaatcgctcttaggggtntnttgctccacccacaacatctcctcanacacaccnttaggtcacttcccaggtgcaacaccttnctctaggngaaccttccaattcaaaccaataaaaggtatctcttacaacctccaaaatatctcccacctgtcatttaccaccaggcccacaaacaacagggctcggtcacacactacaattcgcgcacaggctaaaggacacctttcgtccgccctcggacaataacttcaccacataaataagtggccttcacncattancacaatgctgtccctccctgtagttctnctaaacaacacaacaacaatctctcacagcgcaaaaaatagttctttccacccatcacaaggccagggaaagaaacnnnnnnnnnnnnctccaaaatggcgaaaagtttttttgcatccgtttaaaaaaagggtttattactataataagcccctaaaagaaaaatagggttctcaaaaaataaccaatcgtaatcatatttcccattaattattttcccatatgaaaaccatccaataaaataagtttaccacagtcaaataagcctcgttcaatgaacactcaaaaatacaaatttatccagagtgactacaaacgaaaatgtgtgctatttcaaaattacatgcacctctttaaaaatcagggcaattaatagagcgcttaaatcataattagctgagttcaaatttggcccctaaacaatacttaaaatttccttattcctttatactatcttaccaaaataataaattacttgattatcataattttcttttgctacttatttcaaactgtaaagtcaggactgcaaactgatgtaggaatcttatattattggtctacacctaattatttataaacattaatggacacaacaccgttccaatccactacaacaattttcttctattttacaagtaagaacttctaacctatcacaacaacaaatcatattttaaatttgggtttgaaaacatgtatta

SEQ ID NO: 96834 - DNA, 1082 bp, Homo Sapiens
caaactaattttaagaatttagtcttatttcgttgtaaactgtgtatctaattatattacattactctgttcagatgggatggttactaccacttgtccatgattttcatttgaaaagcaagtatctatatcatttccccccagtcagcattatttaacactccccttaactgtctttgaactttctcttttaacaaaaatgtcaagtctttacagttgtaatatcaccatgtttcccatttctgttaatacttctatgaacccctaaagtattgaagggaactagctgtcagtttcaaggattacaagtttgagtctcctagtattcaacatcattctgaaccctgaaataatatttttctctgttaaacaatttttatctgtttgccacctctgttgttagaggtggttgtcaattgaccttactaagttagctgtctttgatgaggaattattgttattggttcctgaataaaacattaaccttttaagtcagaaggaacctcggtacttcttaaggtttgtttgtgttttctaaaaccagagaataaggaactgatttggctatgaggtttaacattataattttctgtaagctttcccacaaaaaaacattgttgatttgaggatataataatgttttaatctttttaaaatataagtggttattctctgacttggtaactatgttctgaaaacactgcatttaagaatttttaaaaattgggtttctaaaattaaaatgtccaaattaggcatattgctgagctcaaattgatgtgaaatgccatggttccagttgaattttaagcatattttcctttagatatcaaatatatgaagtatgccttttggtgattatagtggaaaacccatgacattacttaacccaagaataatgtttgggttcaaataaaaaatagaaacttaaataccgggggcatttcatactttttttaaagaagaatggaatggaagaaaatccgggtttccccggcctgtgaatccctcctacggggggaagagtcttttaataaaagaacacaagaaatggctgtaaaactcgggccccgttggcggac

SEQ ID NO: 96835 - DNA, 1451 bp, Homo Sapiens
  misc_feature (42)..(42): n is a, c, g, or t
tttgacggaaacgccccggaaatccttccctttctgctttgnaaaatccacccccccctggaagggatggcttttctttggttaaaggaacaaaagggacgggaaaggtctggtttccccgtgtatttggccttaagggcgcttaggatatctttgggaaaatgaggtaattttattcccattccattttgcctaccgggtttatcccttcggctttaatttgggtgggcttgttgccaaaccccgggaaatagcaggaactattttccaggtcccttggtttttcccatttaaatacttagtttaagtaaatataataattaaattcatcttttattaatcccattacttagtaatataaatagattaaggtgaaagcagtgaatttcaaaatttgtgcaggggaaactagttgataatttgtttccaataagggtggtagcaattaattactacaaagtttgtccaaggctagtattgaacccctgatttagcaggctgaatcaaagtgtatagttaggtacttctaattcctctattactgtgcaaatctagaatttcctatgtaaaagacagtgctggcagcatcaaagccctgtaatagtatgaaatagtgattaggatttgaaatgaagagatattatatgaagacatgtgaatgtcttaatgatggtatcatagcaacggcctcagaattcccttactgaaacagaaactaagacaaatcattattcaataatcttctgagccaaaagcctaagttggaagcaagtgataaaaacacaaaaccaaagatgcattttctatgaccatatgcaagaattttaagctttatatcaacattctgtaccagcaccagcccctctgaaaggaaaaagtgtagtcatgactgtccatctcttttcaaagcttccagtctttgaagcagtgcgtttccaaatgcttctcggtaggcggggctgagtgtatccaacaaggagtagactgtttcatggtagggagtctgtaaatgatcatctacctggtcaaaagcatagcctaccaccttgagccctgcttcagtgagttctaggcaatatctgtttctttcctttgtttccacattgatataggccacatcatccgcacaccgcaggcttttcgagacaaacatgttgttaacagcaaagagaacatcatttacaactgcttcagcttcgagcctcatgtctttcatgtcagttccttcaaaaccgttcagctctgaaccttcttcaaatcctgacatactgcttagctccatgggattacagtctgtttccattcttgatgatgcagaaagatcaagaatccagtacttgaagggaaggaatcctcacaggtcagtgaagtaggtcaccaaacagttgtgataatcagcaccgagctgcgcgcccggcgtcctcttcttccttcctccggaggcgactccc

SEQ ID NO: 96836 - DNA, 1021 bp, Homo Sapiens
acataggctaggtacgaggctgggtgttaatcggccgagggagaactagagtttttgcaactttttggcttgaccacccaacagcagaaggaggaatggtggcccagaagcggaggaagcggcggaggatgctgcgagagagaagcccgtcgcccccaacaattcagagcaagcggcagacgccttcaccgagactggcgctgtctacccgctacagccctgatgagatgaacaacagtcccaacttcgaagaaaagaagaagttcctgaccatcttcaacctgacccacatcagcgctgagaagaggaaagacaaagagagacttgttgaaatgctccgtgccatgaagcagaaggcactgtcagcagcagtggccgactccttgacaaactctccgagggacagtcctgccgtctccctgagtgaaccagccacgcagcaagcctctctggatgtggagaagccggttggtgttgctgcttccttgtctgacatcccaaaggccgcggagcctgggaagctggaacaggtccggccccaggagctgtcgagagtccaggagctagctcctgccagcggggagaaggccaggctgagcgaggcccctggaggcaaaaagagtctgagcatgcttcactatatccggggcgctgcacccaaggacattcctgtgccgctgtcccacagcaccaatgggaagagcaagccgtgggagccctttgtggcagaagagtttgcacatcagttccacgagtcagtgcctgcagtccacccagaaggccctgcagaagcataaagggggagcgtggctgtgctgtctgcacagcaaaacccacaaggttgacacgtccgtccactaccaacattcctgagctggcagtcctccagccgcggcccctccacccccagcacaatggggcagcagggacccccccactgcaaggaaaggccccccaaacccaggagttgggaccgggaactcggaggaggaaggaaaaggaggattgatgaatatgggac

SEQ ID NO: 96837 - DNA, 1089 bp, Homo Sapiens
tctggctgcgcaggaacagctggtgcctccgagggcggtcggcgagcgcgcgggcgtggggcgctggggggccggtcgggcagcgctgcgggagcagccgccggcaccgccgccttgcaccatcgcatcatgtccgggcagctggagcgttgcgagcgcgaatggcacgagctggagggagaatttcaagaactgcaggagacgcacaggatctacaagcagaagctggaggagctggctgcgctgcagacgctgtgtagcagttccatcagtaagcagaagaagcacctcaaggacttgaagcttacactccagaggtgcaaacgccatgccagtcgggaggaggcggagcttgttcagcagatggcagcgaacatcaaggagcggcaggacgtcttcttccacatggaggcctacctgcccaagaagaacgggctctacttgaaacctggtcctcggcaatgtgaacgtgaccctcctcagcaaccaggccaagttcgcctacaaggacgaatatgagaagttcaagctctacctgaccatcatcctgctcctgggtgccgtggcatgtcgatttgtccttcactacagggtgactgacgaagtcttcaacttcctgctggtgtggtattactgcaccctgaccattcgggagagcattctcatcagcaacggctcaagaattaaaggctggtgggtgtctcaccactacgtctccacattcctgtccggagtgatgctgacctggcctaatggacccatttatcagaagtttcgcaaccagttcttagcattttccatttttcagagctgcgtccagttcctgcaatattattacccgaggggctgcctctaccggctgcgggccctggggggagaggaacccacctggatctcacagtgggaagggttcccagtcctggatgtgggcggggcctcaccttttctcctggcccttcctccttctgtgggccatttcttggcaagctctacaatggccgtcaccgctgtttttgagctcctccaggcccccaaggaatgccaaaaaaatggcaggggggttccctactgggcgggttcacccttccc

SEQ ID NO: 96838 - DNA, 308 bp, Homo Sapiens
tcaatctgagcaccagcaggaaggcgagagttatatggaccacctgtgctaggcctgggcatgggcctgtgctaggggtggggaggttgccagctcctacccgttcttcttgggcaggtaggcctccatgtcgaagaagacgtcctgccgctccttgatgttcgctgccatctgctgaacgagctccgcctcctcccgactggcatggcgtttgcacctgcggacagagatgcaggcacaggggaaggggcgtcactcagagggaggagggctatgttctgcacgggcaccaggctcacgccttctat

SEQ ID NO: 96839 - DNA, 1638 bp, Homo Sapiens
cctgcatcaatgatgagggttctgatatttttattaatcctttccacttcactgaaagctagaggctgaggaggcaatgcattccaggatgtcttgtccagatgtggtgaggcatttaaaagaagcccatagatgatttgcctgatgggctgagatattctgtgggcatttggttgctgcatgttttccacctgtgtgggaagaatggtccgtcttaggaccaaagcatcactgatgaaaggagatagctggcctttagctaaagccactaatacccattctggtaaaccaagattcaaggcatctggacagacataagtaccacactggaagaagtcctgtagcttcacctgggactgttggtattcttccatggaacagcagagaagttccttaacattttctcgatccttttttgggaggtatttcagaacattatctagtgcttcggtagggttggcaaaatgagacaaccaattcagaagtcccaggattcggtggtgtctcctccctttagaactggtagctccaagaggaagacgcgctttacttaagaatgtctccatgatgggtagattaacatggtcatttccacatagcaccgcaaagagaggtagtagagctttattcatattgctgaagtgatggcagaatgcatcaagggaaaagcatttggcagggatatagttttggggtgccctaaatagtgttcatatttctccactgaaagctattcaaagggcaaaaacccagttttcaggtcaaaaatgcaaaagtcactatctgatgataacacagggcaattccaatggttagcaagtgtcataatgtcccgatctgcttctgaaaagcactggacaaaacacacccgcagcttgatcaaaacctgtattgaatacttcccggatgagtaagggacatacgtacccactcccaccaacagaaagggaatgggccatctggatcttctctctagctctatcctttaaagttgtaagctttttatctgaaatgtcacatcctccatctagatacaacatatgggcatatattacaagcaaacagtgattcaaagaatttttgtacaacatctgcaaaagaatcatagtcccctccataccggagatccaagtttgaactgaagcaaagacggtggaaaagagcataaccatcaatgacaatttttgtgtcccgcaacttcaaatcagtgaagaactcattactatgatcttccacaaaactcattagtcctcggatacccatgatgacagtctaaagaattaatcgcctagatcctcaagcaatgttagctgtgctttttcattctcctttgctttctgatacaaggcacaaattcaatggtttcatgggttgtaatctttggatggtgacagaggctgctgctaattctactctgtcctcccagaggagtagctcctccatcagaagcccgctagagcccagcgaggactggctcctgcacgtgagagtccaatctcaagagcgggaatcggaagtctcccggtgtgacgtctctgggaagtacagttccgtgatgccggtggcgccagactgagccaaggagcaggtgttactcgggcccagaggcgctaagtagcaaagagggctgggacgtac

SEQ ID NO: 96840 - DNA, 652 bp, Homo Sapiens
  misc_feature (120)..(132): n is a, c, g, or t
ttgaggatttctaatacagttcattagtttgtattgtatatgtgtttaagtataatttttatttatacaaagatcttatagtcttagaagtatgaaaaataatgcttaagagtatttgannnnnnnnnnnnnctaattatcttggaaaattggatacttaagacttggagcctttacttcagattaccagtttacattttgtattgcttgtgtgagataatgaataagatgtgatatttggcatgtgtaaacttagttcactctggggttgttaatattatttgtttcattacagagtagctgtaggtaggaaagtaaacatcagaactagcctagtccttgttacgattagtactttggatttgatttttcctgtaaaacagatgcagtcatcttgtttgacctcagtaaccccagacagtttaagaaaacctctccttttgagctgatacaggttttttccccagaatccttttctggcatgtttattgtatgaaataatgaggctctccatgggaggatgaacacatatgagtcaagggattgcaattctctctgatagacttagttttcagaccttataactattgtatatgcatgaagggtgaatatttgcatataaaaataaagcactactctgaaatggtacgac

SEQ ID NO: 96841 - DNA, 1142 bp, Homo Sapiens
  misc_feature (118)..(118): n is a, c, g, or t
  misc_feature (121)..(121): n is a, c, g, or t
  misc_feature (222)..(223): n is a, c, g, or t
gggggaagggctgttagggaatttcgggaaccggccccatgggggaaggcaggaagtgcttatggaaaatgcttccgccaagcttgggctgttcttcggaatgcggtcctccggagtnaanttttgggaaaagcccagggatttgatatttgcttccggccaggtatagggggggagggccactttgggaaggcaagtgacatcttttccacagttgcccanntgtggtaaggttataaagccattggttttatgaagagggcttgaaatctagggttgccccgttccaaggatgccaggccctcctcatcctgtaacacagacccagagcctcccctgggcaagttattgtccaataactgagcccataaatgggtcacagtggttcctaccagaatatttctcagctcttccttctcatcaatagtttttaactccagattatcaaatgggtcttcttcacactcaaagtcagcaagattgaaatccgcctttatgtgaggtgggctgagaactttctgtttcgtggcactactgctgacccgagttggtgtgaggatgctgttgtgctgcaagctggcgaggatggggttaataggaggtggcattgtggctgtactgtgagtcttggagaagctcattttgctatcgccctctgggccactcttagaattcactttagcttctgcttccgcaattttgcactctgcttcccgctcggcttcttcgattttcttaatctcttcagcccactcaatggttttcttttccaaagagaagtcatactgtacttctctgacaacctgcaaacaatcaggcaaggagaagccaataggtagaccaactttagctggtgttttgaatttgtctcctgtcttaaatgggacatcatcaaggtaactgaaagtcccatgaaaatctgcacccaacttcttagaagccatttagaacctgaatgccgctgctgccgccgtctcagaagccgaaaggtgctggcaccggccggcctcccaggctcggtccccgctgagctcccgacagcccctagggagagcgaacgccaccacctccaactctgcccgctccgggccaggccgtcaccgtagccaccgccagtgccgcagccgccatgttgaagtccc

SEQ ID NO: 96842 - DNA, 1677 bp, Homo Sapiens
  misc_feature (58)..(58): n is a, c, g, or t
cgattccactccgtcagctagtacggatggacgttccactgctctacccaaagaatcngagtgcctctcttcccacagtggcttgcagcctccaggatgtgttctgcgcaggctagcagggctgggctcagctggctctgcccgagccatgaggtcttccaaagcattgtcctggtcattgtgtgtaatagcaaaacttccttaatgtctttcagctcaaagcccatctccttaaatttgctcattaactgaagaaactccatcatcttttcttctgaacactggtgcatttccagagcctcttccactaaaagagggtcgaagcccttctcacaaagctgtccatgtgcaaagagatagtcgagaatctgctcaatattctctcctttcttcttcatggctctgaggacacactcgtacgagtagcccatgttgaccaccgtctccacacactgccgctcgctgggggacagcatctgcagttcagaataggcctggggacagctgggcatgttgggcacttgtgacactgagaaattaggaggggtgaccgtgggaccagtatttggaggtgatgattcctctgtgcacacagacaaaacagagagggaaggcatctgggaggatgtcagggctggcatctctgtgccactgtccaagttcaaagctgaaagcccaagagtgtgatgcccattgagctcactggcactgctttgggtggaaggctttagggaattctggaacgtgccattgcggaggcaggatgtgctatggaaagtgctcgccagcttggctgtcttctgattgctgtcatcagagtcaagttgggggaaagacagggatttgatattgcttactgcaggtataggggggagggacactttggaagacagtgacatcttttcacagttgcccaactgtggtaaggttataaagccattgggtttatgaagaggcttgaaatctagggttgcccgttccaaggatgccaggacctcctcatcctgtaacacagacccagagcctcccctgggcaagttattgtccaataactgagccataatgggtccagtggttcctaccagaatatttctcagctcttccttctcatcaatagtttttaactccagattatcaaatgggtcttcttcacactcaaagtcagcaagattgaaatccgcctttatgtgaggtgggctgagaactttctgtttcgtggcactactgctgacccgagttggtgtgaggatgctgttgtgctgcaagctggcgaggatggggttaataggaggtggcattgtggctgtactgtgagtcttggagaagctcattttgctatcgccctctgggccactcttagaattcactttagcttctgcttccgcaattttgcactctgcttcccgctcggcttcttcgattttcttaatctcttcagcccactcaatggttttcttttccaaagagaagtcatacatgaaaatctgcacccaacttcttagaagccatttagaacctgaatgccgctgctgccgccgtctcagaagccgaaaggtgctggcaccggccggcctcccaggctcggtccccgctgagctcccgacagcccctagggagagcgaacgccaccacctccaactctgcccgctccgggccaggccgtcaccgatcccggaa

SEQ ID NO: 96843 - DNA, 1184 bp, Homo Sapiens
gcatcgaagagggcggaggacaaggcgcgcggctcaccggctcgccgcgccgcaaacgaggggcgttcccgagggccccccaagggggaccgagttcgcgggaggtgataaaagggcccccgaggggtacggggcccgcgggaggcccagtaggtagggcgggtgcggaaaacaggggaggcctcgacattaagaagggggccccgatgtttcccagggccccctgcccgccaaggcccccctgggcgcggccccggggaggagtcttgccgggcaggtcagcggccaacagggaggcagcctcgggcgcgcttgcgcgggggaccgccggcgtccgtgggctccaagaggccggggccgcggccccgcgctcgggccctgggcggcgagggcgcagcgagggctgtcgcctcctcgggcagcccggggggccgcggcgttgggtcgcgggtccgggggctgccgtgttcgaccgtatgcgccgatttgtcgctgggcgtccgtttcctcttgctggggctgggcgcggcctcggagcctggcggcggtggtgagggcgcacggccagctgcagcggcgctgtgcttgccgtggatccaggacaccttaggcttggtggcggagtcaaggtggagacggtttcatgcgatcgggcgatggcgacagcgacaggcccccaatctcgccccgggcccgggccggccgggcctcgcgtcgggccacgcgcgcgtacagagcccctccgggcccctccacgctggacgccgaccgctcgctgtcggaggacgcggggaggggtatcgcctcctcggcggaggctggcgtggtcaagggcacaggggacggcgccggcgcctcggcagggacagtggggacttcggggtcccggctctccgctggtgcctcctcatggggtacacagtacacagggccttcatcagtggtgtcaaacgaggagaaggaggcccgagaggaccaggatggtgagggctgctccagccctgagggtggctccaggaagctgcagttgagtgtgttatccaggtcgtggtgggccactacgactttgggtagtttctgcctccggagcgggatccggggcagcttcatgctgatgcgactgaagcgcccgcatagtcggtgcgcctcgtgccgaattcggcgcgccgtcgacttcatactct

SEQ ID NO: 96844 - DNA, 1080 bp, Homo Sapiens
  misc_feature (805)..(805): n is a, c, g, or t
  misc_feature (831)..(831): n is a, c, g, or t
  misc_feature (864)..(864): n is a, c, g, or t
  misc_feature (924)..(924): n is a, c, g, or t
  misc_feature (982)..(982): n is a, c, g, or t
  misc_feature (996)..(996): n is a, c, g, or t
  misc_feature (1049)..(1049): n is a, c, g, or t
aaggtggccatttcaacaactcccctggagaacacatccattaaagtggggccagctcggaagggcagctacaaggccaagatggcccgaaggagcaagaggagccgcggcaaggatgggcaagaaagcagaaaaaggagctccctgttccgcaagatcaccaagcaagcatccctgctccacaccagccgcagcctttcttcccttaaccgctccttgtcatcaggggagagtgggccaggctctcccacacacagccacagcctttccccccgatctcccactcaaggctaccgggtgacccccgatgctgtgcattcagtgggagggaattcatcacagagcagctcccccagctccagcgtgcccagttccccagccggctctgggcacacacggcccagctccctccacggtctggcacccaagctccaacgccagtaccgctctccacggcgcaagtcagcaggcagcatcccactgtcaccactggcccacaccccttctcccccacccccaacagcttcacctcagcggtccccatcgcccctgtctggccatgtagcccaggcctttcccacaaagcttcacttgtcacctcccctgggcaggcaactctcacggcccaagagtgcggagccaccccgttcaccactactcaagagggtgcagtcggctgagaaactggcagcagcacttgccgcctctgagaaaaagctagccacttctcgcaagcacagccttgacctgccccactctgaactaaagaaggaactgccgccccagggaagtgagcccctctggnaggtagttggagccaggagtgtgctngtctggcaagggggcccctgccaagggaagggnggtgctgcagcctggctccctcacgggccctaggcaccctccggcaggaccgagccgaancgacgggagtcgctgcagaagcaagagccaattcgtgaggtggactcctcagagacgnacaccgagaagggnctgagaacagccagggtgcaccaggagctgagcttggcaacctcaccagaaantgagcccagagtgtgcccccctaaggaccag

SEQ ID NO: 96845 - DNA, 1138 bp, Homo Sapiens
tttttgtgggctgggtgggtttcctaatctggtttcgtctgcctggttcatctgcgtgcgacggctccggactcggatcccttccctgaagggccgctcttaaagctgctacccttacacgctagagaccggggcaccaagcgctgccgcctgggcccggccgccctccacgccctgggcgcgctgcttgggctcggcagggaagatctcgctacccgacggcggctcctgcctctgcactgcctggcctcggcgggacggagcggacggctttgtgcagctggacccgctgtgcgcgagccccggggcggcggtcggggcgtcgagatcccggaggagtctcagcctgaatcgcctcctcctagtgccctgtccgcccctgcggcgcgtcgccgtgtggccggtgttgcgagagcgggcaggcgcgcccggtgcccggaatacagccgcggtgctggaggcggcacaggagctgctgagaaaccgacccgatctcccctgggccacgtggtggtcgctccgccatggcgctcctggcctgggggctgccttgcacatcgtcggcgggacgcccagtcccgatcccgctgggctggtcacccctcgtacccgcgtcagccttggcggggagcctccgtcggaagcccatgccgcagcccgaggtgcccctgggaggtctttcggaggcggccgactcgctgcgggagctcctccgcctcccgctccgctacccgcgcgcccctgaccgcgctgggcttagcggtgcctcgcggggtgctcctggcggggccccccggagtgggcaagacccagctggtgcaggccgtggcgctgcgaggcgggcgcggagctgctggcagtcagcgccccggcgctgcagggttcccggcctggggagaccgaggagaacgtgcggcgggtcttccagctgcgcccgggaactggccagccgcggacccagcctcctcttcctggacgagatggacgccttgtgtccccagcggggcagtcgagcacccgagagccgcgtagtggcccaggtgttgacgctgctggacggcgccagtggggaccgcgaggtcggggacgtgggagccactaaccggccggacgctctagacccagcgctgcgtaaagc

SEQ ID NO: 96846 - DNA, 1088 bp, Homo Sapiens
  misc_feature (635)..(660): n is a, c, g, or t
ccacgcgtccgctcagttgagacgtgttttaatcatcagctttctgttcagtttgggatggaattggatgtatttatataagctagcttttgcacagcatcaggctgaagtcgccaagatggagccattaaacaatgtgtgtgccaaaaagatggactggactggaagtatctgggaatggtttagaagttcatggacctataaggatgacccatgccaaaaatactatgagctcttactagtcaaccctatttggttggtcccaccaacaaaggcacttgcagttacattcaccacatttgtaacggagccattgaagcatattggaaaaggaactggggaatttattaaagcactcatgaaggaaattccagcgctgcttcatcttccagtgctgataattatggcattagccatcctgagtttctgctatggtgctggaaaatcagttcatgtgctgagacatataggcggtcctgagagcgaacctccccaggcacttcggccacgggatagaagacggcaggaggaaattgattatagacctgatggtggagcaggtgatgccgatttccattataggggccaaatgggccccactgagcaaggcccttatgccaaaacgtatgagggtnnnnnnnnnnnnnnnnnnnnnnnnnntgttgacttgagatttcagactggcaacaagagcccctgaagtgctccgggcatttgatgtaccagacgcagaggcaccagagcatcccacgggtggtacccagtcataaatcacctgtttttggatacaaaccccaaggagacaggtgggaatcctggggggaaggcacaccgaaaagaaaacagtactgaaaagcagcccagtcggccaagcctggtctctggccaagacacatcagggaaatacagaaggttcacccgcagcggaaaaggcccagctcaagtctgaagccgcaggcagcccagaccaaagcagcacatacagcccccgcagaaggtgtggctgggacacgtgggacaggaatccggtcagcagccccctgtggctagaggaacaccagcacaaacgacagcctcaagtctccttc

SEQ ID NO: 96847 - DNA, 909 bp, Homo Sapiens
  misc_feature (839)..(853): n is a, c, g, or t
cccggggggcccggctgactcgcccatcacctcatctccctgtggacttgggagctctgtgccaggcccaccttgcggccctggctctgagtcgctctcccacccagcctggacttggccccatgggacccatcctcagtgctccctccagatcccgtccggcagcttggcgtccaccctgcacagcatcactgaatcacagagcctttgcgtgaaacagctctgccaggccgggagctgggtttctcttccctttttatctgctggtgtggaccacacctgggcctggccggaggaagagagagtttaccaagagagatgtctccgggcccttatttattatttaaacatttttttaaaaagcactgctagtttacttgtctctcctccccatcgtccccatcgtcctccttgtccctgacgtggggcacttccaccctgacccagccagtccagctctgccatgccggctctccagagtagacatagtgtgtggggttggagctcgtggcacccggggaggtagcatttccctgcagatggtacagatgttcctgccttagagtcatctctagttccccacctcaatcccggcatccagccttcagtcccgcccacgtgctagctccgtgggcccaccgtgcggccttagaggtttcccctccttcctttccactgaaaagcacatgggccttggggtgacaaattccctcctttggatgaatgtacccctgggggggatggtttcatactggaaggattaattttttatttcattcccatgggccataattctaaaaatattttaattttttttaataccccaaatggaaataccnnnnnnnnnnnnnnnacggaaacaaaaaagggagcaaattggaatttaaagaaaatcctacctcccttggg

SEQ ID NO: 96848 - DNA, 519 bp, Homo Sapiens
  misc_feature (168)..(193): n is a, c, g, or t
atgagaccccgcacagtctgtttctacagcggcctctctgcggcttcctctcttctggcctcatggagaaaccccagaaagagcatagactctggaattagagaaacagggtttggaattctgtgccattctctccctgtgtggtttggccaactgattcaaaggctnnnnnnnnnnnnnnnnnnnnnnnnnntatagtcagtggtccttgttattatctccctgctacctgcccccttcccaaacaccagccagtcttctctgctctggccaaattgataatagcttttgtttttcaagcctaaaaccagcttcttccaatttgctcagcagctatttgctaatcatccagagtgacctaggacgtatttacatgagcggaagaagcactcggggagagtgctgctgggaatgcctccacagagatgctgattgtacgcatgctgcgtaagcctcagatttttctgttcaggcccaaatgcgcagcacaatctgtgggaaagttgcaacagagaaagc

SEQ ID NO: 96849 - DNA, 542 bp, Homo Sapiens
tttggctggtgttgaatgtctttagctggggtgacctggagtgacatgggacggtgttgtggtttaccgtctccagcttcagcctttccagaaacccttgtggagggcagtgttggctgcaggtttcatcatattgcagtttgaggtcaccactatttggggaacaagcttgcgtcctgctgaggggcaggattttcagcagagcgtcggtggggctgggccgtcgtggaggtggccccaggagtcatatggccatactcagacacaccttgtgtggcctgctcagagctggatgccacctttaggcaatgtttagagtctattttctaaagttttaagtattttaagaggtattgagactaatgaatataatagttcagtaatttaaatgcttatttattttcagtggaaggatttttattaaaaagaagctaattgacatggaaatgtcagtgaaatttcttacctgcaaggaaagtgaacattttgtatttaagtaaactataatgtgcacattttaataaagaaatctgacatttgaa

SEQ ID NO: 96850 - DNA, 1340 bp, Homo Sapiens
  misc_feature (33)..(33): n is a, c, g, or t
  misc_feature (48)..(48): n is a, c, g, or t
  misc_feature (173)..(173): n is a, c, g, or t
  misc_feature (188)..(188): n is a, c, g, or t
  misc_feature (249)..(249): n is a, c, g, or t
  misc_feature (1096)..(1096): n is a, c, g, or t
ggtccccagtattttgccccccacccatattgnagccttctcccagangaaatgtcaagtttttattatgatgggtaaagtcatgaaagctggagcccccaaaagcagagggaagtagctacgttctttgcaaaaaatgctcgacccatgaatatactaccaaggaaaatatntaggaaaaatttctntaaagactggagaaaggaaatgactaatgaagagaagaatattatcaccaacctaagcaanatgtgattttacccagatgagccagtatttcaaagcccagacggaagctcggaaacagatgagcaaggaagagaaactgaaaatcaaagaggagaatgaaaaattactgaaagaatatggattctgtattatggataaccacaaagagaggattgctaacttcaagatagagcctcctggacttttccgtggccgcggcaaccaccccaagatgggcatgctgaagagacgaatcatgcccgaggataatcatcaactgtagcaaagatgccaaggttccttctcctcctccaggacataagtggaaagaagtccggcatgataacaaggttacttggctggtttcctggacagagaacatccaaggttccattaaatacatcatgcttaaccctagttcacgaatcaagggtgagaaggactggcagaaatacgagactgctcggcggctgaaaaaatgtgtggacaagatccggaaccagtatcgagaagactggaagtccaaagagatgaaagtccggcagagagctgtagccctgtacttcatcgacaagcttgctctgagagcaggcaatgaaaaggaggaaggagaaacagcggacactgtgggctgctgctcacttcgtgtggagcacatcaatctacacccagagttggatggtcaggaatatgtggtagagtttgacttcctcgggaaggactccatcagatactataacaaggtccctgttgagaaacgagtttttaagaacctacaactatttatggagaacaagcagcccgaggatgatctttttgatagactcaatactggtattctgaataagcatcttcaggatctcatggnagggcttgacagccaaaggtattcccgtacatacaatgccctccatcacggctacaggcagccagctaaaaagaactggacaggcccccgggatgaaaaacattccccagcgaaaggatcccttttccttaataacccgtggcccaaattccgagcctggtttgcaaatttcctttggtaaaccccttcaacaagggggcacccaccccacaaaaaccttttttgaagaaaaatctttaattgt

SEQ ID NO: 96851 - DNA, 947 bp, Homo Sapiens
  misc_feature (864)..(864): n is a, c, g, or t
  misc_feature (897)..(897): n is a, c, g, or t
tccgcgctagtacgaggcctgggtgttgaattcggcacgaggggcgcaggtcctcgcgcgtccacgtggggtcccgggcccagcagtctgcgcaccgggctcgctgctgcaccacgcgtcacccacgcagaccatggcagccgccgacggttcgctcttcgacaaccccaggacgttctccagacgtcccccagcccaggcgagtcggcaagcaaaggctacgaaaagaaaataccaagcgtccagtgaggctcccccagcgaaacggaggaacgaaacttcatttctcccagccaagaaaactagtgttaaagaaactcagaggacttttaaggggaacgcacaaaaaatgttttctccaaagaagcattcggttagcacaagtgatagaaaccaggaggagagacagtgcattaagacttcatcactgtttaaaaacaaccctgacattccagaactccacagacctgtggtaaagcaggtgcaagaaaaagtgtttacttcagctgcttttcatgagctgggcctccacccacatttaatttccacaataaatacggtcttaaaaatgtctagtatgaccagtgttcagaagcaaagtattcctgtgttgctggaaggcagagatgctctcgtgagatcccagacgggctcaggtaaaactcttgcctattgcatccctgtggtccagtcccttcaagcaatggagtcaaaaatacagcgcagtgatggcccctatgccctggtgctcgtgccaacgagagagctagctctacaaagctttgacactgtccagaaactgcttaagcctttcacctggattgtgcctgggagtgttaatgggagggaaagaagagaaaatcnggaaaagggccagactccgccaaagggaataanatatcccttaatcctcaactccctgggaccgccctgggtgggattcatac

SEQ ID NO: 96852 - DNA, 820 bp, Homo Sapiens
  misc_feature (228)..(514): n is a, c, g, or t
gagaagcattgttaatatgacagttggttaaaaaagcaggctggtacggtccggaatcccgggatatcgtcgaccacgcgtcgtaaagagataggggagaaaaacctcacccaagttcttatacgttattttaaacgtttgccagctctgaaatttcagagattcattgttcttaaccatattggactaaagtctgtggttagtgctgtcgtaaaagagacctctggnnnnnnnnnnnnnnnnnnnnnnnnnnnnnnnnnnnnnnnnnnnnnnnnnnnnnnnnnnnnnnnnnnnnnnnnnnnnnnnnnnnnnnnnnnnnnnnnnnnnnnnnnnnnnnnnnnnnnnnnnnnnnnnnnnnnnnnnnnnnnnnnnnnnnnnnnnnnnnnnnnnnnnnnnnnnnnnnnnnnnnnnnnnnnnnnnnnnnnnnnnnnnnnnnnnnnnnnnnnnnnnnnnnnnnnnnnnnnnnnnnnnnnnnnnnnnnnnnnnnnnnnnnnnnnnnnnnnnnnnnnnnnnngagacttccgggacagtcattatcagataggccccaaacctgtgatttttcttgggcaagattggtgtttacttaggggtgctttaagaaatatatttttacaagtatacttgtaggaagttggagggtaataattctatgtgtgtagatttggagtttggtttaaacgactcttttatttcgtggttggcttatcttactaacagtgaagtttcctaagggcaagcaagaagaggagtggcaagcacagttgcctggaattggaggcaaagttgtccagggtttttaagataagaggtttggggg

SEQ ID NO: 96853 - DNA, 1127 bp, Homo Sapiens
  misc_feature (351)..(351): n is a, c, g, or t
  misc_feature (578)..(868): n is a, c, g, or t
gggggggttggtgtgggtctacgggaaagaaggagtgggagcaagaccctaacacgcgggggggcgcccaagtaggggcacgggcctggttataaaaccaggggggcgcacagcccagagcctgcccagcggggccccattccccaagggcctggtaccccaattttagggggggtccccaaagagccccaatggggaaggggcgccaaaagggaggggttataaaggggaaggaacccccttggctctcccccggggtgtcccagagaatggcctctccccaaagtttggcccccctttttctatgttccccttctccccttaaggttcccacccttataaagggtaagngcttccgggccaagaaaaggtccccgaaagccttgcttcaccagggcccgggggttgggaaaggggggtttggggccagggaaggcttgatggctggcaccttccagaggttctgcccctttgtgacttccatccttttgggggcagcccggacccgtggggagcagcagcaggatttaacacggtcatcgtcaaaggtaacatccttcctgggaacggtaatcccnnnnnnnnnnnnnnnnnnnnnnnnnnnnnnnnnnnnnnnnnnnnnnnnnnnnnnnnnnnnnnnnnnnnnnnnnnnnnnnnnnnnnnnnnnnnnnnnnnnnnnnnnnnnnnnnnnnnnnnnnnnnnnnnnnnnnnnnnnnnnnnnnnnnnnnnnnnnnnnnnnnnnnnnnnnnnnnnnnnnnnnnnnnnnnnnnnnnnnnnnnnnnnnnnnnnnnnnnnnnnnnnnnnnnnnnnnnnnnnnnnnnnnnnnnnnnnnnnnnnnnnnnnnnnnnnnnnnnnnnnnnnnnnnnnntgcggcgccgcgcggctctgggggtcacagctccgtgggcgctcactggcagatgcaccgcccgcgcctcgcctcccgccgccagcctcccacgggccgctcaacgtggccgctccgacgtcgccctcccggctggagccgccgccatggccgggcagagtccggagccagtgccacgccgccgccccgcccgccgacctggcccttcgcagctccaccagcgcccccgctgcagaccgccgcgccgaggggctgcgcg

SEQ ID NO: 96854 - DNA, 1554 bp, Homo Sapiens
  misc_feature (25)..(25): n is a, c, g, or t
  misc_feature (33)..(33): n is a, c, g, or t
  misc_feature (75)..(75): n is a, c, g, or t
  misc_feature (168)..(168): n is a, c, g, or t
gaagggggattcccccaggcccccncctatttncccaaaaccctttgagctgcagctcgttctgtgtccagttgnccgtgtagtcgtgctggggcccctgtacccttgaaccatgaaaacctggggggcaggtccaagcgccccggcccccaattgcgggccctccancggtggccattcacagttgctgggaaggtctccaccacgacagccaggaagagagctggaggctgcttcacttgccgccgtctcccctggctcctgggctccagccgcaggttgggtcccacccgccacctccgaggcctctgctggctgggagggggtggtcacgctgatctcagggacaaacgtgtcctcaaacaggctgaggatctgctcctgcttgacttccttggacggggtgtgtttgggaggcggagggactggtgggcctttccggagctgagatggggacttggggagggtggccccgggcgtggccccgccggccggctctggctcgtggttgactctgatctcgggggtggcggcaggggagccatctggaggcgaagggctcttgttcccttttgcaggcgccgttgtcactgggctgggccttgaccgtgaaggttgttgctcccgtgttgcttctccaggccgaccagcacatcattgaggttctggttgagcttgctcatctccttgtggaagttttcctccaggcccgcgatgctctggaacgtgttgacgtagaaacctacgcggctgttccacagggacggcagctcctcctgcagatccacattcatctcctcaaacaccttctgggctttgatgagctcctcctcggccttggcaattttggcttcatccttctttttggcagtttgaagggactcgtagtggtgccgggcactgtcgtagtccaccagcttgcgcccccgcttggcaatgcgtgacttgatgtcggggaactggcccaggtacgtgtccatggtcagcagcagcctggtccaccagcttctggtggtaatccatccacagcaggtcgttgttctctgcgatcttgtttgcctcatccctgccgggccaatcgggctcatacacctcctgcagacactcattcagcttcttggaagcctcgtgcatggctttgacggaggccaggtaggtccggagatccttctgcagccgggtgccctccgtcagctgcttgttgaaattctggacgcactgctcaaactgctcatccttggtctcatctgccttccccagcttctggagaaccttctcctgcgcgcgggtgagcttcttctgcacgttgctggcgatctttcccgccgtcacccctttactgcccatctctgccatcgcggcgcaggcctcgcccggtggcaggggccgctctcgcgcggggagatcttgcgcgccgcgctcccagcccccagccccggccgcgcgtccagaccggctgccgctccacgccgcgcacccgacagcggagccaactgaccggaggcggagcgtgcgccggacgggcgagcgagctagcgagctagcaagcgagcg

SEQ ID NO: 96855 - DNA, 1240 bp, Homo Sapiens
  misc_feature (809)..(809): n is a, c, g, or t
  misc_feature (868)..(868): n is a, c, g, or t
  misc_feature (947)..(947): n is a, c, g, or t
  misc_feature (1035)..(1036): n is a, c, g, or t
  misc_feature (1048)..(1048): n is a, c, g, or t
  misc_feature (1088)..(1089): n is a, c, g, or t
  misc_feature (1101)..(1101): n is a, c, g, or t
  misc_feature (1129)..(1129): n is a, c, g, or t
  misc_feature (1171)..(1173): n is a, c, g, or t
cgtctcggccatcttagctgtagatagaggcggcaacctcggaagtgcggagcgggtgggcctatatagatgttgaggtgcggaggccgtgggcttttgttgggcctggctgtagccgcagcagcggtaatggcagcacggcttatgggctggtggggtccccgcgctggctttcgccttttcataccggaggagctgtctcgctaccgcggcggcccaggggacccgggcctgtacttggcgttgctcggccgtgtctacgatgtgtcctccggccggaggcactacgagcctgggtcccactatagcggcttcgcaggccgagacgcatccagagctttcgtgaccggggactgttctgaagcaggcctcgtggatgacgtatccgacctgtcagccgctgagatgctgacacttcacaattggctttcattctatgagaagaattatgtgtgtgttgggagggtgacaggacggttctacggagaggatgggctgcccaccccggcactgacccaggtagaagctgcgatcaccagaggcttggaggccaacaaactacagctgcaagagaagcagacattcccgccgtgcaacgcggagtggagctcagccaggggcagccggctctggtgctcccagaacagtggaggtgtgagcagagactggattggcgtccccaggaagctgtataagccaggtgctaaggagcccccgctgcgtgtgtgtgagaaccaccggccccccctagtggccagatgccgggacaaccctccacacagaaaaccgtgggggacctggaccactcnatcttggcagagtaccccaggcctgccgcgcgggtagggcgtggcatgggtccgttccnctctaagccgggagcgtcttctggtaataaacacccagagagctcggcccggcgacctgggactaggtccctttgaccnttggtggcgcccctgggtatgtcctcctggccgccaatccgggaagggcttggcaaaggactctgggcctatattcctgcaacatggnngataattgcgcncctacccctgggcctcgggggtctggtggggccctggacnnacccccgcgggnacaccgtgtcccagttactggggtcacncttgttccgaaacttgtgttccctttgtggaacttatctggnnnatcgggcgcttcgtggtggcccggccggagcggtcacgcgggggcgcctatttatcaacacaaacct

SEQ ID NO: 96856 - DNA, 890 bp, Homo Sapiens
ccacgcgtccggtgaaggacggaagaggccctgcggaggcggcggtgcagcgctccggtggaatgaatcttacttgttgaatatcttctggttactagttggattcatttgtgaaagaatcattttcccctgtgtggaagacacttagtggcatatttaaattataagtccacggatcaaaaagctttttgatttcccaaaggagggacataccactatatcagataagcttgacattacagccaagatggtgctgtcccagagacaacgagatgaactaaatcgagctatagcagattatcttcgttcaaatggctatgaagaggcatattcagtttttaaaaaggaagctgaattagatgtgaatgaagaattagataaaaagtatgctggtcttttggaaaaaaaatggacatctgttattagattacaaaagaaggttatggaattagaatcaaagctaaatgaagcaaaagaagaatttacgtcaggtggacctcttggtcagaaacgagacccaaaagaatggattccccgtccgccagaaaaatatgcattgagtggtcacaggagtccagtcactcgagtcattttccatcctgtgttcagtgttatggtctctgcttcagaagatgctacaattaaaggtgtggggattatgaggactgggagattttgaacgaactcttaaaggacatacagactctgtacaggacatttcattcgaccacagcggcaagcttctgggcttcctggttctgcagatatgaccattaaactatgggattttcagggctttgaatgcatcagaaccatgcacggccatgaccacaatggtttcttcagtagccatcatggcccaatggagaatcatatagtggtctggcctc

SEQ ID NO: 96857 - DNA, 1387 bp, Homo Sapiens
  misc_feature (1211)..(1211): n is a, c, g, or t
  misc_feature (1343)..(1343): n is a, c, g, or t
gggattggctggagtggcccgagtcgggaaaatggctgcgagtacctccatggtcccggtggctgtgacggcggcagtggcgcctgtcctgtccataaacagcgatttctcagatttgcgggaaattaaaaagcaactgctgcttattgcgggccttacccgggagcggggcctactacacagtagcaaatggtcggcggagttggctttctctctccctgcattgcctctggccgagctgcaaccgcctccgcctattacagaggaagatgcccaggatatggatgcctataccctggccaaggcctactttgacgttaaagagtatgatcgggcagcacatttcctgcatggctgcaatagcaagaaagcctattttctgtatatgtattccagatatctgtctggagaaaaaaagaaggacgatgaaacagttgatagcttaggccccctggaaaaaggacaagtgaaaaatgaggcgcttagagaattgagagtggagctcagcaaaaaacaccaagctcgagaacttgatggatttggactttatctgtatggtgtggtgcttccaaaactggacttggttaaagaggccattgatgtgtttgaggaagctactcatgttttgcccttgcattggggagcctggttagaactctgtaacctgatcacagacaaagagatgcttgaagttcctgtctttgccagacacctggatgaaagagttttttctggctcatatatacacagagttgcagttgatagaggacgccctgcaaaagtatcagaatctcattgatgtgggcttctctaagagctcggatattgtttcccaaattgcagttgcctatcacaatatcagagatattgacaaagccctctccatttttaatgagctaaggaaacaagacccttacaggattgaaaatatggacacattctccaaccttctttatgtcaggagcatgaaatcggaggtgagttatctggctcataacctctgtgagattgataaatatcgtgtataaacgtgctgtgtaattggcaattattacagtttacgttctcatcatgagaaaacagccttatatttccagagagccctgaaattaaatcctcgggatcttggtgcctggacactaatgagacatgagtacatggagatgaacaacacgtctgctgctatccaggcttatagacatgccattgangtcaacaaacgggactacagagcttgatatggacgtcggcagacctatgacatccttaagatgccattttactgccctctatattatacacgggccccaccagctgtcgaccaatgattctcgcatgctggntgcttgtacgagaaatggtaatgagaaaactcaatccgactagc

SEQ ID NO: 96858 - DNA, 1033 bp, Homo Sapiens
  misc_feature (855)..(855): n is a, c, g, or t
  misc_feature (894)..(894): n is a, c, g, or t
  misc_feature (899)..(930): n is a, c, g, or t
ggactccaccggcagattaggtaactatgaacccagtttgtacaaaaaagcaggctggtaccggtccggaattcccgggatatcgtcgaccacgcgtcgacggtgtgcgggcggcagccctggacgaagagaagagggcccctccaggccagtctgggcaccctgggatagcggctgcagccatcagcaggggcagacggcaggtggcctggttgctgcagctcccaggatcagctctgccctcccgccaaacgccagcctcgtcaccgctccaggccacctcctagcagtaacaggtggttgcagcaggtggcagccagcccctggatgagccaaggtctcttccccagccaggcatggccgactctgcgacaggcccagaagctggtgtacctggtcacaggggggctgtggcttcctgggagagcacgtggttgcgaatgctgctgcagcgggagccccggctcggggagctgcgggtctttgaccaacacctgggtccctggctggaggagctgaagacagggcctgtgagggtgactgccatccagggggacgtgacccaggcccatgaggtggcagcagctgtggccggagcccatgtggtcatccacacggctgggctggtagacgtgtttggcagggccagtcccaagaccatccatgaggtcaacgtgcagggtacccggaacgtgatcgaggcttgtgtgcagaccggaacacggttcctggtctacaccagcagcatggaagttgtggggcctaacaccaaaggtcaccccttctacaggggcaacgaagacaccccatacgaagcagtgcacaggcacccctatccttgcagcaagccctggnccgagtggctggtcctggagcaaaacgggaagaaagggnccccnnnnnnnnnnnnnnnnnnnnnnnnnnnnnnnncccttcgtcccacggggcattcaacggtgaaaggccccccgaatcatggaggggacttctaccgccagggcctggggcccctggggagggttgggttccttcc

SEQ ID NO: 96859 - DNA, 1140 bp, Homo Sapiens
  misc_feature (1014)..(1014): n is a, c, g, or t
ccacgcgtccgcccacgcgtccgggacgacctgtgggaccagtttgatgagcggcggtatctgaatgccaaaaagtggcgcgttggtgacgacccctataagctgtatgctttcaaccagcgggagagtgagcggatctccagcaatcgggccatcccggacactcgccatctgagatgcacactgctggtgtattgcacggaccttccacccactagcatcatcatcaccttccacaacgaggcccgctccacgctgctcaggaccatccgcagtgtattaaaccgcacccctacgcatctgatccgggaaatcatattagtggatgacttcagcaatgaccctgatgactgtaaacagctcatcaagttgcccaaggtgaaatgcttgcgcaataatgaacggcaaggtctggtccggtcccggattcggggcgctgacatcgcccagggcaccactctgactttcctcgacagccactgtgaggtgaacagggactggctccagcctctgttgcacagggtcaaagaggactacacgcgggtggtgtgccctgtgatcgatatcattaacctggacaccttcacctacatcgagtctgcctcggagctcagaggggggtttgactggagcctccacttccagtgggagcagctctccccagagcagaaggctcggcgcctggaccccacggagcccatcaggactcctatcatagctggagggctcttcgtgatcgacaaagcttggtttgattacctggggaaatatgatatggacatggacatctggggtggggagaactttgaaatctccttccgagtgtggatgtgcgggggcagcctaaagatcgtcccctgcagccgagtggggcacgttcttccgggaagaagcacccctacctttttccctgatggaaaatgccaacacgtatataaaaaaacaccaagccggacaccctgaaagtgtgggatgggatgaaatacaagcaaatactattaaccctgccccggnccatttcgccctggaaaaaggcccctttcgggaaatgttttaaaaaccaaaattgggaaccctgaagggaaaaaaattcgtggcccttgggcccaaaaacttttccaaagggggggaaccccttgg

SEQ ID NO: 96860 - DNA, 1239 bp, Homo Sapiens
  misc_feature (758)..(758): n is a, c, g, or t
ggccaggaacacccagaacttcctggaactactgtgttcccctggtgctgaggatcccgtgcctgcgaagtagtgctcgcccttcccagcaccctctggtcattgctgagtcctcaaagggatgattaaagtgatgagggttacggaaaaagcaagagggcaacttgcaggtctgatagtttcagaaaggcctgaatgcaacctcagggacagggagagcagaggggcacagacacacacagcagctttgccccaccaggaggcctgttatttcttcttccctcccctaagcccacacctggcccacggtcagagggccaggtctcggggatcaagcagtgcgaaggccccgttcttgcggaagaatgactcaatgcggcacatcttgcaggagaccagttcttgcttcactggggggcctgggaaaagatgtcagaggccaagcatgggttcctgagggagggacacgcagagcatgggagccctgtctgtctgcacagccctaggaatccgtcagtggagtagccactttgtgcgaagaaatagaaagtgctttggagggaatgggagctatggcaaaatactgggagctggctggatgccaggatacagcagccatctgccatcattaccctagcttcagaatcctctacctgcagggaggggggccaccctagcctgcttgtcacagggacagactgtggagagatgagatttccttcggcctcctggctccccgcttctagggctcgcctccntgctttttgttagaaagttatttccctgacttcccctttaggggcctgggggaaagggatgtttgggggcaaaatctcaactgagtcaatccccaaccatccaccttttctgcaagacactcaagcagctggagaagggtacagggctgaggagtctcacttgacattcatgagcacagacagcaatgggacgtgcagcaacatcgcccagcagccctgcctggcacatgcctgttccacacctttcctcttcatctctagttactccactgcctcagctcagctccctccccgctgatggccttgactcaacctcacagaaaaaagactcagccgagatggacaggcttcctgccaatgacatcccctacccgctctggctcagccctcctgcccccactcccatcagattccagcaacttgagctccctaggagatctcatggatttaaatagcacctataggccagccggtggctcat

SEQ ID NO: 96861 - DNA, 1613 bp, Homo Sapiens
  misc_feature (405)..(463): n is a, c, g, or t
  misc_feature (854)..(854): n is a, c, g, or t
  misc_feature (866)..(866): n is a, c, g, or t
aggcccagcacccaggcgccaccttgggaaggcccagcttgccccagccacggtttttgcgcaggtagaggggcggcggtcaacccccccagtggttccgaactggattcagcagcatgaccaggaaagcctcgggtacctggtcgtctgatagggaggacgtgatgtctgtggccgccgagtgcttcccaaaggcccagaagccaaaaatgatgatgatgaagtcgacaacatcagccaggaacatgagggcatagacgtcggtggctgcgcggtacttggtgtgcaggatgtcgtggaagaagcgccgtagcggccgatatgtgccctgggccagggacaggcagaagccctgcagccgccgcccggccgcccttactcttcctccagagcggcttggcctcnnnnnnnnnnnnnnnnnnnnnnnnnnnnnnnnnnnnnnnnnnnnnnnnnnnnnnnnnnnagcttcgatggctgccgctcctttccgtgctgggccctccttccttcttctaaaacgtagactgatgcgcctcgtatcacggggcctgagctccacatgggattctggggtaccgtccgtgggtccgaccctcgcttccacctgaatgtggtcttcggtggtggccgcaggcacccctggcccctcctcggctccctgctcctcctcgccgctcttgtcatgctccttggatggtgagtcctcctcatggtcccagaggccatagcacagcagctgggagcggtggaagaaaagggccatgagctgcaccaggtcgtacttgatgtagccgtcagtcttctccaggcccaggatgcggggcggggaagtaggggcttgttctcgtagcgcncgcagcaccacngtggctgttccaggggaagaacccaaactgggaacaggtacttgacgaccaccgcgatctcggtgaagacgatggccgtcatccagaagcgctggctgggcctcgggatcgacagcatggcccacaggaagacgagcacgggcagcaccagcgagccggcggaggccgtgaccatgtggttgaggatgatgatgaagtagcagagcagctccgagtgggcggccacacactggtacacggcccgcagcagccgcagcgcccggccctgcccctccgcaaacagctctgcctcctccagctctgggatgcgcaggcgcctgtccaggagcagctcgctggccgtccgcatcagtccctggtacagagaggcaccagcctcacgctccccggggtcggtgactgcctcctcactgccactgcgcgtgtggtagccggtgctcagggggctgcccatgtcgtctgtcatgctgctgagtggctcctccgcgcccagcccactggacacggtgcttggggcattgggggcctcggtggggcctggcagcgtggcctcggcctggcttgtgtacagctgatccagcacgcccctgtgcacttcgccgccctgcaggagctcctgtgtgaggaggtagcgctctgcccgcagcacgtcgctcatggtgccgtggtgccgggtgaactcctgcagccagcgtgtcagctcatccactagcgcctgcccctcgtgccgaattcgccacccaggcc

SEQ ID NO: 96862 - DNA, 951 bp, Homo Sapiens
cagtcgacggtaccggacatatgcccgggaattcggccattacggccgggggcggagccaggaggggaagcgatggctgggcccgcgtggatctctaaggtctctcggctgctgggggcattccacaacccaaaacaggtgaccagaggttttactggtggtgttcagacagtaactttaattccaggagatggtattggcccagaaatttcagctgcagttatgaagatttttgatgctgccaaagcacctattcagtgggaggagcggaacgtcactgccattcaaggacctggaggaaagtggatgatcccttcagaggctaaagagtccatggataagaacaagatgggcttgaaaggccctttgaagaccccaatagcagccggtcacccatctatgaatttactgctgcgcaaaacatttgacctttacgcgaatgtccgaccatgtgtctctatcgaaggctataaaaccccttacaccgatgtaaatattgtgaccattcgagagaacacagaaggagaatacagtggaattgagcatgtgattgttgatggagtcgtgcagagtatcaagctcatcaccgagggggcgagcaagcgcattgctgagtttgcctttgagtatgcccggaacaaccaccggagcaacgtcaccgaggtgcacaaagcccaacatcatgcggatgtcagatgggctttttctacaaaaatgcagggaagttgcagaaagctgtaaagatattaaatttaatgagatgtaccttgatacagtatgtttgaatatggtacaagatccttcccaatttgatgttcttgttatgccaaatttgtatggagacatccttagtgacttgtgtgcaggattgatccggagtctcgggtgtgacaccaaggggcaacattggagccaatgggggttgccattttttgagtcggttcatgggaa

SEQ ID NO: 96863 - DNA, 900 bp, Homo Sapiens
ccaaatctcccttggaaaaaggcaattgccccttggccccctgtgaaggcccagggatcattgcctgaatggaaatcttttccctggaggctcctccagggtattcaacccggaaattaggtgcggcctccccggatgaaggcccaaaataaaaacttccctccctggcactgctgttaggaaactgtaagtcttatcacctcccgaatctacaaaagcctctgtgtaggtatcttcaccagcaaggcttggccaatagcggatagatccttctctggtggcaaccatgacagcaacagcctgagtagaatgtgcttcacctgagggagaagagtaagaaagagccactaagtcggcactccagtggaaatcactaggtggcagctgaagttctttgcaaacggataacttagtaataggtgacagagcaatcttccaaataatgagcttctctttgcacaccagacaagcccatccaccttcatctatgttaatggtcagctggtcatcgacttcagccaatgttagggcttccatgactttaacaggaagagaagatccaaacgttttcacatcatagttcacagactcagttatggagtggtgtgggaacattcgtgttggtgttccccgcgagcttagcgagctacgccggccgaccggtcgagaagagcatctggggagctgactgcagaccccaggggcagacccttcctgctagccgtccggggcgtggagccgggcccgagtccggccagcgggccccttcgggacccggtacccggggtccgcggagaaggggcggctgggaacatgactccaaggagcagcgactaggacagcgagggatctggccgtcaggttgcagcctggcctgcgcgcggaacttaaacacctaag

SEQ ID NO: 96864 - DNA, 1369 bp, Homo Sapiens
  misc_feature (1152)..(1152): n is a, c, g, or t
aggtccatgcctcccgcagcaacaacatgggcatcgttggtggcttcactcagatgattcgagaaggaggggccaggtcactctggcggggcaatggcatcaacgtcctcaaaattgcccccgaatcagccatcaaattcatggcctatgagcagatcaagcgccttgttggtagtgaccaggagactctgaggattcacgagaggcttgtggcagggtccttggcaggggccatcgcccagagcagcatctacccaatggaggtcctgaagacccggatggcgctgcggaagacaggccagtactcaggaatgctggactgcgccaggaggatcctggccagagagggggtggccgccttctacaaaggctatgtccccaacatgctgggcatcatcccctatgccggcatcgaccttgcagtctacgagacgctcaagaatgcctggctgcagcactatgcagtgaacagcgcggaccccggcgtgtttgtgctcctggcctgtggcaccatgtccagtacctgtggccagctggccagctaccccctggccctagtcaggacccggatgcaggcgcaagcctctattgagggcgctccggaggtgaccatgagcagcctcttcaaacatatcctgcggaccgagggggccttcgggctgtacagggggctggcccccaacttcatgaaggtcatcccagctgtgagcatcagctacgtggtctacgagaacctgaagatcaccctgggcgtggcagtcgcggggaacggggggagggccccccggcaggggactccctgatcctgggccgcagcctggggtgtgcagccatctcattctgtgaatgtgccaacactaagctgtctcgagccaagctgtgaaaaccctagacgcacccgcagggagggtggggagagctggcaggcccaggcttgtcctgctgaccccagcagaccctcctgttggttccagcgaagaccacaggcattccttagggtccaggtcagcaggctccgggctcacatgtgtaaggacaggacattttctgcagtgcctgccaatagtgagcttggagcctggaggccggcttagttcttccatttcacccttgcagccagctgttggccacggcccctgccctctggtctgncgtgcatctccctgtgccctcttgctgcctgcctgtctgctgaggtaaggtgggaggagggctacaggcgacatcccacccctcgtccaatcccataatccatgatgacaggtgaggtcacgtggcctcccaaggctgagttccaactaccagcatgtgacgccaacttggtgtgaaggaagaggaaaggatctggccttgtggtcactggatctga

SEQ ID NO: 96865 - DNA, 884 bp, Homo Sapiens
  misc_feature (21)..(21): n is a, c, g, or t
  misc_feature (108)..(108): n is a, c, g, or t
  misc_feature (163)..(163): n is a, c, g, or t
  misc_feature (181)..(181): n is a, c, g, or t
  misc_feature (233)..(233): n is a, c, g, or t
ttccttggcatttccaacccnggagcctggccatttcttcttccaagaaggtaaaggaaaccagggcccaggtccctgtgacaagcagctggccatttgccctgggtngctggaactccacccctgcatagaagcttgcatcagaggaggtgcgccattgacnatgcatcccacccaaagnactgggcctgaggggcctgaggattctgctggttcattgacacatgggatcntgagccaggcccagcaccatggactggctgagggttgcctgcaatcagcgttgggatatttgtctggcgatgcagaattttcagggcaatttccggatccacaattctcatcactacctgtgcttgcagcaaagcataagccagttgagggttctgaagtaacatgttccgtgcctcctggggactattctggacacagagcttcatttgtttcatcagctcaaacatctgctctggtggaaggctggcaactgctttgctaatggactcaggggcatcctcaggactgatggtctctccataaggtgactcaatgacaggggcaccagtgccaaggctcttcagctcttctttgttcttttcactggcagcattgtccactcgaagtgctctcccactgaattcgcgcccattcaggttccgcatggcactaagtgctgtctcttggtcttggtattcacagaagccataaccctttggctttcctgtctctctatcgtataccaatctgaaactaacaacaggtccaacctcagaaaagatgtccttcaactgctcttcagtagcttcataaggaatgttccccacgaacacagaacgtagagaacgatccaccgctgggtctctcacagtcaaacccgccatagctct

SEQ ID NO: 96866 - DNA, 1285 bp, Homo Sapiens
  misc_feature (895)..(895): n is a, c, g, or t
gctaggtacgaggcctggggtgtgaaattcggcacgagggccgacctcaacagagctatggcgggtttgactgtgagagacccagcggtggatcgttctctacgttctgtgttcgtggggaacattccttatgaagctactgaagagcagttgaaggacatcttttctgaggttggacctgttgttagtttcagattggtatacgatagagagacaggaaagccaaagggttatggcttctgtgaataccaagaccaagagacagcacttagtgccatgcggaacctgaatgggcgcgaattcagtgggagagcacttcgagtggacaatgctgccagtgaaaagaacaaagaagagctgaagagccttggcactggtgcccctgtcattgagtcaccttatggagagaccatcagtcctgaggatgcccctgagtccattagcaaagcagttgccagccttccaccagagcagatgtttgagctgatgaaacaaatgaagctctgtgtccagaatagtccccaggaggcacggaacatgttacttcagaaccctcaactggcttatgctttgctgcaagcacaggtagtgatgagaattgtggatccggaaattgccctgaaaattctgcatcgccagacaaatatcccaacgctgattgcaggcaaccctcagccagtccatggtgctgggcctggctcaggatccaatgtgtcaatgaaccagcagaatcctcaggcccctcaggcccagtctttgggtggaatgcatgtcaatggcgcacctcctctgatgcaagcttctatgcagggtggagttccagcaccagggcaaatgccagctgctgtcacaggacctggccctggttccttagctcctggaggaggaatgcagngctcaggttggaatgccaggaagtggaccagtgtccatggaacgggggcaagtgccgatgcaagaccccagagcagctatgcagcggggatccttgcctgcgaatgtcccaacccctcgaggcttgttaggagatgctccgaatgatccacggggaggcactttactttctgtaactggagaggtagagcctagaggttacttgggaccacctcatcagggtccacccatgcaccatgtccctgcgcatgagagccgaggaccaccccaaatgaactgaggggagggccattacccgagccagaactctaatggcagaaacaaagaggacccatgctagatcagaggggtccacccttggatggcagaggtggaagggatcccgaggaaa

SEQ ID NO: 96867 - DNA, 1026 bp, Homo Sapiens
  misc_feature (107)..(107): n is a, c, g, or t
  misc_feature (232)..(232): n is a, c, g, or t
tgccccgaggaccatggaaaggtctggttgctctcagccagaccaggaagttgcagagcctagcacttgggtgagcaaccagcacagggtggccaccaccacttttncccccccaattccttgatgaaagtgctgaagatgctgctttggcatcgggggcaggaggcagggataatcccccttcccctgggcccagagagggagaaatcagcctctggtagcccctgttccncctgaggagctgccagcgggagaggggcaaggccacgcagtgcccagccgggagagcctggtagccagagcgggggtggtgcagctacagctgagaggggacgacgccaggaggagctcagccagcaggtggggggacagcaggggcctgctgcggaggacgggtggccacggccagggaggtcgtggccccaggagcaggtgctgggcttgggactctttggaagaacctagcgtgtctggcctggcagcccagccattcccacggctggtcaggatggcactttgatgccaaagtttttgcgtagctgttccagaaacacaaaagtgagcacggtgtgggggatgaggcggatgccagctgggacgaggcccttgtaaaaggccagaggcccgagcttcgctgtctccacggcgcagtggaaaacgccctgatactcccccttggagttcatcaggcgagtcttcagcacatccaggggctggcacaggaacgtggcacatccacctgcaataaagctggcgacaaagtgagtgaagatgttgtcagagaggtacccggtgctaaggaccagctgcttggcctggtcgtagcaggacagctggcccacagtgactaaggcccctcggctggatgccatggttgcacccgagaacagtctcctgagaccctcttcacgagctacgcggtacaggccatccagcgcatgggcgtagttgcgccgctgaccctggggcagcttcacgtcgttctgcatcctgaaacagaagcaggggcgggaggggcgggcgggc

SEQ ID NO: 96868 - DNA, 1030 bp, Homo Sapiens
  misc_feature (879)..(893): n is a, c, g, or t
cggtacacgccggggtagggccggggtcgggttgtggtcgggccgggattgggctctcctgggccatggcagccgaggcgcgcgtgtcgcgctggtacttcggggggctggcctcctgcggggccgcctgctgcacgcacccgctggacctgctcaaggtgcatctgcagacgcagcaggaggtgaagctgcgcatgacgggcatggcgctgcgggtggtgcgtaccgacggcatcctggcactctacagcggcctgagcgcctcgctgtgcagacagatgacctactccctgactcggttcgccatctacgagactgtgcgggaccgcgtggccaagggcagccaggggcctctccccttccacgagaaggtgttgctgggctccgtcagcggtttagctggaggcttcgtggggacgcccgcagacttggtcaacgtcaggatgcagaacgacgtgaagctgccccagggtcagcggcgcaactacgcccatgcgctggatggcctgtaccgcgtagctcgtgaagagggtctcaggagactgttctcgggtgcaaccatggcatccagccgaggggccttagtcactgtgggccagctgtcctgctacgaccaggccaagcagctggtccttagcaaccgggtacctctctgacaacatcttcactcactttgtcgccagctttaatgcaagggggatgtgccaccgttcctgtgcccagccccctggatggtgctgaaaactcccccggatgaactcccaaggggggaaaatcagggggcggttttccccttgggccgggggaaaacagccaaagcctccggccccctggggcccttttaacaaggggccccgtgccccaaggtggggataacgnnnnnnnnnnnnnnnaaacgagggcctccacttttttgggggttcccggaaaaagcccctccccccaaaacagttggggctttcagagggggcccaacctcggccccaaacgcggggaatatgcgcctaggaggcgccccacggccacacac

SEQ ID NO: 96869 - DNA, 960 bp, Homo Sapiens
ggggaggccccagacgcccaaccttactttttggttgagctcccttggcccggccaggtgggcaccctccccggggggttcattggtggctgcttgccagcccggccctgcttccaggggcgtggagtcccatagatggtggtcccaccccggggtgcacacgttctgagcgcagctgggcctggtgcttgcccctctgtgcagcagcatcttggccggtccccagcaggctctgggcagcgatgcggctgggtccaggctgctgggcatgcccatcttgacggctccttcagccaggcactcggagaatgcacacacgaaggccacgccactgccactgaggccagtgtggatgtcgacgtaggcttcaggcacctcctcacaccgcccacaggcctccagcagatgctgcaggagcttggtctcgctgctccccacgtggcggccccgcgccatcactatggccccttcctggaccacacagggcaggttgggcaagacccgcagcacccgtgtgtttgggggcagcagctcctccagggtgctcagagacaccccagcagccacggacaccaagatgtgttcagtggtgaccacaggagccacctctgccaggacagctggcagcacatgaggcttggtggcaaagatgacgagcaggcagctctgcagcacctcctggttggagtgcgtggtccggcaacccagagcttgaaagtgacataggttcctgtctgttggtgcactggccagtatgtgctgagcttccacttttcctgctctgatgaggccctgcgcgatggcccccgccatgcggcccgcgcccacgaagcccacgcgccgcggagacggctccgcagctgccatcttgttgcctcggacgccgctgcgctcaccgcaacatccacaggccgcctcgtgccgaatttaaacgcggcctcgtacctagccgtaatttgt

SEQ ID NO: 96870 - DNA, 1188 bp, Homo Sapiens
ggatatttgtaggatactgtatctgcaaatgcaacaacaaatagttttgtacttggttaacagtcttagttaaaacatgagtttattttctaaaagtatccagaataagtaaaattatagaaataagaaaatgttacacaactttgctgttcatacccttaccttcttactacttttggtttggaggagggtatcaccactagaaagtgtgcctccttaagatttcttaaaggaaagttagtttcagtatttcacagcaagttggactacaaaatctagagttgatctgctttttaaaccttcatttaaaagcaaacttggaagaaatttgaaactgatgtttttaatataggtctgtgttgcctaggttttctttttttaaagaggtatgtaattaaaacctttgtaaaatttgccaactaatattagtgcctgacttcccatatttgtttcatctttttaactgacagtatatctcacttcttctttgaatagaatgagtgagtgatctcagttttcacattttatgcagaagctaatccctacttaacaaggcacacattctacaggaagtcatagaaagtttaatccttgggcctcctaagctctcggatattcagggatctctataaaagttggtggcttttttcatcatcataaattcatcataatcacagatatttttggggctaagatattcatataccaaggatggttttgtaaagaattctgggaatcattgaatttaagggaattggtgggctttgggatcaacttaaagacaaaatagctaaatttcctttaagggggagattataaattaatggatgtcaccgttttttcccctcccattaattatccccccacatttattattttttagaaccgtaaaggggagggtggccccctttggagggtttttttagccaaaaaccggggggatggaagtaaaaaccagccttgagggcaaaagtggggtttcgggggggcaaacagggggaagcgagagtttagattttaaaaagcgctttgtgggagaaattaagagaatgcgcgtgtgacgtattccgtggacctcccggtgggccgtttcggcgatattgggtgggggaaaccgtgaagatactgcggcgaggattcgagagtggggaaatttccttggggaaaagcgcccaaaaaaatggaatt

SEQ ID NO: 96871 - DNA, 949 bp, Homo Sapiens
ggggctggaccccggggtcagtaggaagccgcggggtggtggcgagagaggacccaggtgtcctggcagtgggcgccgcggggcacacgctgggccaaggtgcaggcggccagggtgggagactgttcgccccgccctgagtactcctatcttgtttctccacctgttcgggagttggagatgtgcacctaaaggaggcgcatctggggacggacacatctggcactgaggccctcgccacctgcctcgccacctggcgaccctgaccccaccacactgccttgagagtcgctcaaaagtagggccccagggctcgcagcagcatgggcaccgagaaagaaagcccagagcccgactgccagaaacagttccaggctgcagtgagcgtcatccagaacctgcccaagaacggttcttaccgcccctcctatgaagagatgctgcgattctacagttactacaagcaggccaccatggggccctgcctggtcccccggcccgggttctgggaccccattggacgatataagtgggacgcctggaacagtctgggcaagatgagcagggaggaggccatgtctgcctacatcactgaaatgaaactggtggcacagaaggtgatcgacacagtgcccctgggtgaggtggcagaggacatgtttggttacttcgagcccctgtaccaggtgatccctgacatgccagaggcccccagagaccttcctgagaaagggtcacaggttggaaagagcaggttgtgaatggagatggttggggctgtttcaaagccttccttgcctcccccaagaaaccggggacccccaaagcccaggcttcccctctggggcagtaacctcttaccaaccccccctccacaagagttcccatttcacccccaggggaccctggaacctcccggagggttttcctggtggaatttcccctggat

SEQ ID NO: 96872 - DNA, 2274 bp, Homo Sapiens
  misc_feature (2178)..(2178): n is a, c, g, or t
agagagtatgaagtcgacggcgcgccgaattcggcacgaggtttacccaccccagttctggttctgacgccctagctcattccgcaaatttagggcttgggtctggcttgtacccctccggactcgaaccacctacttctctgagccgagccagctaccgtgggctcctggaatagccacccctccctgggcacccttgaggcctccgtggagggacgtcacggggcagagctgggacgtgagcctgagtttgctgcaggcgtgctctgtgtggtggctgggttctgccaatccccgtgcccaccgggtgggcgcggcctgggaagctcctgcccctccctgctggtcggcgtcacgcgtgacgtcccgcgtgatggctgggagggcccggcggcgacagcggaggcagagaggaaggcggttctgagagcttcagagagcgatggaaagcaaaatgggtgaattgcctttagacatcaacatccaggaacctcgctgggaccaaagtactttcctgggcagagcccggcactttttcactgttactgatcctcgaaatctgctgctgtccggggcacagctggaagcttctcggaacatcgtgcagaactacagggccggcgtggtgaccccagggatcaccgaggaccagctgtggagggccaagtatgtgtatgactccgccttccatccggacacaggggagaaggtggtcctgattggccgcatgtcagcccaggtgcccatgaacatgaccatcactggctgcatgctcacattctacaggaagaccccaaccgtggtgttctggcagtgggtgaatcagtccttcaatgccattgttaactactccaaccgcagtggtgacactcccatcactgtgaggcagctggggacagcctatgtgagtgccaccactggagctgtggccacggccctgggactcaaatccctcaccaagcacctgccccccttggtcggcagatttgtgccctttgcagcagtggcagctggcaactgcatcaacatccccctgatgaggcagagagagctgcaggtgggcatcccggtggctgatgaggcaggtcagaggcttggctactcggtgactgcagccaagcagggaatcttccaggtggtgatttcaagaatctgcatggcgattcctgccatggccatcccaccactgatcatggacactctggagaagaaagacttcctgaagcgccgccccctggctgggggcacccctgcaggtgggactggtgggcttctgcctggtatttgcaacccccctgtgctgtgccctattcccccagaagagctccatacacataagcaacctggaaccagagctgagagctcagatccatgagcaaaaccccagcgttgaagtggtctactacaacaaggggctttgaggagggtcagcctctgtcccctccctcacttccttgggctgctgctttagtggagtcatgtcacccctaccacttggctatctgcctagcactgggcaggggccttggtgggcagatggcaattgagggtagcaacctattagggtgggggagggacctccataaggcttttcctcccttctctggtttcaaagatcagagcacataacccctcctgtgcttgagtgtccatgcatatacatacatgatacacatgtgtatgtgtacattgggtcctgaaagctagaagcaggcatgctagcctagtatgttctgacatctggcttcccttctcagcctcatgtccacctgcctgccagccaggctacaggtgtgacttccttctctaaactgttacaccagccaagttatttttgatggcacctcatcccttctagaaataggaggagccccaggatctcaggacagagacttatagacactagtaggacaaagcgggctgaatccttcaggtttctgatacctagctccccaagctgactgggctggcagaggagaacatgttgagacaagggaggcaggggacttatgcatccctcagtgccatcccttgtatcctggaatagctccatttcccctcctcctctctaccagacaaaggagtgcctggtgtcctgaactgccctcgctgtctcccccaccaccctactttgacagcgtgggcatcttcagcaacaagccttgggaagttcctggntgtgctctgacatcatgacctcaaatctaaatcctccaatccaactcccttttccaaacaaaagccacagaaggcgaagcaggcatccccctttaa

SEQ ID NO: 96873 - DNA, 1078 bp, Homo Sapiens
cggtccggaattcccgggatggataagagagcaagaaaatgaagctcaagagcctcctgctccggtattacccgccaggaattatgttggaatatgaaaaacatggagaattaaagactaagtccatagatttgcttgatcttggtcccagcactgatgtcagtgcgttagtagaagaaatccagaaggcagaacctctactcacagcttcacgaacagagcaagtcaaacttttgatacagaggttgcaagagaaactcggccagaacagcaatcacacgttctatctttttaaggttctcaaagcacatatattgccactgactaatgttgcacttaacaaatcgggctcatgctttatcacaggaagctatgatcggacgtgcaagctctgggacactgcgtctggagaggagctgaacacgctggagggccacaggaatgtggtttatgccatagcattcaacaatccttacggtgacaaaatcgccactgggtcctttgataaaacttgtaaactctggagtgtggaaacaggaaaatgttaccataccttcaggggtcatacagcagaaatagtgtgtttatcatttaaccctcaaagcacattggtggcgactggaagtatggacacaacagccaaattgtgggacattcagaatggcgaggaagtttacaccttaagaggacattctgccgaaatcatctccttgtcatttaacacctcaggagacagaatcatcacggggtctttttgatcatacccgatgtaatggggggacgctgatactggaaaggaaagtaaatatctttaattgggccattgtgcctgagatttacaagtgccctcattccaattgggggattgctcctcttaatattaactgggctcctatgggacaaaaaccctgcaaagctgggggggatgcttacacaagggggaaaagggggtgggacaacctttaacagggcccatggatgattgaaatatattaaaaccggcctggcttttgaatacacacgtgggaaaagattttattttgccaacttgctcttttagccttggatgggaacacca

SEQ ID NO: 96874 - DNA, 862 bp, Homo Sapiens
ggacgcgtgggcgggcggctgggacgcagctgcccccgctcggcgcccgctgcacccttagcagccactgccacctgggcccggagcctccacgatctcgcccggcgattgtgggcaggggcgcctccggatcgatcttctgaaattcaagttttcaagatgaagtttttattgacaactgcctttttaattttaatttccttgtgggtggaagaagcctattctaaggaaaagtcttcaaagaaagggaaggggaaaaagaagcagtatctatgcccatctcagcagtcagcagaggaccttgcccgagtacctgccaactccactagcaatatcttgaacaggttattggtcagttatgatcccaggataagaccaaacttcaaaggcattcctgttgatgtagtagtcaacatttttattaacagttttgggatccattcaagaaacaacaatggactatagagttaacatcttcctgagacaaaaatggaatgaccccaggctgaagctccccagtgattttaggggttcagatgcactgacagtggatccaacaatgtacaagtgtttatggaaacctgatttattttttgcaaatgaaaaaagtgccaattttcatgatgtgacccaggaaaacatcctcctctttatttttcgtgatggagatgtccttgtcagcatgaggttatctattactctttcatgccctttggacttgacattgtttcccatggatacacaacgttgcaagatgcaactggagagctttggttacacaactgatgatttacgatttatctggcagtcaggagatcctgtgcaattagaaaaaattgccttgcctcaatttgatatcaaa

SEQ ID NO: 96875 - DNA, 1360 bp, Homo Sapiens
ggtcgcgcccacccaagttggccccggggcgcggggctctgcccaagtccccgccggcgtgccaggcctggattctttgccagggacgggcaaatgtaccacctcactcgggtttttgagacccggcaggccagaatttgggggttgctgggaaagcccgctgttgttccggcagcctcctgctgactggcccttgacccaggccccaggcagcgcctgcgtatggcagagcagcctctctgtgtagaggctctgcaggtggccggcctccgtgaccgggtagccaacggtgagctcgtcaaactccctgaggaactcctcctcctccacccagaactccccttcctggagctgggacaggagctcagatgctaccgctgcatctacctggctccacccttcacccccctctctccagagcccctgccagcaccgccggccccaggggttctggatccgcagcagcaggatgcactggcccgcctgaccctggagctcccgcaggtccgagacaatgaaggcatggaactcccccagctcccgggcacctgctctggggctgagcacgcagcagctgatcagacactggtcccttcaggtggagcagctgccgacaagtcctgtgctcccagcggcctggcctgtcctgctggcctccgcttcctgctacgcccttcaggttccatctttctgccaggccgccggtcaggtccaccagggcatccgccacctgcccggcccacaggtgctcgtaggacccatggaccttggcgtagaccttttccagtaaggggagccagaacacatcctccctctggcagcgggagaaacagagtctccctgcaaggcacggcaggcggtcatctgtggtcacctccacccagcgtccaaactgccaaatgcgacaggtgaaggagccccggtactcctggtcggcccagctcggctgtcccggaggaatgacctggtccaggaggtgcctgctcttctgcagcgcggcgcaggcacacaggaaccagcaatcccccagcagcccctgcttcacctgcccttcccgtgggtcatctggaaacagccggggtgtggcacaaatctcctggggccgcctccacgtgatgtcctcgcggaactgggccagcggcgtagacaagtcgcagaagagcgaggagtccgcggcggggaaggcggcgtcccggaacagctccctcgccggcgtcgcgccccggcccgcccgcatcctcggctccgcgggctcccatctgcagccggttgcctcggggtcgcagccccggagagaaggcgagtcagccgccgccgcctccgcctcgtgcggaattcgccacccaggcctcgcgtcctt

SEQ ID NO: 96876 - DNA, 940 bp, Homo Sapiens
ggaacatgaacaagaccatgtccagcgtttttactgtgaatgtaaatggaacagcagcccaaagctgttgtctgtgccccagaggtgctacctgtagacagggaccaactccatgtgtgtgtgttaagtgtttgactccaattaagactcccaagcaaatcctgcatattccaaatggaaagagtactcagtgggaaaaagggtgttacctcaaagtcattgcttctttcctggctgggtcacagggtgaagagatgaaggtgtctgatggatatagacaattagggaaaaatgagcggcaaaggagctttccccttcagctgcactctaaaggggaacattttaaggaagtactagcagctttgactcttctatgctcctgttggtttacaagccaccaagaatggcagtgttgagaatacggcctggtaaaatgggagatgtaaaatgactaaatgaaaggaagggtagtttttaatggtggaaccacccgtgctgggcactgggagctacccagaaggaatgcacaacgctcccctcaaggagctcacagtctagcctactccctggctggaagcctcaggaagacgtgctaatttattgtggaattggtagtttgcttttcatgcccctggcttccttctcatgaccatttccccctttctggctgggttgcattattgatttccaggaccaagtcctggcttcctcctggcttcctgagatgatggtctgctcagggagaaatggaggggtgagctgtgtgtggccaccggaggcacggccaggaagagggcgccctttactgggagggggtccatggctcagcagcagagcagggtctagtgacaattcaactttttatgctatgaccaggggtgggatcctaaatttaatggggggtgaaaggcctggaattaatttaagaagactttctttt

SEQ ID NO: 96877 - DNA, 1286 bp, Homo Sapiens
ctggccacttagggatgggtcccaggttgtccagggcctcaaaaggcagagagggaaccccttggttggcacaagggggccacctccccccaccatgtgctgttctggggctgctgccctgccctccactgaccagccagttgggagagggcccagcccacacatttctttctttacccttttatttacagggggctgattccactctgtgttctctccgcttttaagcctatctctatgcccacagggcttcctcgcaaatagctcctcctctcgaaactttccacctccgcaggaccgatgccagggagcagtctcccagagcgcagtcccactggagcccacgtgtgcacctgcagcctttacactgtgactgtgtcaaggcaacatggcccagagctcaccctgcaggctgggtcgatgcccaggtatccacaaacacacatcagtggccatcctcagagagcccctgttcctttaatgctatctttcgtaggtgagttttagaaacgtgacctccagctctggaaaaactatctcaataactcaatcagcgatccctttcttatcgaaaacatgtaaatatcagccaaagcatctcaagtctcccaaataacatctctcatgcatcctggctaagactgtaacatacttcccagtagttgacatagaaacattacaatttaattagcttttgctgaaataaaggagtgggggtgagccactgcccatcgttcaactgtgcagcagatgcagtggctggctgtggtccgcagcagctcatccttccactgagctgcttaaggctaagccttggtttaattctttaaaagtttttgtgtttgttttgtttaaggccaactccagtgttaggaatcaaacttaaagagcgtctgttcttttcggctgcccgggtgtcagtctgaaacaacagaggggccgcggcatggggctctgattggtgccgagtgcgaattcccgctgcagcctcagtgtcggagggacggacttcccttctccatttcccggctgtctttctgcaatgcagtcagtacctgagcccacttcttgtttcggctctgcatctggatcgtggcgatggaggcaaacagctcctcggcgggcaggtcctcgggcagccgggtcaggaactgggccatgtgaatgaagtccatcttggtcaagatgtcctcgaacagcttcaggatgccccaggccgggcggaacaggaactcttccccatcgcgacagaacacgtcccagatacgacaggccaggtcgaaggg

SEQ ID NO: 96878 - DNA, 1395 bp, Homo Sapiens
  misc_feature (124)..(227): n is a, c, g, or t
  misc_feature (283)..(410): n is a, c, g, or t
cgaagcggaaacgcgcggaggcgagataaggggcggggtatagggaagggaggagcgggggtccaatagttaaaaggccgttcagaagggggacgaagggcgatgaacgaaggccggacggagnnnnnnnnnnnnnnnnnnnnnnnnnnnnnnnnnnnnnnnnnnnnnnnnnnnnnnnnnnnnnnnnnnnnnnnnnnnnnnnnnnnnnnnnnnnnnnnnnnnnnnnncggcgtagacgggacaaataagagcacaaggcaaaacagcggcggaagcgggaaannnnnnnnnnnnnnnnnnnnnnnnnnnnnnnnnnnnnnnnnnnnnnnnnnnnnnnnnnnnnnnnnnnnnnnnnnnnnnnnnnnnnnnnnnnnnnnnnnnnnnnnnnnnnnnnnnnnnnnnnnnnnnnnagggaggggacgagggaaacgaaaaagccatgatggggggaggcatctagggcagaaggcgggaggtacggaaggggggacaggcggaagctggcggtggcgggatggcgtcatgcaggcgggggtgcctggaggcttgccgcgtgcacgacggagcaggccgccaccgggatacccatagttggacgggaagatgcccacctggccacgcaccgggcccgcccaccagccctcgtctcgtgagatggctgcgtcccgggacagcacctccacacggtcacccttcctcagggcccagctcatcctgcccactgggctcgtagtcgaacagggctgtccacaccgggttggcataacccgctgcctttggagacccctcaggccggcctcctccaccgcccccaccacccccgctgccactgccattccatgaccctagagggctcttgaggaagaggctcttcaagggctccatggccgggagccggcgctgggatgtgtggaggaccttctctgggtgcccgtggtccccacccccgctggctgccaaggccctagtcccggaacctgggcatccgggccctggccctcagccccagacccacgcctctctggggagccaggagtgttgtctcccggccccccgcatctcgggcttctggaggagggcacccagggcagtgtggtcaggccgggggggtggggccccggggcctccggcgcctcaccatggctagcttggagggacccgagcttccctcggttctggagcagtcctgggagcctggctccggcccccgccaagtgtaaggtggggccttcaggggcagcgcctcaactccggttgggtctttttgcgcagggggtggagggagcgtccgcagttgggccgagactgcctgttcctggcccctcgtgccgaaaacgccacccaggcctcgctacttaggtccgtttaaggggggggtgggatgtacgggcgccg

SEQ ID NO: 96879 - DNA, 1402 bp, Homo Sapiens
cactataggctaggtacgaggctgggtttgaatcggcacgaggtgaatctcaggcacggttcacaggcgtcctcaagggcaggtttccatttcatcatgaagtgagggactcctgtggaagagggtggtgggccttggaacgctgcctccactgaggcgggcacacaaggcggaccctcctgaaacagtctccattttcttcaaacatgcaagaatgttttcccatgactgcgtctatttcagggtcttccatttttgtggtttatggccatgcttgccagttttggtggggttgaggaacccataggactcatagaaataatagtgaaaactcaaacccttattttgggacttcagttctcgtggtccataggggcagagatgtcaaagtgaaggttgcctgagtgaagggagagttcccctataaaaggcctaagaattgatttggggctcagccatcaaggggctggtgttgctcctgtcccagacaaggaagcccctctttacatcagccatattaggggaacggttgtcagctccccaaatgcctactggatcctacagccatacaggaaaacagacggacacagccctttccttaaagagccctggggtcctgtcctgcaggatgctgcataggaatgggcagagatgtcctggatgggaacatggtcctggaggtgccctacctgcatcctgctgcacccccacccacgacactcgagtgcaagatcgcctcactcctaaccctgactttattcccaggccccacaccgaggcaggtgcaggattcgccatggtgcagcctccgggtacaaacatctgaggcactggcgatcccagtccttgcagcaccctgaacacagctcagaccagtgaggggtgattcagaggtggggatgggcagagagggctggccactctgcctcaggacttgacctcaagtgttctgtctccccacccggtgtgtccagaagaccagcctctttcttgccagaagcaggtgctaagatggactgcacagggtcccggcactccctcgggacccattcaggatctcagctgggcaggggtgccacccaacaggaagatgtgatctgagcaatagtgtggccttgtttctccgcttctggttgtggctgtgtgtacagggctacctattttgacttctgacaggtgtcactgattttctttcccccatttaaaaaggtcatttagtcaaagacacagtgctagaggttttaaggggggtaatgtggtgggtcacatcacaaaccagtaagaaacgcttgggtaagttatccacatctttttgctgactggttccatataccaattctgggtcaacatattttcccaagctaaaatcctgaggccggggccttgaagggtttttttaaaa

SEQ ID NO: 96880 - DNA, 620 bp, Homo Sapiens
ggctggtgggagtacaggactcgcctcctcaggttccctgtgctgccacttttcagccagggccacaagtgaacagagtatctgccaagcccgggcttccgtgatggtctacgatgacaccagtaagaaatgggtaccaatcaaacctggccagcagggattcagccggatcaacatctaccacaacactgccagcaacaccttcagagtcgttggagtcaagttgcaggatcagcaggttgtgatcaattattcaatcgtgaaagggctgaagtacaatcaggccacgccaaccttccaccagtggcgagatgcccgccaggtctacggcttaaactttgcaagtaaagaagaggcaaccacgttctccaatgcaatgctgtttgccctgaacatcatgaattcccaagaaggaggcccctccagccagcgtcaggtgcagaatggcccctctcctgatgagatggacatccagagaagacaagtgatggagcagcaccagcagcagcgtcaggaatctctagaaagaagaacctcggccacagggcccatcctcccaccaggacatccttcatctgcagccagcgcccccggctcatgtagtggggctcaccgaaggc

SEQ ID NO: 96881 - DNA, 1801 bp, Homo Sapiens
  misc_feature (91)..(99): n is a, c, g, or t
  misc_feature (173)..(181): n is a, c, g, or t
ctcccccaggggggtttatagggggggccagagggcccttttcaagtaaaggattttcgggggggagggccccccccggtaaggccttttnnnnnnnnnaaaaaaaggctggaattgaggggaaagggccaggtgtgggatggccccccaggggggaggttccagccaagatnnnnnnnnntaattgaaggaagtgggggggcaagaagatgcctggtagtggaatccccaggagaaggaagaagggaccccaaaagccttaagaagaaaagttggtgggggttgaaaatgggtggggggggccaaaccccatcaggggaaggggccgagggaagacggattgaagtagggccagcacactggggggcttatccaccacgagcagatgagggtacaaggtttctcagaggggtgtggcccgtccatcagcagaatcactagaatctcgggaatggggcccgtggaggtattcccccctcttgggactcggacacactcacgtttccgagcctgtgcctcaaactgtgacaggttctgccgggtggccggcctcacgtccactttttctccattaagaactttccctggtaggagttccaacaatttgtggacagagttttcagaggctaccaccacctcagcataccctttggactggccatttgctcgattctctgcaaatttcaactccaccacatcatagactcctatagagcgaataacctggatcagctgctggtctgtggtccaccaggagaagctgcccacataaacggcagctcgtctattacgcaggccactgtaggtatacagaattgcaggggtcttgttgttgggcttgggagatggctcctggcgaacaggaggaggtggttcagtgctgctgcttctgtcatctgagggctgtgaggtggctgtcagcacatcatcatacaggtcaatctgatctgtattgttgaactctgggtcctggttgaactcctcgtcagcatatatatcaatcaagtccactccttctgacatggctccggaaggaagatcgcgagtccggaggatggacaaagtaaggaagatgccacgggaatatggcggcggcggcggcgagtccggactaggcccgaagcgcgcgaaccgcctgatcaacataggctggtgggagtacaggactcgcctcctcaaggttccctgtgctgccacttttcagccatggccacaagtgaacagagtatctgccaagcccgggcttccgtgatggtctacgatgacaccagtaagaaatgggtaccaatcaaacctggccagcagggattcagccggatcaacatctaccacaacactgccatgcaacaccttcagagtcgttggagtcaagttgcaggatcagcaggttgtgatcaattattcaatcgtgaaagggctgaagtacaatcaggccacgccaaccttccaccagtggcgagatgcccgccaggtctacggcttaaactttgcaagtaaagaagaggcaaacacgttctccaatgcaatgctgtttgccctgaacatcatgaattcccaagaacgaggtgcgtgcatcctctaatgacaaagcaaccttgtatttccttccacaaatgacatggaggcagcctaacgtcatgtggcccctccagccagcgtcaggtgcagaatggcccctctcctgatgagatggacatccagagaagacaagtgatggagcagcaccagcagcagcgtcggaatctctagaaagaagaacctcggcacagggcccatcctccaccaggacatccttcatctc

SEQ ID NO: 96882 - DNA, 912 bp, Homo Sapiens
  misc_feature (799)..(799): n is a, c, g, or t
  misc_feature (896)..(896): n is a, c, g, or t
gggctacgtaccgggccgtgctgcttatggcggcgctggagagggggcgctgagctgttgggtatgaagtgtaacagaacagactttaccacctgaaactgctgcttcaagttcagatcaggcaaggaacaaacctcgtaacaactaacaagaccaaagaagagtacacttaagttgaagacacaacacttgatctgaaacaagaagtttgtgcctactcaacagctttgaaagagcacttcccaacgctgctagtagtctttgttttcttcagtgctgtactgtgagattgcccggtacagcagcagttgtattctttattagcttggtagatcattttctctcgctcttttttttaatactagcaactttcatcctttgaaacgtgtgctgaaaaagaagaatcagcaaatactactgaaagtgcaatatttgagtatcactgcgagatgagctttgatccaaaccttctccacaacaatggacataatgggtaccctaatggtacttcagcagcactgcgtgaaactggggttattgaaaaactgttaacctcttacggatttattcagtgttcagaacgtcaagctagacttttcttccactgttcacagtataatggcaacctgcaagacttaaaagtaggagatgatgttgaatttgaagtatcatcggaccgacggactggggaaacccattgctgttaaactggtgaagataaaacaagaaatcctccctgaagaacgaatgaatggacaagaagtggtttatctgacttacacccctgaaaatggcgaangggaactttcgctgggaaccgggaaataaaataaacgttgggaattggtaaccataaacttactgggggcgggaaggggtcgcgaaattaagccggntggaaaaagaaacagg

SEQ ID NO: 96883 - DNA, 1129 bp, Homo Sapiens
  misc_feature (61)..(61): n is a, c, g, or t
  misc_feature (150)..(150): n is a, c, g, or t
  misc_feature (156)..(156): n is a, c, g, or t
gggggcccctccgtccaagccacagtgagtccaatgtcggtggtcctccagccgcactggntaaggtttatgctggaagtgcgcctcccactgcgtactcctgggggcagcatgggcctgtccaccgccttctggaaggccgccacccantccctntgttcggactccgtctcgcaggcaaacagaaacttgcggtcgggcgtgacgatggtgatgccatgtggccagtggtggccctgggtggacggcgggaacccatgcagcaccgtgtagccactctccttgctgccaatgaagacttccctcggggcgaaggcgtccagggggtctttgaagtacatgagcctgcggtcatccatggtgaaccagcgcttccggaagccttccgttttgcttgggccccgtcttctccatgtagccttccttcaggtagttcctgaagagctttggcaccagatctgcgtcgctggcccctgggaatgccacctgcaggtagtggaagcgagcagctcggagtgcattgaaccaagtccacaatctccttcccgtcctcatggtagatgaagatgttacgggtgctgttgtccttcaggtaggtgacctgcaggccgtgggggtggccgatcttggccggctggaaggtggcgttcaggtgctcgatcttcatcacggccttgggctccttggcatcatttctgttgaaatacttcagagcaccctctcgttctgtcagcacaaacttccggctcaaaaactgcccgttgtcccggccacgcttccagagaaaaccctcacggtaccctgccgagtagggctcctgcttctccgggtagatgaactcctgtcgctcgtacttggcccggatccactgctctcgaaggagctggcagtcggagggcgtgggccggtagtagaaggagggtactttggactcaaacctggctctcgcggcgtcgttcccgtgggaggccatgaactccacttgggcctcctcccaggcgtccaggcggacggacttcaccttgctgacctgggggatattccggtggattcccgagcagctcaggcagatgaaaccgcccagagtgtagaggcccagtcggatctgctcccagacgcccgagtactc

SEQ ID NO: 96884 - DNA, 1451 bp, Homo Sapiens
gtaactgcttccccccaggctggtgaaaaagaatgagtgaagctgctgatgaggtcttcaaagacatcatggagtccagccctgtgtgctcagccgcactgatcaaacctcggtggaggtcacagtggcctgctcgggctccccaaagaaagtgaaagggcagtgcttagggaccctgctgcagctgagccagtgacacccaccagcaaagcaggctcaggtgcaccagggggcaccagcaagggccccgccgaggagtccagagtgaggaggcacaagcactcctctgagtcgccagggagggacaaggggaaatcgtccaggctcaaacctgccccgccgcccccaccagcagcctctgcagggaaggctggaggaaagccctacgcagagcccgagccaggaggcggccggggaggcagtcctgggcgcaaagacaaaagccacgagtctggttgatgctgtgaacagtgacgctgccaagcccagccagccgggagagggcctcaaaaagcccgtgctcccggccactccaaagccacagtccgccaagccgtcggggacccccatcagcccagcccccgttccctccacgttgccatcagcatcctcggccctggcaggggaccagccgtcttccaccgccttcatccctctcatatcaacccgagtgtctcttcggaaaacccgccagcctccagagcggatcgccagcggcgccatcaccaagggcgtggtcctggacagcaccgaggcgctgtgcctcgccatctctaggaactccgagcagatggccagccacagcgcagtgctggaggccggcaaaaacctctacacgttctgcgtgagctatgtggattccatccagcaaatgaggaacaagtttgccttccgagaggccatcaacaaactggagaataatctccgggagcttcagatctgcccggcgacagcaggcagtggtccagcggccactcaggacttcagcaagctcctcagttcggtgaaggaaatcagtgacatagtgcagaggtagcagcagtcaggggtcaggtgtcaggcccgtcggagctgcctgcagcacatgcgggctcgcccatacccgtgacagtggctgacaagggactagtgagtcagcaccttggcccaggagctctgcgccaggcagagctgagggccctgtggagtccagctctactacctacgtttgcaccgcctgccctcccgcaccttcctcctccccgctccgtctctgtcctcgaattttatctgtggagttcctgctccgtggactgcagtcggcatgccaggacccgccagccccgctcccacctagtgccccagactgagctctccaggccaagtgggaaacggctgatgtcggactggcctttctcactttttttcctctctgggagccccctccctcccccgggcgtggggcctccctt

SEQ ID NO: 96885 - DNA, 878 bp, Homo Sapiens
ggcctgggtgggattcaagacgaggctggctttcacccccttggacacagctgacccagccaagtccccaaagcccagcaatggggctggggtccccaatggagccctccgggagtccgggggctcaggcttccggtctccccacctgtggaagaagtccagcacgctgaccagcagccgcctagccaccggcgaggaggagggcggtggcagctccagcaagcgcttcctgcgctcttgctccgcctcctgcgttccccatggggccaaggacacggagtggaggtcagtcacgctgcctcgggacttgcagtccacgggaagacagtttgactcgtccacatttggagggcacaaaagtgagaagccggctctgcctcggaagagggcaggggagaacaggtctgaccaggtgacccgaggcacagtaacgcctccccccaggctggtgaaaaagaatgaggaagctgctgatgaggtcttcaaagacatcatggagtccagcccgggctccagcccgcccaacctgactccaaaacccctccggcggcaggtcaccgtggcccctgcctcgggcctcccccacaaggaagaagctggaaagggcagtgccttagggacccctgctgcagctgagccagtgacccccaccagcaaagcaggctcaggtgcaccagggggcaccagcaagggccccgccgaggagtccagagtgaggaggcacaagcactcctctgagtcgccagggagggacaaggggaaattgtccaggctcaaacctgccccgccggccccagcagcagcctctgcagggaaggctggaggaaagccctcgcagagcccgagccaagaggcggccggggaaggcaatccctggg

SEQ ID NO: 96886 - DNA, 955 bp, Homo Sapiens
gtgggagctcatctgtgatcaggagcggtttcaagtcaagaatccccccgcagcctacatccagaagctgaagagctatgtggatactggtggggtcagccgaaaggtagcagctgattggatgtccaacctggggtttaagaggcgagttcaggagtccacgcaggtgctacgggagctggagacctccctgaggaccaaccacattgggtgggtgcaggagttcctcaatgaagagaaccgtggcctggatgtgctgctcgagtacctggcctttgcccagtgctctgtcacgtatgacatggagagcacagacaacggggcttccaactcagagaaaaacaagcccctggagcagtctgtggaagacctcagcaagggtccaccctcctccgtgcccaaaagccgccacctgaccatcaagtgtcccccttctccccggctgaccccagcccacagcaggaaggccctgcggaattcccgcatcgtcagccagaaggacgacgtccacgtctgtattatgtgcctacgcgccatcatgaactaccagtctggcttcagccttgtcatgaaccacccagcctgtgtcaatgagattgctctgagcctcaacaacaagaaccccagaaccaaggctctggtgctggacctgctggcggccgtgtgcttggtgccgggaggacatgacatcatcccttgcagcctttgacaacttcaaggaggtgtgtggggagcagcaccgctttgaaaaactgatggaatatttccggaatgaggacagcaacatccaacttcatggtgggcctgccttgcaggttccataaaccattgggggtacaatccgggtgggagcaaacatgaaaccttcccggggttcttcccttggcaaataatgaagtctccaccccccccttggggggcctggggaaccctggtaactttgcggagaaagggc

SEQ ID NO: 96887 - DNA, 1382 bp, Homo Sapiens
gctggaccggtccggaattcccttcatcggagcggagaggccagagccggagaccgagctgggatcgggccccgggcgggggcggtgcgagcggcgccaagcagatcttaggggcggggacggagccggggcgggcgggactgaagcggagcccgggaacggggcgggaggtcccagggtcccgggttgggggggtggagcagcatttcgtcgccgcgggggtgccgggactccggccgcagtgtcgccgccatcacggacttcctgtgggacaagcgcacgggcctcgccgccagaacgatgccgcatcctcgaaggtaccactcctcagagcgaggcagccgggggagttaccgtgaacactatcggagccgaaagcataagcgacgaagaagtcgctcctggtcaagtagtagtgaccggacacgacggcgtcggcgagaggacagctaccatgtccgttctcgaagcagttatgatgatcgttcgtccgaccggagggtgtatgaccgggcgatactgtggacagctacagacgcaacgattatagccgggatcggggagatgcctactatgatccacagactatcggcattcctatgaatatcagcgggagaacagcagttaccgcagccagcgcagcagccggaggaagcacagacggtcggaggaggcgcagaacgtgacattatacgccgactcatcttacgatgaaatcgttagcaccttaggagaggggaccttcggccgagttgtacaatgtgttgaccatcgcaggggatgcgcgggctcgagttagccctgaagatcattaaagaatgtggagaagtacaaggaatcatgctcgactatgagatcaagcgtgctagagaaatatcaatgagaatagaccctgacaagcaagaagcctctggtgtccagatgtttgactggtttgactaccatggccacatgtgtatcatccttattgagcttacctgggccttagcagccttaccgagtttcctcaaaagaccaagcaagcctacacctgaccgcatactcgccagtccaccaagatgcgccactagtggccttccagctgtgccaggctgtcaaggttcctccagtgataacaagctgacacataccagacctcaatggctgaaaagtattctgttatgtgaattgcacgactatgagctcacctacaacctagagaagaagcgagatgagcgcagtgtgaagagcaacaggtgtgcgggtggtagacttgggcagtgcccacttggaccatgagcagccatagcacccattgtctccgactcggcgattaccgagcaccagaagtcatccttggagttgggctgctcacaggctttgggcatgaggtggagtataag

SEQ ID NO: 96888 - DNA, 942 bp, Homo Sapiens
  misc_feature (737)..(737): n is a, c, g, or t
  misc_feature (908)..(908): n is a, c, g, or t
aggctggaccggtccggattcccgggatcggaagttgagcggcggcaagaaataatggcggcagctacgggggatcctggactctctaaactgcagtttgccccttttagtagtgccttggatgttgggttttggcatgagttgacccagaagaagctgaacgagtatcggctggatgaagctcccaaggacattaagggttattactacaatggtgactctgctgggctgccagctcgcttaacattggagttcagtgcttttgacatgagtgctcccaccccagcccgttgctgcccagctattggaacactgtataacaccaacacactcgagtctttcaagactgcagataagaagctccttttggaacaagcagcaaatgagatatgggaatccataaaatcaggcactgctcttgaaaaccctgtactcctcaacaagttcctcctcttgacatttgcagatctaaagaagtaccacttctactattggttttgctatcctgccctctgtcttccagagagtttacctctcattcaggggccagtgggtttggatcaaaggttttcactaaaacagattgaagcactagagtgtgcatatgataatctttgtcaaacagaaggagtcacagctcttccttacttcttaatcaagtatgatgagaacatggtgctggtttccttgcttaaacactacagtgatttcttccaaggtcaaagggacgaagatanacaattgggtgtatatgatccctggtaacttaaccccagtaccctgggatgggccttttgaggaaatttttgggtcctagcagccccacagatgggagtagcagtttttccaagcctggtggaagttggtttgctttccgtgaccgtaccatgcaagggggcgaagagacntttgcccaacagcatcaatctttcgaaagtgaaa

SEQ ID NO: 96889 - DNA, 876 bp, Homo Sapiens
  misc_feature (718)..(718): n is a, c, g, or t
tacggtccggattcccgggatatcgtcgacccacgcgtcgctagcccgctgcgatgttgcgcgctgccgcccgcttcgggccccgcctgggccgccgcctcttgtcagccgccgcacccaggccgtgcctgcccccaaccagcagcccgaggtcttctgcaaccagattttcataaacaatgaatggcacgatgccgtcagcaggaaaacattccccaccgtcaatccgtccactggagaggtcatctgtcaggtagctgaaggggacaaggaagatgtggacaaggcagtgaaggccgcccgggccgccttccagctgggctcaccttggcgccgcatggacgcatcacacaggggccggctgctgaaccgcctggccgatctgatcgagcgggaccggacctacctggcggccttggagaccctggacaatggcaagccctatgtcatctcctacctggtggatttggacatggtcctcaaatgtctccggtattatgccggctgggctgataagtaccacgggaaaaccatccccattgacggagacttcttcagctacacacgccatgaacctgtgggggtgtgcgggcagatcattccgtggaatttcccgctcctgatgcaagcatggaagctgggcccagccttggcaactggaaacgtggttgtgatgaaggtagctgagcagacacccctcaccgccctctatgtggcncaacctgatcaaggaggctggctttccccctggtgtgggcaacattgtggcctggatttgggccccaacggctgggggccccccattgccttcccatgaagggatgggggacaaaagtgggcatttccacagggcttccaactggaaaattggccaga

SEQ ID NO: 96890 - DNA, 1293 bp, Homo Sapiens
gccctgcaggcggttgcgttccccgtcgttaccctctttctcttcccgacgcgtgagttaggccgtaatgccttggctgctctcagcccccaagctggttcccgctgtagcaaacgtccgcggcctctcaggatgtatgttgtgttcacagcgaaggtactcccttcagcctgtcccagaaaggaggattccaaaccgatacttaggccagcccagcccctttacacacccacacctcctcagaccaggggaggtaactccaggactatctcaggtggaatatgcacttcgcagacacaaactaatgtctctgatccagaaggaagctcaagggcagagtgggacagaccagacagtggttgtgctctccaaccctacatactacatgagcaacgatattccctatactttccaccaagacaacaatttcctgtacctatgtggattccaagagcctgatagcattcttgtccttcagagcctccctggcaaacaattaccatcacaacaaagccatactttttgtgcctcggcgagatcccagtcgagaactttgggatggtccgcgatctggcactgatggagcaatagctctaactggagtagacgaagcctatacgctagaagaatttcaacatcttctaccaaaaatgaaagctgagacgaacatggtttggtatgactggatgaggccctcacatgcacagcttcactctgactatatgcagcccctgactgaggccaaagccaagagcaagaacaaggttcggggtgttcagcagctgatacagcgcctccggctgatcaagtctcctgcagaaattgaacgaatgcagattgctgggaagctgacatcacaggcttccatagaaaccatgttcaccagtaaagcccctgtggaagaagcctttctttatgctaagtttgaatttgaatgccgggctcgtggcgcagacattttagcctatccacctgtggtggctggtggtaatcggtcaaacactttgcactatgtgaaaaataatcaactcatcaagggatggggaaatggtgcttctggatggaggttgtgagtcttcctgctatgtgagtgacatcacacgtacgtgggcagtccatggcagggttcaccccgcacctcagggagaacctctatgaagcccgttctagagatcccaaagaaaatttggtttggcccctctgggttttccctggggaacaaacctttgggagaaaacttcttccagccatggaagggctggaccccctgaataagggaacaaaaaacctttt

SEQ ID NO: 96891 - DNA, 1083 bp, Homo Sapiens
caggctggtactgccccggagtatggatgcagcacctgggagaaggcagaccgtgtgagggggcctgtggccccagcgtgctgtggcctcggggagtgggaagtggaggcaggagccttccttacacttcgccatgagtttcctcatcgactccagcatcatgattacctcccagatactattttttggatttgggtggcttttcttcatgcgccaattgtttaaagactatgagatacgtcagtatgttgtacaggtgatcttctccgtgacgtttgcattttcttgcaccatgtttgagctcatcatctttgaaatcttaggagtattgaatagcagctcccgttattttcactggaaaatgaacctgtgtgtaattctgctgatcctggttttcatggtgcctttttacattggctattttattgtgagcaatatccgactactgcataaacaacgactgcttttttcctgtctcttatggctgacctttatgtatttcttctggaaactaggagatccctttcccattctcagcccaaaacatgggatcttatccatagaacagctcatcagccgggttggtgtgattggagtgactctcatggctcttctttctggatttggtgctgtcaactgcccatacacttacatgtcttacttcctcaggaatgtgactgacacggatattctagccctggaacggcgactgctgcaaaccatggatatgatcataagcaaaaagaaaaggatggcaatggcacggagaacaatgttccagaagggggaagtgcataacaaaccatcaggtttctggggaaatgataaaaagtgttaccacttcagcatcaggaagtgaaaaatcttactcttatttcaacaggaaagtggatgcttttggaagaaattaaccaggcagcctttttctgggaaaccaggctgatctatatggctacccagggggagaatagaaatactcccaaaacctttcaaggggaaaataattttaaattttccttgggttacttttttcccccaatttacctgggggttgggaaaaaatttttcatggggctacccatc

SEQ ID NO: 96892 - DNA, 879 bp, Homo Sapiens
ttccttataaagacaacaatatcaccacggggaagatatatcagcatgtgatcaataaagagaggcgtggtgattacctggggaaaacagtgcaagttgtccctcacattactgatgctgtccaggagtgggttatgaatcaagccaaggtgccggtggatggtaataaggaagagccccaaatatgcgttattgagctgggaggcaccattggagacatcgaaggaatgccgtttgtggaggcgtttagacaattccagtttaaggcgaaaagagagaatttctgtaatatccacgttagccttgtcccacagctcagtgctaccggagaacaaaaaaccaaacccacccaaaacagcgtccgcgcactgaggggtttaggcctgtctccagatctgattgtctgccgaagttcaacgcccattgagatggccgtgaaggagaagatttctatgttttgtcacgtgaaccctgaacaggtcatatgtatccatgatgtttcttccacataccgagttcctgtgcttttagaggaacaaagcattgtgaaatattttaaggagagattgcacctgcccatcggtgattctgcaagtaatttgctttttaagtggagaaatatggctgacaggtatgaaaggttacagaaaatatgctccatagccctggttggcaaatacaccaagctcagagactgctacgcctctgtgttcaaagccctggaacactcagcctggccatcaaccacaagttgaatctgatgtacatagactccattgatctgggaaaagatccctgaaaaccagggacccggggaaatttcctgaaactttggcacaacctatgccaaacctgaggggattccttgtgcccgggagg

SEQ ID NO: 96893 - DNA, 1797 bp, Homo Sapiens
tggaccggtccggaattcccgggatgccgggagccgccggccgccggtgtccggaccgcccgcccccgtttggacccgacttcggttcttctggggtgttgatgctcctaaagcccgagagcacgtgtccagaccctagcctgtacgacgctgactctgcccggtcccagaaccaaagccatgccggggtgtggcctctgaccccacgcggaggggacctcgccttgcgggaccccacctggaacccgacctcccagcctcgcagccggcctgagccgccatgcgcgggaagttgctgccgctggccggcctctacctggtgcagggcctgccctacgggctccagtccggcctcctgccagtgctgctgcgtgccggcggcctctcgctgacgcgcgtggggctggccaaggttctgtacgctccgtggctgctcaagctggcttgggccccgctggtggacgcgcagggctcggcgagggcctgggtgacgcgcagcacggcgggcctgggcctggtgtgtgggctgcttgccgggctgccccctcctggagctggccaggccgggctgcccgccgctgtggcggggttgctgctgttgttgaacctgggtgccgccatgcaggatgtggccctggacgcgctggctgtgcagctgctggagccggccgaactggggccgggcaataccgtgcaggtggtcgcgaactaacctgggggccgcgctacctggaggcgcgcttgctggcactgctgcccaccttctcggggccgcaactctttccgctcctggctgccaacctactggctggccgcggccctggcctgggctgcaccagccctgcggcggctcccacagcagcccccttccgagcagcgtccccacaccgcgcaccttctgcgggacgtgctagccgtgccggggaccgtgtggacggcaggctttgtgctcacctacaagctgggtgagcagggtgccagcagcctgtttcctcttctcctgctggaccacggcgtttctgctcccgagttgggactgtggaatggtgtgggtgctgtggtctgctccatcgctggctcctccctgggtgggaccttgctggccaagcactggaaactgctgcctctgttgaggtcggtgctgcgcttccgcctcgggggcctagcctgtcagactgccttggtcttccacctggacaccctgggggccagcatggacgctggcacaatcttgagagggtcagccttgctgagcctatgtctgcagcacttcttgggaggcctggtcaccacagtcaccttcactgggatgatgcgctgcagccagctggcccccagggccctgcaggccacacactacagccttctggccacgctggagctgctggggaagctgctgctgggcactctggccggaggccctggctgatgggttggggccacatccctgcttcttgctcctgctcatcctctctgcctttcccgttctgtacctggacctagcacccagcacctttctctgagctgagtggcttggacgttggacccaaattaaaaaggccaacaattgggtggcccctggtggggcccccaaggaaaagaacacaacgaacgacagcgagagcagcgaacagcacacaaacgacaaaagaaaaaagagagcggggcgcggcagacaaggaaagaacacgcccagagagggggcgagccaacacataccgacggacacgccccacgagcgtacagtaggaacaccagggcgcgcccacacagaaggcagcgcgagacacacacacg

SEQ ID NO: 96894 - DNA, 882 bp, Homo Sapiens
  misc_feature (647)..(647): n is a, c, g, or t
ggggtggcggtgggcggaactcctagcggacacctcgtggagtccggccggaagagcaaccgagatgaaggtgaagatgctgagccggaatccggacaattatgtccgcgaaaccaagttggacttacagagagttccaagaaactatgatcctgctttacatccttttgaggtcccacgagaatatataagagctttaaatgctaccaaactggaacgagtatttgcaaaaccattccttgcttcgctggatggtcaccgtgatggagtcaattgcttggcaaagcatccagagaagctggctactgtcctttctggggcgtgtgatggagaggttagaatttggaatctaactcagcggaattgtatccgtacaatacaagcacatgaaggctttgtacgaggaatatgtactcgcttttgtgggacttcttttttcactgttggtgatgacaaaactgtgaagcagtggaaaatggatgggccaggctatggagacgaggaagagccattacatacaatattaggaaagacagtgtatactgggattgatcatcactggaaagaagctgtttttgccacatgtggacagccagtagacatttgggatgaacaaagaactaatcctatatgttcaatgacctggnggaattgacagtataagtagtgttaaatttaacccaattgagacatttctccttgggaagttgtgcatctgacaggaatatagtactgtacgatatgaggcaagctactccctttgaaaaagggtatctttagaaatgagaacaaatacaatctgttgggaaccctatggaaagcttttcatttttaccggcagcaaatggaaagattataaccttatataccttttggataggt

SEQ ID NO: 96895 - DNA, 615 bp, Homo Sapiens
ggccgctatgaaaatgtagaatgtgaagtagtggtacatcctgaatgggggatccaagcaagggtccttggagacatgcgctgtgaattccattttcaagggcctctggggagaccttcaaaaggccttcattgatactttcagcatactcaaactcaatcacaggcataacagatgatgtttcaatgggccttgcttccacttctacagtcacaagatgcctttggtctcctaaagttctatctaaggtatctgtggcacgaactgagtttaggatggtctctcgatatgccacctggagaggcccgagataggtctccagtccatattccctctggattcgatcatgaataatctctatatgtaactcccccataccacacagaacagtctggccataatctccttctacttggatagtcgaataatcagctgggcaagtagcatctggctaagactaatgagtgccaacacttagataaataccaacacttcccaaccgcaaaaccaaatttctggccaatggaagatgaatataatggatgtggacagcttcggggtggtgcttgtccagagtcaggatctagcctcactttcaaactgggatcttcacgc

SEQ ID NO: 96896 - DNA, 792 bp, Homo Sapiens
ctccctgttggagatgtggaaataaaaaccacctaaacaagagcagagaggccatttggtcaaagtttgcaaaggagtcagccatgattgcttgtatttggcaggggtcaaaggcaggcagggactgtgaaatgttatagtggaaaaaaagggaaggctctgggtgtgctgtgattggagattgttggcatggggacagagcggactaactggaggggcatctttggttggttgggggggtatatttggctttctctggttggtctggagttggaagagggggtgtggtggctggggattgggaagaagctggcagccactaagttcagactgttctgggtccgattgctgctgaggctgtggtttggcttccttggcttcccaggctggttatgggtttctggccagagtctattgtcatatgtggcctggccattgtccagttgtatgttcagtctcttggaaggaagggtattgactctgagaggggccaccatcgctggaatgggggacacacagtacttcctccagctgcctacacccccctagggtcagtggcgcctgcctgtgagggtgagcccaatggctagagggctctgctccaagtcattgcttactacacccacaaacattcttcgttctttaaggcctaacttaaagcccagatcctacaggaaaccttgattagacccctctctttattaagcttcctaagatcaaaccctgcttttgtgtaaatgctgacctccttgcctacattttaaaaacctagagctgggcatgatggcccca

SEQ ID NO: 96897 - DNA, 1392 bp, Homo Sapiens
  misc_feature (921)..(921): n is a, c, g, or t
  misc_feature (1056)..(1056): n is a, c, g, or t
gggaagcgtcacgggtggggctgcagcttctggacctaggactttgaacatgtcgcgcctgaagcggatagcggggcaggatctccgcgctggtttcaaagcaggtggaagagactgcggtacctcggtaccccaagggctgttgaaggcagcgaggaagagcggccagttaaacctgtcgggtagaaacctcagtgaagtgccgcagtgtgtctggagaataaatgtggatatccctgaggaagctaatcagaatctttcgtttggtgctactgaaagatggtgggagcagacagatttgaccaaactaataatatcaaacaataaacttcagtcacttacagatgacctgcgactcttgcctgcactgactgttcttgatatacatgataatcagttgacatcccttccttctgctataagagagctagaaaatcttcagaaacttaatgtcagccataataaactgaaaatactccctgaagaaattacaaacctaagaaacctgaagtgcctgtatctccagcataatgaattaacctgcatatcagagggatttgaacaactttccaatttagaagatttagatctttcaaacaatcatcttacaactgttcctgctagtttttcttctctgtccagtctggtgcgactcaatctttctagtaatgaactgaagagtttgccagcagaaataaatagaatgaaaagggtgaaacatttggattgtaattcaaatctcttggaaactatacctccctgaattggctggcatgggaatcactaaaaattgctttattgccggaggaataaattacgttttccaccaaaatttccttcttgtagtctattgaaggaattgcacgtaggtgaaaaccagattgaaatgttagaggcagaacatcttaaacatctgaattncattcttgtgctagacctgagggataacaagttaaaatctgttccagatgaaattatactactacggtccttggaaaggcttgacctaagcaacatgatattagtagtcttccctattcattgggggaacctcantttgaatttttgccattagaaggaatcctttgagaacaattcggagagaattataagtaaagggaccccagaagcctaaaatatctaccaggcaagatcaaagatgatggacctagcccaaggggagtctgctactggagactgccctggaacctacccagggggatccggaaggcaatataccctgccatcctttacctttaaaaataattagactctatgggggataaaccaaggcaccttttggaatcccgggagagaggggggtttgatgggcccttaaaaaaggccacaatccgcccacctttccaatttaaatcttccaggaaagaaacc

SEQ ID NO: 96898 - DNA, 1362 bp, Homo Sapiens
  misc_feature (69)..(69): n is a, c, g, or t
  misc_feature (85)..(127): n is a, c, g, or t
  misc_feature (1175)..(1191): n is a, c, g, or t
  misc_feature (1205)..(1299): n is a, c, g, or t
aaacttcttctgggttttaactttatataaacaaggaaacttggcccaggagccatttaacaatggttnttttcaactgggcggnnnnnnnnnnnnnnnnnnnnnnnnnnnnnnnnnnnnnnnnnnnagggtttaaacacagttattagaaaggtacgaaattttatgggggccaaaaggactatgggtccattttttaccaggcccttggctatgtaggtaccaatattgtgttttccaaaggggttgtatctattttaaaccgcccatctgaaatcaaatgcattaaaattttccttctaaattttttttaatcagaaatgctagggtaattttaaactttcagtaagttaaaaataattatggtctctctttaaaaaatgaagagtgtggaatagatggtctcacagataactaatggtgcaaaggagttaagcaacacatcccaactattcccaagttatggcacacatggaaagcgatgctgtaggcacactgaggaaaatggacaaaggtggttctggcccagaggctccagccacccaggccacctttggatgtagcaaggggtgaggggatctgtatctaggcctgtctgtgatttgcagtgccagtgtgcatggctcaggaagctctaatcaaggagaggttaaatgacttaagtcacaaaatctagttactggcagctttgggaaataaatgcaaatatcttcttgtcagtgtattttctactaatcacaactgctctacatgctttctggctctaaaattcaatcatatatgcagacatgtatctatatttaagaataaagaggatttcctaacatgcttgaactaaagacacctaagctagcaatttacatcaaagctgaaaattaaaaacagttcttagcataaacaaatatttgactatcttctatttttcagacttgctattcttttaaatttagtttgtaagctctttgaacagtaacaatcttttgcacagtattttgtatatctctggtagtcagtaaatagagagtaacaataaattacactataaaggaaaaaactagacaaagtaaatccacattctaaataattctgaaggtgaaaaaagtgttaagtgttgattttgtagaggtagagaagattccctctttaaatgtcaaattcctgctagctaaattgannnnnnnnnnnnnnnnngagacagggtctcnnnnnnnnnnnnnnnnnnnnnnnnnnnnnnnnnnnnnnnnnnnnnnnnnnnnnnnnnnnnnnnnnnnnnnnnnnnnnnnnnnnnnnnnnnnnnnngacatcttaatatgcactatctactatattataggctcttgagaaacatttcattccacagcc

SEQ ID NO: 96899 - DNA, 1271 bp, Homo Sapiens
  misc_feature (1202)..(1202): n is a, c, g, or t
  misc_feature (1236)..(1237): n is a, c, g, or t
ggtccggaatttccgggatgggaggggacccgggctgccaggcgcccagctgtgcccagatggatgggacagagacccggcagcggaggctggacagctgtggcaagccaggggagctggggcttcctcaccccctcagcacaggaggactccctgtagcctcagaagatggagctctcagggcccctgagagccaaagcgtgacccccaagccactggagactgagcctagcagggagaccgcctggtccataggccttcaggtgaccgtgcccttcatgtttgcaggcctgggactgtcctgggccggcatgcttctggactatttccagcactggcctgtgtttgtggaggtgaaagaccttttgacattggtgccgcccctggtgggcctgaaggggaacctggagatgacactggcatccagactctccacagctgccaacactggacaaattgatgacccccaggagcagcacagagtcatcagcagcaacctggccctcatccaggtgcaggccactgtcgtggggctcttggctgctgtggctgcgctgctgttgggcgtggtgtctcgagaggaagtggatgtcgccaaggtggagttgctgtgtgccagcagtgtcctcactgccttccttgcagcctttgccctgggggtgctgatggtctgtatagtgattggtgctcgaaagctcggggtcaacccagacaacattgccacgcccattgcagccagcctgggagacctcatcacactgtccattctggctttggttagcagcttcttctacagacacaaagatagtcggtatctgacgccgctggtctgcctcagctttgcggcttctgaccccagtgtggggccctcattgccaagcaaagcccacccatcgtgaaaatccctgaagtttggctggttcccaatcatcctgggccagggccatccaccagtttcggaggactcatcttgagcaaaaccgtttctaaacagcagtacaaaggcatggcgatatttacccccgtcatatgtggtgttggtggcaatctggtggccattcagaccagccgaatctcaacctacctgcacatgtggagtgcacctggcgtcctgcccctccagatgaagaaattctggcccaacccgtgttctactttctgcacgtcagaaatcaattccatgtcagctcgagtcctgctcntttgctggtggtcccaggccccatctgatttttnncttctacatccatctacctgggtgggaggggtca

SEQ ID NO: 96900 - DNA, 1143 bp, Homo Sapiens
  misc_feature (157)..(157): n is a, c, g, or t
  misc_feature (377)..(386): n is a, c, g, or t
gtcgggagggggcgggaggaggatctggggtgtgttgagccggtgccgtggtgattatatctcgcgggtttttgacgaaaatctgtccttagactcgtatgagtgtgaggggcgtcgcactttctctctctcccatttcctgagggtgcggcttagntattcggattagggtggtgtagtgtcccgccagagtccgcgcaggttcttttcgcctttgagatggggggctggattatttgccccttgccttgctggcgtgcgtttataggaaaccggtttgtggctcgaaggaggggtcctatcggaatgggggcggcgtacccatggcccgggtgtgttgaggatgccggcctaagctttcatggattttccgggannnnnnnnnnattttgcgttgaccagtgagggccgcaccgttggggtcagggccgccaaagctggagggcggaccaggggcggtcagatgccgagctatcttggtgtctgtagaagaagctgctaaccaaagccagaatggacagtgtgatgaggtctcccaggcctggctgcaatgggcgtggcaatgttgtctgggttgaccccgagctttcgagcaccaatcactatacagaccatcagcacccccagggcaaaggctgcaaggaaggcagtgaggacactgctggcacacagcaactccaccttggcgacatccacttcctctcgagacaccacgcccaacagcagcgcagccacagcagccaagagccccacgacagtggcctgcacctggatgagggccaggttgctgctgatgactctgtgctgctcctgggggtcatcaatttgtccagtgttggcctggaaatagtccagaagcatgccggcccaggacagtcccaggcctgcaaacatgaagggcacggtcacctgaaggcctatggaccaggcggtctccctgctaggctcagtctccagtggcttgggggtcacgctttggctctcaggggccctgagagctccatcttctgaggctacagggagtcctcctgtgctgagggggtgaggaagccccagctaccctggctttgccacagctgtccagcctccgctgccgggtctctgtcccatgctaagggcacagctgggcgccgatcttgaaaa

SEQ ID NO: 96901 - DNA, 1125 bp, Homo Sapiens
  misc_feature (1008)..(1022): n is a, c, g, or t
  misc_feature (1027)..(1027): n is a, c, g, or t
ccctggtatacatatatggggatatgctcagcaacgtgggagctgcagagaaggttttctcctacatggaccgacagccaaatctgccttcacctggcacgcttgcccccaccactctgcagggggttgtgaaattccaagacgtctcctttgcatatcccaatcgccctgacaggcctgtgctcaaggggctgacgtttaccctacgtcctggtgaggtgacggcgctggtgggacccaatgggtctgggaagagcacagtggctgccctgctgcagaatctgtaccagcccacagggggacaggtgctgctggatgaaaagcccatctcacagtatgaacactgctacctgcacagccaggtggtttcagttgggcaggagcctgtgctgttctccggttctgtgaggaacaacattacttatgggctgcagagctgcgaagatgataaggtgatggcggctgcccaggctgcccacgcagatgacttcatccaggaaatggagcatggaatatacacagatgtaggggagaaggggagccagctggctgcgggacagaaacaacgtctggccattgcccgggcccttgtacgagacccgcgggtcctcatcctggatgaggctactagtgccctagatgtgcagtgcgagcaggccctgcaggactggaattcccgtggggatcgcacagtgctggtgattgctcacaggctgcagacagttcagcgcgcccaccagatcctggtgctccaggagggcaagctgcagaagcttgcccagctctaggagggacaggacctctattcccgcctggtgcagcagcggctgatggactgaggccccagggatactgggccctcttctcaggggcgtctccaggacccagagctgttcctgctttgagtttccctagagctgtgcggccagatagctgttcctgagttgcaggcacgatggagatttggacactgtgtgcttttggtgggggtggaaaagtggcggttgnnnnnnnnnnnnnnngtacntcgcgcccgcgccccctgctaattgtcccccacactatcttgtctatccaccaaaatataagcggctgtaagaagcacaccacgagatgcacctcact

SEQ ID NO: 96902 - DNA, 889 bp, Homo Sapiens
  misc_feature (740)..(748): n is a, c, g, or t
ggcgctgaggcggccaccgcgactccggctctgcgctcggctgcctgacttcttcctgctgctgcttttcaggggctgcctgataggggctgtaaatctcaaatccagcaatcgaaccccagtggtacaggaatttgaaagtgtggaactgtcttgcatcattacggattcgcagacaagtgaccccaggatcgagtggaagaaaattcaagatgaacaaaccacatatgtgttttttgacaacaaaattcagggagacttggcgggtcgtgcagaaatactggggaagacatccctgaagatctggaatgtgacacggagagactcagccctttatcgctgtgaggtcgttgctcgaaatgaccgcaaggaaattgatgagattgtgatcgagttaactgtgcaagtgaagccagtgacccctgtctgtagagtgccgaaggctgtaccagtaggcaagatggcaacactgcactgccaggagagtgagggccacccccggctcactacagctggtatcgcaatgatgtaccactggccacggattccagagccaatcccagatttcgcaattcttctttccacttaaactctgaaaacaggcactttggtgttcactgctgttcacaaggacgactctgggcagtactactgcattggttccaatgacgcaggctcagccaggtgtgaggacgcaggacgatggaagtctatgacctgaacattggccggaataattnnnnnnnnntcctggttcgtcccttggcttgtactggccctgatcacgtcgggcatcctgctgtgctacagaccgtggctaacttcatcaacaaaaaacggatggagaaaggttcaggaacccaggaaaccacgggctactacattccgt

SEQ ID NO: 96903 - DNA, 955 bp, Homo Sapiens
  misc_feature (931)..(931): n is a, c, g, or t
  misc_feature (936)..(936): n is a, c, g, or t
gagcgaggcctgggtggcgaattcggcacgaggcgcagctgcgggtccgggattcccagccatggcagattcctccgggcagcagggcaaaggccggcgtgtgcagccccagtggtcccctcctgctgggacccagccatgcagactccacctttacaacagcctcaccaggaacaaggaagtgttcatacctcaagatgggaaaaaggtgacgtggtattgctgtgggccaaccgtctatgacgcatctcacatggggcacgccaggtcctacatctcttttgatatcttgagaagagtgttgaaggattacttcaaatttgatgtcttttattgcatgaacattacggatattgatgacaagatcatcaagagggcccggcagaaccacctgttcgagcagtatcgggagaagaggcctgaagcggcacagctcttggaggatgttcaggccgccctgaagccattttcagtaaaattaaatgagaccacggatcccgataaaaagcagatgctcgaacggattcagcacgcagtgcagcttgccacagagccacttgagaaagctgtgcagtccagactcacgggagaggaagtcaacagctgtgtggaggtgttgctggaagaagccaaggatttgctctctgactggctggattctacacttggctgtgatgtcactgacaattccatcttctccaagctgcccaagttctgggagggggacttccacagagacatggaagctctgaatgttctccctccagatgtcttaacccgggttagtgagtatgtgccagaaattgtgaactttgtccagaagattggtggacaacggttacggctatgtctccaatgggtctgtctactttggatacagcgaaagtttgcttctagcgagaagcactcctatggggagctggtgcctganggcgnttggagatcagaaagccct

SEQ ID NO: 96904 - DNA, 885 bp, Homo Sapiens
tctgtagccgcagctgcgggtccgggattcccagccatggcagattcctccgggcagcaggctcctgactacaggtccattctgagcattagtgacgaggcagccagggcacaagccctgaacgagcacctcagcacgcgtagctatgtccaggggtactcactgtcccaggcagacgtggacgcgttcaggcagctctcggccccgcccgctgacccccagctcttccacgtggctcggtggttcaggcacatagaagcgctcctgggtagcccctgtggcaaaggccagccctgcaggctccaagcaagcaaaggccggcgtgtgcagccccagtggtcccctcctgctgggacccagccatgcagactccacctttacaacagcctcaccaggaacaaggaagtgttcatacctcaagatgggaaaaaggtgacgtggtattgctgtgggccaaccgtctatgacgcatctcacatggggcacgccaggtcctacatctcttttgatatcttgagaagagtgttgaaggattacttcaaatttgatgtcttttattgcatgaacattacggatattgatgacaagatcatcaagagggcccggcagaaccacctgttcgagcagtatcgggagaagaggcctgaagcggcacagctccttggaggatgttcaggccgccctgaagccattttcagtaaaattaaatgagaccacggatcccgataaaaagcagatgctcgaacggattcagcacgcagtgcagcttgccacagagccacttgagaaagctgtgcagtccagactcacggggagaggaagtcaacagcctgttgtgggaggtgtttgctgggaagaagcccagggatttttgctctctggact

SEQ ID NO: 96905 - DNA, 228 bp, Homo Sapiens
aatcagtttactaagtgttgttatatgtctctcatttctttcattaagaaacagccctgcaccttatgttgtatcagttaagaaactgtagtttgcaagtaaaacaaaattcaacttaaactagtagtggcagggaaaatgttggttcatcaaagtgaaaagcctaatttctttcaagtgtggcttaatccggagattcagatgacaacacttaagtaaactgataaa

SEQ ID NO: 96906 - DNA, 1016 bp, Homo Sapiens
ccctgcgctaccgtgtcggtgttccccggcgcccgcctcctcaccatcggcgacgcgaacggcgagatccagcggcacgcggagcagcaggcgctgcgcctcgaggtgcgcgccggcccggactcggcgggcatcgccctctacagccatgaagatgtgtgtgtctttaagtgctcagtgtcccgagagacagagtgcagccgtgtgggcaagcagtccttcatcatcaccctgggctgcaacagcgtcctcatccagttcgccacaccccaacgatttctgttccttctacaacatcctggaaaacctgccggggccacaccctggagcggtctgtgttcagcgagcggacggaggagtcttctgccgtgcagtacttccagttttatggctacctgtcccagcagcagaacatgatgcaggactacgtgcggacaggcacctaccagcgcgccatcctgcaaaaccacaccgacttcaaggacaagatcgttcttgatgttggctgtggctctgggatcctgtcgttttttggcgcccaagctggagcacggaaaatctacgcggtggaggccagcaccatggcccaacacgctgaggtcttggggaagagtaacaacctgaccgaccgcatcctgggcattccgggcaaagggggggaagggctcctcccccaggcggggggacatcatcgtatcgggagccttggggctcatccgccttccccagggccttcctggaaaacctcctccgcgccaccaaggactctgagagcccatcggaaagcaagttttcttcctcttgggagccgagcccccttttccccattgtcggcttgcccgggaacccaatgtggagacccacccgtaggcacagggcgcgggtcaggagacccgctgccggaggaacaggagccgcgtggccgcggagagatgggcgcgcgcgcccggacaatctatgcaggcccgcccccctccccggcgcaacaccccctgtatacctctcccacgtcgccc

SEQ ID NO: 96907 - DNA, 1029 bp, Homo Sapiens
gccattagttgacctatagaaccagtctgtacaaaaagcaggctggtccggtccggaatcccgggatatcgtcgaccacgcgtcggcgcacccccgcgctacgaaagcctcacgctcgacctcttcatgctcggctacttccagctaccggagatgggcctgagccgcgaggatcgcaagttccgccacctactgtgctacgagatgttccaccggctggacagccacccgtgggagcgcatccgcctcttccaccgcgtggtgctggaggaggtggaggccggccggcgcggctggagcgacggcttcgaggacctcaggcacaggttcttcggaaacggcctggaggctgagccggcccccgaagaacaggcgaagaaaaaggaagagaaggggaaagaacaggagcggaccgaagaggccgctccggttcagaagggggacccgcccaaggggcagcgcgaggccctggccctgtgccgcagcggcggcccgccgcccgccgcgcctcccccgatctcagactctccgggttccgaagcccccgccgaagaccctttggaactggtgtctgagatgggcgaattcagcaacgaggacatctgcgctacatcgaccgcagcttctccttctggaaggagaaggaggcagagctgtttgacatctgagcagcggaattcggaattcgagttcacctcgagcgtttacgtgggcctggacgcctgtctgacgcctccagaggcgtgagccaggggaagaacccaggactgtggcctgacaggccggaggccaggacaggctgctcagcctctgacgtccatcgtgagcaggtgtgtgagcgtggcggataggcaggcaggaccgaaaaaccgggggccctcgtgccgggctcgggactccggggacacgcccaaagcccgatggggcgggcccggggaagggcgggggtcagaggagacccatttagggagccaccgggggagcgcggaaccacgaaggagcggcaaaaagggggaccgcgccacgaga

SEQ ID NO: 96908 - DNA, 972 bp, Homo Sapiens
aaggcctgggtggcgaattcggcacgagggtgcctcgtacgtgtgttatgggcactggtctaggccaggtatgacacccactctcctgtgagatttcactttagtttttaaaaggtccagttctacagagtgagacctatctatctgagtactacatatgttttaagacttggttctttttttgagggatccttgaccctgggaagtctggagcaccctgagaagggggcaccatgtgtgcctttgcccacgtgttcctgaggggctgcttgtctgggagggagggagagaacattcagcagcaggtgcttttttatggccttttcttaaaataacctaagggggacacatccatcttgcagagaagtttacagaactccccttgaaaactgctgctgaggctcctgttaaattttctgtggcatcttttatgccttggtaaaaactgcagtgtctttggacctgagagtggctactccgtgggtttgtgaactgtaagcgtggggttcaggggtgtgtggccctgcagggtcccacgcctccctgagcactgactggaagtttcactggctggtggctgtcccttctcccatcagggtccccagcaaagttaactacacagaggacccacgggaaacgagctgtgtagccactgacttgctcgcgcggccgtggcctctgaggggcactcgccggttaagacagggtgggagtagtgctttccagttcagactctaacttctcccaaagtgtcctaagaaaatactggatcggctcatagatttatgctccttatgatgccctaacttgggaggttgttctaggggacaggcgggcagtgtccccacacaccctttaaagtcaaagccccaagggccccgctgtcacttggcccaaaagatcccttccggggagtaaagggactacccaatgcttacgtcaaaacagcaaaatcggctttgcagggccctt

SEQ ID NO: 96909 - DNA, 1347 bp, Homo Sapiens
aaggacgcgaggcctgggtggcgaattcggcacgaggcagaagtccgcacaggagggggtggctgggaccacacactgatgctctgtcatcagactctgagaacatgccgtgtgatgaagaaccatcccaattagaggagctagctgacttcatggagcagcttacaccaattgaaaaatatgctttaaattacctggaattattccatacttctattgagcaagaaaaggagagaaacagtgaggacgcagtgatgactgcagtgagggcatgggagttctggaacctgaagaccctgcaggagagggaggcccggctgcggctggagcaggaggaggcggagctcctgacctacacgcgagaggatgcctacagcatggagtatgtctacgaagatgtcgatgggcagacagaagtcatgccgctctggaccccacccaccccgccgcaggacgacagcgacatctacctcgactcggtcatgtgtctcatgtatgaagccactcccatcccagaggctaagctgccccctgtgtacgtgaggaaggagcggaagcgacacaaaacagacccctcagctgcaggcaggaagaagaagcagcgtcacggcgaaggcggtcgtccctcctcggtccctgttgtgaccgcgcaagcaccaggacttctgaaaattcgcagagagggcaaggagcagaagaagaatattctgctgaagcagcaggtgccattcgccaagcccctgccaacttttgccaaacccacagctgagcctggtcaagacaaccccgagtggctcatcagtgaggactgggcgctgctgccaggctgtaaagcagttactggagctgcctttgaacctcacaatcgtgtccacctgctacacacagcctaattgggatcttgtcagtgacgttgttaactcctgtagccgaatctaccgctcttccaagacagtgccggaatcgctacgagaatgtcatcattccacgagaggaggggaagagtaaaaacaaccgtcctctccgtacgagccagatctatgcccaggatgagaatgccacacacacccagctgtacacgagccactttgacttaatgaaaatgactgctggcaagaggagtcccccaaatcaaacctccgcttggcatgaatccctttcagaagaaccccaagcacgcgtctgtgttggcagaaagtggaatcaactatgacaagccgctgcctcccatccaggtggcatctctccgtgcagagcgaatcgcaaaagagaaaaaggctctggctgatcagcagaaggcacagcagccggccgtggcccagcttccccggtagtcagccgggggat

SEQ ID NO: 96910 - DNA, 809 bp, Homo Sapiens
gttatgaccattagcctatttagtgacactatagacaagttgacgaaagcaggctggtaccgtccgatttccccggattatctcgacccactgcgtccgctcacgcgtgccgcttctatcttgttggtattctgtctcctggtgcttctcatgtgctgagcttgatagagaaggtgacctggcaaggaactgaaggacatctggcaatgtactgagtgaggaactgaggcccacagtcccaccagtctccaaggaatcaaatcccaccacagccatgtgagtgagcatggaagtagatcttccccggtcaagccccccagaaggagcccagccctgcggacaccttgaccgaaacctgtgagagctccggaaatagaggaaccaagcattccctctggaatacatcagcactgttgcctttgaggctggcctgcttgaatgcacctacctgagctccggattcacagtggaggaagccagatgccatgtcatgagggtgctcaagcaactttttggagatgtatgtatggagagaaactgaggcctcctgccaacagccagcactaacttggcaagcatgtttgagaacgccacctgggaagtggagccttcagccccagttaagccttcagatgagactgcagtcctggccaccatctggactgcaacttcacacagagctcctaagccagagccatgcagatggattcttggccccccagaaattgtgcccactacattctgggaaatttattatgcagccatagattacccatacactcactatttcttttttctgatgccatact

SEQ ID NO: 96911 - DNA, 1178 bp, Homo Sapiens
  misc_feature (808)..(816): n is a, c, g, or t
  misc_feature (992)..(1000): n is a, c, g, or t
ccgataaggtcctaggtagcgaggcctgggtggcgaatacggcacgaggctaccttcctaaagcttgcctctgccctcgatctgccccttcttcgtattaatcaggcaaatagccccgacctgctcagcgtgtcacagtactattctggagagttggtatcctatgtgagaaaagttgtgcagatcatcccagaaagcatgtttacatctcttctaaagatcataaagcttcagacccaccacattattgaagtgcctacccgcctggacaaagacaagctgagggactatgctcagctaggcccacgatacgaggttgccaagcttactcatgctatttccatttttactgaaggcatcttaatgatgaaaacgactttggttggcatcatcaaggtggatccaaagcacttgctggaagatggaataaggaaacagcttgtgaagcgcgttgcctttgccctgcataagggactgatattcaaccctcgagccaagcccagtgaattgatgcccaacctgaaaaagttgggaccgaccatggaatggattccctcgctcttcttaatacataccgggactattgtcaccatttaatggtcctgaaagattttggcccggaaaaacactatcctccccatcctcaaaattaccaacggtgggaaggcaaagagctggcactcaaactttctccttacgcaaaccaaccggagcattccaaaaggatttttggccacacaagagccctctgcgcacacctaaagactccccacgctttccctgttattttctcccccaaaaaataagnnnnnnnnnaaaatgattttatctacccccccgcccttgggcgggcgtgaaatgcaaagaatacctctggtgtgacaaacgcgcttatctactaatcgggggggtctcccgcaccttatttctgtgcgcgagggaaacgaccaacaagtccccttgggccgaggggatttctctccactccatannnnnnnnnacccaacaaccgcgacccatttcctttcgcgccccgttgcggaaatccacaacgcgcggggcgagacatcttctggggctacccgggcgcagatacgcgcgacgaactccactcagcggcgcggggcgcaaactgtccacccccactaagggccccggcggctctaccttgcgtcgcc

SEQ ID NO: 96912 - DNA, 1097 bp, Homo Sapiens
gcaaagttgattagtagtccatgcctttgctggagaagaatgagccgaagatgagcgaagccaaaaattatctaagcagtatccttaaccatgggaggctctcgccacagtacatgtgtgaggccatgctgatcctgggcaaactgcattacgtggagggctcataccgagatgccatcagcatgtacgcacgggccgggattgatgacatgtccatggagaacaagcccctgtatcagatgcggctgctgtcggaggcttttgtcatcaaaggcctctctctggaacgcctacccaactccatcgcctcccgcttccgcctgacagagagggaggaagaagtgatcacctgttttgagagggcctcctggatcgctcaggtgttcctgcaggaattggagaagaccacaaataacagcacgtcgaggcatctgaaaggctgtcacccgcttgactatgagctcacctacttcctggaagctgccctccagagcgcctatgtgaaaaacctgaagaaggggaacatcgtgaagggcatgagagagctccgggaggtgctgcggactgtggagaccaaagcaactcagaacttcaaagtgatggcggccaagcacctggcgggggtcctgctgcactccctgagtgaggagtgctactggagccccctgtcccaccctctgcctgagttcatgggcaaggaggagagttctttcgccactcaggccctgcggaaacctcacctctatgaaggagacaacctctactgccccaaggacaacatcgaggaagccctcctgctcctcctcatcagcgaatccatggcaactcgagatgtggtgctgagccgggtgccggagcaggaggaggaccggacagtgagcttgcagaatgccgcagccatctatgacctcctgagcatcacgttgggcagaaggggacagtacgtcatgctctcggagtgcctggagcgagccatgaagtttgcgtttggagaatttcacctttggtaccaggtggccctctccatggtggcttgtgggaagtcagcctacgctgtgtccctgctgcgggagtgtgtgaagttgcggccctcggac

SEQ ID NO: 96913 - DNA, 1159 bp, Homo Sapiens
  misc_feature (1119)..(1119): n is a, c, g, or t
tgggcataggtgcactatagaacacgttgtacaaaaagcaggctggtaccggtccggaattccgggatatcgtcgaccacgcgtgcggaggattaagggtggcagaaagttctgataactccacatctccaggttctgcagaaacagtggtgagcaacgcagacaagatatctgttgctttagagctgtcattgtggttgggaagtcagacaagaaatgattttataggttgttgaataggacttttcctctgctcttggaatatctgctgaagccacaaagatagaacaatgagggctaaatattcttgcattctgaagagaagtactagacaccttactaaaggcagaacaggttcaacagcaatcaaactacatccctcaattccagtctacaaatgaaagggattgaaggaaagtcagctgaagcataacactgctgcatttgtgggcagggctgagatttccccagagggaactccccaactcaaaccaaatgaagggagctcccagagagaaccagtcatctgcaagaagaggaggctctgtccctataactgtccccccactgatgctgactatgttgtctggatgttacaggcacctcggtgcattaaactacagcaagacagttcatgggagaacccaacatatgtctttaggaattgaggacgtacataaatgaagagacttgtgtgcacttcctgtctggagaattctgatcgtggagcctcgctggagtggcctgtgtggcaaggtgagaagtgggcagggtgaggagcggccaacccaccattgttttgcctggcataggtgggacagtcctatgagagacagaggatgcaggggtctccgagaggttggccagagagtaatttgctatggcaactcagggtggaggtcctgtagagaacctcccaaaaacccacatatgtgcccatgagaaaagccagcgcttggcacctgccaaccaagggtacctgtcacataagactttgctacttttcctctaacacctctctcccagccttgactaagaggagccacagcagaaaagggaggtcaggaaaacagaccacaccccaactctcaccactgcagatctctagcaaggataccngcggagactataatgatgttcattcttcgtcttttctcct

SEQ ID NO: 96914 - DNA, 991 bp, Homo Sapiens
cctgtgtgttgtctcgtctttgtacttgttccgatcgctccgctggtgactcctgaaatccggtccgtctctccggcttgctgcgcggcgtaaccattcacccggaacagctatgaccttagccatttgtgacacttgtacagttgtctcttagcgcctggtaccggtccggattcccggtatcgtcgacccacgcgtccgggacatgctgggagggcagaagcaagatggagtcatagtatgtccaagttatcttactgtcataattttacaaaggcagttttcaaggttactattctcatgattcaacacatcctcaaggagtgagattcagtctgtgtaagtgtatcatgactttctataacacgccttgtcatgcactcttctaccctgctagaattggagtctggcctcagctggttcctaccagcagtactgccatcacctcatcctcatctgccccatctgttgttttggaaccacttgtgtcctctgaaatgcatatgttgaagtcctaaccacctgtgcctcagaatgggactatgtttggagaaagggttttaaagaggtacttaaagttaaatgagatcattactgtgaaccctgatccaaattgacttatgcccttataagaaaaggaaatttggccacttacactcacagaggaagaaatcatttgaagacacagagagaagagggccgaggagagaggtctcagagaaaccaacccaatgacatttcgtcttggatttccagcccccagaattactggaaaatacatttttcttgtttaggccacccaatctgtactactttgttatggcaaccctagcaaactaatgcagtcaccaacccagggtgaaaatgggacattcccaactctagctcttaggccaagcttatttgtaatagattcttgttttcaaaggatatagatattgagattctcaatgtatttgttaaaatacattgtttcttgttaaaagcaaaa

SEQ ID NO: 96915 - DNA, 949 bp, Homo Sapiens
  misc_feature (116)..(221): n is a, c, g, or t
  misc_feature (450)..(526): n is a, c, g, or t
cttcgtgggctaacagtgttagtgactcagttccggtaccacccctggttgacctccattgtagacccgggccgatcggcctctgactctagcttagccgcgggacggataatgannnnnnnnnnnnnnnnnnnnnnnnnnnnnnnnnnnnnnnnnnnnnnnnnnnnnnnnnnnnnnnnnnnnnnnnnnnnnnnnnnnnnnnnnnnnnnnnnnnnnnnnnnccacgcgtccgatctaaaaatgtcattttctactgttaagagtaatcctctgtcttgctggtgtttctaaagaaaagaatcagaaatcaatctttctactaatgtaaatttgagattatttcttaaaaatggaataaaagaggttttggtcatttgctttattttattattttaaagctactgtgattgatagcattgtaagaatcgggacaatattgtattcaactgnnnnnnnnnnnnnnnnnnnnnnnnnnnnnnnnnnnnnnnnnnnnnnnnnnnnnnnnnnnnnnnnnnnnnnnnnnnnnaagtgaaacttttagcaagtgggtgtctagtttttactaatccctaattttttttccagtgtattgctcatattatcagaaggaaaagttatttaagtatgtcagttaattgtactacttggctgaatttccatatagtttttactgtgtatggggaggttgtagtatttattatagcattttaaataagggtaattcattttttattaaagtcattttcacgttaagttcctatttttgtatgttctactcttaagttatataacacagttccttttttaaaagagttcatttgttgaagtgctagtgaaaaattaatgttattaaatagtttgcaaatgactatttataccagtatacatataatttttaaatatttgtaatgtgagatgttgaatgaataaaacttttaactcagaaaaa

SEQ ID NO: 96916 - DNA, 989 bp, Homo Sapiens
  misc_feature (186)..(186): n is a, c, g, or t
ctcgcagcgcggggggcgaggtgcgcggggcacgtcaagggagaaaggtggccaggcgcacgcggggccgggagtggcgcgagcgggccggtcccgtgtactgatgcggcacacacaggttctgacgatcccgtagtcggtttcgtgacgggagagacaggaatctggccactgggaggaacagcnccgtatagtcagcagggttaaaaagagagtacggaaaaggataaactcctacctactttcttgggagatgtgggaaagatttcaagtcacagcattttttcataactgtttataaacaatggtcatttatatccacactttctcttatttacattagtttttggcccttagccaactcatactcctacagtgattattggctttgctttcataacatgtatttttaagtatttactctcttaatggccctcgatgtctattttatacatcatatctcttaattctctagatggaacactgaaggacaggaattaagtaagtgactggccatgcaagggttggaaattttacttatttttccttggtagaagttatgttaaaaattcaagcaaccacatatctaacagaggaattttatctaggatatataaaaaacctctcaaaactcaatagtaaaaagaacaaatgacctaaatagaaaatagacaaaagacatgaagacatttcaccgaagaggatacatagatggcaaattagcacacaaaaagatactcaacatcattagccattggaaatgcaaattaaaaccacatgtggtatcattacacacatctatgtgaatggttaagataaaaaatagtagtaataccaaatgctggtgaggatgtgaagaaactggatcaatcatacattgctgtctgaattgtatgagtgccgacgcgtgggtcgacgatatcccgggaattccggaccgtaccagcctgcttttttgtacccaacttgttctatatgtcaactatgcc

SEQ ID NO: 96917 - DNA, 949 bp, Homo Sapiens
  misc_feature (902)..(902): n is a, c, g, or t
ctttgggaatatagaacagctggtttaaaaaagcaggctggtaccggtccggaattccgggatatcgtcgacccacgcgtcgggtaggaatgcgctgcgggcgggcgtgcgcaggaggcgagcggcggaacatgtaagggcacatcccgcgagctgccgcccagcgctgcagacagagcccaggtgagcaagagaacgggcgggcggtggggctcacggcctagggaggcgcggaggcatctggcagaggcgggtcgggctgggccagctggggtagagcggaggagcgggtgccggctgaagcggggcggtgggcgcggagcgcgctgggggcaccgacaccacctcaccggcagccgggtgctgagggccgcggtgtgggtgcgcggagcagtcagggcgcaggtgggcagcgcgcacggcctgccagcccagggcgccagaatcctgcgctgcggggccgagaggggcgccgcgcccgccgcagcctggagctttccgcgaacctcggggcgcccatgacggcggcggcgacggctaccgtgctcaaggagggcgtgctggagaagcgcagcggcgggctgctgcagctgtggaagcggaagcgctgcgtcctcaccgaacgcgggctgcagctcttcgaggccaagggcacgggcggccggcccaaggagctcagcttcgcccgcatcaaggccgtggagtgcgtggagagcaccgggcgccacatctacttcacgctggtgaccgaagggggcggcgagatcgacttccgctgccccctggaagatcccggctggaacgcccagatcaccctaggcctggtcaagttcaagaaccagcaggccatccagacagtgcgggcccggcagagcctcgggaccgggactctcgtgtcctanacaccgggcgcaccatctttcttcatgctacccacacctcagtgctg

SEQ ID NO: 96918 - DNA, 1415 bp, Homo Sapiens
cttcccgttcccgaagctcccgcttgggcctggcctcaggttctcggccccgggaggaagggccctgggccccaggggttataccctggagatcctcttcagaggggaccagctcctccttcttcagtgaagtggtagtagtggtggtgccaggcactggagccatctcctttctgttgtcgggggtactgacagggcctggcccaccctcctctttccctggggctggggcactgacgccagaatcctctgggtggcccaggttgggggtggagtgggcagagccactggcctgggcccggagcttgccaatctcagcttgtacttctcgaagcttccgcttgtatcgctgggcgtccccttttagctggtggttgtggttttgaagactactaatcaggtggcgcatctcacggttgatgggccccgcctgctcgttggccgccagattctgctcaaactcgatgcgcagcatctcatactccttgcgtacctgggccagcgtgtcctccagctgaatgacctctgtgcgtagcttcttctgcagccccagctcgtcgctctccatgtgctcgatgtgtcgcaggtgggagttctttgtggccagcagcaggccccgagcctcgtctagctgggtcttcacttgcagagactcgtggtagagcagtgagaattgggcctgcagcatgcggtactcccccgtctcccgcactacctcctcaggaaggctccgcagggccaccttgaggcgctcattggtccgcacagccccctgaagttcggcctgcagtttctccagctctgccatacggctgcttggccagttcctggttttcctctaactctgcattcagcatctcaaacttctgcatgctgagtgtgatctggcccccctggaagcctgaggagctcccagatacatagtagccagagcttaagctgctctaaggcctctgccaggtgcttattgagcttttgctctcgcttccgcagcttctcgatgtcccactgcaagtcctccactgttgtctccatctccagcaccttggtctctgccgatgtcactttatcctggagctcggagtactccaatgagatgcggtggtgtttctcctgcagctgagtggccaagtcctgcagtcgccggttctcacggcccagctctcgggtgtgtgcctgagccgcctcactgaggggctcactgtcccctcggctgtacactcgctgacagagttcctccacccggcgctgtaggcggtctgaggcctctaccacacgagacacagctgccttggagaactccattcggccttgcagctccagctccacctcctcactgctgctggcacccagtgccaccacaaaagccaaggccggctcactgagagcctcgtgccgaattcgccacccaggcc

SEQ ID NO: 96919 - DNA, 1286 bp, Homo Sapiens
gcatagtgacatatagaacagttgttcaaaagcggctggtaccggtccggaattcccgggatatcgtcgacccacgcgtcgggcccacgctcgctcccgctgtcggactctgggcctggaccgcgcgtggccggcgccaaaagcgagaggcatgagcgcgcgcccgggccagtgaactgctcggggatggactgcggctcggtcggcggccagaggacccagcgcctgcccggccgccagcggcttctcttcttgcccgtgggcctcagcggaagaccgggcggcagcgaaacctcagcacgccgctgcctctctgcgctctccgacggtctgggggcgctgcgccctcgcgccccggcggcccgcggcggcgtgtcacgtgcctcaccgctgctcctcctcctgctagtgccctccccgcgcttggccgccgcagccccgcgccggcagctcggggactgggagcgctcgcgcctcgggtatgccgcacccccggccgggcgcagcagcgcgtggaggtgctcaccgggcgtcgccgctgccgccggcgcccttccccagtaccacggcccggcgcctgcactcgtttcctgcaggagagagctaagcttgtctgctggatccctgcagctggagcgcaaaaggagagatttcacctcttctgggagcaggaaactctacttcgacactcatgccttagtgtgcttactggaagacaatgggtttgctactcaacaagcagaaatcattgtgtctgcattggtcaagatcctggaggccaacatggacatcgtctacaaagatatggtcaccaagatgcagcaggaaatcacttttcagcaagtaatgtctcagattgcgaatgtgaaaaaggatatgattattttggagaagagtgaattttcagccctcagagcagaaaatgagaaaataaaactcgaactacatcagttaaaacaacaagtaatggatgaagtgatcaaagtccgaacagataccaaattagacttcaacctagaaaagagcagagtaaaagaattgtattcattgaacgaaaagaagctgctggaattgagaacagaaatagtggcattgcatgcccagcaagatcgggcccttacccagacagacaggaagatcgaaactgaggttgctggcctcaaaaccatgcttgagtcacacaagcttgataatattaaatatttagcagggtctatatttacgtgcctaacagtagctctgggattttatcgcctgtggatctaataaagtgtctatttaaagtg

SEQ ID NO: 96920 - DNA, 812 bp, Homo Sapiens
cggccgcgcctgcgcactggccacgcggacggcgcgatggcggcggctgccgccgagacccccgaagtccttcgggaatgcggttgcaagggcatccggacctgtctgatctgcgagcggcagcgcggcagtgacccgccctgggagctgcccccagcgaaaacataccgtttcatttactgctccgacaccggctgggccgtgggcacagaggagtctgactttgagggctgggccttccccttcccaggagtgatgctgatcgaggactttgtgacccgggaggaagaagccgagttggtgcggctcatggaccgtgacccctggaagctctcccagtctggacggaggaagcaggactatggccccaaagtcaactttcggaaacagaagctaaagaccgagggcttctgcggcctccccagcttcagccgggaggtggtgcggaggatgggcctctacccggggctggagggcttccggcccgtcgagcagtgcaacctggactactgccccgagcggggctctgccattgacccccacctggacgacgcctggctgtggggggagcggctggtcagcctcaacctcctgtcccccaccgggctgtccatgtgtcgggaggcgcccgggagcctgctcctctgctcggccccgtcggctgccccggaggccttggtggacagcgtgataccacccagccggtcggtgctatgccaggaggtggaggtggccatccccttaccccgccgttcctgctggtcctcaccgggtggcacggaccagtggaagcatgccatccaccgcagaca

SEQ ID NO: 96921 - DNA, 1236 bp, Homo Sapiens
gcgtttcaagactgtggaactatgtcaaatatatggtccctctgcctttgtgctgcgtgttgctgtcatctttactgtatgctgctgttttagttgatcttttggtggctcgcggtgtaattgttctctgtgagggctcggttgtttctgactgtgttgtgtgttgcagattcctgcccttctcatgttgttgtgtgttcatcaggtgtgcacgggtcctgttgttcaggcgtaccccgtactagtggttctctgtgtgttccttggtttcagattttctgtttaattgcgctttaggtttgtccctttgctctttgtgtgttctggttctcgttacagttgtggcctcgtcctgttgccagctttactggctataggagattcctcgctttctgatgcagaggcttgtactctttgtctgaaccacggttggtagtaaaatggtctacatcgcagtatgtggtgccatttctgtaactatgcagtgatacatgaaggcatgggctcgggttaataggcctaggcaccagctttagctcggctgaagctggcggccctggcaaattactttgattgaatcacctgtgatgttgaaggctgcctacttggtgaaatttaagtgagctgtatgtaaaatggcacagggtaggtgttcagtacatgactccctttcccactactgaggctagagggacctggcaatcactacaggagggtgagaaagctagtagggaatttaagaaaatagaacattccctaactattgtttgattcccctcagattccattgttttctttcctccaatttagccacgattggacattgacttctattttccttcatactcacagctaactctgtcataacctagagcctctacagaggaagccagaagtagactgaaagtgcaatattagtttactggctccattaggacccagctagtttgagataaggaacattttatgtagaaaggtttgaattagcataggctgtaatctatgtctcacagctacaaagactagacaggccaggaaacaatcccacattctaggcccagctcttccatgaacttgcagatgacctacaaaaatcattttatatgtgcttgccgttgctctgtgttaatcagattatgcttactgatacgagcgaggttttcctccgatgaagagtaaccccgacgccttttcataatagctcgcgtgtgtttcttgctgtgttgtctctgtggg

SEQ ID NO: 96922 - DNA, 878 bp, Homo Sapiens
cggaagcaaaccgtggcgacccggcgaggtaagcgacaggggcaaattcaggcccctgccgcaatcaggaaatatctcaaccggagacggggtcgctgagtcctttagcgctctctcagtaggccacaatgggcgaaactccgggcctcctaaaggccggtccgggaagcaacggactgtgcggggaccaggggaccagattcccacgcacactgatcaggaccggaacatggaactggtttccaccccagctccaggccacatgcaacgggccacaagtctgccttcaatgactgggtcagtggacacctcaacttccagatgagcaccatcatttttcccacgatccctcgacacaagttaccacaaagtggctcccctggtgcagtccttgtgtgccaagcatggcatagagtaccagtccaagcccccgctgtcagccttcgccgacatcatccactcactaaaggagtcagggcagctctggctagatgcctatcttcaccaataacaacagccaccctgcccagtctggaagaagaggaggaagactctggagccaaggcagaggggagcttgagggacaatgccactatagtttaatactcagagggggttgggtttggggacataaagcctctgactcaaactcctcccttttatcttctagccacagttctaagacccaaagtggggggtggacacagaagtccctaggagggaaggagctgttggggcaggggtgtaaattatttcctttttctagtttggcacatgcaggtagttggtgaacagagagaaccaggagggtaacagaagaggagggacctactgaacccagagtcaggaagagatttaacactggaattccacctcat

SEQ ID NO: 96923 - DNA, 930 bp, Homo Sapiens
ggtggaagggcccggatggcccggcaggcattcagggcaagaagggcaagtgcacgcaagttgcccctggcagtgaagggaactaggctcgctgggtttctagaccacagttcatacctgcatcggccacagccccaggggactctgaaaacccctgaaccgtggataactatgtgttctttggtggccacatccgtcagcaagggcacataggcatggaagacagtcactcaaagttggtaatggtttcaggggttgtatggactccatttatttgaatgggcaggagctccctttagacagcaaacccagtaagctatgcacactatcgaagagtcggtggatgtatctccaggcgtgcttcctgacggccacggaagactgcgccagcgaacccttgccaagaatggaggcgtttgccaatccgtcacctgctggaggttattactgcaaatgcagtgccttgtacatagggacccactgtgagataagcgtcaataccgtgttcctccaacccatgcctctatgggggcacctgtgttgtcgacaacggaggctttgtttgccagtgtagaggattatatactggtcagaggtgtcagcttagtcgcatactgcaaagatgaaccccgtaagaatggcggaacatgctttgacagtttggatggcgccctttgtcagtgtgattcgggttttaggggagaaaggtgtcagagtgatatcgacgagtgctctggaaacccttgcctgcacggggccctctgtgagaacacgcacggctcctatcactgcaactgcagccacgagtacacggggacaactcctgctaacactcggatggatgaatttcacatatacatataatattttcatctacagtccaatttaataatgtgaatgcccttataaacccctaattcttcaatttcc

SEQ ID NO: 96924 - DNA, 1094 bp, Homo Sapiens
tctcatccggtaatgtccctactcaggtagtctatcgtgtctgttttggcccctttttgccctgacagtcaatcttccccgaacttatctcacttagatccatcggtgtgtccgaccccgttatcctcggacctttaatgaggcaccgacacaggcttctctcgcacctgatccatgcacctctgccacaggtggcgtttccccgtgtcacacagttacgacgcatttgacgggcctagaataccagttgacccacgaggcccgagaacaaggcaccggggctgtggcctaatcagagccagcctcacatcgctgccagggctactcggggatccggagcaacaaggagctgcaggaaccacccgacgcgcagacgggaagcagcagtcagaagggcacggatctgtgtgcccacagctcctgagccccacaggagcacgtgaatcgcctcagcttacgttcaggccctgtcctgaaacccagccgtctagcacccagtgatcccactgcctgtgggaatacccacggatgctgcccaacgggaaaattgtacaatcgggtgctatcaatgccacatgcacacgggaccagctcatcacagagcaaagtgacctccacgtctgatgctggggtcatcaggacggacccaatcatggctgtctttttgccccaccgccctgccgtccagttcttcccttctccgtggctggcttcccgcactagggaacgggttgtaaatggggaacatgacttccttccggagtccttgagcacctcagctaaggaccgcagtgccctgtagagttcctagattacctcactgggaatagcattgtgcgtgtccggagaaagggctccatttggttccagcccactcccctctgcaagtgccgcagcttccctcagagcatactctccagtggatccaagtactctctctcctaagacaccaccttcctgccagctgtttgcccttaggccagtacacagaattaaagtgggggagatggcagacgctttactgggacctgcccaagatatgtattctctgacactcttatttggtcataaaacaataaatggtgtcaatttcc

SEQ ID NO: 96925 - DNA, 1023 bp, Homo Sapiens
tcacttgtggacatttgggtcgaatggggaaattcgtcttggtagccagataattatccggcccaaaaagatgttctgccgttatccagggttacccttcattaagcaaaactaagatgtgcacggttcactttggtttaaagccacatgtgacccggatgttcttagctactggcgtgagcagatcaaaattaatatgtataggtcttaaaaccaaattatacagcttcaggactgcgaggacatgtcatgtgcaaataagctatcacttatatgcgggtgaaccgagatcgcgccatacactacatactggcaaacaagagctaaactccgtctcagacaaaaattacactaccattaaattatactaatattgtctaataatttaacaatgctaggcaaggattttatgactctattgaaaaacgtttaaatctcagatgtcataccatggtcagctccaagaaagaagcactcaggaagcatagtaggatgcctggggtctacctctatatttatggaaacattattacctagaatgaaacaagattaaatcttttagaagtagaacagctcatcaaacaacccaataaaaaataaagaggtgttggtctggctacctattttcactgtatacccacggaaagattaaccaaatgttttgtagttttatgtaatggtaaatataattgaaccaaaagaagtaattttgatatgattgatcattgaaaggatcttaaatttcagccagtcaacaaattgatatatttaattagattgcaattctggtcaactgtacttaaagtttaaatacaaaatgttctgtggagtgattaaaggtctgttaatatcaaaactatcacacagtcaccatgtttaagaaataactatctaaattatttttcactggctttcctgaaaaagtttacatttcatagaactatggcccaatgtaaaaagacccaccaatacagtaaatggtaaaaaccaacattaaagattcaagttttataaaaaatttat

SEQ ID NO: 96926 - DNA, 1543 bp, Homo Sapiens
  misc_feature (226)..(273): n is a, c, g, or t
  misc_feature (813)..(821): n is a, c, g, or t
  misc_feature (1057)..(1101): n is a, c, g, or t
gggtccctggtactaaatgtaaggccccaatgagtttcgcctccattttgaaggaaacccaaccaaaggccataaccaaagtttcaggaatgaaagccacggtaaaaccgggcggggttagcaagcaagggccaacttacaaccctgaatgcaaccaaatctcaaatgaaaagaaaagaaactttttctgagttaggagacatttgtggagatgctcagtactggnnnnnnnnnnnnnnnnnnnnnnnnnnnnnnnnnnnnnnnnnnnnnnnntaagttacatttgcattttataatcttacaactatctgtttctaaagtactgtcttccagctattttagttgatcatctaataaaagcatcttatgttttaagattacaatgatgttctggctaggctaccccctccaaccccccaaaaaagtaaagataataaaacatgcttttgcggacattttcctcattctaccattaagggcaccatctaccaactggtagcaaatacttcccatattttttgtcacttgccaacaaggcagaaaataccctgctgaatgaaatcactgggaacattccaagttcaaaataaaatgtttaacttacacataatacaagttatgtacaagattaggaggggggaaaaacctgaacaaatcctggaacacacctatgtatttacgtcatgggcaaaaggggagagaacacttcaaatatcaacaagttctgcgccattaactcattaatagctaaatggccacaccaaattgcatgtgaatgttagaacctctcagataaccacaataagtccatannnnnnnnnaaaaaaaggaaaacacagaaattaagctaccaacagtgtctgagaagagagactaagttaacatacattgcatggtattgcgaggctaagtgcatgatggcattttgtttataagagctctttagcacagtacttcattataatctgttaaaacaacaatatgcaggcctttgcaagatttgacttgctgaaatccgaacaatttggactcatgaaaagtcataagacttcagctnnnnnnnnnnnnnnnnnnnnnnnnnnnnnnnnnnnnnnnnnnnnncctggaagagtatgatagattaaacaaggatggtcaggctgtggaaccgtgaatgtatttaagagcaaaagctcaaaggggggtggggaagagaccaacctatagggtaacagggggatactaataataccgagatataaaaaagggtatggtgaaaatgtacctttaacaaaagcttatacaatatacaagtaaggacgcgtgggtcgacgatatcccgggaaatccggaccggtacaagccgagataaaaggaacaaacttgtcacatagtgtcacctaaaaaggccaaatagacaaagcagtaaccggtgtgacaaggtaatacgaccgaggctaggaagatacggagcagaatggaccgaagactcaaagggggacaaacaacgtgaagaggacccagggaaccgaagggacctaagaaccggtataacaaacgaaag

SEQ ID NO: 96927 - DNA, 955 bp, Homo Sapiens
ggcctgggtggcgaattcggcacgaggctcagatggtacgctgcctagacatcctagaggattatttaatccagaggaggtacttatatgaacgtattgatgggcgagttagaggcaaccttcgacaggctgccattgaccgcttcagcaagcctgactcagaccgctttgtcttcttactgtgtacccgggctggtggacttggtattaatcttacagctgctgatacctgcatcatctttgattcagactggaatccacaaaatgacctgcaggcccaggcacgatgtcatcgaattgggcagagcaaagctgtgaaggtgtaccgcctcatcactcgtaattcctacgagagagagatgtttgataaggccagcctcaagttggggttggataaggctgtgcttcaatccatgagtggtcgggatggcaacattactggaatccaacagttctctaagaaggagattgaagatcttttaagaaaaggagcatatgcagccatcatggaggaagatgatgaaggctccaagttttgtgaagaggacattgaccagatcttgttaagacgaactacaaccatcaccattgaatctgaaggaaaaggttccacctttgctaaggcaagctttgttgcttctgaaaacaggacagatatttctttggatgaccccaacttttggcaaaagtgggccaaaaaggctgacctagacatggatctgctcaacagcaagaataatttggtaattgacacacctagagcacgaaaacaaacgcgccactttagcactctgaaagatgatgacctggggggaattctctgatttggaaagtgaagatgatgaacgggccacgcctcccgcaaacatgaaccgtcattttggctatggggggcacttgactgcttttcgggggggaaaagcatctcccgggtatatgggttgggggaccaagg

SEQ ID NO: 96928 - DNA, 1138 bp, Homo Sapiens
  misc_feature (807)..(846): n is a, c, g, or t
ttgtactaaaacagcttgtacaaaaagcaggctggtacggtccggaattcccgggatatgtcgacccacgcgtcggcggcggctgggcgtgcgctcgctccccgaagccggggctgggccggagccgggcgagggctgggagctgggccgggtccggggacagcgggcgaggggcagctgccggagccgggcagccaggccgctcagggcaggggacagctggcgccggttctgcggtctccggggcccagatgtgaggcggcggcgcccccggcccgagagcgcacgatgggggccccgctcgccgtagcgctgggcgccctccactacctggcacttttcctgcaactcggcggcgccacgcggcccgccggccacgcgccctgggacaaccacgtctccggccacgccctgttcacagagacaccccatgacatgacagcacggacgggcgaggacgtggagatggcctgctccttccgcggcagcggctccccctcctactcgctggagatccagtggtggtatgtacggagccaccgggactggaccgacaagcaggcgtgggcctcgaaccagctaaaagcatctcagcaggaagacgcagggaaggaggcaaccaaaataagtgtggtcaaggtggtgggcagcaacatctcccacaagctgcgcctgtcccgggtgaagcccacggacgaaggcacctacgagtgccgcgtcatcgacttcagcgacggcaaggcccggcaccacaaggtcaaggcctacctgcgggtgcagccaggggagaactccgtcctgcatctnnnnnnnnnnnnnnnnnnnnnnnnnnnnnnnnnnnnnnnnaagccaggcaaggagctgaggaagcgctcggtggaccaggaggcctgcagcctctagactgatgcccctgcccccgcccatccgcccccacgctgtacagagtgcatgagggagccgccgggacacccggggaccgactgcctgcggcccaccgcgcccccatcccccgagggcgcccggggggccaccatggtccggcccctctttccacccaccccttggttcagcatggaagccccaaacccaccccctggccctttcaggaacccctggcggggaccctgggcccccc

SEQ ID NO: 96929 - DNA, 1317 bp, Homo Sapiens
tatagtacctatagacagtggttaacaaaagcaggctggtaccggtccggaatcccgggatatcgtcgaccacgcgtccgtcaggttataatcatgttcttcctctaaactgcctcttgggctttacatcaggtcaaggatttttagggtttctcaaaaataggattcttgtcagtgtatgcatgctgagtaagtcacctttctggctctaatttctgggtggccatctgttgtccagctctgctgccaactggactttccgaaagccatgtcaactaattttttatatgctaagacaaatcgaatatgaaaagaggaagaatattctagatattctaagacatttcttaatttggcatctcagaggaggtaggtggaaagtaaaggaagaagataattttgggggaaaatttgtggaaacatacaaaacgttgtgctttgtatagatgctaaacagagtgggaggcagcatatctgtaacaacaaccattctgaccttttgaaacacaagctttcggagaagtcagggagagacacagtatgaataaaagcaattaacattttctttaatgtactatttttcaaagaggaccacggaatcctgttctctaacccaaggggcagctgtaggtggtctgaacgcccacagaatattgagcatatttctcttgtggttttggtggggtggtgggatgcagaaggttattaaagatcaatttaagcatcagatagactatcccttttatttttttaacttttaggttcaggggtacatgtgcaggttgttatataggtaaactcatgtcaagtggttttgttgtacagattattttgtcacccaggtgctaagcctagtacccagtagttattttccctgctcttctccctcctcccaccctccaccctcaagtaggccccagtgtctgttgttcctttctttgtgtccttgagttctcatcatttagctcctacttctaaatgagaacatgtatttggttttctgttctgtgttagtttgctaaggataatggcctccagctcagatggaatatctctatcatatagacctgttgttacagggcaggatcggatgatggacactgaaatcctcagcttgctaagttcagttgctctccctagcctccttttggcttcagagtctttttgattcatctatcctgggattttttgtgtgctgaggtttagttctggattggcttcagctgtgctaataaggaaggccggtgtccttttcaagcaaaccttaaaagggggcccaatcaaaagggccgaagcccggaatcccttctgggggtt

SEQ ID NO: 96930 - DNA, 156 bp, Homo Sapiens; identical to SEQ ID NO: 5451
